United States Patent Application Publication US 2026/0234583 A1, published August 13, 2026 (application 19/155,227).

The application's sequence listing, which the Patent Office published only in electronic form, follows.

SEQUENCE LISTING (12981 sequences)

SEQ ID NO: 1 - protein, 407 aa, Homo sapiens
  source 1..407: note = Gene Symbol: ZFP1; note = Alternative Gene Symbol: ZFP; note = Sequence Name: 56322-704_101_SL_seq_1
MNKSQGSVSFTDVTVDFTQEEWEQLDPSQRILYMDVMLENYSNLLSVEVWKADDQMERDHRNPDEQARQFLILKNQTPIEERGDLFGKALNLNTDFVSLRQVPYKYDLYEKTLKYNSDLLNSNRSYAGKQTDECNEFGKALLYLKQEKTHSGVEYSEYNKSGKALSHKAAIFKHQKIKNLVQPFICTYCDKAFSFKSLLISHKRIHTGEKPYECNVCKKTFSHKANLIKHQRIHTGEKPFECPECGKAFTHQSNLIVHQRAHMEKKPYECSECGKTFAQKFELTTHQRIHTGERPYECNECAKTFFKKSNLIIHQKIHTGEKRYECSECGKSFIQNSQLIIHMRTHTGEKPYECTECGKTFSQRSTLRLHLRIHTGEKPYECSECGKAFSRKSRLSVHQRVHIGEKP

SEQ ID NO: 2 - protein, 533 aa, Homo sapiens
  source 1..533: note = Gene Symbol: ZFP14; note = Alternative Gene Symbol: ZFP4; note = Sequence Name: 56322-704_101_SL_seq_2
MAHGSVTFRDVAIDFSQEEWEFLDPAQRDLYRDVMWENYSNFISLGPSISKPDVITLLDEERKEPGMVVREGTRRYCPDLESRYRTNTLSPEKDIYEIYSFQWDIMERIKSYSLQGSIFRNDWECKSKIEGEKEQQEGYFGQVKITSEKMTTYKRHNFLTEYQIVHNGEKVYECKECRKTFIRRSTLSQHLRIHTGEKPYKCKECGQAFRQRAHLIRHHKLHTGEKPYECKECGKAFTVLQELTQHQRLHTGEKPYECKECGKAFRVHQQLARHQRIHTGEKPYECKDCGKTFRQCTHLTRHQRLHTAEKLYECKECGKAFVCGPDLRVHQKIHFGEKPYECKECGKAFRICQQLTVHQSIHTGEKPYECKECGKTFRLRQQLVRHQRIHTREKPYECMECWKTFSSYSQLISHQSIHIGERPYECEECGKAFRLLSQLTQHQSIHTGEKPYECKECRKPFRLLSQLTQHQSIHTGEKPYECKECGKAFRLYSFLTQHQRIHTGEKPYKCKECKKAFRQHSHLTQHQKIHNGI

SEQ ID NO: 3 - protein, 532 aa, Homo sapiens
  source 1..532: note = Gene Symbol: ZFP82; note = Alternative Gene Symbol: ZFP82; note = Sequence Name: 56322-704_101_SL_seq_3
MALRSVMFSDVSIDFSPEEWEYLDLEQKDLYRDVMLENYSNLVSLGCFISKPDVISSLEQGKEPWKVVRKGRRQYPDLETKYETKKLSLENDIYEINLSQWKIMERIENHGLKGLILKNDWESTGKIEGQERPQEGYFSSVKMPSEKVSSYQKRTSVTPHQRLHFVDKPYECKECGKAFRVRQQLTFHHRIHTGEKPYECKECGMAFRQTAHLTRHQRLHSGEKLYECKECGEAFICGADLRVHQKMHIGEKPYECKECGKAFRVRGQLTLHQRIHTGEKPYVCKECGKAFRQYAHLTRHQKLNSADRLYECKECGKAFLCGSGLRVHHKLHTGEKPYECKECGKAFRVRQQLTLHQRIHTGEKPYECKECGKTFSRGYHLILHHRIHTGEKPYECKECWKAFSRYSQLISHQSIHIGVKPYDCKECGKAFRLLSQLTQHQSIHIGEKPYKCKECGKAFRLRQKLTLHQSIHTGEKPFECKECRKAFRLNSSLIQHLRIHSGEKPYECKECKKAFRQHSHLTHHLKIHNVKI

SEQ ID NO: 4 - protein, 527 aa, Homo sapiens
  source 1..527: note = Gene Symbol: ZIM2; note = Alternative Gene Symbol: ZIM2; note = Sequence Name: 56322-704_101_SL_seq_4
MYQPEDDNNSDVTSDDDMTRNRRESSPPHSVHSFSGDRDWDRRGRSRDMEPRDRWSHTRNPRSRMPPRDLSLPVVAKTSFEMDREDDRDSRAYESRSQDAESYQNVVDLAEDRKPHNTIQDNMENYRKLLSLGFLAQDSVPAEKRNTEMLDNLPSAGSQFPDFKHLGTFLVFEELVTFEDVLVDFSPEELSSLSAAQRNLYREVMLENYRNLVSLGHQFSKPDIISRLEEEESYAMETDSRHTVICQGESHDDPLEPHQGNQEKLLTPITMNDPKTLTPERSYGSDEFERSSNLSKQSKDPLGKDPQEGTAPGICTSPQSASQENKHNRCEFCKRTFSTQVALRRHERIHTGKKPYECKQCAEAFYLMPHLNRHQKTHSGRKTSGCNEGRKPSVQCANLCERVRIHSQEDYFECFQCGKAFLQNVHLLQHLKAHEAARVLPPGLSHSKTYLIRYQRKHDYVGERACQCCDCGRVFSRNSYLIQHYRTHTQERPYQCQLCGKCFGRPSYLTQHYQLHSQEKTVECDHC

SEQ ID NO: 5 - protein, 472 aa, Homo sapiens
  source 1..472: note = Gene Symbol: ZIM3; note = Alternative Gene Symbol: ZIM3; note = Sequence Name: 56322-704_101_SL_seq_5
MNNSQGRVTFEDVTVNFTQGEWQRLNPEQRNLYRDVMLENYSNLVSVGQGETTKPDVILRLEQGKEPWLEEEEVLGSGRAEKNGDIGGQIWKPKDVKESLAREVPSINKETLTTQKGVECDGSKKILPLGIDDVSSLQHYVQNNSHDDNGYRKLVGNNPSKFVGQQLKCNACRKLFSSKSRLQSHLRRHACQKPFECHSCGRAFGEKWKLDKHQKTHAEERPYKCENCGNAYKQKSNLFQHQKMHTKEKPYQCKTCGKAFSWKSSCINHEKIHNAKKSYQCNECEKSFRQNSTLIQHKKVHTGQKPFQCTDCGKAFIYKSDLVKHQRIHTGEKPYKCSICEKAFSQKSNVIDHEKIHTGKRAYECDLCGNTFIQKKNLIQHKKIHTGEKPYECNRCGKAFFQKSNLHSHQKTHSGERTYRCSECGKTFIRKLNLSLHKKTHTGQKPYGCSECGKAFADRSYLVRHQKRIHSR

SEQ ID NO: 6 - protein, 457 aa, Homo sapiens
  source 1..457: note = Gene Symbol: ZNF140; note = Alternative Gene Symbol: ZNF40; note = Sequence Name: 56322-704_101_SL_seq_6
MSQGSVTFRDVAIDFSQEEWKWLQPAQRDLYRCVMLENYGHLVSLGLSISKPDVVSLLEQGKEPWLGKREVKRDLFSVSESSGEIKDFSPKNVIYDDSSQYLIMERILSQGPVYSSFKGGWKCKDHTEMLQENQGCIRKVTVSHQEALAQHMNISTVERPYGCHECGKTFGRRFSLVLHQRTHTGEKPYACKECGKTFSQISNLVKHQMIHTGKKPHECKDCNKTFSYLSFLIEHQRTHTGEKPYECTECGKAFSRASNLTRHQRIHIGKKQYICRKCGKAFSSGSELIRHQITHTGEKPYECIECGKAFRRFSHLTRHQSIHTTKTPYECNECRKAFRCHSFLIKHQRIHAGEKLYECDECGKVFTWHASLIQHTKSHTGEKPYACAECDKAFSRSFSLILHQRTHTGEKPYVCKVCNKSFSWSSNLAKHQRTHTLDNPYEYENSFNYHSFLTEHQ

SEQ ID NO: 7 - protein, 711 aa, Homo sapiens
  source 1..711: note = Gene Symbol: ZNF175; note = Alternative Gene Symbol: ZNF75; note = Sequence Name: 56322-704_101_SL_seq_7
MPADVNLSQKPQVLGPEKQDGSCEASVSFEDVTVDFSREEWQQLDPAQRCLYRDVMLELYSHLFAVGYHIPNPEVIFRMLKEKEPRVEEAEVSHQRCQEREFGLEIPQKEISKKASFQKDMVGEFTRDGSWCSILEELRLDADRTKKDEQNQIQPMSHSAFFNKKTLNTESNCEYKDPGKMIRTRPHLASSQKQPQKCCLFTESLKLNLEVNGQNESNDTEQLDDVVGSGQLFSHSSSDACSKNIHTGETFCKGNQCRKVCGHKQSLKQHQIHTQKKPDGCSECGGSFTQKSHLFAQQRIHSVGNLHECGKCGKAFMPQLKLSVYLTDHTGDIPCICKECGKVFIQRSELLTHQKTHTRKKPYKCHDCGKAFFQMLSLFRHQRTHSREKLYECSECGKGFSQNSTLIIHQKIHTGERQYACSECGKAFTQKSTLSLHQRIHSGQKSYVCIECGQAFIQKAHLIVHQRSHTGEKPYQCHNCGKSFISKSQLDIHHRIHTGEKPYECSDCGKTFTQKSHLNIHQKIHTGERHHVCSECGKAFNQKSILSMHQRIHTGEKPYKCSECGKAFTSKSQFKEHQRIHTGEKPYVCTECGKAFNGRSNFHKHQITHTRERPFVCYKCGKAFVQKSELITHQRTHMGEKPYECLDCGKSFSKKPQLKVHQRIHTGERPYVCSECGKAFNNRSNFNKHQTTHTRDKSYKCSYSVKGFTKQ

SEQ ID NO: 8 - protein, 549 aa, Homo sapiens
  source 1..549: note = Gene Symbol: ZNF18; note = Alternative Gene Symbol: ZNF8; note = Sequence Name: 56322-704_101_SL_seq_8
MPVDLGQALGLLPSLAKAEDSQFSESDAALQEELSSPETARQLFRQFRYQVMSGPHETLKQLRKLCFQWLQPEVHTKEQILEILMLEQFLTILPGEIQMWVRKQCPGSGEEAVTLVESLKGDPQRLWQWISIQVLGQDILSEKMESPSCQVGEVEPHLEVVPQELGLENSSSGPGELLSHIVKEESDTEAELALAASQPARLEERLIRDQDLGASLLSAAPQEQWRQLDSTQKEQYWDLMLETYGKMVSGAGISHPKSDLTNSIEFGEELAGIYLHVNEKIPRPTCIGDRQENDKENLNLENHRDQELLHASCQASGEVPSQASLRGFFTEDEPGCFGEGENLPEALQNIQDEGTGEQLSPQERISEKQLGQHLPNPHSGEMSTMWLEEKRETSQKGQPRAPMAQKLPTCRECGKTFYRNSQLIFHQRTHTGETYFQCTICKKAFLRSSDFVKHQRTHTGEKPCKCDYCGKGFSDFSGLRHHEKIHTGEEPYKCPICEKSFIQRSNFNRHQRVHTGEKPYKCSHCGKSFSWSSSLDKHQRSHLGKKPFQ

SEQ ID NO: 9 - protein, 751 aa, Homo sapiens
  source 1..751: note = Gene Symbol: ZNF184; note = Alternative Gene Symbol: ZNF84; note = Sequence Name: 56322-704_101_SL_seq_9
MEDLSSPDSTLLQGGHNLLSSASFQEAVTFKDVIVDFTQEEWKQLDPGQRDLFRDVTLENYTHLVSIGLQVSKPDVISQLEQGTEPWIMEPSIPVGTCADWETRLENSVSAPEPDISEEELSPEVIVEKHKRDDSWSSNLLESWEYEGSLERQQANQQTLPKEIKVTEKTIPSWEKGPVNNEFGKSVNVSSNLVTQEPSPEETSTKRSIKQNSNPVKKEKSCKCNECGKAFSYCSALIRHQRTHTGEKPYKCNECEKAFSRSENLINHQRIHTGDKPYKCDQCGKGFIEGPSLTQHQRIHTGEKPYKCDECGKAFSQRTHLVQHQRIHTGEKPYTCNECGKAFSQRGHFMEHQKIHTGEKPFKCDECDKTFTRSTHLTQHQKIHTGEKTYKCNECGKAFNGPSTFIRHHMIHTGEKPYECNECGKAFSQHSNLTQHQKTHTGEKPYDCAECGKSFSYWSSLAQHLKIHTGEKPYKCNECGKAFSYCSSLTQHRRIHTREKPFECSECGKAFSYLSNLNQHQKTHTQEKAYECKECGKAFIRSSSLAKHERIHTGEKPYQCHECGKTFSYGSSLIQHRKIHTGERPYKCNECGRAFNQNIHLTQHKRIHTGAKPYECAECGKAFRHCSSLAQHQKTHTEEKPYQCNKCEKTFSQSSHLTQHQRIHTGEKPYKCNECDKAFSRSTHLTEHQNTHTGEKPYNCNECRKTFSQSTYLIQHQRIHSGEKPFGCNDCGKSFRYRSALNKHQRLHPGI

SEQ ID NO: 10 - protein, 612 aa, Homo sapiens
  source 1..612: note = Gene Symbol: ZNF189; note = Alternative Gene Symbol: ZNF89; note = Sequence Name: 56322-704_101_SL_seq_10
MASPSPPPESKEEWDYLDPAQRSLYKDVMMENYGNLVSLDVLNRDKDEEPTVKQEIEEIEEEVEPQGVIVTRIKSEIDQDPMGRETFELVGRLDKQRGIFLWEIPRESLTQEQRMFRENTNIIRKRPNSEEKCHKCEECGKGFVRKAHFIQHQRVHTGEKPFQCNECGKSFSRSSFVIEHQRIHTGERPYECNYCGKTFSVSSTLIRHQRIHTGERPYQCNQCKQSFSQRRSLVKHQRIHTGEKPHKCSDCGKAFSWKSHLIEHQRTHTGEKPYHCTKCKKSFSRNSLLVEHQRIHTGERPHKCGECGKAFRLSTYLIQHQKIHTGEKPFLCIECGKSFSRSSFLIEHQRIHTGERPYQCKECGKSFSQLCNLTRHQRIHTGDKPHKCEECGKAFSRSSGLIQHQRIHTREKTYPYNETKESFDPNCSLVIQQEVYPKEKSYKCDECGKTFSVSAHLVQHQRIHTGEKPYLCTVCGKSFSRSSFLIEHQRIHTGERPYLCRQCGKSFSQLCNLIRHQGVHTGNKPHKCDECGKAFSRNSGLIQHQRIHTGEKPYKCEKCDKSFSQQRSLVNHQKIHAEVKTQETHECDACGEAFNCRISLIQHQKLHTAWMQ

SEQ ID NO: 11 - protein, 459 aa, Homo sapiens
  source 1..459: note = Gene Symbol: ZNF213; note = Alternative Gene Symbol: ZNF23; note = Sequence Name: 56322-704_101_SL_seq_11
MAAPLEAQDQAPGEGEGLLIVKVEDSSWEQESAQHEDGRDSEACRQRFRQFCYGDVHGPHEAFSQLWELCCRWLRPELRTKEQILELLVLEQFLTVLPGEIQGWVREQHPGSGEEAVALVEDLQKQPVKAWRQDVPSEEAEPEAAGRGSQATGPPPTVGARRRPSVPQEQHSHSAQPPALLKEGRPGETTDTCFVSGVHGPVALGDIPFYFSREEWGTLDPAQRDLFWDIKRENSRNTTLGFGLKGQSEKSLLQEMVPVVPGQTGSDVTVSWSPEEAEAWESENRPRAALGPVVGARRGRPPTRRRQFRDLAAEKPHSCGQCGKRFRWGSDLARHQRTHTGEKPHKCPECDKSFRSSSDLVRHQGVHTGEKPFSCSECGKSFSRSAYLADHQRIHTGEKPFGCSDCGKSFSLRSYLLDHRRVHTGERPFGCGECDKSFKQRAHLIAHQSLHAKMAQPVG

SEQ ID NO: 12 - protein, 606 aa, Homo sapiens
  source 1..606: note = Gene Symbol: ZNF214; note = Alternative Gene Symbol: ZNF24; note = Sequence Name: 56322-704_101_SL_seq_12
MAVTFEDVTIIFTWEEWKFLDSSQKRLYREVMWENYTNVMSVENWNESYKSQEEKFRYLEYENFSYWQGWWNAGAQMYENQNYGETVQGTDSKDLTQQDRSQCQEWLILSTQVPGYGNYELTFESKSLRNLKYKNFMPWQSLETKTTQDYGREIYMSGSHGFQGGRYRLGISRKNLSMEKEQKLIVQHSYIPVEEALPQYVGVICQEDLLRDSMEEKYCGCNKCKGIYYWNSRCVFHKRNQPGENLCQCSICKACFSQRSDLYRHPRNHIGKKLYGCDEVDGNFHQSSGVHFHQRVHIGEVPYSCNACGKSFSQISSLHNHQRVHTEEKFYKIECDKDLSRNSLLHIHQRLHIGEKPFKCNQCGKSFNRSSVLHVHQRVHTGEKPYKCDECGKGFSQSSNLRIHQLVHTGEKSYKCEDCGKGFTQRSNLQIHQRVHTGEKPYKCDDCGKDFSHSSDLRIHQRVHTGEKPYTCPECGKGFSKSSKLHTHQRVHTGEKPYKCEECGKGFSQRSHLLIHQRVHTGEKPYKCHDCGKGFSHSSNLHIHQRVHTGEKPYQCAKCGKGFSHSSALRIHQRVHAGEKPYKCREYYKGFDHNSHLHNNHRRGNL

SEQ ID NO: 13 - protein, 707 aa, Homo sapiens
  source 1..707: note = Gene Symbol: ZNF224; note = Alternative Gene Symbol: ZNF224; note = Sequence Name: 56322-704_101_SL_seq_13
MTTFKEAMTFKDVAVVFTEEELGLLDLAQRKLYRDVMLENFRNLLSVGHQAFHRDTFHFLREEKIWMMKTAIQREGNSGDKIQTEMETVSEAGTHQEWSFQQIWEKIASDLTRSQDLMINSSQFSKEGDFPCQTEAGLSVIHTRQKSSQGNGYKPSFSDVSHFDFHQQLHSGEKSHTCDECGKNFCYISALRIHQRVHMGEKCYKCDVCGKEFSQSSHLQTHQRVHTGEKPFKCVECGKGFSRRSALNVHHKLHTGEKPYNCEECGKAFIHDSQLQEHQRIHTGEKPFKCDICGKSFCGRSRLNRHSMVHTAEKPFRCDTCDKSFRQRSALNSHRMIHTGEKPYKCEECGKGFICRRDLYTHHMVHTGEKPYNCKECGKSFRWASCLLKHQRVHSGEKPFKCEECGKGFYTNSQCYSHQRSHSGEKPYKCVECGKGYKRRLDLDFHQRVHTGEKLYNCKECGKSFSRAPCLLKHERLHSGEKPFQCEECGKRFTQNSHLHSHQRVHTGEKPYKCEKCGKGYNSKFNLDMHQKVHTGERPYNCKECGKSFGWASCLLKHQRLHSGEKPFKCEECGKRFTQNSQLHSHQRVHTGEKPYKCDECGKGFSWSSTRLTHQRRHSRETPLKCEQHGKNIVQNSFSKVQEKVHSVEKPYKCEDCGKGYNRRLNLDMHQRVHMGEKTWKCRECDMCFSQASSLRLHQNVHVGEKP

SEQ ID NO: 14 - protein, 560 aa, Homo sapiens
  source 1..560: note = Gene Symbol: ZNF250; note = Alternative Gene Symbol: ZNF250; note = Sequence Name: 56322-704_101_SL_seq_14
MAAARLLPVPAGPQPLSFQAKLTFEDVAVLLSQDEWDRLCPAQRGLYRNVMMETYGNVVSLGLPGSKPDIISQLERGEDPWVLDRKGAKKSQGLWSDYSDNLKYDHTTACTQQDSLSCPWECETKGESQNTDLSPKPLISEQTVILGKTPLGRIDQENNETKQSFCLSPNSVDHREVQVLSQSMPLTPHQAVPSGERPYMCVECGKCFGRSSHLLQHQRIHTGEKPYVCSVCGKAFSQSSVLSKHRRIHTGEKPYECNECGKAFRVSSDLAQHHKIHTGEKPHECLECRKAFTQLSHLIQHQRIHTGERPYVCPLCGKAFNHSTALRSHQRVHTGEKPHRCNECGKTFSVKRTLLQHQRIHTGEKPYTCSECGKAFSDRSVLIQHHNVHTGEKPYECSECGKTFSHRSTLMNHERIHTEEKPYACYECGKAFVQHSHLIQHQRVHTGEKPYVCGECGHAFSARRSLIQHERIHTGEKPFQCTECGKAFSLKATLIVHLRTHTGEKPYECNSCGKAFSQYSVLIQHQRIHTGEKPYECGECGRAFNQHGHLIQHQKVHRKL

SEQ ID NO: 15 - protein, 618 aa, Homo sapiens
  source 1..618: note = Gene Symbol: ZNF254; note = Alternative Gene Symbol: ZNF254; note = Sequence Name: 56322-704_101_SL_seq_15
MLENYRNLAFLGIAVSKPDLITCLEQGKEPWNMKRHEMVDEPPGMCPHFAQDLWPEQGMEDSFQKAILRRYGKYGHENLQLRKGCKSVDEYKVNKEGYNGLNQCFTTAQSKVFQCDKYLKVFYKFLNSNRPKIRHTEKKSFKCKKRVKLFCMLSHKTQHKSIYHREKSYKCKECGKTFNWSSTLTNHRKIYTEEKPYKCEEYNKSPKQLSTLTTHEIIHAGEKLYKCEECGEAFNRSSNLTTHKIIHTGEKPYKCEECGKAFIWSSTLTEHKKIHTRKKPYKCEECGKAFIWSSTLTRHKRMHTGEKPYKCEECGKAFSQSSTLTTHKIIHTGEKRYKCLECGKAFKQLSTLTTHKIIHVGEKLYKCEECGKGFNRSSNLTTHKIIHTGEKPYKCEECGKAFIWSSTLTKHKRIHTREKPYKCEECGKAFIWSSTLTRHKRMHTGEKPYKCEECGKSFSQSSTLTTHKIIHTGEKPYKCEECGKAFNWSSTLTKHKIIHTEEKPYKCEKCGKAFKQSSILTNHKRIHTGEKPYKCEECGKSFNRSSTFTKHKVIHTGVKPYKCEECGKAFFWSSTLTKHKRIHTGEQPYKWEKFGKAFNRSSHLTTDKITHWREILQV

SEQ ID NO: 16 - protein, 563 aa, Homo sapiens
  source 1..563: note = Gene Symbol: ZNF257; note = Alternative Gene Symbol: ZNF257; note = Sequence Name: 56322-704_101_SL_seq_16
MGPLTIRDVTVEFSLEEWHCLDTAQQNLYRDVMLENYRNLVFLGIAVSKPDLITCLEQGKEPCNMKRHEMVAKPPVMCSHIAEDLCPERDIKYFFQKVILRRYDKCEHENLQLRKGCKSVDECKVCKGGYNGLNQCLITTQSKMYQCDKYVKVFYKFSNSDRHKIRHTEKKTCKCKECGKSFCMLSQLTRHKRIHIRENSHKCEECGKAFNQSSALTRHKMTHTGEKPYKCEECGKAFNRSSHLTQHKVIHTREKPYKCEECGKAFNRSSHITQHKRIHNREKPFKYDECCKAFKWSSALTTLTQHKRIHTGEKPYKCEECGKAFNQSSALTRHKMIHTGEKPFQCEECGKAFNRSSHLTQHKIIHTKEKPYKCEECGKAFNRSSHLTKHKRIHTREKAYKCDEYCKAFNWSSALTTLTQHKIIHTGEKPYKCEECGKAFNRSSYLIRHKIIHTGEKPYKCEECGKAFNQSSHLTQHKIIHTGEKPYKCEECGKAFNRSSHLSQHKIIHTGEKPYKCEECGKPFNRFSYLTVHKRIHAGENPNKYEECGKACNHSSNLTKHNS

SEQ ID NO: 17 - protein, 627 aa, Homo sapiens
  source 1..627: note = Gene Symbol: ZNF264; note = Alternative Gene Symbol: ZNF264; note = Sequence Name: 56322-704_101_SL_seq_17
MAAAVLTDRAQVSVTFDDVAVTFTKEEWGQLDLAQRTLYQEVMLENCGLLVSLGCPVPKAELICHLEHGQEPWTRKEDLSQDTCPGDKGKPKTTEPTTCEPALSEGISLQGQVTQGNSVDSQLGQAEDQDGLSEMQEGHFRPGIDPQEKSPGKMSPECDGLGTADGVCSRIGQEQVSPGDRVRSHNSCESGKDPMIQEEENNFKCSECGKVFNKKHLLAGHEKIHSGVKPYECTECGKTFIKSTHLLQHHMIHTGERPYECMECGKAFNRKSYLTQHQRIHSGEKPYKCNECGKAFTHRSNFVLHNRRHTGEKSFVCTECGQVFRHRPGFLRHYVVHSGENPYECLECGKVFKHRSYLMWHQQTHTGEKPYECSECGKVFLESAALIHHYVIHTGEKPFECLECGKAFNHRSYLKRHQRIHTGEKPFVCSECGKAFTHCSTFILHKRAHTGEKPFECKECGKAFSNRKDLIRHFSIHTGEKPYECVECGKAFTRMSGLTRHKRIHSGEKPYECVECGKSFCWSTNLIRHAIIHTGEKPYKCSECGKAFSRSSSLTQHQRMHTGKNPISVTDVGRPFTSGQTSVTLRELLLGKDFLNVTTEANILPEETSSSASDQPYQRETPQVSSL

SEQ ID NO: 18 - protein, 569 aa, Homo sapiens
  source 1..569: note = Gene Symbol: ZNF273; note = Alternative Gene Symbol: ZNF273; note = Sequence Name: 56322-704_101_SL_seq_18
MSSAPRGPPSVAPLPAGIGRSTAKTPGLPGSLEMGPLTFRDVAIEFSLEEWQCLDTSQQNLYRNVMLDNYRNLVFLGIAVSKPDLITCLEQGKEPCNMKRHAMVAKPPVVCSHFAQDLWPKQGLKDSFQKVILRRYGKYGHENLQLRKGCKSADEHKVHKRGYNGLNQCLTTTQSKIFQCDKYVKVLHKFSNSNIHKKRQTGKKPFKCKECGKSCCILSQLTQHKKTATRVNFYKCKTCGKAFNQFSNLTKHKIIHPEVNPYKCEECGKAFNQSLTLTKHKKIHTEEKPYKCEDCGKVFSVFSVLTKHKIIHTGTKPYNCEECGKGFSIFSTLTKHKIIHTGEKPYKCNECGKAFNWSSTLTKHKRIHTGEKPYKCEECGKAFNQSSTLTRHKIVHTGEKPYKCEECGKAFKRSTTLTKHKRIYTKEKPYKCEECGKAFSVFSTLTKHKIIHTGAKPYKCEECGSAFRAFSTLTEHKRVHTGEKPYKCNECGKAFNWSSTLTKHKRIHTGEKPYKCEECGKAFNRSSNLTRHKKIHTGEKPYKPKRCDSAFDNTPNFSRHKRNHMGEKS

SEQ ID NO: 19 - protein, 623 aa, Homo sapiens
  source 1..623: note = Gene Symbol: ZNF30; note = Alternative Gene Symbol: ZNF30; note = Sequence Name: 56322-704_101_SL_seq_19
MAHKYVGLQYHGSVTFEDVAIAFSQQEWESLDSSQRGLYRDVMLENYRNLVSMGHSRSKPHVIALLEQWKEPEVTVRKDGRRWCTDLQLEDDTIGCKEMPTSENCPSFALHQKISRQKPRECQEYGKTLCQDSKPVQHERIHSSEKPNRCKECGKNFSNGHQLTIHQRLHVGEKPYKYEKCGKAFISGSAFVKHGRIHTGEKPLKCKQCGKTISGSYQLTVHKSIHTGKKPYECGECGKAFLVYGKLTRHQSTHTGEKPFGCEECGKAFSTFSYLVQHQRIHTSEKPYECKECGKAFSTSSPLAKHQRIHTGEKPYECKECGKSFTVYGQLTRHQSIHTGEKPFECKECGKAFRLSSFLHAHQRIHAEIKPYGCKECGRTFSRASYLVQHGRLHTGEKPYECKECGKAFSTGSYLVQHQRIHTGEKPYECKECGKAFISRHQLTVHQRVHTGEKPYECKECGKAFRVHVHLTQHRKIHTDVKPYECKECGKTFSRASYLVQHSRIHTGKKPYECKECGKAFSSGSYLVQHQRIHTGEKPYECNKCGKAFTVYGQLIGHQSVHTGEKPFECKECGKAFRLNSFLTEHQRVHTGEKPFKCKKCGKTFRYSSALKVHLRKHMSVIP

SEQ ID NO: 20 - protein, 509 aa, Homo sapiens
  source 1..509: note = Gene Symbol: ZNF320; note = Alternative Gene Symbol: ZNF320; note = Sequence Name: 56322-704_101_SL_seq_20
MALSQGLLTFRDVAIEFSQEEWKCLDPAQRTLYRDVMLENYRNLVSLDISSKCMMNTLSSTGQGNTEVIHTGTLQRQASYHIGAFCSQEIEKDIHDFVFQWQEDETNDHEAPMTEIKKLTSSTDRYDQRHAGNKPIKGQLESRFHLHLRRHRRIHTGEKPYKCEECEKVFSCKSHLEIHRIIHTGEKPYKCKVCDKAFKHDSHLAKHTRIHRGDKHYTCNECGKVFDQKATLACHHRSHTGEKPYKCNECGKTFSQTSHLVYHHRLHTGEKPYKCNECGKTFARNSVLVIHKAVHTAEKPYKCNECGKVFKQRATLAGHRRVHTGEKPYRCEECDKVFSRKSHLERHRRIHTGEKPYKCKVCDKAFRSDSRLAEHQRVHTGERPYTCNECGKVFSTKAYLACHQKLHTGEKLYECEECDKVYIRKSHLERHRRIHTGEKPHKCGDCGKAFNSPSHLIRHQRIHTGQKSYKCHQCGKVFSLRSLLAEHQKIPFGDNCFKCNEYSKPSSIN

SEQ ID NO: 21 - protein, 553 aa, Homo sapiens
  source 1..553: note = Gene Symbol: ZNF324; note = Alternative Gene Symbol: ZNF324; note = Sequence Name: 56322-704_101_SL_seq_21
MAFEDVAVYFSQEEWGLLDTAQRALYRRVMLDNFALVASLGLSTSRPRVVIQLERGEEPWVPSGTDTTLSRTTYRRRNPGSWSLTEDRDVSGEWPRAFPDTPPGMTTSVFPVAGACHSVKSLQRQRGASPSRERKPTGVSVIYWERLLLGSGSGQASVSLRLTSPLRPPEGVRLREKTLTEHALLGRQPRTPERQKPCAQEVPGRTFGSAQDLEAAGGRGHHRMGAVWQEPHRLLGGQEPSTWDELGEALHAGEKSFECRACSKVFVKSSDLLKHLRTHTGERPYECAQCGKAFSQTSHLTQHQRIHSGETPYACPVCGKAFRHSSSLVRHQRIHTAEKSFRCSECGKAFSHGSNLSQHRKIHAGGRPYACAQCGRRFCRNSHLIQHERTHTGEKPFVCALCGAAFSQGSSLFKHQRVHTGEKPFACPQCGRAFSHSSNLTQHQLLHTGERPFRCVDCGKAFAKGAVLLSHRRIHTGEKPFVCTQCGRAFRERPALFHHQRIHTGEKTVRRSRASLHPQARSVAGASSEGAPAKETEPTPASGPAAVSQPAEV

SEQ ID NO: 22 - protein, 463 aa, Homo sapiens
  source 1..463: note = Gene Symbol: ZNF331; note = Alternative Gene Symbol: ZNF33; note = Sequence Name: 56322-704_101_SL_seq_22
MAQGLVTFADVAIDFSQEEWACLNSAQRDLYWDVMLENYSNLVSLDLESAYENKSLPTEKNIHEIRASKRNSDRRSKSLGRNWICEGTLERPQRSRGRYVNQMIINYVKRPATREGTPPRTHQRHHKENSFECKDCGKAFSRGYQLSQHQKIHTGEKPYECKECKKAFRWGNQLTQHQKIHTGEKPYECKDCGKAFRWGSSLVIHKRIHTGEKPYECKDCGKAFRRGDELTQHQRFHTGEKDYECKDCGKTFSRVYKLIQHKRIHSGEKPYECKDCGKAFICGSSLIQHKRIHTGEKPYECQECGKAFTRVNYLTQHQKIHTGEKPHECKECGKAFRWGSSLVKHERIHTGEKPYKCTECGKAFNCGYHLTQHERIHTGETPYKCKECGKAFIYGSSLVKHERIHTGVKPYGCTECGKSFSHGHQLTQHQKTHSGAKSYECKECGKACNHLNHLREHQRIHNS

SEQ ID NO: 23 - protein, 829 aa, Homo sapiens
  source 1..829: note = Gene Symbol: ZNF33A; note = Alternative Gene Symbol: ZNF33A; note = Sequence Name: 56322-704_101_SL_seq_23
MCPRGYPEQSNWMSSPLYSTEVEQKSQESVSFKDVTVGFTQEEWQHLDPSQRALYRDVMLENYSNLVSVGYCVHKPEVIFRLQQGEEPWKQEEEFPSQSFPEVWTADHLKERSQENQSKHLWEVVFINNEMLTKEQGDVIGIPFNVDVSSFPSRKMFCQCDSCGMSFNTVSELVISKINYLGKKSDEFNACGKLLLNIKHDETHTQEKNEVLKNRNTLSHHEETLQHEKIQTLEHNFEYSICQETLLEKAVFNTQKRENAEENNCDYNEFGRTLCDSSSLLFHQISPSRDNHYEFSDCEKFLCVKSTLSKPHGVSMKHYDCGESGNNFRRKLCLSHLQKGDKGEKHFECNECGKAFWEKSHLTRHQRVHTGQKPFQCNECEKAFWDKSNLTKHQRSHTGEKPFECNECGKAFSHKSALTLHQRTHTGEKPYQCNACGKTFCQKSDLTKHQRTHTGLKPYECYECGKSFRVTSHLKVHQRTHTGEKPFECLECGKSFSEKSNLTQHQRIHIGDKSYECNACGKTFYHKSLLTRHQIIHTGWKPYECYECGKTFCLKSDLTVHQRTHTGQKPFACPECGKFFSHKSTLSQHYRTHTGEKPYECHECGKIFYNKSYLTKHNRTHTGEKPYECNECGKAFYQKSQLTQHQRIHIGEKPYKCNECGKAFCHKSALIVHQRTHTQEKPYKCNECGKSFCVKSGLIFHERKHTGEKPYECNECGKFFRHKSSLTVHHRAHTGEKSCQCNECGKIFYRKSELAQHQRSHTGEKPYECNTCRKTFSQKSNLIVHQRRHIGENLMNEMDIRNFQPQVSLHNASEYSHCGESPDDILNVQ

SEQ ID NO: 24 - protein, 539 aa, Homo sapiens
  source 1..539: note = Gene Symbol: ZNF34; note = Alternative Gene Symbol: ZNF34; note = Sequence Name: 56322-704_101_SL_seq_24
MAALFLSAPPQAEVTFEDVAVYLSREEWGRLGPAQRGLYRDVMLETYGNLVSLGVGPAGPKPGVISQLERGDEPWVLDVQGTSGKEHLRVNSPALGTRTEYKELTSQETFGEEDPQGSEPVEACDHISKSEGSLEKLVEQRGPRAVTLTNGESSRESGGNLRLLSRPVPDQRPHKCDICEQSFEQRSYLNNHKRVHRSKKTNTVRNSGEIFSANLVVKEDQKIPTGKKLHYCSYCGKTFRYSANLVKHQRLHTEEKPYKCDECGKAFSQSCEFINHRRMHSGEIPYRCDECGKTFTRRPNLMKHQRIHTGEKPYKCGECGKHFSAYSSLIYHQRIHTGEKPYKCNDCGKAFSDGSILIRHRRTHTGEKPFECKECGKGFTQSSNLIQHQRIHTGEKPYKCNECEKAFIQKTKLVEHQRSHTGEKPYECNDCGKVFSQSTHLIQHQRIHTGEKPYKCSECGKAFHNSSRLIHHQRLHHGEKPYRCSDCKKAFSQSTYLIQHRRIHTGEKPYKCSECGKAFRHSSNMCQHQRIHLREDFSM

SEQ ID NO: 25 - protein, 532 aa, Homo sapiens
  source 1..532: note = Gene Symbol: ZNF350; note = Alternative Gene Symbol: ZNF350; note = Sequence Name: 56322-704_101_SL_seq_25
MIQAQESITLEDVAVDFTWEEWQLLGAAQKDLYRDVMLENYSNLVAVGYQASKPDALFKLEQGEQLWTIEDGIHSGACSDIWKVDHVLERLQSESLVNRRKPCHEHDAFENIVHCSKSQFLLGQNHDIFDLRGKSLKSNLTLVNQSKGYEIKNSVEFTGNGDSFLHANHERLHTAIKFPASQKLISTKSQFISPKHQKTRKLEKHHVCSECGKAFIKKSWLTDHQVMHTGEKPHRCSLCEKAFSRKFMLTEHQRTHTGEKPYECPECGKAFLKKSRLNIHQKTHTGEKPYICSECGKGFIQKGNLIVHQRIHTGEKPYICNECGKGFIQKTCLIAHQRFHTGKTPFVCSECGKSCSQKSGLIKHQRIHTGEKPFECSECGKAFSTKQKLIVHQRTHTGERPYGCNECGKAFAYMSCLVKHKRIHTREKQEAAKVENPPAERHSSLHTSDVMQEKNSANGATTQVPSVAPQTSLNISGLLANRNVVLVGQPVVRCAASGDNRGFAQDRNLVNAVNVVVPSVINYVLFYVTENP

SEQ ID NO: 26 - protein, 605 aa, Homo sapiens
  source 1..605: note = Gene Symbol: ZNF354A; note = Alternative Gene Symbol: ZNF354A; note = Sequence Name: 56322-704_101_SL_seq_26
MAAGQREARPQVSLTFEDVAVLFTRDEWRKLAPSQRNLYRDVMLENYRNLVSLGLPFTKPKVISLLQQGEDPWEVEKDGSGVSSLGSKSSHKTTKSTQTQDSSFQGLILKRSNRNVPWDLKLEKPYIYEGRLEKKQDKKGSFQIVSATHKKIPTIERSHKNTELSQNFSPKSVLIRQQILPREKTPPKCEIQGNSLKQNSQLLNQPKITADKRYKCSLCEKTFINTSSLRKHEKNHSGEKLFKCKECSKAFSQSSALIQHQITHTGEKPYICKECGKAFTLSTSLYKHLRTHTVEKSYRCKECGKSFSRRSGLFIHQKIHAEENPCKYNPGRKASSCSTSLSGCQRIHSRKKSYLCNECGNTFKSSSSLRYHQRIHTGEKPFKCSECGRAFSQSASLIQHERIHTGEKPYRCNECGKGFTSISRLNRHRIIHTGEKFYNCNECGKALSSHSTLIIHERIHTGEKPCKCKVCGKAFRQSSALIQHQRMHTGERPYKCNECGKTFRCNSSLSNHQRIHTGEKPYRCEECGISFGQSSALIQHRRIHTGEKPFKCNTCGKTFRQSSSRIAHQRIHTGEKPYECNTCGKLFNHRSSLTNHYKIHIEEDP

SEQ ID NO: 27 - protein, 561 aa, Homo sapiens
  source 1..561: note = Gene Symbol: ZNF37A; note = Alternative Gene Symbol: ZNF37A; note = Sequence Name: 56322-704_101_SL_seq_27
MITSQGSVSFRDVTVGFTQEEWQHLDPAQRTLYRDVMLENYSHLVSVGYCIPKPEVILKLEKGEEPWILEEKFPSQSHLELINTSRNYSIMKFNEFNKGGKCFCDEKHEIIHSEEEPSEYNKNGNSFWLNEDLIWHQKIKNWEQSFEYNECGKAFPENSLFLVHKRGYTGQKTCKYTEHGKTCDMSFFITHQQTHPRENHYGNECGENIFEESILLEHQSVYPFSQKLNLTPIQRTHSINNIIEYNECGTFFSEKLVLHLQQRTHTGEKPYECHECGKTFTQKSAHTRHQRTHTGGKPYECHECGKTFYKNSDLIKHQRIHTGERPYGCHECGKSFSEKSTLTQHQRTHTGEKPYECHECGKTFSFKSVLTVHQKTHTGEKPYECYACGKAFLRKSDLIKHQRIHTGEKPYECNECGKSFSEKSTLTKHLRTHTGEKPYECIQCGKFFCYYSGFTEHLRRHTGEKPFGCNECGKTFRQKSALIVHQRTHIRQKPYGCNQCGKSFCVKSKLIAHHRTHTGEKPYECNVCGKSFYVKSKLTVHQRIHLGRNPINVVNEGNYSG

SEQ ID NO: 28 - protein, 561 aa, Homo sapiens
  source 1..561: note = Gene Symbol: ZNF394; note = Alternative Gene Symbol: ZNF394; note = Sequence Name: 56322-704_101_SL_seq_28
MNSSLTAQRRGSDAELGPWVMAARSKDAAPSQRDGLLPVKVEEDSPGSWEPNYPAASPDPETSRLHFRQLRYQEVAGPEEALSRLRELCRRWLRPELLSKEQILELLVLEQFLTILPEELQAWVREHCPESGEEAVAVVRALQRALDGTSSQGMVTFEDTAVSLTWEEWERLDPARRDFCRESAQKDSGSTVPPSLESRVENKELIPMQQILEEAEPQGQLQEAFQGKRPLFSKCGSTHEDRVEKQSGDPLPLKLENSPEAEGLNSISDVNKNGSIEGEDSKNNELQNSARCSNLVLCQHIPKAERPTDSEEHGNKCKQSFHMVTWHVLKPHKSDSGDSFHHSSLFETQRQLHEERPYKCGNCGKSFKQRSDLFRHQRIHTGEKPYGCQECGKSFSQSAALTKHQRTHTGEKPYTCLKCGERFRQNSHLNRHQSTHSRDKHFKCEECGETCHISNLFRHQRLHKGERPYKCEECEKSFKQRSDLFKHHRIHTGEKPYGCSVCGKRFNQSATLIKHQRIHTGEKPYKCLECGERFRQSTHLIRHQRIHQNKVLSAGRGGSRL

SEQ ID NO: 29 - protein, 779 aa, Homo sapiens
  source 1..779: note = Gene Symbol: ZNF41; note = Alternative Gene Symbol: ZNF4; note = Sequence Name: 56322-704_101_SL_seq_29
MAANGDSPPWSPALAAEGRGSSCEASVSFEDVTVDFSKEEWQHLDPAQRRLYWDVTLENYSHLLSVGYQIPKSEAAFKLEQGEGPWMLEGEAPHQSCSGEAIGKMQQQGIPGGIFFHCERFDQPIGEDSLCSILEELWQDNDQLEQRQENQNNLLSHVKVLIKERGYEHKNIEKIIHVTTKLVPSIKRLHNCDTILKHTLNSHNHNRNSATKNLGKIFGNGNNFPHSPSSTKNENAKTGANSCEHDHYEKHLSHKQAPTHHQKIHPEEKLYVCTECVMGFTQKSHLFEHQRIHAGEKSRECDKSNKVFPQKPQVDVHPSVYTGEKPYLCTQCGKVFTLKSNLITHQKIHTGQKPYKCSECGKAFFQRSDLFRHLRIHTGEKPYECSECGKGFSQNSDLSIHQKTHTGEKHYECNECGKAFTRKSALRMHQRIHTGEKPYVCADCGKAFIQKSHFNTHQRIHTGEKPYECSDCGKSFTKKSQLHVHQRIHTGEKPYICTECGKVFTHRTNLTTHQKTHTGEKPYMCAECGKAFTDQSNLIKHQKTHTGEKPYKCNGCGKAFIWKSRLKIHQKSHIGERHYECKDCGKAFIQKSTLSVHQRIHTGEKPYVCPECGKAFIQKSHFIAHHRIHTGEKPYECSDCGKCFTKKSQLRVHQKIHTGEKPNICAECGKAFTDRSNLITHQKIHTREKPYECGDCGKTFTWKSRLNIHQKSHTGERHYECSKCGKAFIQKATLSMHQIIHTGKKPYACTECQKAFTDRSNLIKHQKMHSGEKRYKASD

SEQ ID NO: 30 - protein, 594 aa, Homo sapiens
  source 1..594: note = Gene Symbol: ZNF416; note = Alternative Gene Symbol: ZNF46; note = Sequence Name: 56322-704_101_SL_seq_30
MAAAVLRDSTSVPVTAEAKLMGFTQGCVTFEDVAIYFSQEEWGLLDEAQRLLYRDVMLENFALITALVCWHGMEDEETPEQSVSVEGVPQVRTPEASPSTQKIQSCDMCVPFLTDILHLTDLPGQELYLTGACAVFHQDQKHHSAEKPLESDMDKASFVQCCLFHESGMPFTSSEVGKDFLAPLGILQPQAIANYEKPNKISKCEEAFHVGISHYKWSQCRRESSHKHTFFHPRVCTGKRLYESSKCGKACCCECSLVQLQRVHPGERPYECSECGKSFSQTSHLNDHRRIHTGERPYVCGQCGKSFSQRATLIKHHRVHTGERPYECGECGKSFSQSSNLIEHCRIHTGERPYECDECGKAFGSKSTLVRHQRTHTGEKPYECGECGKLFRQSFSLVVHQRIHTTARPYECGQCGKSFSLKCGLIQHQLIHSGARPFECDECGKSFSQRTTLNKHHKVHTAERPYVCGECGKAFMFKSKLVRHQRTHTGERPFECSECGKFFRQSYTLVEHQKIHTGLRPYDCGQCGKSFIQKSSLIQHQVVHTGERPYECGKCGKSFTQHSGLILHRKSHTVERPRDSSKCGKPYSPRSNIV

SEQ ID NO: 31 - protein, 510 aa, Homo sapiens
  source 1..510: note = Gene Symbol: ZNF419; note = Alternative Gene Symbol: ZNF49; note = Sequence Name: 56322-704_101_SL_seq_31
MAAAALRDPAQVPVAADLLTDHEEGYVTFEDVAVYFSQEEWRLLDDAQRLLYRNVMLENFTLLASLGLASSKTHEITQLESWEEPFMPAWEVVTSAIPRGCWHGAEAEEAPEQIASVGLLSSNIQQHQKQHCGEKPLKRQEGRVPVLRSCKVHLSEKSLQSREVGKALLISSGVLKHQVTHTGEKSHRSSKSREAFHAGKRHYKCSECGKAFGQKYLLVQHQRLHAGKKTYECSECGKLFRDMSNLFIHQIVHTGERPYGCSNCGKSFSRNAHLIEHQRVHTGEKPFTCSECGKAFRHNSTLVQHHKIHTGVRPYECSECGKLFSFNSSLMKHQRIHTGERPYKCSECGKFYSHKSNLIKHWRVHTGERPYKCSDCGKFFTQCSSLMQHQKVHTGEKPFKCNECGRFFRENSTLVRHQRVHTGAKPYECRECGKFFSQSSTLMQHRKVHIGEKPFKCNECGRLFRENSSLVKHQRVHTGAKPYECRECGKFFRHNSSLFKHRRIHTGEMQ

SEQ ID NO: 32 - protein, 470 aa, Homo sapiens
  source 1..470: note = Gene Symbol: ZNF436; note = Alternative Gene Symbol: ZNF436; note = Sequence Name: 56322-704_101_SL_seq_32
MAATLLMAGSQAPVTFEDMAMYLTREEWRPLDAAQRDLYRDVMQENYGNVVSLDFEIRSENEVNPKQEISEDVQFGTTSERPAENAEENPESEEGFESGDRSERQWGDLTAEEWVSYPLQPVTDLLVHKEVHTGIRYHICSHCGKAFSQISDLNRHQKTHTGDRPYKCYECGKGFSRSSHLIQHQRTHTGERPYDCNECGKSFGRSSHLIQHQTIHTGEKPHKCNECGKSFCRLSHLIQHQRTHSGEKPYECEECGKSFSRSSHLAQHQRTHTGEKPYECNECGRGFSERSDLIKHYRVHTGERPYKCDECGKNFSQNSDLVRHRRAHTGEKPYHCNECGENFSRISHLVQHQRTHTGEKPYECNACGKSFSRSSHLITHQKIHTGEKPYECNECWRSFGERSDLIKHQRTHTGEKPYECVQCGKGFTQSSNLITHQRVHTGEKPYECTECEKSFSRSSALIKHKRVHTD

SEQ ID NO: 33 - protein, 682 aa, Homo sapiens
  source 1..682: note = Gene Symbol: ZNF45; note = Alternative Gene Symbol: ZNF45; note = Sequence Name: 56322-704_101_SL_seq_33
MTKSKEAVTFKDVAVVFSEEELQLLDLAQRKLYRDVMLENFRNVVSVGHQSTPDGLPQLEREEKLWMMKMATQRDNSSGAKNLKEMETLQEVGLRYLPHEELFCSQIWQQITRELIKYQDSVVNIQRTGCQLEKRDDLHYKDEGFSNQSSHLQVHRVHTGEKPYKGEHCVKSFSWSSHLQINQRAHAGEKPYKCEKCDNAFRRFSSLQAHQRVHSRAKSYTNDASYRSFSQRSHLPHHQRVPTGENPYKYEECGRNVGKSSHCQAPLIVHTGEKPYKCEECGVGFSQRSYLQVHLKVHTGKKPYKCEECGKSFSWRSRLQAHERIHTGEKPYKCNACGKSFSYSSHLNIHCRIHTGEKPYKCEECGKGFSVGSHLQAHQISHTGEKPYKCEECGKGFCRASNLLDHQRGHTGEKPYQCDACGKGFSRSSDFNIHFRVHTGEKPYKCEECGKGFSQASNLLAHQRGHTGEKPYKCGTCGKGFSRSSDLNVHCRIHTGEKPYKCERCGKAFSQFSSLQVHQRVHTGEKPYQCAECGKGFSVGSQLQAHQRCHTGEKPYQCEECGKGFCRASNFLAHRGVHTGEKPYRCDVCGKRFRQRSYLQAHQRVHTGERPYKCEECGKVFSWSSYLQAHQRVHTGEKPYKCEECGKGFSWSSSLIIHQRVHADDEGDKDFPSSEDSHRKTR

SEQ ID NO: 34 - protein, 529 aa, Homo sapiens
  source 1..529: note = Gene Symbol: ZNF490; note = Alternative Gene Symbol: ZNF490; note = Sequence Name: 56322-704_101_SL_seq_34
MRRNSSLSFQMERPLEEQVQSKWSSSQGRTGTGGSDVLQMQNSEHHGQSIKTQTDSISLEDVAVNFTLEEWALLDPGQRNIYRDVMRATFKNLACIGEKWKDQDIEDEHKNQGRNLRSPMVEALCENKEDCPCGKSTSQIPDLNTNLETPTGLKPCDCSVCGEVFMHQVSLNRHMRSHTEQKPNECHEYGEKPHKCKECGKTFTRSSSIRTHERIHTGEKPYECKECGKAFAFLFSFRNHIRIHTGETPYECKECGKAFRYLTALRRHEKNHTGEKPYKCKQCGKAFIYYQPFLTHERTHTGEKPYECKQCGKAFSCPTYLRSHEKTHTGEKPFVCRECGRAFFSHSSLRKHVKTHTGVQPYTCKKCGEAFKSSSSCEVHERTHFGEKPYECKQCGKAFNSSSYLQLHERVHTGEKTYECKECGKAFLYSTHFRIHERTHTREKPYECKQCGRVFIYFSHLRRHERSHTGVKPCECKQCGKAFTCLNSLKVHKRIHTGERPFQCRQCGKAFSYSKSLHVHERTHSRQKP

SEQ ID NO: 35 - protein, 628 aa, Homo sapiens
  source 1..628: note = Gene Symbol: ZNF528; note = Alternative Gene Symbol: ZNF528; note = Sequence Name: 56322-704_101_SL_seq_35
MALTQGPLKFMDVAIEFSQEEWKCLDPAQRTLYRDVMLENYRNLVSLGICLPDLSVTSMLEQKRDPWTLQSEEKIANDPDGRECIKGVNTERSSKLGSNAGNKPCKNQLGFTFQLHLSDLQLFQAERKISGCKHFEKPVSDNSSVSPLEKISSSVKSHLLNKYRNNFDHAPLLPQEQKAHIREKAYKCNEHGQVFRASASLTNQVIHNADNPYKCSECGKVFSCSSKLVIHRRMHTGEKPYKCHECGKLFSSNSNLSQHQRIHTGEKPYKCHECDKVFRSSSKLAQHQRIHTGEKPYKCHECDKVFNQIAHLVRHQKIHTGEKPYSCNKCGKVFSRHSYLAEHQTVHTGEKPYKCEECGKAFSVRSSLITHQLIHTGRKPYKCKECDKVFGRKCFLTSHQRIHTRERPYGCSQCGKIFSQKSDLIRHRKTHTDEKPYKCNKCGTAFREFSDLTAHFLIHSGEKPYECKECGKVFRYKSSLTSHHRIHTGEKPYKCNRCGKVFSRSSNLVCHQKIHTGEKPYKCNQCGKVFNQASYLTRHQIIHTGERPYRCSKCGKAFRGCSGLTAHLAIHTEKKSHECKECGKIFTQKSSLTNHHRIHIGEKPYKCTLCSKVFSHNSDLAQHQRVHS

SEQ ID NO: 36 - protein, 600 aa, Homo sapiens
  source 1..600: note = Gene Symbol: ZNF543; note = Alternative Gene Symbol: ZNF543; note = Sequence Name: 56322-704_101_SL_seq_36
MAASAQVSVTFEDVAVTFTQEEWGQLDAAQRTLYQEVMLETCGLLMSLGCPLFKPELIYQLDHRQELWMATKDLSQSSYPGDNTKPKTTEPTFSHLALPEEVLLQEQLTQGASKNSQLGQSKDQDGPSEMQEVHLKIGIGPQRGKLLEKMSSERDGLGSDDGVCTKITQKQVSTEGDLYECDSHGPVTDALIREEKNSYKCEECGKVFKKNALLVQHERIHTQVKPYECTECGKTFSKSTHLLQHLIIHTGEKPYKCMECGKAFNRRSHLTRHQRIHSGEKPYKCSECGKAFTHRSTFVLHHRSHTGEKPFVCKECGKAFRDRPGFIRHYIIHTGEKPYECIECGKAFNRRSYLTWHQQIHTGVKPFECNECGKAFCESADLIQHYIIHTGEKPYKCMECGKAFNRRSHLKQHQRIHTGEKPYECSECGKAFTHCSTFVLHKRTHTGEKPYECKECGKAFSDRADLIRHFSIHTGEKPYECVECGKAFNRSSHLTRHQQIHTGEKPYECIQCGKAFCRSANLIRHSIIHTGEKPYECSECGKAFNRGSSLTHHQRIHTGRNPTIVTDVGRPFMTAQTSVNIQELLLGKEFLNITTEENLW

SEQ ID NO: 37 - protein, 402 aa, Homo sapiens
  source 1..402: note = Gene Symbol: ZNF547; note = Alternative Gene Symbol: ZNF547; note = Sequence Name: 56322-704_101_SL_seq_37
MAEMNPAQGHVVFEDVAIYFSQEEWGHLDEAQRLLYRDVMLENLALLSSLGCCHGAEDEEAPLEPGVSVGVSQVMAPKPCLSTQNTQPCETCSSLLKDILRLAEHDGTHPEQGLYTCPAHLHQHQKEQIREKLSRGDGGRPTFVKNHRVHMAGKTFLCSECGKAFSHKHKLSDHQKIHTGERTYKCSKCGILFMERSTLNRHQRTHTGERPYECNECGKAFLCKSHLVRHQTIHSGERPYECSECGKLFMWSSTLITHQRVHTGKRPYGCSECGKFFKCNSNLFRHYRIHTGKRSYGCSECGKFFMERSTLSRHQRVHTGERPYECNECGKFFSLKSVLIQHQRVHTGERPYECSECGKAFLTKSHLICHQTVHTAAKQCSECGKFFRYNSTLLRHQKVHTG

SEQ ID NO: 38 - protein, 538 aa, Homo sapiens
  source 1..538: note = Gene Symbol: ZNF554; note = Alternative Gene Symbol: ZNF554; note = Sequence Name: 56322-704_101_SL_seq_38
MVTCAHLGRRARLPAAQPSACPGTCFSQEERMAAGYLPRWSQELVTFEDVSMDFSQEEWELLEPAQKNLYREVMLENYRNVVSLEALKNQCTDVGIKEGPLSPAQTSQVTSLSSWTGYLLFQPVASSHLEQREALWIEEKGTPQASCSDWMTVLRNQDSTYKKVALQEEPASGINMIKLIREDGGWKQLEDSHEDPQGLLSQKASLHVVAVPQEKATAWHGFGENGNLSPALVLSQGSSKGNHLCGSELDITSLASDSVLNHHQLGYADRRPCESNECGNAIRQNSHFIQHGGKMFVYLENGQSLNHGMALTIHNKINTAEKPFECHQCGKVFNRRHSLSEHQRIHTGEKPYECQECGRAFTHSSTLTRHLRTHTGEKPYGCGECGKAFNRISSLTQHQRIHTGEKPYKCEDCGKSFCQSSYLILHKRTHTGEKPYECSECGKAFSDRSSLNQHERTHTGENPYECKQCGRAFSQRSSLVRHERTHTGEKPYRCQECGKAFSQSSSLVTHQKTHSSQKTYKIIDCGKAFYQNRHLIGY

SEQ ID NO: 39 - protein, 423 aa, Homo sapiens
  source 1..423: note = Gene Symbol: ZNF557; note = Alternative Gene Symbol: ZNF557; note = Sequence Name: 56322-704_101_SL_seq_39
MAAVVLPPTAASQREGHTEGGELVNELLKSWLKGLVTFEDVAVEFTQEEWALLDPAQRTLYRDVMLENCRNLASLGNQVDKPRLISQLEQEDKVMTEERGILSGTCPDVENPFKAKGLTPKLHVFRKEQSRNMKMERNHLGATLNECNQCFKVFSTKSSLTRHRKIHTGERPYGCSECGKSYSSRSYLAVHKRIHNGEKPYECNDCGKTFSSRSYLTVHKRIHNGEKPYECSDCGKTFSNSSYLRPHLRIHTGEKPYKCNQCFREFRTQSIFTRHKRVHTGEGHYVCNQCGKAFGTRSSLSSHYSIHTGEYPYECHDCGRTFRRRSNLTQHIRTHTGEKPYTCNECGKSFTNSFSLTIHRRIHNGEKSYECSDCGKSFNVLSSVKKHMRTHTGKKPYECNYCGKSFTSNSYLSVHTRMHNRQM

SEQ ID NO: 40 - protein, 418 aa, Homo sapiens
  source 1..418: note = Gene Symbol: ZNF566; note = Alternative Gene Symbol: ZNF566; note = Sequence Name: 56322-704_101_SL_seq_40
MAQESVMFSDVSVDFSQEEWECLNDDQRDLYRDVMLENYSNLVSMGHSISKPNVISYLEQGKEPWLADRELTRGQWPVLESRCETKKLFLKKEIYEIESTQWEIMEKLTRRDFQCSSFRDDWECNRQFKKELGSQGGHFNQLVFTHEDLPTLSHHPSFTLQQIINSKKKFCASKEYRKTFRHGSQFATHEIIHTIEKPYECKECGKSFRHPSRLTHHQKIHTGKKPFECKECGKTFICGSDLTRHHRIHTGEKPYECKECGKAFSSGSNFTRHQRIHTGEKPYECKECGKAFSSGSNFTQHQRIHTGEKPYECKECGNAFSQSSQLIKHQRIHTGEKPYECKECEKAFRSGSDLTRHQRIHTGEKPYECKICGKAYSQSSQLISHHRIHTSEKPYEYRECGKNFNYDPQLIQHQNLYW

SEQ ID NO: 41 - protein, 517 aa, Homo sapiens
  source 1..517: note = Gene Symbol: ZNF582; note = Alternative Gene Symbol: ZNF582; note = Sequence Name: 56322-704_101_SL_seq_41
MSLGSELFRDVAIVFSQEEWQWLAPAQRDLYRDVMLETYSNLVSLGLAVSKPDVISFLEQGKEPWMVERVVSGGLCPVLESRYDTKELFPKQHVYEVESPQWEIMESLTSYGLECSSFQDDWECRNQFDRQQGNPDRHFHQMIIRHEEMPTFDQHASLTFYQKIHTREKPFGYNKCRKDFWQKELLINHQGIYTNEKPYKCKECGKAFKYGSRLIQHENIHSGKKPYECKECGKAFNSGSNFIQHQRVHTGEKPYECKDCEKAFSRSSQLIEHQRTHTGEKPYQCKECGKAFNRISHLKVHYRIHTGEKPYACKECGKTFSHRSQLIQHQTVHTGRKLYECKECGKAFNQGSTLIRHQRIHTGEKPYECKVCGKAFRVSSQLKQHQRIHTGEKPYQCKVCGRAFKRVSHLTVHYRIHTGEKPYECKECGKAFSHCSQLIHHQVIHTEKKPYEYKECEKTLSHDSTTVQPQRMHNRETHVNIINVEKPSISSYPLLIIREFMLASNHMNGSNGESPLA

SEQ ID NO: 42 - protein, 616 aa, Homo sapiens
  source 1..616: note = Gene Symbol: ZNF595; note = Alternative Gene Symbol: ZNF595; note = Sequence Name: 56322-704_101_SL_seq_42
MELVTFRDVAIEFSPEEWKCLDPAQQNLYRDVMLENYRNLVSLAICSPFSQDLSPVQGIEDSFHKLILKRYEKCGHENLQLRKGCKRVNECKVQKGVNNGVYQCLSTTQSKIFQCNTCVKVFSKFSNSNKHKIRHTGEKPFKCTECGRSFYMSHLTQHTGIHAGEKPYKCEKCGKAFNRSTSLSKHKRIHTGEKPYTCEECGKAFRRSTVLNEHKKIHTGEKPYKCEECGKAFTRSTTLNEHKKIHTGEKPYKCKECGKAFRWSTSLNEHKNIHTGEKPYKCKECGKAFRQSRSLNEHKNIHTGEKPYTCEKCGKAFNQSSSLIIHRSIHSEQKLYKCEECGKAFTWSSSLNKHKRIHTGEKPYTCEECGKAFYRSSHLAKHKRIHTGEKPYTCEECGKAFNQSSTLILHKRIHSGQKPYKCEECGKAFTRSTTLNEHKKIHTGEKPYKCEECGKAFIWSASLNEHKNIHTGEKPYKCKECGKAFNQSSGLIIHRSIHSEQKLYKCEECGKAFTRSTALNEHKKIHSGEKPYKCKECGKAYNLSSTLTKHKRIHTGEKPFTCEECGKAFNWSSSLTKHKIIHTGEKSYKCEECGKAFNRPSTLTVHKRIHTGKEHS

SEQ ID NO: 43 - protein, 504 aa, Homo sapiens
  source 1..504: note = Gene Symbol: ZNF596; note = Alternative Gene Symbol: ZNF596; note = Sequence Name: 56322-704_101_SL_seq_43
MPSPDSMTFEDIIVDFTQEEWALLDTSQRKLFQDVMLENISHLVSIGKQLCKSVVLSQLEQVEKLSTQRISLLQGREVGIKHQEIPFIQHIYQKGTSTISTMRSHTQEDPFLCNDLGEDFTQHIALTQNVITYMRTKHFVSKKFGKIFSDWLSFNQHKEIHTKCKSYGSHLFDYAFIQNSALRPHSVTHTREITLECRVCGKTFSKNSNLRRHEMIHTGEKPHGCHLCGKAFTHCSDLRKHERTHTGEKPYGCHLCGKAFSKSSNLRRHEMIHTREKAQICHLCGKAFTHCSDLRKHERTHLGDKPYGCLLCGKAFSKCSYLRQHERTHNGEKPYECHLCGKAFSHCSHLRQHERSHNGEKPHGCHLCGKAFTESSVLKRHERIHTGEKPYECHVCGKAFTESSDLRRHERTHTGEKPYECHLCGKAFNHSSVLRRHERTHTGEKPYECNICGKAFNRSYNFRLHRRVHTGEKPYVCPLCGKAFSKFFNLRQHERTHTKKAMNM

SEQ ID NO: 44 - protein, 462 aa, Homo sapiens
  source 1..462: note = Gene Symbol: ZNF610; note = Alternative Gene Symbol: ZNF60; note = Sequence Name: 56322-704_101_SL_seq_44
MLCDEEAQKRKAKESGMALPQGRLTFMDVAIEFSQEEWKSLDPGQRALYRDVMLENYRNLVFLGICLPDLSIISMLKQRREPLILQSQVKIVKNTDGRECVRSVNTGRSCVLGSNAENKPIKNQLGLTLEAHLSELQLFQAGRKIYRSNQVEKFTNHRSSVSPLQKISSSFTTHIFNKYRNDLIDFPLLPQEEKAYIRGKSYEYECSEDGEVFRVRASLTNHQVIHTAEKPYKCTECGKVFSRNSHLVEHWRIHTGQKPYKCSECDKVFNRNSNLARHQRIHTGEKPHKCNECGKAFRECSGLTTHLVIHTGEKPYKCNECGKNFRHKFSLTNHQRSHTAEKPYKCNECGKVFSLLSYLARHQIIHSTEKPYKCNECGRAFHKRPGLMAHLLIHTGEKPYKCNECDKVFGRKLYLTNHQRIHTGERPYKCNACGKVFNQNPHLSRHRKIHAGENSLRTLQME

SEQ ID NO: 45 - protein, 464 aa, Homo sapiens
  source 1..464: note = Gene Symbol: ZNF669; note = Alternative Gene Symbol: ZNF669; note = Sequence Name: 56322-704_101_SL_seq_45
MVSGLRLASRSGEEGWLKPAVARLGPPRHRLRNLRTESPWRSRGSVLFCSGPGRAGRAAEPLHPVCTCGRHFRRPEPCREPLASPIQDSVAFEDVAVNFTQEEWALLDSSQKNLYREVMQETCRNLASVGSQWKDQNIEDHFEKPGKDIRNHIVQRLCESKEDGQYGEVVSQIPNLDLNENISTGLKPCECSICGKVFVRHSLLNRHILAHSGYKPYGEKQYKCEQCGKFFVSVPGVRRHMIMHSGNPAYKCTICGKAFYFLNSVERHQRTHTGEKPYKCKQCGKAFTVSGSCLIHERTHTGEKPYECKECGKTFRFSCSFKTHERTHTGERPYKCTKCDKAFSCSTSLRYHGSIHTGERPYECKQCGKAFSRLSSLCNHRSTHTGEKPYECKQCDQAFSRLSSLHLHERIHTGEKPYECKKCGKAYTRSSHLTRHERSHDIEAGCSDSAYNPSTLGGQGVWIA

SEQ ID NO: 46 - protein, 568 aa, Homo sapiens
  source 1..568: note = Gene Symbol: ZNF675; note = Alternative Gene Symbol: ZNF675; note = Sequence Name: 56322-704_101_SL_seq_46
MGLLTFRDVAIEFSLEEWQCLDTAQRNLYKNVILENYRNLVFLGIAVSKQDLITCLEQEKEPLTVKRHEMVNEPPVMCSHFAQEFWPEQNIKDSFEKVTLRRYEKCGNDNFQLKGCKSVDECKLHKGGYNGLNQCLPTMQSKMFQCDKYVKVFNKFSHSDRHKIKHMENKPFKCKECGRSFCMLSHLTRHERNYTKVNFCKCEECEKAVNQSSKLTKHKRIYTCEKLYKCQECDRTFNQFSNLTEYKKDYAREKPYKCEECGKAFNQSSHLTTHKIIHTGEKPYKCEECGKAFNQFSNLTTHKKIHTGEQPYICEECGKAFTQSSTLTTHKRIHTGEKPYKCEECGKAFNRSSKLTEHKNIHTGEQPYKCEECGKAFNRSSNLTEHRKIHTEEKPYKCKECGKAFKHSSALTTHKRIHTGEKPYKCEECGKAFNRSSKLTEHKKLHTGKKPYKCEECGKAFIQSSKLTEHKKIHSGEIPYKCEECGKAFKHSSSLTTHKRIHTGEKPYKCEECGKAFSRSSKLTEHKIIHTGEKPYKCERCDKAFNQSANLTKHKKIHTGEKLQNWNV

SEQ ID NO: 47 - protein, 584 aa, Homo sapiens
  source 1..584: note = Gene Symbol: ZNF677; note = Alternative Gene Symbol: ZNF677; note = Sequence Name: 56322-704_101_SL_seq_47
MALSQGLFTFKDVAIEFSQEEWECLDPAQRALYRDVMLENYRNLLSLDEDNIPPEDDISVGFTSKGLSPKENNKEELYHLVILERKESHGINNFDLKEVWENMPKFDSLWDYDVKNYKGMPLTCNKNLTHRKDQQHNKSSIHFSLKQSVSIRDSAHQYFIHDKPFIRNLLKLKNNIRYAGNKYVKCFENKIGLSLQAQLAELQRFQTGEKMYECNPVEKSINSSSVSPLPPCVKNICNKYRKILKYPLLHTQYGRTHIREKSYKCNDCGKAFSKSSNLTNHQRIHSGQRPYKCNECGKAFNQCSNLTRHQRVHTGEKPYQCNICGKVCSQNSNLASHQRMHTGEKPYKCNECGKAFIQRSHLWGHERIHTGEKPYKCNECDKAFAERSSLTQHKRIHTGEKPYICNECGKAFKQCSHLTRHQNIHPGEKPHKCNVCGRAFIQSSSLVEHQRIHTGEKPYKCNKCDKAFIKRSHLWGHQRTHTGEKPYKCTECGKAFTERSNLTQHKKIHTGEKPYKCTECGKAFTQFANLTRHQKIHIEKKHCKHNIHGNALFQSSNLGDHQKSYNREKHIKYNETKIKYSSCT

SEQ ID NO: 48 - protein, 530 aa, Homo sapiens
  source 1..530: note = Gene Symbol: ZNF680; note = Alternative Gene Symbol: ZNF680; note = Sequence Name: 56322-704_101_SL_seq_48
MPGPPGSLEMGPLTFRDVAIEFSLEEWQCLDTAQRNLYRKVMFENYRNLVFLGIAVSKPHLITCLEQGKEPWNRKRQEMVAKPPVIYSHFTEDLWPEHSIKDSFQKVILRGYGKCGHENLQLRISCKSVDESKVFKEGYNELNQCLRTTQSKIFQCDKYVKVFHKFSNSNSHKKRNTGKKVFKCKECGKSFCMLSHLTQHIRIHTRENSYKCEECGKVLNWFSELIKHKGIHMGEKPYKCEECGKAFNQSSTLIKHKKIHIEEKPFKCEECGKAFSLFSILSKHKIIHTGDKPYKCDECHKAFNWFATLTNHKRIHTGEKPFKCEECGKDFNQFSNLTKHKKIHTGEKPYKCEECGKAFNQFANLTRHKKIHTGEKSYKCEECGKAFIQSSNLTEHMRIHTGEKPYKCEECGKAFNGCSSLTRHKRIHTRENTYKCEECGKGFTLFSTLTNHKVIHTGEKSYKCDECGNVFNWPATLANHKRIHAREKPYKCEECGKAFNRSSHLTRHKKIHTGEKLYKPEKCDNNFDNT

SEQ ID NO: 49 - protein, 1252 aa, Homo sapiens
  source 1..1252: note = Gene Symbol: ZNF729; note = Alternative Gene Symbol: ZNF729; note = Sequence Name: 56322-704_101_SL_seq_49
MPGAPGSLEMGPLTFRDVTIEFSLEEWQCLDTVQQNLYRDVMLENYRNLVFLGMAVFKPDLITCLKQGKEPWNMKRHEMVTKPPVMRSHFTQDLWPDQSTKDSFQEVILRTYARCGHKNLRLRKDCKSANEGKMHKEGYNKLNQCRTATQRKIFQCNKHMKVFHKYSNRNKVRHTKKKTFKCIKCSKSFFMLSCLIRHKRIHIRQNIYKCEERGKAFKSFSTLTKHKIIHTEDKPYKYKKCGNAFKFSSTFTKHKRIHTGETPFRCEECGKAFNQSSNLTDHKRIHTGEKTYKCEECGKAFKGSSNFNAHKVIHTAEKPYKCEDCGKTFNHFSALRKHKIIHTGKKPYKREECGKAFSQSSTLRKHEIIHTGEKPYKCEECGKAFKWSSKLTVHKVVHTGEKPYKCEECGKAFSQFSTLKKHKIIHTGKKPYKCEECGKAFNSSSTLMKHKIIHTGEKPYKCEECGKAFRQSSHLTRHKAIHTGEKPYKCEECGKAFNHFSDLRRHKIIHTGKKPYKCEECGKAFSQSSTLRNHQIIHTGEKPYKCEECGKAFKWSSKLTVHKVIHTGEKPCKCEECGKAFKHFSALRKHKVIHTREKLYKCEECGKAFNNSSILAKHKIIHTGKKPYKCEECGKAFRQSSHLTRHKAIHTGEKPYKCEECGKAFSHFSALRRHKIIHTGKKPYKCEECGKAFSHFSALRRHKIIHTGEKPYKCEECGKAFKWSSKLTVHKVIHTAEKPCKCEECGKSFKHFSALRKHKVIHTREKLYKCEECVKAFNSFSALMKHKVIHTGEKPYKCEECGKAFKWSSKLTVHKVIHTGEKPCKCEECGKAFKHFSALRKHKVIHTGKKPYKCEECGKAFSQSSSLRKHEIIHSGEKPYKCEECGKAFKWLSKLTVHKVIHTAEKPCKCEECGKAFKHFSALRKHKIIHTGKKPYKCEECGKAFNDSSTLMKHKIIHTGKKPYKCAECGKAFKQSSHLTRHKAIHTGEKPYKCEECGKDFNNSSTLKKHKLIHTREKLYKCEECVKAFNNFSALMKHKIIHTGEKPYKCEECGKAFKWSSKLTEHKVIHTGEKPCKCEECDKAFKHFSALRKHKVIHTGKKPYQCDECGKAFNNSSTLTKHKIIHTGEKPYKCEECGKAFSQSSILTKHKIIHSVEKPYKCEECGKAFNQSSHLTRHKTIHTGEKPYKCEECGKAFIQCSYLIRHKTIHTREKPTNVKKVPKLLSNPHTLLDKTIHTGEKPYKCEECAKAF

SEQ ID NO: 50 - protein, 408 aa, Homo sapiens
  source 1..408: note = Gene Symbol: ZNF764; note = Alternative Gene Symbol: ZNF764; note = Sequence Name: 56322-704_101_SL_seq_50
MAPPLAPLPPRDPNGAGPEWREPGAVSFADVAVYFCREEWGCLRPAQRALYRDVMRETYGHLSALGIGGNKPALISWVEEEAELWGPAAQDPEVAKCQTQTDPADSRNKKKERQREGTGALEKPDPVAAGSPGLKSPQAPSAGPPYGWEQLSKAPHRGRPSLCAHPPVPRADQRHGCYVCGKSFAWRSTLVEHVYSHTGEKPFHCTDCGKGFGHASSLSKHRAIHRGERPHRCLECGRAFTQRSALTSHLRVHTGEKPYGCADCGRRFSQSSALYQHRRVHSGETPFPCPDCGRAFAYPSDLRRHVRTHTGEKPYPCPDCGRCFRQSSEMAAHRRTHSGEKPYPCPQCGRRFGQKSAVAKHQWVHRPGAGGHRGRVAGRLSVTLTPGHGDLDPPVGFQLYPEIFQECG

SEQ ID NO: 51 - protein, 405 aa, Homo sapiens
  source 1..405: note = Gene Symbol: ZNF785; note = Alternative Gene Symbol: ZNF785; note = Sequence Name: 56322-704_101_SL_seq_51
MGPPLAPRPAHVPGEAGPRRTRESRPGAVSFADVAVYFSPEEWECLRPAQRALYRDVMRETFGHLGALGFSVPKPAFISWVEGEVEAWSPEAQDPDGESSAAFSRGQGQEAGSRDGNEEKERLKKCPKQKEVAHEVAVKEWWPSVACPEFCNPRQSPMNPWLKDTLTRRLPHSCPDCGRNFSYPSLLASHQRVHSGERPFSCGQCQARFSQRRYLLQHQFIHTGEKPYPCPDCGRRFRQRGSLAIHRRAHTGEKPYACSDCKSRFTYPYLLAIHQRKHTGEKPYSCPDCSLRFAYTSLLAIHRRIHTGEKPYPCPDCGRRFTYSSLLLSHRRIHSDSRPFPCVECGKGFKRKTALEAHRWIHRSCSERRAWQQAVVGRSEPIPVLGGKDPPVHFRHFPDIFQECG

SEQ ID NO: 52 - protein, 575 aa, Homo sapiens
  source 1..575: note = Gene Symbol: ZNF8; note = Alternative Gene Symbol: ZNF8; note = Sequence Name: 56322-704_101_SL_seq_52
MDPEDEGVAGVMSVGPPAARLQEPVTFRDVAVDFTQEEWGQLDPTQRILYRDVMLETFGHLLSIGPELPKPEVISQLEQGTELWVAERGTTQGCHPAWEPRSESQASRKEEGLPEEEPSHVTGREGFPTDAPYPTTLGKDRECQSQSLALKEQNNLKQLEFGLKEAPVQDQGYKTLRLRENCVLSSSPNPFPEISRGEYLYTYDSQITDSEHNSSLVSQQTGSPGKQPGENSDCHRDSSQAIPITELTKSQVQDKPYKCTDCGKSFNHNAHLTVHKRIHTGERPYMCKECGKAFSQNSSLVQHERIHTGDKPYKCAECGKSFCHSTHLTVHRRIHTGEKPYECQDCGRAFNQNSSLGRHKRTHTGEKPYTCSVCGKSFSRTTCLFLHLRTHTEERPYECNHCGKGFRHSSSLAQHQRKHAGEKPFGCRQRLIFEQTPALTKHEWTEALGCDPPLSQDERTHRSDRPFKCNQCGKCFIQSSHLIRHQITHTREEQPHGRSRRREQSSSRNSHLVQHQHPNSRKSSAGGAKAGQPESRALALFDIQKIMQEKNPVHVIGVEEPSVGASMLFDIREST

SEQ ID NO: 53 - protein, 651 aa, Homo sapiens
  source 1..651: note = Gene Symbol: ZNF816; note = Alternative Gene Symbol: ZNF86; note = Sequence Name: 56322-704_101_SL_seq_53
MLREEATKKSKEKEPGMALPQGRLTFRDVAIEFSLEEWKCLNPAQRALYRAVMLENYRNLEFVDSSLKSMMEFSSTRHSITGEVIHTGTLQRHKSHHIGDFCFPEMKKDIHHFEFQWQEVERNGHEAPMTKIKKLTGSTDRSDHRHAGNKPIKDQLGLSFHSHLPELHMFQTKGKISNQLDKSIGASSASESQRISCRLKTHISNKYGKNFLHSSFTQIQEICMREKPCQSNECGKAFNYSSLLRRHHITHSREREYKCDVCGKIFNQKQYIVYHHRCHTGEKTYKCNECGKTFTQMSSLVCHRRLHTGEKPYKCNECGKTFSEKSSLRCHRRLHTGEKPYKCNECGKTFGRNSALVIHKAIHTGEKPYKCNECGKTFSQKSSLQCHHILHTGEKPYKCEECDNVYIRRSHLERHRKIHTGEGSYKCKVCDKVFRSDSYLAEHQRVHTGEKPYKCNKCGRSFSRKSSLQYHHTLHTGEKPYTCNECGKVFSRRENLARHHRLHAGEKPYKCEECDKVFSRRSHLERHRRIHTGEKPYKCKVCDKAFRSDSCLANHTRVHTGEKPYKCNKCAKVFNQKGILAQHQRVHTGEKPYKCNECGKVFNQKASLAKHQRVHTAEKPYKCNECGKAFTGQSTLIHHQAIHGCRETLQM

SEQ ID NO: 54 - protein, 572 aa, Homo sapiens
  source 1..572: note = Gene Symbol: ZNF98; note = Alternative Gene Symbol: ZNF98; note = Sequence Name: 56322-704_101_SL_seq_54
MPGPLGSLEMGVLTFRDVALEFSLEEWQCLDTAQQNLYRNVMLENYRNLVFVGIAASKPDLITCLEQGKEPWNVKRHEMVTEPPVVYSYFAQDLWPKQGKKNYFQKVILRTYKKCGRENLQLRKYCKSMDECKVHKECYNGLNQCLTTTQNKIFQYDKYVKVFHKFSNSNRHKIGHTGKKSFKCKECEKSFCMLSHLAQHKRIHSGEKPYKCKECGKAYNEASNLSTHKRIHTGKKPYKCEECGKAFNRLSHLTTHKIIHTGKKPYKCEECGKAFNQSANLTTHKRIHTGEKPYKCEECGRAFSQSSTLTAHKIIHAGEKPYKCEECGKAFSQSSTLTTHKIIHTGEKFYKCEECGKAFSRLSHLTTHKRIHSGEKPYKCEECGKAFKQSSTLTTHKRIHAGEKFYKCEVCSKAFSRFSHLTTHKRIHTGEKPYKCEECGKAFNLSSQLTTHKIIHTGEKPYKCEECGKAFNQSSTLSKHKVIHTGEKPYKCEECGKAFNQSSHLTTHKMIHTGEKPYKCEECGKAFNNSSILNRHKMIHTGEKLYKPESCNNACDNIAKISKYKRNCAGEK

SEQ ID NO: 55 - DNA, 20 bp, Homo sapiens
  source 1..20: mol_type = genomic DNA; note = Gene: ABL1; note = Orientation (relative to transcription): sense; note = sgRNA Position: 130835306; note = Sequence Name: 56322-704_101_SL_seq_55
ccgcggccatgggcgggcgc

SEQ ID NO: 56 - DNA, 20 bp, Homo sapiens
  source 1..20: mol_type = genomic DNA; note = Gene: ABL1; note = Orientation (relative to transcription): sense; note = sgRNA Position: 130835327; note = Sequence Name: 56322-704_101_SL_seq_56
ggcgcgcggggcggcggtga

SEQ ID NO: 57 - DNA, 20 bp, Homo sapiens
  source 1..20: mol_type = genomic DNA; note = Gene: ABL1; note = Orientation (relative to transcription): sense; note = sgRNA Position: 130835337; note = Sequence Name: 56322-704_101_SL_seq_57
gcggcggtgagggcggctgg

SEQ ID NO: 58 - DNA, 20 bp, Homo sapiens
  source 1..20: mol_type = genomic DNA; note = Gene: ABL1; note = Orientation (relative to transcription): sense; note = sgRNA Position: 130835339; note = Sequence Name: 56322-704_101_SL_seq_58
ggcggtgagggcggctggcg

SEQ ID NO: 59 - DNA, 20 bp, Homo sapiens
  source 1..20: mol_type = genomic DNA; note = Gene: ABL1; note = Orientation (relative to transcription): sense; note = sgRNA Position: 130835318; note = Sequence Name: 56322-704_101_SL_seq_59
gcgggcgcgggcgcgcgggg

SEQ ID NO: 60 - DNA, 20 bp, Homo sapiens
  source 1..20: mol_type = genomic DNA; note = Gene: AKT1; note = Orientation (relative to transcription): sense; note = sgRNA Position: 104795681; note = Sequence Name: 56322-704_101_SL_seq_60
ggcccgaagacgggagcagg

SEQ ID NO: 61 - DNA, 20 bp, Homo sapiens
  source 1..20: mol_type = genomic DNA; note = Gene: AKT1; note = Orientation (relative to transcription): sense; note = sgRNA Position: 104795702; note = Sequence Name: 56322-704_101_SL_seq_61
ctggcccagcgcacgcagcg

SEQ ID NO: 62 - DNA, 20 bp, Homo sapiens
  source 1..20: mol_type = genomic DNA; note = Gene: AKT1; note = Orientation (relative to transcription): sense; note = sgRNA Position: 104795690; note = Sequence Name: 56322-704_101_SL_seq_62
acgcagcgcggcccgaagac

SEQ ID NO: 63 - DNA, 20 bp, Homo sapiens
  source 1..20: mol_type = genomic DNA; note = Gene: AKT1; note = Orientation (relative to transcription): sense; note = sgRNA Position: 104795691; note = Sequence Name: 56322-704_101_SL_seq_63
cacgcagcgcggcccgaaga

SEQ ID NO: 64 - DNA, 20 bp, Homo sapiens
  source 1..20: mol_type = genomic DNA; note = Gene: AKT1; note = Orientation (relative to transcription): sense; note = sgRNA Position: 104795684; note = Sequence Name: 56322-704_101_SL_seq_64
cgcggcccgaagacgggagc

SEQ ID NO: 65 - DNA, 20 bp, Homo sapiens
  source 1..20: mol_type = genomic DNA; note = Gene: ALK; note = Orientation (relative to transcription): antisense; note = sgRNA Position: 29921522; note = Sequence Name: 56322-704_101_SL_seq_65
ccccgcgaccctccgaacag

SEQ ID NO: 66 - DNA, 20 bp, Homo sapiens
  source 1..20: mol_type = genomic DNA; note = Gene: ALK; note = Orientation (relative to transcription): antisense; note = sgRNA Position: 29921525; note = Sequence Name: 56322-704_101_SL_seq_66
cgcgaccctccgaacagagg

SEQ ID NO: 67 - DNA, 20 bp, Homo sapiens
  source 1..20: mol_type = genomic DNA; note = Gene: ALK; note = Orientation (relative to transcription): sense; note = sgRNA Position: 29921520; note = Sequence Name: 56322-704_101_SL_seq_67
ctcccgccgcctctgttcgg

SEQ ID NO: 68 - DNA, 20 bp, Homo sapiens
  source 1..20: mol_type = genomic DNA; note = Gene: ALK; note = Orientation (relative to transcription): sense; note = sgRNA Position: 29921519; note = Sequence Name: 56322-704_101_SL_seq_68
tcccgccgcctctgttcgga

SEQ ID NO: 69 - DNA, 20 bp, Homo sapiens
  source 1..20: mol_type = genomic DNA; note = Gene: ALK; note = Orientation (relative to transcription): sense; note = sgRNA Position: 29921512; note = Sequence Name: 56322-704_101_SL_seq_69
gcctctgttcggagggtcgc

SEQ ID NO: 70 - DNA, 20 bp, Homo sapiens
  source 1..20: mol_type = genomic DNA; note = Gene: AR; note = Orientation (relative to transcription): sense; note = sgRNA Position: 67544104; note = Sequence Name: 56322-704_101_SL_seq_70
gaggcagaggaggcgacaga

SEQ ID NO: 71 - DNA, 20 bp, Homo sapiens
  source 1..20: mol_type = genomic DNA; note = Gene: AR; note = Orientation (relative to transcription): sense; note = sgRNA Position: 67544071; note = Sequence Name: 56322-704_101_SL_seq_71
gctgggagagcgggacggtc

SEQ ID NO: 72 - DNA, 20 bp, Homo sapiens
  source 1..20: mol_type = genomic DNA; note = Gene: AR; note = Orientation (relative to transcription): sense; note = sgRNA Position: 67544085; note = Sequence Name: 56322-704_101_SL_seq_72
acggtccggagcaagcccag

SEQ ID NO: 73 - DNA, 20 bp, Homo sapiens
  source 1..20: mol_type = genomic DNA; note = Gene: AR; note = Orientation (relative to transcription): sense; note = sgRNA Position: 67544061; note = Sequence Name: 56322-704_101_SL_seq_73
gagccagcttgctgggagag

SEQ ID NO: 74 - DNA, 20 bp, Homo sapiens
  source 1..20: mol_type = genomic DNA; note = Gene: AR; note = Orientation (relative to transcription): sense; note = sgRNA Position: 67544066; note = Sequence Name: 56322-704_101_SL_seq_74
agcttgctgggagagcggga

SEQ ID NO: 75 - DNA, 20 bp, Homo sapiens
  source 1..20: mol_type = genomic DNA; note = Gene: ARAF; note = Orientation (relative to transcription): sense; note = sgRNA Position: 47561252; note = Sequence Name: 56322-704_101_SL_seq_75
ctgtagcggcgtgacaggtg

SEQ ID NO: 76 - DNA, 20 bp, Homo sapiens
  source 1..20: mol_type = genomic DNA; note = Gene: ARAF; note = Orientation (relative to transcription): antisense; note = sgRNA Position: 47561269; note = Sequence Name: 56322-704_101_SL_seq_76
tccagaaaccgagccctccc

SEQ ID NO: 77 - DNA, 20 bp, Homo sapiens
  source 1..20: mol_type = genomic DNA; note = Gene: ARAF; note = Orientation (relative to transcription): sense; note = sgRNA Position: 47561256; note = Sequence Name: 56322-704_101_SL_seq_77
agcggcgtgacaggtgaggg

SEQ ID NO: 78 - DNA, 20 bp, Homo sapiens
  source 1..20: mol_type = genomic DNA; note = Gene: ARAF; note = Orientation (relative to transcription): sense; note = sgRNA Position: 47561247; note = Sequence Name: 56322-704_101_SL_seq_78
ggcggctgtagcggcgtgac

SEQ ID NO: 79 - DNA, 20 bp, Homo sapiens
  source 1..20: mol_type = genomic DNA; note = Gene: ARAF; note = Orientation (relative to transcription): sense; note = sgRNA Position: 47561253; note = Sequence Name: 56322-704_101_SL_seq_79
tgtagcggcgtgacaggtga

SEQ ID NO: 80 - DNA, 20 bp, Homo sapiens
  source 1..20: mol_type = genomic DNA; note = Gene: ATM; note = Orientation (relative to transcription): sense; note = sgRNA Position: 108223098; note = Sequence Name: 56322-704_101_SL_seq_80
ctaacggagaaaagaagccg

SEQ ID NO: 81 - DNA, 20 bp, Homo sapiens
  source 1..20: mol_type = genomic DNA; note = Gene: ATM; note = Orientation (relative to transcription): sense; note = sgRNA Position: 108223105; note = Sequence Name: 56322-704_101_SL_seq_81
agaaaagaagccgtggccgc

SEQ ID NO: 82 - DNA, 20 bp, Homo sapiens
  source 1..20: mol_type = genomic DNA; note = Gene: ATM; note = Orientation (relative to transcription): antisense; note = sgRNA Position: 108223110; note = Sequence Name: 56322-704_101_SL_seq_82
actcctctcgcctcctcccg

SEQ ID NO: 83 - DNA, 20 bp, Homo sapiens
  source 1..20: mol_type = genomic DNA; note = Gene: ATM; note = Orientation (relative to transcription): sense; note = sgRNA Position: 108223118; note = Sequence Name: 56322-704_101_SL_seq_83
tggccgcgggaggaggcgag

SEQ ID NO: 84 - DNA, 20 bp, Homo sapiens
  source 1..20: mol_type = genomic DNA; note = Gene: ATM; note = Orientation (relative to transcription): sense; note = sgRNA Position: 108223104; note = Sequence Name: 56322-704_101_SL_seq_84
gagaaaagaagccgtggccg

SEQ ID NO: 85 - DNA, 20 bp, Homo sapiens
  source 1..20: mol_type = genomic DNA; note = Gene: BARD1; note = Orientation (relative to transcription): antisense; note = sgRNA Position: 214809631; note = Sequence Name: 56322-704_101_SL_seq_85
ggaagcctcgggaaaccaca

SEQ ID NO: 86 - DNA, 20 bp, Homo sapiens
  source 1..20: mol_type = genomic DNA; note = Gene: BARD1; note = Orientation (relative to transcription): sense; note = sgRNA Position: 214809635; note = Sequence Name: 56322-704_101_SL_seq_86
gctggcctgcagcttccctg

SEQ ID NO: 87 - DNA, 20 bp, Homo sapiens
  source 1..20: mol_type = genomic DNA; note = Gene: BARD1; note = Orientation (relative to transcription): antisense; note = sgRNA Position: 214809630; note = Sequence Name: 56322-704_101_SL_seq_87
aggaagcctcgggaaaccac

SEQ ID NO: 88 - DNA, 20 bp, Homo sapiens
  source 1..20: mol_type = genomic DNA; note = Gene: BARD1; note = Orientation (relative to transcription): antisense; note = sgRNA Position: 214809659; note = Sequence Name: 56322-704_101_SL_seq_88
gcaggccagcgactcgaaac

SEQ ID NO: 89 - DNA, 20 bp, Homo sapiens
  source 1..20: mol_type = genomic DNA; note = Gene: BARD1; note = Orientation (relative to transcription): sense; note = sgRNA Position: 214809625; note = Sequence Name: 56322-704_101_SL_seq_89
agcttccctgtggtttcccg

SEQ ID NO: 90 - DNA, 20 bp, Homo sapiens
  source 1..20: mol_type = genomic DNA; note = Gene: BCL2; note = Orientation (relative to transcription): sense; note = sgRNA Position: 63320025; note = Sequence Name: 56322-704_101_SL_seq_90
cgctgccagcgaaggtgccg

SEQ ID NO: 91 - DNA, 20 bp, Homo sapiens
  source 1..20: mol_type = genomic DNA; note = Gene: BCL2; note = Orientation (relative to transcription): sense; note = sgRNA Position: 63319983; note = Sequence Name: 56322-704_101_SL_seq_91
gcggccgtcagcgctcggag

SEQ ID NO: 92 - DNA, 20 bp, Homo sapiens
  source 1..20: mol_type = genomic DNA; note = Gene: BCL2; note = Orientation (relative to transcription): antisense; note = sgRNA Position: 63320005; note = Sequence Name: 56322-704_101_SL_seq_92
gctgacggccgccggcaggg

SEQ ID NO: 93 - DNA, 20 bp, Homo sapiens
  source 1..20: mol_type = genomic DNA; note = Gene: BCL2; note = Orientation (relative to transcription): sense; note = sgRNA Position: 63320002; note = Sequence Name: 56322-704_101_SL_seq_93
ctccgggccctccctgccgg

SEQ ID NO: 94 - DNA, 20 bp, Homo sapiens
  source 1..20: mol_type = genomic DNA; note = Gene: BCL2; note = Orientation (relative to transcription): antisense; note = sgRNA Position: 63320031; note = Sequence Name: 56322-704_101_SL_seq_94
cggagccccggcaccttcgc

SEQ ID NO: 95 - DNA, 20 bp, Homo sapiens
  source 1..20: mol_type = genomic DNA; note = Gene: BIRC5; note = Orientation (relative to transcription): sense; note = sgRNA Position: 78214298; note = Sequence Name: 56322-704_101_SL_seq_95
atcgcgggacccgttggcag

SEQ ID NO: 96 - DNA, 20 bp, Homo sapiens
  source 1..20: mol_type = genomic DNA; note = Gene: BIRC5; note = Orientation (relative to transcription): sense; note = sgRNA Position: 78214301; note = Sequence Name: 56322-704_101_SL_seq_96
gcgggacccgttggcagagg

SEQ ID NO: 97 - DNA, 20 bp, Homo sapiens
  source 1..20: mol_type = genomic DNA; note = Gene: BIRC5; note = Orientation (relative to transcription): sense; note = sgRNA Position: 78214304; note = Sequence Name: 56322-704_101_SL_seq_97
ggacccgttggcagaggtgg

SEQ ID NO: 98 - DNA, 20 bp, Homo sapiens
  source 1..20: mol_type = genomic DNA; note = Gene: BIRC5; note = Orientation (relative to transcription): sense; note = sgRNA Position: 78214310; note = Sequence Name: 56322-704_101_SL_seq_98
gttggcagaggtggcggcgg

SEQ ID NO: 99 - DNA, 20 bp, Homo sapiens
  source 1..20: mol_type = genomic DNA; note = Gene: BIRC5; note = Orientation (relative to transcription): sense; note = sgRNA Position: 78214307; note = Sequence Name: 56322-704_101_SL_seq_99
cccgttggcagaggtggcgg

SEQ ID NO: 100 - DNA, 20 bp, Homo sapiens
  source 1..20: mol_type = genomic DNA; note = Gene: BRAF; note = Orientation (relative to transcription): antisense; note = sgRNA Position: 140924887; note = Sequence Name: 56322-704_101_SL_seq_100
ccacctcaggtaccggcccg

SEQ ID NO: 101 - DNA, 20 bp, Homo sapiens
  source 1..20: mol_type = genomic DNA; note = Gene: BRAF; note = Orientation (relative to transcription): antisense; note = sgRNA Position: 140924880; note = Sequence Name: 56322-704_101_SL_seq_101
gcctgggccacctcaggtac

SEQ ID NO: 102 - DNA, 20 bp, Homo sapiens
  source 1..20: mol_type = genomic DNA; note = Gene: BRAF; note = Orientation (relative to transcription): sense; note = sgRNA Position: 140924879; note = Sequence Name: 56322-704_101_SL_seq_102
gggccgcgggccggtacctg

SEQ ID NO: 103 - DNA, 20 bp, Homo sapiens
  source 1..20: mol_type = genomic DNA; note = Gene: BRAF; note = Orientation (relative to transcription): sense; note = sgRNA Position: 140924876; note = Sequence Name: 56322-704_101_SL_seq_103
ccgcgggccggtacctgagg

SEQ ID NO: 104 - DNA, 20 bp, Homo sapiens
  source 1..20: mol_type = genomic DNA; note = Gene: BRAF; note = Orientation (relative to transcription): sense; note = sgRNA Position: 140924870; note = Sequence Name: 56322-704_101_SL_seq_104
gccggtacctgaggtggccc

SEQ ID NO: 105 - DNA, 20 bp, Homo sapiens
  source 1..20: mol_type = genomic DNA; note = Gene: BRIP1; note = Orientation (relative to transcription): sense; note = sgRNA Position: 61863425; note = Sequence Name: 56322-704_101_SL_seq_105
ggggaagtagcagcaccccc

SEQ ID NO: 106 - DNA, 20 bp, Homo sapiens
  source 1..20: mol_type = genomic DNA; note = Gene: BRIP1; note = Orientation (relative to transcription): antisense; note = sgRNA Position: 61863421; note = Sequence Name: 56322-704_101_SL_seq_106
ttcctcctccctcttcctgg

SEQ ID NO: 107 - DNA, 20 bp, Homo sapiens
  source 1..20: mol_type = genomic DNA; note = Gene: BRIP1; note = Orientation (relative to transcription): sense; note = sgRNA Position: 61863415; note = Sequence Name: 56322-704_101_SL_seq_107
cagcacccccaggaagaggg

SEQ ID NO: 108 - DNA, 20 bp, Homo sapiens
  source 1..20: mol_type = genomic DNA; note = Gene: BRIP1; note = Orientation (relative to transcription): sense; note = sgRNA Position: 61863418; note = Sequence Name: 56322-704_101_SL_seq_108
tagcagcacccccaggaaga

SEQ ID NO: 109 - DNA, 20 bp, Homo sapiens
  source 1..20: mol_type = genomic DNA; note = Gene: BRIP1; note = Orientation (relative to transcription): antisense; note = sgRNA Position: 61863420; note = Sequence Name: 56322-704_101_SL_seq_109
cttcctcctccctcttcctg

SEQ ID NO: 110 - DNA, 20 bp, Homo sapiens
  source 1..20: mol_type = genomic DNA; note = Gene: CDK12; note = Orientation (relative to transcription): sense; note = sgRNA Position: 39461573; note = Sequence Name: 56322-704_101_SL_seq_110
gtgaaacggaggcaagaaag

SEQ ID NO: 111 - DNA, 20 bp, Homo sapiens
  source 1..20: mol_type = genomic DNA; note = Gene: CDK12; note = Orientation (relative to transcription): sense; note = sgRNA Position: 39461562; note = Sequence Name: 56322-704_101_SL_seq_111
gtggtgtggaggtgaaacgg

SEQ ID NO: 112 - DNA, 20 bp, Homo sapiens
  source 1..20: mol_type = genomic DNA; note = Gene: CDK12; note = Orientation (relative to transcription): sense; note = sgRNA Position: 39461548; note = Sequence Name: 56322-704_101_SL_seq_112
gggagagagtgtgtgtggtg

SEQ ID NO: 113 - DNA, 20 bp, Homo sapiens
  source 1..20: mol_type = genomic DNA; note = Gene: CDK12; note = Orientation (relative to transcription): sense; note = sgRNA Position: 39461574; note = Sequence Name: 56322-704_101_SL_seq_113
tgaaacggaggcaagaaagg

SEQ ID NO: 114 - DNA, 20 bp, Homo sapiens
  source 1..20: mol_type = genomic DNA; note = Gene: CDK12; note = Orientation (relative to transcription): sense; note = sgRNA Position: 39461559; note = Sequence Name: 56322-704_101_SL_seq_114
tgtgtggtgtggaggtgaaa

SEQ ID NO: 115 - DNA, 20 bp, Homo sapiens
  source 1..20: mol_type = genomic DNA; note = Gene: CDK4; note = Orientation (relative to transcription): antisense; note = sgRNA Position: 57752254; note = Sequence Name: 56322-704_101_SL_seq_115
cggccccatacacccgagct

SEQ ID NO: 116 - DNA, 20 bp, Homo sapiens
  source 1..20: mol_type = genomic DNA; note = Gene: CDK4; note = Orientation (relative to transcription): sense; note = sgRNA Position: 57752239; note = Sequence Name: 56322-704_101_SL_seq_116
gctcgggtgtatggggccgt

SEQ ID NO: 117 - DNA, 20 bp, Homo sapiens
  source 1..20: mol_type = genomic DNA; note = Gene: CDK4; note = Orientation (relative to transcription): antisense; note = sgRNA Position: 57752259; note = Sequence Name: 56322-704_101_SL_seq_117
ccatacacccgagctcggtc

SEQ ID NO: 118 - DNA, 20 bp, Homo sapiens
  source 1..20: mol_type = genomic DNA; note = Gene: CDK4; note = Orientation (relative to transcription): sense; note = sgRNA Position: 57752246; note = Sequence Name: 56322-704_101_SL_seq_118
ggaccgagctcgggtgtatg

SEQ ID NO: 119 - DNA, 20 bp, Homo sapiens
  source 1..20: mol_type = genomic DNA; note = Gene: CDK4; note = Orientation (relative to transcription): sense; note = sgRNA Position: 57752225; note = Sequence Name: 56322-704_101_SL_seq_119
ggccgtaggaaccggctccg

SEQ ID NO: 120 - DNA, 20 bp, Homo sapiens
  source 1..20: mol_type = genomic DNA; note = Gene: CDK6; note = Orientation (relative to transcription): antisense; note = sgRNA Position: 92836545; note = Sequence Name: 56322-704_101_SL_seq_120
cggctctccgcacgtgtccg

SEQ ID NO: 121 - DNA, 20 bp, Homo sapiens
  source 1..20: mol_type = genomic DNA; note = Gene: CDK6; note = Orientation (relative to transcription): antisense; note = sgRNA Position: 92836508; note = Sequence Name: 56322-704_101_SL_seq_121
tcgcgtcgggcctcccgagg

SEQ ID NO: 122 - DNA, 20 bp, Homo sapiens
  source 1..20: mol_type = genomic DNA; note = Gene: CDK6; note = Orientation (relative to transcription): antisense; note = sgRNA Position: 92836525; note = Sequence Name: 56322-704_101_SL_seq_122
agggggctgcgagtgtcagt

SEQ ID NO: 123 - DNA, 20 bp, Homo sapiens
  source 1..20: mol_type = genomic DNA; note = Gene: CDK6; note = Orientation (relative to transcription): sense; note = sgRNA Position: 92836507; note = Sequence Name: 56322-704_101_SL_seq_123
acactcgcagccccctcggg

SEQ ID NO: 124 - DNA, 20 bp, Homo sapiens
  source 1..20: mol_type = genomic DNA; note = Gene: CDK6; note = Orientation (relative to transcription): antisense; note = sgRNA Position: 92836507; note = Sequence Name: 56322-704_101_SL_seq_124
gtcgcgtcgggcctcccgag

SEQ ID NO: 125 - DNA, 20 bp, Homo sapiens
  source 1..20: mol_type = genomic DNA; note = Gene: CDKN2A; note = Orientation (relative to transcription): antisense; note = sgRNA Position: 21994345; note = Sequence Name: 56322-704_101_SL_seq_125
ccatgttctcgccgcctcca

SEQ ID NO: 126 - DNA, 20 bp, Homo sapiens
  source 1..20: mol_type = genomic DNA; note = Gene: CDKN2A; note = Orientation (relative to transcription): sense; note = sgRNA Position: 21994326; note = Sequence Name: 56322-704_101_SL_seq_126
gcggcgagaacatggtgcgc

SEQ ID NO: 127 - DNA, 20 bp, Homo sapiens
  source 1..20: mol_type = genomic DNA; note = Gene: CDKN2A; note = Orientation (relative to transcription): sense; note = sgRNA Position: 21994334; note = Sequence Name: 56322-704_101_SL_seq_127
ccctggaggcggcgagaaca

SEQ ID NO: 128 - DNA, 20 bp, Homo sapiens
  source 1..20: mol_type = genomic DNA; note = Gene: CDKN2A; note = Orientation (relative to transcription): sense; note = sgRNA Position: 21994348; note = Sequence Name: 56322-704_101_SL_seq_128
gctgccgagctcggccctgg

SEQ ID NO: 129 - DNA, 20 bp, Homo sapiens
  source 1..20: mol_type = genomic DNA; note = Gene: CDKN2A; note = Orientation (relative to transcription): sense; note = sgRNA Position: 21994319; note = Sequence Name: 56322-704_101_SL_seq_129
gaacatggtgcgcaggttct

SEQ ID NO: 130 - DNA, 20 bp, Homo sapiens
  source 1..20: mol_type = genomic DNA; note = Gene: CHEK1; note = Orientation (relative to transcription): sense; note = sgRNA Position: 125626013; note = Sequence Name: 56322-704_101_SL_seq_130
gggcaaaggacagtccggtg

SEQ ID NO: 131 - DNA, 20 bp, Homo sapiens
  source 1..20: mol_type = genomic DNA; note = Gene: CHEK1; note = Orientation (relative to transcription): sense; note = sgRNA Position: 125626021; note = Sequence Name: 56322-704_101_SL_seq_131
gacagtccggtgaggaaggg

SEQ ID NO: 132 - DNA, 20 bp, Homo sapiens
  source 1..20: mol_type = genomic DNA; note = Gene: CHEK1; note = Orientation (relative to transcription): antisense; note = sgRNA Position: 125626033; note = Sequence Name: 56322-704_101_SL_seq_132
agaaaccttccctactctac

SEQ ID NO: 133 - DNA, 20 bp, Homo sapiens
  source 1..20: mol_type = genomic DNA; note = Gene: CHEK1; note = Orientation (relative to transcription): sense; note = sgRNA Position: 125626035; note = Sequence Name: 56322-704_101_SL_seq_133
gaagggcggccggtagagta

SEQ ID NO: 134 - DNA, 20 bp, Homo sapiens
  source 1..20: mol_type = genomic DNA; note = Gene: CHEK1; note = Orientation (relative to transcription): sense; note = sgRNA Position: 125626008; note = Sequence Name: 56322-704_101_SL_seq_134
gtggtgggcaaaggacagtc

SEQ ID NO: 135 - DNA, 20 bp, Homo sapiens
  source 1..20: mol_type = genomic DNA; note = Gene: CHEK2; note = Orientation (relative to transcription): sense; note = sgRNA Position: 28741783; note = Sequence Name: 56322-704_101_SL_seq_135
gagagtgtgcggctccaggt

SEQ ID NO: 136 - DNA, 20 bp, Homo sapiens
  source 1..20: mol_type = genomic DNA; note = Gene: CHEK2; note = Orientation (relative to transcription): sense; note = sgRNA Position: 28741784; note = Sequence Name: 56322-704_101_SL_seq_136
ggagagtgtgcggctccagg

SEQ ID NO: 137 - DNA, 20 bp, Homo sapiens
  source 1..20: mol_type = genomic DNA; note = Gene: CHEK2; note = Orientation (relative to transcription): sense; note = sgRNA Position: 28741794; note = Sequence Name: 56322-704_101_SL_seq_137
ctgaggctgcggagagtgtg

SEQ ID NO: 138 - DNA, 20 bp, Homo sapiens
  source 1..20: mol_type = genomic DNA; note = Gene: CHEK2; note = Orientation (relative to transcription): antisense; note = sgRNA Position: 28741780; note = Sequence Name: 56322-704_101_SL_seq_138
actcaccgcgtgagcccacc

SEQ ID NO: 139 - DNA, 20 bp, Homo sapiens
  source 1..20: mol_type = genomic DNA; note = Gene: CHEK2; note = Orientation (relative to transcription): sense; note = sgRNA Position: 28741787; note = Sequence Name: 56322-704_101_SL_seq_139
tgcggagagtgtgcggctcc

SEQ ID NO: 140 - DNA, 20 bp, Homo sapiens
  source 1..20: mol_type = genomic DNA; note = Gene: DNMT1; note = Orientation (relative to transcription): antisense; note = sgRNA Position: 10194864; note = Sequence Name: 56322-704_101_SL_seq_140
atggccgggacggccagtgt

SEQ ID NO: 141 - DNA, 20 bp, Homo sapiens
  source 1..20: mol_type = genomic DNA; note = Gene: DNMT1; note = Orientation (relative to transcription): sense; note = sgRNA Position: 10194899; note = Sequence Name: 56322-704_101_SL_seq_141
tgctgaagcctccgagatgc

SEQ ID NO: 142 - DNA, 20 bp, Homo sapiens
  source 1..20: mol_type = genomic DNA; note = Gene: DNMT1; note = Orientation (relative to transcription): antisense; note = sgRNA Position: 10194863; note = Sequence Name: 56322-704_101_SL_seq_142
gatggccgggacggccagtg

SEQ ID NO: 143 - DNA, 20 bp, Homo sapiens
  source 1..20: mol_type = genomic DNA; note = Gene: DNMT1; note = Orientation (relative to transcription): antisense; note = sgRNA Position: 10194849; note = Sequence Name: 56322-704_101_SL_seq_143
tcgtcgggcagcgagatggc

SEQ ID NO: 144 - DNA, 20 bp, Homo sapiens
  source 1..20: mol_type = genomic DNA; note = Gene: DNMT1; note = Orientation (relative to transcription): antisense; note = sgRNA Position: 10194854; note = Sequence Name: 56322-704_101_SL_seq_144
gggcagcgagatggccggga

SEQ ID NO: 145 - DNA, 20 bp, Homo sapiens
  source 1..20: mol_type = genomic DNA; note = Gene: EGFR; note = Orientation (relative to transcription): antisense; note = sgRNA Position: 55019069; note = Sequence Name: 56322-704_101_SL_seq_145
gggcgctcacaccgtgcggg

SEQ ID NO: 146 - DNA, 20 bp, Homo sapiens
  source 1..20: mol_type = genomic DNA; note = Gene: EGFR; note = Orientation (relative to transcription): antisense; note = sgRNA Position: 55019071; note = Sequence Name: 56322-704_101_SL_seq_146
tcgggcgctcacaccgtgcg

SEQ ID NO: 147 - DNA, 20 bp, Homo sapiens
  source 1..20: mol_type = genomic DNA; note = Gene: EGFR; note = Orientation (relative to transcription): antisense; note = sgRNA Position: 55019070; note = Sequence Name: 56322-704_101_SL_seq_147
cgggcgctcacaccgtgcgg

SEQ ID NO: 148 - DNA, 20 bp, Homo sapiens
  source 1..20: mol_type = genomic DNA; note = Gene: EGFR; note = Orientation (relative to transcription): sense; note = sgRNA Position: 55019042; note = Sequence Name: 56322-704_101_SL_seq_148
gggcagcccccggcgcagcg

SEQ ID NO: 149 - DNA, 20 bp, Homo sapiens
  source 1..20: mol_type = genomic DNA; note = Gene: EGFR; note = Orientation (relative to transcription): sense; note = sgRNA Position: 55019069; note = Sequence Name: 56322-704_101_SL_seq_149
agcagcctccgccccccgca

SEQ ID NO: 150 - DNA, 20 bp, Homo sapiens
  source 1..20: mol_type = genomic DNA; note = Gene: ERBB2; note = Orientation (relative to transcription): antisense; note = sgRNA Position: 39700128; note = Sequence Name: 56322-704_101_SL_seq_150
cggcgcagtaaagggccccg

SEQ ID NO: 151 - DNA, 20 bp, Homo sapiens
  source 1..20: mol_type = genomic DNA; note = Gene: ERBB2; note = Orientation (relative to transcription): antisense; note = sgRNA Position: 39700127; note = Sequence Name: 56322-704_101_SL_seq_151
ggcgcagtaaagggccccgt

SEQ ID NO: 152 - DNA, 20 bp, Homo sapiens
  source 1..20: mol_type = genomic DNA; note = Gene: ERBB2; note = Orientation (relative to transcription): sense; note = sgRNA Position: 39700124; note = Sequence Name: 56322-704_101_SL_seq_152
gccgcgcgccccttcccacg

SEQ ID NO: 153 - DNA, 20 bp, Homo sapiens
  source 1..20: mol_type = genomic DNA; note = Gene: ERBB2; note = Orientation (relative to transcription): antisense; note = sgRNA Position: 39700122; note = Sequence Name: 56322-704_101_SL_seq_153
agtaaagggccccgtgggaa

SEQ ID NO: 154 - DNA, 20 bp, Homo sapiens
  source 1..20: mol_type = genomic DNA; note = Gene: ERBB2; note = Orientation (relative to transcription): antisense; note = sgRNA Position: 39700123; note = Sequence Name: 56322-704_101_SL_seq_154
cagtaaagggccccgtggga

SEQ ID NO: 155 - DNA, 20 bp, Homo sapiens
  source 1..20: mol_type = genomic DNA; note = Gene: ERBB4; note = Orientation (relative to transcription): antisense; note = sgRNA Position: 212539139; note = Sequence Name: 56322-704_101_SL_seq_155
gcgtcatttccagcgctccg

SEQ ID NO: 156 - DNA, 20 bp, Homo sapiens
  source 1..20: mol_type = genomic DNA; note = Gene: ERBB4; note = Orientation (relative to transcription): sense; note = sgRNA Position: 212539124; note = Sequence Name: 56322-704_101_SL_seq_156
ggagcgctggaaatgacgct

SEQ ID NO: 157 - DNA, 20 bp, Homo sapiens
  source 1..20: mol_type = genomic DNA; note = Gene: ERBB4; note = Orientation (relative to transcription): sense; note = sgRNA Position: 212539145; note = Sequence Name: 56322-704_101_SL_seq_157
tgggctgcagctggagaccg

SEQ ID NO: 158 - DNA, 20 bp, Homo sapiens
  source 1..20: mol_type = genomic DNA; note = Gene: ERBB4; note = Orientation (relative to transcription): sense; note = sgRNA Position: 212539154; note = Sequence Name: 56322-704_101_SL_seq_158
atttctctgtgggctgcagc

SEQ ID NO: 159 - DNA, 20 bp, Homo sapiens
  source 1..20: mol_type = genomic DNA; note = Gene: ERBB4; note = Orientation (relative to transcription): sense; note = sgRNA Position: 212539137; note = Sequence Name: 56322-704_101_SL_seq_159
agctggagaccgcggagcgc

SEQ ID NO: 160 - DNA, 20 bp, Homo sapiens
  source 1..20: mol_type = genomic DNA; note = Gene: ERCC2; note = Orientation (relative to transcription): sense; note = sgRNA Position: 45370531; note = Sequence Name: 56322-704_101_SL_seq_160
cggcgccatgaagtgagaag

SEQ ID NO: 161 - DNA, 20 bp, Homo sapiens
  source 1..20: mol_type = genomic DNA; note = Gene: ERCC2; note = Orientation (relative to transcription): sense; note = sgRNA Position: 45370532; note = Sequence Name: 56322-704_101_SL_seq_161
ccggcgccatgaagtgagaa

SEQ ID NO: 162 - DNA, 20 bp, Homo sapiens
  source 1..20: mol_type = genomic DNA; note = Gene: ERCC2; note = Orientation (relative to transcription): sense; note = sgRNA Position: 45370533; note = Sequence Name: 56322-704_101_SL_seq_162
gccggcgccatgaagtgaga

SEQ ID NO: 163 - DNA, 20 bp, Homo sapiens
  source 1..20: mol_type = genomic DNA; note = Gene: ERCC2; note = Orientation (relative to transcription): sense; note = sgRNA Position: 45370523; note = Sequence Name: 56322-704_101_SL_seq_163
tgaagtgagaagggggctgg

SEQ ID NO: 164 - DNA, 20 bp, Homo sapiens
  source 1..20: mol_type = genomic DNA; note = Gene: ERCC2; note = Orientation (relative to transcription): sense; note = sgRNA Position: 45370484; note = Sequence Name: 56322-704_101_SL_seq_164
gcgcggggggtcttgaagat

SEQ ID NO: 165 - DNA, 20 bp, Homo sapiens
  source 1..20: mol_type = genomic DNA; note = Gene: ESR1; note = Orientation (relative to transcription): antisense; note = sgRNA Position: 151690616; note = Sequence Name: 56322-704_101_SL_seq_165
tcttatgctatagaatgggc

SEQ ID NO: 166 - DNA, 20 bp, Homo sapiens
  source 1..20: mol_type = genomic DNA; note = Gene: ESR1; note = Orientation (relative to transcription): sense; note = sgRNA Position: 151690589; note = Sequence Name: 56322-704_101_SL_seq_166
agctctttaacaggctcgaa

SEQ ID NO: 167 - DNA, 20 bp, Homo sapiens
  source 1..20: mol_type = genomic DNA; note = Gene: ESR1; note = Orientation (relative to transcription): antisense; note = sgRNA Position: 151690567; note = Sequence Name: 56322-704_101_SL_seq_167
tgttaaagagcttctgagca

SEQ ID NO: 168 - DNA, 20 bp, Homo sapiens
  source 1..20: mol_type = genomic DNA; note = Gene: ESR1; note = Orientation (relative to transcription): antisense; note = sgRNA Position: 151690602; note = Sequence Name: 56322-704_101_SL_seq_168
atgggcaggagaaaggagca

SEQ ID NO: 169 - DNA, 20 bp, Homo sapiens
  source 1..20: mol_type = genomic DNA; note = Gene: ESR1; note = Orientation (relative to transcription): sense; note = sgRNA Position: 151690580; note = Sequence Name: 56322-704_101_SL_seq_169
atgctcagaagctctttaac

SEQ ID NO: 170 - DNA, 20 bp, Homo sapiens
  source 1..20: mol_type = genomic DNA; note = Gene: EZH2; note = Orientation (relative to transcription): sense; note = sgRNA Position: 148884259; note = Sequence Name: 56322-704_101_SL_seq_170
ggtcgcgtccgacacccggt

SEQ ID NO: 171 - DNA, 20 bp, Homo sapiens
  source 1..20: mol_type = genomic DNA; note = Gene: EZH2; note = Orientation (relative to transcription): antisense; note = sgRNA Position: 148884256; note = Sequence Name: 56322-704_101_SL_seq_171
actgccttctgagtcccacc

SEQ ID NO: 172 - DNA, 20 bp, Homo sapiens
  source 1..20: mol_type = genomic DNA; note = Gene: EZH2; note = Orientation (relative to transcription): sense; note = sgRNA Position: 148884263; note = Sequence Name: 56322-704_101_SL_seq_172
gtccggtcgcgtccgacacc

SEQ ID NO: 173 - DNA, 20 bp, Homo sapiens
  source 1..20: mol_type = genomic DNA; note = Gene: EZH2; note = Orientation (relative to transcription): sense; note = sgRNA Position: 148884260; note = Sequence Name: 56322-704_101_SL_seq_173
cggtcgcgtccgacacccgg

SEQ ID NO: 174 - DNA, 20 bp, Homo sapiens
  source 1..20: mol_type = genomic DNA; note = Gene: EZH2; note = Orientation (relative to transcription): antisense; note = sgRNA Position: 148884262; note = Sequence Name: 56322-704_101_SL_seq_174
ttctgagtcccaccgggtgt

SEQ ID NO: 175 - DNA, 20 bp, Homo sapiens
  source 1..20: mol_type = genomic DNA; note = Gene: FGFR1; note = Orientation (relative to transcription): sense; note = sgRNA Position: 38468604; note = Sequence Name: 56322-704_101_SL_seq_175
cgctcttgcggccacaggcg

SEQ ID NO: 176 - DNA, 20 bp, Homo sapiens
  source 1..20: mol_type = genomic DNA; note = Gene: FGFR1; note = Orientation (relative to transcription): sense; note = sgRNA Position: 38468609; note = Sequence Name: 56322-704_101_SL_seq_176
cggagcgctcttgcggccac

SEQ ID NO: 177 - DNA, 20 bp, Homo sapiens
  source 1..20: mol_type = genomic DNA; note = Gene: FGFR1; note = Orientation (relative to transcription): antisense; note = sgRNA Position: 38468604; note = Sequence Name: 56322-704_101_SL_seq_177
cgccgaggacgccgcgcctg

SEQ ID NO: 178 - DNA, 20 bp, Homo sapiens
  source 1..20: mol_type = genomic DNA; note = Gene: FGFR1; note = Orientation (relative to transcription): sense; note = sgRNA Position: 38468595; note = Sequence Name: 56322-704_101_SL_seq_178
ggccacaggcgcggcgtcct

SEQ ID NO: 179 - DNA, 20 bp, Homo sapiens
  source 1..20: mol_type = genomic DNA; note = Gene: FGFR1; note = Orientation (relative to transcription): sense; note = sgRNA Position: 38468575; note = Sequence Name: 56322-704_101_SL_seq_179
cggcggcgggcggcagctag

SEQ ID NO: 180 - DNA, 20 bp, Homo sapiens
  source 1..20: mol_type = genomic DNA; note = Gene: FGFR2; note = Orientation (relative to transcription): antisense; note = sgRNA Position: 121598374; note = Sequence Name: 56322-704_101_SL_seq_180
gcggcgcccgagctttgtgg

SEQ ID NO: 181 - DNA, 20 bp, Homo sapiens
  source 1..20: mol_type = genomic DNA; note = Gene: FGFR2; note = Orientation (relative to transcription): antisense; note = sgRNA Position: 121598371; note = Sequence Name: 56322-704_101_SL_seq_181
cccgcggcgcccgagctttg

SEQ ID NO: 182 - DNA, 20 bp, Homo sapiens
  source 1..20: mol_type = genomic DNA; note = Gene: FGFR2; note = Orientation (relative to transcription): sense; note = sgRNA Position: 121598359; note = Sequence Name: 56322-704_101_SL_seq_182
cacaaagctcgggcgccgcg

SEQ ID NO: 183 - DNA, 20 bp, Homo sapiens
  source 1..20: mol_type = genomic DNA; note = Gene: FGFR2; note = Orientation (relative to transcription): sense; note = sgRNA Position: 121598361; note = Sequence Name: 56322-704_101_SL_seq_183
gccacaaagctcgggcgccg

SEQ ID NO: 184 - DNA, 20 bp, Homo sapiens
  source 1..20: mol_type = genomic DNA; note = Gene: FGFR2; note = Orientation (relative to transcription): sense; note = sgRNA Position: 121598369; note = Sequence Name: 56322-704_101_SL_seq_184
gcgcggccgccacaaagctc

SEQ ID NO: 185 - DNA, 20 bp, Homo sapiens
  source 1..20: mol_type = genomic DNA; note = Gene: FGFR3; note = Orientation (relative to transcription): antisense; note = sgRNA Position: 1793344; note = Sequence Name: 56322-704_101_SL_seq_185
gtccgtgcgaccggcagagc

SEQ ID NO: 186 - DNA, 20 bp, Homo sapiens
  source 1..20: mol_type = genomic DNA; note = Gene: FGFR3; note = Orientation (relative to transcription): sense; note = sgRNA Position: 1793362; note = Sequence Name: 56322-704_101_SL_seq_186
tgccggtcgcacggacgcac

SEQ ID NO: 187 - DNA, 20 bp, Homo sapiens
  source 1..20: mol_type = genomic DNA; note = Gene: FGFR3; note = Orientation (relative to transcription): sense; note = sgRNA Position: 1793353; note = Sequence Name: 56322-704_101_SL_seq_187
gtcctgctctgccggtcgca

SEQ ID NO: 188 - DNA, 20 bp, Homo sapiens
  source 1..20: mol_type = genomic DNA; note = Gene: FGFR3; note = Orientation (relative to transcription): sense; note = sgRNA Position: 1793365; note = Sequence Name: 56322-704_101_SL_seq_188
cggtcgcacggacgcaccgg

SEQ ID NO: 189 - DNA, 20 bp, Homo sapiens
  source 1..20: mol_type = genomic DNA; note = Gene: FGFR3; note = Orientation (relative to transcription): sense; note = sgRNA Position: 1793366; note = Sequence Name: 56322-704_101_SL_seq_189
ggtcgcacggacgcaccggc

SEQ ID NO: 190 - DNA, 20 bp, Homo sapiens
  source 1..20: mol_type = genomic DNA; note = Gene: FGFR4; note = Orientation (relative to transcription): sense; note = sgRNA Position: 177086970; note = Sequence Name: 56322-704_101_SL_seq_190
gcggaccctgccgcgtgcag

SEQ ID NO: 191 - DNA, 20 bp, Homo sapiens
  source 1..20: mol_type = genomic DNA; note = Gene: FGFR4; note = Orientation (relative to transcription): sense; note = sgRNA Position: 177086951; note = Sequence Name: 56322-704_101_SL_seq_191
aggagcgctcgggctgtctg

SEQ ID NO: 192 - DNA, 20 bp, Homo sapiens
  source 1..20: mol_type = genomic DNA; note = Gene: FGFR4; note = Orientation (relative to transcription): antisense; note = sgRNA Position: 177086964; note = Sequence Name: 56322-704_101_SL_seq_192
cgcgacccctgcacgcggca

SEQ ID NO: 193 - DNA, 20 bp, Homo sapiens
  source 1..20: mol_type = genomic DNA; note = Gene: FGFR4; note = Orientation (relative to transcription): antisense; note = sgRNA Position: 177086988; note = Sequence Name: 56322-704_101_SL_seq_193
gcctcactcccagctccagc

SEQ ID NO: 194 - DNA, 20 bp, Homo sapiens
  source 1..20: mol_type = genomic DNA; note = Gene: FGFR4; note = Orientation (relative to transcription): sense; note = sgRNA Position: 177086941; note = Sequence Name: 56322-704_101_SL_seq_194
ctcccggccgaggagcgctc

SEQ ID NO: 195 - DNA, 20 bp, Homo sapiens
  source 1..20: mol_type = genomic DNA; note = Gene: FLT1; note = Orientation (relative to transcription): sense; note = sgRNA Position: 28495085; note = Sequence Name: 56322-704_101_SL_seq_195
cgccaggcggacactcctct

SEQ ID NO: 196 - DNA, 20 bp, Homo sapiens
  source 1..20: mol_type = genomic DNA; note = Gene: FLT1; note = Orientation (relative to transcription): sense; note = sgRNA Position: 28495098; note = Sequence Name: 56322-704_101_SL_seq_196
gaggctcggagcgcgccagg

SEQ ID NO: 197 - DNA, 20 bp, Homo sapiens
  source 1..20: mol_type = genomic DNA; note = Gene: FLT1; note = Orientation (relative to transcription): antisense; note = sgRNA Position: 28495081; note = Sequence Name: 56322-704_101_SL_seq_197
gctgccggggaggagccgag

SEQ ID NO: 198 - DNA, 20 bp, Homo sapiens
  source 1..20: mol_type = genomic DNA; note = Gene: FLT1; note = Orientation (relative to transcription): sense; note = sgRNA Position: 28495074; note = Sequence Name: 56322-704_101_SL_seq_198
cactcctctcggctcctccc

SEQ ID NO: 199 - DNA, 20 bp, Homo sapiens
  source 1..20: mol_type = genomic DNA; note = Gene: FLT1; note = Orientation (relative to transcription): antisense; note = sgRNA Position: 28495094; note = Sequence Name: 56322-704_101_SL_seq_199
agccgagaggagtgtccgcc

SEQ ID NO: 200 - DNA, 20 bp, Homo sapiens
  source 1..20: mol_type = genomic DNA; note = Gene: FLT3; note = Orientation (relative to transcription): antisense; note = sgRNA Position: 28100523; note = Sequence Name: 56322-704_101_SL_seq_200
ggcatggcctccggagcccg

SEQ ID NO: 201 - DNA, 20 bp, Homo sapiens
  source 1..20: mol_type = genomic DNA; note = Gene: FLT3; note = Orientation (relative to transcription): sense; note = sgRNA Position: 28100510; note = Sequence Name: 56322-704_101_SL_seq_201
ccgggctccggaggccatgc

SEQ ID NO: 202 - DNA, 20 bp, Homo sapiens
  source 1..20: mol_type = genomic DNA; note = Gene: FLT3; note = Orientation (relative to transcription): antisense; note = sgRNA Position: 28100507; note = Sequence Name: 56322-704_101_SL_seq_202
gtcgcgcgccaacgccggca

SEQ ID NO: 203 - DNA, 20 bp, Homo sapiens
  source 1..20: mol_type = genomic DNA; note = Gene: FLT3; note = Orientation (relative to transcription): antisense; note = sgRNA Position: 28100502; note = Sequence Name: 56322-704_101_SL_seq_203
ccgccgtcgcgcgccaacgc

SEQ ID NO: 204 - DNA, 20 bp, Homo sapiens
  source 1..20: mol_type = genomic DNA; note = Gene: FLT3; note = Orientation (relative to transcription): antisense; note = sgRNA Position: 28100514; note = Sequence Name: 56322-704_101_SL_seq_204
gccaacgccggcatggcctc

SEQ ID NO: 205 - DNA, 20 bp, Homo sapiens
  source 1..20: mol_type = genomic DNA; note = Gene: FLT4; note = Orientation (relative to transcription): antisense; note = sgRNA Position: 180649574; note = Sequence Name: 56322-704_101_SL_seq_205
gcgcgtgggtccgacccgag

SEQ ID NO: 206 - DNA, 20 bp, Homo sapiens
  source 1..20: mol_type = genomic DNA; note = Gene: FLT4; note = Orientation (relative to transcription): sense; note = sgRNA Position: 180649541; note = Sequence Name: 56322-704_101_SL_seq_206
cagcggccggagatgcagcg

SEQ ID NO: 207 - DNA, 20 bp, Homo sapiens
  source 1..20: mol_type = genomic DNA; note = Gene: FLT4; note = Orientation (relative to transcription): sense; note = sgRNA Position: 180649558; note = Sequence Name: 56322-704_101_SL_seq_207
cgggtcggacccacgcgcag

SEQ ID NO: 208 - DNA, 20 bp, Homo sapiens
  source 1..20: mol_type = genomic DNA; note = Gene: FLT4; note = Orientation (relative to transcription): antisense; note = sgRNA Position: 180649560; note = Sequence Name: 56322-704_101_SL_seq_208
catctccggccgctgcgcgt

SEQ ID NO: 209 - DNA, 20 bp, Homo sapiens
  source 1..20: mol_type = genomic DNA; note = Gene: FLT4; note = Orientation (relative to transcription): sense; note = sgRNA Position: 180649554; note = Sequence Name: 56322-704_101_SL_seq_209
tcggacccacgcgcagcggc

SEQ ID NO: 210 - DNA, 20 bp, Homo sapiens
  source 1..20: mol_type = genomic DNA; note = Gene: GART; note = Orientation (relative to transcription): antisense; note = sgRNA Position: 33542072; note = Sequence Name: 56322-704_101_SL_seq_210
gtttacgcaccgacaccggg

SEQ ID NO: 211 - DNA, 20 bp, Homo sapiens
  source 1..20: mol_type = genomic DNA; note = Gene: GART; note = Orientation (relative to transcription): antisense; note = sgRNA Position: 33542044; note = Sequence Name: 56322-704_101_SL_seq_211
aagcgcgctccgtgtaaaag

SEQ ID NO: 212 - DNA, 20 bp, Homo sapiens
  source 1..20: mol_type = genomic DNA; note = Gene: GART; note = Orientation (relative to transcription): antisense; note = sgRNA Position: 33542069; note = Sequence Name: 56322-704_101_SL_seq_212
ggggtttacgcaccgacacc

SEQ ID NO: 213 - DNA, 20 bp, Homo sapiens
  source 1..20: mol_type = genomic DNA; note = Gene: GART; note = Orientation (relative to transcription): antisense; note = sgRNA Position: 33542048; note = Sequence Name: 56322-704_101_SL_seq_213
gcgctccgtgtaaaagcgga

SEQ ID NO: 214 - DNA, 20 bp, Homo sapiens
  source 1..20: mol_type = genomic DNA; note = Gene: GART; note = Orientation (relative to transcription): antisense; note = sgRNA Position: 33542049; note = Sequence Name: 56322-704_101_SL_seq_214
cgctccgtgtaaaagcggag

SEQ ID NO: 215 - DNA, 20 bp, Homo sapiens
  source 1..20: mol_type = genomic DNA; note = Gene: GSK3B; note = Orientation (relative to transcription): antisense; note = sgRNA Position: 120094384; note = Sequence Name: 56322-704_101_SL_seq_215
cctttgtcacttggcccggg

SEQ ID NO: 216 - DNA, 20 bp, Homo sapiens
  source 1..20: mol_type = genomic DNA; note = Gene: GSK3B; note = Orientation (relative to transcription): sense; note = sgRNA Position: 120094421; note = Sequence Name: 56322-704_101_SL_seq_216
gctcctgacccgggcgaatg

SEQ ID NO: 217 - DNA, 20 bp, Homo sapiens
  source 1..20: mol_type = genomic DNA; note = Gene: GSK3B; note = Orientation (relative to transcription): sense; note = sgRNA Position: 120094420; note = Sequence Name: 56322-704_101_SL_seq_217
ctcctgacccgggcgaatgc

SEQ ID NO: 218 - DNA, 20 bp, Homo sapiens
  source 1..20: mol_type = genomic DNA; note = Gene: GSK3B; note = Orientation (relative to transcription): antisense; note = sgRNA Position: 120094381; note = Sequence Name: 56322-704_101_SL_seq_218
cttcctttgtcacttggccc

SEQ ID NO: 219 - DNA, 20 bp, Homo sapiens
  source 1..20: mol_type = genomic DNA; note = Gene: GSK3B; note = Orientation (relative to transcription): antisense; note = sgRNA Position: 120094423; note = Sequence Name: 56322-704_101_SL_seq_219
ggcacaagcccgcattcgcc

SEQ ID NO: 220 - DNA, 20 bp, Homo sapiens
  source 1..20: mol_type = genomic DNA; note = Gene: HDAC1; note = Orientation (relative to transcription): sense; note = sgRNA Position: 32292191; note = Sequence Name: 56322-704_101_SL_seq_220
cgcagacgcagggcacccgg

SEQ ID NO: 221 - DNA, 20 bp, Homo sapiens
  source 1..20: mol_type = genomic DNA; note = Gene: HDAC1; note = Orientation (relative to transcription): sense; note = sgRNA Position: 32292168; note = Sequence Name: 56322-704_101_SL_seq_221
gggacgggaggcgagcaaga

SEQ ID NO: 222 - DNA, 20 bp, Homo sapiens
  source 1..20: mol_type = genomic DNA; note = Gene: HDAC1; note = Orientation (relative to transcription): sense; note = sgRNA Position: 32292181; note = Sequence Name: 56322-704_101_SL_seq_222
agcaagatggcgcagacgca

SEQ ID NO: 223 - DNA, 20 bp, Homo sapiens
  source 1..20: mol_type = genomic DNA; note = Gene: HDAC1; note = Orientation (relative to transcription): antisense; note = sgRNA Position: 32292196; note = Sequence Name: 56322-704_101_SL_seq_223
agtagtaacagactttcctc

SEQ ID NO: 224 - DNA, 20 bp, Homo sapiens
  source 1..20: mol_type = genomic DNA; note = Gene: HDAC1; note = Orientation (relative to transcription): sense; note = sgRNA Position: 32292214; note = Sequence Name: 56322-704_101_SL_seq_224
aaagtctgttactactacga

SEQ ID NO: 225 - DNA, 20 bp, Homo sapiens
  source 1..20: mol_type = genomic DNA; note = Gene: HDAC2; note = Orientation (relative to transcription): antisense; note = sgRNA Position: 113971105; note = Sequence Name: 56322-704_101_SL_seq_225
cggcagaggtgccgaaagct

SEQ ID NO: 226 - DNA, 20 bp, Homo sapiens
  source 1..20: mol_type = genomic DNA; note = Gene: HDAC2; note = Orientation (relative to transcription): antisense; note = sgRNA Position: 113971085; note = Sequence Name: 56322-704_101_SL_seq_226
cgggaaggctcggtaccacc

SEQ ID NO: 227 - DNA, 20 bp, Homo sapiens
  source 1..20: mol_type = genomic DNA; note = Gene: HDAC2; note = Orientation (relative to transcription): antisense; note = sgRNA Position: 113971111; note = Sequence Name: 56322-704_101_SL_seq_227
aggtgccgaaagctcggaat

SEQ ID NO: 228 - DNA, 20 bp, Homo sapiens
  source 1..20: mol_type = genomic DNA; note = Gene: HDAC2; note = Orientation (relative to transcription): sense; note = sgRNA Position: 113971089; note = Sequence Name: 56322-704_101_SL_seq_228
ctttcggcacctctgccggg

SEQ ID NO: 229 - DNA, 20 bp, Homo sapiens
  source 1..20: mol_type = genomic DNA; note = Gene: HDAC2; note = Orientation (relative to transcription): antisense; note = sgRNA Position: 113971091; note = Sequence Name: 56322-704_101_SL_seq_229
ggctcggtaccacccggcag

SEQ ID NO: 230 - DNA, 20 bp, Homo sapiens
  source 1..20: mol_type = genomic DNA; note = Gene: HDAC3; note = Orientation (relative to transcription): sense; note = sgRNA Position: 141636781; note = Sequence Name: 56322-704_101_SL_seq_230
cggcaccatggccaagaccg

SEQ ID NO: 231 - DNA, 20 bp, Homo sapiens
  source 1..20: mol_type = genomic DNA; note = Gene: HDAC3; note = Orientation (relative to transcription): antisense; note = sgRNA Position: 141636781; note = Sequence Name: 56322-704_101_SL_seq_231
gtagaaataggccacggtct

SEQ ID NO: 232 - DNA, 20 bp, Homo sapiens
  source 1..20: mol_type = genomic DNA; note = Gene: HDAC3; note = Orientation (relative to transcription): antisense; note = sgRNA Position: 141636787; note = Sequence Name: 56322-704_101_SL_seq_232
ataggccacggtcttggcca

SEQ ID NO: 233 - DNA, 20 bp, Homo sapiens
  source 1..20: mol_type = genomic DNA; note = Gene: HDAC3; note = Orientation (relative to transcription): antisense; note = sgRNA Position: 141636775; note = Sequence Name: 56322-704_101_SL_seq_233
ggggtcgtagaaataggcca

SEQ ID NO: 234 - DNA, 20 bp, Homo sapiens
  source 1..20: mol_type = genomic DNA; note = Gene: HDAC3; note = Orientation (relative to transcription): sense; note = sgRNA Position: 141636793; note = Sequence Name: 56322-704_101_SL_seq_234
gcctgctcccgccggcacca

SEQ ID NO: 235 - DNA, 20 bp, Homo sapiens
  source 1..20: mol_type = genomic DNA; note = Gene: HRAS; note = Orientation (relative to transcription): antisense; note = sgRNA Position: 535517; note = Sequence Name: 56322-704_101_SL_seq_235
cgcatgggctccgtccgcgg

SEQ ID NO: 236 - DNA, 20 bp, Homo sapiens
  source 1..20: mol_type = genomic DNA; note = Gene: HRAS; note = Orientation (relative to transcription): sense; note = sgRNA Position: 535501; note = Sequence Name: 56322-704_101_SL_seq_236
gcggacggagcccatgcgcg

SEQ ID NO: 237 - DNA, 20 bp, Homo sapiens
  source 1..20: mol_type = genomic DNA; note = Gene: HRAS; note = Orientation (relative to transcription): antisense; note = sgRNA Position: 535514; note = Sequence Name: 56322-704_101_SL_seq_237
ccgcgcatgggctccgtccg

SEQ ID NO: 238 - DNA, 20 bp, Homo sapiens
  source 1..20: mol_type = genomic DNA; note = Gene: HRAS; note = Orientation (relative to transcription): sense; note = sgRNA Position: 535503; note = Sequence Name: 56322-704_101_SL_seq_238
ccgcggacggagcccatgcg

SEQ ID NO: 239 - DNA, 20 bp, Homo sapiens
  source 1..20: mol_type = genomic DNA; note = Gene: HRAS; note = Orientation (relative to transcription): sense; note = sgRNA Position: 535520; note = Sequence Name: 56322-704_101_SL_seq_239
aacccgagccgcacccgccg

SEQ ID NO: 240 - DNA, 20 bp, Homo sapiens
  source 1..20: mol_type = genomic DNA; note = Gene: IDH1; note = Orientation (relative to transcription): antisense; note = sgRNA Position: 208255009; note = Sequence Name: 56322-704_101_SL_seq_240
tcagactcacaaccacagcc

SEQ ID NO: 241 - DNA, 20 bp, Homo sapiens
  source 1..20: mol_type = genomic DNA; note = Gene: IDH1; note = Orientation (relative to transcription): sense; note = sgRNA Position: 208255038; note = Sequence Name: 56322-704_101_SL_seq_241
acttcagaagcggaggcact

SEQ ID NO: 242 - DNA, 20 bp, Homo sapiens
  source 1..20: mol_type = genomic DNA; note = Gene: IDH1; note = Orientation (relative to transcription): sense; note = sgRNA Position: 208255045; note = Sequence Name: 56322-704_101_SL_seq_242
agagtctacttcagaagcgg

SEQ ID NO: 243 - DNA, 20 bp, Homo sapiens
  source 1..20: mol_type = genomic DNA; note = Gene: IDH1; note = Orientation (relative to transcription): antisense; note = sgRNA Position: 208255023; note = Sequence Name: 56322-704_101_SL_seq_243
acagcctggcaatcccaaac

SEQ ID NO: 244 - DNA, 20 bp, Homo sapiens
  source 1..20: mol_type = genomic DNA; note = Gene: IDH1; note = Orientation (relative to transcription): sense; note = sgRNA Position: 208255016; note = Sequence Name: 56322-704_101_SL_seq_244
gagtccggtttgggattgcc

SEQ ID NO: 245 - DNA, 20 bp, Homo sapiens
  source 1..20: mol_type = genomic DNA; note = Gene: IDH2; note = Orientation (relative to transcription): antisense; note = sgRNA Position: 90102415; note = Sequence Name: 56322-704_101_SL_seq_245
tggagagcgaacgagcaggg

SEQ ID NO: 246 - DNA, 20 bp, Homo sapiens
  source 1..20: mol_type = genomic DNA; note = Gene: IDH2; note = Orientation (relative to transcription): antisense; note = sgRNA Position: 90102395; note = Sequence Name: 56322-704_101_SL_seq_246
ggtagccggccatcccaagc

SEQ ID NO: 247 - DNA, 20 bp, Homo sapiens
  source 1..20: mol_type = genomic DNA; note = Gene: IDH2; note = Orientation (relative to transcription): antisense; note = sgRNA Position: 90102411; note = Sequence Name: 56322-704_101_SL_seq_247
aagctggagagcgaacgagc

SEQ ID NO: 248 - DNA, 20 bp, Homo sapiens
  source 1..20: mol_type = genomic DNA; note = Gene: IDH2; note = Orientation (relative to transcription): antisense; note = sgRNA Position: 90102412; note = Sequence Name: 56322-704_101_SL_seq_248
agctggagagcgaacgagca

SEQ ID NO: 249 - DNA, 20 bp, Homo sapiens
  source 1..20: mol_type = genomic DNA; note = Gene: IDH2; note = Orientation (relative to transcription): sense; note = sgRNA Position: 90102397; note = Sequence Name: 56322-704_101_SL_seq_249
gctcgttcgctctccagctt

SEQ ID NO: 250 - DNA, 20 bp, Homo sapiens
  source 1..20: mol_type = genomic DNA; note = Gene: IGF1R; note = Orientation (relative to transcription): sense; note = sgRNA Position: 98648606; note = Sequence Name: 56322-704_101_SL_seq_250
ccagcattaactccgctgag

SEQ ID NO: 251 - DNA, 20 bp, Homo sapiens
  source 1..20: mol_type = genomic DNA; note = Gene: IGF1R; note = Orientation (relative to transcription): antisense; note = sgRNA Position: 98648540; note = Sequence Name: 56322-704_101_SL_seq_251
ccgccgctgccacacactgg

SEQ ID NO: 252 - DNA, 20 bp, Homo sapiens
  source 1..20: mol_type = genomic DNA; note = Gene: IGF1R; note = Orientation (relative to transcription): antisense; note = sgRNA Position: 98648595; note = Sequence Name: 56322-704_101_SL_seq_252
ccgctcagcggagttaatgc

SEQ ID NO: 253 - DNA, 20 bp, Homo sapiens
  source 1..20: mol_type = genomic DNA; note = Gene: IGF1R; note = Orientation (relative to transcription): sense; note = sgRNA Position: 98648572; note = Sequence Name: 56322-704_101_SL_seq_253
ggcggcggcgcggcgaggct

SEQ ID NO: 254 - DNA, 20 bp, Homo sapiens
  source 1..20: mol_type = genomic DNA; note = Gene: IGF1R; note = Orientation (relative to transcription): sense; note = sgRNA Position: 98648573; note = Sequence Name: 56322-704_101_SL_seq_254
gcggcggcgcggcgaggctg

SEQ ID NO: 255 - DNA, 20 bp, Homo sapiens
  source 1..20: mol_type = genomic DNA; note = Gene: JAK1; note = Orientation (relative to transcription): antisense; note = sgRNA Position: 64966518; note = Sequence Name: 56322-704_101_SL_seq_255
tgcagctccaggatactccg

SEQ ID NO: 256 - DNA, 20 bp, Homo sapiens
  source 1..20: mol_type = genomic DNA; note = Gene: JAK1; note = Orientation (relative to transcription): sense; note = sgRNA Position: 64966496; note = Sequence Name: 56322-704_101_SL_seq_256
cctggagctgcagacagtgc

SEQ ID NO: 257 - DNA, 20 bp, Homo sapiens
  source 1..20: mol_type = genomic DNA; note = Gene: JAK1; note = Orientation (relative to transcription): sense; note = sgRNA Position: 64966479; note = Sequence Name: 56322-704_101_SL_seq_257
tgcgggcctgcgcccagtcc

SEQ ID NO: 258 - DNA, 20 bp, Homo sapiens
  source 1..20: mol_type = genomic DNA; note = Gene: JAK1; note = Orientation (relative to transcription): antisense; note = sgRNA Position: 64966478; note = Sequence Name: 56322-704_101_SL_seq_258
cggcgaggacagccgggact

SEQ ID NO: 259 - DNA, 20 bp, Homo sapiens
  source 1..20: mol_type = genomic DNA; note = Gene: JAK1; note = Orientation (relative to transcription): sense; note = sgRNA Position: 64966514; note = Sequence Name: 56322-704_101_SL_seq_259
gcggcggccgcggagtatcc

SEQ ID NO: 260 - DNA, 20 bp, Homo sapiens
  source 1..20: mol_type = genomic DNA; note = Gene: JAK2; note = Orientation (relative to transcription): antisense; note = sgRNA Position: 4985299; note = Sequence Name: 56322-704_101_SL_seq_260
gcgccgagggaggccgttag

SEQ ID NO: 261 - DNA, 20 bp, Homo sapiens
  source 1..20: mol_type = genomic DNA; note = Gene: JAK2; note = Orientation (relative to transcription): sense; note = sgRNA Position: 4985297; note = Sequence Name: 56322-704_101_SL_seq_261
gcagcagcggacgccgctaa

SEQ ID NO: 262 - DNA, 20 bp, Homo sapiens
  source 1..20: mol_type = genomic DNA; note = Gene: JAK2; note = Orientation (relative to transcription): antisense; note = sgRNA Position: 4985340; note = Sequence Name: 56322-704_101_SL_seq_262
cgcgaacacccaagcgagcc

SEQ ID NO: 263 - DNA, 20 bp, Homo sapiens
  source 1..20: mol_type = genomic DNA; note = Gene: JAK2; note = Orientation (relative to transcription): antisense; note = sgRNA Position: 4985309; note = Sequence Name: 56322-704_101_SL_seq_263
cagcctgtcagcgccgaggg

SEQ ID NO: 264 - DNA, 20 bp, Homo sapiens
  source 1..20: mol_type = genomic DNA; note = Gene: JAK2; note = Orientation (relative to transcription): sense; note = sgRNA Position: 4985307; note = Sequence Name: 56322-704_101_SL_seq_264
acgccgctaacggcctccct

SEQ ID NO: 265 - DNA, 20 bp, Homo sapiens
  source 1..20: mol_type = genomic DNA; note = Gene: JAK3; note = Orientation (relative to transcription): antisense; note = sgRNA Position: 17847947; note = Sequence Name: 56322-704_101_SL_seq_265
catcgccagctcttacctag

SEQ ID NO: 266 - DNA, 20 bp, Homo sapiens
  source 1..20: mol_type = genomic DNA; note = Gene: JAK3; note = Orientation (relative to transcription): sense; note = sgRNA Position: 17847928; note = Sequence Name: 56322-704_101_SL_seq_266
taagagctggcgatgccgca

SEQ ID NO: 267 - DNA, 20 bp, Homo sapiens
  source 1..20: mol_type = genomic DNA; note = Gene: JAK3; note = Orientation (relative to transcription): antisense; note = sgRNA Position: 17847953; note = Sequence Name: 56322-704_101_SL_seq_267
cagctcttacctagcgggca

SEQ ID NO: 268 - DNA, 20 bp, Homo sapiens
  source 1..20: mol_type = genomic DNA; note = Gene: JAK3; note = Orientation (relative to transcription): sense; note = sgRNA Position: 17847941; note = Sequence Name: 56322-704_101_SL_seq_268
cctgcccgctaggtaagagc

SEQ ID NO: 269 - DNA, 20 bp, Homo sapiens
  source 1..20: mol_type = genomic DNA; note = Gene: JAK3; note = Orientation (relative to transcription): sense; note = sgRNA Position: 17847909; note = Sequence Name: 56322-704_101_SL_seq_269
agggctcggcccagacactg

SEQ ID NO: 270 - DNA, 20 bp, Homo sapiens
  source 1..20: mol_type = genomic DNA; note = Gene: KDM6A; note = Orientation (relative to transcription): antisense; note = sgRNA Position: 44873232; note = Sequence Name: 56322-704_101_SL_seq_270
ggagcactgaggggattcgt

SEQ ID NO: 271 - DNA, 20 bp, Homo sapiens
  source 1..20: mol_type = genomic DNA; note = Gene: KDM6A; note = Orientation (relative to transcription): antisense; note = sgRNA Position: 44873214; note = Sequence Name: 56322-704_101_SL_seq_271
gttggagacacaaacttccc

SEQ ID NO: 272 - DNA, 20 bp, Homo sapiens
  source 1..20: mol_type = genomic DNA; note = Gene: KDM6A; note = Orientation (relative to transcription): antisense; note = sgRNA Position: 44873259; note = Sequence Name: 56322-704_101_SL_seq_272
gggaacggccggagcgcgcg

SEQ ID NO: 273 - DNA, 20 bp, Homo sapiens
  source 1..20: mol_type = genomic DNA; note = Gene: KDM6A; note = Orientation (relative to transcription): antisense; note = sgRNA Position: 44873242; note = Sequence Name: 56322-704_101_SL_seq_273
gcggggctggggagcactga

SEQ ID NO: 274 - DNA, 20 bp, Homo sapiens
  source 1..20: mol_type = genomic DNA; note = Gene: KDM6A; note = Orientation (relative to transcription): sense; note = sgRNA Position: 44873262; note = Sequence Name: 56322-704_101_SL_seq_274
ctccccagccccgcgcgctc

SEQ ID NO: 275 - DNA, 20 bp, Homo sapiens
  source 1..20: mol_type = genomic DNA; note = Gene: KDR; note = Orientation (relative to transcription): sense; note = sgRNA Position: 55125563; note = Sequence Name: 56322-704_101_SL_seq_275
ccgggagagcggtcaatgtg

SEQ ID NO: 276 - DNA, 20 bp, Homo sapiens
  source 1..20: mol_type = genomic DNA; note = Gene: KDR; note = Orientation (relative to transcription): antisense; note = sgRNA Position: 55125528; note = Sequence Name: 56322-704_101_SL_seq_276
tgcggcgcgcaagtgatgcc

SEQ ID NO: 277 - DNA, 20 bp, Homo sapiens
  source 1..20: mol_type = genomic DNA; note = Gene: KDR; note = Orientation (relative to transcription): antisense; note = sgRNA Position: 55125534; note = Sequence Name: 56322-704_101_SL_seq_277
gcgcaagtgatgcccggcgc

SEQ ID NO: 278 - DNA, 20 bp, Homo sapiens
  source 1..20: mol_type = genomic DNA; note = Gene: KDR; note = Orientation (relative to transcription): antisense; note = sgRNA Position: 55125540; note = Sequence Name: 56322-704_101_SL_seq_278
gtgatgcccggcgcaggcag

SEQ ID NO: 279 - DNA, 20 bp, Homo sapiens
  source 1..20: mol_type = genomic DNA; note = Gene: KDR; note = Orientation (relative to transcription): sense; note = sgRNA Position: 55125535; note = Sequence Name: 56322-704_101_SL_seq_279
gcgtttcctctgcctgcgcc

SEQ ID NO: 280 - DNA, 20 bp, Homo sapiens
  source 1..20: mol_type = genomic DNA; note = Gene: KIF11; note = Orientation (relative to transcription): sense; note = sgRNA Position: 92593197; note = Sequence Name: 56322-704_101_SL_seq_280
ctggcgcgggacaaacgcca

SEQ ID NO: 281 - DNA, 20 bp, Homo sapiens
  source 1..20: mol_type = genomic DNA; note = Gene: KIF11; note = Orientation (relative to transcription): antisense; note = sgRNA Position: 92593182; note = Sequence Name: 56322-704_101_SL_seq_281
ggcgtttgtcccgcgccagt

SEQ ID NO: 282 - DNA, 20 bp, Homo sapiens
  source 1..20: mol_type = genomic DNA; note = Gene: KIF11; note = Orientation (relative to transcription): antisense; note = sgRNA Position: 92593203; note = Sequence Name: 56322-704_101_SL_seq_282
tctacccggtactctggccg

SEQ ID NO: 283 - DNA, 20 bp, Homo sapiens
  source 1..20: mol_type = genomic DNA; note = Gene: KIF11; note = Orientation (relative to transcription): sense; note = sgRNA Position: 92593183; note = Sequence Name: 56322-704_101_SL_seq_283
tttggcggctccgactggcg

SEQ ID NO: 284 - DNA, 20 bp, Homo sapiens
  source 1..20: mol_type = genomic DNA; note = Gene: KIF11; note = Orientation (relative to transcription): sense; note = sgRNA Position: 92593178; note = Sequence Name: 56322-704_101_SL_seq_284
agtgatttggcggctccgac

SEQ ID NO: 285 - DNA, 20 bp, Homo sapiens
  source 1..20: mol_type = genomic DNA; note = Gene: KIT; note = Orientation (relative to transcription): antisense; note = sgRNA Position: 54658016; note = Sequence Name: 56322-704_101_SL_seq_285
gccgcgagcgcctctcatcg

SEQ ID NO: 286 - DNA, 20 bp, Homo sapiens
  source 1..20: mol_type = genomic DNA; note = Gene: KIT; note = Orientation (relative to transcription): sense; note = sgRNA Position: 54658017; note = Sequence Name: 56322-704_101_SL_seq_286
atcgcagctaccgcgatgag

SEQ ID NO: 287 - DNA, 20 bp, Homo sapiens
  source 1..20: mol_type = genomic DNA; note = Gene: KIT; note = Orientation (relative to transcription): antisense; note = sgRNA Position: 54658003; note = Sequence Name: 56322-704_101_SL_seq_287
ctcatcgcggtagctgcgat

SEQ ID NO: 288 - DNA, 20 bp, Homo sapiens
  source 1..20: mol_type = genomic DNA; note = Gene: KIT; note = Orientation (relative to transcription): sense; note = sgRNA Position: 54657989; note = Sequence Name: 56322-704_101_SL_seq_288
ctggaacgtggaccagagct

SEQ ID NO: 289 - DNA, 20 bp, Homo sapiens
  source 1..20: mol_type = genomic DNA; note = Gene: KIT; note = Orientation (relative to transcription): antisense; note = sgRNA Position: 54657990; note = Sequence Name: 56322-704_101_SL_seq_289
ctgcgatgggatccgagctc

SEQ ID NO: 290 - DNA, 20 bp, Homo sapiens
  source 1..20: mol_type = genomic DNA; note = Gene: KRAS; note = Orientation (relative to transcription): sense; note = sgRNA Position: 25250874; note = Sequence Name: 56322-704_101_SL_seq_290
ggcagtggcggcggcgaagg

SEQ ID NO: 291 - DNA, 20 bp, Homo sapiens
  source 1..20: mol_type = genomic DNA; note = Gene: KRAS; note = Orientation (relative to transcription): sense; note = sgRNA Position: 25250868; note = Sequence Name: 56322-704_101_SL_seq_291
ggcggcggcgaaggtggcgg

SEQ ID NO: 292 - DNA, 20 bp, Homo sapiens
  source 1..20: mol_type = genomic DNA; note = Gene: KRAS; note = Orientation (relative to transcription): sense; note = sgRNA Position: 25250871; note = Sequence Name: 56322-704_101_SL_seq_292
agtggcggcggcgaaggtgg

SEQ ID NO: 293 - DNA, 20 bp, Homo sapiens
  source 1..20: mol_type = genomic DNA; note = Gene: KRAS; note = Orientation (relative to transcription): sense; note = sgRNA Position: 25250863; note = Sequence Name: 56322-704_101_SL_seq_293
cggcgaaggtggcggcggct

SEQ ID NO: 294 - DNA, 20 bp, Homo sapiens
  source 1..20: mol_type = genomic DNA; note = Gene: KRAS; note = Orientation (relative to transcription): sense; note = sgRNA Position: 25250886; note = Sequence Name: 56322-704_101_SL_seq_294
agcagcggcggcggcagtgg

SEQ ID NO: 295 - DNA, 20 bp, Homo sapiens
  source 1..20: mol_type = genomic DNA; note = Gene: MAP2K1; note = Orientation (relative to transcription): sense; note = sgRNA Position: 66386951; note = Sequence Name: 56322-704_101_SL_seq_295
cagagcggctaggagcacgg

SEQ ID NO: 296 - DNA, 20 bp, Homo sapiens
  source 1..20: mol_type = genomic DNA; note = Gene: MAP2K1; note = Orientation (relative to transcription): sense; note = sgRNA Position: 66386948; note = Sequence Name: 56322-704_101_SL_seq_296
tcgcagagcggctaggagca

SEQ ID NO: 297 - DNA, 20 bp, Homo sapiens
  source 1..20: mol_type = genomic DNA; note = Gene: MAP2K1; note = Orientation (relative to transcription): sense; note = sgRNA Position: 66386941; note = Sequence Name: 56322-704_101_SL_seq_297
ggccgcttcgcagagcggct

SEQ ID NO: 298 - DNA, 20 bp, Homo sapiens
  source 1..20: mol_type = genomic DNA; note = Gene: MAP2K1; note = Orientation (relative to transcription): sense; note = sgRNA Position: 66386954; note = Sequence Name: 56322-704_101_SL_seq_298
agcggctaggagcacggcgg

SEQ ID NO: 299 - DNA, 20 bp, Homo sapiens
  source 1..20: mol_type = genomic DNA; note = Gene: MAP2K1; note = Orientation (relative to transcription): antisense; note = sgRNA Position: 66386975; note = Sequence Name: 56322-704_101_SL_seq_299
cccagctccagctcctgccg

SEQ ID NO: 300 - DNA, 20 bp, Homo sapiens
  source 1..20: mol_type = genomic DNA; note = Gene: MAP2K2; note = Orientation (relative to transcription): sense; note = sgRNA Position: 4124086; note = Sequence Name: 56322-704_101_SL_seq_300
cgtcagccttcttcgggcct

SEQ ID NO: 301 - DNA, 20 bp, Homo sapiens
  source 1..20: mol_type = genomic DNA; note = Gene: MAP2K2; note = Orientation (relative to transcription): sense; note = sgRNA Position: 4124093; note = Sequence Name: 56322-704_101_SL_seq_301
gctgcggcgtcagccttctt

SEQ ID NO: 302 - DNA, 20 bp, Homo sapiens
  source 1..20: mol_type = genomic DNA; note = Gene: MAP2K2; note = Orientation (relative to transcription): sense; note = sgRNA Position: 4124080; note = Sequence Name: 56322-704_101_SL_seq_302
ccttcttcgggcctcggcag

SEQ ID NO: 303 - DNA, 20 bp, Homo sapiens
  source 1..20: mol_type = genomic DNA; note = Gene: MAP2K2; note = Orientation (relative to transcription): antisense; note = sgRNA Position: 4124080; note = Sequence Name: 56322-704_101_SL_seq_303
gcgagccgctaccgctgccg

SEQ ID NO: 304 - DNA, 20 bp, Homo sapiens
  source 1..20: mol_type = genomic DNA; note = Gene: MAP2K2; note = Orientation (relative to transcription): sense; note = sgRNA Position: 4124074; note = Sequence Name: 56322-704_101_SL_seq_304
tcgggcctcggcagcggtag

SEQ ID NO: 305 - DNA, 20 bp, Homo sapiens
  source 1..20: mol_type = genomic DNA; note = Gene: MET; note = Orientation (relative to transcription): sense; note = sgRNA Position: 116672499; note = Sequence Name: 56322-704_101_SL_seq_305
gcgacagctgacttgctgag

SEQ ID NO: 306 - DNA, 20 bp, Homo sapiens
  source 1..20: mol_type = genomic DNA; note = Gene: MET; note = Orientation (relative to transcription): sense; note = sgRNA Position: 116672502; note = Sequence Name: 56322-704_101_SL_seq_306
acagctgacttgctgagagg

SEQ ID NO: 307 - DNA, 20 bp, Homo sapiens
  source 1..20: mol_type = genomic DNA; note = Gene: MET; note = Orientation (relative to transcription): sense; note = sgRNA Position: 116672477; note = Sequence Name: 56322-704_101_SL_seq_307
gagggcgcgagccagatgcg

SEQ ID NO: 308 - DNA, 20 bp, Homo sapiens
  source 1..20: mol_type = genomic DNA; note = Gene: MET; note = Orientation (relative to transcription): sense; note = sgRNA Position: 116672507; note = Sequence Name: 56322-704_101_SL_seq_308
tgacttgctgagaggaggcg

SEQ ID NO: 309 - DNA, 20 bp, Homo sapiens
  source 1..20: mol_type = genomic DNA; note = Gene: MET; note = Orientation (relative to transcription): antisense; note = sgRNA Position: 116672477; note = Sequence Name: 56322-704_101_SL_seq_309
gtcagctgtcgccccgcatc

SEQ ID NO: 310 - DNA, 20 bp, Homo sapiens
  source 1..20: mol_type = genomic DNA; note = Gene: MTOR; note = Orientation (relative to transcription): sense; note = sgRNA Position: 11262491; note = Sequence Name: 56322-704_101_SL_seq_310
ggggcctgaagcggcggtac

SEQ ID NO: 311 - DNA, 20 bp, Homo sapiens
  source 1..20: mol_type = genomic DNA; note = Gene: MTOR; note = Orientation (relative to transcription): sense; note = sgRNA Position: 11262482; note = Sequence Name: 56322-704_101_SL_seq_311
agcggcggtaccggtgctgg

SEQ ID NO: 312 - DNA, 20 bp, Homo sapiens
  source 1..20: mol_type = genomic DNA; note = Gene: MTOR; note = Orientation (relative to transcription): sense; note = sgRNA Position: 11262526; note = Sequence Name: 56322-704_101_SL_seq_312
ttagaggacagcggggaagg

SEQ ID NO: 313 - DNA, 20 bp, Homo sapiens
  source 1..20: mol_type = genomic DNA; note = Gene: MTOR; note = Orientation (relative to transcription): sense; note = sgRNA Position: 11262525; note = Sequence Name: 56322-704_101_SL_seq_313
tagaggacagcggggaaggc

SEQ ID NO: 314 - DNA, 20 bp, Homo sapiens
  source 1..20: mol_type = genomic DNA; note = Gene: MTOR; note = Orientation (relative to transcription): sense; note = sgRNA Position: 11262485; note = Sequence Name: 56322-704_101_SL_seq_314
tgaagcggcggtaccggtgc

SEQ ID NO: 315 - DNA, 20 bp, Homo sapiens
  source 1..20: mol_type = genomic DNA; note = Gene: NRAS; note = Orientation (relative to transcription): antisense; note = sgRNA Position: 114716721; note = Sequence Name: 56322-704_101_SL_seq_315
gggaaaaatgttggagaccc

SEQ ID NO: 316 - DNA, 20 bp, Homo sapiens
  source 1..20: mol_type = genomic DNA; note = Gene: NRAS; note = Orientation (relative to transcription): sense; note = sgRNA Position: 114716727; note = Sequence Name: 56322-704_101_SL_seq_316
ggctgttcatggcggttccg

SEQ ID NO: 317 - DNA, 20 bp, Homo sapiens
  source 1..20: mol_type = genomic DNA; note = Gene: NRAS; note = Orientation (relative to transcription): sense; note = sgRNA Position: 114716735; note = Sequence Name: 56322-704_101_SL_seq_317
ttggtgggggctgttcatgg

SEQ ID NO: 318 - DNA, 20 bp, Homo sapiens
  source 1..20: mol_type = genomic DNA; note = Gene: NRAS; note = Orientation (relative to transcription): sense; note = sgRNA Position: 114716738; note = Sequence Name: 56322-704_101_SL_seq_318
tccttggtgggggctgttca

SEQ ID NO: 319 - DNA, 20 bp, Homo sapiens
  source 1..20: mol_type = genomic DNA; note = Gene: NRAS; note = Orientation (relative to transcription): sense; note = sgRNA Position: 114716728; note = Sequence Name: 56322-704_101_SL_seq_319
gggctgttcatggcggttcc

SEQ ID NO: 320 - DNA, 20 bp, Homo sapiens
  source 1..20: mol_type = genomic DNA; note = Gene: NTRK1; note = Orientation (relative to transcription): antisense; note = sgRNA Position: 156860936; note = Sequence Name: 56322-704_101_SL_seq_320
ccgtccgcctcgcagcatcg

SEQ ID NO: 321 - DNA, 20 bp, Homo sapiens
  source 1..20: mol_type = genomic DNA; note = Gene: NTRK1; note = Orientation (relative to transcription): sense; note = sgRNA Position: 156860915; note = Sequence Name: 56322-704_101_SL_seq_321
acggctgccccgcctgagcg

SEQ ID NO: 322 - DNA, 20 bp, Homo sapiens
  source 1..20: mol_type = genomic DNA; note = Gene: NTRK1; note = Orientation (relative to transcription): sense; note = sgRNA Position: 156860896; note = Sequence Name: 56322-704_101_SL_seq_322
tgcagctgggagcgcacaga

SEQ ID NO: 323 - DNA, 20 bp, Homo sapiens
  source 1..20: mol_type = genomic DNA; note = Gene: NTRK1; note = Orientation (relative to transcription): antisense; note = sgRNA Position: 156860933; note = Sequence Name: 56322-704_101_SL_seq_323
tccgcctcgcagcatcgcgg

SEQ ID NO: 324 - DNA, 20 bp, Homo sapiens
  source 1..20: mol_type = genomic DNA; note = Gene: NTRK1; note = Orientation (relative to transcription): sense; note = sgRNA Position: 156860940; note = Sequence Name: 56322-704_101_SL_seq_324
ggcgccgccgcgatgctgcg

SEQ ID NO: 325 - DNA, 20 bp, Homo sapiens
  source 1..20: mol_type = genomic DNA; note = Gene: NTRK2; note = Orientation (relative to transcription): sense; note = sgRNA Position: 84669829; note = Sequence Name: 56322-704_101_SL_seq_325
tctacgcgctcagtccccgg

SEQ ID NO: 326 - DNA, 20 bp, Homo sapiens
  source 1..20: mol_type = genomic DNA; note = Gene: NTRK2; note = Orientation (relative to transcription): antisense; note = sgRNA Position: 84669833; note = Sequence Name: 56322-704_101_SL_seq_326
tccaggctcctgctaccgcc

SEQ ID NO: 327 - DNA, 20 bp, Homo sapiens
  source 1..20: mol_type = genomic DNA; note = Gene: NTRK2; note = Orientation (relative to transcription): antisense; note = sgRNA Position: 84669832; note = Sequence Name: 56322-704_101_SL_seq_327
ccaggctcctgctaccgccg

SEQ ID NO: 328 - DNA, 20 bp, Homo sapiens
  source 1..20: mol_type = genomic DNA; note = Gene: NTRK2; note = Orientation (relative to transcription): sense; note = sgRNA Position: 84669836; note = Sequence Name: 56322-704_101_SL_seq_328
gctcagtccccggcggtagc

SEQ ID NO: 329 - DNA, 20 bp, Homo sapiens
  source 1..20: mol_type = genomic DNA; note = Gene: NTRK2; note = Orientation (relative to transcription): sense; note = sgRNA Position: 84669826; note = Sequence Name: 56322-704_101_SL_seq_329
cgctctacgcgctcagtccc

SEQ ID NO: 330 - DNA, 20 bp, Homo sapiens
  source 1..20: mol_type = genomic DNA; note = Gene: NTRK3; note = Orientation (relative to transcription): sense; note = sgRNA Position: 88256701; note = Sequence Name: 56322-704_101_SL_seq_330
gcgcggcgagccattcgcgg

SEQ ID NO: 331 - DNA, 20 bp, Homo sapiens
  source 1..20: mol_type = genomic DNA; note = Gene: NTRK3; note = Orientation (relative to transcription): antisense; note = sgRNA Position: 88256678; note = Sequence Name: 56322-704_101_SL_seq_331
gaagagaaggaagatgcagt

SEQ ID NO: 332 - DNA, 20 bp, Homo sapiens
  source 1..20: mol_type = genomic DNA; note = Gene: NTRK3; note = Orientation (relative to transcription): sense; note = sgRNA Position: 88256704; note = Sequence Name: 56322-704_101_SL_seq_332
gccgcgcggcgagccattcg

SEQ ID NO: 333 - DNA, 20 bp, Homo sapiens
  source 1..20: mol_type = genomic DNA; note = Gene: NTRK3; note = Orientation (relative to transcription): antisense; note = sgRNA Position: 88256714; note = Sequence Name: 56322-704_101_SL_seq_333
gccgcgaatggctcgccgcg

SEQ ID NO: 334 - DNA, 20 bp, Homo sapiens
  source 1..20: mol_type = genomic DNA; note = Gene: NTRK3; note = Orientation (relative to transcription): antisense; note = sgRNA Position: 88256665; note = Sequence Name: 56322-704_101_SL_seq_334
agcccgaggaaaggaagaga

SEQ ID NO: 335 - DNA, 20 bp, Homo sapiens
  source 1..20: mol_type = genomic DNA; note = Gene: PALB2; note = Orientation (relative to transcription): antisense; note = sgRNA Position: 23641222; note = Sequence Name: 56322-704_101_SL_seq_335
tgccgacaccgggacccagt

SEQ ID NO: 336 - DNA, 20 bp, Homo sapiens
  source 1..20: mol_type = genomic DNA; note = Gene: PALB2; note = Orientation (relative to transcription): antisense; note = sgRNA Position: 23641212; note = Sequence Name: 56322-704_101_SL_seq_336
accccaggcctgccgacacc

SEQ ID NO: 337 - DNA, 20 bp, Homo sapiens
  source 1..20: mol_type = genomic DNA; note = Gene: PALB2; note = Orientation (relative to transcription): sense; note = sgRNA Position: 23641213; note = Sequence Name: 56322-704_101_SL_seq_337
ggccaactgggtcccggtgt

SEQ ID NO: 338 - DNA, 20 bp, Homo sapiens
  source 1..20: mol_type = genomic DNA; note = Gene: PALB2; note = Orientation (relative to transcription): antisense; note = sgRNA Position: 23641211; note = Sequence Name: 56322-704_101_SL_seq_338
gaccccaggcctgccgacac

SEQ ID NO: 339 - DNA, 20 bp, Homo sapiens
  source 1..20: mol_type = genomic DNA; note = Gene: PALB2; note = Orientation (relative to transcription): sense; note = sgRNA Position: 23641225; note = Sequence Name: 56322-704_101_SL_seq_339
tccccggcccagggccaact

SEQ ID NO: 340 - DNA, 20 bp, Homo sapiens
  source 1..20: mol_type = genomic DNA; note = Gene: PARP1; note = Orientation (relative to transcription): sense; note = sgRNA Position: 226408053; note = Sequence Name: 56322-704_101_SL_seq_340
ggccggtgcggcgtgttcgg

SEQ ID NO: 341 - DNA, 20 bp, Homo sapiens
  source 1..20: mol_type = genomic DNA; note = Gene: PARP1; note = Orientation (relative to transcription): antisense; note = sgRNA Position: 226408062; note = Sequence Name: 56322-704_101_SL_seq_341
cgccaccgaacacgccgcac

SEQ ID NO: 342 - DNA, 20 bp, Homo sapiens
  source 1..20: mol_type = genomic DNA; note = Gene: PARP1; note = Orientation (relative to transcription): sense; note = sgRNA Position: 226408050; note = Sequence Name: 56322-704_101_SL_seq_342
cggtgcggcgtgttcggtgg

SEQ ID NO: 343 - DNA, 20 bp, Homo sapiens
  source 1..20: mol_type = genomic DNA; note = Gene: PARP1; note = Orientation (relative to transcription): sense; note = sgRNA Position: 226408026; note = Sequence Name: 56322-704_101_SL_seq_343
tctggccgctcaggcgcctg

SEQ ID NO: 344 - DNA, 20 bp, Homo sapiens
  source 1..20: mol_type = genomic DNA; note = Gene: PARP1; note = Orientation (relative to transcription): sense; note = sgRNA Position: 226408065; note = Sequence Name: 56322-704_101_SL_seq_344
gggaacggcggtggccggtg

SEQ ID NO: 345 - DNA, 20 bp, Homo sapiens
  source 1..20: mol_type = genomic DNA; note = Gene: PARP2; note = Orientation (relative to transcription): sense; note = sgRNA Position: 20343671; note = Sequence Name: 56322-704_101_SL_seq_345
cggcgacggagcaccggcgg

SEQ ID NO: 346 - DNA, 20 bp, Homo sapiens
  source 1..20: mol_type = genomic DNA; note = Gene: PARP2; note = Orientation (relative to transcription): sense; note = sgRNA Position: 20343676; note = Sequence Name: 56322-704_101_SL_seq_346
acggagcaccggcggcggca

SEQ ID NO: 347 - DNA, 20 bp, Homo sapiens
  source 1..20: mol_type = genomic DNA; note = Gene: PARP2; note = Orientation (relative to transcription): sense; note = sgRNA Position: 20343668; note = Sequence Name: 56322-704_101_SL_seq_347
cggcggcgacggagcaccgg

SEQ ID NO: 348 - DNA, 20 bp, Homo sapiens
  source 1..20: mol_type = genomic DNA; note = Gene: PARP2; note = Orientation (relative to transcription): sense; note = sgRNA Position: 20343688; note = Sequence Name: 56322-704_101_SL_seq_348
cggcggcagggcgagaggtt

SEQ ID NO: 349 - DNA, 20 bp, Homo sapiens
  source 1..20: mol_type = genomic DNA; note = Gene: PARP2; note = Orientation (relative to transcription): sense; note = sgRNA Position: 20343683; note = Sequence Name: 56322-704_101_SL_seq_349
accggcggcggcagggcgag

SEQ ID NO: 350 - DNA, 20 bp, Homo sapiens
  source 1..20: mol_type = genomic DNA; note = Gene: PARP3; note = Orientation (relative to transcription): antisense; note = sgRNA Position: 51942434; note = Sequence Name: 56322-704_101_SL_seq_350
atctggcatatccaaggccg

SEQ ID NO: 351 - DNA, 20 bp, Homo sapiens
  source 1..20: mol_type = genomic DNA; note = Gene: PARP3; note = Orientation (relative to transcription): antisense; note = sgRNA Position: 51942440; note = Sequence Name: 56322-704_101_SL_seq_351
cactcgatctggcatatcca

SEQ ID NO: 352 - DNA, 20 bp, Homo sapiens
  source 1..20: mol_type = genomic DNA; note = Gene: PARP3; note = Orientation (relative to transcription): sense; note = sgRNA Position: 51942413; note = Sequence Name: 56322-704_101_SL_seq_352
cggccacatgagcagcgcta

SEQ ID NO: 353 - DNA, 20 bp, Homo sapiens
  source 1..20: mol_type = genomic DNA; note = Gene: PARP3; note = Orientation (relative to transcription): antisense; note = sgRNA Position: 51942405; note = Sequence Name: 56322-704_101_SL_seq_353
cgtccgtagcgctgctcatg

SEQ ID NO: 354 - DNA, 20 bp, Homo sapiens
  source 1..20: mol_type = genomic DNA; note = Gene: PARP3; note = Orientation (relative to transcription): antisense; note = sgRNA Position: 51942451; note = Sequence Name: 56322-704_101_SL_seq_354
ggacgggtggacactcgatc

SEQ ID NO: 355 - DNA, 20 bp, Homo sapiens
  source 1..20: mol_type = genomic DNA; note = Gene: PDGFRA; note = Orientation (relative to transcription): antisense; note = sgRNA Position: 54229359; note = Sequence Name: 56322-704_101_SL_seq_355
tggagtaaagagcgtgccca

SEQ ID NO: 356 - DNA, 20 bp, Homo sapiens
  source 1..20: mol_type = genomic DNA; note = Gene: PDGFRA; note = Orientation (relative to transcription): sense; note = sgRNA Position: 54229347; note = Sequence Name: 56322-704_101_SL_seq_356
agactgcaagagatcattgg

SEQ ID NO: 357 - DNA, 20 bp, Homo sapiens
  source 1..20: mol_type = genomic DNA; note = Gene: PDGFRA; note = Orientation (relative to transcription): sense; note = sgRNA Position: 54229354; note = Sequence Name: 56322-704_101_SL_seq_357
aagagatcattggaggccgt

SEQ ID NO: 358 - DNA, 20 bp, Homo sapiens
  source 1..20: mol_type = genomic DNA; note = Gene: PDGFRA; note = Orientation (relative to transcription): sense; note = sgRNA Position: 54229344; note = Sequence Name: 56322-704_101_SL_seq_358
aggagactgcaagagatcat

SEQ ID NO: 359 - DNA, 20 bp, Homo sapiens
  source 1..20: mol_type = genomic DNA; note = Gene: PDGFRA; note = Orientation (relative to transcription): sense; note = sgRNA Position: 54229321; note = Sequence Name: 56322-704_101_SL_seq_359
agctacagggagagaaacag

SEQ ID NO: 360 - DNA, 20 bp, Homo sapiens
  source 1..20: mol_type = genomic DNA; note = Gene: PDGFRB; note = Orientation (relative to transcription): sense; note = sgRNA Position: 150155791; note = Sequence Name: 56322-704_101_SL_seq_360
ggatcgctctgtgagcaact

SEQ ID NO: 361 - DNA, 20 bp, Homo sapiens
  source 1..20: mol_type = genomic DNA; note = Gene: PDGFRB; note = Orientation (relative to transcription): antisense; note = sgRNA Position: 150155806; note = Sequence Name: 56322-704_101_SL_seq_361
gttgctcacagagcgatcct

SEQ ID NO: 362 - DNA, 20 bp, Homo sapiens
  source 1..20: mol_type = genomic DNA; note = Gene: PDGFRB; note = Orientation (relative to transcription): sense; note = sgRNA Position: 150155780; note = Sequence Name: 56322-704_101_SL_seq_362
tgagcaacttggagccagag

SEQ ID NO: 363 - DNA, 20 bp, Homo sapiens
  source 1..20: mol_type = genomic DNA; note = Gene: PDGFRB; note = Orientation (relative to transcription): antisense; note = sgRNA Position: 150155821; note = Sequence Name: 56322-704_101_SL_seq_363
atcctgggtcccagataggg

SEQ ID NO: 364 - DNA, 20 bp, Homo sapiens
  source 1..20: mol_type = genomic DNA; note = Gene: PDGFRB; note = Orientation (relative to transcription): antisense; note = sgRNA Position: 150155818; note = Sequence Name: 56322-704_101_SL_seq_364
gcgatcctgggtcccagata

SEQ ID NO: 365 - DNA, 20 bp, Homo sapiens
  source 1..20: mol_type = genomic DNA; note = Gene: PIK3CA; note = Orientation (relative to transcription): antisense; note = sgRNA Position: 179148385; note = Sequence Name: 56322-704_101_SL_seq_365
gcagcagcccgacacctcag

SEQ ID NO: 366 - DNA, 20 bp, Homo sapiens
  source 1..20: mol_type = genomic DNA; note = Gene: PIK3CA; note = Orientation (relative to transcription): antisense; note = sgRNA Position: 179148416; note = Sequence Name: 56322-704_101_SL_seq_366
ggccccagccccagtcccag

SEQ ID NO: 367 - DNA, 20 bp, Homo sapiens
  source 1..20: mol_type = genomic DNA; note = Gene: PIK3CA; note = Orientation (relative to transcription): sense; note = sgRNA Position: 179148404; note = Sequence Name: 56322-704_101_SL_seq_367
gtgtcgggctgctgctgccg

SEQ ID NO: 368 - DNA, 20 bp, Homo sapiens
  source 1..20: mol_type = genomic DNA; note = Gene: PIK3CA; note = Orientation (relative to transcription): sense; note = sgRNA Position: 179148389; note = Sequence Name: 56322-704_101_SL_seq_368
gctgcggccgctgaggtgtc

SEQ ID NO: 369 - DNA, 20 bp, Homo sapiens
  source 1..20: mol_type = genomic DNA; note = Gene: PIK3CA; note = Orientation (relative to transcription): antisense; note = sgRNA Position: 179148410; note = Sequence Name: 56322-704_101_SL_seq_369
agccccagtcccagcggccg

SEQ ID NO: 370 - DNA, 20 bp, Homo sapiens
  source 1..20: mol_type = genomic DNA; note = Gene: PSMB5; note = Orientation (relative to transcription): sense; note = sgRNA Position: 23034838; note = Sequence Name: 56322-704_101_SL_seq_370
ccgctaccggtgaaccagcg

SEQ ID NO: 371 - DNA, 20 bp, Homo sapiens
  source 1..20: mol_type = genomic DNA; note = Gene: PSMB5; note = Orientation (relative to transcription): sense; note = sgRNA Position: 23034837; note = Sequence Name: 56322-704_101_SL_seq_371
cgctaccggtgaaccagcgc

SEQ ID NO: 372 - DNA, 20 bp, Homo sapiens
  source 1..20: mol_type = genomic DNA; note = Gene: PSMB5; note = Orientation (relative to transcription): sense; note = sgRNA Position: 23034851; note = Sequence Name: 56322-704_101_SL_seq_372
cgtgttggagagaccgctac

SEQ ID NO: 373 - DNA, 20 bp, Homo sapiens
  source 1..20: mol_type = genomic DNA; note = Gene: PSMB5; note = Orientation (relative to transcription): antisense; note = sgRNA Position: 23034849; note = Sequence Name: 56322-704_101_SL_seq_373
ccgcgctggttcaccggtag

SEQ ID NO: 374 - DNA, 20 bp, Homo sapiens
  source 1..20: mol_type = genomic DNA; note = Gene: PSMB5; note = Orientation (relative to transcription): antisense; note = sgRNA Position: 23034843; note = Sequence Name: 56322-704_101_SL_seq_374
aaaaacccgcgctggttcac

SEQ ID NO: 375 - DNA, 20 bp, Homo sapiens
  source 1..20: mol_type = genomic DNA; note = Gene: RAD51C; note = Orientation (relative to transcription): sense; note = sgRNA Position: 58692674; note = Sequence Name: 56322-704_101_SL_seq_375
cgttccgctttgaaatgcag

SEQ ID NO: 376 - DNA, 20 bp, Homo sapiens
  source 1..20: mol_type = genomic DNA; note = Gene: RAD51C; note = Orientation (relative to transcription): sense; note = sgRNA Position: 58692646; note = Sequence Name: 56322-704_101_SL_seq_376
gcaggtgagcctgcgatgcg

SEQ ID NO: 377 - DNA, 20 bp, Homo sapiens
  source 1..20: mol_type = genomic DNA; note = Gene: RAD51C; note = Orientation (relative to transcription): antisense; note = sgRNA Position: 58692667; note = Sequence Name: 56322-704_101_SL_seq_377
aatcccgctgcatttcaaag

SEQ ID NO: 378 - DNA, 20 bp, Homo sapiens
  source 1..20: mol_type = genomic DNA; note = Gene: RAD51C; note = Orientation (relative to transcription): sense; note = sgRNA Position: 58692675; note = Sequence Name: 56322-704_101_SL_seq_378
gttccgctttgaaatgcagc

SEQ ID NO: 379 - DNA, 20 bp, Homo sapiens
  source 1..20: mol_type = genomic DNA; note = Gene: RAD51C; note = Orientation (relative to transcription): sense; note = sgRNA Position: 58692647; note = Sequence Name: 56322-704_101_SL_seq_379
caggtgagcctgcgatgcgc

SEQ ID NO: 380 - DNA, 20 bp, Homo sapiens
  source 1..20: mol_type = genomic DNA; note = Gene: RAD51D; note = Orientation (relative to transcription): antisense; note = sgRNA Position: 35119766; note = Sequence Name: 56322-704_101_SL_seq_380
agaggaggaggcggcaccaa

SEQ ID NO: 381 - DNA, 20 bp, Homo sapiens
  source 1..20: mol_type = genomic DNA; note = Gene: RAD51D; note = Orientation (relative to transcription): antisense; note = sgRNA Position: 35119771; note = Sequence Name: 56322-704_101_SL_seq_381
aggaggcggcaccaagggta

SEQ ID NO: 382 - DNA, 20 bp, Homo sapiens
  source 1..20: mol_type = genomic DNA; note = Gene: RAD51D; note = Orientation (relative to transcription): antisense; note = sgRNA Position: 35119770; note = Sequence Name: 56322-704_101_SL_seq_382
gaggaggcggcaccaagggt

SEQ ID NO: 383 - DNA, 20 bp, Homo sapiens
  source 1..20: mol_type = genomic DNA; note = Gene: RAD51D; note = Orientation (relative to transcription): antisense; note = sgRNA Position: 35119748; note = Sequence Name: 56322-704_101_SL_seq_383
tgccggaggagaaaggagag

SEQ ID NO: 384 - DNA, 20 bp, Homo sapiens
  source 1..20: mol_type = genomic DNA; note = Gene: RAD51D; note = Orientation (relative to transcription): antisense; note = sgRNA Position: 35119776; note = Sequence Name: 56322-704_101_SL_seq_384
gcggcaccaagggtagggct

SEQ ID NO: 385 - DNA, 20 bp, Homo sapiens
  source 1..20: mol_type = genomic DNA; note = Gene: RAF1; note = Orientation (relative to transcription): sense; note = sgRNA Position: 12664060; note = Sequence Name: 56322-704_101_SL_seq_385
agaggaaaacgattgtgagg

SEQ ID NO: 386 - DNA, 20 bp, Homo sapiens
  source 1..20: mol_type = genomic DNA; note = Gene: RAF1; note = Orientation (relative to transcription): sense; note = sgRNA Position: 12664063; note = Sequence Name: 56322-704_101_SL_seq_386
gtaagaggaaaacgattgtg

SEQ ID NO: 387 - DNA, 20 bp, Homo sapiens
  source 1..20: mol_type = genomic DNA; note = Gene: RAF1; note = Orientation (relative to transcription): sense; note = sgRNA Position: 12664088; note = Sequence Name: 56322-704_101_SL_seq_387
tgggccgccatcttagatgg

SEQ ID NO: 388 - DNA, 20 bp, Homo sapiens
  source 1..20: mol_type = genomic DNA; note = Gene: RAF1; note = Orientation (relative to transcription): sense; note = sgRNA Position: 12664078; note = Sequence Name: 56322-704_101_SL_seq_388
tcttagatggcgggagtaag

SEQ ID NO: 389 - DNA, 20 bp, Homo sapiens
  source 1..20: mol_type = genomic DNA; note = Gene: RAF1; note = Orientation (relative to transcription): sense; note = sgRNA Position: 12664054; note = Sequence Name: 56322-704_101_SL_seq_389
aaacgattgtgaggcgggaa

SEQ ID NO: 390 - DNA, 20 bp, Homo sapiens
  source 1..20: mol_type = genomic DNA; note = Gene: RET; note = Orientation (relative to transcription): antisense; note = sgRNA Position: 43077134; note = Sequence Name: 56322-704_101_SL_seq_390
gcggacgcgacggacactgg

SEQ ID NO: 391 - DNA, 20 bp, Homo sapiens
  source 1..20: mol_type = genomic DNA; note = Gene: RET; note = Orientation (relative to transcription): antisense; note = sgRNA Position: 43077115; note = Sequence Name: 56322-704_101_SL_seq_391
ggggcgcgacgcacgttccg

SEQ ID NO: 392 - DNA, 20 bp, Homo sapiens
  source 1..20: mol_type = genomic DNA; note = Gene: RET; note = Orientation (relative to transcription): antisense; note = sgRNA Position: 43077135; note = Sequence Name: 56322-704_101_SL_seq_392
ggcggacgcgacggacactg

SEQ ID NO: 393 - DNA, 20 bp, Homo sapiens
  source 1..20: mol_type = genomic DNA; note = Gene: RET; note = Orientation (relative to transcription): antisense; note = sgRNA Position: 43077116; note = Sequence Name: 56322-704_101_SL_seq_393
gggggcgcgacgcacgttcc

SEQ ID NO: 394 - DNA, 20 bp, Homo sapiens
  source 1..20: mol_type = genomic DNA; note = Gene: RET; note = Orientation (relative to transcription): antisense; note = sgRNA Position: 43077117; note = Sequence Name: 56322-704_101_SL_seq_394
tgggggcgcgacgcacgttc

SEQ ID NO: 395 - DNA, 20 bp, Homo sapiens
  source 1..20: mol_type = genomic DNA; note = Gene: ROS1; note = Orientation (relative to transcription): sense; note = sgRNA Position: 117425670; note = Sequence Name: 56322-704_101_SL_seq_395
gccatctaaaaatctgccat

SEQ ID NO: 396 - DNA, 20 bp, Homo sapiens
  source 1..20: mol_type = genomic DNA; note = Gene: ROS1; note = Orientation (relative to transcription): antisense; note = sgRNA Position: 117425665; note = Sequence Name: 56322-704_101_SL_seq_396
gttcttcatcacttcaccaa

SEQ ID NO: 397 - DNA, 20 bp, Homo sapiens
  source 1..20: mol_type = genomic DNA; note = Gene: ROS1; note = Orientation (relative to transcription): sense; note = sgRNA Position: 117425840; note = Sequence Name: 56322-704_101_SL_seq_397
acaagctttcaagcattcaa

SEQ ID NO: 398 - DNA, 20 bp, Homo sapiens
  source 1..20: mol_type = genomic DNA; note = Gene: ROS1; note = Orientation (relative to transcription): sense; note = sgRNA Position: 117425805; note = Sequence Name: 56322-704_101_SL_seq_398
aggctaagtattatttcaaa

SEQ ID NO: 399 - DNA, 20 bp, Homo sapiens
  source 1..20: mol_type = genomic DNA; note = Gene: ROS1; note = Orientation (relative to transcription): sense; note = sgRNA Position: 117425825; note = Sequence Name: 56322-704_101_SL_seq_399
ttcaaaggtctaaatgaaaa

SEQ ID NO: 400 - DNA, 20 bp, Homo sapiens
  source 1..20: mol_type = genomic DNA; note = Gene: RPL3; note = Orientation (relative to transcription): antisense; note = sgRNA Position: 39319556; note = Sequence Name: 56322-704_101_SL_seq_400
ggattcagccgtgccgacgc

SEQ ID NO: 401 - DNA, 20 bp, Homo sapiens
  source 1..20: mol_type = genomic DNA; note = Gene: RPL3; note = Orientation (relative to transcription): sense; note = sgRNA Position: 39319558; note = Sequence Name: 56322-704_101_SL_seq_401
cgtttcattgtcaccggcgt

SEQ ID NO: 402 - DNA, 20 bp, Homo sapiens
  source 1..20: mol_type = genomic DNA; note = Gene: RPL3; note = Orientation (relative to transcription): sense; note = sgRNA Position: 39319553; note = Sequence Name: 56322-704_101_SL_seq_402
cattgtcaccggcgtcggca

SEQ ID NO: 403 - DNA, 20 bp, Homo sapiens
  source 1..20: mol_type = genomic DNA; note = Gene: RPL3; note = Orientation (relative to transcription): sense; note = sgRNA Position: 39319585; note = Sequence Name: 56322-704_101_SL_seq_403
cgtgatggtatgtgttgtaa

SEQ ID NO: 404 - DNA, 20 bp, Homo sapiens
  source 1..20: mol_type = genomic DNA; note = Gene: RPL3; note = Orientation (relative to transcription): sense; note = sgRNA Position: 39319582; note = Sequence Name: 56322-704_101_SL_seq_404
gatggtatgtgttgtaatgg

SEQ ID NO: 405 - DNA, 20 bp, Homo sapiens
  source 1..20: mol_type = genomic DNA; note = Gene: SF3B1; note = Orientation (relative to transcription): sense; note = sgRNA Position: 197434977; note = Sequence Name: 56322-704_101_SL_seq_405
aagatcgccaagactcacga

SEQ ID NO: 406 - DNA, 20 bp, Homo sapiens
  source 1..20: mol_type = genomic DNA; note = Gene: SF3B1; note = Orientation (relative to transcription): antisense; note = sgRNA Position: 197434953; note = Sequence Name: 56322-704_101_SL_seq_406
acgaagaaaacacgtaagca

SEQ ID NO: 407 - DNA, 20 bp, Homo sapiens
  source 1..20: mol_type = genomic DNA; note = Gene: SF3B1; note = Orientation (relative to transcription): antisense; note = sgRNA Position: 197434981; note = Sequence Name: 56322-704_101_SL_seq_407
ccgcttaccttcgtgagtct

SEQ ID NO: 408 - DNA, 20 bp, Homo sapiens
  source 1..20: mol_type = genomic DNA; note = Gene: SF3B1; note = Orientation (relative to transcription): sense; note = sgRNA Position: 197434970; note = Sequence Name: 56322-704_101_SL_seq_408
ccaagactcacgaaggtaag

SEQ ID NO: 409 - DNA, 20 bp, Homo sapiens
  source 1..20: mol_type = genomic DNA; note = Gene: SF3B1; note = Orientation (relative to transcription): sense; note = sgRNA Position: 197435002; note = Sequence Name: 56322-704_101_SL_seq_409
gtgtgttcgagtggacaaaa

SEQ ID NO: 410 - DNA, 20 bp, Homo sapiens
  source 1..20: mol_type = genomic DNA; note = Gene: SMARCB1; note = Orientation (relative to transcription): sense; note = sgRNA Position: 23787003; note = Sequence Name: 56322-704_101_SL_seq_410
ggcggcctggtcgtcgtctg

SEQ ID NO: 411 - DNA, 20 bp, Homo sapiens
  source 1..20: mol_type = genomic DNA; note = Gene: SMARCB1; note = Orientation (relative to transcription): sense; note = sgRNA Position: 23787006; note = Sequence Name: 56322-704_101_SL_seq_411
ggcctggtcgtcgtctgcgg

SEQ ID NO: 412 - DNA, 20 bp, Homo sapiens
  source 1..20: mol_type = genomic DNA; note = Gene: SMARCB1; note = Orientation (relative to transcription): sense; note = sgRNA Position: 23787047; note = Sequence Name: 56322-704_101_SL_seq_412
ccggctgaggcgccagtacc

SEQ ID NO: 413 - DNA, 20 bp, Homo sapiens
  source 1..20: mol_type = genomic DNA; note = Gene: SMARCB1; note = Orientation (relative to transcription): sense; note = sgRNA Position: 23787009; note = Sequence Name: 56322-704_101_SL_seq_413
ctggtcgtcgtctgcggcgg

SEQ ID NO: 414 - DNA, 20 bp, Homo sapiens
  source 1..20: mol_type = genomic DNA; note = Gene: SMARCB1; note = Orientation (relative to transcription): antisense; note = sgRNA Position: 23787035; note = Sequence Name: 56322-704_101_SL_seq_414
cgggtactggcgcctcagcc

SEQ ID NO: 415 - DNA, 20 bp, Homo sapiens
  source 1..20: mol_type = genomic DNA; note = Gene: SMO; note = Orientation (relative to transcription): sense; note = sgRNA Position: 129188830; note = Sequence Name: 56322-704_101_SL_seq_415
gtggctttaatggtgggaga

SEQ ID NO: 416 - DNA, 20 bp, Homo sapiens
  source 1..20: mol_type = genomic DNA; note = Gene: SMO; note = Orientation (relative to transcription): sense; note = sgRNA Position: 129188824; note = Sequence Name: 56322-704_101_SL_seq_416
ggggaggtggctttaatggt

SEQ ID NO: 417 - DNA, 20 bp, Homo sapiens
  source 1..20: mol_type = genomic DNA; note = Gene: SMO; note = Orientation (relative to transcription): sense; note = sgRNA Position: 129188837; note = Sequence Name: 56322-704_101_SL_seq_417
taatggtgggagagggaatg

SEQ ID NO: 418 - DNA, 20 bp, Homo sapiens
  source 1..20: mol_type = genomic DNA; note = Gene: SMO; note = Orientation (relative to transcription): sense; note = sgRNA Position: 129188859; note = Sequence Name: 56322-704_101_SL_seq_418
gctggggattgggggcccag

SEQ ID NO: 419 - DNA, 20 bp, Homo sapiens
  source 1..20: mol_type = genomic DNA; note = Gene: SMO; note = Orientation (relative to transcription): sense; note = sgRNA Position: 129188858; note = Sequence Name: 56322-704_101_SL_seq_419
ggctggggattgggggccca

SEQ ID NO: 420 - DNA, 20 bp, Homo sapiens
  source 1..20: mol_type = genomic DNA; note = Gene: SRSF2; note = Orientation (relative to transcription): antisense; note = sgRNA Position: 76737290; note = Sequence Name: 56322-704_101_SL_seq_420
ggccttgccgcagaacagca

SEQ ID NO: 421 - DNA, 20 bp, Homo sapiens
  source 1..20: mol_type = genomic DNA; note = Gene: SRSF2; note = Orientation (relative to transcription): antisense; note = sgRNA Position: 76737294; note = Sequence Name: 56322-704_101_SL_seq_421
ttgccgcagaacagcacgga

SEQ ID NO: 422 - DNA, 20 bp, Homo sapiens
  source 1..20: mol_type = genomic DNA; note = Gene: SRSF2; note = Orientation (relative to transcription): sense; note = sgRNA Position: 76737286; note = Sequence Name: 56322-704_101_SL_seq_422
agcccgtccgtgctgttctg

SEQ ID NO: 423 - DNA, 20 bp, Homo sapiens
  source 1..20: mol_type = genomic DNA; note = Gene: SRSF2; note = Orientation (relative to transcription): antisense; note = sgRNA Position: 76737295; note = Sequence Name: 56322-704_101_SL_seq_423
tgccgcagaacagcacggac

SEQ ID NO: 424 - DNA, 20 bp, Homo sapiens
  source 1..20: mol_type = genomic DNA; note = Gene: SRSF2; note = Orientation (relative to transcription): sense; note = sgRNA Position: 76737258; note = Sequence Name: 56322-704_101_SL_seq_424
cctttcccagtgtccccacg

SEQ ID NO: 425 - DNA, 20 bp, Homo sapiens
  source 1..20: mol_type = genomic DNA; note = Gene: TGFBR1; note = Orientation (relative to transcription): sense; note = sgRNA Position: 99105146; note = Sequence Name: 56322-704_101_SL_seq_425
gggcgaggcgaggtttgctg

SEQ ID NO: 426 - DNA, 20 bp, Homo sapiens
  source 1..20: mol_type = genomic DNA; note = Gene: TGFBR1; note = Orientation (relative to transcription): sense; note = sgRNA Position: 99105157; note = Sequence Name: 56322-704_101_SL_seq_426
ggtttgctggggtgaggcag

SEQ ID NO: 427 - DNA, 20 bp, Homo sapiens
  source 1..20: mol_type = genomic DNA; note = Gene: TGFBR1; note = Orientation (relative to transcription): sense; note = sgRNA Position: 99105145; note = Sequence Name: 56322-704_101_SL_seq_427
ggggcgaggcgaggtttgct

SEQ ID NO: 428 - DNA, 20 bp, Homo sapiens
  source 1..20: mol_type = genomic DNA; note = Gene: TGFBR1; note = Orientation (relative to transcription): antisense; note = sgRNA Position: 99105184; note = Sequence Name: 56322-704_101_SL_seq_428
cgccgccaccgcctgtggcc

SEQ ID NO: 429 - DNA, 20 bp, Homo sapiens
  source 1..20: mol_type = genomic DNA; note = Gene: TGFBR1; note = Orientation (relative to transcription): antisense; note = sgRNA Position: 99105189; note = Sequence Name: 56322-704_101_SL_seq_429
ggtcccgccgccaccgcctg

SEQ ID NO: 430 - DNA, 20 bp, Homo sapiens
  source 1..20: mol_type = genomic DNA; note = Gene: TOP2A; note = Orientation (relative to transcription): antisense; note = sgRNA Position: 40417838; note = Sequence Name: 56322-704_101_SL_seq_430
ctgaaagcgactaaacaggc

SEQ ID NO: 431 - DNA, 20 bp, Homo sapiens
  source 1..20: mol_type = genomic DNA; note = Gene: TOP2A; note = Orientation (relative to transcription): antisense; note = sgRNA Position: 40417834; note = Sequence Name: 56322-704_101_SL_seq_431
aaccctgaaagcgactaaac

SEQ ID NO: 432 - DNA, 20 bp, Homo sapiens
  source 1..20: mol_type = genomic DNA; note = Gene: TOP2A; note = Orientation (relative to transcription): sense; note = sgRNA Position: 40417851; note = Sequence Name: 56322-704_101_SL_seq_432
tggtcgggggtggtctcgtg

SEQ ID NO: 433 - DNA, 20 bp, Homo sapiens
  source 1..20: mol_type = genomic DNA; note = Gene: TOP2A; note = Orientation (relative to transcription): sense; note = sgRNA Position: 40417825; note = Sequence Name: 56322-704_101_SL_seq_433
tgcctgtttagtcgctttca

SEQ ID NO: 434 - DNA, 20 bp, Homo sapiens
  source 1..20: mol_type = genomic DNA; note = Gene: TOP2A; note = Orientation (relative to transcription): sense; note = sgRNA Position: 40417852; note = Sequence Name: 56322-704_101_SL_seq_434
ttggtcgggggtggtctcgt

SEQ ID NO: 435 - DNA, 20 bp, Homo sapiens
  source 1..20: mol_type = genomic DNA; note = Gene: TSC1; note = Orientation (relative to transcription): sense; note = sgRNA Position: 132944561; note = Sequence Name: 56322-704_101_SL_seq_435
tgtgaggtaaacagctgagg

SEQ ID NO: 436 - DNA, 20 bp, Homo sapiens
  source 1..20: mol_type = genomic DNA; note = Gene: TSC1; note = Orientation (relative to transcription): sense; note = sgRNA Position: 132944564; note = Sequence Name: 56322-704_101_SL_seq_436
gactgtgaggtaaacagctg

SEQ ID NO: 437 - DNA, 20 bp, Homo sapiens
  source 1..20: mol_type = genomic DNA; note = Gene: TSC1; note = Orientation (relative to transcription): sense; note = sgRNA Position: 132944562; note = Sequence Name: 56322-704_101_SL_seq_437
ctgtgaggtaaacagctgag

SEQ ID NO: 438 - DNA, 20 bp, Homo sapiens
  source 1..20: mol_type = genomic DNA; note = Gene: TSC1; note = Orientation (relative to transcription): sense; note = sgRNA Position: 132944563; note = Sequence Name: 56322-704_101_SL_seq_438
actgtgaggtaaacagctga

SEQ ID NO: 439 - DNA, 20 bp, Homo sapiens
  source 1..20: mol_type = genomic DNA; note = Gene: TSC1; note = Orientation (relative to transcription): antisense; note = sgRNA Position: 132944590; note = Sequence Name: 56322-704_101_SL_seq_439
tcacagtccctccagcctac

SEQ ID NO: 440 - DNA, 20 bp, Homo sapiens
  source 1..20: mol_type = genomic DNA; note = Gene: TSC2; note = Orientation (relative to transcription): sense; note = sgRNA Position: 2048031; note = Sequence Name: 56322-704_101_SL_seq_440
gtgcgcctttctccgcgtcg

SEQ ID NO: 441 - DNA, 20 bp, Homo sapiens
  source 1..20: mol_type = genomic DNA; note = Gene: TSC2; note = Orientation (relative to transcription): sense; note = sgRNA Position: 2048029; note = Sequence Name: 56322-704_101_SL_seq_441
gggtgcgcctttctccgcgt

SEQ ID NO: 442 - DNA, 20 bp, Homo sapiens
  source 1..20: mol_type = genomic DNA; note = Gene: TSC2; note = Orientation (relative to transcription): sense; note = sgRNA Position: 2048034; note = Sequence Name: 56322-704_101_SL_seq_442
cgcctttctccgcgtcgggg

SEQ ID NO: 443 - DNA, 20 bp, Homo sapiens
  source 1..20: mol_type = genomic DNA; note = Gene: TSC2; note = Orientation (relative to transcription): antisense; note = sgRNA Position: 2048012; note = Sequence Name: 56322-704_101_SL_seq_443
cggagaaaggcgcacccccc

SEQ ID NO: 444 - DNA, 20 bp, Homo sapiens
  source 1..20: mol_type = genomic DNA; note = Gene: TSC2; note = Orientation (relative to transcription): antisense; note = sgRNA Position: 2048032; note = Sequence Name: 56322-704_101_SL_seq_444
cgctccgggccgccccgacg

SEQ ID NO: 445 - DNA, 20 bp, Homo sapiens
  source 1..20: mol_type = genomic DNA; note = Gene: TUBG1; note = Orientation (relative to transcription): antisense; note = sgRNA Position: 42609747; note = Sequence Name: 56322-704_101_SL_seq_445
tgtagggtgatgatttccct

SEQ ID NO: 446 - DNA, 20 bp, Homo sapiens
  source 1..20: mol_type = genomic DNA; note = Gene: TUBG1; note = Orientation (relative to transcription): sense; note = sgRNA Position: 42609742; note = Sequence Name: 56322-704_101_SL_seq_446
tgcctgaggagcgatgccga

SEQ ID NO: 447 - DNA, 20 bp, Homo sapiens
  source 1..20: mol_type = genomic DNA; note = Gene: TUBG1; note = Orientation (relative to transcription): antisense; note = sgRNA Position: 42609727; note = Sequence Name: 56322-704_101_SL_seq_447
cggcatcgctcctcaggcac

SEQ ID NO: 448 - DNA, 20 bp, Homo sapiens
  source 1..20: mol_type = genomic DNA; note = Gene: TUBG1; note = Orientation (relative to transcription): sense; note = sgRNA Position: 42609741; note = Sequence Name: 56322-704_101_SL_seq_448
gtgcctgaggagcgatgccg

SEQ ID NO: 449 - DNA, 20 bp, Homo sapiens
  source 1..20: mol_type = genomic DNA; note = Gene: TUBG1; note = Orientation (relative to transcription): sense; note = sgRNA Position: 42609728; note = Sequence Name: 56322-704_101_SL_seq_449
ggctgcaacgccggtgcctg

SEQ ID NO: 450 - DNA, 20 bp, Homo sapiens
  source 1..20: mol_type = genomic DNA; note = Gene: U2AF1; note = Orientation (relative to transcription): sense; note = sgRNA Position: 43107523; note = Sequence Name: 56322-704_101_SL_seq_450
ggcgtcggcagcagtgtcga

SEQ ID NO: 451 - DNA, 20 bp, Homo sapiens
  source 1..20: mol_type = genomic DNA; note = Gene: U2AF1; note = Orientation (relative to transcription): sense; note = sgRNA Position: 43107517; note = Sequence Name: 56322-704_101_SL_seq_451
ggcagcagtgtcgacggcag

SEQ ID NO: 452 - DNA, 20 bp, Homo sapiens
  source 1..20: mol_type = genomic DNA; note = Gene: U2AF1; note = Orientation (relative to transcription): sense; note = sgRNA Position: 43107514; note = Sequence Name: 56322-704_101_SL_seq_452
agcagtgtcgacggcagcgg

SEQ ID NO: 453 - DNA, 20 bp, Homo sapiens
  source 1..20: mol_type = genomic DNA; note = Gene: U2AF1; note = Orientation (relative to transcription): sense; note = sgRNA Position: 43107503; note = Sequence Name: 56322-704_101_SL_seq_453
cggcagcggcggcggcgggt

SEQ ID NO: 454 - DNA, 20 bp, Homo sapiens
  source 1..20: mol_type = genomic DNA; note = Gene: U2AF1; note = Orientation (relative to transcription): sense; note = sgRNA Position: 43107494; note = Sequence Name: 56322-704_101_SL_seq_454
cggcggcgggtgggaaatgg

SEQ ID NO: 455 - DNA, 20 bp, Homo sapiens
  source 1..20: mol_type = genomic DNA; note = Gene: ZRSR2; note = Orientation (relative to transcription): sense; note = sgRNA Position: 15790548; note = Sequence Name: 56322-704_101_SL_seq_455
accaaggtaagcgccgtacg

SEQ ID NO: 456 - DNA, 20 bp, Homo sapiens
  source 1..20: mol_type = genomic DNA; note = Gene: ZRSR2; note = Orientation (relative to transcription): antisense; note = sgRNA Position: 15790550; note = Sequence Name: 56322-704_101_SL_seq_456
cgcctgctcatctccccgta

SEQ ID NO: 457 - DNA, 20 bp, Homo sapiens
  source 1..20: mol_type = genomic DNA; note = Gene: ZRSR2; note = Orientation (relative to transcription): sense; note = sgRNA Position: 15790532; note = Sequence Name: 56322-704_101_SL_seq_457
tgacgtttcccgagaaacca

SEQ ID NO: 458 - DNA, 20 bp, Homo sapiens
  source 1..20: mol_type = genomic DNA; note = Gene: ZRSR2; note = Orientation (relative to transcription): sense; note = sgRNA Position: 15790546; note = Sequence Name: 56322-704_101_SL_seq_458
aaaccaaggtaagcgccgta

SEQ ID NO: 459 - DNA, 20 bp, Homo sapiens
  source 1..20: mol_type = genomic DNA; note = Gene: ZRSR2; note = Orientation (relative to transcription): sense; note = sgRNA Position: 15790547; note = Sequence Name: 56322-704_101_SL_seq_459
aaccaaggtaagcgccgtac

SEQ ID NO: 460 - DNA, 20 bp, Homo sapiens
  source 1..20: mol_type = genomic DNA; note = Gene: ABL1; note = Location (start to end; relative to TSS): ABL1_41_71; note = Orientation (relative to transcription): antisense; note = sgRNA Position: 130835301; note = Sequence Name: 56322-704_101_SL_seq_460
cgcgcgcccgcgcccgccca

SEQ ID NO: 461 - DNA, 20 bp, Homo sapiens
  source 1..20: mol_type = genomic DNA; note = Gene: ABL1; note = Location (start to end; relative to TSS): ABL1_122_152; note = Orientation (relative to transcription): antisense; note = sgRNA Position: 130835382; note = Sequence Name: 56322-704_101_SL_seq_461
ccgcgggcccggctcaggcc

SEQ ID NO: 462 - DNA, 20 bp, Homo sapiens
  source 1..20: mol_type = genomic DNA; note = Gene: ABL1; note = Location (start to end; relative to TSS): ABL1_19_49; note = Orientation (relative to transcription): sense; note = sgRNA Position: 130835299; note = Sequence Name: 56322-704_101_SL_seq_462
gacgcggccgcggccatggg

SEQ ID NO: 463 - DNA, 20 bp, Homo sapiens
  source 1..20: mol_type = genomic DNA; note = Gene: ABL1; note = Location (start to end; relative to TSS): ABL1_117_147; note = Orientation (relative to transcription): antisense; note = sgRNA Position: 130835377; note = Sequence Name: 56322-704_101_SL_seq_463
ggcccggctcaggcccggct

SEQ ID NO: 464 - DNA, 20 bp, Homo sapiens
  source 1..20: mol_type = genomic DNA; note = Gene: ABL1; note = Location (start to end; relative to TSS): ABL1_47_77; note = Orientation (relative to transcription): sense; note = sgRNA Position: 130835327; note = Sequence Name: 56322-704_101_SL_seq_464
ggcgcgcggggcggcggtga

SEQ ID NO: 465 - DNA, 20 bp, Homo sapiens
  source 1..20: mol_type = genomic DNA; note = Gene: ABL1; note = Location (start to end; relative to TSS): ABL1_113_143; note = Orientation (relative to transcription): sense; note = sgRNA Position: 130835393; note = Sequence Name: 56322-704_101_SL_seq_465
ccgggcctgagccgggcccg

SEQ ID NO: 466 - DNA, 20 bp, Homo sapiens
  source 1..20: mol_type = genomic DNA; note = Gene: ABL1; note = Location (start to end; relative to TSS): ABL1_14_44; note = Orientation (relative to transcription): antisense; note = sgRNA Position: 130835274; note = Sequence Name: 56322-704_101_SL_seq_466
ggccgcgtctccgcctggcc

SEQ ID NO: 467 - DNA, 20 bp, Homo sapiens
  source 1..20: mol_type = genomic DNA; note = Gene: ABL1; note = Location (start to end; relative to TSS): ABL1_47_77; note = Orientation (relative to transcription): sense; note = sgRNA Position: 130835327; note = Sequence Name: 56322-704_101_SL_seq_467
ggcgcgcggggcggcggtga

SEQ ID NO: 468 - DNA, 20 bp, Homo sapiens
  source 1..20: mol_type = genomic DNA; note = Gene: ABL1; note = Location (start to end; relative to TSS): ABL1_9_39; note = Orientation (relative to transcription): sense; note = sgRNA Position: 130835289; note = Sequence Name: 56322-704_101_SL_seq_468
gccaggcggagacgcggccg

SEQ ID NO: 469 - DNA, 20 bp, Homo sapiens
  source 1..20: mol_type = genomic DNA; note = Gene: ABL1; note = Location (start to end; relative to TSS): ABL1_41_71; note = Orientation (relative to transcription): antisense; note = sgRNA Position: 130835301; note = Sequence Name: 56322-704_101_SL_seq_469
cgcgcgcccgcgcccgccca

SEQ ID NO: 470 - DNA, 20 bp, Homo sapiens
  source 1..20: mol_type = genomic DNA; note = Gene: AKT1; note = Location (start to end; relative to TSS): AKT1_61_91; note = Orientation (relative to transcription): sense; note = sgRNA Position: 104795663; note = Sequence Name: 56322-704_101_SL_seq_470
ggcggccgagcaccgagcgc

SEQ ID NO: 471 - DNA, 20 bp, Homo sapiens
  source 1..20: mol_type = genomic DNA; note = Gene: AKT1; note = Location (start to end; relative to TSS): AKT1_103_133; note = Orientation (relative to transcription): antisense; note = sgRNA Position: 104795641; note = Sequence Name: 56322-704_101_SL_seq_471
cctcgcgtgccgccgccgct

SEQ ID NO: 472 - DNA, 20 bp, Homo sapiens
  source 1..20: mol_type = genomic DNA; note = Gene: AKT1; note = Location (start to end; relative to TSS): AKT1_62_92; note = Orientation (relative to transcription): sense; note = sgRNA Position: 104795662; note = Sequence Name: 56322-704_101_SL_seq_472
gcggccgagcaccgagcgct

SEQ ID NO: 473 - DNA, 20 bp, Homo sapiens
  source 1..20: mol_type = genomic DNA; note = Gene: AKT1; note = Location (start to end; relative to TSS): AKT1_94_124; note = Orientation (relative to transcription): sense; note = sgRNA Position: 104795630; note = Sequence Name: 56322-704_101_SL_seq_473
ccgagcggcggcggcacgcg

SEQ ID NO: 474 - DNA, 20 bp, Homo sapiens
  source 1..20: mol_type = genomic DNA; note = Gene: AKT1; note = Location (start to end; relative to TSS): AKT1_33_63; note = Orientation (relative to transcription): sense; note = sgRNA Position: 104795691; note = Sequence Name: 56322-704_101_SL_seq_474
cacgcagcgcggcccgaaga

SEQ ID NO: 475 - DNA, 20 bp, Homo sapiens
  source 1..20: mol_type = genomic DNA; note = Gene: AKT1; note = Location (start to end; relative to TSS): AKT1_69_99; note = Orientation (relative to transcription): sense; note = sgRNA Position: 104795655; note = Sequence Name: 56322-704_101_SL_seq_475
agcaccgagcgctgggcacc

SEQ ID NO: 476 - DNA, 20 bp, Homo sapiens
  source 1..20: mol_type = genomic DNA; note = Gene: AKT1; note = Location (start to end; relative to TSS): AKT1_22_52; note = Orientation (relative to transcription): sense; note = sgRNA Position: 104795702; note = Sequence Name: 56322-704_101_SL_seq_476
ctggcccagcgcacgcagcg

SEQ ID NO: 477 - DNA, 20 bp, Homo sapiens
  source 1..20: mol_type = genomic DNA; note = Gene: AKT1; note = Location (start to end; relative to TSS): AKT1_62_92; note = Orientation (relative to transcription): sense; note = sgRNA Position: 104795662; note = Sequence Name: 56322-704_101_SL_seq_477
gcggccgagcaccgagcgct

SEQ ID NO: 478 - DNA, 20 bp, Homo sapiens
  source 1..20: mol_type = genomic DNA; note = Gene: AKT1; note = Location (start to end; relative to TSS): AKT1_14_44; note = Orientation (relative to transcription): antisense; note = sgRNA Position: 104795730; note = Sequence Name: 56322-704_101_SL_seq_478
ggccagccgcctgccgcgct

SEQ ID NO: 479 - DNA, 20 bp, Homo sapiens
  source 1..20: mol_type = genomic DNA; note = Gene: AKT1; note = Location (start to end; relative to TSS): AKT1_61_91; note = Orientation (relative to transcription): sense; note = sgRNA Position: 104795663; note = Sequence Name: 56322-704_101_SL_seq_479
ggcggccgagcaccgagcgc

SEQ ID NO: 480 - DNA, 20 bp, Homo sapiens
  source 1..20: mol_type = genomic DNA; note = Gene: ALK; note = Location (start to end; relative to TSS): ALK_42_72; note = Orientation (relative to transcription): sense; note = sgRNA Position: 29921520; note = Sequence Name: 56322-704_101_SL_seq_480
ctcccgccgcctctgttcgg

SEQ ID NO: 481 - DNA, 20 bp, Homo sapiens
  source 1..20: mol_type = genomic DNA; note = Gene: ALK; note = Location (start to end; relative to TSS): ALK_100_130; note = Orientation (relative to transcription): sense; note = sgRNA Position: 29921462; note = Sequence Name: 56322-704_101_SL_seq_481
tggtcggccacccaaagccg

SEQ ID NO: 482 - DNA, 20 bp, Homo sapiens
  source 1..20: mol_type = genomic DNA; note = Gene: ALK; note = Location (start to end; relative to TSS): ALK_43_73; note = Orientation (relative to transcription): sense; note = sgRNA Position: 29921519; note = Sequence Name: 56322-704_101_SL_seq_482
tcccgccgcctctgttcgga

SEQ ID NO: 483 - DNA, 20 bp, Homo sapiens
  source 1..20: mol_type = genomic DNA; note = Gene: ALK; note = Location (start to end; relative to TSS): ALK_85_115; note = Orientation (relative to transcription): antisense; note = sgRNA Position: 29921497; note = Sequence Name: 56322-704_101_SL_seq_483
agggcggccggaaagcacct

SEQ ID NO: 484 - DNA, 20 bp, Homo sapiens
  source 1..20: mol_type = genomic DNA; note = Gene: ALK; note = Location (start to end; relative to TSS): ALK_39_69; note = Orientation (relative to transcription): sense; note = sgRNA Position: 29921523; note = Sequence Name: 56322-704_101_SL_seq_484
tacctcccgccgcctctgtt

SEQ ID NO: 485 - DNA, 20 bp, Homo sapiens
  source 1..20: mol_type = genomic DNA; note = Gene: ALK; note = Location (start to end; relative to TSS): ALK_84_114; note = Orientation (relative to transcription): sense; note = sgRNA Position: 29921478; note = Sequence Name: 56322-704_101_SL_seq_485
ctttccggccgccctctggt

SEQ ID NO: 486 - DNA, 20 bp, Homo sapiens
  source 1..20: mol_type = genomic DNA; note = Gene: ALK; note = Location (start to end; relative to TSS): ALK_49_79; note = Orientation (relative to transcription): sense; note = sgRNA Position: 29921513; note = Sequence Name: 56322-704_101_SL_seq_486
cgcctctgttcggagggtcg

SEQ ID NO: 487 - DNA, 20 bp, Homo sapiens
  source 1..20: mol_type = genomic DNA; note = Gene: ALK; note = Location (start to end; relative to TSS): ALK_80_110; note = Orientation (relative to transcription): sense; note = sgRNA Position: 29921482; note = Sequence Name: 56322-704_101_SL_seq_487
ggtgctttccggccgccctc

SEQ ID NO: 488 - DNA, 20 bp, Homo sapiens
  source 1..20: mol_type = genomic DNA; note = Gene: ALK; note = Location (start to end; relative to TSS): ALK_16_46; note = Orientation (relative to transcription): sense; note = sgRNA Position: 29921546; note = Sequence Name: 56322-704_101_SL_seq_488
gcggcagcggtggtagcagc

SEQ ID NO: 489 - DNA, 20 bp, Homo sapiens
  source 1..20: mol_type = genomic DNA; note = Gene: ALK; note = Location (start to end; relative to TSS): ALK_49_79; note = Orientation (relative to transcription): sense; note = sgRNA Position: 29921513; note = Sequence Name: 56322-704_101_SL_seq_489
cgcctctgttcggagggtcg

SEQ ID NO: 490 - DNA, 20 bp, Homo sapiens
  source 1..20: mol_type = genomic DNA; note = Gene: AR; note = Location (start to end; relative to TSS): AR_38_68; note = Orientation (relative to transcription): sense; note = sgRNA Position: 67544085; note = Sequence Name: 56322-704_101_SL_seq_490
acggtccggagcaagcccag

SEQ ID NO: 491 - DNA, 20 bp, Homo sapiens
  source 1..20: mol_type = genomic DNA; note = Gene: AR; note = Location (start to end; relative to TSS): AR_103_133; note = Orientation (relative to transcription): sense; note = sgRNA Position: 67544150; note = Sequence Name: 56322-704_101_SL_seq_491
cagtgctgtacaggagccga

SEQ ID NO: 492 - DNA, 20 bp, Homo sapiens
  source 1..20: mol_type = genomic DNA; note = Gene: AR; note = Location (start to end; relative to TSS): AR_26_56; note = Orientation (relative to transcription): antisense; note = sgRNA Position: 67544053; note = Sequence Name: 56322-704_101_SL_seq_492
gtcccgctctcccagcaagc

SEQ ID NO: 493 - DNA, 20 bp, Homo sapiens
  source 1..20: mol_type = genomic DNA; note = Gene: AR; note = Location (start to end; relative to TSS): AR_97_127; note = Orientation (relative to transcription): antisense; note = sgRNA Position: 67544124; note = Sequence Name: 56322-704_101_SL_seq_493
cagcactggagcggctagct

SEQ ID NO: 494 - DNA, 20 bp, Homo sapiens
  source 1..20: mol_type = genomic DNA; note = Gene: AR; note = Location (start to end; relative to TSS): AR_24_54; note = Orientation (relative to transcription): sense; note = sgRNA Position: 67544071; note = Sequence Name: 56322-704_101_SL_seq_494
gctgggagagcgggacggtc

SEQ ID NO: 495 - DNA, 20 bp, Homo sapiens
  source 1..20: mol_type = genomic DNA; note = Gene: AR; note = Location (start to end; relative to TSS): AR_94_124; note = Orientation (relative to transcription): sense; note = sgRNA Position: 67544141; note = Sequence Name: 56322-704_101_SL_seq_495
tagccgctccagtgctgtac

SEQ ID NO: 496 - DNA, 20 bp, Homo sapiens
  source 1..20: mol_type = genomic DNA; note = Gene: AR; note = Location (start to end; relative to TSS): AR_18_48; note = Orientation (relative to transcription): antisense; note = sgRNA Position: 67544045; note = Sequence Name: 56322-704_101_SL_seq_496
ctcccagcaagctggctccc

SEQ ID NO: 497 - DNA, 20 bp, Homo sapiens
  source 1..20: mol_type = genomic DNA; note = Gene: AR; note = Location (start to end; relative to TSS): AR_62_92; note = Orientation (relative to transcription): antisense; note = sgRNA Position: 67544089; note = Sequence Name: 56322-704_101_SL_seq_497
ctgtcgcctcctctgcctct

SEQ ID NO: 498 - DNA, 20 bp, Homo sapiens
  source 1..20: mol_type = genomic DNA; note = Gene: AR; note = Location (start to end; relative to TSS): AR_19_49; note = Orientation (relative to transcription): sense; note = sgRNA Position: 67544066; note = Sequence Name: 56322-704_101_SL_seq_498
agcttgctgggagagcggga

SEQ ID NO: 499 - DNA, 20 bp, Homo sapiens
  source 1..20: mol_type = genomic DNA; note = Gene: AR; note = Location (start to end; relative to TSS): AR_52_82; note = Orientation (relative to transcription): antisense; note = sgRNA Position: 67544079; note = Sequence Name: 56322-704_101_SL_seq_499
ctctgcctctgggcttgctc

SEQ ID NO: 500 - DNA, 20 bp, Homo sapiens
  source 1..20: mol_type = genomic DNA; note = Gene: ARAF; note = Location (start to end; relative to TSS): ARAF_32_62; note = Orientation (relative to transcription): sense; note = sgRNA Position: 47561263; note = Sequence Name: 56322-704_101_SL_seq_500
tgacaggtgagggcgggccc

SEQ ID NO: 501 - DNA, 20 bp, Homo sapiens
  source 1..20: mol_type = genomic DNA; note = Gene: ARAF; note = Location (start to end; relative to TSS): ARAF_66_96; note = Orientation (relative to transcription): sense; note = sgRNA Position: 47561297; note = Sequence Name: 56322-704_101_SL_seq_501
tctggagcggctgccgggca

SEQ ID NO: 502 - DNA, 20 bp, Homo sapiens
  source 1..20: mol_type = genomic DNA; note = Gene: ARAF; note = Location (start to end; relative to TSS): ARAF_25_55; note = Orientation (relative to transcription): sense; note = sgRNA Position: 47561256; note = Sequence Name: 56322-704_101_SL_seq_502
agcggcgtgacaggtgaggg

SEQ ID NO: 503 - DNA, 20 bp, Homo sapiens
  source 1..20: mol_type = genomic DNA; note = Gene: ARAF; note = Location (start to end; relative to TSS): ARAF_61_91; note = Orientation (relative to transcription): sense; note = sgRNA Position: 47561292; note = Sequence Name: 56322-704_101_SL_seq_503
cggtttctggagcggctgcc

SEQ ID NO: 504 - DNA, 20 bp, Homo sapiens
  source 1..20: mol_type = genomic DNA; note = Gene: ARAF; note = Location (start to end; relative to TSS): ARAF_26_56; note = Orientation (relative to transcription): sense; note = sgRNA Position: 47561257; note = Sequence Name: 56322-704_101_SL_seq_504
gcggcgtgacaggtgagggc

SEQ ID NO: 505 - DNA, 20 bp, Homo sapiens
  source 1..20: mol_type = genomic DNA; note = Gene: ARAF; note = Location (start to end; relative to TSS): ARAF_59_89; note = Orientation (relative to transcription): antisense; note = sgRNA Position: 47561270; note = Sequence Name: 56322-704_101_SL_seq_505
ctccagaaaccgagccctcc

SEQ ID NO: 506 - DNA, 20 bp, Homo sapiens
  source 1..20: mol_type = genomic DNA; note = Gene: ARAF; note = Location (start to end; relative to TSS): ARAF_22_52; note = Orientation (relative to transcription): sense; note = sgRNA Position: 47561253; note = Sequence Name: 56322-704_101_SL_seq_506
tgtagcggcgtgacaggtga

SEQ ID NO: 507 - DNA, 20 bp, Homo sapiens
  source 1..20: mol_type = genomic DNA; note = Gene: ARAF; note = Location (start to end; relative to TSS): ARAF_58_88; note = Orientation (relative to transcription): antisense; note = sgRNA Position: 47561269; note = Sequence Name: 56322-704_101_SL_seq_507
tccagaaaccgagccctccc

SEQ ID NO: 508 - DNA, 20 bp, Homo sapiens
  source 1..20: mol_type = genomic DNA; note = Gene: ARAF; note = Location (start to end; relative to TSS): ARAF_21_51; note = Orientation (relative to transcription): sense; note = sgRNA Position: 47561252; note = Sequence Name: 56322-704_101_SL_seq_508
ctgtagcggcgtgacaggtg

SEQ ID NO: 509 - DNA, 20 bp, Homo sapiens
  source 1..20: mol_type = genomic DNA; note = Gene: ARAF; note = Location (start to end; relative to TSS): ARAF_53_83; note = Orientation (relative to transcription): sense; note = sgRNA Position: 47561284; note = Sequence Name: 56322-704_101_SL_seq_509
ggagggctcggtttctggag

SEQ ID NO: 510 - DNA, 20 bp, Homo sapiens
  source 1..20: mol_type = genomic DNA; note = Gene: ATM; note = Location (start to end; relative to TSS): ATM_32_62; note = Orientation (relative to transcription): sense; note = sgRNA Position: 108223125; note = Sequence Name: 56322-704_101_SL_seq_510
gggaggaggcgagaggagtc

SEQ ID NO: 511 - DNA, 20 bp, Homo sapiens
  source 1..20: mol_type = genomic DNA; note = Gene: ATM; note = Location (start to end; relative to TSS): ATM_89_119; note = Orientation (relative to transcription): sense; note = sgRNA Position: 108223182; note = Sequence Name: 56322-704_101_SL_seq_511
ctttgaccttccgagtgcag

SEQ ID NO: 512 - DNA, 20 bp, Homo sapiens
  source 1..20: mol_type = genomic DNA; note = Gene: ATM; note = Location (start to end; relative to TSS): ATM_31_61; note = Orientation (relative to transcription): antisense; note = sgRNA Position: 108223104; note = Sequence Name: 56322-704_101_SL_seq_512
ctcgcctcctcccgcggcca

SEQ ID NO: 513 - DNA, 20 bp, Homo sapiens
  source 1..20: mol_type = genomic DNA; note = Gene: ATM; note = Location (start to end; relative to TSS): ATM_83_113; note = Orientation (relative to transcription): antisense; note = sgRNA Position: 108223156; note = Sequence Name: 56322-704_101_SL_seq_513
ggtcaaagtagtatcaaccg

SEQ ID NO: 514 - DNA, 20 bp, Homo sapiens
  source 1..20: mol_type = genomic DNA; note = Gene: ATM; note = Location (start to end; relative to TSS): ATM_37_67; note = Orientation (relative to transcription): antisense; note = sgRNA Position: 108223110; note = Sequence Name: 56322-704_101_SL_seq_514
actcctctcgcctcctcccg

SEQ ID NO: 515 - DNA, 20 bp, Homo sapiens
  source 1..20: mol_type = genomic DNA; note = Gene: ATM; note = Location (start to end; relative to TSS): ATM_80_110; note = Orientation (relative to transcription): antisense; note = sgRNA Position: 108223153; note = Sequence Name: 56322-704_101_SL_seq_515
caaagtagtatcaaccgcgg

SEQ ID NO: 516 - DNA, 20 bp, Homo sapiens
  source 1..20: mol_type = genomic DNA; note = Gene: ATM; note = Location (start to end; relative to TSS): ATM_25_55; note = Orientation (relative to transcription): sense; note = sgRNA Position: 108223118; note = Sequence Name: 56322-704_101_SL_seq_516
tggccgcgggaggaggcgag

SEQ ID NO: 517 - DNA, 20 bp, Homo sapiens
  source 1..20: mol_type = genomic DNA; note = Gene: ATM; note = Location (start to end; relative to TSS): ATM_77_107; note = Orientation (relative to transcription): antisense; note = sgRNA Position: 108223150; note = Sequence Name: 56322-704_101_SL_seq_517
agtagtatcaaccgcggcgg

SEQ ID NO: 518 - DNA, 20 bp, Homo sapiens
  source 1..20: mol_type = genomic DNA; note = Gene: ATM; note = Location (start to end; relative to TSS): ATM_18_48; note = Orientation (relative to transcription): sense; note = sgRNA Position: 108223111; note = Sequence Name: 56322-704_101_SL_seq_518
gaagccgtggccgcgggagg

SEQ ID NO: 519 - DNA, 20 bp, Homo sapiens
  source 1..20: mol_type = genomic DNA; note = Gene: ATM; note = Location (start to end; relative to TSS): ATM_57_87; note = Orientation (relative to transcription): sense; note = sgRNA Position: 108223150; note = Sequence Name: 56322-704_101_SL_seq_519
ctgcgctgcagccaccgccg

SEQ ID NO: 520 - DNA, 20 bp, Homo sapiens
  source 1..20: mol_type = genomic DNA; note = Gene: ATR; note = Location (start to end; relative to TSS): ATR_44_74; note = Orientation (relative to transcription): antisense; note = sgRNA Position: 142578685; note = Sequence Name: 56322-704_101_SL_seq_520
ggatcatggaagccagctcc

SEQ ID NO: 521 - DNA, 20 bp, Homo sapiens
  source 1..20: mol_type = genomic DNA; note = Gene: ATR; note = Location (start to end; relative to TSS): ATR_101_131; note = Orientation (relative to transcription): antisense; note = sgRNA Position: 142578628; note = Sequence Name: 56322-704_101_SL_seq_521
ggaggatgcaggacccaggc

SEQ ID NO: 522 - DNA, 20 bp, Homo sapiens
  source 1..20: mol_type = genomic DNA; note = Gene: ATR; note = Location (start to end; relative to TSS): ATR_46_76; note = Orientation (relative to transcription): sense; note = sgRNA Position: 142578663; note = Sequence Name: 56322-704_101_SL_seq_522
cttccatgatccccgccctg

SEQ ID NO: 523 - DNA, 20 bp, Homo sapiens
  source 1..20: mol_type = genomic DNA; note = Gene: ATR; note = Location (start to end; relative to TSS): ATR_100_130; note = Orientation (relative to transcription): antisense; note = sgRNA Position: 142578629; note = Sequence Name: 56322-704_101_SL_seq_523
gaggatgcaggacccaggct

SEQ ID NO: 524 - DNA, 20 bp, Homo sapiens
  source 1..20: mol_type = genomic DNA; note = Gene: ATR; note = Location (start to end; relative to TSS): ATR_47_77; note = Orientation (relative to transcription): sense; note = sgRNA Position: 142578662; note = Sequence Name: 56322-704_101_SL_seq_524
ttccatgatccccgccctgc

SEQ ID NO: 525 - DNA, 20 bp, Homo sapiens
  source 1..20: mol_type = genomic DNA; note = Gene: ATR; note = Location (start to end; relative to TSS): ATR_79_109; note = Orientation (relative to transcription): sense; note = sgRNA Position: 142578630; note = Sequence Name: 56322-704_101_SL_seq_525
ggtagggctaggcccagcct

SEQ ID NO: 526 - DNA, 20 bp, Homo sapiens
  source 1..20: mol_type = genomic DNA; note = Gene: ATR; note = Location (start to end; relative to TSS): ATR_23_53; note = Orientation (relative to transcription): antisense; note = sgRNA Position: 142578706; note = Sequence Name: 56322-704_101_SL_seq_526
ggccatgttcccccatgctg

SEQ ID NO: 527 - DNA, 20 bp, Homo sapiens
  source 1..20: mol_type = genomic DNA; note = Gene: ATR; note = Location (start to end; relative to TSS): ATR_54_84; note = Orientation (relative to transcription): sense; note = sgRNA Position: 142578655; note = Sequence Name: 56322-704_101_SL_seq_527
atccccgccctgcgggagct

SEQ ID NO: 528 - DNA, 20 bp, Homo sapiens
  source 1..20: mol_type = genomic DNA; note = Gene: ATR; note = Location (start to end; relative to TSS): ATR_17_47; note = Orientation (relative to transcription): sense; note = sgRNA Position: 142578692; note = Sequence Name: 56322-704_101_SL_seq_528
cagcatgggggaacatggcc

SEQ ID NO: 529 - DNA, 20 bp, Homo sapiens
  source 1..20: mol_type = genomic DNA; note = Gene: ATR; note = Location (start to end; relative to TSS): ATR_47_77; note = Orientation (relative to transcription): sense; note = sgRNA Position: 142578662; note = Sequence Name: 56322-704_101_SL_seq_529
ttccatgatccccgccctgc

SEQ ID NO: 530 - DNA, 20 bp, Homo sapiens
  source 1..20: mol_type = genomic DNA; note = Gene: BARD1; note = Location (start to end; relative to TSS): BARD1_48_78; note = Orientation (relative to transcription): antisense; note = sgRNA Position: 214809631; note = Sequence Name: 56322-704_101_SL_seq_530
ggaagcctcgggaaaccaca

SEQ ID NO: 531 - DNA, 20 bp, Homo sapiens
  source 1..20: mol_type = genomic DNA; note = Gene: BARD1; note = Location (start to end; relative to TSS): BARD1_80_110; note = Orientation (relative to transcription): sense; note = sgRNA Position: 214809579; note = Sequence Name: 56322-704_101_SL_seq_531
ggagcctttcatccgaaggc

SEQ ID NO: 532 - DNA, 20 bp, Homo sapiens
  source 1..20: mol_type = genomic DNA; note = Gene: BARD1; note = Location (start to end; relative to TSS): BARD1_34_64; note = Orientation (relative to transcription): sense; note = sgRNA Position: 214809625; note = Sequence Name: 56322-704_101_SL_seq_532
agcttccctgtggtttcccg

SEQ ID NO: 533 - DNA, 20 bp, Homo sapiens
  source 1..20: mol_type = genomic DNA; note = Gene: BARD1; note = Location (start to end; relative to TSS): BARD1_79_109; note = Orientation (relative to transcription): sense; note = sgRNA Position: 214809580; note = Sequence Name: 56322-704_101_SL_seq_533
aggagcctttcatccgaagg

SEQ ID NO: 534 - DNA, 20 bp, Homo sapiens
  source 1..20: mol_type = genomic DNA; note = Gene: BARD1; note = Location (start to end; relative to TSS): BARD1_38_68; note = Orientation (relative to transcription): antisense; note = sgRNA Position: 214809641; note = Sequence Name: 56322-704_101_SL_seq_534
ggaaaccacagggaagctgc

SEQ ID NO: 535 - DNA, 20 bp, Homo sapiens
  source 1..20: mol_type = genomic DNA; note = Gene: BARD1; note = Location (start to end; relative to TSS): BARD1_76_106; note = Orientation (relative to transcription): sense; note = sgRNA Position: 214809583; note = Sequence Name: 56322-704_101_SL_seq_535
gcgaggagcctttcatccga

SEQ ID NO: 536 - DNA, 20 bp, Homo sapiens
  source 1..20: mol_type = genomic DNA; note = Gene: BARD1; note = Location (start to end; relative to TSS): BARD1_20_50; note = Orientation (relative to transcription): antisense; note = sgRNA Position: 214809659; note = Sequence Name: 56322-704_101_SL_seq_536
gcaggccagcgactcgaaac

SEQ ID NO: 537 - DNA, 20 bp, Homo sapiens
  source 1..20: mol_type = genomic DNA; note = Gene: BARD1; note = Location (start to end; relative to TSS): BARD1_60_90; note = Orientation (relative to transcription): antisense; note = sgRNA Position: 214809619; note = Sequence Name: 56322-704_101_SL_seq_537
agcgggaagcaaggaagcct

SEQ ID NO: 538 - DNA, 20 bp, Homo sapiens
  source 1..20: mol_type = genomic DNA; note = Gene: BARD1; note = Location (start to end; relative to TSS): BARD1_24_54; note = Orientation (relative to transcription): sense; note = sgRNA Position: 214809635; note = Sequence Name: 56322-704_101_SL_seq_538
gctggcctgcagcttccctg

SEQ ID NO: 539 - DNA, 20 bp, Homo sapiens
  source 1..20: mol_type = genomic DNA; note = Gene: BARD1; note = Location (start to end; relative to TSS): BARD1_59_89; note = Orientation (relative to transcription): sense; note = sgRNA Position: 214809600; note = Sequence Name: 56322-704_101_SL_seq_539
tccttgcttcccgctctgcg

SEQ ID NO: 540 - DNA, 20 bp, Homo sapiens
  source 1..20: mol_type = genomic DNA; note = Gene: BCL2; note = Location (start to end; relative to TSS): BCL2_46_76; note = Orientation (relative to transcription): antisense; note = sgRNA Position: 63319719; note = Sequence Name: 56322-704_101_SL_seq_540
gcaggacgcgcctggcccgc

SEQ ID NO: 541 - DNA, 20 bp, Homo sapiens
  source 1..20: mol_type = genomic DNA; note = Gene: BCL2; note = Location (start to end; relative to TSS): BCL2_79_109; note = Orientation (relative to transcription): antisense; note = sgRNA Position: 63319686; note = Sequence Name: 56322-704_101_SL_seq_541
tgcattttccgaaaagctgc

SEQ ID NO: 542 - DNA, 20 bp, Homo sapiens
  source 1..20: mol_type = genomic DNA; note = Gene: BCL2; note = Location (start to end; relative to TSS): BCL2_18_48; note = Orientation (relative to transcription): sense; note = sgRNA Position: 63319727; note = Sequence Name: 56322-704_101_SL_seq_542
gggcttctagcgctcggcac

SEQ ID NO: 543 - DNA, 20 bp, Homo sapiens
  source 1..20: mol_type = genomic DNA; note = Gene: BCL2; note = Location (start to end; relative to TSS): BCL2_68_98; note = Orientation (relative to transcription): antisense; note = sgRNA Position: 63319697; note = Sequence Name: 56322-704_101_SL_seq_543
aaaagctgctggataaatga

SEQ ID NO: 544 - DNA, 20 bp, Homo sapiens
  source 1..20: mol_type = genomic DNA; note = Gene: BCL2; note = Location (start to end; relative to TSS): BCL2_21_51; note = Orientation (relative to transcription): sense; note = sgRNA Position: 63319724; note = Sequence Name: 56322-704_101_SL_seq_544
cttctagcgctcggcaccgg

SEQ ID NO: 545 - DNA, 20 bp, Homo sapiens
  source 1..20: mol_type = genomic DNA; note = Gene: BCL2; note = Location (start to end; relative to TSS): BCL2_64_94; note = Orientation (relative to transcription): antisense; note = sgRNA Position: 63319701; note = Sequence Name: 56322-704_101_SL_seq_545
gctgctggataaatgaaggc

SEQ ID NO: 546 - DNA, 20 bp, Homo sapiens
  source 1..20: mol_type = genomic DNA; note = Gene: BCL2; note = Location (start to end; relative to TSS): BCL2_22_52; note = Orientation (relative to transcription): sense; note = sgRNA Position: 63319723; note = Sequence Name: 56322-704_101_SL_seq_546
ttctagcgctcggcaccggc

SEQ ID NO: 547 - DNA, 20 bp, Homo sapiens
  source 1..20: mol_type = genomic DNA; note = Gene: BCL2; note = Location (start to end; relative to TSS): BCL2_54_84; note = Orientation (relative to transcription): antisense; note = sgRNA Position: 63319711; note = Sequence Name: 56322-704_101_SL_seq_547
aaatgaaggcaggacgcgcc

SEQ ID NO: 548 - DNA, 20 bp, Homo sapiens
  source 1..20: mol_type = genomic DNA; note = Gene: BCL2; note = Location (start to end; relative to TSS): BCL2_14_44; note = Orientation (relative to transcription): antisense; note = sgRNA Position: 63319751; note = Sequence Name: 56322-704_101_SL_seq_548
ctagaagcccgcgctgtgtg

SEQ ID NO: 549 - DNA, 20 bp, Homo sapiens
  source 1..20: mol_type = genomic DNA; note = Gene: BCL2; note = Location (start to end; relative to TSS): BCL2_46_76; note = Orientation (relative to transcription): antisense; note = sgRNA Position: 63319719; note = Sequence Name: 56322-704_101_SL_seq_549
gcaggacgcgcctggcccgc

SEQ ID NO: 550 - DNA, 20 bp, Homo sapiens
  source 1..20: mol_type = genomic DNA; note = Gene: BCL2L1; note = Location (start to end; relative to TSS): BCL2L1_45_75; note = Orientation (relative to transcription): antisense; note = sgRNA Position: 31722819; note = Sequence Name: 56322-704_101_SL_seq_550
acacaggaattgcgaagctc

SEQ ID NO: 551 - DNA, 20 bp, Homo sapiens
  source 1..20: mol_type = genomic DNA; note = Gene: BCL2L1; note = Location (start to end; relative to TSS): BCL2L1_80_110; note = Orientation (relative to transcription): sense; note = sgRNA Position: 31722764; note = Sequence Name: 56322-704_101_SL_seq_551
gccgggtcgcatgatccctc

SEQ ID NO: 552 - DNA, 20 bp, Homo sapiens
  source 1..20: mol_type = genomic DNA; note = Gene: BCL2L1; note = Location (start to end; relative to TSS): BCL2L1_11_41; note = Orientation (relative to transcription): sense; note = sgRNA Position: 31722833; note = Sequence Name: 56322-704_101_SL_seq_552
gaggaagcaagcgagggggc

SEQ ID NO: 553 - DNA, 20 bp, Homo sapiens
  source 1..20: mol_type = genomic DNA; note = Gene: BCL2L1; note = Location (start to end; relative to TSS): BCL2L1_63_93; note = Orientation (relative to transcription): sense; note = sgRNA Position: 31722781; note = Sequence Name: 56322-704_101_SL_seq_553
ttctgggctcccagcctgcc

SEQ ID NO: 554 - DNA, 20 bp, Homo sapiens
  source 1..20: mol_type = genomic DNA; note = Gene: BCL2L1; note = Location (start to end; relative to TSS): BCL2L1_7_37; note = Orientation (relative to transcription): sense; note = sgRNA Position: 31722837; note = Sequence Name: 56322-704_101_SL_seq_554
ggaggaggaagcaagcgagg

SEQ ID NO: 555 - DNA, 20 bp, Homo sapiens
  source 1..20: mol_type = genomic DNA; note = Gene: BCL2L1; note = Location (start to end; relative to TSS): BCL2L1_62_92; note = Orientation (relative to transcription): sense; note = sgRNA Position: 31722782; note = Sequence Name: 56322-704_101_SL_seq_555
cttctgggctcccagcctgc

SEQ ID NO: 556 - DNA, 20 bp, Homo sapiens
  source 1..20: mol_type = genomic DNA; note = Gene: BCL2L1; note = Location (start to end; relative to TSS): BCL2L1_6_36; note = Orientation (relative to transcription): sense; note = sgRNA Position: 31722838; note = Sequence Name: 56322-704_101_SL_seq_556
tggaggaggaagcaagcgag

SEQ ID NO: 557 - DNA, 20 bp, Homo sapiens
  source 1..20: mol_type = genomic DNA; note = Gene: BCL2L1; note = Location (start to end; relative to TSS): BCL2L1_61_91; note = Orientation (relative to transcription): antisense; note = sgRNA Position: 31722803; note = Sequence Name: 56322-704_101_SL_seq_557
gggagcccagaaggcgacac

SEQ ID NO: 558 - DNA, 20 bp, Homo sapiens
  source 1..20: mol_type = genomic DNA; note = Gene: BCL2L1; note = Location (start to end; relative to TSS): BCL2L1_5_35; note = Orientation (relative to transcription): sense; note = sgRNA Position: 31722839; note = Sequence Name: 56322-704_101_SL_seq_558
atggaggaggaagcaagcga

SEQ ID NO: 559 - DNA, 20 bp, Homo sapiens
  source 1..20: mol_type = genomic DNA; note = Gene: BCL2L1; note = Location (start to end; relative to TSS): BCL2L1_45_75; note = Orientation (relative to transcription): antisense; note = sgRNA Position: 31722819; note = Sequence Name: 56322-704_101_SL_seq_559
acacaggaattgcgaagctc

SEQ ID NO: 560 - DNA, 20 bp, Homo sapiens
  source 1..20: mol_type = genomic DNA; note = Gene: BIRC5; note = Location (start to end; relative to TSS): BIRC5_38_68; note = Orientation (relative to transcription): antisense; note = sgRNA Position: 78214297; note = Sequence Name: 56322-704_101_SL_seq_560
gccgccgccacctctgccaa

SEQ ID NO: 561 - DNA, 20 bp, Homo sapiens
  source 1..20: mol_type = genomic DNA; note = Gene: BIRC5; note = Location (start to end; relative to TSS): BIRC5_78_108; note = Orientation (relative to transcription): sense; note = sgRNA Position: 78214357; note = Sequence Name: 56322-704_101_SL_seq_561
tgcctggcagccctttctca

SEQ ID NO: 562 - DNA, 20 bp, Homo sapiens
  source 1..20: mol_type = genomic DNA; note = Gene: BIRC5; note = Location (start to end; relative to TSS): BIRC5_37_67; note = Orientation (relative to transcription): antisense; note = sgRNA Position: 78214296; note = Sequence Name: 56322-704_101_SL_seq_562
ccgccgccacctctgccaac

SEQ ID NO: 563 - DNA, 20 bp, Homo sapiens
  source 1..20: mol_type = genomic DNA; note = Gene: BIRC5; note = Location (start to end; relative to TSS): BIRC5_73_103; note = Orientation (relative to transcription): antisense; note = sgRNA Position: 78214332; note = Sequence Name: 56322-704_101_SL_seq_563
tgccaggcagggggcaacgt

SEQ ID NO: 564 - DNA, 20 bp, Homo sapiens
  source 1..20: mol_type = genomic DNA; note = Gene: BIRC5; note = Location (start to end; relative to TSS): BIRC5_19_49; note = Orientation (relative to transcription): sense; note = sgRNA Position: 78214298; note = Sequence Name: 56322-704_101_SL_seq_564
atcgcgggacccgttggcag

SEQ ID NO: 565 - DNA, 20 bp, Homo sapiens
  source 1..20: mol_type = genomic DNA; note = Gene: BIRC5; note = Location (start to end; relative to TSS): BIRC5_72_102; note = Orientation (relative to transcription): antisense; note = sgRNA Position: 78214331; note = Sequence Name: 56322-704_101_SL_seq_565
gccaggcagggggcaacgtc

SEQ ID NO: 566 - DNA, 20 bp, Homo sapiens
  source 1..20: mol_type = genomic DNA; note = Gene: BIRC5; note = Location (start to end; relative to TSS): BIRC5_18_48; note = Orientation (relative to transcription): antisense; note = sgRNA Position: 78214277; note = Sequence Name: 56322-704_101_SL_seq_566
cgggtcccgcgattcaaatc

SEQ ID NO: 567 - DNA, 20 bp, Homo sapiens
  source 1..20: mol_type = genomic DNA; note = Gene: BIRC5; note = Location (start to end; relative to TSS): BIRC5_71_101; note = Orientation (relative to transcription): antisense; note = sgRNA Position: 78214330; note = Sequence Name: 56322-704_101_SL_seq_567
ccaggcagggggcaacgtcg

SEQ ID NO: 568 - DNA, 20 bp, Homo sapiens
  source 1..20: mol_type = genomic DNA; note = Gene: BIRC5; note = Location (start to end; relative to TSS): BIRC5_15_45; note = Orientation (relative to transcription): antisense; note = sgRNA Position: 78214274; note = Sequence Name: 56322-704_101_SL_seq_568
gtcccgcgattcaaatctgg

SEQ ID NO: 569 - DNA, 20 bp, Homo sapiens
  source 1..20: mol_type = genomic DNA; note = Gene: BIRC5; note = Location (start to end; relative to TSS): BIRC5_62_92; note = Orientation (relative to transcription): sense; note = sgRNA Position: 78214341; note = Sequence Name: 56322-704_101_SL_seq_569
ccccgacgttgccccctgcc

SEQ ID NO: 570 - DNA, 20 bp, Homo sapiens
  source 1..20: mol_type = genomic DNA; note = Gene: BLM; note = Location (start to end; relative to TSS): BLM_35_65; note = Orientation (relative to transcription): sense; note = sgRNA Position: 90717407; note = Sequence Name: 56322-704_101_SL_seq_570
ggcgcgggaagtttggatcc

SEQ ID NO: 571 - DNA, 20 bp, Homo sapiens
  source 1..20: mol_type = genomic DNA; note = Gene: BLM; note = Location (start to end; relative to TSS): BLM_73_103; note = Orientation (relative to transcription): antisense; note = sgRNA Position: 90717425; note = Sequence Name: 56322-704_101_SL_seq_571
cctcgcacgcagactcctag

SEQ ID NO: 572 - DNA, 20 bp, Homo sapiens
  source 1..20: mol_type = genomic DNA; note = Gene: BLM; note = Location (start to end; relative to TSS): BLM_34_64; note = Orientation (relative to transcription): antisense; note = sgRNA Position: 90717386; note = Sequence Name: 56322-704_101_SL_seq_572
aacttcccgcgccgcaacca

SEQ ID NO: 573 - DNA, 20 bp, Homo sapiens
  source 1..20: mol_type = genomic DNA; note = Gene: BLM; note = Location (start to end; relative to TSS): BLM_69_99; note = Orientation (relative to transcription): antisense; note = sgRNA Position: 90717421; note = Sequence Name: 56322-704_101_SL_seq_573
gcacgcagactcctagcgga

SEQ ID NO: 574 - DNA, 20 bp, Homo sapiens
  source 1..20: mol_type = genomic DNA; note = Gene: BLM; note = Location (start to end; relative to TSS): BLM_28_58; note = Orientation (relative to transcription): sense; note = sgRNA Position: 90717400; note = Sequence Name: 56322-704_101_SL_seq_574
tggttgcggcgcgggaagtt

SEQ ID NO: 575 - DNA, 20 bp, Homo sapiens
  source 1..20: mol_type = genomic DNA; note = Gene: BLM; note = Location (start to end; relative to TSS): BLM_64_94; note = Orientation (relative to transcription): sense; note = sgRNA Position: 90717436; note = Sequence Name: 56322-704_101_SL_seq_575
ccgctaggagtctgcgtgcg

SEQ ID NO: 576 - DNA, 20 bp, Homo sapiens
  source 1..20: mol_type = genomic DNA; note = Gene: BLM; note = Location (start to end; relative to TSS): BLM_20_50; note = Orientation (relative to transcription): sense; note = sgRNA Position: 90717392; note = Sequence Name: 56322-704_101_SL_seq_576
ggcggccgtggttgcggcgc

SEQ ID NO: 577 - DNA, 20 bp, Homo sapiens
  source 1..20: mol_type = genomic DNA; note = Gene: BLM; note = Location (start to end; relative to TSS): BLM_62_92; note = Orientation (relative to transcription): antisense; note = sgRNA Position: 90717414; note = Sequence Name: 56322-704_101_SL_seq_577
gactcctagcggacggaacc

SEQ ID NO: 578 - DNA, 20 bp, Homo sapiens
  source 1..20: mol_type = genomic DNA; note = Gene: BLM; note = Location (start to end; relative to TSS): BLM_19_49; note = Orientation (relative to transcription): sense; note = sgRNA Position: 90717391; note = Sequence Name: 56322-704_101_SL_seq_578
cggcggccgtggttgcggcg

SEQ ID NO: 579 - DNA, 20 bp, Homo sapiens
  source 1..20: mol_type = genomic DNA; note = Gene: BLM; note = Location (start to end; relative to TSS): BLM_49_79; note = Orientation (relative to transcription): sense; note = sgRNA Position: 90717421; note = Sequence Name: 56322-704_101_SL_seq_579
ggatcctggttccgtccgct

SEQ ID NO: 580 - DNA, 20 bp, Homo sapiens
  source 1..20: mol_type = genomic DNA; note = Gene: BRAF; note = Location (start to end; relative to TSS): BRAF_45_75; note = Orientation (relative to transcription): antisense; note = sgRNA Position: 140924880; note = Sequence Name: 56322-704_101_SL_seq_580
gcctgggccacctcaggtac

SEQ ID NO: 581 - DNA, 20 bp, Homo sapiens
  source 1..20: mol_type = genomic DNA; note = Gene: BRAF; note = Location (start to end; relative to TSS): BRAF_88_118; note = Orientation (relative to transcription): antisense; note = sgRNA Position: 140924837; note = Sequence Name: 56322-704_101_SL_seq_581
ggcgcggggaggagcggccc

SEQ ID NO: 582 - DNA, 20 bp, Homo sapiens
  source 1..20: mol_type = genomic DNA; note = Gene: BRAF; note = Location (start to end; relative to TSS): BRAF_35_65; note = Orientation (relative to transcription): sense; note = sgRNA Position: 140924870; note = Sequence Name: 56322-704_101_SL_seq_582
gccggtacctgaggtggccc

SEQ ID NO: 583 - DNA, 20 bp, Homo sapiens
  source 1..20: mol_type = genomic DNA; note = Gene: BRAF; note = Location (start to end; relative to TSS): BRAF_85_115; note = Orientation (relative to transcription): antisense; note = sgRNA Position: 140924840; note = Sequence Name: 56322-704_101_SL_seq_583
gcggggaggagcggcccggg

SEQ ID NO: 584 - DNA, 20 bp, Homo sapiens
  source 1..20: mol_type = genomic DNA; note = Gene: BRAF; note = Location (start to end; relative to TSS): BRAF_38_68; note = Orientation (relative to transcription): antisense; note = sgRNA Position: 140924887; note = Sequence Name: 56322-704_101_SL_seq_584
ccacctcaggtaccggcccg

SEQ ID NO: 585 - DNA, 20 bp, Homo sapiens
  source 1..20: mol_type = genomic DNA; note = Gene: BRAF; note = Location (start to end; relative to TSS): BRAF_73_103; note = Orientation (relative to transcription): antisense; note = sgRNA Position: 140924852; note = Sequence Name: 56322-704_101_SL_seq_585
ggcccgggcggcgccgcggg

SEQ ID NO: 586 - DNA, 20 bp, Homo sapiens
  source 1..20: mol_type = genomic DNA; note = Gene: BRAF; note = Location (start to end; relative to TSS): BRAF_29_59; note = Orientation (relative to transcription): sense; note = sgRNA Position: 140924876; note = Sequence Name: 56322-704_101_SL_seq_586
ccgcgggccggtacctgagg

SEQ ID NO: 587 - DNA, 20 bp, Homo sapiens
  source 1..20: mol_type = genomic DNA; note = Gene: BRAF; note = Location (start to end; relative to TSS): BRAF_69_99; note = Orientation (relative to transcription): antisense; note = sgRNA Position: 140924856; note = Sequence Name: 56322-704_101_SL_seq_587
cgggcggcgccgcgggcgga

SEQ ID NO: 588 - DNA, 20 bp, Homo sapiens
  source 1..20: mol_type = genomic DNA; note = Gene: BRAF; note = Location (start to end; relative to TSS): BRAF_26_56; note = Orientation (relative to transcription): sense; note = sgRNA Position: 140924879; note = Sequence Name: 56322-704_101_SL_seq_588
gggccgcgggccggtacctg

SEQ ID NO: 589 - DNA, 20 bp, Homo sapiens
  source 1..20: mol_type = genomic DNA; note = Gene: BRAF; note = Location (start to end; relative to TSS): BRAF_61_91; note = Orientation (relative to transcription): antisense; note = sgRNA Position: 140924864; note = Sequence Name: 56322-704_101_SL_seq_589
gccgcgggcggagggcgcct

SEQ ID NO: 590 - DNA, 20 bp, Homo sapiens
  source 1..20: mol_type = genomic DNA; note = Gene: BRCA1; note = Location (start to end; relative to TSS): BRCA1_53_83; note = Orientation (relative to transcription): antisense; note = sgRNA Position: 43125307; note = Sequence Name: 56322-704_101_SL_seq_590
tgaaggcctcctgagcgcag

SEQ ID NO: 591 - DNA, 20 bp, Homo sapiens
  source 1..20: mol_type = genomic DNA; note = Gene: BRCA1; note = Location (start to end; relative to TSS): BRCA1_85_115; note = Orientation (relative to transcription): sense; note = sgRNA Position: 43125255; note = Sequence Name: 56322-704_101_SL_seq_591
ggtagtagagtcccgggaaa

SEQ ID NO: 592 - DNA, 20 bp, Homo sapiens
  source 1..20: mol_type = genomic DNA; note = Gene: BRCA1; note = Location (start to end; relative to TSS): BRCA1_54_84; note = Orientation (relative to transcription): antisense; note = sgRNA Position: 43125306; note = Sequence Name: 56322-704_101_SL_seq_592
gtgaaggcctcctgagcgca

SEQ ID NO: 593 - DNA, 20 bp, Homo sapiens
  source 1..20: mol_type = genomic DNA; note = Gene: BRCA1; note = Location (start to end; relative to TSS): BRCA1_84_114; note = Orientation (relative to transcription): sense; note = sgRNA Position: 43125256; note = Sequence Name: 56322-704_101_SL_seq_593
aggtagtagagtcccgggaa

SEQ ID NO: 594 - DNA, 20 bp, Homo sapiens
  source 1..20: mol_type = genomic DNA; note = Gene: BRCA1; note = Location (start to end; relative to TSS): BRCA1_35_65; note = Orientation (relative to transcription): sense; note = sgRNA Position: 43125305; note = Sequence Name: 56322-704_101_SL_seq_594
ataactgggcccctgcgctc

SEQ ID NO: 595 - DNA, 20 bp, Homo sapiens
  source 1..20: mol_type = genomic DNA; note = Gene: BRCA1; note = Location (start to end; relative to TSS): BRCA1_78_108; note = Orientation (relative to transcription): sense; note = sgRNA Position: 43125262; note = Sequence Name: 56322-704_101_SL_seq_595
gggtaaaggtagtagagtcc

SEQ ID NO: 596 - DNA, 20 bp, Homo sapiens
  source 1..20: mol_type = genomic DNA; note = Gene: BRCA1; note = Location (start to end; relative to TSS): BRCA1_21_51; note = Orientation (relative to transcription): sense; note = sgRNA Position: 43125319; note = Sequence Name: 56322-704_101_SL_seq_596
gtggggtttctcagataact

SEQ ID NO: 597 - DNA, 20 bp, Homo sapiens
  source 1..20: mol_type = genomic DNA; note = Gene: BRCA1; note = Location (start to end; relative to TSS): BRCA1_54_84; note = Orientation (relative to transcription): antisense; note = sgRNA Position: 43125306; note = Sequence Name: 56322-704_101_SL_seq_597
gtgaaggcctcctgagcgca

SEQ ID NO: 598 - DNA, 20 bp, Homo sapiens
  source 1..20: mol_type = genomic DNA; note = Gene: BRCA1; note = Location (start to end; relative to TSS): BRCA1_11_41; note = Orientation (relative to transcription): antisense; note = sgRNA Position: 43125349; note = Sequence Name: 56322-704_101_SL_seq_598
ccacagcctgtcccccgtcc

SEQ ID NO: 599 - DNA, 20 bp, Homo sapiens
  source 1..20: mol_type = genomic DNA; note = Gene: BRCA1; note = Location (start to end; relative to TSS): BRCA1_53_83; note = Orientation (relative to transcription): antisense; note = sgRNA Position: 43125307; note = Sequence Name: 56322-704_101_SL_seq_599
tgaaggcctcctgagcgcag

SEQ ID NO: 600 - DNA, 20 bp, Homo sapiens
  source 1..20: mol_type = genomic DNA; note = Gene: BRCA2; note = Location (start to end; relative to TSS): BRCA2_30_60; note = Orientation (relative to transcription): sense; note = sgRNA Position: 32315564; note = Sequence Name: 56322-704_101_SL_seq_600
gcctcgggtgtcttttgcgg

SEQ ID NO: 601 - DNA, 20 bp, Homo sapiens
  source 1..20: mol_type = genomic DNA; note = Gene: BRCA2; note = Location (start to end; relative to TSS): BRCA2_75_105; note = Orientation (relative to transcription): sense; note = sgRNA Position: 32315609; note = Sequence Name: 56322-704_101_SL_seq_601
tgaggggacagatttgtgac

SEQ ID NO: 602 - DNA, 20 bp, Homo sapiens
  source 1..20: mol_type = genomic DNA; note = Gene: BRCA2; note = Location (start to end; relative to TSS): BRCA2_33_63; note = Orientation (relative to transcription): sense; note = sgRNA Position: 32315567; note = Sequence Name: 56322-704_101_SL_seq_602
tcgggtgtcttttgcggcgg

SEQ ID NO: 603 - DNA, 20 bp, Homo sapiens
  source 1..20: mol_type = genomic DNA; note = Gene: BRCA2; note = Location (start to end; relative to TSS): BRCA2_72_102; note = Orientation (relative to transcription): antisense; note = sgRNA Position: 32315586; note = Sequence Name: 56322-704_101_SL_seq_603
ctgtcccctcacgcttctcc

SEQ ID NO: 604 - DNA, 20 bp, Homo sapiens
  source 1..20: mol_type = genomic DNA; note = Gene: BRCA2; note = Location (start to end; relative to TSS): BRCA2_34_64; note = Orientation (relative to transcription): sense; note = sgRNA Position: 32315568; note = Sequence Name: 56322-704_101_SL_seq_604
cgggtgtcttttgcggcggt

SEQ ID NO: 605 - DNA, 20 bp, Homo sapiens
  source 1..20: mol_type = genomic DNA; note = Gene: BRCA2; note = Location (start to end; relative to TSS): BRCA2_69_99; note = Orientation (relative to transcription): antisense; note = sgRNA Position: 32315583; note = Sequence Name: 56322-704_101_SL_seq_605
tcccctcacgcttctcccgg

SEQ ID NO: 606 - DNA, 20 bp, Homo sapiens
  source 1..20: mol_type = genomic DNA; note = Gene: BRCA2; note = Location (start to end; relative to TSS): BRCA2_29_59; note = Orientation (relative to transcription): antisense; note = sgRNA Position: 32315543; note = Sequence Name: 56322-704_101_SL_seq_606
agacacccgaggcgcagcag

SEQ ID NO: 607 - DNA, 20 bp, Homo sapiens
  source 1..20: mol_type = genomic DNA; note = Gene: BRCA2; note = Location (start to end; relative to TSS): BRCA2_59_89; note = Orientation (relative to transcription): sense; note = sgRNA Position: 32315593; note = Sequence Name: 56322-704_101_SL_seq_607
gccgccgggagaagcgtgag

SEQ ID NO: 608 - DNA, 20 bp, Homo sapiens
  source 1..20: mol_type = genomic DNA; note = Gene: BRCA2; note = Location (start to end; relative to TSS): BRCA2_27_57; note = Orientation (relative to transcription): sense; note = sgRNA Position: 32315561; note = Sequence Name: 56322-704_101_SL_seq_608
tgcgcctcgggtgtcttttg

SEQ ID NO: 609 - DNA, 20 bp, Homo sapiens
  source 1..20: mol_type = genomic DNA; note = Gene: BRCA2; note = Location (start to end; relative to TSS): BRCA2_57_87; note = Orientation (relative to transcription): sense; note = sgRNA Position: 32315591; note = Sequence Name: 56322-704_101_SL_seq_609
tcgccgccgggagaagcgtg

SEQ ID NO: 610 - DNA, 20 bp, Homo sapiens
  source 1..20: mol_type = genomic DNA; note = Gene: BRD4; note = Location (start to end; relative to TSS): BRD4_57_87; note = Orientation (relative to transcription): sense; note = sgRNA Position: 15332458; note = Sequence Name: 56322-704_101_SL_seq_610
ccgaggagccgaagcagtgg

SEQ ID NO: 611 - DNA, 20 bp, Homo sapiens
  source 1..20: mol_type = genomic DNA; note = Gene: BRD4; note = Location (start to end; relative to TSS): BRD4_104_134; note = Orientation (relative to transcription): sense; note = sgRNA Position: 15332411; note = Sequence Name: 56322-704_101_SL_seq_611
gcggtgcccgcgggcgagcg

SEQ ID NO: 612 - DNA, 20 bp, Homo sapiens
  source 1..20: mol_type = genomic DNA; note = Gene: BRD4; note = Location (start to end; relative to TSS): BRD4_59_89; note = Orientation (relative to transcription): antisense; note = sgRNA Position: 15332476; note = Sequence Name: 56322-704_101_SL_seq_612
tgcttcggctcctcggctgc

SEQ ID NO: 613 - DNA, 20 bp, Homo sapiens
  source 1..20: mol_type = genomic DNA; note = Gene: BRD4; note = Location (start to end; relative to TSS): BRD4_95_125; note = Orientation (relative to transcription): sense; note = sgRNA Position: 15332420; note = Sequence Name: 56322-704_101_SL_seq_613
cggctgccggcggtgcccgc

SEQ ID NO: 614 - DNA, 20 bp, Homo sapiens
  source 1..20: mol_type = genomic DNA; note = Gene: BRD4; note = Location (start to end; relative to TSS): BRD4_60_90; note = Orientation (relative to transcription): sense; note = sgRNA Position: 15332455; note = Sequence Name: 56322-704_101_SL_seq_614
aggagccgaagcagtggcgg

SEQ ID NO: 615 - DNA, 20 bp, Homo sapiens
  source 1..20: mol_type = genomic DNA; note = Gene: BRD4; note = Location (start to end; relative to TSS): BRD4_94_124; note = Orientation (relative to transcription): sense; note = sgRNA Position: 15332421; note = Sequence Name: 56322-704_101_SL_seq_615
gcggctgccggcggtgcccg

SEQ ID NO: 616 - DNA, 20 bp, Homo sapiens
  source 1..20: mol_type = genomic DNA; note = Gene: BRD4; note = Location (start to end; relative to TSS): BRD4_54_84; note = Orientation (relative to transcription): sense; note = sgRNA Position: 15332461; note = Sequence Name: 56322-704_101_SL_seq_616
cagccgaggagccgaagcag

SEQ ID NO: 617 - DNA, 20 bp, Homo sapiens
  source 1..20: mol_type = genomic DNA; note = Gene: BRD4; note = Location (start to end; relative to TSS): BRD4_85_115; note = Orientation (relative to transcription): sense; note = sgRNA Position: 15332430; note = Sequence Name: 56322-704_101_SL_seq_617
gcggctgcggcggctgccgg

SEQ ID NO: 618 - DNA, 20 bp, Homo sapiens
  source 1..20: mol_type = genomic DNA; note = Gene: BRD4; note = Location (start to end; relative to TSS): BRD4_40_70; note = Orientation (relative to transcription): sense; note = sgRNA Position: 15332475; note = Sequence Name: 56322-704_101_SL_seq_618
gttctggtctcccgcagccg

SEQ ID NO: 619 - DNA, 20 bp, Homo sapiens
  source 1..20: mol_type = genomic DNA; note = Gene: BRD4; note = Location (start to end; relative to TSS): BRD4_72_102; note = Orientation (relative to transcription): sense; note = sgRNA Position: 15332443; note = Sequence Name: 56322-704_101_SL_seq_619
agtggcggcggcagcggctg

SEQ ID NO: 620 - DNA, 20 bp, Homo sapiens
  source 1..20: mol_type = genomic DNA; note = Gene: BRIP1; note = Location (start to end; relative to TSS): BRIP1_31_61; note = Orientation (relative to transcription): sense; note = sgRNA Position: 61863473; note = Sequence Name: 56322-704_101_SL_seq_620
ggtgggtcgaggaaaggtaa

SEQ ID NO: 621 - DNA, 20 bp, Homo sapiens
  source 1..20: mol_type = genomic DNA; note = Gene: BRIP1; note = Location (start to end; relative to TSS): BRIP1_67_97; note = Orientation (relative to transcription): antisense; note = sgRNA Position: 61863457; note = Sequence Name: 56322-704_101_SL_seq_621
ccggccttgtgtgcaggact

SEQ ID NO: 622 - DNA, 20 bp, Homo sapiens
  source 1..20: mol_type = genomic DNA; note = Gene: BRIP1; note = Location (start to end; relative to TSS): BRIP1_34_64; note = Orientation (relative to transcription): sense; note = sgRNA Position: 61863470; note = Sequence Name: 56322-704_101_SL_seq_622
gggtcgaggaaaggtaacgg

SEQ ID NO: 623 - DNA, 20 bp, Homo sapiens
  source 1..20: mol_type = genomic DNA; note = Gene: BRIP1; note = Location (start to end; relative to TSS): BRIP1_66_96; note = Orientation (relative to transcription): antisense; note = sgRNA Position: 61863458; note = Sequence Name: 56322-704_101_SL_seq_623
cggccttgtgtgcaggactg

SEQ ID NO: 624 - DNA, 20 bp, Homo sapiens
  source 1..20: mol_type = genomic DNA; note = Gene: BRIP1; note = Location (start to end; relative to TSS): BRIP1_25_55; note = Orientation (relative to transcription): sense; note = sgRNA Position: 61863479; note = Sequence Name: 56322-704_101_SL_seq_624
gggtctggtgggtcgaggaa

SEQ ID NO: 625 - DNA, 20 bp, Homo sapiens
  source 1..20: mol_type = genomic DNA; note = Gene: BRIP1; note = Location (start to end; relative to TSS): BRIP1_59_89; note = Orientation (relative to transcription): sense; note = sgRNA Position: 61863445; note = Sequence Name: 56322-704_101_SL_seq_625
ccagtcctgcacacaaggcc

SEQ ID NO: 626 - DNA, 20 bp, Homo sapiens
  source 1..20: mol_type = genomic DNA; note = Gene: BRIP1; note = Location (start to end; relative to TSS): BRIP1_20_50; note = Orientation (relative to transcription): sense; note = sgRNA Position: 61863484; note = Sequence Name: 56322-704_101_SL_seq_626
ttgaggggtctggtgggtcg

SEQ ID NO: 627 - DNA, 20 bp, Homo sapiens
  source 1..20: mol_type = genomic DNA; note = Gene: BRIP1; note = Location (start to end; relative to TSS): BRIP1_58_88; note = Orientation (relative to transcription): sense; note = sgRNA Position: 61863446; note = Sequence Name: 56322-704_101_SL_seq_627
cccagtcctgcacacaaggc

SEQ ID NO: 628 - DNA, 20 bp, Homo sapiens
  source 1..20: mol_type = genomic DNA; note = Gene: BRIP1; note = Location (start to end; relative to TSS): BRIP1_14_44; note = Orientation (relative to transcription): sense; note = sgRNA Position: 61863490; note = Sequence Name: 56322-704_101_SL_seq_628
gtgtggttgaggggtctggt

SEQ ID NO: 629 - DNA, 20 bp, Homo sapiens
  source 1..20: mol_type = genomic DNA; note = Gene: BRIP1; note = Location (start to end; relative to TSS): BRIP1_54_84; note = Orientation (relative to transcription): sense; note = sgRNA Position: 61863450; note = Sequence Name: 56322-704_101_SL_seq_629
cggccccagtcctgcacaca

SEQ ID NO: 630 - DNA, 20 bp, Homo sapiens
  source 1..20: mol_type = genomic DNA; note = Gene: BTK; note = Location (start to end; relative to TSS): BTK_66_96; note = Orientation (relative to transcription): antisense; note = sgRNA Position: 101386121; note = Sequence Name: 56322-704_101_SL_seq_630
gatgccaggacttggaaggt

SEQ ID NO: 631 - DNA, 20 bp, Homo sapiens
  source 1..20: mol_type = genomic DNA; note = Gene: BTK; note = Location (start to end; relative to TSS): BTK_100_130; note = Orientation (relative to transcription): sense; note = sgRNA Position: 101386067; note = Sequence Name: 56322-704_101_SL_seq_631
cctgcattaagtcaggactg

SEQ ID NO: 632 - DNA, 20 bp, Homo sapiens
  source 1..20: mol_type = genomic DNA; note = Gene: BTK; note = Location (start to end; relative to TSS): BTK_53_83; note = Orientation (relative to transcription): sense; note = sgRNA Position: 101386114; note = Sequence Name: 56322-704_101_SL_seq_632
gagtcccaccttccaagtcc

SEQ ID NO: 633 - DNA, 20 bp, Homo sapiens
  source 1..20: mol_type = genomic DNA; note = Gene: BTK; note = Location (start to end; relative to TSS): BTK_93_123; note = Orientation (relative to transcription): sense; note = sgRNA Position: 101386074; note = Sequence Name: 56322-704_101_SL_seq_633
gaagctacctgcattaagtc

SEQ ID NO: 634 - DNA, 20 bp, Homo sapiens
  source 1..20: mol_type = genomic DNA; note = Gene: BTK; note = Location (start to end; relative to TSS): BTK_44_74; note = Orientation (relative to transcription): antisense; note = sgRNA Position: 101386143; note = Sequence Name: 56322-704_101_SL_seq_634
gactcgatcgcagcagacac

SEQ ID NO: 635 - DNA, 20 bp, Homo sapiens
  source 1..20: mol_type = genomic DNA; note = Gene: BTK; note = Location (start to end; relative to TSS): BTK_74_104; note = Orientation (relative to transcription): antisense; note = sgRNA Position: 101386113; note = Sequence Name: 56322-704_101_SL_seq_635
tgcattgagatgccaggact

SEQ ID NO: 636 - DNA, 20 bp, Homo sapiens
  source 1..20: mol_type = genomic DNA; note = Gene: BTK; note = Location (start to end; relative to TSS): BTK_38_68; note = Orientation (relative to transcription): antisense; note = sgRNA Position: 101386149; note = Sequence Name: 56322-704_101_SL_seq_636
atcgcagcagacactggccc

SEQ ID NO: 637 - DNA, 20 bp, Homo sapiens
  source 1..20: mol_type = genomic DNA; note = Gene: BTK; note = Location (start to end; relative to TSS): BTK_70_100; note = Orientation (relative to transcription): antisense; note = sgRNA Position: 101386117; note = Sequence Name: 56322-704_101_SL_seq_637
ttgagatgccaggacttgga

SEQ ID NO: 638 - DNA, 20 bp, Homo sapiens
  source 1..20: mol_type = genomic DNA; note = Gene: BTK; note = Location (start to end; relative to TSS): BTK_11_41; note = Orientation (relative to transcription): sense; note = sgRNA Position: 101386156; note = Sequence Name: 56322-704_101_SL_seq_638
gactgtaagaatatgtctcc

SEQ ID NO: 639 - DNA, 20 bp, Homo sapiens
  source 1..20: mol_type = genomic DNA; note = Gene: BTK; note = Location (start to end; relative to TSS): BTK_44_74; note = Orientation (relative to transcription): antisense; note = sgRNA Position: 101386143; note = Sequence Name: 56322-704_101_SL_seq_639
gactcgatcgcagcagacac

SEQ ID NO: 640 - DNA, 20 bp, Homo sapiens
  source 1..20: mol_type = genomic DNA; note = Gene: CDK12; note = Location (start to end; relative to TSS): CDK12_47_77; note = Orientation (relative to transcription): sense; note = sgRNA Position: 39461559; note = Sequence Name: 56322-704_101_SL_seq_640
tgtgtggtgtggaggtgaaa

SEQ ID NO: 641 - DNA, 20 bp, Homo sapiens
  source 1..20: mol_type = genomic DNA; note = Gene: CDK12; note = Location (start to end; relative to TSS): CDK12_80_110; note = Orientation (relative to transcription): sense; note = sgRNA Position: 39461592; note = Sequence Name: 56322-704_101_SL_seq_641
gggggctacctcaggagcga

SEQ ID NO: 642 - DNA, 20 bp, Homo sapiens
  source 1..20: mol_type = genomic DNA; note = Gene: CDK12; note = Location (start to end; relative to TSS): CDK12_39_69; note = Orientation (relative to transcription): sense; note = sgRNA Position: 39461551; note = Sequence Name: 56322-704_101_SL_seq_642
agagagtgtgtgtggtgtgg

SEQ ID NO: 643 - DNA, 20 bp, Homo sapiens
  source 1..20: mol_type = genomic DNA; note = Gene: CDK12; note = Location (start to end; relative to TSS): CDK12_79_109; note = Orientation (relative to transcription): sense; note = sgRNA Position: 39461591; note = Sequence Name: 56322-704_101_SL_seq_643
agggggctacctcaggagcg

SEQ ID NO: 644 - DNA, 20 bp, Homo sapiens
  source 1..20: mol_type = genomic DNA; note = Gene: CDK12; note = Location (start to end; relative to TSS): CDK12_36_66; note = Orientation (relative to transcription): sense; note = sgRNA Position: 39461548; note = Sequence Name: 56322-704_101_SL_seq_644
gggagagagtgtgtgtggtg

SEQ ID NO: 645 - DNA, 20 bp, Homo sapiens
  source 1..20: mol_type = genomic DNA; note = Gene: CDK12; note = Location (start to end; relative to TSS): CDK12_72_102; note = Orientation (relative to transcription): sense; note = sgRNA Position: 39461584; note = Sequence Name: 56322-704_101_SL_seq_645
gcaagaaagggggctacctc

SEQ ID NO: 646 - DNA, 20 bp, Homo sapiens
  source 1..20: mol_type = genomic DNA; note = Gene: CDK12; note = Location (start to end; relative to TSS): CDK12_31_61; note = Orientation (relative to transcription): sense; note = sgRNA Position: 39461543; note = Sequence Name: 56322-704_101_SL_seq_646
tgtgagggagagagtgtgtg

SEQ ID NO: 647 - DNA, 20 bp, Homo sapiens
  source 1..20: mol_type = genomic DNA; note = Gene: CDK12; note = Location (start to end; relative to TSS): CDK12_61_91; note = Orientation (relative to transcription): sense; note = sgRNA Position: 39461573; note = Sequence Name: 56322-704_101_SL_seq_647
gtgaaacggaggcaagaaag

SEQ ID NO: 648 - DNA, 20 bp, Homo sapiens
  source 1..20: mol_type = genomic DNA; note = Gene: CDK12; note = Location (start to end; relative to TSS): CDK12_16_46; note = Orientation (relative to transcription): sense; note = sgRNA Position: 39461528; note = Sequence Name: 56322-704_101_SL_seq_648
gtgtgactgggtctgtgtga

SEQ ID NO: 649 - DNA, 20 bp, Homo sapiens
  source 1..20: mol_type = genomic DNA; note = Gene: CDK12; note = Location (start to end; relative to TSS): CDK12_47_77; note = Orientation (relative to transcription): sense; note = sgRNA Position: 39461559; note = Sequence Name: 56322-704_101_SL_seq_649
tgtgtggtgtggaggtgaaa

SEQ ID NO: 650 - DNA, 20 bp, Homo sapiens
  source 1..20: mol_type = genomic DNA; note = Gene: CDK2; note = Location (start to end; relative to TSS): CDK2_38_68; note = Orientation (relative to transcription): sense; note = sgRNA Position: 55966894; note = Sequence Name: 56322-704_101_SL_seq_650
tccatcccgacccggggcca

SEQ ID NO: 651 - DNA, 20 bp, Homo sapiens
  source 1..20: mol_type = genomic DNA; note = Gene: CDK2; note = Location (start to end; relative to TSS): CDK2_81_111; note = Orientation (relative to transcription): sense; note = sgRNA Position: 55966937; note = Sequence Name: 56322-704_101_SL_seq_651
tcctcggcccccgagagcca

SEQ ID NO: 652 - DNA, 20 bp, Homo sapiens
  source 1..20: mol_type = genomic DNA; note = Gene: CDK2; note = Location (start to end; relative to TSS): CDK2_44_74; note = Orientation (relative to transcription): sense; note = sgRNA Position: 55966900; note = Sequence Name: 56322-704_101_SL_seq_652
ccgacccggggccacggtac

SEQ ID NO: 653 - DNA, 20 bp, Homo sapiens
  source 1..20: mol_type = genomic DNA; note = Gene: CDK2; note = Location (start to end; relative to TSS): CDK2_80_110; note = Orientation (relative to transcription): sense; note = sgRNA Position: 55966936; note = Sequence Name: 56322-704_101_SL_seq_653
ctcctcggcccccgagagcc

SEQ ID NO: 654 - DNA, 20 bp, Homo sapiens
  source 1..20: mol_type = genomic DNA; note = Gene: CDK2; note = Location (start to end; relative to TSS): CDK2_30_60; note = Orientation (relative to transcription): sense; note = sgRNA Position: 55966886; note = Sequence Name: 56322-704_101_SL_seq_654
tactgcgttccatcccgacc

SEQ ID NO: 655 - DNA, 20 bp, Homo sapiens
  source 1..20: mol_type = genomic DNA; note = Gene: CDK2; note = Location (start to end; relative to TSS): CDK2_77_107; note = Orientation (relative to transcription): antisense; note = sgRNA Position: 55966913; note = Sequence Name: 56322-704_101_SL_seq_655
gggccgaggagggggaaaca

SEQ ID NO: 656 - DNA, 20 bp, Homo sapiens
  source 1..20: mol_type = genomic DNA; note = Gene: CDK2; note = Location (start to end; relative to TSS): CDK2_31_61; note = Orientation (relative to transcription): sense; note = sgRNA Position: 55966887; note = Sequence Name: 56322-704_101_SL_seq_656
actgcgttccatcccgaccc

SEQ ID NO: 657 - DNA, 20 bp, Homo sapiens
  source 1..20: mol_type = genomic DNA; note = Gene: CDK2; note = Location (start to end; relative to TSS): CDK2_65_95; note = Orientation (relative to transcription): sense; note = sgRNA Position: 55966921; note = Sequence Name: 56322-704_101_SL_seq_657
gggccctgtttccccctcct

SEQ ID NO: 658 - DNA, 20 bp, Homo sapiens
  source 1..20: mol_type = genomic DNA; note = Gene: CDK2; note = Location (start to end; relative to TSS): CDK2_32_62; note = Orientation (relative to transcription): sense; note = sgRNA Position: 55966888; note = Sequence Name: 56322-704_101_SL_seq_658
ctgcgttccatcccgacccg

SEQ ID NO: 659 - DNA, 20 bp, Homo sapiens
  source 1..20: mol_type = genomic DNA; note = Gene: CDK2; note = Location (start to end; relative to TSS): CDK2_64_94; note = Orientation (relative to transcription): antisense; note = sgRNA Position: 55966900; note = Sequence Name: 56322-704_101_SL_seq_659
ggaaacagggcccagtaccg

SEQ ID NO: 660 - DNA, 20 bp, Homo sapiens
  source 1..20: mol_type = genomic DNA; note = Gene: CDK4; note = Location (start to end; relative to TSS): CDK4_38_68; note = Orientation (relative to transcription): antisense; note = sgRNA Position: 57752268; note = Sequence Name: 56322-704_101_SL_seq_660
cgagctcggtccggagcagc

SEQ ID NO: 661 - DNA, 20 bp, Homo sapiens
  source 1..20: mol_type = genomic DNA; note = Gene: CDK4; note = Location (start to end; relative to TSS): CDK4_73_103; note = Orientation (relative to transcription): sense; note = sgRNA Position: 57752213; note = Sequence Name: 56322-704_101_SL_seq_661
cggctccggggccccgataa

SEQ ID NO: 662 - DNA, 20 bp, Homo sapiens
  source 1..20: mol_type = genomic DNA; note = Gene: CDK4; note = Location (start to end; relative to TSS): CDK4_30_60; note = Orientation (relative to transcription): sense; note = sgRNA Position: 57752256; note = Sequence Name: 56322-704_101_SL_seq_662
cagctgctccggaccgagct

SEQ ID NO: 663 - DNA, 20 bp, Homo sapiens
  source 1..20: mol_type = genomic DNA; note = Gene: CDK4; note = Location (start to end; relative to TSS): CDK4_72_102; note = Orientation (relative to transcription): antisense; note = sgRNA Position: 57752234; note = Sequence Name: 56322-704_101_SL_seq_663
ggccccggagccggttccta

SEQ ID NO: 664 - DNA, 20 bp, Homo sapiens
  source 1..20: mol_type = genomic DNA; note = Gene: CDK4; note = Location (start to end; relative to TSS): CDK4_31_61; note = Orientation (relative to transcription): sense; note = sgRNA Position: 57752255; note = Sequence Name: 56322-704_101_SL_seq_664
agctgctccggaccgagctc

SEQ ID NO: 665 - DNA, 20 bp, Homo sapiens
  source 1..20: mol_type = genomic DNA; note = Gene: CDK4; note = Location (start to end; relative to TSS): CDK4_61_91; note = Orientation (relative to transcription): sense; note = sgRNA Position: 57752225; note = Sequence Name: 56322-704_101_SL_seq_665
ggccgtaggaaccggctccg

SEQ ID NO: 666 - DNA, 20 bp, Homo sapiens
  source 1..20: mol_type = genomic DNA; note = Gene: CDK4; note = Location (start to end; relative to TSS): CDK4_29_59; note = Orientation (relative to transcription): antisense; note = sgRNA Position: 57752277; note = Sequence Name: 56322-704_101_SL_seq_666
tccggagcagctggacgcag

SEQ ID NO: 667 - DNA, 20 bp, Homo sapiens
  source 1..20: mol_type = genomic DNA; note = Gene: CDK4; note = Location (start to end; relative to TSS): CDK4_59_89; note = Orientation (relative to transcription): sense; note = sgRNA Position: 57752227; note = Sequence Name: 56322-704_101_SL_seq_667
ggggccgtaggaaccggctc

SEQ ID NO: 668 - DNA, 20 bp, Homo sapiens
  source 1..20: mol_type = genomic DNA; note = Gene: CDK4; note = Location (start to end; relative to TSS): CDK4_19_49; note = Orientation (relative to transcription): sense; note = sgRNA Position: 57752267; note = Sequence Name: 56322-704_101_SL_seq_668
ccctctgcgtccagctgctc

SEQ ID NO: 669 - DNA, 20 bp, Homo sapiens
  source 1..20: mol_type = genomic DNA; note = Gene: CDK4; note = Location (start to end; relative to TSS): CDK4_52_82; note = Orientation (relative to transcription): antisense; note = sgRNA Position: 57752254; note = Sequence Name: 56322-704_101_SL_seq_669
cggccccatacacccgagct

SEQ ID NO: 670 - DNA, 20 bp, Homo sapiens
  source 1..20: mol_type = genomic DNA; note = Gene: CDK6; note = Location (start to end; relative to TSS): CDK6_42_72; note = Orientation (relative to transcription): sense; note = sgRNA Position: 92836507; note = Sequence Name: 56322-704_101_SL_seq_670
acactcgcagccccctcggg

SEQ ID NO: 671 - DNA, 20 bp, Homo sapiens
  source 1..20: mol_type = genomic DNA; note = Gene: CDK6; note = Location (start to end; relative to TSS): CDK6_85_115; note = Orientation (relative to transcription): sense; note = sgRNA Position: 92836464; note = Sequence Name: 56322-704_101_SL_seq_671
caggtgaggagctgtgcgct

SEQ ID NO: 672 - DNA, 20 bp, Homo sapiens
  source 1..20: mol_type = genomic DNA; note = Gene: CDK6; note = Location (start to end; relative to TSS): CDK6_44_74; note = Orientation (relative to transcription): antisense; note = sgRNA Position: 92836525; note = Sequence Name: 56322-704_101_SL_seq_672
agggggctgcgagtgtcagt

SEQ ID NO: 673 - DNA, 20 bp, Homo sapiens
  source 1..20: mol_type = genomic DNA; note = Gene: CDK6; note = Location (start to end; relative to TSS): CDK6_75_105; note = Orientation (relative to transcription): antisense; note = sgRNA Position: 92836494; note = Sequence Name: 56322-704_101_SL_seq_673
cctgaggggcccagtcgcgt

SEQ ID NO: 674 - DNA, 20 bp, Homo sapiens
  source 1..20: mol_type = genomic DNA; note = Gene: CDK6; note = Location (start to end; relative to TSS): CDK6_38_68; note = Orientation (relative to transcription): sense; note = sgRNA Position: 92836511; note = Sequence Name: 56322-704_101_SL_seq_674
actgacactcgcagccccct

SEQ ID NO: 675 - DNA, 20 bp, Homo sapiens
  source 1..20: mol_type = genomic DNA; note = Gene: CDK6; note = Location (start to end; relative to TSS): CDK6_74_104; note = Orientation (relative to transcription): antisense; note = sgRNA Position: 92836495; note = Sequence Name: 56322-704_101_SL_seq_675
ctgaggggcccagtcgcgtc

SEQ ID NO: 676 - DNA, 20 bp, Homo sapiens
  source 1..20: mol_type = genomic DNA; note = Gene: CDK6; note = Location (start to end; relative to TSS): CDK6_39_69; note = Orientation (relative to transcription): sense; note = sgRNA Position: 92836510; note = Sequence Name: 56322-704_101_SL_seq_676
ctgacactcgcagccccctc

SEQ ID NO: 677 - DNA, 20 bp, Homo sapiens
  source 1..20: mol_type = genomic DNA; note = Gene: CDK6; note = Location (start to end; relative to TSS): CDK6_71_101; note = Orientation (relative to transcription): sense; note = sgRNA Position: 92836478; note = Sequence Name: 56322-704_101_SL_seq_677
gcgactgggcccctcaggtg

SEQ ID NO: 678 - DNA, 20 bp, Homo sapiens
  source 1..20: mol_type = genomic DNA; note = Gene: CDK6; note = Location (start to end; relative to TSS): CDK6_24_54; note = Orientation (relative to transcription): antisense; note = sgRNA Position: 92836545; note = Sequence Name: 56322-704_101_SL_seq_678
cggctctccgcacgtgtccg

SEQ ID NO: 679 - DNA, 20 bp, Homo sapiens
  source 1..20: mol_type = genomic DNA; note = Gene: CDK6; note = Location (start to end; relative to TSS): CDK6_57_87; note = Orientation (relative to transcription): sense; note = sgRNA Position: 92836492; note = Sequence Name: 56322-704_101_SL_seq_679
tcgggaggcccgacgcgact

SEQ ID NO: 680 - DNA, 20 bp, Homo sapiens
  source 1..20: mol_type = genomic DNA; note = Gene: CDK7; note = Location (start to end; relative to TSS): CDK7_44_74; note = Orientation (relative to transcription): sense; note = sgRNA Position: 69234956; note = Sequence Name: 56322-704_101_SL_seq_680
cgcccttttcggctggagtc

SEQ ID NO: 681 - DNA, 20 bp, Homo sapiens
  source 1..20: mol_type = genomic DNA; note = Gene: CDK7; note = Location (start to end; relative to TSS): CDK7_83_113; note = Orientation (relative to transcription): sense; note = sgRNA Position: 69234995; note = Sequence Name: 56322-704_101_SL_seq_681
ggctctggacgtgaagtctc

SEQ ID NO: 682 - DNA, 20 bp, Homo sapiens
  source 1..20: mol_type = genomic DNA; note = Gene: CDK7; note = Location (start to end; relative to TSS): CDK7_43_73; note = Orientation (relative to transcription): antisense; note = sgRNA Position: 69234935; note = Sequence Name: 56322-704_101_SL_seq_682
gccgaaaagggcgagctccc

SEQ ID NO: 683 - DNA, 20 bp, Homo sapiens
  source 1..20: mol_type = genomic DNA; note = Gene: CDK7; note = Location (start to end; relative to TSS): CDK7_82_112; note = Orientation (relative to transcription): sense; note = sgRNA Position: 69234994; note = Sequence Name: 56322-704_101_SL_seq_683
tggctctggacgtgaagtct

SEQ ID NO: 684 - DNA, 20 bp, Homo sapiens
  source 1..20: mol_type = genomic DNA; note = Gene: CDK7; note = Location (start to end; relative to TSS): CDK7_37_67; note = Orientation (relative to transcription): sense; note = sgRNA Position: 69234949; note = Sequence Name: 56322-704_101_SL_seq_684
gggagctcgcccttttcggc

SEQ ID NO: 685 - DNA, 20 bp, Homo sapiens
  source 1..20: mol_type = genomic DNA; note = Gene: CDK7; note = Location (start to end; relative to TSS): CDK7_68_98; note = Orientation (relative to transcription): sense; note = sgRNA Position: 69234980; note = Sequence Name: 56322-704_101_SL_seq_685
tttacggcgccggatggctc

SEQ ID NO: 686 - DNA, 20 bp, Homo sapiens
  source 1..20: mol_type = genomic DNA; note = Gene: CDK7; note = Location (start to end; relative to TSS): CDK7_17_47; note = Orientation (relative to transcription): sense; note = sgRNA Position: 69234929; note = Sequence Name: 56322-704_101_SL_seq_686
ctttaaattcgtgttgtcct

SEQ ID NO: 687 - DNA, 20 bp, Homo sapiens
  source 1..20: mol_type = genomic DNA; note = Gene: CDK7; note = Location (start to end; relative to TSS): CDK7_55_85; note = Orientation (relative to transcription): antisense; note = sgRNA Position: 69234947; note = Sequence Name: 56322-704_101_SL_seq_687
agcccgactccagccgaaaa

SEQ ID NO: 688 - DNA, 20 bp, Homo sapiens
  source 1..20: mol_type = genomic DNA; note = Gene: CDK7; note = Location (start to end; relative to TSS): CDK7_16_46; note = Orientation (relative to transcription): sense; note = sgRNA Position: 69234928; note = Sequence Name: 56322-704_101_SL_seq_688
gctttaaattcgtgttgtcc

SEQ ID NO: 689 - DNA, 20 bp, Homo sapiens
  source 1..20: mol_type = genomic DNA; note = Gene: CDK7; note = Location (start to end; relative to TSS): CDK7_52_82; note = Orientation (relative to transcription): sense; note = sgRNA Position: 69234964; note = Sequence Name: 56322-704_101_SL_seq_689
tcggctggagtcgggcttta

SEQ ID NO: 690 - DNA, 20 bp, Homo sapiens
  source 1..20: mol_type = genomic DNA; note = Gene: CDK9; note = Location (start to end; relative to TSS): CDK9_42_72; note = Orientation (relative to transcription): sense; note = sgRNA Position: 127786102; note = Sequence Name: 56322-704_101_SL_seq_690
gggacccggagcaggagcgg

SEQ ID NO: 691 - DNA, 20 bp, Homo sapiens
  source 1..20: mol_type = genomic DNA; note = Gene: CDK9; note = Location (start to end; relative to TSS): CDK9_105_135; note = Orientation (relative to transcription): sense; note = sgRNA Position: 127786165; note = Sequence Name: 56322-704_101_SL_seq_691
catggcaaagcagtacgact

SEQ ID NO: 692 - DNA, 20 bp, Homo sapiens
  source 1..20: mol_type = genomic DNA; note = Gene: CDK9; note = Location (start to end; relative to TSS): CDK9_39_69; note = Orientation (relative to transcription): sense; note = sgRNA Position: 127786099; note = Sequence Name: 56322-704_101_SL_seq_692
ggcgggacccggagcaggag

SEQ ID NO: 693 - DNA, 20 bp, Homo sapiens
  source 1..20: mol_type = genomic DNA; note = Gene: CDK9; note = Location (start to end; relative to TSS): CDK9_87_117; note = Orientation (relative to transcription): sense; note = sgRNA Position: 127786147; note = Sequence Name: 56322-704_101_SL_seq_693
cggcgcgttggaggcggcca

SEQ ID NO: 694 - DNA, 20 bp, Homo sapiens
  source 1..20: mol_type = genomic DNA; note = Gene: CDK9; note = Location (start to end; relative to TSS): CDK9_32_62; note = Orientation (relative to transcription): antisense; note = sgRNA Position: 127786072; note = Sequence Name: 56322-704_101_SL_seq_694
tcccgccgccgccgcactcc

SEQ ID NO: 695 - DNA, 20 bp, Homo sapiens
  source 1..20: mol_type = genomic DNA; note = Gene: CDK9; note = Location (start to end; relative to TSS): CDK9_75_105; note = Orientation (relative to transcription): sense; note = sgRNA Position: 127786135; note = Sequence Name: 56322-704_101_SL_seq_695
tgggggcggcggcggcgcgt

SEQ ID NO: 696 - DNA, 20 bp, Homo sapiens
  source 1..20: mol_type = genomic DNA; note = Gene: CDK9; note = Location (start to end; relative to TSS): CDK9_21_51; note = Orientation (relative to transcription): antisense; note = sgRNA Position: 127786061; note = Sequence Name: 56322-704_101_SL_seq_696
ccgcactccaggcccctccg

SEQ ID NO: 697 - DNA, 20 bp, Homo sapiens
  source 1..20: mol_type = genomic DNA; note = Gene: CDK9; note = Location (start to end; relative to TSS): CDK9_56_86; note = Orientation (relative to transcription): sense; note = sgRNA Position: 127786116; note = Sequence Name: 56322-704_101_SL_seq_697
gagcggcggcagcagcgact

SEQ ID NO: 698 - DNA, 20 bp, Homo sapiens
  source 1..20: mol_type = genomic DNA; note = Gene: CDK9; note = Location (start to end; relative to TSS): CDK9_15_45; note = Orientation (relative to transcription): sense; note = sgRNA Position: 127786075; note = Sequence Name: 56322-704_101_SL_seq_698
cggaggggcctggagtgcgg

SEQ ID NO: 699 - DNA, 20 bp, Homo sapiens
  source 1..20: mol_type = genomic DNA; note = Gene: CDK9; note = Location (start to end; relative to TSS): CDK9_55_85; note = Orientation (relative to transcription): antisense; note = sgRNA Position: 127786095; note = Sequence Name: 56322-704_101_SL_seq_699
gctgccgccgctcctgctcc

SEQ ID NO: 700 - DNA, 20 bp, Homo sapiens
  source 1..20: mol_type = genomic DNA; note = Gene: CDKN2A; note = Location (start to end; relative to TSS): CDKN2A_48_78; note = Orientation (relative to transcription): sense; note = sgRNA Position: 21974785; note = Sequence Name: 56322-704_101_SL_seq_700
ggagccttcggctgactggc

SEQ ID NO: 701 - DNA, 20 bp, Homo sapiens
  source 1..20: mol_type = genomic DNA; note = Gene: CDKN2A; note = Location (start to end; relative to TSS): CDKN2A_80_110; note = Orientation (relative to transcription): antisense; note = sgRNA Position: 21974773; note = Sequence Name: 56322-704_101_SL_seq_701
ccgaccccgggccgcggccg

SEQ ID NO: 702 - DNA, 20 bp, Homo sapiens
  source 1..20: mol_type = genomic DNA; note = Gene: CDKN2A; note = Location (start to end; relative to TSS): CDKN2A_37_67; note = Orientation (relative to transcription): antisense; note = sgRNA Position: 21974816; note = Sequence Name: 56322-704_101_SL_seq_702
tccatgctgctccccgccgc

SEQ ID NO: 703 - DNA, 20 bp, Homo sapiens
  source 1..20: mol_type = genomic DNA; note = Gene: CDKN2A; note = Location (start to end; relative to TSS): CDKN2A_71_101; note = Orientation (relative to transcription): sense; note = sgRNA Position: 21974762; note = Sequence Name: 56322-704_101_SL_seq_703
ccacggccgcggcccggggt

SEQ ID NO: 704 - DNA, 20 bp, Homo sapiens
  source 1..20: mol_type = genomic DNA; note = Gene: CDKN2A; note = Location (start to end; relative to TSS): CDKN2A_36_66; note = Orientation (relative to transcription): sense; note = sgRNA Position: 21974797; note = Sequence Name: 56322-704_101_SL_seq_704
ggggagcagcatggagcctt

SEQ ID NO: 705 - DNA, 20 bp, Homo sapiens
  source 1..20: mol_type = genomic DNA; note = Gene: CDKN2A; note = Location (start to end; relative to TSS): CDKN2A_67_97; note = Orientation (relative to transcription): sense; note = sgRNA Position: 21974766; note = Sequence Name: 56322-704_101_SL_seq_705
ctggccacggccgcggcccg

SEQ ID NO: 706 - DNA, 20 bp, Homo sapiens
  source 1..20: mol_type = genomic DNA; note = Gene: CDKN2A; note = Location (start to end; relative to TSS): CDKN2A_27_57; note = Orientation (relative to transcription): sense; note = sgRNA Position: 21974806; note = Sequence Name: 56322-704_101_SL_seq_706
gccggcggcggggagcagca

SEQ ID NO: 707 - DNA, 20 bp, Homo sapiens
  source 1..20: mol_type = genomic DNA; note = Gene: CDKN2A; note = Location (start to end; relative to TSS): CDKN2A_60_90; note = Orientation (relative to transcription): sense; note = sgRNA Position: 21974773; note = Sequence Name: 56322-704_101_SL_seq_707
tgactggctggccacggccg

SEQ ID NO: 708 - DNA, 20 bp, Homo sapiens
  source 1..20: mol_type = genomic DNA; note = Gene: CDKN2A; note = Location (start to end; relative to TSS): CDKN2A_17_47; note = Orientation (relative to transcription): sense; note = sgRNA Position: 21974816; note = Sequence Name: 56322-704_101_SL_seq_708
gcagcatggagccggcggcg

SEQ ID NO: 709 - DNA, 20 bp, Homo sapiens
  source 1..20: mol_type = genomic DNA; note = Gene: CDKN2A; note = Location (start to end; relative to TSS): CDKN2A_48_78; note = Orientation (relative to transcription): sense; note = sgRNA Position: 21974785; note = Sequence Name: 56322-704_101_SL_seq_709
ggagccttcggctgactggc

SEQ ID NO: 710 - DNA, 20 bp, Homo sapiens
  source 1..20: mol_type = genomic DNA; note = Gene: CHEK1; note = Location (start to end; relative to TSS): CHEK1_74_104; note = Orientation (relative to transcription): antisense; note = sgRNA Position: 125625243; note = Sequence Name: 56322-704_101_SL_seq_710
cttcagcccggtctttttgc

SEQ ID NO: 711 - DNA, 20 bp, Homo sapiens
  source 1..20: mol_type = genomic DNA; note = Gene: CHEK1; note = Location (start to end; relative to TSS): CHEK1_111_141; note = Orientation (relative to transcription): sense; note = sgRNA Position: 125625300; note = Sequence Name: 56322-704_101_SL_seq_711
tcacagaaaaaaggcaaaac

SEQ ID NO: 712 - DNA, 20 bp, Homo sapiens
  source 1..20: mol_type = genomic DNA; note = Gene: CHEK1; note = Location (start to end; relative to TSS): CHEK1_14_44; note = Orientation (relative to transcription): antisense; note = sgRNA Position: 125625183; note = Sequence Name: 56322-704_101_SL_seq_712
atttttaatgtgcaaagaac

SEQ ID NO: 713 - DNA, 20 bp, Homo sapiens
  source 1..20: mol_type = genomic DNA; note = Gene: CHEK1; note = Location (start to end; relative to TSS): CHEK1_87_117; note = Orientation (relative to transcription): sense; note = sgRNA Position: 125625276; note = Sequence Name: 56322-704_101_SL_seq_713
gtaaagcattgttttggagc

SEQ ID NO: 714 - DNA, 20 bp, Homo sapiens
  source 1..20: mol_type = genomic DNA; note = Gene: CHEK1; note = Location (start to end; relative to TSS): CHEK1_11_41; note = Orientation (relative to transcription): antisense; note = sgRNA Position: 125625180; note = Sequence Name: 56322-704_101_SL_seq_714
tttaatgtgcaaagaacagg

SEQ ID NO: 715 - DNA, 20 bp, Homo sapiens
  source 1..20: mol_type = genomic DNA; note = Gene: CHEK1; note = Location (start to end; relative to TSS): CHEK1_86_116; note = Orientation (relative to transcription): antisense; note = sgRNA Position: 125625255; note = Sequence Name: 56322-704_101_SL_seq_715
aacaatgctttacttcagcc

SEQ ID NO: 716 - DNA, 20 bp, Homo sapiens
  source 1..20: mol_type = genomic DNA; note = Gene: CHEK1; note = Location (start to end; relative to TSS): CHEK1_10_40; note = Orientation (relative to transcription): antisense; note = sgRNA Position: 125625179; note = Sequence Name: 56322-704_101_SL_seq_716
ttaatgtgcaaagaacaggc

SEQ ID NO: 717 - DNA, 20 bp, Homo sapiens
  source 1..20: mol_type = genomic DNA; note = Gene: CHEK1; note = Location (start to end; relative to TSS): CHEK1_81_111; note = Orientation (relative to transcription): sense; note = sgRNA Position: 125625270; note = Sequence Name: 56322-704_101_SL_seq_717
gctgaagtaaagcattgttt

SEQ ID NO: 718 - DNA, 20 bp, Homo sapiens
  source 1..20: mol_type = genomic DNA; note = Gene: CHEK1; note = Location (start to end; relative to TSS): CHEK1_9_39; note = Orientation (relative to transcription): antisense; note = sgRNA Position: 125625178; note = Sequence Name: 56322-704_101_SL_seq_718
taatgtgcaaagaacaggcg

SEQ ID NO: 719 - DNA, 20 bp, Homo sapiens
  source 1..20: mol_type = genomic DNA; note = Gene: CHEK1; note = Location (start to end; relative to TSS): CHEK1_74_104; note = Orientation (relative to transcription): antisense; note = sgRNA Position: 125625243; note = Sequence Name: 56322-704_101_SL_seq_719
cttcagcccggtctttttgc

SEQ ID NO: 720 - DNA, 20 bp, Homo sapiens
  source 1..20: mol_type = genomic DNA; note = Gene: CHEK2; note = Location (start to end; relative to TSS): CHEK2_35_65; note = Orientation (relative to transcription): sense; note = sgRNA Position: 28741761; note = Sequence Name: 56322-704_101_SL_seq_720
gctcacgcggtgagtcatat

SEQ ID NO: 721 - DNA, 20 bp, Homo sapiens
  source 1..20: mol_type = genomic DNA; note = Gene: CHEK2; note = Location (start to end; relative to TSS): CHEK2_130_160; note = Orientation (relative to transcription): antisense; note = sgRNA Position: 28741686; note = Sequence Name: 56322-704_101_SL_seq_721
ctacagacaaagcgaagctc

SEQ ID NO: 722 - DNA, 20 bp, Homo sapiens
  source 1..20: mol_type = genomic DNA; note = Gene: CHEK2; note = Location (start to end; relative to TSS): CHEK2_36_66; note = Orientation (relative to transcription): sense; note = sgRNA Position: 28741760; note = Sequence Name: 56322-704_101_SL_seq_722
ctcacgcggtgagtcatatg

SEQ ID NO: 723 - DNA, 20 bp, Homo sapiens
  source 1..20: mol_type = genomic DNA; note = Gene: CHEK2; note = Location (start to end; relative to TSS): CHEK2_99_129; note = Orientation (relative to transcription): antisense; note = sgRNA Position: 28741717; note = Sequence Name: 56322-704_101_SL_seq_723
ttcgcacaaaacgcttaaga

SEQ ID NO: 724 - DNA, 20 bp, Homo sapiens
  source 1..20: mol_type = genomic DNA; note = Gene: CHEK2; note = Location (start to end; relative to TSS): CHEK2_48_78; note = Orientation (relative to transcription): sense; note = sgRNA Position: 28741748; note = Sequence Name: 56322-704_101_SL_seq_724
gtcatatggggaacttctgt

SEQ ID NO: 725 - DNA, 20 bp, Homo sapiens
  source 1..20: mol_type = genomic DNA; note = Gene: CHEK2; note = Location (start to end; relative to TSS): CHEK2_98_128; note = Orientation (relative to transcription): antisense; note = sgRNA Position: 28741718; note = Sequence Name: 56322-704_101_SL_seq_725
tcgcacaaaacgcttaagat

SEQ ID NO: 726 - DNA, 20 bp, Homo sapiens
  source 1..20: mol_type = genomic DNA; note = Gene: CHEK2; note = Location (start to end; relative to TSS): CHEK2_49_79; note = Orientation (relative to transcription): sense; note = sgRNA Position: 28741747; note = Sequence Name: 56322-704_101_SL_seq_726
tcatatggggaacttctgtt

SEQ ID NO: 727 - DNA, 20 bp, Homo sapiens
  source 1..20: mol_type = genomic DNA; note = Gene: CHEK2; note = Location (start to end; relative to TSS): CHEK2_93_123; note = Orientation (relative to transcription): sense; note = sgRNA Position: 28741703; note = Sequence Name: 56322-704_101_SL_seq_727
tcttaagcgttttgtgcgaa

SEQ ID NO: 728 - DNA, 20 bp, Homo sapiens
  source 1..20: mol_type = genomic DNA; note = Gene: CHEK2; note = Location (start to end; relative to TSS): CHEK2_22_52; note = Orientation (relative to transcription): sense; note = sgRNA Position: 28741774; note = Sequence Name: 56322-704_101_SL_seq_728
cggctccaggtgggctcacg

SEQ ID NO: 729 - DNA, 20 bp, Homo sapiens
  source 1..20: mol_type = genomic DNA; note = Gene: CHEK2; note = Location (start to end; relative to TSS): CHEK2_59_89; note = Orientation (relative to transcription): sense; note = sgRNA Position: 28741737; note = Sequence Name: 56322-704_101_SL_seq_729
aacttctgttgggtgtttgg

SEQ ID NO: 730 - DNA, 20 bp, Homo sapiens
  source 1..20: mol_type = genomic DNA; note = Gene: CPSF3; note = Location (start to end; relative to TSS): CPSF3_44_74; note = Orientation (relative to transcription): antisense; note = sgRNA Position: 9423704; note = Sequence Name: 56322-704_101_SL_seq_730
taaattggaagcacagccac

SEQ ID NO: 731 - DNA, 20 bp, Homo sapiens
  source 1..20: mol_type = genomic DNA; note = Gene: CPSF3; note = Location (start to end; relative to TSS): CPSF3_75_105; note = Orientation (relative to transcription): antisense; note = sgRNA Position: 9423735; note = Sequence Name: 56322-704_101_SL_seq_731
gggggtgaggaacaggtcgc

SEQ ID NO: 732 - DNA, 20 bp, Homo sapiens
  source 1..20: mol_type = genomic DNA; note = Gene: CPSF3; note = Location (start to end; relative to TSS): CPSF3_31_61; note = Orientation (relative to transcription): antisense; note = sgRNA Position: 9423691; note = Sequence Name: 56322-704_101_SL_seq_732
cagccaccggtaaataaaaa

SEQ ID NO: 733 - DNA, 20 bp, Homo sapiens
  source 1..20: mol_type = genomic DNA; note = Gene: CPSF3; note = Location (start to end; relative to TSS): CPSF3_74_104; note = Orientation (relative to transcription): antisense; note = sgRNA Position: 9423734; note = Sequence Name: 56322-704_101_SL_seq_733
ggggtgaggaacaggtcgcc

SEQ ID NO: 734 - DNA, 20 bp, Homo sapiens
  source 1..20: mol_type = genomic DNA; note = Gene: CPSF3; note = Location (start to end; relative to TSS): CPSF3_19_49; note = Orientation (relative to transcription): sense; note = sgRNA Position: 9423699; note = Sequence Name: 56322-704_101_SL_seq_734
cttccttttttatttaccgg

SEQ ID NO: 735 - DNA, 20 bp, Homo sapiens
  source 1..20: mol_type = genomic DNA; note = Gene: CPSF3; note = Location (start to end; relative to TSS): CPSF3_73_103; note = Orientation (relative to transcription): antisense; note = sgRNA Position: 9423733; note = Sequence Name: 56322-704_101_SL_seq_735
gggtgaggaacaggtcgccg

SEQ ID NO: 736 - DNA, 20 bp, Homo sapiens
  source 1..20: mol_type = genomic DNA; note = Gene: CPSF3; note = Location (start to end; relative to TSS): CPSF3_-6_24; note = Orientation (relative to transcription): sense; note = sgRNA Position: 9423674; note = Sequence Name: 56322-704_101_SL_seq_736
agttgtgctcttggtgaatg

SEQ ID NO: 737 - DNA, 20 bp, Homo sapiens
  source 1..20: mol_type = genomic DNA; note = Gene: CPSF3; note = Location (start to end; relative to TSS): CPSF3_31_61; note = Orientation (relative to transcription): antisense; note = sgRNA Position: 9423691; note = Sequence Name: 56322-704_101_SL_seq_737
cagccaccggtaaataaaaa

SEQ ID NO: 738 - DNA, 20 bp, Homo sapiens
  source 1..20: mol_type = genomic DNA; note = Gene: CPSF3; note = Location (start to end; relative to TSS): CPSF3_-7_23; note = Orientation (relative to transcription): sense; note = sgRNA Position: 9423673; note = Sequence Name: 56322-704_101_SL_seq_738
aagttgtgctcttggtgaat

SEQ ID NO: 739 - DNA, 20 bp, Homo sapiens
  source 1..20: mol_type = genomic DNA; note = Gene: CPSF3; note = Location (start to end; relative to TSS): CPSF3_44_74; note = Orientation (relative to transcription): antisense; note = sgRNA Position: 9423704; note = Sequence Name: 56322-704_101_SL_seq_739
taaattggaagcacagccac

SEQ ID NO: 740 - DNA, 20 bp, Homo sapiens
  source 1..20: mol_type = genomic DNA; note = Gene: CSF1R; note = Location (start to end; relative to TSS): CSF1R_46_76; note = Orientation (relative to transcription): antisense; note = sgRNA Position: 150086504; note = Sequence Name: 56322-704_101_SL_seq_740
tctcagctactagctccgca

SEQ ID NO: 741 - DNA, 20 bp, Homo sapiens
  source 1..20: mol_type = genomic DNA; note = Gene: CSF1R; note = Location (start to end; relative to TSS): CSF1R_94_124; note = Orientation (relative to transcription): sense; note = sgRNA Position: 150086436; note = Sequence Name: 56322-704_101_SL_seq_741
tgcctgccacttccccaccg

SEQ ID NO: 742 - DNA, 20 bp, Homo sapiens
  source 1..20: mol_type = genomic DNA; note = Gene: CSF1R; note = Location (start to end; relative to TSS): CSF1R_41_71; note = Orientation (relative to transcription): antisense; note = sgRNA Position: 150086509; note = Sequence Name: 56322-704_101_SL_seq_742
gctactagctccgcagggat

SEQ ID NO: 743 - DNA, 20 bp, Homo sapiens
  source 1..20: mol_type = genomic DNA; note = Gene: CSF1R; note = Location (start to end; relative to TSS): CSF1R_86_116; note = Orientation (relative to transcription): antisense; note = sgRNA Position: 150086464; note = Sequence Name: 56322-704_101_SL_seq_743
caggcaggtgcagggctgca

SEQ ID NO: 744 - DNA, 20 bp, Homo sapiens
  source 1..20: mol_type = genomic DNA; note = Gene: CSF1R; note = Location (start to end; relative to TSS): CSF1R_40_70; note = Orientation (relative to transcription): antisense; note = sgRNA Position: 150086510; note = Sequence Name: 56322-704_101_SL_seq_744
ctactagctccgcagggatc

SEQ ID NO: 745 - DNA, 20 bp, Homo sapiens
  source 1..20: mol_type = genomic DNA; note = Gene: CSF1R; note = Location (start to end; relative to TSS): CSF1R_78_108; note = Orientation (relative to transcription): antisense; note = sgRNA Position: 150086472; note = Sequence Name: 56322-704_101_SL_seq_745
tgcagggctgcaaggtgccc

SEQ ID NO: 746 - DNA, 20 bp, Homo sapiens
  source 1..20: mol_type = genomic DNA; note = Gene: CSF1R; note = Location (start to end; relative to TSS): CSF1R_33_63; note = Orientation (relative to transcription): antisense; note = sgRNA Position: 150086517; note = Sequence Name: 56322-704_101_SL_seq_746
ctccgcagggatcgggacac

SEQ ID NO: 747 - DNA, 20 bp, Homo sapiens
  source 1..20: mol_type = genomic DNA; note = Gene: CSF1R; note = Location (start to end; relative to TSS): CSF1R_77_107; note = Orientation (relative to transcription): antisense; note = sgRNA Position: 150086473; note = Sequence Name: 56322-704_101_SL_seq_747
gcagggctgcaaggtgccca

SEQ ID NO: 748 - DNA, 20 bp, Homo sapiens
  source 1..20: mol_type = genomic DNA; note = Gene: CSF1R; note = Location (start to end; relative to TSS): CSF1R_22_52; note = Orientation (relative to transcription): sense; note = sgRNA Position: 150086508; note = Sequence Name: 56322-704_101_SL_seq_748
gtccagtgtcccgatccctg

SEQ ID NO: 749 - DNA, 20 bp, Homo sapiens
  source 1..20: mol_type = genomic DNA; note = Gene: CSF1R; note = Location (start to end; relative to TSS): CSF1R_52_82; note = Orientation (relative to transcription): sense; note = sgRNA Position: 150086478; note = Sequence Name: 56322-704_101_SL_seq_749
agctgagagctctgtgccct

SEQ ID NO: 750 - DNA, 20 bp, Homo sapiens
  source 1..20: mol_type = genomic DNA; note = Gene: DHFR; note = Location (start to end; relative to TSS): DHFR_28_58; note = Orientation (relative to transcription): sense; note = sgRNA Position: 80654931; note = Sequence Name: 56322-704_101_SL_seq_750
ggggcgggaaggcgggagct

SEQ ID NO: 751 - DNA, 20 bp, Homo sapiens
  source 1..20: mol_type = genomic DNA; note = Gene: DHFR; note = Location (start to end; relative to TSS): DHFR_91_121; note = Orientation (relative to transcription): sense; note = sgRNA Position: 80654868; note = Sequence Name: 56322-704_101_SL_seq_751
ctgcagcgccagggtccacc

SEQ ID NO: 752 - DNA, 20 bp, Homo sapiens
  source 1..20: mol_type = genomic DNA; note = Gene: DHFR; note = Location (start to end; relative to TSS): DHFR_47_77; note = Orientation (relative to transcription): sense; note = sgRNA Position: 80654912; note = Sequence Name: 56322-704_101_SL_seq_752
tgggggcgctgggggcgctg

SEQ ID NO: 753 - DNA, 20 bp, Homo sapiens
  source 1..20: mol_type = genomic DNA; note = Gene: DHFR; note = Location (start to end; relative to TSS): DHFR_88_118; note = Orientation (relative to transcription): antisense; note = sgRNA Position: 80654891; note = Sequence Name: 56322-704_101_SL_seq_753
tggcgctgcagcggctgcag

SEQ ID NO: 754 - DNA, 20 bp, Homo sapiens
  source 1..20: mol_type = genomic DNA; note = Gene: DHFR; note = Location (start to end; relative to TSS): DHFR_30_60; note = Orientation (relative to transcription): sense; note = sgRNA Position: 80654929; note = Sequence Name: 56322-704_101_SL_seq_754
ggcgggaaggcgggagctgg

SEQ ID NO: 755 - DNA, 20 bp, Homo sapiens
  source 1..20: mol_type = genomic DNA; note = Gene: DHFR; note = Location (start to end; relative to TSS): DHFR_82_112; note = Orientation (relative to transcription): sense; note = sgRNA Position: 80654877; note = Sequence Name: 56322-704_101_SL_seq_755
ctgcagccgctgcagcgcca

SEQ ID NO: 756 - DNA, 20 bp, Homo sapiens
  source 1..20: mol_type = genomic DNA; note = Gene: DHFR; note = Location (start to end; relative to TSS): DHFR_29_59; note = Orientation (relative to transcription): sense; note = sgRNA Position: 80654930; note = Sequence Name: 56322-704_101_SL_seq_756
gggcgggaaggcgggagctg

SEQ ID NO: 757 - DNA, 20 bp, Homo sapiens
  source 1..20: mol_type = genomic DNA; note = Gene: DHFR; note = Location (start to end; relative to TSS): DHFR_79_109; note = Orientation (relative to transcription): antisense; note = sgRNA Position: 80654900; note = Sequence Name: 56322-704_101_SL_seq_757
agcggctgcagcggccgcag

SEQ ID NO: 758 - DNA, 20 bp, Homo sapiens
  source 1..20: mol_type = genomic DNA; note = Gene: DHFR; note = Location (start to end; relative to TSS): DHFR_21_51; note = Orientation (relative to transcription): sense; note = sgRNA Position: 80654938; note = Sequence Name: 56322-704_101_SL_seq_758
ggcagctggggcgggaaggc

SEQ ID NO: 759 - DNA, 20 bp, Homo sapiens
  source 1..20: mol_type = genomic DNA; note = Gene: DHFR; note = Location (start to end; relative to TSS): DHFR_56_86; note = Orientation (relative to transcription): sense; note = sgRNA Position: 80654903; note = Sequence Name: 56322-704_101_SL_seq_759
tgggggcgctgcggccgctg

SEQ ID NO: 760 - DNA, 20 bp, Homo sapiens
  source 1..20: mol_type = genomic DNA; note = Gene: DHX15; note = Location (start to end; relative to TSS): DHX15_31_61; note = Orientation (relative to transcription): sense; note = sgRNA Position: 24584499; note = Sequence Name: 56322-704_101_SL_seq_760
accgtgtgggctgtagtagc

SEQ ID NO: 761 - DNA, 20 bp, Homo sapiens
  source 1..20: mol_type = genomic DNA; note = Gene: DHX15; note = Location (start to end; relative to TSS): DHX15_108_138; note = Orientation (relative to transcription): antisense; note = sgRNA Position: 24584442; note = Sequence Name: 56322-704_101_SL_seq_761
gaagaaagctggctgctgta

SEQ ID NO: 762 - DNA, 20 bp, Homo sapiens
  source 1..20: mol_type = genomic DNA; note = Gene: DHX15; note = Location (start to end; relative to TSS): DHX15_32_62; note = Orientation (relative to transcription): antisense; note = sgRNA Position: 24584518; note = Sequence Name: 56322-704_101_SL_seq_762
tacagcccacacggtgcggc

SEQ ID NO: 763 - DNA, 20 bp, Homo sapiens
  source 1..20: mol_type = genomic DNA; note = Gene: DHX15; note = Location (start to end; relative to TSS): DHX15_107_137; note = Orientation (relative to transcription): antisense; note = sgRNA Position: 24584443; note = Sequence Name: 56322-704_101_SL_seq_763
aagaaagctggctgctgtat

SEQ ID NO: 764 - DNA, 20 bp, Homo sapiens
  source 1..20: mol_type = genomic DNA; note = Gene: DHX15; note = Location (start to end; relative to TSS): DHX15_34_64; note = Orientation (relative to transcription): sense; note = sgRNA Position: 24584496; note = Sequence Name: 56322-704_101_SL_seq_764
gtgtgggctgtagtagcggg

SEQ ID NO: 765 - DNA, 20 bp, Homo sapiens
  source 1..20: mol_type = genomic DNA; note = Gene: DHX15; note = Location (start to end; relative to TSS): DHX15_96_126; note = Orientation (relative to transcription): antisense; note = sgRNA Position: 24584454; note = Sequence Name: 56322-704_101_SL_seq_765
ctgctgtatgggcacagtcg

SEQ ID NO: 766 - DNA, 20 bp, Homo sapiens
  source 1..20: mol_type = genomic DNA; note = Gene: DHX15; note = Location (start to end; relative to TSS): DHX15_18_48; note = Orientation (relative to transcription): sense; note = sgRNA Position: 24584512; note = Sequence Name: 56322-704_101_SL_seq_766
tggttccggccgcaccgtgt

SEQ ID NO: 767 - DNA, 20 bp, Homo sapiens
  source 1..20: mol_type = genomic DNA; note = Gene: DHX15; note = Location (start to end; relative to TSS): DHX15_78_108; note = Orientation (relative to transcription): antisense; note = sgRNA Position: 24584472; note = Sequence Name: 56322-704_101_SL_seq_767
cgaggacagccacttaactc

SEQ ID NO: 768 - DNA, 20 bp, Homo sapiens
  source 1..20: mol_type = genomic DNA; note = Gene: DHX15; note = Location (start to end; relative to TSS): DHX15_30_60; note = Orientation (relative to transcription): sense; note = sgRNA Position: 24584500; note = Sequence Name: 56322-704_101_SL_seq_768
caccgtgtgggctgtagtag

SEQ ID NO: 769 - DNA, 20 bp, Homo sapiens
  source 1..20: mol_type = genomic DNA; note = Gene: DHX15; note = Location (start to end; relative to TSS): DHX15_75_105; note = Orientation (relative to transcription): antisense; note = sgRNA Position: 24584475; note = Sequence Name: 56322-704_101_SL_seq_769
ggacagccacttaactctgg

SEQ ID NO: 770 - DNA, 20 bp, Homo sapiens
  source 1..20: mol_type = genomic DNA; note = Gene: DNMT1; note = Location (start to end; relative to TSS): DNMT1_47_77; note = Orientation (relative to transcription): antisense; note = sgRNA Position: 10194902; note = Sequence Name: 56322-704_101_SL_seq_770
ggtacgcgccggcatctcgg

SEQ ID NO: 771 - DNA, 20 bp, Homo sapiens
  source 1..20: mol_type = genomic DNA; note = Gene: DNMT1; note = Location (start to end; relative to TSS): DNMT1_77_107; note = Orientation (relative to transcription): antisense; note = sgRNA Position: 10194872; note = Sequence Name: 56322-704_101_SL_seq_771
gacggccagtgtgggcaccc

SEQ ID NO: 772 - DNA, 20 bp, Homo sapiens
  source 1..20: mol_type = genomic DNA; note = Gene: DNMT1; note = Location (start to end; relative to TSS): DNMT1_29_59; note = Orientation (relative to transcription): antisense; note = sgRNA Position: 10194920; note = Sequence Name: 56322-704_101_SL_seq_772
ggaggcttcagcagacgcgg

SEQ ID NO: 773 - DNA, 20 bp, Homo sapiens
  source 1..20: mol_type = genomic DNA; note = Gene: DNMT1; note = Location (start to end; relative to TSS): DNMT1_71_101; note = Orientation (relative to transcription): antisense; note = sgRNA Position: 10194878; note = Sequence Name: 56322-704_101_SL_seq_773
cagtgtgggcacccgggctg

SEQ ID NO: 774 - DNA, 20 bp, Homo sapiens
  source 1..20: mol_type = genomic DNA; note = Gene: DNMT1; note = Location (start to end; relative to TSS): DNMT1_30_60; note = Orientation (relative to transcription): sense; note = sgRNA Position: 10194899; note = Sequence Name: 56322-704_101_SL_seq_774
tgctgaagcctccgagatgc

SEQ ID NO: 775 - DNA, 20 bp, Homo sapiens
  source 1..20: mol_type = genomic DNA; note = Gene: DNMT1; note = Location (start to end; relative to TSS): DNMT1_68_98; note = Orientation (relative to transcription): antisense; note = sgRNA Position: 10194881; note = Sequence Name: 56322-704_101_SL_seq_775
tgtgggcacccgggctgggg

SEQ ID NO: 776 - DNA, 20 bp, Homo sapiens
  source 1..20: mol_type = genomic DNA; note = Gene: DNMT1; note = Location (start to end; relative to TSS): DNMT1_32_62; note = Orientation (relative to transcription): antisense; note = sgRNA Position: 10194917; note = Sequence Name: 56322-704_101_SL_seq_776
ctcggaggcttcagcagacg

SEQ ID NO: 777 - DNA, 20 bp, Homo sapiens
  source 1..20: mol_type = genomic DNA; note = Gene: DNMT1; note = Location (start to end; relative to TSS): DNMT1_63_93; note = Orientation (relative to transcription): sense; note = sgRNA Position: 10194866; note = Sequence Name: 56322-704_101_SL_seq_777
cccagcccgggtgcccacac

SEQ ID NO: 778 - DNA, 20 bp, Homo sapiens
  source 1..20: mol_type = genomic DNA; note = Gene: DNMT1; note = Location (start to end; relative to TSS): DNMT1_26_56; note = Orientation (relative to transcription): antisense; note = sgRNA Position: 10194923; note = Sequence Name: 56322-704_101_SL_seq_778
ggcttcagcagacgcggcgg

SEQ ID NO: 779 - DNA, 20 bp, Homo sapiens
  source 1..20: mol_type = genomic DNA; note = Gene: DNMT1; note = Location (start to end; relative to TSS): DNMT1_58_88; note = Orientation (relative to transcription): antisense; note = sgRNA Position: 10194891; note = Sequence Name: 56322-704_101_SL_seq_779
cgggctggggcggtacgcgc

SEQ ID NO: 780 - DNA, 20 bp, Homo sapiens
  source 1..20: mol_type = genomic DNA; note = Gene: EGFR; note = Location (start to end; relative to TSS): EGFR_40_70; note = Orientation (relative to transcription): antisense; note = sgRNA Position: 55019063; note = Sequence Name: 56322-704_101_SL_seq_780
tcacaccgtgcggggggcgg

SEQ ID NO: 781 - DNA, 20 bp, Homo sapiens
  source 1..20: mol_type = genomic DNA; note = Gene: EGFR; note = Location (start to end; relative to TSS): EGFR_85_115; note = Orientation (relative to transcription): antisense; note = sgRNA Position: 55019108; note = Sequence Name: 56322-704_101_SL_seq_781
ccggggctagctcgggactc

SEQ ID NO: 782 - DNA, 20 bp, Homo sapiens
  source 1..20: mol_type = genomic DNA; note = Gene: EGFR; note = Location (start to end; relative to TSS): EGFR_44_74; note = Orientation (relative to transcription): sense; note = sgRNA Position: 55019087; note = Sequence Name: 56322-704_101_SL_seq_782
cacggtgtgagcgcccgacg

SEQ ID NO: 783 - DNA, 20 bp, Homo sapiens
  source 1..20: mol_type = genomic DNA; note = Gene: EGFR; note = Location (start to end; relative to TSS): EGFR_79_109; note = Orientation (relative to transcription): sense; note = sgRNA Position: 55019122; note = Sequence Name: 56322-704_101_SL_seq_783
gagtcccgagctagccccgg

SEQ ID NO: 784 - DNA, 20 bp, Homo sapiens
  source 1..20: mol_type = genomic DNA; note = Gene: EGFR; note = Location (start to end; relative to TSS): EGFR_46_76; note = Orientation (relative to transcription): antisense; note = sgRNA Position: 55019069; note = Sequence Name: 56322-704_101_SL_seq_784
gggcgctcacaccgtgcggg

SEQ ID NO: 785 - DNA, 20 bp, Homo sapiens
  source 1..20: mol_type = genomic DNA; note = Gene: EGFR; note = Location (start to end; relative to TSS): EGFR_76_106; note = Orientation (relative to transcription): antisense; note = sgRNA Position: 55019099; note = Sequence Name: 56322-704_101_SL_seq_785
gctcgggactccggccgcct

SEQ ID NO: 786 - DNA, 20 bp, Homo sapiens
  source 1..20: mol_type = genomic DNA; note = Gene: EGFR; note = Location (start to end; relative to TSS): EGFR_26_56; note = Orientation (relative to transcription): sense; note = sgRNA Position: 55019069; note = Sequence Name: 56322-704_101_SL_seq_786
agcagcctccgccccccgca

SEQ ID NO: 787 - DNA, 20 bp, Homo sapiens
  source 1..20: mol_type = genomic DNA; note = Gene: EGFR; note = Location (start to end; relative to TSS): EGFR_67_97; note = Orientation (relative to transcription): antisense; note = sgRNA Position: 55019090; note = Sequence Name: 56322-704_101_SL_seq_787
tccggccgcctcggccgcgt

SEQ ID NO: 788 - DNA, 20 bp, Homo sapiens
  source 1..20: mol_type = genomic DNA; note = Gene: EGFR; note = Location (start to end; relative to TSS): EGFR_31_61; note = Orientation (relative to transcription): antisense; note = sgRNA Position: 55019054; note = Sequence Name: 56322-704_101_SL_seq_788
gcggggggcggaggctgctg

SEQ ID NO: 789 - DNA, 20 bp, Homo sapiens
  source 1..20: mol_type = genomic DNA; note = Gene: EGFR; note = Location (start to end; relative to TSS): EGFR_66_96; note = Orientation (relative to transcription): antisense; note = sgRNA Position: 55019089; note = Sequence Name: 56322-704_101_SL_seq_789
ccggccgcctcggccgcgtc

SEQ ID NO: 790 - DNA, 20 bp, Homo sapiens
  source 1..20: mol_type = genomic DNA; note = Gene: ERBB2; note = Location (start to end; relative to TSS): ERBB2_32_62; note = Orientation (relative to transcription): antisense; note = sgRNA Position: 39700102; note = Sequence Name: 56322-704_101_SL_seq_790
ggggcgcgcggctgcccggg

SEQ ID NO: 791 - DNA, 20 bp, Homo sapiens
  source 1..20: mol_type = genomic DNA; note = Gene: ERBB2; note = Location (start to end; relative to TSS): ERBB2_104_134; note = Orientation (relative to transcription): sense; note = sgRNA Position: 39700194; note = Sequence Name: 56322-704_101_SL_seq_791
cgccccgcgccctcccagcc

SEQ ID NO: 792 - DNA, 20 bp, Homo sapiens
  source 1..20: mol_type = genomic DNA; note = Gene: ERBB2; note = Location (start to end; relative to TSS): ERBB2_33_63; note = Orientation (relative to transcription): antisense; note = sgRNA Position: 39700103; note = Sequence Name: 56322-704_101_SL_seq_792
aggggcgcgcggctgcccgg

SEQ ID NO: 793 - DNA, 20 bp, Homo sapiens
  source 1..20: mol_type = genomic DNA; note = Gene: ERBB2; note = Location (start to end; relative to TSS): ERBB2_98_128; note = Orientation (relative to transcription): antisense; note = sgRNA Position: 39700168; note = Sequence Name: 56322-704_101_SL_seq_793
gcggggcgcggggtgctgcg

SEQ ID NO: 794 - DNA, 20 bp, Homo sapiens
  source 1..20: mol_type = genomic DNA; note = Gene: ERBB2; note = Location (start to end; relative to TSS): ERBB2_44_74; note = Orientation (relative to transcription): antisense; note = sgRNA Position: 39700114; note = Sequence Name: 56322-704_101_SL_seq_794
gccccgtgggaaggggcgcg

SEQ ID NO: 795 - DNA, 20 bp, Homo sapiens
  source 1..20: mol_type = genomic DNA; note = Gene: ERBB2; note = Location (start to end; relative to TSS): ERBB2_90_120; note = Orientation (relative to transcription): antisense; note = sgRNA Position: 39700160; note = Sequence Name: 56322-704_101_SL_seq_795
cggggtgctgcgaggggtgg

SEQ ID NO: 796 - DNA, 20 bp, Homo sapiens
  source 1..20: mol_type = genomic DNA; note = Gene: ERBB2; note = Location (start to end; relative to TSS): ERBB2_35_65; note = Orientation (relative to transcription): antisense; note = sgRNA Position: 39700105; note = Sequence Name: 56322-704_101_SL_seq_796
gaaggggcgcgcggctgccc

SEQ ID NO: 797 - DNA, 20 bp, Homo sapiens
  source 1..20: mol_type = genomic DNA; note = Gene: ERBB2; note = Location (start to end; relative to TSS): ERBB2_86_116; note = Orientation (relative to transcription): antisense; note = sgRNA Position: 39700156; note = Sequence Name: 56322-704_101_SL_seq_797
gtgctgcgaggggtgggggc

SEQ ID NO: 798 - DNA, 20 bp, Homo sapiens
  source 1..20: mol_type = genomic DNA; note = Gene: ERBB2; note = Location (start to end; relative to TSS): ERBB2_34_64; note = Orientation (relative to transcription): sense; note = sgRNA Position: 39700124; note = Sequence Name: 56322-704_101_SL_seq_798
gccgcgcgccccttcccacg

SEQ ID NO: 799 - DNA, 20 bp, Homo sapiens
  source 1..20: mol_type = genomic DNA; note = Gene: ERBB2; note = Location (start to end; relative to TSS): ERBB2_85_115; note = Orientation (relative to transcription): antisense; note = sgRNA Position: 39700155; note = Sequence Name: 56322-704_101_SL_seq_799
tgctgcgaggggtgggggcc

SEQ ID NO: 800 - DNA, 20 bp, Homo sapiens
  source 1..20: mol_type = genomic DNA; note = Gene: ERBB3; note = Location (start to end; relative to TSS): ERBB3_46_76; note = Orientation (relative to transcription): antisense; note = sgRNA Position: 56080217; note = Sequence Name: 56322-704_101_SL_seq_800
gcaagagccacctgaaccgc

SEQ ID NO: 801 - DNA, 20 bp, Homo sapiens
  source 1..20: mol_type = genomic DNA; note = Gene: ERBB3; note = Location (start to end; relative to TSS): ERBB3_77_107; note = Orientation (relative to transcription): antisense; note = sgRNA Position: 56080248; note = Sequence Name: 56322-704_101_SL_seq_801
ggcccgggggcccctaggct

SEQ ID NO: 802 - DNA, 20 bp, Homo sapiens
  source 1..20: mol_type = genomic DNA; note = Gene: ERBB3; note = Location (start to end; relative to TSS): ERBB3_30_60; note = Orientation (relative to transcription): sense; note = sgRNA Position: 56080221; note = Sequence Name: 56322-704_101_SL_seq_802
caattcgccagcggttcagg

SEQ ID NO: 803 - DNA, 20 bp, Homo sapiens
  source 1..20: mol_type = genomic DNA; note = Gene: ERBB3; note = Location (start to end; relative to TSS): ERBB3_65_95; note = Orientation (relative to transcription): sense; note = sgRNA Position: 56080256; note = Sequence Name: 56322-704_101_SL_seq_803
tgtcctagcctaggggcccc

SEQ ID NO: 804 - DNA, 20 bp, Homo sapiens
  source 1..20: mol_type = genomic DNA; note = Gene: ERBB3; note = Location (start to end; relative to TSS): ERBB3_26_56; note = Orientation (relative to transcription): antisense; note = sgRNA Position: 56080197; note = Sequence Name: 56322-704_101_SL_seq_804
tggcgaattggtggctgctg

SEQ ID NO: 805 - DNA, 20 bp, Homo sapiens
  source 1..20: mol_type = genomic DNA; note = Gene: ERBB3; note = Location (start to end; relative to TSS): ERBB3_58_88; note = Orientation (relative to transcription): sense; note = sgRNA Position: 56080249; note = Sequence Name: 56322-704_101_SL_seq_805
gcctcgatgtcctagcctag

SEQ ID NO: 806 - DNA, 20 bp, Homo sapiens
  source 1..20: mol_type = genomic DNA; note = Gene: ERBB3; note = Location (start to end; relative to TSS): ERBB3_21_51; note = Orientation (relative to transcription): sense; note = sgRNA Position: 56080212; note = Sequence Name: 56322-704_101_SL_seq_806
agcagccaccaattcgccag

SEQ ID NO: 807 - DNA, 20 bp, Homo sapiens
  source 1..20: mol_type = genomic DNA; note = Gene: ERBB3; note = Location (start to end; relative to TSS): ERBB3_57_87; note = Orientation (relative to transcription): sense; note = sgRNA Position: 56080248; note = Sequence Name: 56322-704_101_SL_seq_807
tgcctcgatgtcctagccta

SEQ ID NO: 808 - DNA, 20 bp, Homo sapiens
  source 1..20: mol_type = genomic DNA; note = Gene: ERBB3; note = Location (start to end; relative to TSS): ERBB3_20_50; note = Orientation (relative to transcription): antisense; note = sgRNA Position: 56080191; note = Sequence Name: 56322-704_101_SL_seq_808
attggtggctgctgcggcga

SEQ ID NO: 809 - DNA, 20 bp, Homo sapiens
  source 1..20: mol_type = genomic DNA; note = Gene: ERBB3; note = Location (start to end; relative to TSS): ERBB3_56_86; note = Orientation (relative to transcription): sense; note = sgRNA Position: 56080247; note = Sequence Name: 56322-704_101_SL_seq_809
ttgcctcgatgtcctagcct

SEQ ID NO: 810 - DNA, 20 bp, Homo sapiens
  source 1..20: mol_type = genomic DNA; note = Gene: ERBB4; note = Location (start to end; relative to TSS): ERBB4_53_83; note = Orientation (relative to transcription): sense; note = sgRNA Position: 212538725; note = Sequence Name: 56322-704_101_SL_seq_810
gctcacactcgccccctcct

SEQ ID NO: 811 - DNA, 20 bp, Homo sapiens
  source 1..20: mol_type = genomic DNA; note = Gene: ERBB4; note = Location (start to end; relative to TSS): ERBB4_86_116; note = Orientation (relative to transcription): antisense; note = sgRNA Position: 212538712; note = Sequence Name: 56322-704_101_SL_seq_811
cgcccgcgggtccagggccg

SEQ ID NO: 812 - DNA, 20 bp, Homo sapiens
  source 1..20: mol_type = genomic DNA; note = Gene: ERBB4; note = Location (start to end; relative to TSS): ERBB4_44_74; note = Orientation (relative to transcription): antisense; note = sgRNA Position: 212538754; note = Sequence Name: 56322-704_101_SL_seq_812
tgagcgcgtgtgtgcgcgtg

SEQ ID NO: 813 - DNA, 20 bp, Homo sapiens
  source 1..20: mol_type = genomic DNA; note = Gene: ERBB4; note = Location (start to end; relative to TSS): ERBB4_76_106; note = Orientation (relative to transcription): antisense; note = sgRNA Position: 212538722; note = Sequence Name: 56322-704_101_SL_seq_813
tccagggccggggcccgagg

SEQ ID NO: 814 - DNA, 20 bp, Homo sapiens
  source 1..20: mol_type = genomic DNA; note = Gene: ERBB4; note = Location (start to end; relative to TSS): ERBB4_43_73; note = Orientation (relative to transcription): antisense; note = sgRNA Position: 212538755; note = Sequence Name: 56322-704_101_SL_seq_814
gagcgcgtgtgtgcgcgtgt

SEQ ID NO: 815 - DNA, 20 bp, Homo sapiens
  source 1..20: mol_type = genomic DNA; note = Gene: ERBB4; note = Location (start to end; relative to TSS): ERBB4_75_105; note = Orientation (relative to transcription): antisense; note = sgRNA Position: 212538723; note = Sequence Name: 56322-704_101_SL_seq_815
ccagggccggggcccgagga

SEQ ID NO: 816 - DNA, 20 bp, Homo sapiens
  source 1..20: mol_type = genomic DNA; note = Gene: ERBB4; note = Location (start to end; relative to TSS): ERBB4_32_62; note = Orientation (relative to transcription): antisense; note = sgRNA Position: 212538766; note = Sequence Name: 56322-704_101_SL_seq_816
tgcgcgtgtgggagtgtgct

SEQ ID NO: 817 - DNA, 20 bp, Homo sapiens
  source 1..20: mol_type = genomic DNA; note = Gene: ERBB4; note = Location (start to end; relative to TSS): ERBB4_74_104; note = Orientation (relative to transcription): sense; note = sgRNA Position: 212538704; note = Sequence Name: 56322-704_101_SL_seq_817
gggccccggccctggacccg

SEQ ID NO: 818 - DNA, 20 bp, Homo sapiens
  source 1..20: mol_type = genomic DNA; note = Gene: ERBB4; note = Location (start to end; relative to TSS): ERBB4_19_49; note = Orientation (relative to transcription): antisense; note = sgRNA Position: 212538779; note = Sequence Name: 56322-704_101_SL_seq_818
gtgtgctcggtgtgtgcgct

SEQ ID NO: 819 - DNA, 20 bp, Homo sapiens
  source 1..20: mol_type = genomic DNA; note = Gene: ERBB4; note = Location (start to end; relative to TSS): ERBB4_53_83; note = Orientation (relative to transcription): sense; note = sgRNA Position: 212538725; note = Sequence Name: 56322-704_101_SL_seq_819
gctcacactcgccccctcct

SEQ ID NO: 820 - DNA, 20 bp, Homo sapiens
  source 1..20: mol_type = genomic DNA; note = Gene: ESR1; note = Location (start to end; relative to TSS): ESR1_39_69; note = Orientation (relative to transcription): antisense; note = sgRNA Position: 151807727; note = Sequence Name: 56322-704_101_SL_seq_820
ggtgaagccgggcgacccga

SEQ ID NO: 821 - DNA, 20 bp, Homo sapiens
  source 1..20: mol_type = genomic DNA; note = Gene: ESR1; note = Location (start to end; relative to TSS): ESR1_76_106; note = Orientation (relative to transcription): antisense; note = sgRNA Position: 151807764; note = Sequence Name: 56322-704_101_SL_seq_821
ctctggccccggccctgccc

SEQ ID NO: 822 - DNA, 20 bp, Homo sapiens
  source 1..20: mol_type = genomic DNA; note = Gene: ESR1; note = Location (start to end; relative to TSS): ESR1_38_68; note = Orientation (relative to transcription): antisense; note = sgRNA Position: 151807726; note = Sequence Name: 56322-704_101_SL_seq_822
gtgaagccgggcgacccgac

SEQ ID NO: 823 - DNA, 20 bp, Homo sapiens
  source 1..20: mol_type = genomic DNA; note = Gene: ESR1; note = Location (start to end; relative to TSS): ESR1_75_105; note = Orientation (relative to transcription): antisense; note = sgRNA Position: 151807763; note = Sequence Name: 56322-704_101_SL_seq_823
tctggccccggccctgcccc

SEQ ID NO: 824 - DNA, 20 bp, Homo sapiens
  source 1..20: mol_type = genomic DNA; note = Gene: ESR1; note = Location (start to end; relative to TSS): ESR1_32_62; note = Orientation (relative to transcription): sense; note = sgRNA Position: 151807740; note = Sequence Name: 56322-704_101_SL_seq_824
gtcgggtcgcccggcttcac

SEQ ID NO: 825 - DNA, 20 bp, Homo sapiens
  source 1..20: mol_type = genomic DNA; note = Gene: ESR1; note = Location (start to end; relative to TSS): ESR1_65_95; note = Orientation (relative to transcription): antisense; note = sgRNA Position: 151807753; note = Sequence Name: 56322-704_101_SL_seq_825
gccctgccccgggagcctgc

SEQ ID NO: 826 - DNA, 20 bp, Homo sapiens
  source 1..20: mol_type = genomic DNA; note = Gene: ESR1; note = Location (start to end; relative to TSS): ESR1_23_53; note = Orientation (relative to transcription): sense; note = sgRNA Position: 151807731; note = Sequence Name: 56322-704_101_SL_seq_826
cttgctcccgtcgggtcgcc

SEQ ID NO: 827 - DNA, 20 bp, Homo sapiens
  source 1..20: mol_type = genomic DNA; note = Gene: ESR1; note = Location (start to end; relative to TSS): ESR1_55_85; note = Orientation (relative to transcription): sense; note = sgRNA Position: 151807763; note = Sequence Name: 56322-704_101_SL_seq_827
acccgcaggctcccggggca

SEQ ID NO: 828 - DNA, 20 bp, Homo sapiens
  source 1..20: mol_type = genomic DNA; note = Gene: ESR1; note = Location (start to end; relative to TSS): ESR1_20_50; note = Orientation (relative to transcription): antisense; note = sgRNA Position: 151807708; note = Sequence Name: 56322-704_101_SL_seq_828
acgggagcaagtgcagtccc

SEQ ID NO: 829 - DNA, 20 bp, Homo sapiens
  source 1..20: mol_type = genomic DNA; note = Gene: ESR1; note = Location (start to end; relative to TSS): ESR1_50_80; note = Orientation (relative to transcription): sense; note = sgRNA Position: 151807758; note = Sequence Name: 56322-704_101_SL_seq_829
accggacccgcaggctcccg

SEQ ID NO: 830 - DNA, 20 bp, Homo sapiens
  source 1..20: mol_type = genomic DNA; note = Gene: EZH2; note = Location (start to end; relative to TSS): EZH2_31_61; note = Orientation (relative to transcription): antisense; note = sgRNA Position: 148884256; note = Sequence Name: 56322-704_101_SL_seq_830
actgccttctgagtcccacc

SEQ ID NO: 831 - DNA, 20 bp, Homo sapiens
  source 1..20: mol_type = genomic DNA; note = Gene: EZH2; note = Location (start to end; relative to TSS): EZH2_98_128; note = Orientation (relative to transcription): sense; note = sgRNA Position: 148884169; note = Sequence Name: 56322-704_101_SL_seq_831
cgagtcggcgcgcgggacga

SEQ ID NO: 832 - DNA, 20 bp, Homo sapiens
  source 1..20: mol_type = genomic DNA; note = Gene: EZH2; note = Location (start to end; relative to TSS): EZH2_32_62; note = Orientation (relative to transcription): sense; note = sgRNA Position: 148884235; note = Sequence Name: 56322-704_101_SL_seq_832
ctcagaaggcagtggagccc

SEQ ID NO: 833 - DNA, 20 bp, Homo sapiens
  source 1..20: mol_type = genomic DNA; note = Gene: EZH2; note = Location (start to end; relative to TSS): EZH2_91_121; note = Orientation (relative to transcription): sense; note = sgRNA Position: 148884176; note = Sequence Name: 56322-704_101_SL_seq_833
aacaacgcgagtcggcgcgc

SEQ ID NO: 834 - DNA, 20 bp, Homo sapiens
  source 1..20: mol_type = genomic DNA; note = Gene: EZH2; note = Location (start to end; relative to TSS): EZH2_35_65; note = Orientation (relative to transcription): sense; note = sgRNA Position: 148884232; note = Sequence Name: 56322-704_101_SL_seq_834
agaaggcagtggagccccgg

SEQ ID NO: 835 - DNA, 20 bp, Homo sapiens
  source 1..20: mol_type = genomic DNA; note = Gene: EZH2; note = Location (start to end; relative to TSS): EZH2_90_120; note = Orientation (relative to transcription): sense; note = sgRNA Position: 148884177; note = Sequence Name: 56322-704_101_SL_seq_835
gaacaacgcgagtcggcgcg

SEQ ID NO: 836 - DNA, 20 bp, Homo sapiens
  source 1..20: mol_type = genomic DNA; note = Gene: EZH2; note = Location (start to end; relative to TSS): EZH2_25_55; note = Orientation (relative to transcription): antisense; note = sgRNA Position: 148884262; note = Sequence Name: 56322-704_101_SL_seq_836
ttctgagtcccaccgggtgt

SEQ ID NO: 837 - DNA, 20 bp, Homo sapiens
  source 1..20: mol_type = genomic DNA; note = Gene: EZH2; note = Location (start to end; relative to TSS): EZH2_83_113; note = Orientation (relative to transcription): sense; note = sgRNA Position: 148884184; note = Sequence Name: 56322-704_101_SL_seq_837
cgcgcgggaacaacgcgagt

SEQ ID NO: 838 - DNA, 20 bp, Homo sapiens
  source 1..20: mol_type = genomic DNA; note = Gene: EZH2; note = Location (start to end; relative to TSS): EZH2_24_54; note = Orientation (relative to transcription): sense; note = sgRNA Position: 148884243; note = Sequence Name: 56322-704_101_SL_seq_838
cggtgggactcagaaggcag

SEQ ID NO: 839 - DNA, 20 bp, Homo sapiens
  source 1..20: mol_type = genomic DNA; note = Gene: EZH2; note = Location (start to end; relative to TSS): EZH2_58_88; note = Orientation (relative to transcription): antisense; note = sgRNA Position: 148884229; note = Sequence Name: 56322-704_101_SL_seq_839
cgccgccgccgccgccgccg

SEQ ID NO: 840 - DNA, 20 bp, Homo sapiens
  source 1..20: mol_type = genomic DNA; note = Gene: FGFR1; note = Location (start to end; relative to TSS): FGFR1_36_66; note = Orientation (relative to transcription): sense; note = sgRNA Position: 38468575; note = Sequence Name: 56322-704_101_SL_seq_840
cggcggcgggcggcagctag

SEQ ID NO: 841 - DNA, 20 bp, Homo sapiens
  source 1..20: mol_type = genomic DNA; note = Gene: FGFR1; note = Location (start to end; relative to TSS): FGFR1_79_109; note = Orientation (relative to transcription): antisense; note = sgRNA Position: 38468552; note = Sequence Name: 56322-704_101_SL_seq_841
tccgcgcgctgcggctgcac

SEQ ID NO: 842 - DNA, 20 bp, Homo sapiens
  source 1..20: mol_type = genomic DNA; note = Gene: FGFR1; note = Location (start to end; relative to TSS): FGFR1_23_53; note = Orientation (relative to transcription): sense; note = sgRNA Position: 38468588; note = Sequence Name: 56322-704_101_SL_seq_842
ggcgcggcgtcctcggcggc

SEQ ID NO: 843 - DNA, 20 bp, Homo sapiens
  source 1..20: mol_type = genomic DNA; note = Gene: FGFR1; note = Location (start to end; relative to TSS): FGFR1_72_102; note = Orientation (relative to transcription): sense; note = sgRNA Position: 38468539; note = Sequence Name: 56322-704_101_SL_seq_843
ggtgcagccgcagcgcgcgg

SEQ ID NO: 844 - DNA, 20 bp, Homo sapiens
  source 1..20: mol_type = genomic DNA; note = Gene: FGFR1; note = Location (start to end; relative to TSS): FGFR1_26_56; note = Orientation (relative to transcription): sense; note = sgRNA Position: 38468585; note = Sequence Name: 56322-704_101_SL_seq_844
gcggcgtcctcggcggcggg

SEQ ID NO: 845 - DNA, 20 bp, Homo sapiens
  source 1..20: mol_type = genomic DNA; note = Gene: FGFR1; note = Location (start to end; relative to TSS): FGFR1_71_101; note = Orientation (relative to transcription): antisense; note = sgRNA Position: 38468560; note = Sequence Name: 56322-704_101_SL_seq_845
ctgcggctgcaccggcgtcc

SEQ ID NO: 846 - DNA, 20 bp, Homo sapiens
  source 1..20: mol_type = genomic DNA; note = Gene: FGFR1; note = Location (start to end; relative to TSS): FGFR1_27_57; note = Orientation (relative to transcription): antisense; note = sgRNA Position: 38468604; note = Sequence Name: 56322-704_101_SL_seq_846
cgccgaggacgccgcgcctg

SEQ ID NO: 847 - DNA, 20 bp, Homo sapiens
  source 1..20: mol_type = genomic DNA; note = Gene: FGFR1; note = Location (start to end; relative to TSS): FGFR1_69_99; note = Orientation (relative to transcription): sense; note = sgRNA Position: 38468542; note = Sequence Name: 56322-704_101_SL_seq_847
gccggtgcagccgcagcgcg

SEQ ID NO: 848 - DNA, 20 bp, Homo sapiens
  source 1..20: mol_type = genomic DNA; note = Gene: FGFR1; note = Location (start to end; relative to TSS): FGFR1_19_49; note = Orientation (relative to transcription): sense; note = sgRNA Position: 38468592; note = Sequence Name: 56322-704_101_SL_seq_848
cacaggcgcggcgtcctcgg

SEQ ID NO: 849 - DNA, 20 bp, Homo sapiens
  source 1..20: mol_type = genomic DNA; note = Gene: FGFR1; note = Location (start to end; relative to TSS): FGFR1_51_81; note = Orientation (relative to transcription): sense; note = sgRNA Position: 38468560; note = Sequence Name: 56322-704_101_SL_seq_849
gctagcgggagccgggacgc

SEQ ID NO: 850 - DNA, 20 bp, Homo sapiens
  source 1..20: mol_type = genomic DNA; note = Gene: FGFR2; note = Location (start to end; relative to TSS): FGFR2_51_81; note = Orientation (relative to transcription): sense; note = sgRNA Position: 121598369; note = Sequence Name: 56322-704_101_SL_seq_850
gcgcggccgccacaaagctc

SEQ ID NO: 851 - DNA, 20 bp, Homo sapiens
  source 1..20: mol_type = genomic DNA; note = Gene: FGFR2; note = Location (start to end; relative to TSS): FGFR2_85_115; note = Orientation (relative to transcription): antisense; note = sgRNA Position: 121598355; note = Sequence Name: 56322-704_101_SL_seq_851
gtacgccgcatgcagccccg

SEQ ID NO: 852 - DNA, 20 bp, Homo sapiens
  source 1..20: mol_type = genomic DNA; note = Gene: FGFR2; note = Location (start to end; relative to TSS): FGFR2_34_64; note = Orientation (relative to transcription): sense; note = sgRNA Position: 121598386; note = Sequence Name: 56322-704_101_SL_seq_852
agcgggcgagggagcgcgcg

SEQ ID NO: 853 - DNA, 20 bp, Homo sapiens
  source 1..20: mol_type = genomic DNA; note = Gene: FGFR2; note = Location (start to end; relative to TSS): FGFR2_66_96; note = Orientation (relative to transcription): antisense; note = sgRNA Position: 121598374; note = Sequence Name: 56322-704_101_SL_seq_853
gcggcgcccgagctttgtgg

SEQ ID NO: 854 - DNA, 20 bp, Homo sapiens
  source 1..20: mol_type = genomic DNA; note = Gene: FGFR2; note = Location (start to end; relative to TSS): FGFR2_23_53; note = Orientation (relative to transcription): sense; note = sgRNA Position: 121598397; note = Sequence Name: 56322-704_101_SL_seq_854
ggcgggtgcggagcgggcga

SEQ ID NO: 855 - DNA, 20 bp, Homo sapiens
  source 1..20: mol_type = genomic DNA; note = Gene: FGFR2; note = Location (start to end; relative to TSS): FGFR2_61_91; note = Orientation (relative to transcription): sense; note = sgRNA Position: 121598359; note = Sequence Name: 56322-704_101_SL_seq_855
cacaaagctcgggcgccgcg

SEQ ID NO: 856 - DNA, 20 bp, Homo sapiens
  source 1..20: mol_type = genomic DNA; note = Gene: FGFR2; note = Location (start to end; relative to TSS): FGFR2_18_48; note = Orientation (relative to transcription): antisense; note = sgRNA Position: 121598422; note = Sequence Name: 56322-704_101_SL_seq_856
gcacccgccgcccgcccgct

SEQ ID NO: 857 - DNA, 20 bp, Homo sapiens
  source 1..20: mol_type = genomic DNA; note = Gene: FGFR2; note = Location (start to end; relative to TSS): FGFR2_59_89; note = Orientation (relative to transcription): sense; note = sgRNA Position: 121598361; note = Sequence Name: 56322-704_101_SL_seq_857
gccacaaagctcgggcgccg

SEQ ID NO: 858 - DNA, 20 bp, Homo sapiens
  source 1..20: mol_type = genomic DNA; note = Gene: FGFR2; note = Location (start to end; relative to TSS): FGFR2_16_46; note = Orientation (relative to transcription): sense; note = sgRNA Position: 121598404; note = Sequence Name: 56322-704_101_SL_seq_858
ggcgggcggcgggtgcggag

SEQ ID NO: 859 - DNA, 20 bp, Homo sapiens
  source 1..20: mol_type = genomic DNA; note = Gene: FGFR2; note = Location (start to end; relative to TSS): FGFR2_51_81; note = Orientation (relative to transcription): sense; note = sgRNA Position: 121598369; note = Sequence Name: 56322-704_101_SL_seq_859
gcgcggccgccacaaagctc

SEQ ID NO: 860 - DNA, 20 bp, Homo sapiens
  source 1..20: mol_type = genomic DNA; note = Gene: FGFR3; note = Location (start to end; relative to TSS): FGFR3_43_73; note = Orientation (relative to transcription): sense; note = sgRNA Position: 1793362; note = Sequence Name: 56322-704_101_SL_seq_860
tgccggtcgcacggacgcac

SEQ ID NO: 861 - DNA, 20 bp, Homo sapiens
  source 1..20: mol_type = genomic DNA; note = Gene: FGFR3; note = Location (start to end; relative to TSS): FGFR3_86_116; note = Orientation (relative to transcription): antisense; note = sgRNA Position: 1793385; note = Sequence Name: 56322-704_101_SL_seq_861
cagctcccgccccgtccctc

SEQ ID NO: 862 - DNA, 20 bp, Homo sapiens
  source 1..20: mol_type = genomic DNA; note = Gene: FGFR3; note = Location (start to end; relative to TSS): FGFR3_46_76; note = Orientation (relative to transcription): sense; note = sgRNA Position: 1793365; note = Sequence Name: 56322-704_101_SL_seq_862
cggtcgcacggacgcaccgg

SEQ ID NO: 863 - DNA, 20 bp, Homo sapiens
  source 1..20: mol_type = genomic DNA; note = Gene: FGFR3; note = Location (start to end; relative to TSS): FGFR3_82_112; note = Orientation (relative to transcription): antisense; note = sgRNA Position: 1793381; note = Sequence Name: 56322-704_101_SL_seq_863
tcccgccccgtccctccggc

SEQ ID NO: 864 - DNA, 20 bp, Homo sapiens
  source 1..20: mol_type = genomic DNA; note = Gene: FGFR3; note = Location (start to end; relative to TSS): FGFR3_47_77; note = Orientation (relative to transcription): sense; note = sgRNA Position: 1793366; note = Sequence Name: 56322-704_101_SL_seq_864
ggtcgcacggacgcaccggc

SEQ ID NO: 865 - DNA, 20 bp, Homo sapiens
  source 1..20: mol_type = genomic DNA; note = Gene: FGFR3; note = Location (start to end; relative to TSS): FGFR3_79_109; note = Orientation (relative to transcription): antisense; note = sgRNA Position: 1793378; note = Sequence Name: 56322-704_101_SL_seq_865
cgccccgtccctccggccgg

SEQ ID NO: 866 - DNA, 20 bp, Homo sapiens
  source 1..20: mol_type = genomic DNA; note = Gene: FGFR3; note = Location (start to end; relative to TSS): FGFR3_34_64; note = Orientation (relative to transcription): sense; note = sgRNA Position: 1793353; note = Sequence Name: 56322-704_101_SL_seq_866
gtcctgctctgccggtcgca

SEQ ID NO: 867 - DNA, 20 bp, Homo sapiens
  source 1..20: mol_type = genomic DNA; note = Gene: FGFR3; note = Location (start to end; relative to TSS): FGFR3_71_101; note = Orientation (relative to transcription): antisense; note = sgRNA Position: 1793370; note = Sequence Name: 56322-704_101_SL_seq_867
ccctccggccggcggcccgc

SEQ ID NO: 868 - DNA, 20 bp, Homo sapiens
  source 1..20: mol_type = genomic DNA; note = Gene: FGFR3; note = Location (start to end; relative to TSS): FGFR3_26_56; note = Orientation (relative to transcription): sense; note = sgRNA Position: 1793345; note = Sequence Name: 56322-704_101_SL_seq_868
gccgcgcggtcctgctctgc

SEQ ID NO: 869 - DNA, 20 bp, Homo sapiens
  source 1..20: mol_type = genomic DNA; note = Gene: FGFR3; note = Location (start to end; relative to TSS): FGFR3_61_91; note = Orientation (relative to transcription): sense; note = sgRNA Position: 1793380; note = Sequence Name: 56322-704_101_SL_seq_869
accggcgggccgccggccgg

SEQ ID NO: 870 - DNA, 20 bp, Homo sapiens
  source 1..20: mol_type = genomic DNA; note = Gene: FGFR4; note = Location (start to end; relative to TSS): FGFR4_39_69; note = Orientation (relative to transcription): sense; note = sgRNA Position: 177086980; note = Sequence Name: 56322-704_101_SL_seq_870
ccgcgtgcaggggtcgcggc

SEQ ID NO: 871 - DNA, 20 bp, Homo sapiens
  source 1..20: mol_type = genomic DNA; note = Gene: FGFR4; note = Location (start to end; relative to TSS): FGFR4_73_103; note = Orientation (relative to transcription): sense; note = sgRNA Position: 177087014; note = Sequence Name: 56322-704_101_SL_seq_871
agtgaggcggcggaggagcc

SEQ ID NO: 872 - DNA, 20 bp, Homo sapiens
  source 1..20: mol_type = genomic DNA; note = Gene: FGFR4; note = Location (start to end; relative to TSS): FGFR4_35_65; note = Orientation (relative to transcription): sense; note = sgRNA Position: 177086976; note = Sequence Name: 56322-704_101_SL_seq_872
cctgccgcgtgcaggggtcg

SEQ ID NO: 873 - DNA, 20 bp, Homo sapiens
  source 1..20: mol_type = genomic DNA; note = Gene: FGFR4; note = Location (start to end; relative to TSS): FGFR4_66_96; note = Orientation (relative to transcription): sense; note = sgRNA Position: 177087007; note = Sequence Name: 56322-704_101_SL_seq_873
agctgggagtgaggcggcgg

SEQ ID NO: 874 - DNA, 20 bp, Homo sapiens
  source 1..20: mol_type = genomic DNA; note = Gene: FGFR4; note = Location (start to end; relative to TSS): FGFR4_28_58; note = Orientation (relative to transcription): sense; note = sgRNA Position: 177086969; note = Sequence Name: 56322-704_101_SL_seq_874
tgcggaccctgccgcgtgca

SEQ ID NO: 875 - DNA, 20 bp, Homo sapiens
  source 1..20: mol_type = genomic DNA; note = Gene: FGFR4; note = Location (start to end; relative to TSS): FGFR4_63_93; note = Orientation (relative to transcription): sense; note = sgRNA Position: 177087004; note = Sequence Name: 56322-704_101_SL_seq_875
tggagctgggagtgaggcgg

SEQ ID NO: 876 - DNA, 20 bp, Homo sapiens
  source 1..20: mol_type = genomic DNA; note = Gene: FGFR4; note = Location (start to end; relative to TSS): FGFR4_29_59; note = Orientation (relative to transcription): sense; note = sgRNA Position: 177086970; note = Sequence Name: 56322-704_101_SL_seq_876
gcggaccctgccgcgtgcag

SEQ ID NO: 877 - DNA, 20 bp, Homo sapiens
  source 1..20: mol_type = genomic DNA; note = Gene: FGFR4; note = Location (start to end; relative to TSS): FGFR4_60_90; note = Orientation (relative to transcription): sense; note = sgRNA Position: 177087001; note = Sequence Name: 56322-704_101_SL_seq_877
ggctggagctgggagtgagg

SEQ ID NO: 878 - DNA, 20 bp, Homo sapiens
  source 1..20: mol_type = genomic DNA; note = Gene: FGFR4; note = Location (start to end; relative to TSS): FGFR4_27_57; note = Orientation (relative to transcription): sense; note = sgRNA Position: 177086968; note = Sequence Name: 56322-704_101_SL_seq_878
ctgcggaccctgccgcgtgc

SEQ ID NO: 879 - DNA, 20 bp, Homo sapiens
  source 1..20: mol_type = genomic DNA; note = Gene: FGFR4; note = Location (start to end; relative to TSS): FGFR4_57_87; note = Orientation (relative to transcription): sense; note = sgRNA Position: 177086998; note = Sequence Name: 56322-704_101_SL_seq_879
gccggctggagctgggagtg

SEQ ID NO: 880 - DNA, 20 bp, Homo sapiens
  source 1..20: mol_type = genomic DNA; note = Gene: FLT1; note = Location (start to end; relative to TSS): FLT1_39_69; note = Orientation (relative to transcription): sense; note = sgRNA Position: 28495065; note = Sequence Name: 56322-704_101_SL_seq_880
cggctcctccccggcagcgg

SEQ ID NO: 881 - DNA, 20 bp, Homo sapiens
  source 1..20: mol_type = genomic DNA; note = Gene: FLT1; note = Location (start to end; relative to TSS): FLT1_82_112; note = Orientation (relative to transcription): sense; note = sgRNA Position: 28495022; note = Sequence Name: 56322-704_101_SL_seq_881
ggctcgggtgcagcggccag

SEQ ID NO: 882 - DNA, 20 bp, Homo sapiens
  source 1..20: mol_type = genomic DNA; note = Gene: FLT1; note = Location (start to end; relative to TSS): FLT1_42_72; note = Orientation (relative to transcription): sense; note = sgRNA Position: 28495062; note = Sequence Name: 56322-704_101_SL_seq_882
ctcctccccggcagcggcgg

SEQ ID NO: 883 - DNA, 20 bp, Homo sapiens
  source 1..20: mol_type = genomic DNA; note = Gene: FLT1; note = Location (start to end; relative to TSS): FLT1_75_105; note = Orientation (relative to transcription): sense; note = sgRNA Position: 28495029; note = Sequence Name: 56322-704_101_SL_seq_883
gctccggggctcgggtgcag

SEQ ID NO: 884 - DNA, 20 bp, Homo sapiens
  source 1..20: mol_type = genomic DNA; note = Gene: FLT1; note = Location (start to end; relative to TSS): FLT1_36_66; note = Orientation (relative to transcription): sense; note = sgRNA Position: 28495068; note = Sequence Name: 56322-704_101_SL_seq_884
tctcggctcctccccggcag

SEQ ID NO: 885 - DNA, 20 bp, Homo sapiens
  source 1..20: mol_type = genomic DNA; note = Gene: FLT1; note = Location (start to end; relative to TSS): FLT1_67_97; note = Orientation (relative to transcription): sense; note = sgRNA Position: 28495037; note = Sequence Name: 56322-704_101_SL_seq_885
cggagcgggctccggggctc

SEQ ID NO: 886 - DNA, 20 bp, Homo sapiens
  source 1..20: mol_type = genomic DNA; note = Gene: FLT1; note = Location (start to end; relative to TSS): FLT1_30_60; note = Orientation (relative to transcription): sense; note = sgRNA Position: 28495074; note = Sequence Name: 56322-704_101_SL_seq_886
cactcctctcggctcctccc

SEQ ID NO: 887 - DNA, 20 bp, Homo sapiens
  source 1..20: mol_type = genomic DNA; note = Gene: FLT1; note = Location (start to end; relative to TSS): FLT1_61_91; note = Orientation (relative to transcription): sense; note = sgRNA Position: 28495043; note = Sequence Name: 56322-704_101_SL_seq_887
gcggctcggagcgggctccg

SEQ ID NO: 888 - DNA, 20 bp, Homo sapiens
  source 1..20: mol_type = genomic DNA; note = Gene: FLT1; note = Location (start to end; relative to TSS): FLT1_19_49; note = Orientation (relative to transcription): sense; note = sgRNA Position: 28495085; note = Sequence Name: 56322-704_101_SL_seq_888
cgccaggcggacactcctct

SEQ ID NO: 889 - DNA, 20 bp, Homo sapiens
  source 1..20: mol_type = genomic DNA; note = Gene: FLT1; note = Location (start to end; relative to TSS): FLT1_52_82; note = Orientation (relative to transcription): sense; note = sgRNA Position: 28495052; note = Sequence Name: 56322-704_101_SL_seq_889
gcagcggcggcggctcggag

SEQ ID NO: 890 - DNA, 20 bp, Homo sapiens
  source 1..20: mol_type = genomic DNA; note = Gene: FLT3; note = Location (start to end; relative to TSS): FLT3_41_71; note = Orientation (relative to transcription): antisense; note = sgRNA Position: 28100531; note = Sequence Name: 56322-704_101_SL_seq_890
ctccggagcccggggtcccc

SEQ ID NO: 891 - DNA, 20 bp, Homo sapiens
  source 1..20: mol_type = genomic DNA; note = Gene: FLT3; note = Location (start to end; relative to TSS): FLT3_79_109; note = Orientation (relative to transcription): sense; note = sgRNA Position: 28100473; note = Sequence Name: 56322-704_101_SL_seq_891
ggcggccagctgccgctgct

SEQ ID NO: 892 - DNA, 20 bp, Homo sapiens
  source 1..20: mol_type = genomic DNA; note = Gene: FLT3; note = Location (start to end; relative to TSS): FLT3_32_62; note = Orientation (relative to transcription): antisense; note = sgRNA Position: 28100540; note = Sequence Name: 56322-704_101_SL_seq_892
ccggggtccccaggccgcgc

SEQ ID NO: 893 - DNA, 20 bp, Homo sapiens
  source 1..20: mol_type = genomic DNA; note = Gene: FLT3; note = Location (start to end; relative to TSS): FLT3_70_100; note = Orientation (relative to transcription): antisense; note = sgRNA Position: 28100502; note = Sequence Name: 56322-704_101_SL_seq_893
ccgccgtcgcgcgccaacgc

SEQ ID NO: 894 - DNA, 20 bp, Homo sapiens
  source 1..20: mol_type = genomic DNA; note = Gene: FLT3; note = Location (start to end; relative to TSS): FLT3_33_63; note = Orientation (relative to transcription): sense; note = sgRNA Position: 28100519; note = Sequence Name: 56322-704_101_SL_seq_894
ctggggaccccgggctccgg

SEQ ID NO: 895 - DNA, 20 bp, Homo sapiens
  source 1..20: mol_type = genomic DNA; note = Gene: FLT3; note = Location (start to end; relative to TSS): FLT3_65_95; note = Orientation (relative to transcription): antisense; note = sgRNA Position: 28100507; note = Sequence Name: 56322-704_101_SL_seq_895
gtcgcgcgccaacgccggca

SEQ ID NO: 896 - DNA, 20 bp, Homo sapiens
  source 1..20: mol_type = genomic DNA; note = Gene: FLT3; note = Location (start to end; relative to TSS): FLT3_30_60; note = Orientation (relative to transcription): sense; note = sgRNA Position: 28100522; note = Sequence Name: 56322-704_101_SL_seq_896
ggcctggggaccccgggctc

SEQ ID NO: 897 - DNA, 20 bp, Homo sapiens
  source 1..20: mol_type = genomic DNA; note = Gene: FLT3; note = Location (start to end; relative to TSS): FLT3_61_91; note = Orientation (relative to transcription): sense; note = sgRNA Position: 28100491; note = Sequence Name: 56322-704_101_SL_seq_897
ccggcgttggcgcgcgacgg

SEQ ID NO: 898 - DNA, 20 bp, Homo sapiens
  source 1..20: mol_type = genomic DNA; note = Gene: FLT3; note = Location (start to end; relative to TSS): FLT3_24_54; note = Orientation (relative to transcription): sense; note = sgRNA Position: 28100528; note = Sequence Name: 56322-704_101_SL_seq_898
cggcgcggcctggggacccc

SEQ ID NO: 899 - DNA, 20 bp, Homo sapiens
  source 1..20: mol_type = genomic DNA; note = Gene: FLT3; note = Location (start to end; relative to TSS): FLT3_58_88; note = Orientation (relative to transcription): sense; note = sgRNA Position: 28100494; note = Sequence Name: 56322-704_101_SL_seq_899
atgccggcgttggcgcgcga

SEQ ID NO: 900 - DNA, 20 bp, Homo sapiens
  source 1..20: mol_type = genomic DNA; note = Gene: FLT4; note = Location (start to end; relative to TSS): FLT4_33_63; note = Orientation (relative to transcription): sense; note = sgRNA Position: 180649543; note = Sequence Name: 56322-704_101_SL_seq_900
cgcagcggccggagatgcag

SEQ ID NO: 901 - DNA, 20 bp, Homo sapiens
  source 1..20: mol_type = genomic DNA; note = Gene: FLT4; note = Location (start to end; relative to TSS): FLT4_83_113; note = Orientation (relative to transcription): sense; note = sgRNA Position: 180649493; note = Sequence Name: 56322-704_101_SL_seq_901
ctctgcctgggactcctgga

SEQ ID NO: 902 - DNA, 20 bp, Homo sapiens
  source 1..20: mol_type = genomic DNA; note = Gene: FLT4; note = Location (start to end; relative to TSS): FLT4_34_64; note = Orientation (relative to transcription): sense; note = sgRNA Position: 180649542; note = Sequence Name: 56322-704_101_SL_seq_902
gcagcggccggagatgcagc

SEQ ID NO: 903 - DNA, 20 bp, Homo sapiens
  source 1..20: mol_type = genomic DNA; note = Gene: FLT4; note = Location (start to end; relative to TSS): FLT4_71_101; note = Orientation (relative to transcription): sense; note = sgRNA Position: 180649505; note = Sequence Name: 56322-704_101_SL_seq_903
ctgcgactgtggctctgcct

SEQ ID NO: 904 - DNA, 20 bp, Homo sapiens
  source 1..20: mol_type = genomic DNA; note = Gene: FLT4; note = Location (start to end; relative to TSS): FLT4_35_65; note = Orientation (relative to transcription): sense; note = sgRNA Position: 180649541; note = Sequence Name: 56322-704_101_SL_seq_904
cagcggccggagatgcagcg

SEQ ID NO: 905 - DNA, 20 bp, Homo sapiens
  source 1..20: mol_type = genomic DNA; note = Gene: FLT4; note = Location (start to end; relative to TSS): FLT4_69_99; note = Orientation (relative to transcription): antisense; note = sgRNA Position: 180649527; note = Sequence Name: 56322-704_101_SL_seq_905
ccacagtcgcaggcacagcg

SEQ ID NO: 906 - DNA, 20 bp, Homo sapiens
  source 1..20: mol_type = genomic DNA; note = Gene: FLT4; note = Location (start to end; relative to TSS): FLT4_22_52; note = Orientation (relative to transcription): antisense; note = sgRNA Position: 180649574; note = Sequence Name: 56322-704_101_SL_seq_906
gcgcgtgggtccgacccgag

SEQ ID NO: 907 - DNA, 20 bp, Homo sapiens
  source 1..20: mol_type = genomic DNA; note = Gene: FLT4; note = Location (start to end; relative to TSS): FLT4_60_90; note = Orientation (relative to transcription): sense; note = sgRNA Position: 180649516; note = Sequence Name: 56322-704_101_SL_seq_907
ccgcgctgtgcctgcgactg

SEQ ID NO: 908 - DNA, 20 bp, Homo sapiens
  source 1..20: mol_type = genomic DNA; note = Gene: FLT4; note = Location (start to end; relative to TSS): FLT4_18_48; note = Orientation (relative to transcription): sense; note = sgRNA Position: 180649558; note = Sequence Name: 56322-704_101_SL_seq_908
cgggtcggacccacgcgcag

SEQ ID NO: 909 - DNA, 20 bp, Homo sapiens
  source 1..20: mol_type = genomic DNA; note = Gene: FLT4; note = Location (start to end; relative to TSS): FLT4_50_80; note = Orientation (relative to transcription): antisense; note = sgRNA Position: 180649546; note = Sequence Name: 56322-704_101_SL_seq_909
gcggcgccccgctgcatctc

SEQ ID NO: 910 - DNA, 20 bp, Homo sapiens
  source 1..20: mol_type = genomic DNA; note = Gene: GART; note = Location (start to end; relative to TSS): GART_45_75; note = Orientation (relative to transcription): antisense; note = sgRNA Position: 33542068; note = Sequence Name: 56322-704_101_SL_seq_910
gggggtttacgcaccgacac

SEQ ID NO: 911 - DNA, 20 bp, Homo sapiens
  source 1..20: mol_type = genomic DNA; note = Gene: GART; note = Location (start to end; relative to TSS): GART_76_106; note = Orientation (relative to transcription): sense; note = sgRNA Position: 33542017; note = Sequence Name: 56322-704_101_SL_seq_911
cgcgcttaggctttggtttg

SEQ ID NO: 912 - DNA, 20 bp, Homo sapiens
  source 1..20: mol_type = genomic DNA; note = Gene: GART; note = Location (start to end; relative to TSS): GART_44_74; note = Orientation (relative to transcription): antisense; note = sgRNA Position: 33542069; note = Sequence Name: 56322-704_101_SL_seq_912
ggggtttacgcaccgacacc

SEQ ID NO: 913 - DNA, 20 bp, Homo sapiens
  source 1..20: mol_type = genomic DNA; note = Gene: GART; note = Location (start to end; relative to TSS): GART_75_105; note = Orientation (relative to transcription): sense; note = sgRNA Position: 33542018; note = Sequence Name: 56322-704_101_SL_seq_913
gcgcgcttaggctttggttt

SEQ ID NO: 914 - DNA, 20 bp, Homo sapiens
  source 1..20: mol_type = genomic DNA; note = Gene: GART; note = Location (start to end; relative to TSS): GART_41_71; note = Orientation (relative to transcription): antisense; note = sgRNA Position: 33542072; note = Sequence Name: 56322-704_101_SL_seq_914
gtttacgcaccgacaccggg

SEQ ID NO: 915 - DNA, 20 bp, Homo sapiens
  source 1..20: mol_type = genomic DNA; note = Gene: GART; note = Location (start to end; relative to TSS): GART_74_104; note = Orientation (relative to transcription): sense; note = sgRNA Position: 33542019; note = Sequence Name: 56322-704_101_SL_seq_915
agcgcgcttaggctttggtt

SEQ ID NO: 916 - DNA, 20 bp, Homo sapiens
  source 1..20: mol_type = genomic DNA; note = Gene: GART; note = Location (start to end; relative to TSS): GART_23_53; note = Orientation (relative to transcription): sense; note = sgRNA Position: 33542070; note = Sequence Name: 56322-704_101_SL_seq_916
accaggtggccacccggtgt

SEQ ID NO: 917 - DNA, 20 bp, Homo sapiens
  source 1..20: mol_type = genomic DNA; note = Gene: GART; note = Location (start to end; relative to TSS): GART_64_94; note = Orientation (relative to transcription): antisense; note = sgRNA Position: 33542049; note = Sequence Name: 56322-704_101_SL_seq_917
cgctccgtgtaaaagcggag

SEQ ID NO: 918 - DNA, 20 bp, Homo sapiens
  source 1..20: mol_type = genomic DNA; note = Gene: GART; note = Location (start to end; relative to TSS): GART_33_63; note = Orientation (relative to transcription): antisense; note = sgRNA Position: 33542080; note = Sequence Name: 56322-704_101_SL_seq_918
accgacaccgggtggccacc

SEQ ID NO: 919 - DNA, 20 bp, Homo sapiens
  source 1..20: mol_type = genomic DNA; note = Gene: GART; note = Location (start to end; relative to TSS): GART_63_93; note = Orientation (relative to transcription): antisense; note = sgRNA Position: 33542050; note = Sequence Name: 56322-704_101_SL_seq_919
gctccgtgtaaaagcggagg

SEQ ID NO: 920 - DNA, 20 bp, Homo sapiens
  source 1..20: mol_type = genomic DNA; note = Gene: GSK3B; note = Location (start to end; relative to TSS): GSK3B_50_80; note = Orientation (relative to transcription): sense; note = sgRNA Position: 120094373; note = Sequence Name: 56322-704_101_SL_seq_920
ccgcccgggccaagtgacaa

SEQ ID NO: 921 - DNA, 20 bp, Homo sapiens
  source 1..20: mol_type = genomic DNA; note = Gene: GSK3B; note = Location (start to end; relative to TSS): GSK3B_102_132; note = Orientation (relative to transcription): sense; note = sgRNA Position: 120094321; note = Sequence Name: 56322-704_101_SL_seq_921
gcagccgctgacagggctct

SEQ ID NO: 922 - DNA, 20 bp, Homo sapiens
  source 1..20: mol_type = genomic DNA; note = Gene: GSK3B; note = Location (start to end; relative to TSS): GSK3B_53_83; note = Orientation (relative to transcription): antisense; note = sgRNA Position: 120094390; note = Sequence Name: 56322-704_101_SL_seq_922
tcacttggcccgggcggcgg

SEQ ID NO: 923 - DNA, 20 bp, Homo sapiens
  source 1..20: mol_type = genomic DNA; note = Gene: GSK3B; note = Location (start to end; relative to TSS): GSK3B_95_125; note = Orientation (relative to transcription): sense; note = sgRNA Position: 120094328; note = Sequence Name: 56322-704_101_SL_seq_923
cggccccgcagccgctgaca

SEQ ID NO: 924 - DNA, 20 bp, Homo sapiens
  source 1..20: mol_type = genomic DNA; note = Gene: GSK3B; note = Location (start to end; relative to TSS): GSK3B_20_50; note = Orientation (relative to transcription): antisense; note = sgRNA Position: 120094423; note = Sequence Name: 56322-704_101_SL_seq_924
ggcacaagcccgcattcgcc

SEQ ID NO: 925 - DNA, 20 bp, Homo sapiens
  source 1..20: mol_type = genomic DNA; note = Gene: GSK3B; note = Location (start to end; relative to TSS): GSK3B_54_84; note = Orientation (relative to transcription): sense; note = sgRNA Position: 120094369; note = Sequence Name: 56322-704_101_SL_seq_925
ccgggccaagtgacaaagga

SEQ ID NO: 926 - DNA, 20 bp, Homo sapiens
  source 1..20: mol_type = genomic DNA; note = Gene: GSK3B; note = Location (start to end; relative to TSS): GSK3B_19_49; note = Orientation (relative to transcription): antisense; note = sgRNA Position: 120094424; note = Sequence Name: 56322-704_101_SL_seq_926
gcacaagcccgcattcgccc

SEQ ID NO: 927 - DNA, 20 bp, Homo sapiens
  source 1..20: mol_type = genomic DNA; note = Gene: GSK3B; note = Location (start to end; relative to TSS): GSK3B_53_83; note = Orientation (relative to transcription): antisense; note = sgRNA Position: 120094390; note = Sequence Name: 56322-704_101_SL_seq_927
tcacttggcccgggcggcgg

SEQ ID NO: 928 - DNA, 20 bp, Homo sapiens
  source 1..20: mol_type = genomic DNA; note = Gene: GSK3B; note = Location (start to end; relative to TSS): GSK3B_14_44; note = Orientation (relative to transcription): antisense; note = sgRNA Position: 120094429; note = Sequence Name: 56322-704_101_SL_seq_928
agcccgcattcgcccgggtc

SEQ ID NO: 929 - DNA, 20 bp, Homo sapiens
  source 1..20: mol_type = genomic DNA; note = Gene: GSK3B; note = Location (start to end; relative to TSS): GSK3B_50_80; note = Orientation (relative to transcription): sense; note = sgRNA Position: 120094373; note = Sequence Name: 56322-704_101_SL_seq_929
ccgcccgggccaagtgacaa

SEQ ID NO: 930 - DNA, 20 bp, Homo sapiens
  source 1..20: mol_type = genomic DNA; note = Gene: HDAC1; note = Location (start to end; relative to TSS): HDAC1_44_74; note = Orientation (relative to transcription): sense; note = sgRNA Position: 32292153; note = Sequence Name: 56322-704_101_SL_seq_930
gaccgactgacggtagggac

SEQ ID NO: 931 - DNA, 20 bp, Homo sapiens
  source 1..20: mol_type = genomic DNA; note = Gene: HDAC1; note = Location (start to end; relative to TSS): HDAC1_82_112; note = Orientation (relative to transcription): sense; note = sgRNA Position: 32292191; note = Sequence Name: 56322-704_101_SL_seq_931
cgcagacgcagggcacccgg

SEQ ID NO: 932 - DNA, 20 bp, Homo sapiens
  source 1..20: mol_type = genomic DNA; note = Gene: HDAC1; note = Location (start to end; relative to TSS): HDAC1_34_64; note = Orientation (relative to transcription): sense; note = sgRNA Position: 32292143; note = Sequence Name: 56322-704_101_SL_seq_932
agggcggacggaccgactga

SEQ ID NO: 933 - DNA, 20 bp, Homo sapiens
  source 1..20: mol_type = genomic DNA; note = Gene: HDAC1; note = Location (start to end; relative to TSS): HDAC1_79_109; note = Orientation (relative to transcription): sense; note = sgRNA Position: 32292188; note = Sequence Name: 56322-704_101_SL_seq_933
tggcgcagacgcagggcacc

SEQ ID NO: 934 - DNA, 20 bp, Homo sapiens
  source 1..20: mol_type = genomic DNA; note = Gene: HDAC1; note = Location (start to end; relative to TSS): HDAC1_39_69; note = Orientation (relative to transcription): sense; note = sgRNA Position: 32292148; note = Sequence Name: 56322-704_101_SL_seq_934
ggacggaccgactgacggta

SEQ ID NO: 935 - DNA, 20 bp, Homo sapiens
  source 1..20: mol_type = genomic DNA; note = Gene: HDAC1; note = Location (start to end; relative to TSS): HDAC1_72_102; note = Orientation (relative to transcription): sense; note = sgRNA Position: 32292181; note = Sequence Name: 56322-704_101_SL_seq_935
agcaagatggcgcagacgca

SEQ ID NO: 936 - DNA, 20 bp, Homo sapiens
  source 1..20: mol_type = genomic DNA; note = Gene: HDAC1; note = Location (start to end; relative to TSS): HDAC1_38_68; note = Orientation (relative to transcription): sense; note = sgRNA Position: 32292147; note = Sequence Name: 56322-704_101_SL_seq_936
cggacggaccgactgacggt

SEQ ID NO: 937 - DNA, 20 bp, Homo sapiens
  source 1..20: mol_type = genomic DNA; note = Gene: HDAC1; note = Location (start to end; relative to TSS): HDAC1_71_101; note = Orientation (relative to transcription): sense; note = sgRNA Position: 32292180; note = Sequence Name: 56322-704_101_SL_seq_937
gagcaagatggcgcagacgc

SEQ ID NO: 938 - DNA, 20 bp, Homo sapiens
  source 1..20: mol_type = genomic DNA; note = Gene: HDAC1; note = Location (start to end; relative to TSS): HDAC1_18_48; note = Orientation (relative to transcription): sense; note = sgRNA Position: 32292127; note = Sequence Name: 56322-704_101_SL_seq_938
cggagccgcgggcgggaggg

SEQ ID NO: 939 - DNA, 20 bp, Homo sapiens
  source 1..20: mol_type = genomic DNA; note = Gene: HDAC1; note = Location (start to end; relative to TSS): HDAC1_55_85; note = Orientation (relative to transcription): antisense; note = sgRNA Position: 32292144; note = Sequence Name: 56322-704_101_SL_seq_939
ctcccgtccctaccgtcagt

SEQ ID NO: 940 - DNA, 20 bp, Homo sapiens
  source 1..20: mol_type = genomic DNA; note = Gene: HDAC2; note = Location (start to end; relative to TSS): HDAC2_31_61; note = Orientation (relative to transcription): sense; note = sgRNA Position: 113971093; note = Sequence Name: 56322-704_101_SL_seq_940
cgagctttcggcacctctgc

SEQ ID NO: 941 - DNA, 20 bp, Homo sapiens
  source 1..20: mol_type = genomic DNA; note = Gene: HDAC2; note = Location (start to end; relative to TSS): HDAC2_74_104; note = Orientation (relative to transcription): antisense; note = sgRNA Position: 113971070; note = Sequence Name: 56322-704_101_SL_seq_941
gagaggagggggcgccggga

SEQ ID NO: 942 - DNA, 20 bp, Homo sapiens
  source 1..20: mol_type = genomic DNA; note = Gene: HDAC2; note = Location (start to end; relative to TSS): HDAC2_30_60; note = Orientation (relative to transcription): antisense; note = sgRNA Position: 113971114; note = Sequence Name: 56322-704_101_SL_seq_942
tgccgaaagctcggaatcgg

SEQ ID NO: 943 - DNA, 20 bp, Homo sapiens
  source 1..20: mol_type = genomic DNA; note = Gene: HDAC2; note = Location (start to end; relative to TSS): HDAC2_69_99; note = Orientation (relative to transcription): antisense; note = sgRNA Position: 113971075; note = Sequence Name: 56322-704_101_SL_seq_943
gagggggcgccgggaaggct

SEQ ID NO: 944 - DNA, 20 bp, Homo sapiens
  source 1..20: mol_type = genomic DNA; note = Gene: HDAC2; note = Location (start to end; relative to TSS): HDAC2_27_57; note = Orientation (relative to transcription): antisense; note = sgRNA Position: 113971117; note = Sequence Name: 56322-704_101_SL_seq_944
cgaaagctcggaatcggagg

SEQ ID NO: 945 - DNA, 20 bp, Homo sapiens
  source 1..20: mol_type = genomic DNA; note = Gene: HDAC2; note = Location (start to end; relative to TSS): HDAC2_59_89; note = Orientation (relative to transcription): antisense; note = sgRNA Position: 113971085; note = Sequence Name: 56322-704_101_SL_seq_945
cgggaaggctcggtaccacc

SEQ ID NO: 946 - DNA, 20 bp, Homo sapiens
  source 1..20: mol_type = genomic DNA; note = Gene: HDAC2; note = Location (start to end; relative to TSS): HDAC2_21_51; note = Orientation (relative to transcription): antisense; note = sgRNA Position: 113971123; note = Sequence Name: 56322-704_101_SL_seq_946
ctcggaatcggaggtggcag

SEQ ID NO: 947 - DNA, 20 bp, Homo sapiens
  source 1..20: mol_type = genomic DNA; note = Gene: HDAC2; note = Location (start to end; relative to TSS): HDAC2_53_83; note = Orientation (relative to transcription): antisense; note = sgRNA Position: 113971091; note = Sequence Name: 56322-704_101_SL_seq_947
ggctcggtaccacccggcag

SEQ ID NO: 948 - DNA, 20 bp, Homo sapiens
  source 1..20: mol_type = genomic DNA; note = Gene: HDAC2; note = Location (start to end; relative to TSS): HDAC2_19_49; note = Orientation (relative to transcription): sense; note = sgRNA Position: 113971105; note = Sequence Name: 56322-704_101_SL_seq_948
cacctccgattccgagcttt

SEQ ID NO: 949 - DNA, 20 bp, Homo sapiens
  source 1..20: mol_type = genomic DNA; note = Gene: HDAC2; note = Location (start to end; relative to TSS): HDAC2_51_81; note = Orientation (relative to transcription): sense; note = sgRNA Position: 113971073; note = Sequence Name: 56322-704_101_SL_seq_949
cgggtggtaccgagccttcc

SEQ ID NO: 950 - DNA, 20 bp, Homo sapiens
  source 1..20: mol_type = genomic DNA; note = Gene: HDAC3; note = Location (start to end; relative to TSS): HDAC3_48_78; note = Orientation (relative to transcription): antisense; note = sgRNA Position: 141636797; note = Sequence Name: 56322-704_101_SL_seq_950
gtcttggccatggtgccggc

SEQ ID NO: 951 - DNA, 20 bp, Homo sapiens
  source 1..20: mol_type = genomic DNA; note = Gene: HDAC3; note = Location (start to end; relative to TSS): HDAC3_89_119; note = Orientation (relative to transcription): sense; note = sgRNA Position: 141636736; note = Sequence Name: 56322-704_101_SL_seq_951
gggcaacttccactacggtg

SEQ ID NO: 952 - DNA, 20 bp, Homo sapiens
  source 1..20: mol_type = genomic DNA; note = Gene: HDAC3; note = Location (start to end; relative to TSS): HDAC3_42_72; note = Orientation (relative to transcription): antisense; note = sgRNA Position: 141636803; note = Sequence Name: 56322-704_101_SL_seq_952
gccatggtgccggcgggagc

SEQ ID NO: 953 - DNA, 20 bp, Homo sapiens
  source 1..20: mol_type = genomic DNA; note = Gene: HDAC3; note = Location (start to end; relative to TSS): HDAC3_84_114; note = Orientation (relative to transcription): sense; note = sgRNA Position: 141636741; note = Sequence Name: 56322-704_101_SL_seq_953
gacgtgggcaacttccacta

SEQ ID NO: 954 - DNA, 20 bp, Homo sapiens
  source 1..20: mol_type = genomic DNA; note = Gene: HDAC3; note = Location (start to end; relative to TSS): HDAC3_44_74; note = Orientation (relative to transcription): sense; note = sgRNA Position: 141636781; note = Sequence Name: 56322-704_101_SL_seq_954
cggcaccatggccaagaccg

SEQ ID NO: 955 - DNA, 20 bp, Homo sapiens
  source 1..20: mol_type = genomic DNA; note = Gene: HDAC3; note = Location (start to end; relative to TSS): HDAC3_76_106; note = Orientation (relative to transcription): antisense; note = sgRNA Position: 141636769; note = Sequence Name: 56322-704_101_SL_seq_955
cacgtcggggtcgtagaaat

SEQ ID NO: 956 - DNA, 20 bp, Homo sapiens
  source 1..20: mol_type = genomic DNA; note = Gene: HDAC3; note = Location (start to end; relative to TSS): HDAC3_32_62; note = Orientation (relative to transcription): sense; note = sgRNA Position: 141636793; note = Sequence Name: 56322-704_101_SL_seq_956
gcctgctcccgccggcacca

SEQ ID NO: 957 - DNA, 20 bp, Homo sapiens
  source 1..20: mol_type = genomic DNA; note = Gene: HDAC3; note = Location (start to end; relative to TSS): HDAC3_64_94; note = Orientation (relative to transcription): antisense; note = sgRNA Position: 141636781; note = Sequence Name: 56322-704_101_SL_seq_957
gtagaaataggccacggtct

SEQ ID NO: 958 - DNA, 20 bp, Homo sapiens
  source 1..20: mol_type = genomic DNA; note = Gene: HDAC3; note = Location (start to end; relative to TSS): HDAC3_24_54; note = Orientation (relative to transcription): sense; note = sgRNA Position: 141636801; note = Sequence Name: 56322-704_101_SL_seq_958
ggtgcggggcctgctcccgc

SEQ ID NO: 959 - DNA, 20 bp, Homo sapiens
  source 1..20: mol_type = genomic DNA; note = Gene: HDAC3; note = Location (start to end; relative to TSS): HDAC3_58_88; note = Orientation (relative to transcription): antisense; note = sgRNA Position: 141636787; note = Sequence Name: 56322-704_101_SL_seq_959
ataggccacggtcttggcca

SEQ ID NO: 960 - DNA, 20 bp, Homo sapiens
  source 1..20: mol_type = genomic DNA; note = Gene: HIF1A; note = Location (start to end; relative to TSS): HIF1A_43_73; note = Orientation (relative to transcription): sense; note = sgRNA Position: 61695582; note = Sequence Name: 56322-704_101_SL_seq_960
cttcggccagtgtgtcgggc

SEQ ID NO: 961 - DNA, 20 bp, Homo sapiens
  source 1..20: mol_type = genomic DNA; note = Gene: HIF1A; note = Location (start to end; relative to TSS): HIF1A_80_110; note = Orientation (relative to transcription): sense; note = sgRNA Position: 61695619; note = Sequence Name: 56322-704_101_SL_seq_961
cctgaggagaggctcggagc

SEQ ID NO: 962 - DNA, 20 bp, Homo sapiens
  source 1..20: mol_type = genomic DNA; note = Gene: HIF1A; note = Location (start to end; relative to TSS): HIF1A_41_71; note = Orientation (relative to transcription): antisense; note = sgRNA Position: 61695560; note = Sequence Name: 56322-704_101_SL_seq_962
cactggccgaagcgacgaag

SEQ ID NO: 963 - DNA, 20 bp, Homo sapiens
  source 1..20: mol_type = genomic DNA; note = Gene: HIF1A; note = Location (start to end; relative to TSS): HIF1A_76_106; note = Orientation (relative to transcription): antisense; note = sgRNA Position: 61695595; note = Sequence Name: 56322-704_101_SL_seq_963
tctcctcaggtggcttgtca

SEQ ID NO: 964 - DNA, 20 bp, Homo sapiens
  source 1..20: mol_type = genomic DNA; note = Gene: HIF1A; note = Location (start to end; relative to TSS): HIF1A_40_70; note = Orientation (relative to transcription): antisense; note = sgRNA Position: 61695559; note = Sequence Name: 56322-704_101_SL_seq_964
actggccgaagcgacgaaga

SEQ ID NO: 965 - DNA, 20 bp, Homo sapiens
  source 1..20: mol_type = genomic DNA; note = Gene: HIF1A; note = Location (start to end; relative to TSS): HIF1A_74_104; note = Orientation (relative to transcription): sense; note = sgRNA Position: 61695613; note = Sequence Name: 56322-704_101_SL_seq_965
aagccacctgaggagaggct

SEQ ID NO: 966 - DNA, 20 bp, Homo sapiens
  source 1..20: mol_type = genomic DNA; note = Gene: HIF1A; note = Location (start to end; relative to TSS): HIF1A_39_69; note = Orientation (relative to transcription): sense; note = sgRNA Position: 61695578; note = Sequence Name: 56322-704_101_SL_seq_966
gtcgcttcggccagtgtgtc

SEQ ID NO: 967 - DNA, 20 bp, Homo sapiens
  source 1..20: mol_type = genomic DNA; note = Gene: HIF1A; note = Location (start to end; relative to TSS): HIF1A_69_99; note = Orientation (relative to transcription): sense; note = sgRNA Position: 61695608; note = Sequence Name: 56322-704_101_SL_seq_967
ctgacaagccacctgaggag

SEQ ID NO: 968 - DNA, 20 bp, Homo sapiens
  source 1..20: mol_type = genomic DNA; note = Gene: HIF1A; note = Location (start to end; relative to TSS): HIF1A_26_56; note = Orientation (relative to transcription): sense; note = sgRNA Position: 61695565; note = Sequence Name: 56322-704_101_SL_seq_968
gatcaccctcttcgtcgctt

SEQ ID NO: 969 - DNA, 20 bp, Homo sapiens
  source 1..20: mol_type = genomic DNA; note = Gene: HIF1A; note = Location (start to end; relative to TSS): HIF1A_58_88; note = Orientation (relative to transcription): antisense; note = sgRNA Position: 61695577; note = Sequence Name: 56322-704_101_SL_seq_969
cagggcccagcccgacacac

SEQ ID NO: 970 - DNA, 20 bp, Homo sapiens
  source 1..20: mol_type = genomic DNA; note = Gene: HRAS; note = Location (start to end; relative to TSS): HRAS_43_73; note = Orientation (relative to transcription): antisense; note = sgRNA Position: 535529; note = Sequence Name: 56322-704_101_SL_seq_970
gtccgcggcgggtgcggctc

SEQ ID NO: 971 - DNA, 20 bp, Homo sapiens
  source 1..20: mol_type = genomic DNA; note = Gene: HRAS; note = Location (start to end; relative to TSS): HRAS_112_142; note = Orientation (relative to transcription): sense; note = sgRNA Position: 535440; note = Sequence Name: 56322-704_101_SL_seq_971
ggccccggccctggccccgg

SEQ ID NO: 972 - DNA, 20 bp, Homo sapiens
  source 1..20: mol_type = genomic DNA; note = Gene: HRAS; note = Location (start to end; relative to TSS): HRAS_44_74; note = Orientation (relative to transcription): antisense; note = sgRNA Position: 535528; note = Sequence Name: 56322-704_101_SL_seq_972
cgtccgcggcgggtgcggct

SEQ ID NO: 973 - DNA, 20 bp, Homo sapiens
  source 1..20: mol_type = genomic DNA; note = Gene: HRAS; note = Location (start to end; relative to TSS): HRAS_111_141; note = Orientation (relative to transcription): sense; note = sgRNA Position: 535441; note = Sequence Name: 56322-704_101_SL_seq_973
cggccccggccctggccccg

SEQ ID NO: 974 - DNA, 20 bp, Homo sapiens
  source 1..20: mol_type = genomic DNA; note = Gene: HRAS; note = Location (start to end; relative to TSS): HRAS_29_59; note = Orientation (relative to transcription): antisense; note = sgRNA Position: 535543; note = Sequence Name: 56322-704_101_SL_seq_974
cggctcgggttgcgggcgca

SEQ ID NO: 975 - DNA, 20 bp, Homo sapiens
  source 1..20: mol_type = genomic DNA; note = Gene: HRAS; note = Location (start to end; relative to TSS): HRAS_106_136; note = Orientation (relative to transcription): antisense; note = sgRNA Position: 535466; note = Sequence Name: 56322-704_101_SL_seq_975
ccggggccgaggccggggcg

SEQ ID NO: 976 - DNA, 20 bp, Homo sapiens
  source 1..20: mol_type = genomic DNA; note = Gene: HRAS; note = Location (start to end; relative to TSS): HRAS_36_66; note = Orientation (relative to transcription): sense; note = sgRNA Position: 535516; note = Sequence Name: 56322-704_101_SL_seq_976
cgagccgcacccgccgcgga

SEQ ID NO: 977 - DNA, 20 bp, Homo sapiens
  source 1..20: mol_type = genomic DNA; note = Gene: HRAS; note = Location (start to end; relative to TSS): HRAS_103_133; note = Orientation (relative to transcription): sense; note = sgRNA Position: 535449; note = Sequence Name: 56322-704_101_SL_seq_977
cccggcctcggccccggccc

SEQ ID NO: 978 - DNA, 20 bp, Homo sapiens
  source 1..20: mol_type = genomic DNA; note = Gene: HRAS; note = Location (start to end; relative to TSS): HRAS_32_62; note = Orientation (relative to transcription): sense; note = sgRNA Position: 535520; note = Sequence Name: 56322-704_101_SL_seq_978
aacccgagccgcacccgccg

SEQ ID NO: 979 - DNA, 20 bp, Homo sapiens
  source 1..20: mol_type = genomic DNA; note = Gene: HRAS; note = Location (start to end; relative to TSS): HRAS_70_100; note = Orientation (relative to transcription): antisense; note = sgRNA Position: 535502; note = Sequence Name: 56322-704_101_SL_seq_979
gcgcggttcgccccgcgcat

SEQ ID NO: 980 - DNA, 20 bp, Homo sapiens
  source 1..20: mol_type = genomic DNA; note = Gene: IDH1; note = Location (start to end; relative to TSS): IDH1_44_74; note = Orientation (relative to transcription): antisense; note = sgRNA Position: 208255023; note = Sequence Name: 56322-704_101_SL_seq_980
acagcctggcaatcccaaac

SEQ ID NO: 981 - DNA, 20 bp, Homo sapiens
  source 1..20: mol_type = genomic DNA; note = Gene: IDH1; note = Location (start to end; relative to TSS): IDH1_101_131; note = Orientation (relative to transcription): antisense; note = sgRNA Position: 208254966; note = Sequence Name: 56322-704_101_SL_seq_981
gatatgctggcgaagagttg

SEQ ID NO: 982 - DNA, 20 bp, Homo sapiens
  source 1..20: mol_type = genomic DNA; note = Gene: IDH1; note = Location (start to end; relative to TSS): IDH1_37_67; note = Orientation (relative to transcription): sense; note = sgRNA Position: 208255010; note = Sequence Name: 56322-704_101_SL_seq_982
ggtttgggattgccaggctg

SEQ ID NO: 983 - DNA, 20 bp, Homo sapiens
  source 1..20: mol_type = genomic DNA; note = Gene: IDH1; note = Location (start to end; relative to TSS): IDH1_99_129; note = Orientation (relative to transcription): sense; note = sgRNA Position: 208254948; note = Sequence Name: 56322-704_101_SL_seq_983
tcttcgccagcatatcatcc

SEQ ID NO: 984 - DNA, 20 bp, Homo sapiens
  source 1..20: mol_type = genomic DNA; note = Gene: IDH1; note = Location (start to end; relative to TSS): IDH1_31_61; note = Orientation (relative to transcription): sense; note = sgRNA Position: 208255016; note = Sequence Name: 56322-704_101_SL_seq_984
gagtccggtttgggattgcc

SEQ ID NO: 985 - DNA, 20 bp, Homo sapiens
  source 1..20: mol_type = genomic DNA; note = Gene: IDH1; note = Location (start to end; relative to TSS): IDH1_67_97; note = Orientation (relative to transcription): sense; note = sgRNA Position: 208254980; note = Sequence Name: 56322-704_101_SL_seq_985
tctgagcttgtgagcggctg

SEQ ID NO: 986 - DNA, 20 bp, Homo sapiens
  source 1..20: mol_type = genomic DNA; note = Gene: IDH1; note = Location (start to end; relative to TSS): IDH1_22_52; note = Orientation (relative to transcription): sense; note = sgRNA Position: 208255025; note = Sequence Name: 56322-704_101_SL_seq_986
aggcactgggagtccggttt

SEQ ID NO: 987 - DNA, 20 bp, Homo sapiens
  source 1..20: mol_type = genomic DNA; note = Gene: IDH1; note = Location (start to end; relative to TSS): IDH1_61_91; note = Orientation (relative to transcription): sense; note = sgRNA Position: 208254986; note = Sequence Name: 56322-704_101_SL_seq_987
tgtgagtctgagcttgtgag

SEQ ID NO: 988 - DNA, 20 bp, Homo sapiens
  source 1..20: mol_type = genomic DNA; note = Gene: IDH1; note = Location (start to end; relative to TSS): IDH1_16_46; note = Orientation (relative to transcription): sense; note = sgRNA Position: 208255031; note = Sequence Name: 56322-704_101_SL_seq_988
aagcggaggcactgggagtc

SEQ ID NO: 989 - DNA, 20 bp, Homo sapiens
  source 1..20: mol_type = genomic DNA; note = Gene: IDH1; note = Location (start to end; relative to TSS): IDH1_58_88; note = Orientation (relative to transcription): antisense; note = sgRNA Position: 208255009; note = Sequence Name: 56322-704_101_SL_seq_989
tcagactcacaaccacagcc

SEQ ID NO: 990 - DNA, 20 bp, Homo sapiens
  source 1..20: mol_type = genomic DNA; note = Gene: IDH2; note = Location (start to end; relative to TSS): IDH2_43_73; note = Orientation (relative to transcription): antisense; note = sgRNA Position: 90102421; note = Sequence Name: 56322-704_101_SL_seq_990
gcgaacgagcagggcgggag

SEQ ID NO: 991 - DNA, 20 bp, Homo sapiens
  source 1..20: mol_type = genomic DNA; note = Gene: IDH2; note = Location (start to end; relative to TSS): IDH2_119_149; note = Orientation (relative to transcription): antisense; note = sgRNA Position: 90102345; note = Sequence Name: 56322-704_101_SL_seq_991
ccaggccggccgcgagcctg

SEQ ID NO: 992 - DNA, 20 bp, Homo sapiens
  source 1..20: mol_type = genomic DNA; note = Gene: IDH2; note = Location (start to end; relative to TSS): IDH2_46_76; note = Orientation (relative to transcription): sense; note = sgRNA Position: 90102398; note = Sequence Name: 56322-704_101_SL_seq_992
tgctcgttcgctctccagct

SEQ ID NO: 993 - DNA, 20 bp, Homo sapiens
  source 1..20: mol_type = genomic DNA; note = Gene: IDH2; note = Location (start to end; relative to TSS): IDH2_90_120; note = Orientation (relative to transcription): antisense; note = sgRNA Position: 90102374; note = Sequence Name: 56322-704_101_SL_seq_993
agagcgagcgcacgacccgc

SEQ ID NO: 994 - DNA, 20 bp, Homo sapiens
  source 1..20: mol_type = genomic DNA; note = Gene: IDH2; note = Location (start to end; relative to TSS): IDH2_47_77; note = Orientation (relative to transcription): sense; note = sgRNA Position: 90102397; note = Sequence Name: 56322-704_101_SL_seq_994
gctcgttcgctctccagctt

SEQ ID NO: 995 - DNA, 20 bp, Homo sapiens
  source 1..20: mol_type = genomic DNA; note = Gene: IDH2; note = Location (start to end; relative to TSS): IDH2_83_113; note = Orientation (relative to transcription): antisense; note = sgRNA Position: 90102381; note = Sequence Name: 56322-704_101_SL_seq_995
gcgcacgacccgcaggtagc

SEQ ID NO: 996 - DNA, 20 bp, Homo sapiens
  source 1..20: mol_type = genomic DNA; note = Gene: IDH2; note = Location (start to end; relative to TSS): IDH2_48_78; note = Orientation (relative to transcription): antisense; note = sgRNA Position: 90102416; note = Sequence Name: 56322-704_101_SL_seq_996
ggagagcgaacgagcagggc

SEQ ID NO: 997 - DNA, 20 bp, Homo sapiens
  source 1..20: mol_type = genomic DNA; note = Gene: IDH2; note = Location (start to end; relative to TSS): IDH2_83_113; note = Orientation (relative to transcription): antisense; note = sgRNA Position: 90102381; note = Sequence Name: 56322-704_101_SL_seq_997
gcgcacgacccgcaggtagc

SEQ ID NO: 998 - DNA, 20 bp, Homo sapiens
  source 1..20: mol_type = genomic DNA; note = Gene: IDH2; note = Location (start to end; relative to TSS): IDH2_18_48; note = Orientation (relative to transcription): antisense; note = sgRNA Position: 90102446; note = Sequence Name: 56322-704_101_SL_seq_998
cgagcgcgcgccgctcctcc

SEQ ID NO: 999 - DNA, 20 bp, Homo sapiens
  source 1..20: mol_type = genomic DNA; note = Gene: IDH2; note = Location (start to end; relative to TSS): IDH2_48_78; note = Orientation (relative to transcription): antisense; note = sgRNA Position: 90102416; note = Sequence Name: 56322-704_101_SL_seq_999
ggagagcgaacgagcagggc

SEQ ID NO: 1000 - DNA, 20 bp, Homo sapiens
  source 1..20: mol_type = genomic DNA; note = Gene: IGF1R; note = Location (start to end; relative to TSS): IGF1R_62_92; note = Orientation (relative to transcription): antisense; note = sgRNA Position: 98648607; note = Sequence Name: 56322-704_101_SL_seq_1000
ccctttttttttccgctcag

SEQ ID NO: 1001 - DNA, 20 bp, Homo sapiens
  source 1..20: mol_type = genomic DNA; note = Gene: IGF1R; note = Location (start to end; relative to TSS): IGF1R_102_132; note = Orientation (relative to transcription): sense; note = sgRNA Position: 98648667; note = Sequence Name: 56322-704_101_SL_seq_1001
ccaggcgaactcgagagagg

SEQ ID NO: 1002 - DNA, 20 bp, Homo sapiens
  source 1..20: mol_type = genomic DNA; note = Gene: IGF1R; note = Location (start to end; relative to TSS): IGF1R_41_71; note = Orientation (relative to transcription): sense; note = sgRNA Position: 98648606; note = Sequence Name: 56322-704_101_SL_seq_1002
ccagcattaactccgctgag

SEQ ID NO: 1003 - DNA, 20 bp, Homo sapiens
  source 1..20: mol_type = genomic DNA; note = Gene: IGF1R; note = Location (start to end; relative to TSS): IGF1R_99_129; note = Orientation (relative to transcription): sense; note = sgRNA Position: 98648664; note = Sequence Name: 56322-704_101_SL_seq_1003
gcaccaggcgaactcgagag

SEQ ID NO: 1004 - DNA, 20 bp, Homo sapiens
  source 1..20: mol_type = genomic DNA; note = Gene: IGF1R; note = Location (start to end; relative to TSS): IGF1R_50_80; note = Orientation (relative to transcription): antisense; note = sgRNA Position: 98648595; note = Sequence Name: 56322-704_101_SL_seq_1004
ccgctcagcggagttaatgc

SEQ ID NO: 1005 - DNA, 20 bp, Homo sapiens
  source 1..20: mol_type = genomic DNA; note = Gene: IGF1R; note = Location (start to end; relative to TSS): IGF1R_92_122; note = Orientation (relative to transcription): antisense; note = sgRNA Position: 98648637; note = Sequence Name: 56322-704_101_SL_seq_1005
ctggtgcgctcgctcctcct

SEQ ID NO: 1006 - DNA, 20 bp, Homo sapiens
  source 1..20: mol_type = genomic DNA; note = Gene: IGF1R; note = Location (start to end; relative to TSS): IGF1R_52_82; note = Orientation (relative to transcription): sense; note = sgRNA Position: 98648617; note = Sequence Name: 56322-704_101_SL_seq_1006
tccgctgagcggaaaaaaaa

SEQ ID NO: 1007 - DNA, 20 bp, Homo sapiens
  source 1..20: mol_type = genomic DNA; note = Gene: IGF1R; note = Location (start to end; relative to TSS): IGF1R_91_121; note = Orientation (relative to transcription): antisense; note = sgRNA Position: 98648636; note = Sequence Name: 56322-704_101_SL_seq_1007
tggtgcgctcgctcctcctc

SEQ ID NO: 1008 - DNA, 20 bp, Homo sapiens
  source 1..20: mol_type = genomic DNA; note = Gene: IGF1R; note = Location (start to end; relative to TSS): IGF1R_53_83; note = Orientation (relative to transcription): sense; note = sgRNA Position: 98648618; note = Sequence Name: 56322-704_101_SL_seq_1008
ccgctgagcggaaaaaaaaa

SEQ ID NO: 1009 - DNA, 20 bp, Homo sapiens
  source 1..20: mol_type = genomic DNA; note = Gene: IGF1R; note = Location (start to end; relative to TSS): IGF1R_84_114; note = Orientation (relative to transcription): sense; note = sgRNA Position: 98648649; note = Sequence Name: 56322-704_101_SL_seq_1009
cgaggaggagcgagcgcacc

SEQ ID NO: 1010 - DNA, 20 bp, Homo sapiens
  source 1..20: mol_type = genomic DNA; note = Gene: IMP3; note = Location (start to end; relative to TSS): IMP3_49_79; note = Orientation (relative to transcription): antisense; note = sgRNA Position: 75640171; note = Sequence Name: 56322-704_101_SL_seq_1010
aagcttccgcaccatgatgg

SEQ ID NO: 1011 - DNA, 20 bp, Homo sapiens
  source 1..20: mol_type = genomic DNA; note = Gene: IMP3; note = Location (start to end; relative to TSS): IMP3_88_118; note = Orientation (relative to transcription): sense; note = sgRNA Position: 75640112; note = Sequence Name: 56322-704_101_SL_seq_1011
agcaggtggacttcctgaac

SEQ ID NO: 1012 - DNA, 20 bp, Homo sapiens
  source 1..20: mol_type = genomic DNA; note = Gene: IMP3; note = Location (start to end; relative to TSS): IMP3_34_64; note = Orientation (relative to transcription): sense; note = sgRNA Position: 75640166; note = Sequence Name: 56322-704_101_SL_seq_1012
cggctgccgccatcatggtg

SEQ ID NO: 1013 - DNA, 20 bp, Homo sapiens
  source 1..20: mol_type = genomic DNA; note = Gene: IMP3; note = Location (start to end; relative to TSS): IMP3_77_107; note = Orientation (relative to transcription): antisense; note = sgRNA Position: 75640143; note = Sequence Name: 56322-704_101_SL_seq_1013
gcttcagcagcttctgctcg

SEQ ID NO: 1014 - DNA, 20 bp, Homo sapiens
  source 1..20: mol_type = genomic DNA; note = Gene: IMP3; note = Location (start to end; relative to TSS): IMP3_33_63; note = Orientation (relative to transcription): antisense; note = sgRNA Position: 75640187; note = Sequence Name: 56322-704_101_SL_seq_1014
atggcggcagccgcagccgc

SEQ ID NO: 1015 - DNA, 20 bp, Homo sapiens
  source 1..20: mol_type = genomic DNA; note = Gene: IMP3; note = Location (start to end; relative to TSS): IMP3_74_104; note = Orientation (relative to transcription): sense; note = sgRNA Position: 75640126; note = Sequence Name: 56322-704_101_SL_seq_1015
gcagaagctgctgaagcagg

SEQ ID NO: 1016 - DNA, 20 bp, Homo sapiens
  source 1..20: mol_type = genomic DNA; note = Gene: IMP3; note = Location (start to end; relative to TSS): IMP3_29_59; note = Orientation (relative to transcription): sense; note = sgRNA Position: 75640171; note = Sequence Name: 56322-704_101_SL_seq_1016
ggctgcggctgccgccatca

SEQ ID NO: 1017 - DNA, 20 bp, Homo sapiens
  source 1..20: mol_type = genomic DNA; note = Gene: IMP3; note = Location (start to end; relative to TSS): IMP3_71_101; note = Orientation (relative to transcription): sense; note = sgRNA Position: 75640129; note = Sequence Name: 56322-704_101_SL_seq_1017
cgagcagaagctgctgaagc

SEQ ID NO: 1018 - DNA, 20 bp, Homo sapiens
  source 1..20: mol_type = genomic DNA; note = Gene: IMP3; note = Location (start to end; relative to TSS): IMP3_14_44; note = Orientation (relative to transcription): sense; note = sgRNA Position: 75640186; note = Sequence Name: 56322-704_101_SL_seq_1018
agcttcgggtcctgcggctg

SEQ ID NO: 1019 - DNA, 20 bp, Homo sapiens
  source 1..20: mol_type = genomic DNA; note = Gene: IMP3; note = Location (start to end; relative to TSS): IMP3_49_79; note = Orientation (relative to transcription): antisense; note = sgRNA Position: 75640171; note = Sequence Name: 56322-704_101_SL_seq_1019
aagcttccgcaccatgatgg

SEQ ID NO: 1020 - DNA, 20 bp, Homo sapiens
  source 1..20: mol_type = genomic DNA; note = Gene: JAK1; note = Location (start to end; relative to TSS): JAK1_46_76; note = Orientation (relative to transcription): sense; note = sgRNA Position: 64966479; note = Sequence Name: 56322-704_101_SL_seq_1020
tgcgggcctgcgcccagtcc

SEQ ID NO: 1021 - DNA, 20 bp, Homo sapiens
  source 1..20: mol_type = genomic DNA; note = Gene: JAK1; note = Location (start to end; relative to TSS): JAK1_78_108; note = Orientation (relative to transcription): sense; note = sgRNA Position: 64966447; note = Sequence Name: 56322-704_101_SL_seq_1021
ccgcgacccctcctcagccc

SEQ ID NO: 1022 - DNA, 20 bp, Homo sapiens
  source 1..20: mol_type = genomic DNA; note = Gene: JAK1; note = Location (start to end; relative to TSS): JAK1_38_68; note = Orientation (relative to transcription): antisense; note = sgRNA Position: 64966507; note = Sequence Name: 56322-704_101_SL_seq_1022
cccgcactgtctgcagctcc

SEQ ID NO: 1023 - DNA, 20 bp, Homo sapiens
  source 1..20: mol_type = genomic DNA; note = Gene: JAK1; note = Location (start to end; relative to TSS): JAK1_74_104; note = Orientation (relative to transcription): antisense; note = sgRNA Position: 64966471; note = Sequence Name: 56322-704_101_SL_seq_1023
ggggtcgcggcgaggacagc

SEQ ID NO: 1024 - DNA, 20 bp, Homo sapiens
  source 1..20: mol_type = genomic DNA; note = Gene: JAK1; note = Location (start to end; relative to TSS): JAK1_28_58; note = Orientation (relative to transcription): sense; note = sgRNA Position: 64966497; note = Sequence Name: 56322-704_101_SL_seq_1024
tcctggagctgcagacagtg

SEQ ID NO: 1025 - DNA, 20 bp, Homo sapiens
  source 1..20: mol_type = genomic DNA; note = Gene: JAK1; note = Location (start to end; relative to TSS): JAK1_73_103; note = Orientation (relative to transcription): antisense; note = sgRNA Position: 64966472; note = Sequence Name: 56322-704_101_SL_seq_1025
gggtcgcggcgaggacagcc

SEQ ID NO: 1026 - DNA, 20 bp, Homo sapiens
  source 1..20: mol_type = genomic DNA; note = Gene: JAK1; note = Location (start to end; relative to TSS): JAK1_27_57; note = Orientation (relative to transcription): antisense; note = sgRNA Position: 64966518; note = Sequence Name: 56322-704_101_SL_seq_1026
tgcagctccaggatactccg

SEQ ID NO: 1027 - DNA, 20 bp, Homo sapiens
  source 1..20: mol_type = genomic DNA; note = Gene: JAK1; note = Location (start to end; relative to TSS): JAK1_67_97; note = Orientation (relative to transcription): antisense; note = sgRNA Position: 64966478; note = Sequence Name: 56322-704_101_SL_seq_1027
cggcgaggacagccgggact

SEQ ID NO: 1028 - DNA, 20 bp, Homo sapiens
  source 1..20: mol_type = genomic DNA; note = Gene: JAK1; note = Location (start to end; relative to TSS): JAK1_18_48; note = Orientation (relative to transcription): antisense; note = sgRNA Position: 64966527; note = Sequence Name: 56322-704_101_SL_seq_1028
aggatactccgcggccgccg

SEQ ID NO: 1029 - DNA, 20 bp, Homo sapiens
  source 1..20: mol_type = genomic DNA; note = Gene: JAK1; note = Location (start to end; relative to TSS): JAK1_61_91; note = Orientation (relative to transcription): antisense; note = sgRNA Position: 64966484; note = Sequence Name: 56322-704_101_SL_seq_1029
ggacagccgggactgggcgc

SEQ ID NO: 1030 - DNA, 20 bp, Homo sapiens
  source 1..20: mol_type = genomic DNA; note = Gene: JAK2; note = Location (start to end; relative to TSS): JAK2_31_61; note = Orientation (relative to transcription): antisense; note = sgRNA Position: 4985309; note = Sequence Name: 56322-704_101_SL_seq_1030
cagcctgtcagcgccgaggg

SEQ ID NO: 1031 - DNA, 20 bp, Homo sapiens
  source 1..20: mol_type = genomic DNA; note = Gene: JAK2; note = Location (start to end; relative to TSS): JAK2_73_103; note = Orientation (relative to transcription): sense; note = sgRNA Position: 4985371; note = Sequence Name: 56322-704_101_SL_seq_1031
gcgtcgccacttcggcttct

SEQ ID NO: 1032 - DNA, 20 bp, Homo sapiens
  source 1..20: mol_type = genomic DNA; note = Gene: JAK2; note = Location (start to end; relative to TSS): JAK2_28_58; note = Orientation (relative to transcription): sense; note = sgRNA Position: 4985326; note = Sequence Name: 56322-704_101_SL_seq_1032
tcggcgctgacaggctgggc

SEQ ID NO: 1033 - DNA, 20 bp, Homo sapiens
  source 1..20: mol_type = genomic DNA; note = Gene: JAK2; note = Location (start to end; relative to TSS): JAK2_65_95; note = Orientation (relative to transcription): sense; note = sgRNA Position: 4985363; note = Sequence Name: 56322-704_101_SL_seq_1033
gggtgttcgcgtcgccactt

SEQ ID NO: 1034 - DNA, 20 bp, Homo sapiens
  source 1..20: mol_type = genomic DNA; note = Gene: JAK2; note = Location (start to end; relative to TSS): JAK2_19_49; note = Orientation (relative to transcription): sense; note = sgRNA Position: 4985317; note = Sequence Name: 56322-704_101_SL_seq_1034
cggcctccctcggcgctgac

SEQ ID NO: 1035 - DNA, 20 bp, Homo sapiens
  source 1..20: mol_type = genomic DNA; note = Gene: JAK2; note = Location (start to end; relative to TSS): JAK2_63_93; note = Orientation (relative to transcription): antisense; note = sgRNA Position: 4985341; note = Sequence Name: 56322-704_101_SL_seq_1035
acgcgaacacccaagcgagc

SEQ ID NO: 1036 - DNA, 20 bp, Homo sapiens
  source 1..20: mol_type = genomic DNA; note = Gene: JAK2; note = Location (start to end; relative to TSS): JAK2_21_51; note = Orientation (relative to transcription): antisense; note = sgRNA Position: 4985299; note = Sequence Name: 56322-704_101_SL_seq_1036
gcgccgagggaggccgttag

SEQ ID NO: 1037 - DNA, 20 bp, Homo sapiens
  source 1..20: mol_type = genomic DNA; note = Gene: JAK2; note = Location (start to end; relative to TSS): JAK2_62_92; note = Orientation (relative to transcription): antisense; note = sgRNA Position: 4985340; note = Sequence Name: 56322-704_101_SL_seq_1037
cgcgaacacccaagcgagcc

SEQ ID NO: 1038 - DNA, 20 bp, Homo sapiens
  source 1..20: mol_type = genomic DNA; note = Gene: JAK2; note = Location (start to end; relative to TSS): JAK2_24_54; note = Orientation (relative to transcription): sense; note = sgRNA Position: 4985322; note = Sequence Name: 56322-704_101_SL_seq_1038
tccctcggcgctgacaggct

SEQ ID NO: 1039 - DNA, 20 bp, Homo sapiens
  source 1..20: mol_type = genomic DNA; note = Gene: JAK2; note = Location (start to end; relative to TSS): JAK2_56_86; note = Orientation (relative to transcription): antisense; note = sgRNA Position: 4985334; note = Sequence Name: 56322-704_101_SL_seq_1039
cacccaagcgagccgggcgc

SEQ ID NO: 1040 - DNA, 20 bp, Homo sapiens
  source 1..20: mol_type = genomic DNA; note = Gene: JAK3; note = Location (start to end; relative to TSS): JAK3_29_59; note = Orientation (relative to transcription): sense; note = sgRNA Position: 17847929; note = Sequence Name: 56322-704_101_SL_seq_1040
gtaagagctggcgatgccgc

SEQ ID NO: 1041 - DNA, 20 bp, Homo sapiens
  source 1..20: mol_type = genomic DNA; note = Gene: JAK3; note = Location (start to end; relative to TSS): JAK3_66_96; note = Orientation (relative to transcription): sense; note = sgRNA Position: 17847892; note = Sequence Name: 56322-704_101_SL_seq_1041
ctgggggaggatggtggtgg

SEQ ID NO: 1042 - DNA, 20 bp, Homo sapiens
  source 1..20: mol_type = genomic DNA; note = Gene: JAK3; note = Location (start to end; relative to TSS): JAK3_30_60; note = Orientation (relative to transcription): sense; note = sgRNA Position: 17847928; note = Sequence Name: 56322-704_101_SL_seq_1042
taagagctggcgatgccgca

SEQ ID NO: 1043 - DNA, 20 bp, Homo sapiens
  source 1..20: mol_type = genomic DNA; note = Gene: JAK3; note = Location (start to end; relative to TSS): JAK3_63_93; note = Orientation (relative to transcription): sense; note = sgRNA Position: 17847895; note = Sequence Name: 56322-704_101_SL_seq_1043
acactgggggaggatggtgg

SEQ ID NO: 1044 - DNA, 20 bp, Homo sapiens
  source 1..20: mol_type = genomic DNA; note = Gene: JAK3; note = Location (start to end; relative to TSS): JAK3_25_55; note = Orientation (relative to transcription): antisense; note = sgRNA Position: 17847953; note = Sequence Name: 56322-704_101_SL_seq_1044
cagctcttacctagcgggca

SEQ ID NO: 1045 - DNA, 20 bp, Homo sapiens
  source 1..20: mol_type = genomic DNA; note = Gene: JAK3; note = Location (start to end; relative to TSS): JAK3_60_90; note = Orientation (relative to transcription): sense; note = sgRNA Position: 17847898; note = Sequence Name: 56322-704_101_SL_seq_1045
cagacactgggggaggatgg

SEQ ID NO: 1046 - DNA, 20 bp, Homo sapiens
  source 1..20: mol_type = genomic DNA; note = Gene: JAK3; note = Location (start to end; relative to TSS): JAK3_26_56; note = Orientation (relative to transcription): antisense; note = sgRNA Position: 17847952; note = Sequence Name: 56322-704_101_SL_seq_1046
ccagctcttacctagcgggc

SEQ ID NO: 1047 - DNA, 20 bp, Homo sapiens
  source 1..20: mol_type = genomic DNA; note = Gene: JAK3; note = Location (start to end; relative to TSS): JAK3_57_87; note = Orientation (relative to transcription): sense; note = sgRNA Position: 17847901; note = Sequence Name: 56322-704_101_SL_seq_1047
gcccagacactgggggagga

SEQ ID NO: 1048 - DNA, 20 bp, Homo sapiens
  source 1..20: mol_type = genomic DNA; note = Gene: JAK3; note = Location (start to end; relative to TSS): JAK3_18_48; note = Orientation (relative to transcription): antisense; note = sgRNA Position: 17847960; note = Sequence Name: 56322-704_101_SL_seq_1048
tacctagcgggcagggaccc

SEQ ID NO: 1049 - DNA, 20 bp, Homo sapiens
  source 1..20: mol_type = genomic DNA; note = Gene: JAK3; note = Location (start to end; relative to TSS): JAK3_48_78; note = Orientation (relative to transcription): sense; note = sgRNA Position: 17847910; note = Sequence Name: 56322-704_101_SL_seq_1049
cagggctcggcccagacact

SEQ ID NO: 1050 - DNA, 20 bp, Homo sapiens
  source 1..20: mol_type = genomic DNA; note = Gene: KDR; note = Location (start to end; relative to TSS): KDR_35_65; note = Orientation (relative to transcription): sense; note = sgRNA Position: 55125536; note = Sequence Name: 56322-704_101_SL_seq_1050
tgcgtttcctctgcctgcgc

SEQ ID NO: 1051 - DNA, 20 bp, Homo sapiens
  source 1..20: mol_type = genomic DNA; note = Gene: KDR; note = Location (start to end; relative to TSS): KDR_76_106; note = Orientation (relative to transcription): sense; note = sgRNA Position: 55125495; note = Sequence Name: 56322-704_101_SL_seq_1051
agaaagtccgtctggcagcc

SEQ ID NO: 1052 - DNA, 20 bp, Homo sapiens
  source 1..20: mol_type = genomic DNA; note = Gene: KDR; note = Location (start to end; relative to TSS): KDR_36_66; note = Orientation (relative to transcription): sense; note = sgRNA Position: 55125535; note = Sequence Name: 56322-704_101_SL_seq_1052
gcgtttcctctgcctgcgcc

SEQ ID NO: 1053 - DNA, 20 bp, Homo sapiens
  source 1..20: mol_type = genomic DNA; note = Gene: KDR; note = Location (start to end; relative to TSS): KDR_68_98; note = Orientation (relative to transcription): sense; note = sgRNA Position: 55125503; note = Sequence Name: 56322-704_101_SL_seq_1053
cgcgccgcagaaagtccgtc

SEQ ID NO: 1054 - DNA, 20 bp, Homo sapiens
  source 1..20: mol_type = genomic DNA; note = Gene: KDR; note = Location (start to end; relative to TSS): KDR_17_47; note = Orientation (relative to transcription): antisense; note = sgRNA Position: 55125574; note = Sequence Name: 56322-704_101_SL_seq_1054
ccacacattgaccgctctcc

SEQ ID NO: 1055 - DNA, 20 bp, Homo sapiens
  source 1..20: mol_type = genomic DNA; note = Gene: KDR; note = Location (start to end; relative to TSS): KDR_63_93; note = Orientation (relative to transcription): antisense; note = sgRNA Position: 55125528; note = Sequence Name: 56322-704_101_SL_seq_1055
tgcggcgcgcaagtgatgcc

SEQ ID NO: 1056 - DNA, 20 bp, Homo sapiens
  source 1..20: mol_type = genomic DNA; note = Gene: KDR; note = Location (start to end; relative to TSS): KDR_16_46; note = Orientation (relative to transcription): antisense; note = sgRNA Position: 55125575; note = Sequence Name: 56322-704_101_SL_seq_1056
cacacattgaccgctctccc

SEQ ID NO: 1057 - DNA, 20 bp, Homo sapiens
  source 1..20: mol_type = genomic DNA; note = Gene: KDR; note = Location (start to end; relative to TSS): KDR_57_87; note = Orientation (relative to transcription): antisense; note = sgRNA Position: 55125534; note = Sequence Name: 56322-704_101_SL_seq_1057
gcgcaagtgatgcccggcgc

SEQ ID NO: 1058 - DNA, 20 bp, Homo sapiens
  source 1..20: mol_type = genomic DNA; note = Gene: KDR; note = Location (start to end; relative to TSS): KDR_15_45; note = Orientation (relative to transcription): antisense; note = sgRNA Position: 55125576; note = Sequence Name: 56322-704_101_SL_seq_1058
acacattgaccgctctcccg

SEQ ID NO: 1059 - DNA, 20 bp, Homo sapiens
  source 1..20: mol_type = genomic DNA; note = Gene: KDR; note = Location (start to end; relative to TSS): KDR_51_81; note = Orientation (relative to transcription): antisense; note = sgRNA Position: 55125540; note = Sequence Name: 56322-704_101_SL_seq_1059
gtgatgcccggcgcaggcag

SEQ ID NO: 1060 - DNA, 20 bp, Homo sapiens
  source 1..20: mol_type = genomic DNA; note = Gene: KIF11; note = Location (start to end; relative to TSS): KIF11_46_76; note = Orientation (relative to transcription): antisense; note = sgRNA Position: 92593182; note = Sequence Name: 56322-704_101_SL_seq_1060
ggcgtttgtcccgcgccagt

SEQ ID NO: 1061 - DNA, 20 bp, Homo sapiens
  source 1..20: mol_type = genomic DNA; note = Gene: KIF11; note = Location (start to end; relative to TSS): KIF11_87_117; note = Orientation (relative to transcription): sense; note = sgRNA Position: 92593243; note = Sequence Name: 56322-704_101_SL_seq_1061
ggacgccgacctgcgtgcgt

SEQ ID NO: 1062 - DNA, 20 bp, Homo sapiens
  source 1..20: mol_type = genomic DNA; note = Gene: KIF11; note = Location (start to end; relative to TSS): KIF11_41_71; note = Orientation (relative to transcription): sense; note = sgRNA Position: 92593197; note = Sequence Name: 56322-704_101_SL_seq_1062
ctggcgcgggacaaacgcca

SEQ ID NO: 1063 - DNA, 20 bp, Homo sapiens
  source 1..20: mol_type = genomic DNA; note = Gene: KIF11; note = Location (start to end; relative to TSS): KIF11_81_111; note = Orientation (relative to transcription): antisense; note = sgRNA Position: 92593217; note = Sequence Name: 56322-704_101_SL_seq_1063
cggcgtccccgctctctacc

SEQ ID NO: 1064 - DNA, 20 bp, Homo sapiens
  source 1..20: mol_type = genomic DNA; note = Gene: KIF11; note = Location (start to end; relative to TSS): KIF11_22_52; note = Orientation (relative to transcription): sense; note = sgRNA Position: 92593178; note = Sequence Name: 56322-704_101_SL_seq_1064
agtgatttggcggctccgac

SEQ ID NO: 1065 - DNA, 20 bp, Homo sapiens
  source 1..20: mol_type = genomic DNA; note = Gene: KIF11; note = Location (start to end; relative to TSS): KIF11_73_103; note = Orientation (relative to transcription): antisense; note = sgRNA Position: 92593209; note = Sequence Name: 56322-704_101_SL_seq_1065
ccgctctctacccggtactc

SEQ ID NO: 1066 - DNA, 20 bp, Homo sapiens
  source 1..20: mol_type = genomic DNA; note = Gene: KIF11; note = Location (start to end; relative to TSS): KIF11_27_57; note = Orientation (relative to transcription): sense; note = sgRNA Position: 92593183; note = Sequence Name: 56322-704_101_SL_seq_1066
tttggcggctccgactggcg

SEQ ID NO: 1067 - DNA, 20 bp, Homo sapiens
  source 1..20: mol_type = genomic DNA; note = Gene: KIF11; note = Location (start to end; relative to TSS): KIF11_67_97; note = Orientation (relative to transcription): antisense; note = sgRNA Position: 92593203; note = Sequence Name: 56322-704_101_SL_seq_1067
tctacccggtactctggccg

SEQ ID NO: 1068 - DNA, 20 bp, Homo sapiens
  source 1..20: mol_type = genomic DNA; note = Gene: KIF11; note = Location (start to end; relative to TSS): KIF11_28_58; note = Orientation (relative to transcription): sense; note = sgRNA Position: 92593184; note = Sequence Name: 56322-704_101_SL_seq_1068
ttggcggctccgactggcgc

SEQ ID NO: 1069 - DNA, 20 bp, Homo sapiens
  source 1..20: mol_type = genomic DNA; note = Gene: KIF11; note = Location (start to end; relative to TSS): KIF11_66_96; note = Orientation (relative to transcription): sense; note = sgRNA Position: 92593222; note = Sequence Name: 56322-704_101_SL_seq_1069
agagtaccgggtagagagcg

SEQ ID NO: 1070 - DNA, 20 bp, Homo sapiens
  source 1..20: mol_type = genomic DNA; note = Gene: KIT; note = Location (start to end; relative to TSS): KIT_27_57; note = Orientation (relative to transcription): antisense; note = sgRNA Position: 54657990; note = Sequence Name: 56322-704_101_SL_seq_1070
ctgcgatgggatccgagctc

SEQ ID NO: 1071 - DNA, 20 bp, Homo sapiens
  source 1..20: mol_type = genomic DNA; note = Gene: KIT; note = Location (start to end; relative to TSS): KIT_107_137; note = Orientation (relative to transcription): sense; note = sgRNA Position: 54658090; note = Sequence Name: 56322-704_101_SL_seq_1071
tccagacaggtgggacaccg

SEQ ID NO: 1072 - DNA, 20 bp, Homo sapiens
  source 1..20: mol_type = genomic DNA; note = Gene: KIT; note = Location (start to end; relative to TSS): KIT_34_64; note = Orientation (relative to transcription): sense; note = sgRNA Position: 54658017; note = Sequence Name: 56322-704_101_SL_seq_1072
atcgcagctaccgcgatgag

SEQ ID NO: 1073 - DNA, 20 bp, Homo sapiens
  source 1..20: mol_type = genomic DNA; note = Gene: KIT; note = Location (start to end; relative to TSS): KIT_102_132; note = Orientation (relative to transcription): antisense; note = sgRNA Position: 54658065; note = Sequence Name: 56322-704_101_SL_seq_1073
ctgtctggacgcgaagcagt

SEQ ID NO: 1074 - DNA, 20 bp, Homo sapiens
  source 1..20: mol_type = genomic DNA; note = Gene: KIT; note = Location (start to end; relative to TSS): KIT_40_70; note = Orientation (relative to transcription): antisense; note = sgRNA Position: 54658003; note = Sequence Name: 56322-704_101_SL_seq_1074
ctcatcgcggtagctgcgat

SEQ ID NO: 1075 - DNA, 20 bp, Homo sapiens
  source 1..20: mol_type = genomic DNA; note = Gene: KIT; note = Location (start to end; relative to TSS): KIT_98_128; note = Orientation (relative to transcription): sense; note = sgRNA Position: 54658081; note = Sequence Name: 56322-704_101_SL_seq_1075
tgcttcgcgtccagacaggt

SEQ ID NO: 1076 - DNA, 20 bp, Homo sapiens
  source 1..20: mol_type = genomic DNA; note = Gene: KIT; note = Location (start to end; relative to TSS): KIT_41_71; note = Orientation (relative to transcription): antisense; note = sgRNA Position: 54658004; note = Sequence Name: 56322-704_101_SL_seq_1076
tctcatcgcggtagctgcga

SEQ ID NO: 1077 - DNA, 20 bp, Homo sapiens
  source 1..20: mol_type = genomic DNA; note = Gene: KIT; note = Location (start to end; relative to TSS): KIT_97_127; note = Orientation (relative to transcription): sense; note = sgRNA Position: 54658080; note = Sequence Name: 56322-704_101_SL_seq_1077
ctgcttcgcgtccagacagg

SEQ ID NO: 1078 - DNA, 20 bp, Homo sapiens
  source 1..20: mol_type = genomic DNA; note = Gene: KIT; note = Location (start to end; relative to TSS): KIT_43_73; note = Orientation (relative to transcription): sense; note = sgRNA Position: 54658026; note = Sequence Name: 56322-704_101_SL_seq_1078
accgcgatgagaggcgctcg

SEQ ID NO: 1079 - DNA, 20 bp, Homo sapiens
  source 1..20: mol_type = genomic DNA; note = Gene: KIT; note = Location (start to end; relative to TSS): KIT_94_124; note = Orientation (relative to transcription): sense; note = sgRNA Position: 54658077; note = Sequence Name: 56322-704_101_SL_seq_1079
ctactgcttcgcgtccagac

SEQ ID NO: 1080 - DNA, 20 bp, Homo sapiens
  source 1..20: mol_type = genomic DNA; note = Gene: KMT2A; note = Location (start to end; relative to TSS): KMT2A_41_71; note = Orientation (relative to transcription): sense; note = sgRNA Position: 118436559; note = Sequence Name: 56322-704_101_SL_seq_1080
cgcccgacccgggaccaccg

SEQ ID NO: 1081 - DNA, 20 bp, Homo sapiens
  source 1..20: mol_type = genomic DNA; note = Gene: KMT2A; note = Location (start to end; relative to TSS): KMT2A_92_122; note = Orientation (relative to transcription): antisense; note = sgRNA Position: 118436590; note = Sequence Name: 56322-704_101_SL_seq_1081
gcggggcgccccctaggccc

SEQ ID NO: 1082 - DNA, 20 bp, Homo sapiens
  source 1..20: mol_type = genomic DNA; note = Gene: KMT2A; note = Location (start to end; relative to TSS): KMT2A_40_70; note = Orientation (relative to transcription): sense; note = sgRNA Position: 118436558; note = Sequence Name: 56322-704_101_SL_seq_1082
ccgcccgacccgggaccacc

SEQ ID NO: 1083 - DNA, 20 bp, Homo sapiens
  source 1..20: mol_type = genomic DNA; note = Gene: KMT2A; note = Location (start to end; relative to TSS): KMT2A_85_115; note = Orientation (relative to transcription): sense; note = sgRNA Position: 118436603; note = Sequence Name: 56322-704_101_SL_seq_1083
ggggcctagggggcgccccg

SEQ ID NO: 1084 - DNA, 20 bp, Homo sapiens
  source 1..20: mol_type = genomic DNA; note = Gene: KMT2A; note = Location (start to end; relative to TSS): KMT2A_39_69; note = Orientation (relative to transcription): sense; note = sgRNA Position: 118436557; note = Sequence Name: 56322-704_101_SL_seq_1084
cccgcccgacccgggaccac

SEQ ID NO: 1085 - DNA, 20 bp, Homo sapiens
  source 1..20: mol_type = genomic DNA; note = Gene: KMT2A; note = Location (start to end; relative to TSS): KMT2A_75_105; note = Orientation (relative to transcription): sense; note = sgRNA Position: 118436593; note = Sequence Name: 56322-704_101_SL_seq_1085
ggggggcgccggggcctagg

SEQ ID NO: 1086 - DNA, 20 bp, Homo sapiens
  source 1..20: mol_type = genomic DNA; note = Gene: KMT2A; note = Location (start to end; relative to TSS): KMT2A_30_60; note = Orientation (relative to transcription): sense; note = sgRNA Position: 118436548; note = Sequence Name: 56322-704_101_SL_seq_1086
tggcgcttccccgcccgacc

SEQ ID NO: 1087 - DNA, 20 bp, Homo sapiens
  source 1..20: mol_type = genomic DNA; note = Gene: KMT2A; note = Location (start to end; relative to TSS): KMT2A_74_104; note = Orientation (relative to transcription): sense; note = sgRNA Position: 118436592; note = Sequence Name: 56322-704_101_SL_seq_1087
cggggggcgccggggcctag

SEQ ID NO: 1088 - DNA, 20 bp, Homo sapiens
  source 1..20: mol_type = genomic DNA; note = Gene: KMT2A; note = Location (start to end; relative to TSS): KMT2A_31_61; note = Orientation (relative to transcription): sense; note = sgRNA Position: 118436549; note = Sequence Name: 56322-704_101_SL_seq_1088
ggcgcttccccgcccgaccc

SEQ ID NO: 1089 - DNA, 20 bp, Homo sapiens
  source 1..20: mol_type = genomic DNA; note = Gene: KMT2A; note = Location (start to end; relative to TSS): KMT2A_64_94; note = Orientation (relative to transcription): antisense; note = sgRNA Position: 118436562; note = Sequence Name: 56322-704_101_SL_seq_1089
cccgccgccgccgcccccgg

SEQ ID NO: 1090 - DNA, 20 bp, Homo sapiens
  source 1..20: mol_type = genomic DNA; note = Gene: KRAS; note = Location (start to end; relative to TSS): KRAS_37_67; note = Orientation (relative to transcription): sense; note = sgRNA Position: 25250868; note = Sequence Name: 56322-704_101_SL_seq_1090
ggcggcggcgaaggtggcgg

SEQ ID NO: 1091 - DNA, 20 bp, Homo sapiens
  source 1..20: mol_type = genomic DNA; note = Gene: KRAS; note = Location (start to end; relative to TSS): KRAS_82_112; note = Orientation (relative to transcription): antisense; note = sgRNA Position: 25250843; note = Sequence Name: 56322-704_101_SL_seq_1091
agtccgaaatggcgggggcc

SEQ ID NO: 1092 - DNA, 20 bp, Homo sapiens
  source 1..20: mol_type = genomic DNA; note = Gene: KRAS; note = Location (start to end; relative to TSS): KRAS_34_64; note = Orientation (relative to transcription): sense; note = sgRNA Position: 25250871; note = Sequence Name: 56322-704_101_SL_seq_1092
agtggcggcggcgaaggtgg

SEQ ID NO: 1093 - DNA, 20 bp, Homo sapiens
  source 1..20: mol_type = genomic DNA; note = Gene: KRAS; note = Location (start to end; relative to TSS): KRAS_76_106; note = Orientation (relative to transcription): sense; note = sgRNA Position: 25250829; note = Sequence Name: 56322-704_101_SL_seq_1093
ggcccccgccatttcggact

SEQ ID NO: 1094 - DNA, 20 bp, Homo sapiens
  source 1..20: mol_type = genomic DNA; note = Gene: KRAS; note = Location (start to end; relative to TSS): KRAS_31_61; note = Orientation (relative to transcription): sense; note = sgRNA Position: 25250874; note = Sequence Name: 56322-704_101_SL_seq_1094
ggcagtggcggcggcgaagg

SEQ ID NO: 1095 - DNA, 20 bp, Homo sapiens
  source 1..20: mol_type = genomic DNA; note = Gene: KRAS; note = Location (start to end; relative to TSS): KRAS_75_105; note = Orientation (relative to transcription): sense; note = sgRNA Position: 25250830; note = Sequence Name: 56322-704_101_SL_seq_1095
cggcccccgccatttcggac

SEQ ID NO: 1096 - DNA, 20 bp, Homo sapiens
  source 1..20: mol_type = genomic DNA; note = Gene: KRAS; note = Location (start to end; relative to TSS): KRAS_28_58; note = Orientation (relative to transcription): sense; note = sgRNA Position: 25250877; note = Sequence Name: 56322-704_101_SL_seq_1096
ggcggcagtggcggcggcga

SEQ ID NO: 1097 - DNA, 20 bp, Homo sapiens
  source 1..20: mol_type = genomic DNA; note = Gene: KRAS; note = Location (start to end; relative to TSS): KRAS_74_104; note = Orientation (relative to transcription): antisense; note = sgRNA Position: 25250851; note = Sequence Name: 56322-704_101_SL_seq_1097
atggcgggggccgggagtac

SEQ ID NO: 1098 - DNA, 20 bp, Homo sapiens
  source 1..20: mol_type = genomic DNA; note = Gene: KRAS; note = Location (start to end; relative to TSS): KRAS_19_49; note = Orientation (relative to transcription): sense; note = sgRNA Position: 25250886; note = Sequence Name: 56322-704_101_SL_seq_1098
agcagcggcggcggcagtgg

SEQ ID NO: 1099 - DNA, 20 bp, Homo sapiens
  source 1..20: mol_type = genomic DNA; note = Gene: KRAS; note = Location (start to end; relative to TSS): KRAS_55_85; note = Orientation (relative to transcription): sense; note = sgRNA Position: 25250850; note = Sequence Name: 56322-704_101_SL_seq_1099
ggcggctcggccagtactcc

SEQ ID NO: 1100 - DNA, 20 bp, Homo sapiens
  source 1..20: mol_type = genomic DNA; note = Gene: LUC7L3; note = Location (start to end; relative to TSS): LUC7L3_47_77; note = Orientation (relative to transcription): antisense; note = sgRNA Position: 50719656; note = Sequence Name: 56322-704_101_SL_seq_1100
gacaccgtcgccaatctcct

SEQ ID NO: 1101 - DNA, 20 bp, Homo sapiens
  source 1..20: mol_type = genomic DNA; note = Gene: LUC7L3; note = Location (start to end; relative to TSS): LUC7L3_91_121; note = Orientation (relative to transcription): sense; note = sgRNA Position: 50719720; note = Sequence Name: 56322-704_101_SL_seq_1101
tggtgggaacagccgcccga

SEQ ID NO: 1102 - DNA, 20 bp, Homo sapiens
  source 1..20: mol_type = genomic DNA; note = Gene: LUC7L3; note = Location (start to end; relative to TSS): LUC7L3_35_65; note = Orientation (relative to transcription): antisense; note = sgRNA Position: 50719644; note = Sequence Name: 56322-704_101_SL_seq_1102
aatctcctcggcccgctctc

SEQ ID NO: 1103 - DNA, 20 bp, Homo sapiens
  source 1..20: mol_type = genomic DNA; note = Gene: LUC7L3; note = Location (start to end; relative to TSS): LUC7L3_67_97; note = Orientation (relative to transcription): sense; note = sgRNA Position: 50719696; note = Sequence Name: 56322-704_101_SL_seq_1103
gttttcgttggcgggtgcct

SEQ ID NO: 1104 - DNA, 20 bp, Homo sapiens
  source 1..20: mol_type = genomic DNA; note = Gene: LUC7L3; note = Location (start to end; relative to TSS): LUC7L3_34_64; note = Orientation (relative to transcription): sense; note = sgRNA Position: 50719663; note = Sequence Name: 56322-704_101_SL_seq_1104
cgggccgaggagattggcga

SEQ ID NO: 1105 - DNA, 20 bp, Homo sapiens
  source 1..20: mol_type = genomic DNA; note = Gene: LUC7L3; note = Location (start to end; relative to TSS): LUC7L3_66_96; note = Orientation (relative to transcription): sense; note = sgRNA Position: 50719695; note = Sequence Name: 56322-704_101_SL_seq_1105
tgttttcgttggcgggtgcc

SEQ ID NO: 1106 - DNA, 20 bp, Homo sapiens
  source 1..20: mol_type = genomic DNA; note = Gene: LUC7L3; note = Location (start to end; relative to TSS): LUC7L3_28_58; note = Orientation (relative to transcription): sense; note = sgRNA Position: 50719657; note = Sequence Name: 56322-704_101_SL_seq_1106
tgagagcgggccgaggagat

SEQ ID NO: 1107 - DNA, 20 bp, Homo sapiens
  source 1..20: mol_type = genomic DNA; note = Gene: LUC7L3; note = Location (start to end; relative to TSS): LUC7L3_58_88; note = Orientation (relative to transcription): sense; note = sgRNA Position: 50719687; note = Sequence Name: 56322-704_101_SL_seq_1107
gtcgcccgtgttttcgttgg

SEQ ID NO: 1108 - DNA, 20 bp, Homo sapiens
  source 1..20: mol_type = genomic DNA; note = Gene: LUC7L3; note = Location (start to end; relative to TSS): LUC7L3_21_51; note = Orientation (relative to transcription): sense; note = sgRNA Position: 50719650; note = Sequence Name: 56322-704_101_SL_seq_1108
ttcggcctgagagcgggccg

SEQ ID NO: 1109 - DNA, 20 bp, Homo sapiens
  source 1..20: mol_type = genomic DNA; note = Gene: LUC7L3; note = Location (start to end; relative to TSS): LUC7L3_55_85; note = Orientation (relative to transcription): sense; note = sgRNA Position: 50719684; note = Sequence Name: 56322-704_101_SL_seq_1109
ggtgtcgcccgtgttttcgt

SEQ ID NO: 1110 - DNA, 20 bp, Homo sapiens
  source 1..20: mol_type = genomic DNA; note = Gene: MAP2K1; note = Location (start to end; relative to TSS): MAP2K1_41_71; note = Orientation (relative to transcription): sense; note = sgRNA Position: 66386979; note = Sequence Name: 56322-704_101_SL_seq_1110
gcactttccccggcaggagc

SEQ ID NO: 1111 - DNA, 20 bp, Homo sapiens
  source 1..20: mol_type = genomic DNA; note = Gene: MAP2K1; note = Location (start to end; relative to TSS): MAP2K1_87_117; note = Orientation (relative to transcription): sense; note = sgRNA Position: 66387025; note = Sequence Name: 56322-704_101_SL_seq_1111
gctgtgccgcccgagccgga

SEQ ID NO: 1112 - DNA, 20 bp, Homo sapiens
  source 1..20: mol_type = genomic DNA; note = Gene: MAP2K1; note = Location (start to end; relative to TSS): MAP2K1_48_78; note = Orientation (relative to transcription): sense; note = sgRNA Position: 66386986; note = Sequence Name: 56322-704_101_SL_seq_1112
ccccggcaggagctggagct

SEQ ID NO: 1113 - DNA, 20 bp, Homo sapiens
  source 1..20: mol_type = genomic DNA; note = Gene: MAP2K1; note = Location (start to end; relative to TSS): MAP2K1_86_116; note = Orientation (relative to transcription): sense; note = sgRNA Position: 66387024; note = Sequence Name: 56322-704_101_SL_seq_1113
ggctgtgccgcccgagccgg

SEQ ID NO: 1114 - DNA, 20 bp, Homo sapiens
  source 1..20: mol_type = genomic DNA; note = Gene: MAP2K1; note = Location (start to end; relative to TSS): MAP2K1_35_65; note = Orientation (relative to transcription): sense; note = sgRNA Position: 66386973; note = Sequence Name: 56322-704_101_SL_seq_1114
gcggcggcactttccccggc

SEQ ID NO: 1115 - DNA, 20 bp, Homo sapiens
  source 1..20: mol_type = genomic DNA; note = Gene: MAP2K1; note = Location (start to end; relative to TSS): MAP2K1_83_113; note = Orientation (relative to transcription): sense; note = sgRNA Position: 66387021; note = Sequence Name: 56322-704_101_SL_seq_1115
cgcggctgtgccgcccgagc

SEQ ID NO: 1116 - DNA, 20 bp, Homo sapiens
  source 1..20: mol_type = genomic DNA; note = Gene: MAP2K1; note = Location (start to end; relative to TSS): MAP2K1_31_61; note = Orientation (relative to transcription): sense; note = sgRNA Position: 66386969; note = Sequence Name: 56322-704_101_SL_seq_1116
ggcggcggcggcactttccc

SEQ ID NO: 1117 - DNA, 20 bp, Homo sapiens
  source 1..20: mol_type = genomic DNA; note = Gene: MAP2K1; note = Location (start to end; relative to TSS): MAP2K1_65_95; note = Orientation (relative to transcription): sense; note = sgRNA Position: 66387003; note = Sequence Name: 56322-704_101_SL_seq_1117
gctgggctctggtgcgcgcg

SEQ ID NO: 1118 - DNA, 20 bp, Homo sapiens
  source 1..20: mol_type = genomic DNA; note = Gene: MAP2K1; note = Location (start to end; relative to TSS): MAP2K1_19_49; note = Orientation (relative to transcription): sense; note = sgRNA Position: 66386957; note = Sequence Name: 56322-704_101_SL_seq_1118
ggctaggagcacggcggcgg

SEQ ID NO: 1119 - DNA, 20 bp, Homo sapiens
  source 1..20: mol_type = genomic DNA; note = Gene: MAP2K1; note = Location (start to end; relative to TSS): MAP2K1_54_84; note = Orientation (relative to transcription): sense; note = sgRNA Position: 66386992; note = Sequence Name: 56322-704_101_SL_seq_1119
caggagctggagctgggctc

SEQ ID NO: 1120 - DNA, 20 bp, Homo sapiens
  source 1..20: mol_type = genomic DNA; note = Gene: MAP2K2; note = Location (start to end; relative to TSS): MAP2K2_38_68; note = Orientation (relative to transcription): antisense; note = sgRNA Position: 4124080; note = Sequence Name: 56322-704_101_SL_seq_1120
gcgagccgctaccgctgccg

SEQ ID NO: 1121 - DNA, 20 bp, Homo sapiens
  source 1..20: mol_type = genomic DNA; note = Gene: MAP2K2; note = Location (start to end; relative to TSS): MAP2K2_78_108; note = Orientation (relative to transcription): antisense; note = sgRNA Position: 4124040; note = Sequence Name: 56322-704_101_SL_seq_1121
ctgggccgagggtagccgag

SEQ ID NO: 1122 - DNA, 20 bp, Homo sapiens
  source 1..20: mol_type = genomic DNA; note = Gene: MAP2K2; note = Location (start to end; relative to TSS): MAP2K2_27_57; note = Orientation (relative to transcription): antisense; note = sgRNA Position: 4124091; note = Sequence Name: 56322-704_101_SL_seq_1122
ccgctgccgaggcccgaaga

SEQ ID NO: 1123 - DNA, 20 bp, Homo sapiens
  source 1..20: mol_type = genomic DNA; note = Gene: MAP2K2; note = Location (start to end; relative to TSS): MAP2K2_71_101; note = Orientation (relative to transcription): antisense; note = sgRNA Position: 4124047; note = Sequence Name: 56322-704_101_SL_seq_1123
gagggtagccgaggggcgct

SEQ ID NO: 1124 - DNA, 20 bp, Homo sapiens
  source 1..20: mol_type = genomic DNA; note = Gene: MAP2K2; note = Location (start to end; relative to TSS): MAP2K2_24_54; note = Orientation (relative to transcription): sense; note = sgRNA Position: 4124074; note = Sequence Name: 56322-704_101_SL_seq_1124
tcgggcctcggcagcggtag

SEQ ID NO: 1125 - DNA, 20 bp, Homo sapiens
  source 1..20: mol_type = genomic DNA; note = Gene: MAP2K2; note = Location (start to end; relative to TSS): MAP2K2_70_100; note = Orientation (relative to transcription): antisense; note = sgRNA Position: 4124048; note = Sequence Name: 56322-704_101_SL_seq_1125
agggtagccgaggggcgctg

SEQ ID NO: 1126 - DNA, 20 bp, Homo sapiens
  source 1..20: mol_type = genomic DNA; note = Gene: MAP2K2; note = Location (start to end; relative to TSS): MAP2K2_18_48; note = Orientation (relative to transcription): sense; note = sgRNA Position: 4124080; note = Sequence Name: 56322-704_101_SL_seq_1126
ccttcttcgggcctcggcag

SEQ ID NO: 1127 - DNA, 20 bp, Homo sapiens
  source 1..20: mol_type = genomic DNA; note = Gene: MAP2K2; note = Location (start to end; relative to TSS): MAP2K2_64_94; note = Orientation (relative to transcription): sense; note = sgRNA Position: 4124034; note = Sequence Name: 56322-704_101_SL_seq_1127
cagcgcccctcggctaccct

SEQ ID NO: 1128 - DNA, 20 bp, Homo sapiens
  source 1..20: mol_type = genomic DNA; note = Gene: MAP2K2; note = Location (start to end; relative to TSS): MAP2K2_12_42; note = Orientation (relative to transcription): sense; note = sgRNA Position: 4124086; note = Sequence Name: 56322-704_101_SL_seq_1128
cgtcagccttcttcgggcct

SEQ ID NO: 1129 - DNA, 20 bp, Homo sapiens
  source 1..20: mol_type = genomic DNA; note = Gene: MAP2K2; note = Location (start to end; relative to TSS): MAP2K2_54_84; note = Orientation (relative to transcription): sense; note = sgRNA Position: 4124044; note = Sequence Name: 56322-704_101_SL_seq_1129
gcctcagccccagcgcccct

SEQ ID NO: 1130 - DNA, 20 bp, Homo sapiens
  source 1..20: mol_type = genomic DNA; note = Gene: MAPK1; note = Location (start to end; relative to TSS): MAPK1_63_93; note = Orientation (relative to transcription): sense; note = sgRNA Position: 21867558; note = Sequence Name: 56322-704_101_SL_seq_1130
ttcctcctcccggtcagcgt

SEQ ID NO: 1131 - DNA, 20 bp, Homo sapiens
  source 1..20: mol_type = genomic DNA; note = Gene: MAPK1; note = Location (start to end; relative to TSS): MAPK1_95_125; note = Orientation (relative to transcription): sense; note = sgRNA Position: 21867526; note = Sequence Name: 56322-704_101_SL_seq_1131
cggcggcggcgcagtccctg

SEQ ID NO: 1132 - DNA, 20 bp, Homo sapiens
  source 1..20: mol_type = genomic DNA; note = Gene: MAPK1; note = Location (start to end; relative to TSS): MAPK1_28_58; note = Orientation (relative to transcription): antisense; note = sgRNA Position: 21867613; note = Sequence Name: 56322-704_101_SL_seq_1132
ctgaagagccgacagccact

SEQ ID NO: 1133 - DNA, 20 bp, Homo sapiens
  source 1..20: mol_type = genomic DNA; note = Gene: MAPK1; note = Location (start to end; relative to TSS): MAPK1_74_104; note = Orientation (relative to transcription): antisense; note = sgRNA Position: 21867567; note = Sequence Name: 56322-704_101_SL_seq_1133
cgccgacgctgaccgggagg

SEQ ID NO: 1134 - DNA, 20 bp, Homo sapiens
  source 1..20: mol_type = genomic DNA; note = Gene: MAPK1; note = Location (start to end; relative to TSS): MAPK1_32_62; note = Orientation (relative to transcription): sense; note = sgRNA Position: 21867589; note = Sequence Name: 56322-704_101_SL_seq_1134
ggctcttcagctctcccgct

SEQ ID NO: 1135 - DNA, 20 bp, Homo sapiens
  source 1..20: mol_type = genomic DNA; note = Gene: MAPK1; note = Location (start to end; relative to TSS): MAPK1_70_100; note = Orientation (relative to transcription): antisense; note = sgRNA Position: 21867571; note = Sequence Name: 56322-704_101_SL_seq_1135
gacgctgaccgggaggagga

SEQ ID NO: 1136 - DNA, 20 bp, Homo sapiens
  source 1..20: mol_type = genomic DNA; note = Gene: MAPK1; note = Location (start to end; relative to TSS): MAPK1_11_41; note = Orientation (relative to transcription): sense; note = sgRNA Position: 21867610; note = Sequence Name: 56322-704_101_SL_seq_1136
caatcggtccgagtggctgt

SEQ ID NO: 1137 - DNA, 20 bp, Homo sapiens
  source 1..20: mol_type = genomic DNA; note = Gene: MAPK1; note = Location (start to end; relative to TSS): MAPK1_66_96; note = Orientation (relative to transcription): sense; note = sgRNA Position: 21867555; note = Sequence Name: 56322-704_101_SL_seq_1137
ctcctcccggtcagcgtcgg

SEQ ID NO: 1138 - DNA, 20 bp, Homo sapiens
  source 1..20: mol_type = genomic DNA; note = Gene: MAPK1; note = Location (start to end; relative to TSS): MAPK1_4_34; note = Orientation (relative to transcription): sense; note = sgRNA Position: 21867617; note = Sequence Name: 56322-704_101_SL_seq_1138
aggcaggcaatcggtccgag

SEQ ID NO: 1139 - DNA, 20 bp, Homo sapiens
  source 1..20: mol_type = genomic DNA; note = Gene: MAPK1; note = Location (start to end; relative to TSS): MAPK1_63_93; note = Orientation (relative to transcription): sense; note = sgRNA Position: 21867558; note = Sequence Name: 56322-704_101_SL_seq_1139
ttcctcctcccggtcagcgt

SEQ ID NO: 1140 - DNA, 20 bp, Homo sapiens
  source 1..20: mol_type = genomic DNA; note = Gene: MAPK3; note = Location (start to end; relative to TSS): MAPK3_42_72; note = Orientation (relative to transcription): sense; note = sgRNA Position: 30123154; note = Sequence Name: 56322-704_101_SL_seq_1140
ccccgtagaaccgagggggt

SEQ ID NO: 1141 - DNA, 20 bp, Homo sapiens
  source 1..20: mol_type = genomic DNA; note = Gene: MAPK3; note = Location (start to end; relative to TSS): MAPK3_77_107; note = Orientation (relative to transcription): sense; note = sgRNA Position: 30123119; note = Sequence Name: 56322-704_101_SL_seq_1141
gggggaggtggagatggtga

SEQ ID NO: 1142 - DNA, 20 bp, Homo sapiens
  source 1..20: mol_type = genomic DNA; note = Gene: MAPK3; note = Location (start to end; relative to TSS): MAPK3_37_67; note = Orientation (relative to transcription): sense; note = sgRNA Position: 30123159; note = Sequence Name: 56322-704_101_SL_seq_1142
gggagccccgtagaaccgag

SEQ ID NO: 1143 - DNA, 20 bp, Homo sapiens
  source 1..20: mol_type = genomic DNA; note = Gene: MAPK3; note = Location (start to end; relative to TSS): MAPK3_75_105; note = Orientation (relative to transcription): antisense; note = sgRNA Position: 30123141; note = Sequence Name: 56322-704_101_SL_seq_1143
tccacctcccccgggacccc

SEQ ID NO: 1144 - DNA, 20 bp, Homo sapiens
  source 1..20: mol_type = genomic DNA; note = Gene: MAPK3; note = Location (start to end; relative to TSS): MAPK3_38_68; note = Orientation (relative to transcription): sense; note = sgRNA Position: 30123158; note = Sequence Name: 56322-704_101_SL_seq_1144
ggagccccgtagaaccgagg

SEQ ID NO: 1145 - DNA, 20 bp, Homo sapiens
  source 1..20: mol_type = genomic DNA; note = Gene: MAPK3; note = Location (start to end; relative to TSS): MAPK3_74_104; note = Orientation (relative to transcription): antisense; note = sgRNA Position: 30123142; note = Sequence Name: 56322-704_101_SL_seq_1145
ccacctcccccgggaccccc

SEQ ID NO: 1146 - DNA, 20 bp, Homo sapiens
  source 1..20: mol_type = genomic DNA; note = Gene: MAPK3; note = Location (start to end; relative to TSS): MAPK3_36_66; note = Orientation (relative to transcription): sense; note = sgRNA Position: 30123160; note = Sequence Name: 56322-704_101_SL_seq_1146
ggggagccccgtagaaccga

SEQ ID NO: 1147 - DNA, 20 bp, Homo sapiens
  source 1..20: mol_type = genomic DNA; note = Gene: MAPK3; note = Location (start to end; relative to TSS): MAPK3_71_101; note = Orientation (relative to transcription): sense; note = sgRNA Position: 30123125; note = Sequence Name: 56322-704_101_SL_seq_1147
ggtcccgggggaggtggaga

SEQ ID NO: 1148 - DNA, 20 bp, Homo sapiens
  source 1..20: mol_type = genomic DNA; note = Gene: MAPK3; note = Location (start to end; relative to TSS): MAPK3_35_65; note = Orientation (relative to transcription): sense; note = sgRNA Position: 30123161; note = Sequence Name: 56322-704_101_SL_seq_1148
cggggagccccgtagaaccg

SEQ ID NO: 1149 - DNA, 20 bp, Homo sapiens
  source 1..20: mol_type = genomic DNA; note = Gene: MAPK3; note = Location (start to end; relative to TSS): MAPK3_65_95; note = Orientation (relative to transcription): sense; note = sgRNA Position: 30123131; note = Sequence Name: 56322-704_101_SL_seq_1149
cccgggggtcccgggggagg

SEQ ID NO: 1150 - DNA, 20 bp, Homo sapiens
  source 1..20: mol_type = genomic DNA; note = Gene: MCL1; note = Location (start to end; relative to TSS): MCL1_31_61; note = Orientation (relative to transcription): sense; note = sgRNA Position: 150579555; note = Sequence Name: 56322-704_101_SL_seq_1150
cttccccagttttctcagcc

SEQ ID NO: 1151 - DNA, 20 bp, Homo sapiens
  source 1..20: mol_type = genomic DNA; note = Gene: MCL1; note = Location (start to end; relative to TSS): MCL1_100_130; note = Orientation (relative to transcription): sense; note = sgRNA Position: 150579486; note = Sequence Name: 56322-704_101_SL_seq_1151
tcggactcaacctctactgt

SEQ ID NO: 1152 - DNA, 20 bp, Homo sapiens
  source 1..20: mol_type = genomic DNA; note = Gene: MCL1; note = Location (start to end; relative to TSS): MCL1_34_64; note = Orientation (relative to transcription): sense; note = sgRNA Position: 150579552; note = Sequence Name: 56322-704_101_SL_seq_1152
ccccagttttctcagccagg

SEQ ID NO: 1153 - DNA, 20 bp, Homo sapiens
  source 1..20: mol_type = genomic DNA; note = Gene: MCL1; note = Location (start to end; relative to TSS): MCL1_99_129; note = Orientation (relative to transcription): sense; note = sgRNA Position: 150579487; note = Sequence Name: 56322-704_101_SL_seq_1153
atcggactcaacctctactg

SEQ ID NO: 1154 - DNA, 20 bp, Homo sapiens
  source 1..20: mol_type = genomic DNA; note = Gene: MCL1; note = Location (start to end; relative to TSS): MCL1_37_67; note = Orientation (relative to transcription): sense; note = sgRNA Position: 150579549; note = Sequence Name: 56322-704_101_SL_seq_1154
cagttttctcagccaggcgg

SEQ ID NO: 1155 - DNA, 20 bp, Homo sapiens
  source 1..20: mol_type = genomic DNA; note = Gene: MCL1; note = Location (start to end; relative to TSS): MCL1_81_111; note = Orientation (relative to transcription): sense; note = sgRNA Position: 150579505; note = Sequence Name: 56322-704_101_SL_seq_1155
ctcaaaagaaacgcggtaat

SEQ ID NO: 1156 - DNA, 20 bp, Homo sapiens
  source 1..20: mol_type = genomic DNA; note = Gene: MCL1; note = Location (start to end; relative to TSS): MCL1_40_70; note = Orientation (relative to transcription): sense; note = sgRNA Position: 150579546; note = Sequence Name: 56322-704_101_SL_seq_1156
ttttctcagccaggcggcgg

SEQ ID NO: 1157 - DNA, 20 bp, Homo sapiens
  source 1..20: mol_type = genomic DNA; note = Gene: MCL1; note = Location (start to end; relative to TSS): MCL1_74_104; note = Orientation (relative to transcription): sense; note = sgRNA Position: 150579512; note = Sequence Name: 56322-704_101_SL_seq_1157
gtttggcctcaaaagaaacg

SEQ ID NO: 1158 - DNA, 20 bp, Homo sapiens
  source 1..20: mol_type = genomic DNA; note = Gene: MCL1; note = Location (start to end; relative to TSS): MCL1_18_48; note = Orientation (relative to transcription): antisense; note = sgRNA Position: 150579588; note = Sequence Name: 56322-704_101_SL_seq_1158
gaccccgactccttactgga

SEQ ID NO: 1159 - DNA, 20 bp, Homo sapiens
  source 1..20: mol_type = genomic DNA; note = Gene: MCL1; note = Location (start to end; relative to TSS): MCL1_57_87; note = Orientation (relative to transcription): sense; note = sgRNA Position: 150579529; note = Sequence Name: 56322-704_101_SL_seq_1159
cggcggcgactggcaatgtt

SEQ ID NO: 1160 - DNA, 20 bp, Homo sapiens
  source 1..20: mol_type = genomic DNA; note = Gene: MEN1; note = Location (start to end; relative to TSS): MEN1_32_62; note = Orientation (relative to transcription): sense; note = sgRNA Position: 64810495; note = Sequence Name: 56322-704_101_SL_seq_1160
gggcgagggggaccgaggcc

SEQ ID NO: 1161 - DNA, 20 bp, Homo sapiens
  source 1..20: mol_type = genomic DNA; note = Gene: MEN1; note = Location (start to end; relative to TSS): MEN1_90_120; note = Orientation (relative to transcription): antisense; note = sgRNA Position: 64810457; note = Sequence Name: 56322-704_101_SL_seq_1161
tctgtccagaaagcgcaccc

SEQ ID NO: 1162 - DNA, 20 bp, Homo sapiens
  source 1..20: mol_type = genomic DNA; note = Gene: MEN1; note = Location (start to end; relative to TSS): MEN1_27_57; note = Orientation (relative to transcription): sense; note = sgRNA Position: 64810500; note = Sequence Name: 56322-704_101_SL_seq_1162
gaggtgggcgagggggaccg

SEQ ID NO: 1163 - DNA, 20 bp, Homo sapiens
  source 1..20: mol_type = genomic DNA; note = Gene: MEN1; note = Location (start to end; relative to TSS): MEN1_69_99; note = Orientation (relative to transcription): antisense; note = sgRNA Position: 64810478; note = Sequence Name: 56322-704_101_SL_seq_1163
ggtcaagcccccaaacccca

SEQ ID NO: 1164 - DNA, 20 bp, Homo sapiens
  source 1..20: mol_type = genomic DNA; note = Gene: MEN1; note = Location (start to end; relative to TSS): MEN1_20_50; note = Orientation (relative to transcription): sense; note = sgRNA Position: 64810507; note = Sequence Name: 56322-704_101_SL_seq_1164
aagcgcggaggtgggcgagg

SEQ ID NO: 1165 - DNA, 20 bp, Homo sapiens
  source 1..20: mol_type = genomic DNA; note = Gene: MEN1; note = Location (start to end; relative to TSS): MEN1_64_94; note = Orientation (relative to transcription): sense; note = sgRNA Position: 64810463; note = Sequence Name: 56322-704_101_SL_seq_1165
ggggtttgggggcttgacct

SEQ ID NO: 1166 - DNA, 20 bp, Homo sapiens
  source 1..20: mol_type = genomic DNA; note = Gene: MEN1; note = Location (start to end; relative to TSS): MEN1_19_49; note = Orientation (relative to transcription): sense; note = sgRNA Position: 64810508; note = Sequence Name: 56322-704_101_SL_seq_1166
taagcgcggaggtgggcgag

SEQ ID NO: 1167 - DNA, 20 bp, Homo sapiens
  source 1..20: mol_type = genomic DNA; note = Gene: MEN1; note = Location (start to end; relative to TSS): MEN1_59_89; note = Orientation (relative to transcription): antisense; note = sgRNA Position: 64810488; note = Sequence Name: 56322-704_101_SL_seq_1167
ccaaaccccaaggagagtcc

SEQ ID NO: 1168 - DNA, 20 bp, Homo sapiens
  source 1..20: mol_type = genomic DNA; note = Gene: MEN1; note = Location (start to end; relative to TSS): MEN1_18_48; note = Orientation (relative to transcription): sense; note = sgRNA Position: 64810509; note = Sequence Name: 56322-704_101_SL_seq_1168
gtaagcgcggaggtgggcga

SEQ ID NO: 1169 - DNA, 20 bp, Homo sapiens
  source 1..20: mol_type = genomic DNA; note = Gene: MEN1; note = Location (start to end; relative to TSS): MEN1_53_83; note = Orientation (relative to transcription): antisense; note = sgRNA Position: 64810494; note = Sequence Name: 56322-704_101_SL_seq_1169
cccaaggagagtcctggcct

SEQ ID NO: 1170 - DNA, 20 bp, Homo sapiens
  source 1..20: mol_type = genomic DNA; note = Gene: MET; note = Location (start to end; relative to TSS): MET_43_73; note = Orientation (relative to transcription): antisense; note = sgRNA Position: 116672245; note = Sequence Name: 56322-704_101_SL_seq_1170
ttggggccggaggcaccgcc

SEQ ID NO: 1171 - DNA, 20 bp, Homo sapiens
  source 1..20: mol_type = genomic DNA; note = Gene: MET; note = Location (start to end; relative to TSS): MET_86_116; note = Orientation (relative to transcription): sense; note = sgRNA Position: 116672308; note = Sequence Name: 56322-704_101_SL_seq_1171
ccgatgcccggctgagtcac

SEQ ID NO: 1172 - DNA, 20 bp, Homo sapiens
  source 1..20: mol_type = genomic DNA; note = Gene: MET; note = Location (start to end; relative to TSS): MET_44_74; note = Orientation (relative to transcription): sense; note = sgRNA Position: 116672266; note = Sequence Name: 56322-704_101_SL_seq_1172
cctccggccccaacgcgccc

SEQ ID NO: 1173 - DNA, 20 bp, Homo sapiens
  source 1..20: mol_type = genomic DNA; note = Gene: MET; note = Location (start to end; relative to TSS): MET_79_109; note = Orientation (relative to transcription): antisense; note = sgRNA Position: 116672281; note = Sequence Name: 56322-704_101_SL_seq_1173
gcatcggcgcgcgcggcccg

SEQ ID NO: 1174 - DNA, 20 bp, Homo sapiens
  source 1..20: mol_type = genomic DNA; note = Gene: MET; note = Location (start to end; relative to TSS): MET_28_58; note = Orientation (relative to transcription): sense; note = sgRNA Position: 116672250; note = Sequence Name: 56322-704_101_SL_seq_1174
tggtcgcctggcggtgcctc

SEQ ID NO: 1175 - DNA, 20 bp, Homo sapiens
  source 1..20: mol_type = genomic DNA; note = Gene: MET; note = Location (start to end; relative to TSS): MET_76_106; note = Orientation (relative to transcription): antisense; note = sgRNA Position: 116672278; note = Sequence Name: 56322-704_101_SL_seq_1175
tcggcgcgcgcggcccgcgg

SEQ ID NO: 1176 - DNA, 20 bp, Homo sapiens
  source 1..20: mol_type = genomic DNA; note = Gene: MET; note = Location (start to end; relative to TSS): MET_29_59; note = Orientation (relative to transcription): antisense; note = sgRNA Position: 116672231; note = Sequence Name: 56322-704_101_SL_seq_1176
accgccaggcgaccagactg

SEQ ID NO: 1177 - DNA, 20 bp, Homo sapiens
  source 1..20: mol_type = genomic DNA; note = Gene: MET; note = Location (start to end; relative to TSS): MET_60_90; note = Orientation (relative to transcription): antisense; note = sgRNA Position: 116672262; note = Sequence Name: 56322-704_101_SL_seq_1177
gcggcggcccgggcgcgttg

SEQ ID NO: 1178 - DNA, 20 bp, Homo sapiens
  source 1..20: mol_type = genomic DNA; note = Gene: MET; note = Location (start to end; relative to TSS): MET_19_49; note = Orientation (relative to transcription): sense; note = sgRNA Position: 116672241; note = Sequence Name: 56322-704_101_SL_seq_1178
gcctcagtctggtcgcctgg

SEQ ID NO: 1179 - DNA, 20 bp, Homo sapiens
  source 1..20: mol_type = genomic DNA; note = Gene: MET; note = Location (start to end; relative to TSS): MET_53_83; note = Orientation (relative to transcription): antisense; note = sgRNA Position: 116672255; note = Sequence Name: 56322-704_101_SL_seq_1179
cccgggcgcgttggggccgg

SEQ ID NO: 1180 - DNA, 20 bp, Homo sapiens
  source 1..20: mol_type = genomic DNA; note = Gene: MTOR; note = Location (start to end; relative to TSS): MTOR_42_72; note = Orientation (relative to transcription): sense; note = sgRNA Position: 11262485; note = Sequence Name: 56322-704_101_SL_seq_1180
tgaagcggcggtaccggtgc

SEQ ID NO: 1181 - DNA, 20 bp, Homo sapiens
  source 1..20: mol_type = genomic DNA; note = Gene: MTOR; note = Location (start to end; relative to TSS): MTOR_88_118; note = Orientation (relative to transcription): sense; note = sgRNA Position: 11262439; note = Sequence Name: 56322-704_101_SL_seq_1181
gaagccgcgcggtgagtcta

SEQ ID NO: 1182 - DNA, 20 bp, Homo sapiens
  source 1..20: mol_type = genomic DNA; note = Gene: MTOR; note = Location (start to end; relative to TSS): MTOR_36_66; note = Orientation (relative to transcription): sense; note = sgRNA Position: 11262491; note = Sequence Name: 56322-704_101_SL_seq_1182
ggggcctgaagcggcggtac

SEQ ID NO: 1183 - DNA, 20 bp, Homo sapiens
  source 1..20: mol_type = genomic DNA; note = Gene: MTOR; note = Location (start to end; relative to TSS): MTOR_87_117; note = Orientation (relative to transcription): sense; note = sgRNA Position: 11262440; note = Sequence Name: 56322-704_101_SL_seq_1183
cgaagccgcgcggtgagtct

SEQ ID NO: 1184 - DNA, 20 bp, Homo sapiens
  source 1..20: mol_type = genomic DNA; note = Gene: MTOR; note = Location (start to end; relative to TSS): MTOR_45_75; note = Orientation (relative to transcription): sense; note = sgRNA Position: 11262482; note = Sequence Name: 56322-704_101_SL_seq_1184
agcggcggtaccggtgctgg

SEQ ID NO: 1185 - DNA, 20 bp, Homo sapiens
  source 1..20: mol_type = genomic DNA; note = Gene: MTOR; note = Location (start to end; relative to TSS): MTOR_77_107; note = Orientation (relative to transcription): sense; note = sgRNA Position: 11262450; note = Sequence Name: 56322-704_101_SL_seq_1185
aggccttggccgaagccgcg

SEQ ID NO: 1186 - DNA, 20 bp, Homo sapiens
  source 1..20: mol_type = genomic DNA; note = Gene: MTOR; note = Location (start to end; relative to TSS): MTOR_30_60; note = Orientation (relative to transcription): sense; note = sgRNA Position: 11262497; note = Sequence Name: 56322-704_101_SL_seq_1186
gggcagggggcctgaagcgg

SEQ ID NO: 1187 - DNA, 20 bp, Homo sapiens
  source 1..20: mol_type = genomic DNA; note = Gene: MTOR; note = Location (start to end; relative to TSS): MTOR_63_93; note = Orientation (relative to transcription): sense; note = sgRNA Position: 11262464; note = Sequence Name: 56322-704_101_SL_seq_1187
ggcggcggcagctgaggcct

SEQ ID NO: 1188 - DNA, 20 bp, Homo sapiens
  source 1..20: mol_type = genomic DNA; note = Gene: MTOR; note = Location (start to end; relative to TSS): MTOR_27_57; note = Orientation (relative to transcription): sense; note = sgRNA Position: 11262500; note = Sequence Name: 56322-704_101_SL_seq_1188
gtggggcagggggcctgaag

SEQ ID NO: 1189 - DNA, 20 bp, Homo sapiens
  source 1..20: mol_type = genomic DNA; note = Gene: MTOR; note = Location (start to end; relative to TSS): MTOR_57_87; note = Orientation (relative to transcription): sense; note = sgRNA Position: 11262470; note = Sequence Name: 56322-704_101_SL_seq_1189
ggtgctggcggcggcagctg

SEQ ID NO: 1190 - DNA, 20 bp, Homo sapiens
  source 1..20: mol_type = genomic DNA; note = Gene: NAMPT; note = Location (start to end; relative to TSS): NAMPT_53_83; note = Orientation (relative to transcription): antisense; note = sgRNA Position: 106284926; note = Sequence Name: 56322-704_101_SL_seq_1190
gcgccgcgagctccctggcg

SEQ ID NO: 1191 - DNA, 20 bp, Homo sapiens
  source 1..20: mol_type = genomic DNA; note = Gene: NAMPT; note = Location (start to end; relative to TSS): NAMPT_87_117; note = Orientation (relative to transcription): antisense; note = sgRNA Position: 106284892; note = Sequence Name: 56322-704_101_SL_seq_1191
caggattcatctcgggccgg

SEQ ID NO: 1192 - DNA, 20 bp, Homo sapiens
  source 1..20: mol_type = genomic DNA; note = Gene: NAMPT; note = Location (start to end; relative to TSS): NAMPT_45_75; note = Orientation (relative to transcription): antisense; note = sgRNA Position: 106284934; note = Sequence Name: 56322-704_101_SL_seq_1192
agctccctggcgcggctgcg

SEQ ID NO: 1193 - DNA, 20 bp, Homo sapiens
  source 1..20: mol_type = genomic DNA; note = Gene: NAMPT; note = Location (start to end; relative to TSS): NAMPT_82_112; note = Orientation (relative to transcription): antisense; note = sgRNA Position: 106284897; note = Sequence Name: 56322-704_101_SL_seq_1193
ttcatctcgggccggaggac

SEQ ID NO: 1194 - DNA, 20 bp, Homo sapiens
  source 1..20: mol_type = genomic DNA; note = Gene: NAMPT; note = Location (start to end; relative to TSS): NAMPT_41_71; note = Orientation (relative to transcription): sense; note = sgRNA Position: 106284918; note = Sequence Name: 56322-704_101_SL_seq_1194
cagccgcgccagggagctcg

SEQ ID NO: 1195 - DNA, 20 bp, Homo sapiens
  source 1..20: mol_type = genomic DNA; note = Gene: NAMPT; note = Location (start to end; relative to TSS): NAMPT_81_111; note = Orientation (relative to transcription): sense; note = sgRNA Position: 106284878; note = Sequence Name: 56322-704_101_SL_seq_1195
ccggcccgagatgaatcctg

SEQ ID NO: 1196 - DNA, 20 bp, Homo sapiens
  source 1..20: mol_type = genomic DNA; note = Gene: NAMPT; note = Location (start to end; relative to TSS): NAMPT_48_78; note = Orientation (relative to transcription): sense; note = sgRNA Position: 106284911; note = Sequence Name: 56322-704_101_SL_seq_1196
gccagggagctcgcggcgcg

SEQ ID NO: 1197 - DNA, 20 bp, Homo sapiens
  source 1..20: mol_type = genomic DNA; note = Gene: NAMPT; note = Location (start to end; relative to TSS): NAMPT_80_110; note = Orientation (relative to transcription): antisense; note = sgRNA Position: 106284899; note = Sequence Name: 56322-704_101_SL_seq_1197
catctcgggccggaggacag

SEQ ID NO: 1198 - DNA, 20 bp, Homo sapiens
  source 1..20: mol_type = genomic DNA; note = Gene: NAMPT; note = Location (start to end; relative to TSS): NAMPT_32_62; note = Orientation (relative to transcription): sense; note = sgRNA Position: 106284927; note = Sequence Name: 56322-704_101_SL_seq_1198
ccttcctcgcagccgcgcca

SEQ ID NO: 1199 - DNA, 20 bp, Homo sapiens
  source 1..20: mol_type = genomic DNA; note = Gene: NAMPT; note = Location (start to end; relative to TSS): NAMPT_62_92; note = Orientation (relative to transcription): sense; note = sgRNA Position: 106284897; note = Sequence Name: 56322-704_101_SL_seq_1199
ggcgcgcggcccctgtcctc

SEQ ID NO: 1200 - DNA, 20 bp, Homo sapiens
  source 1..20: mol_type = genomic DNA; note = Gene: NAPRT; note = Location (start to end; relative to TSS): NAPRT_48_78; note = Orientation (relative to transcription): sense; note = sgRNA Position: 143578258; note = Sequence Name: 56322-704_101_SL_seq_1200
gctgctcactgacctctacc

SEQ ID NO: 1201 - DNA, 20 bp, Homo sapiens
  source 1..20: mol_type = genomic DNA; note = Gene: NAPRT; note = Location (start to end; relative to TSS): NAPRT_78_108; note = Orientation (relative to transcription): sense; note = sgRNA Position: 143578228; note = Sequence Name: 56322-704_101_SL_seq_1201
ggcgttgggctattggcgcg

SEQ ID NO: 1202 - DNA, 20 bp, Homo sapiens
  source 1..20: mol_type = genomic DNA; note = Gene: NAPRT; note = Location (start to end; relative to TSS): NAPRT_30_60; note = Orientation (relative to transcription): antisense; note = sgRNA Position: 143578296; note = Sequence Name: 56322-704_101_SL_seq_1202
gcgccgccgcgcgcgcctcg

SEQ ID NO: 1203 - DNA, 20 bp, Homo sapiens
  source 1..20: mol_type = genomic DNA; note = Gene: NAPRT; note = Location (start to end; relative to TSS): NAPRT_63_93; note = Orientation (relative to transcription): sense; note = sgRNA Position: 143578243; note = Sequence Name: 56322-704_101_SL_seq_1203
ctaccaggccaccatggcgt

SEQ ID NO: 1204 - DNA, 20 bp, Homo sapiens
  source 1..20: mol_type = genomic DNA; note = Gene: NAPRT; note = Location (start to end; relative to TSS): NAPRT_23_53; note = Orientation (relative to transcription): sense; note = sgRNA Position: 143578283; note = Sequence Name: 56322-704_101_SL_seq_1204
ccgaggcgcgcgcggcggcg

SEQ ID NO: 1205 - DNA, 20 bp, Homo sapiens
  source 1..20: mol_type = genomic DNA; note = Gene: NAPRT; note = Location (start to end; relative to TSS): NAPRT_57_87; note = Orientation (relative to transcription): sense; note = sgRNA Position: 143578249; note = Sequence Name: 56322-704_101_SL_seq_1205
tgacctctaccaggccacca

SEQ ID NO: 1206 - DNA, 20 bp, Homo sapiens
  source 1..20: mol_type = genomic DNA; note = Gene: NAPRT; note = Location (start to end; relative to TSS): NAPRT_18_48; note = Orientation (relative to transcription): sense; note = sgRNA Position: 143578288; note = Sequence Name: 56322-704_101_SL_seq_1206
ggaccccgaggcgcgcgcgg

SEQ ID NO: 1207 - DNA, 20 bp, Homo sapiens
  source 1..20: mol_type = genomic DNA; note = Gene: NAPRT; note = Location (start to end; relative to TSS): NAPRT_55_85; note = Orientation (relative to transcription): antisense; note = sgRNA Position: 143578271; note = Sequence Name: 56322-704_101_SL_seq_1207
tggtagaggtcagtgagcag

SEQ ID NO: 1208 - DNA, 20 bp, Homo sapiens
  source 1..20: mol_type = genomic DNA; note = Gene: NAPRT; note = Location (start to end; relative to TSS): NAPRT_15_45; note = Orientation (relative to transcription): sense; note = sgRNA Position: 143578291; note = Sequence Name: 56322-704_101_SL_seq_1208
gcaggaccccgaggcgcgcg

SEQ ID NO: 1209 - DNA, 20 bp, Homo sapiens
  source 1..20: mol_type = genomic DNA; note = Gene: NAPRT; note = Location (start to end; relative to TSS): NAPRT_48_78; note = Orientation (relative to transcription): sense; note = sgRNA Position: 143578258; note = Sequence Name: 56322-704_101_SL_seq_1209
gctgctcactgacctctacc

SEQ ID NO: 1210 - DNA, 20 bp, Homo sapiens
  source 1..20: mol_type = genomic DNA; note = Gene: NRAS; note = Location (start to end; relative to TSS): NRAS_46_76; note = Orientation (relative to transcription): antisense; note = sgRNA Position: 114716721; note = Sequence Name: 56322-704_101_SL_seq_1210
gggaaaaatgttggagaccc

SEQ ID NO: 1211 - DNA, 20 bp, Homo sapiens
  source 1..20: mol_type = genomic DNA; note = Gene: NRAS; note = Location (start to end; relative to TSS): NRAS_111_141; note = Orientation (relative to transcription): sense; note = sgRNA Position: 114716636; note = Sequence Name: 56322-704_101_SL_seq_1211
tttatctcatgcatagtgtt

SEQ ID NO: 1212 - DNA, 20 bp, Homo sapiens
  source 1..20: mol_type = genomic DNA; note = Gene: NRAS; note = Location (start to end; relative to TSS): NRAS_45_75; note = Orientation (relative to transcription): sense; note = sgRNA Position: 114716702; note = Sequence Name: 56322-704_101_SL_seq_1212
tccaacatttttcccggctg

SEQ ID NO: 1213 - DNA, 20 bp, Homo sapiens
  source 1..20: mol_type = genomic DNA; note = Gene: NRAS; note = Location (start to end; relative to TSS): NRAS_89_119; note = Orientation (relative to transcription): antisense; note = sgRNA Position: 114716678; note = Sequence Name: 56322-704_101_SL_seq_1213
aagctccactgcctctgctt

SEQ ID NO: 1214 - DNA, 20 bp, Homo sapiens
  source 1..20: mol_type = genomic DNA; note = Gene: NRAS; note = Location (start to end; relative to TSS): NRAS_39_69; note = Orientation (relative to transcription): sense; note = sgRNA Position: 114716708; note = Sequence Name: 56322-704_101_SL_seq_1214
ggggtctccaacatttttcc

SEQ ID NO: 1215 - DNA, 20 bp, Homo sapiens
  source 1..20: mol_type = genomic DNA; note = Gene: NRAS; note = Location (start to end; relative to TSS): NRAS_69_99; note = Orientation (relative to transcription): sense; note = sgRNA Position: 114716678; note = Sequence Name: 56322-704_101_SL_seq_1215
cctaaatctgtccaaagcag

SEQ ID NO: 1216 - DNA, 20 bp, Homo sapiens
  source 1..20: mol_type = genomic DNA; note = Gene: NRAS; note = Location (start to end; relative to TSS): NRAS_19_49; note = Orientation (relative to transcription): antisense; note = sgRNA Position: 114716748; note = Sequence Name: 56322-704_101_SL_seq_1216
gccatgaacagcccccacca

SEQ ID NO: 1217 - DNA, 20 bp, Homo sapiens
  source 1..20: mol_type = genomic DNA; note = Gene: NRAS; note = Location (start to end; relative to TSS): NRAS_66_96; note = Orientation (relative to transcription): antisense; note = sgRNA Position: 114716701; note = Sequence Name: 56322-704_101_SL_seq_1217
acagatttaggaccacagcc

SEQ ID NO: 1218 - DNA, 20 bp, Homo sapiens
  source 1..20: mol_type = genomic DNA; note = Gene: NRAS; note = Location (start to end; relative to TSS): NRAS_20_50; note = Orientation (relative to transcription): sense; note = sgRNA Position: 114716727; note = Sequence Name: 56322-704_101_SL_seq_1218
ggctgttcatggcggttccg

SEQ ID NO: 1219 - DNA, 20 bp, Homo sapiens
  source 1..20: mol_type = genomic DNA; note = Gene: NRAS; note = Location (start to end; relative to TSS): NRAS_55_85; note = Orientation (relative to transcription): antisense; note = sgRNA Position: 114716712; note = Sequence Name: 56322-704_101_SL_seq_1219
accacagccgggaaaaatgt

SEQ ID NO: 1220 - DNA, 20 bp, Homo sapiens
  source 1..20: mol_type = genomic DNA; note = Gene: NTRK1; note = Location (start to end; relative to TSS): NTRK1_42_72; note = Orientation (relative to transcription): antisense; note = sgRNA Position: 156860913; note = Sequence Name: 56322-704_101_SL_seq_1220
cggcgcccgcctcgctcagg

SEQ ID NO: 1221 - DNA, 20 bp, Homo sapiens
  source 1..20: mol_type = genomic DNA; note = Gene: NTRK1; note = Location (start to end; relative to TSS): NTRK1_74_104; note = Orientation (relative to transcription): sense; note = sgRNA Position: 156860965; note = Sequence Name: 56322-704_101_SL_seq_1221
gacggcgcgggcagcttggc

SEQ ID NO: 1222 - DNA, 20 bp, Homo sapiens
  source 1..20: mol_type = genomic DNA; note = Gene: NTRK1; note = Location (start to end; relative to TSS): NTRK1_40_70; note = Orientation (relative to transcription): antisense; note = sgRNA Position: 156860911; note = Sequence Name: 56322-704_101_SL_seq_1222
gcgcccgcctcgctcaggcg

SEQ ID NO: 1223 - DNA, 20 bp, Homo sapiens
  source 1..20: mol_type = genomic DNA; note = Gene: NTRK1; note = Location (start to end; relative to TSS): NTRK1_70_100; note = Orientation (relative to transcription): sense; note = sgRNA Position: 156860961; note = Sequence Name: 56322-704_101_SL_seq_1223
ggcggacggcgcgggcagct

SEQ ID NO: 1224 - DNA, 20 bp, Homo sapiens
  source 1..20: mol_type = genomic DNA; note = Gene: NTRK1; note = Location (start to end; relative to TSS): NTRK1_28_58; note = Orientation (relative to transcription): sense; note = sgRNA Position: 156860919; note = Sequence Name: 56322-704_101_SL_seq_1224
ctgccccgcctgagcgaggc

SEQ ID NO: 1225 - DNA, 20 bp, Homo sapiens
  source 1..20: mol_type = genomic DNA; note = Gene: NTRK1; note = Location (start to end; relative to TSS): NTRK1_62_92; note = Orientation (relative to transcription): antisense; note = sgRNA Position: 156860933; note = Sequence Name: 56322-704_101_SL_seq_1225
tccgcctcgcagcatcgcgg

SEQ ID NO: 1226 - DNA, 20 bp, Homo sapiens
  source 1..20: mol_type = genomic DNA; note = Gene: NTRK1; note = Location (start to end; relative to TSS): NTRK1_27_57; note = Orientation (relative to transcription): sense; note = sgRNA Position: 156860918; note = Sequence Name: 56322-704_101_SL_seq_1226
gctgccccgcctgagcgagg

SEQ ID NO: 1227 - DNA, 20 bp, Homo sapiens
  source 1..20: mol_type = genomic DNA; note = Gene: NTRK1; note = Location (start to end; relative to TSS): NTRK1_61_91; note = Orientation (relative to transcription): sense; note = sgRNA Position: 156860952; note = Sequence Name: 56322-704_101_SL_seq_1227
atgctgcgaggcggacggcg

SEQ ID NO: 1228 - DNA, 20 bp, Homo sapiens
  source 1..20: mol_type = genomic DNA; note = Gene: NTRK1; note = Location (start to end; relative to TSS): NTRK1_24_54; note = Orientation (relative to transcription): sense; note = sgRNA Position: 156860915; note = Sequence Name: 56322-704_101_SL_seq_1228
acggctgccccgcctgagcg

SEQ ID NO: 1229 - DNA, 20 bp, Homo sapiens
  source 1..20: mol_type = genomic DNA; note = Gene: NTRK1; note = Location (start to end; relative to TSS): NTRK1_56_86; note = Orientation (relative to transcription): sense; note = sgRNA Position: 156860947; note = Sequence Name: 56322-704_101_SL_seq_1229
ccgcgatgctgcgaggcgga

SEQ ID NO: 1230 - DNA, 20 bp, Homo sapiens
  source 1..20: mol_type = genomic DNA; note = Gene: NTRK2; note = Location (start to end; relative to TSS): NTRK2_35_65; note = Orientation (relative to transcription): antisense; note = sgRNA Position: 84669770; note = Sequence Name: 56322-704_101_SL_seq_1230
tcctgctccaacccaattcc

SEQ ID NO: 1231 - DNA, 20 bp, Homo sapiens
  source 1..20: mol_type = genomic DNA; note = Gene: NTRK2; note = Location (start to end; relative to TSS): NTRK2_88_118; note = Orientation (relative to transcription): sense; note = sgRNA Position: 84669843; note = Sequence Name: 56322-704_101_SL_seq_1231
ccccggcggtagcaggagcc

SEQ ID NO: 1232 - DNA, 20 bp, Homo sapiens
  source 1..20: mol_type = genomic DNA; note = Gene: NTRK2; note = Location (start to end; relative to TSS): NTRK2_36_66; note = Orientation (relative to transcription): sense; note = sgRNA Position: 84669791; note = Sequence Name: 56322-704_101_SL_seq_1232
ggttggagcaggagcctcgc

SEQ ID NO: 1233 - DNA, 20 bp, Homo sapiens
  source 1..20: mol_type = genomic DNA; note = Gene: NTRK2; note = Location (start to end; relative to TSS): NTRK2_81_111; note = Orientation (relative to transcription): sense; note = sgRNA Position: 84669836; note = Sequence Name: 56322-704_101_SL_seq_1233
gctcagtccccggcggtagc

SEQ ID NO: 1234 - DNA, 20 bp, Homo sapiens
  source 1..20: mol_type = genomic DNA; note = Gene: NTRK2; note = Location (start to end; relative to TSS): NTRK2_25_55; note = Orientation (relative to transcription): sense; note = sgRNA Position: 84669780; note = Sequence Name: 56322-704_101_SL_seq_1234
tcccggaattgggttggagc

SEQ ID NO: 1235 - DNA, 20 bp, Homo sapiens
  source 1..20: mol_type = genomic DNA; note = Gene: NTRK2; note = Location (start to end; relative to TSS): NTRK2_74_104; note = Orientation (relative to transcription): sense; note = sgRNA Position: 84669829; note = Sequence Name: 56322-704_101_SL_seq_1235
tctacgcgctcagtccccgg

SEQ ID NO: 1236 - DNA, 20 bp, Homo sapiens
  source 1..20: mol_type = genomic DNA; note = Gene: NTRK2; note = Location (start to end; relative to TSS): NTRK2_19_49; note = Orientation (relative to transcription): sense; note = sgRNA Position: 84669774; note = Sequence Name: 56322-704_101_SL_seq_1236
ggcggctcccggaattgggt

SEQ ID NO: 1237 - DNA, 20 bp, Homo sapiens
  source 1..20: mol_type = genomic DNA; note = Gene: NTRK2; note = Location (start to end; relative to TSS): NTRK2_71_101; note = Orientation (relative to transcription): sense; note = sgRNA Position: 84669826; note = Sequence Name: 56322-704_101_SL_seq_1237
cgctctacgcgctcagtccc

SEQ ID NO: 1238 - DNA, 20 bp, Homo sapiens
  source 1..20: mol_type = genomic DNA; note = Gene: NTRK2; note = Location (start to end; relative to TSS): NTRK2_15_45; note = Orientation (relative to transcription): sense; note = sgRNA Position: 84669770; note = Sequence Name: 56322-704_101_SL_seq_1238
cggcggcggctcccggaatt

SEQ ID NO: 1239 - DNA, 20 bp, Homo sapiens
  source 1..20: mol_type = genomic DNA; note = Gene: NTRK2; note = Location (start to end; relative to TSS): NTRK2_59_89; note = Orientation (relative to transcription): antisense; note = sgRNA Position: 84669794; note = Sequence Name: 56322-704_101_SL_seq_1239
cgcgagcgaagcagccagcg

SEQ ID NO: 1240 - DNA, 20 bp, Homo sapiens
  source 1..20: mol_type = genomic DNA; note = Gene: NTRK3; note = Location (start to end; relative to TSS): NTRK3_57_87; note = Orientation (relative to transcription): antisense; note = sgRNA Position: 88256678; note = Sequence Name: 56322-704_101_SL_seq_1240
gaagagaaggaagatgcagt

SEQ ID NO: 1241 - DNA, 20 bp, Homo sapiens
  source 1..20: mol_type = genomic DNA; note = Gene: NTRK3; note = Location (start to end; relative to TSS): NTRK3_93_123; note = Orientation (relative to transcription): antisense; note = sgRNA Position: 88256642; note = Sequence Name: 56322-704_101_SL_seq_1241
ctctcacacatacacacacc

SEQ ID NO: 1242 - DNA, 20 bp, Homo sapiens
  source 1..20: mol_type = genomic DNA; note = Gene: NTRK3; note = Location (start to end; relative to TSS): NTRK3_33_63; note = Orientation (relative to transcription): antisense; note = sgRNA Position: 88256702; note = Sequence Name: 56322-704_101_SL_seq_1242
gctgcagcagccgccgcgaa

SEQ ID NO: 1243 - DNA, 20 bp, Homo sapiens
  source 1..20: mol_type = genomic DNA; note = Gene: NTRK3; note = Location (start to end; relative to TSS): NTRK3_65_95; note = Orientation (relative to transcription): sense; note = sgRNA Position: 88256650; note = Sequence Name: 56322-704_101_SL_seq_1243
ctcttcctttcctcgggctc

SEQ ID NO: 1244 - DNA, 20 bp, Homo sapiens
  source 1..20: mol_type = genomic DNA; note = Gene: NTRK3; note = Location (start to end; relative to TSS): NTRK3_21_51; note = Orientation (relative to transcription): antisense; note = sgRNA Position: 88256714; note = Sequence Name: 56322-704_101_SL_seq_1244
gccgcgaatggctcgccgcg

SEQ ID NO: 1245 - DNA, 20 bp, Homo sapiens
  source 1..20: mol_type = genomic DNA; note = Gene: NTRK3; note = Location (start to end; relative to TSS): NTRK3_59_89; note = Orientation (relative to transcription): sense; note = sgRNA Position: 88256656; note = Sequence Name: 56322-704_101_SL_seq_1245
ttccttctcttcctttcctc

SEQ ID NO: 1246 - DNA, 20 bp, Homo sapiens
  source 1..20: mol_type = genomic DNA; note = Gene: NTRK3; note = Location (start to end; relative to TSS): NTRK3_14_44; note = Orientation (relative to transcription): sense; note = sgRNA Position: 88256701; note = Sequence Name: 56322-704_101_SL_seq_1246
gcgcggcgagccattcgcgg

SEQ ID NO: 1247 - DNA, 20 bp, Homo sapiens
  source 1..20: mol_type = genomic DNA; note = Gene: NTRK3; note = Location (start to end; relative to TSS): NTRK3_58_88; note = Orientation (relative to transcription): sense; note = sgRNA Position: 88256657; note = Sequence Name: 56322-704_101_SL_seq_1247
cttccttctcttcctttcct

SEQ ID NO: 1248 - DNA, 20 bp, Homo sapiens
  source 1..20: mol_type = genomic DNA; note = Gene: NTRK3; note = Location (start to end; relative to TSS): NTRK3_11_41; note = Orientation (relative to transcription): sense; note = sgRNA Position: 88256704; note = Sequence Name: 56322-704_101_SL_seq_1248
gccgcgcggcgagccattcg

SEQ ID NO: 1249 - DNA, 20 bp, Homo sapiens
  source 1..20: mol_type = genomic DNA; note = Gene: NTRK3; note = Location (start to end; relative to TSS): NTRK3_57_87; note = Orientation (relative to transcription): antisense; note = sgRNA Position: 88256678; note = Sequence Name: 56322-704_101_SL_seq_1249
gaagagaaggaagatgcagt

SEQ ID NO: 1250 - DNA, 20 bp, Homo sapiens
  source 1..20: mol_type = genomic DNA; note = Gene: NUP133; note = Location (start to end; relative to TSS): NUP133_54_84; note = Orientation (relative to transcription): antisense; note = sgRNA Position: 229508283; note = Sequence Name: 56322-704_101_SL_seq_1250
gactaggacagcgagggatc

SEQ ID NO: 1251 - DNA, 20 bp, Homo sapiens
  source 1..20: mol_type = genomic DNA; note = Gene: NUP133; note = Location (start to end; relative to TSS): NUP133_88_118; note = Orientation (relative to transcription): sense; note = sgRNA Position: 229508229; note = Sequence Name: 56322-704_101_SL_seq_1251
tcccagccgccccttctccg

SEQ ID NO: 1252 - DNA, 20 bp, Homo sapiens
  source 1..20: mol_type = genomic DNA; note = Gene: NUP133; note = Location (start to end; relative to TSS): NUP133_46_76; note = Orientation (relative to transcription): antisense; note = sgRNA Position: 229508291; note = Sequence Name: 56322-704_101_SL_seq_1252
cagcgagggatctggccgtc

SEQ ID NO: 1253 - DNA, 20 bp, Homo sapiens
  source 1..20: mol_type = genomic DNA; note = Gene: NUP133; note = Location (start to end; relative to TSS): NUP133_83_113; note = Orientation (relative to transcription): antisense; note = sgRNA Position: 229508254; note = Sequence Name: 56322-704_101_SL_seq_1253
cggctgggaacatgactcca

SEQ ID NO: 1254 - DNA, 20 bp, Homo sapiens
  source 1..20: mol_type = genomic DNA; note = Gene: NUP133; note = Location (start to end; relative to TSS): NUP133_35_65; note = Orientation (relative to transcription): antisense; note = sgRNA Position: 229508302; note = Sequence Name: 56322-704_101_SL_seq_1254
ctggccgtcaggttgcagcc

SEQ ID NO: 1255 - DNA, 20 bp, Homo sapiens
  source 1..20: mol_type = genomic DNA; note = Gene: NUP133; note = Location (start to end; relative to TSS): NUP133_70_100; note = Orientation (relative to transcription): antisense; note = sgRNA Position: 229508267; note = Sequence Name: 56322-704_101_SL_seq_1255
gactccaaggagcagcgact

SEQ ID NO: 1256 - DNA, 20 bp, Homo sapiens
  source 1..20: mol_type = genomic DNA; note = Gene: NUP133; note = Location (start to end; relative to TSS): NUP133_24_54; note = Orientation (relative to transcription): antisense; note = sgRNA Position: 229508313; note = Sequence Name: 56322-704_101_SL_seq_1256
gttgcagcctggcctgcgcg

SEQ ID NO: 1257 - DNA, 20 bp, Homo sapiens
  source 1..20: mol_type = genomic DNA; note = Gene: NUP133; note = Location (start to end; relative to TSS): NUP133_57_87; note = Orientation (relative to transcription): sense; note = sgRNA Position: 229508260; note = Sequence Name: 56322-704_101_SL_seq_1257
ctgtcctagtcgctgctcct

SEQ ID NO: 1258 - DNA, 20 bp, Homo sapiens
  source 1..20: mol_type = genomic DNA; note = Gene: NUP133; note = Location (start to end; relative to TSS): NUP133_22_52; note = Orientation (relative to transcription): sense; note = sgRNA Position: 229508295; note = Sequence Name: 56322-704_101_SL_seq_1258
caggccaggctgcaacctga

SEQ ID NO: 1259 - DNA, 20 bp, Homo sapiens
  source 1..20: mol_type = genomic DNA; note = Gene: NUP133; note = Location (start to end; relative to TSS): NUP133_54_84; note = Orientation (relative to transcription): antisense; note = sgRNA Position: 229508283; note = Sequence Name: 56322-704_101_SL_seq_1259
gactaggacagcgagggatc

SEQ ID NO: 1260 - DNA, 20 bp, Homo sapiens
  source 1..20: mol_type = genomic DNA; note = Gene: PALB2; note = Location (start to end; relative to TSS): PALB2_45_75; note = Orientation (relative to transcription): sense; note = sgRNA Position: 23641241; note = Sequence Name: 56322-704_101_SL_seq_1260
tccttcctggggcgcctccc

SEQ ID NO: 1261 - DNA, 20 bp, Homo sapiens
  source 1..20: mol_type = genomic DNA; note = Gene: PALB2; note = Location (start to end; relative to TSS): PALB2_77_107; note = Orientation (relative to transcription): antisense; note = sgRNA Position: 23641229; note = Sequence Name: 56322-704_101_SL_seq_1261
accgggacccagttggccct

SEQ ID NO: 1262 - DNA, 20 bp, Homo sapiens
  source 1..20: mol_type = genomic DNA; note = Gene: PALB2; note = Location (start to end; relative to TSS): PALB2_40_70; note = Orientation (relative to transcription): antisense; note = sgRNA Position: 23641266; note = Sequence Name: 56322-704_101_SL_seq_1262
caggaaggaatggggagccc

SEQ ID NO: 1263 - DNA, 20 bp, Homo sapiens
  source 1..20: mol_type = genomic DNA; note = Gene: PALB2; note = Location (start to end; relative to TSS): PALB2_72_102; note = Orientation (relative to transcription): antisense; note = sgRNA Position: 23641234; note = Sequence Name: 56322-704_101_SL_seq_1263
gacccagttggccctgggcc

SEQ ID NO: 1264 - DNA, 20 bp, Homo sapiens
  source 1..20: mol_type = genomic DNA; note = Gene: PALB2; note = Location (start to end; relative to TSS): PALB2_41_71; note = Orientation (relative to transcription): antisense; note = sgRNA Position: 23641265; note = Sequence Name: 56322-704_101_SL_seq_1264
ccaggaaggaatggggagcc

SEQ ID NO: 1265 - DNA, 20 bp, Homo sapiens
  source 1..20: mol_type = genomic DNA; note = Gene: PALB2; note = Location (start to end; relative to TSS): PALB2_71_101; note = Orientation (relative to transcription): antisense; note = sgRNA Position: 23641235; note = Sequence Name: 56322-704_101_SL_seq_1265
acccagttggccctgggccg

SEQ ID NO: 1266 - DNA, 20 bp, Homo sapiens
  source 1..20: mol_type = genomic DNA; note = Gene: PALB2; note = Location (start to end; relative to TSS): PALB2_33_63; note = Orientation (relative to transcription): sense; note = sgRNA Position: 23641253; note = Sequence Name: 56322-704_101_SL_seq_1266
cgggctccccattccttcct

SEQ ID NO: 1267 - DNA, 20 bp, Homo sapiens
  source 1..20: mol_type = genomic DNA; note = Gene: PALB2; note = Location (start to end; relative to TSS): PALB2_68_98; note = Orientation (relative to transcription): antisense; note = sgRNA Position: 23641238; note = Sequence Name: 56322-704_101_SL_seq_1267
cagttggccctgggccgggg

SEQ ID NO: 1268 - DNA, 20 bp, Homo sapiens
  source 1..20: mol_type = genomic DNA; note = Gene: PALB2; note = Location (start to end; relative to TSS): PALB2_34_64; note = Orientation (relative to transcription): sense; note = sgRNA Position: 23641252; note = Sequence Name: 56322-704_101_SL_seq_1268
gggctccccattccttcctg

SEQ ID NO: 1269 - DNA, 20 bp, Homo sapiens
  source 1..20: mol_type = genomic DNA; note = Gene: PALB2; note = Location (start to end; relative to TSS): PALB2_67_97; note = Orientation (relative to transcription): sense; note = sgRNA Position: 23641219; note = Sequence Name: 56322-704_101_SL_seq_1269
gcccagggccaactgggtcc

SEQ ID NO: 1270 - DNA, 20 bp, Homo sapiens
  source 1..20: mol_type = genomic DNA; note = Gene: PARP1; note = Location (start to end; relative to TSS): PARP1_43_73; note = Orientation (relative to transcription): sense; note = sgRNA Position: 226408026; note = Sequence Name: 56322-704_101_SL_seq_1270
tctggccgctcaggcgcctg

SEQ ID NO: 1271 - DNA, 20 bp, Homo sapiens
  source 1..20: mol_type = genomic DNA; note = Gene: PARP1; note = Location (start to end; relative to TSS): PARP1_74_104; note = Orientation (relative to transcription): sense; note = sgRNA Position: 226407995; note = Sequence Name: 56322-704_101_SL_seq_1271
gcgcacgcgaggcggcgagg

SEQ ID NO: 1272 - DNA, 20 bp, Homo sapiens
  source 1..20: mol_type = genomic DNA; note = Gene: PARP1; note = Location (start to end; relative to TSS): PARP1_34_64; note = Orientation (relative to transcription): sense; note = sgRNA Position: 226408035; note = Sequence Name: 56322-704_101_SL_seq_1272
ggtggcggctctggccgctc

SEQ ID NO: 1273 - DNA, 20 bp, Homo sapiens
  source 1..20: mol_type = genomic DNA; note = Gene: PARP1; note = Location (start to end; relative to TSS): PARP1_68_98; note = Orientation (relative to transcription): antisense; note = sgRNA Position: 226408021; note = Sequence Name: 56322-704_101_SL_seq_1273
gcgtgcgctcacccagccgc

SEQ ID NO: 1274 - DNA, 20 bp, Homo sapiens
  source 1..20: mol_type = genomic DNA; note = Gene: PARP1; note = Location (start to end; relative to TSS): PARP1_19_49; note = Orientation (relative to transcription): sense; note = sgRNA Position: 226408050; note = Sequence Name: 56322-704_101_SL_seq_1274
cggtgcggcgtgttcggtgg

SEQ ID NO: 1275 - DNA, 20 bp, Homo sapiens
  source 1..20: mol_type = genomic DNA; note = Gene: PARP1; note = Location (start to end; relative to TSS): PARP1_66_96; note = Orientation (relative to transcription): sense; note = sgRNA Position: 226408003; note = Sequence Name: 56322-704_101_SL_seq_1275
ctgggtgagcgcacgcgagg

SEQ ID NO: 1276 - DNA, 20 bp, Homo sapiens
  source 1..20: mol_type = genomic DNA; note = Gene: PARP1; note = Location (start to end; relative to TSS): PARP1_25_55; note = Orientation (relative to transcription): sense; note = sgRNA Position: 226408044; note = Sequence Name: 56322-704_101_SL_seq_1276
ggcgtgttcggtggcggctc

SEQ ID NO: 1277 - DNA, 20 bp, Homo sapiens
  source 1..20: mol_type = genomic DNA; note = Gene: PARP1; note = Location (start to end; relative to TSS): PARP1_63_93; note = Orientation (relative to transcription): sense; note = sgRNA Position: 226408006; note = Sequence Name: 56322-704_101_SL_seq_1277
cggctgggtgagcgcacgcg

SEQ ID NO: 1278 - DNA, 20 bp, Homo sapiens
  source 1..20: mol_type = genomic DNA; note = Gene: PARP1; note = Location (start to end; relative to TSS): PARP1_27_57; note = Orientation (relative to transcription): antisense; note = sgRNA Position: 226408062; note = Sequence Name: 56322-704_101_SL_seq_1278
cgccaccgaacacgccgcac

SEQ ID NO: 1279 - DNA, 20 bp, Homo sapiens
  source 1..20: mol_type = genomic DNA; note = Gene: PARP1; note = Location (start to end; relative to TSS): PARP1_57_87; note = Orientation (relative to transcription): antisense; note = sgRNA Position: 226408032; note = Sequence Name: 56322-704_101_SL_seq_1279
cccagccgcaggcgcctgag

SEQ ID NO: 1280 - DNA, 20 bp, Homo sapiens
  source 1..20: mol_type = genomic DNA; note = Gene: PARP2; note = Location (start to end; relative to TSS): PARP2_42_72; note = Orientation (relative to transcription): sense; note = sgRNA Position: 20343703; note = Sequence Name: 56322-704_101_SL_seq_1280
aggttcggagctcaatatcg

SEQ ID NO: 1281 - DNA, 20 bp, Homo sapiens
  source 1..20: mol_type = genomic DNA; note = Gene: PARP2; note = Location (start to end; relative to TSS): PARP2_113_143; note = Orientation (relative to transcription): antisense; note = sgRNA Position: 20343754; note = Sequence Name: 56322-704_101_SL_seq_1281
gggaagggggtcacagtagg

SEQ ID NO: 1282 - DNA, 20 bp, Homo sapiens
  source 1..20: mol_type = genomic DNA; note = Gene: PARP2; note = Location (start to end; relative to TSS): PARP2_43_73; note = Orientation (relative to transcription): sense; note = sgRNA Position: 20343704; note = Sequence Name: 56322-704_101_SL_seq_1282
ggttcggagctcaatatcgc

SEQ ID NO: 1283 - DNA, 20 bp, Homo sapiens
  source 1..20: mol_type = genomic DNA; note = Gene: PARP2; note = Location (start to end; relative to TSS): PARP2_74_104; note = Orientation (relative to transcription): sense; note = sgRNA Position: 20343735; note = Sequence Name: 56322-704_101_SL_seq_1283
cggggggcgggcagtcagaa

SEQ ID NO: 1284 - DNA, 20 bp, Homo sapiens
  source 1..20: mol_type = genomic DNA; note = Gene: PARP2; note = Location (start to end; relative to TSS): PARP2_32_62; note = Orientation (relative to transcription): antisense; note = sgRNA Position: 20343673; note = Sequence Name: 56322-704_101_SL_seq_1284
acctctcgccctgccgccgc

SEQ ID NO: 1285 - DNA, 20 bp, Homo sapiens
  source 1..20: mol_type = genomic DNA; note = Gene: PARP2; note = Location (start to end; relative to TSS): PARP2_62_92; note = Orientation (relative to transcription): sense; note = sgRNA Position: 20343723; note = Sequence Name: 56322-704_101_SL_seq_1285
cgggacggcatgcggggggc

SEQ ID NO: 1286 - DNA, 20 bp, Homo sapiens
  source 1..20: mol_type = genomic DNA; note = Gene: PARP2; note = Location (start to end; relative to TSS): PARP2_27_57; note = Orientation (relative to transcription): sense; note = sgRNA Position: 20343688; note = Sequence Name: 56322-704_101_SL_seq_1286
cggcggcagggcgagaggtt

SEQ ID NO: 1287 - DNA, 20 bp, Homo sapiens
  source 1..20: mol_type = genomic DNA; note = Gene: PARP2; note = Location (start to end; relative to TSS): PARP2_57_87; note = Orientation (relative to transcription): sense; note = sgRNA Position: 20343718; note = Sequence Name: 56322-704_101_SL_seq_1287
tatcgcgggacggcatgcgg

SEQ ID NO: 1288 - DNA, 20 bp, Homo sapiens
  source 1..20: mol_type = genomic DNA; note = Gene: PARP2; note = Location (start to end; relative to TSS): PARP2_22_52; note = Orientation (relative to transcription): sense; note = sgRNA Position: 20343683; note = Sequence Name: 56322-704_101_SL_seq_1288
accggcggcggcagggcgag

SEQ ID NO: 1289 - DNA, 20 bp, Homo sapiens
  source 1..20: mol_type = genomic DNA; note = Gene: PARP2; note = Location (start to end; relative to TSS): PARP2_54_84; note = Orientation (relative to transcription): sense; note = sgRNA Position: 20343715; note = Sequence Name: 56322-704_101_SL_seq_1289
caatatcgcgggacggcatg

SEQ ID NO: 1290 - DNA, 20 bp, Homo sapiens
  source 1..20: mol_type = genomic DNA; note = Gene: PARP3; note = Location (start to end; relative to TSS): PARP3_36_66; note = Orientation (relative to transcription): antisense; note = sgRNA Position: 51942405; note = Sequence Name: 56322-704_101_SL_seq_1290
cgtccgtagcgctgctcatg

SEQ ID NO: 1291 - DNA, 20 bp, Homo sapiens
  source 1..20: mol_type = genomic DNA; note = Gene: PARP3; note = Location (start to end; relative to TSS): PARP3_77_107; note = Orientation (relative to transcription): sense; note = sgRNA Position: 51942466; note = Sequence Name: 56322-704_101_SL_seq_1291
atcgagtgtccacccgtccg

SEQ ID NO: 1292 - DNA, 20 bp, Homo sapiens
  source 1..20: mol_type = genomic DNA; note = Gene: PARP3; note = Location (start to end; relative to TSS): PARP3_32_62; note = Orientation (relative to transcription): antisense; note = sgRNA Position: 51942401; note = Sequence Name: 56322-704_101_SL_seq_1292
cgtagcgctgctcatgtggc

SEQ ID NO: 1293 - DNA, 20 bp, Homo sapiens
  source 1..20: mol_type = genomic DNA; note = Gene: PARP3; note = Location (start to end; relative to TSS): PARP3_71_101; note = Orientation (relative to transcription): antisense; note = sgRNA Position: 51942440; note = Sequence Name: 56322-704_101_SL_seq_1293
cactcgatctggcatatcca

SEQ ID NO: 1294 - DNA, 20 bp, Homo sapiens
  source 1..20: mol_type = genomic DNA; note = Gene: PARP3; note = Location (start to end; relative to TSS): PARP3_31_61; note = Orientation (relative to transcription): antisense; note = sgRNA Position: 51942400; note = Sequence Name: 56322-704_101_SL_seq_1294
gtagcgctgctcatgtggcc

SEQ ID NO: 1295 - DNA, 20 bp, Homo sapiens
  source 1..20: mol_type = genomic DNA; note = Gene: PARP3; note = Location (start to end; relative to TSS): PARP3_67_97; note = Orientation (relative to transcription): antisense; note = sgRNA Position: 51942436; note = Sequence Name: 56322-704_101_SL_seq_1295
cgatctggcatatccaaggc

SEQ ID NO: 1296 - DNA, 20 bp, Homo sapiens
  source 1..20: mol_type = genomic DNA; note = Gene: PARP3; note = Location (start to end; relative to TSS): PARP3_24_54; note = Orientation (relative to transcription): sense; note = sgRNA Position: 51942413; note = Sequence Name: 56322-704_101_SL_seq_1296
cggccacatgagcagcgcta

SEQ ID NO: 1297 - DNA, 20 bp, Homo sapiens
  source 1..20: mol_type = genomic DNA; note = Gene: PARP3; note = Location (start to end; relative to TSS): PARP3_66_96; note = Orientation (relative to transcription): antisense; note = sgRNA Position: 51942435; note = Sequence Name: 56322-704_101_SL_seq_1297
gatctggcatatccaaggcc

SEQ ID NO: 1298 - DNA, 20 bp, Homo sapiens
  source 1..20: mol_type = genomic DNA; note = Gene: PARP3; note = Location (start to end; relative to TSS): PARP3_30_60; note = Orientation (relative to transcription): antisense; note = sgRNA Position: 51942399; note = Sequence Name: 56322-704_101_SL_seq_1298
tagcgctgctcatgtggccg

SEQ ID NO: 1299 - DNA, 20 bp, Homo sapiens
  source 1..20: mol_type = genomic DNA; note = Gene: PARP3; note = Location (start to end; relative to TSS): PARP3_65_95; note = Orientation (relative to transcription): antisense; note = sgRNA Position: 51942434; note = Sequence Name: 56322-704_101_SL_seq_1299
atctggcatatccaaggccg

SEQ ID NO: 1300 - DNA, 20 bp, Homo sapiens
  source 1..20: mol_type = genomic DNA; note = Gene: PDGFRA; note = Location (start to end; relative to TSS): PDGFRA_58_88; note = Orientation (relative to transcription): sense; note = sgRNA Position: 54229377; note = Sequence Name: 56322-704_101_SL_seq_1300
cacgctctttactccatgtg

SEQ ID NO: 1301 - DNA, 20 bp, Homo sapiens
  source 1..20: mol_type = genomic DNA; note = Gene: PDGFRA; note = Location (start to end; relative to TSS): PDGFRA_92_122; note = Orientation (relative to transcription): sense; note = sgRNA Position: 54229411; note = Sequence Name: 56322-704_101_SL_seq_1301
cggaataacatcggaggaga

SEQ ID NO: 1302 - DNA, 20 bp, Homo sapiens
  source 1..20: mol_type = genomic DNA; note = Gene: PDGFRA; note = Location (start to end; relative to TSS): PDGFRA_35_65; note = Orientation (relative to transcription): sense; note = sgRNA Position: 54229354; note = Sequence Name: 56322-704_101_SL_seq_1302
aagagatcattggaggccgt

SEQ ID NO: 1303 - DNA, 20 bp, Homo sapiens
  source 1..20: mol_type = genomic DNA; note = Gene: PDGFRA; note = Location (start to end; relative to TSS): PDGFRA_80_110; note = Orientation (relative to transcription): antisense; note = sgRNA Position: 54229379; note = Sequence Name: 56322-704_101_SL_seq_1303
cgcaatgaatgtcccacaca

SEQ ID NO: 1304 - DNA, 20 bp, Homo sapiens
  source 1..20: mol_type = genomic DNA; note = Gene: PDGFRA; note = Location (start to end; relative to TSS): PDGFRA_34_64; note = Orientation (relative to transcription): sense; note = sgRNA Position: 54229353; note = Sequence Name: 56322-704_101_SL_seq_1304
caagagatcattggaggccg

SEQ ID NO: 1305 - DNA, 20 bp, Homo sapiens
  source 1..20: mol_type = genomic DNA; note = Gene: PDGFRA; note = Location (start to end; relative to TSS): PDGFRA_72_102; note = Orientation (relative to transcription): sense; note = sgRNA Position: 54229391; note = Sequence Name: 56322-704_101_SL_seq_1305
catgtgtgggacattcattg

SEQ ID NO: 1306 - DNA, 20 bp, Homo sapiens
  source 1..20: mol_type = genomic DNA; note = Gene: PDGFRA; note = Location (start to end; relative to TSS): PDGFRA_25_55; note = Orientation (relative to transcription): sense; note = sgRNA Position: 54229344; note = Sequence Name: 56322-704_101_SL_seq_1306
aggagactgcaagagatcat

SEQ ID NO: 1307 - DNA, 20 bp, Homo sapiens
  source 1..20: mol_type = genomic DNA; note = Gene: PDGFRA; note = Location (start to end; relative to TSS): PDGFRA_59_89; note = Orientation (relative to transcription): sense; note = sgRNA Position: 54229378; note = Sequence Name: 56322-704_101_SL_seq_1307
acgctctttactccatgtgt

SEQ ID NO: 1308 - DNA, 20 bp, Homo sapiens
  source 1..20: mol_type = genomic DNA; note = Gene: PDGFRA; note = Location (start to end; relative to TSS): PDGFRA_28_58; note = Orientation (relative to transcription): sense; note = sgRNA Position: 54229347; note = Sequence Name: 56322-704_101_SL_seq_1308
agactgcaagagatcattgg

SEQ ID NO: 1309 - DNA, 20 bp, Homo sapiens
  source 1..20: mol_type = genomic DNA; note = Gene: PDGFRA; note = Location (start to end; relative to TSS): PDGFRA_58_88; note = Orientation (relative to transcription): sense; note = sgRNA Position: 54229377; note = Sequence Name: 56322-704_101_SL_seq_1309
cacgctctttactccatgtg

SEQ ID NO: 1310 - DNA, 20 bp, Homo sapiens
  source 1..20: mol_type = genomic DNA; note = Gene: PDGFRB; note = Location (start to end; relative to TSS): PDGFRB_30_60; note = Orientation (relative to transcription): sense; note = sgRNA Position: 150155791; note = Sequence Name: 56322-704_101_SL_seq_1310
ggatcgctctgtgagcaact

SEQ ID NO: 1311 - DNA, 20 bp, Homo sapiens
  source 1..20: mol_type = genomic DNA; note = Gene: PDGFRB; note = Location (start to end; relative to TSS): PDGFRB_101_131; note = Orientation (relative to transcription): antisense; note = sgRNA Position: 150155740; note = Sequence Name: 56322-704_101_SL_seq_1311
tgctgggcagcagggctgag

SEQ ID NO: 1312 - DNA, 20 bp, Homo sapiens
  source 1..20: mol_type = genomic DNA; note = Gene: PDGFRB; note = Location (start to end; relative to TSS): PDGFRB_24_54; note = Orientation (relative to transcription): antisense; note = sgRNA Position: 150155817; note = Sequence Name: 56322-704_101_SL_seq_1312
agcgatcctgggtcccagat

SEQ ID NO: 1313 - DNA, 20 bp, Homo sapiens
  source 1..20: mol_type = genomic DNA; note = Gene: PDGFRB; note = Location (start to end; relative to TSS): PDGFRB_97_127; note = Orientation (relative to transcription): antisense; note = sgRNA Position: 150155744; note = Sequence Name: 56322-704_101_SL_seq_1313
gggcagcagggctgaggggc

SEQ ID NO: 1314 - DNA, 20 bp, Homo sapiens
  source 1..20: mol_type = genomic DNA; note = Gene: PDGFRB; note = Location (start to end; relative to TSS): PDGFRB_23_53; note = Orientation (relative to transcription): antisense; note = sgRNA Position: 150155818; note = Sequence Name: 56322-704_101_SL_seq_1314
gcgatcctgggtcccagata

SEQ ID NO: 1315 - DNA, 20 bp, Homo sapiens
  source 1..20: mol_type = genomic DNA; note = Gene: PDGFRB; note = Location (start to end; relative to TSS): PDGFRB_69_99; note = Orientation (relative to transcription): sense; note = sgRNA Position: 150155752; note = Sequence Name: 56322-704_101_SL_seq_1315
aacaaggaggaggagagagc

SEQ ID NO: 1316 - DNA, 20 bp, Homo sapiens
  source 1..20: mol_type = genomic DNA; note = Gene: PDGFRB; note = Location (start to end; relative to TSS): PDGFRB_20_50; note = Orientation (relative to transcription): antisense; note = sgRNA Position: 150155821; note = Sequence Name: 56322-704_101_SL_seq_1316
atcctgggtcccagataggg

SEQ ID NO: 1317 - DNA, 20 bp, Homo sapiens
  source 1..20: mol_type = genomic DNA; note = Gene: PDGFRB; note = Location (start to end; relative to TSS): PDGFRB_64_94; note = Orientation (relative to transcription): antisense; note = sgRNA Position: 150155777; note = Sequence Name: 56322-704_101_SL_seq_1317
ctccttgttgatctcctctc

SEQ ID NO: 1318 - DNA, 20 bp, Homo sapiens
  source 1..20: mol_type = genomic DNA; note = Gene: PDGFRB; note = Location (start to end; relative to TSS): PDGFRB_19_49; note = Orientation (relative to transcription): antisense; note = sgRNA Position: 150155822; note = Sequence Name: 56322-704_101_SL_seq_1318
tcctgggtcccagatagggc

SEQ ID NO: 1319 - DNA, 20 bp, Homo sapiens
  source 1..20: mol_type = genomic DNA; note = Gene: PDGFRB; note = Location (start to end; relative to TSS): PDGFRB_59_89; note = Orientation (relative to transcription): sense; note = sgRNA Position: 150155762; note = Sequence Name: 56322-704_101_SL_seq_1319
agaggagatcaacaaggagg

SEQ ID NO: 1320 - DNA, 20 bp, Homo sapiens
  source 1..20: mol_type = genomic DNA; note = Gene: PIK3CA; note = Location (start to end; relative to TSS): PIK3CA_47_77; note = Orientation (relative to transcription): antisense; note = sgRNA Position: 179148410; note = Sequence Name: 56322-704_101_SL_seq_1320
agccccagtcccagcggccg

SEQ ID NO: 1321 - DNA, 20 bp, Homo sapiens
  source 1..20: mol_type = genomic DNA; note = Gene: PIK3CA; note = Location (start to end; relative to TSS): PIK3CA_89_119; note = Orientation (relative to transcription): sense; note = sgRNA Position: 179148472; note = Sequence Name: 56322-704_101_SL_seq_1321
ccggccgggcagctccggag

SEQ ID NO: 1322 - DNA, 20 bp, Homo sapiens
  source 1..20: mol_type = genomic DNA; note = Gene: PIK3CA; note = Location (start to end; relative to TSS): PIK3CA_36_66; note = Orientation (relative to transcription): sense; note = sgRNA Position: 179148419; note = Sequence Name: 56322-704_101_SL_seq_1322
tgccgcggccgctgggactg

SEQ ID NO: 1323 - DNA, 20 bp, Homo sapiens
  source 1..20: mol_type = genomic DNA; note = Gene: PIK3CA; note = Location (start to end; relative to TSS): PIK3CA_77_107; note = Orientation (relative to transcription): antisense; note = sgRNA Position: 179148440; note = Sequence Name: 56322-704_101_SL_seq_1323
gggcccgagccctgcctcgc

SEQ ID NO: 1324 - DNA, 20 bp, Homo sapiens
  source 1..20: mol_type = genomic DNA; note = Gene: PIK3CA; note = Location (start to end; relative to TSS): PIK3CA_42_72; note = Orientation (relative to transcription): sense; note = sgRNA Position: 179148425; note = Sequence Name: 56322-704_101_SL_seq_1324
ggccgctgggactggggctg

SEQ ID NO: 1325 - DNA, 20 bp, Homo sapiens
  source 1..20: mol_type = genomic DNA; note = Gene: PIK3CA; note = Location (start to end; relative to TSS): PIK3CA_74_104; note = Orientation (relative to transcription): antisense; note = sgRNA Position: 179148437; note = Sequence Name: 56322-704_101_SL_seq_1325
cccgagccctgcctcgccgg

SEQ ID NO: 1326 - DNA, 20 bp, Homo sapiens
  source 1..20: mol_type = genomic DNA; note = Gene: PIK3CA; note = Location (start to end; relative to TSS): PIK3CA_21_51; note = Orientation (relative to transcription): sense; note = sgRNA Position: 179148404; note = Sequence Name: 56322-704_101_SL_seq_1326
gtgtcgggctgctgctgccg

SEQ ID NO: 1327 - DNA, 20 bp, Homo sapiens
  source 1..20: mol_type = genomic DNA; note = Gene: PIK3CA; note = Location (start to end; relative to TSS): PIK3CA_59_89; note = Orientation (relative to transcription): sense; note = sgRNA Position: 179148442; note = Sequence Name: 56322-704_101_SL_seq_1327
ctggggccgccggcgaggca

SEQ ID NO: 1328 - DNA, 20 bp, Homo sapiens
  source 1..20: mol_type = genomic DNA; note = Gene: PIK3CA; note = Location (start to end; relative to TSS): PIK3CA_22_52; note = Orientation (relative to transcription): antisense; note = sgRNA Position: 179148385; note = Sequence Name: 56322-704_101_SL_seq_1328
gcagcagcccgacacctcag

SEQ ID NO: 1329 - DNA, 20 bp, Homo sapiens
  source 1..20: mol_type = genomic DNA; note = Gene: PIK3CA; note = Location (start to end; relative to TSS): PIK3CA_53_83; note = Orientation (relative to transcription): antisense; note = sgRNA Position: 179148416; note = Sequence Name: 56322-704_101_SL_seq_1329
ggccccagccccagtcccag

SEQ ID NO: 1330 - DNA, 20 bp, Homo sapiens
  source 1..20: mol_type = genomic DNA; note = Gene: PIK3CD; note = Location (start to end; relative to TSS): PIK3CD_41_71; note = Orientation (relative to transcription): sense; note = sgRNA Position: 9651798; note = Sequence Name: 56322-704_101_SL_seq_1330
ccctgccagctgcgccggga

SEQ ID NO: 1331 - DNA, 20 bp, Homo sapiens
  source 1..20: mol_type = genomic DNA; note = Gene: PIK3CD; note = Location (start to end; relative to TSS): PIK3CD_76_106; note = Orientation (relative to transcription): sense; note = sgRNA Position: 9651833; note = Sequence Name: 56322-704_101_SL_seq_1331
gctggctgcgtcaggggagg

SEQ ID NO: 1332 - DNA, 20 bp, Homo sapiens
  source 1..20: mol_type = genomic DNA; note = Gene: PIK3CD; note = Location (start to end; relative to TSS): PIK3CD_42_72; note = Orientation (relative to transcription): antisense; note = sgRNA Position: 9651779; note = Sequence Name: 56322-704_101_SL_seq_1332
gcgcagctggcagggctggg

SEQ ID NO: 1333 - DNA, 20 bp, Homo sapiens
  source 1..20: mol_type = genomic DNA; note = Gene: PIK3CD; note = Location (start to end; relative to TSS): PIK3CD_73_103; note = Orientation (relative to transcription): sense; note = sgRNA Position: 9651830; note = Sequence Name: 56322-704_101_SL_seq_1333
gccgctggctgcgtcagggg

SEQ ID NO: 1334 - DNA, 20 bp, Homo sapiens
  source 1..20: mol_type = genomic DNA; note = Gene: PIK3CD; note = Location (start to end; relative to TSS): PIK3CD_37_67; note = Orientation (relative to transcription): sense; note = sgRNA Position: 9651794; note = Sequence Name: 56322-704_101_SL_seq_1334
ccagccctgccagctgcgcc

SEQ ID NO: 1335 - DNA, 20 bp, Homo sapiens
  source 1..20: mol_type = genomic DNA; note = Gene: PIK3CD; note = Location (start to end; relative to TSS): PIK3CD_68_98; note = Orientation (relative to transcription): sense; note = sgRNA Position: 9651825; note = Sequence Name: 56322-704_101_SL_seq_1335
cgatcgccgctggctgcgtc

SEQ ID NO: 1336 - DNA, 20 bp, Homo sapiens
  source 1..20: mol_type = genomic DNA; note = Gene: PIK3CD; note = Location (start to end; relative to TSS): PIK3CD_30_60; note = Orientation (relative to transcription): antisense; note = sgRNA Position: 9651767; note = Sequence Name: 56322-704_101_SL_seq_1336
gggctgggcggctctgctcg

SEQ ID NO: 1337 - DNA, 20 bp, Homo sapiens
  source 1..20: mol_type = genomic DNA; note = Gene: PIK3CD; note = Location (start to end; relative to TSS): PIK3CD_64_94; note = Orientation (relative to transcription): antisense; note = sgRNA Position: 9651801; note = Sequence Name: 56322-704_101_SL_seq_1337
gcggcgatcgcttaccgtcc

SEQ ID NO: 1338 - DNA, 20 bp, Homo sapiens
  source 1..20: mol_type = genomic DNA; note = Gene: PIK3CD; note = Location (start to end; relative to TSS): PIK3CD_22_52; note = Orientation (relative to transcription): antisense; note = sgRNA Position: 9651759; note = Sequence Name: 56322-704_101_SL_seq_1338
cggctctgctcgcggccgct

SEQ ID NO: 1339 - DNA, 20 bp, Homo sapiens
  source 1..20: mol_type = genomic DNA; note = Gene: PIK3CD; note = Location (start to end; relative to TSS): PIK3CD_55_85; note = Orientation (relative to transcription): antisense; note = sgRNA Position: 9651792; note = Sequence Name: 56322-704_101_SL_seq_1339
gcttaccgtcccggcgcagc

SEQ ID NO: 1340 - DNA, 20 bp, Homo sapiens
  source 1..20: mol_type = genomic DNA; note = Gene: PIK3CG; note = Location (start to end; relative to TSS): PIK3CG_42_72; note = Orientation (relative to transcription): sense; note = sgRNA Position: 106865350; note = Sequence Name: 56322-704_101_SL_seq_1340
aatttagacgcacactgggt

SEQ ID NO: 1341 - DNA, 20 bp, Homo sapiens
  source 1..20: mol_type = genomic DNA; note = Gene: PIK3CG; note = Location (start to end; relative to TSS): PIK3CG_146_176; note = Orientation (relative to transcription): sense; note = sgRNA Position: 106865454; note = Sequence Name: 56322-704_101_SL_seq_1341
cttctattttttgctctttg

SEQ ID NO: 1342 - DNA, 20 bp, Homo sapiens
  source 1..20: mol_type = genomic DNA; note = Gene: PIK3CG; note = Location (start to end; relative to TSS): PIK3CG_38_68; note = Orientation (relative to transcription): sense; note = sgRNA Position: 106865346; note = Sequence Name: 56322-704_101_SL_seq_1342
gaagaatttagacgcacact

SEQ ID NO: 1343 - DNA, 20 bp, Homo sapiens
  source 1..20: mol_type = genomic DNA; note = Gene: PIK3CG; note = Location (start to end; relative to TSS): PIK3CG_130_160; note = Orientation (relative to transcription): antisense; note = sgRNA Position: 106865418; note = Sequence Name: 56322-704_101_SL_seq_1343
agcaatacctgataaagcag

SEQ ID NO: 1344 - DNA, 20 bp, Homo sapiens
  source 1..20: mol_type = genomic DNA; note = Gene: PIK3CG; note = Location (start to end; relative to TSS): PIK3CG_37_67; note = Orientation (relative to transcription): sense; note = sgRNA Position: 106865345; note = Sequence Name: 56322-704_101_SL_seq_1344
ggaagaatttagacgcacac

SEQ ID NO: 1345 - DNA, 20 bp, Homo sapiens
  source 1..20: mol_type = genomic DNA; note = Gene: PIK3CG; note = Location (start to end; relative to TSS): PIK3CG_127_157; note = Orientation (relative to transcription): antisense; note = sgRNA Position: 106865415; note = Sequence Name: 56322-704_101_SL_seq_1345
aatacctgataaagcagcgg

SEQ ID NO: 1346 - DNA, 20 bp, Homo sapiens
  source 1..20: mol_type = genomic DNA; note = Gene: PIK3CG; note = Location (start to end; relative to TSS): PIK3CG_34_64; note = Orientation (relative to transcription): antisense; note = sgRNA Position: 106865322; note = Sequence Name: 56322-704_101_SL_seq_1346
taaattcttccgcttttctg

SEQ ID NO: 1347 - DNA, 20 bp, Homo sapiens
  source 1..20: mol_type = genomic DNA; note = Gene: PIK3CG; note = Location (start to end; relative to TSS): PIK3CG_114_144; note = Orientation (relative to transcription): sense; note = sgRNA Position: 106865422; note = Sequence Name: 56322-704_101_SL_seq_1347
atcgcctccgctgctttatc

SEQ ID NO: 1348 - DNA, 20 bp, Homo sapiens
  source 1..20: mol_type = genomic DNA; note = Gene: PIK3CG; note = Location (start to end; relative to TSS): PIK3CG_16_46; note = Orientation (relative to transcription): sense; note = sgRNA Position: 106865324; note = Sequence Name: 56322-704_101_SL_seq_1348
tgaagggagccccagaaaag

SEQ ID NO: 1349 - DNA, 20 bp, Homo sapiens
  source 1..20: mol_type = genomic DNA; note = Gene: PIK3CG; note = Location (start to end; relative to TSS): PIK3CG_112_142; note = Orientation (relative to transcription): antisense; note = sgRNA Position: 106865400; note = Sequence Name: 56322-704_101_SL_seq_1349
agcggaggcgatgatgctga

SEQ ID NO: 1350 - DNA, 20 bp, Homo sapiens
  source 1..20: mol_type = genomic DNA; note = Gene: PIM1; note = Location (start to end; relative to TSS): PIM1_35_65; note = Orientation (relative to transcription): sense; note = sgRNA Position: 37170213; note = Sequence Name: 56322-704_101_SL_seq_1350
ggtggctgaggaggcccgag

SEQ ID NO: 1351 - DNA, 20 bp, Homo sapiens
  source 1..20: mol_type = genomic DNA; note = Gene: PIM1; note = Location (start to end; relative to TSS): PIM1_93_123; note = Orientation (relative to transcription): antisense; note = sgRNA Position: 37170251; note = Sequence Name: 56322-704_101_SL_seq_1351
gctgctgctgctgctgctgc

SEQ ID NO: 1352 - DNA, 20 bp, Homo sapiens
  source 1..20: mol_type = genomic DNA; note = Gene: PIM1; note = Location (start to end; relative to TSS): PIM1_40_70; note = Orientation (relative to transcription): antisense; note = sgRNA Position: 37170198; note = Sequence Name: 56322-704_101_SL_seq_1352
tcgggcctcctcagccaccg

SEQ ID NO: 1353 - DNA, 20 bp, Homo sapiens
  source 1..20: mol_type = genomic DNA; note = Gene: PIM1; note = Location (start to end; relative to TSS): PIM1_93_123; note = Orientation (relative to transcription): antisense; note = sgRNA Position: 37170251; note = Sequence Name: 56322-704_101_SL_seq_1353
gctgctgctgctgctgctgc

SEQ ID NO: 1354 - DNA, 20 bp, Homo sapiens
  source 1..20: mol_type = genomic DNA; note = Gene: PIM1; note = Location (start to end; relative to TSS): PIM1_26_56; note = Orientation (relative to transcription): sense; note = sgRNA Position: 37170204; note = Sequence Name: 56322-704_101_SL_seq_1354
agcggccgcggtggctgagg

SEQ ID NO: 1355 - DNA, 20 bp, Homo sapiens
  source 1..20: mol_type = genomic DNA; note = Gene: PIM1; note = Location (start to end; relative to TSS): PIM1_56_86; note = Orientation (relative to transcription): sense; note = sgRNA Position: 37170234; note = Sequence Name: 56322-704_101_SL_seq_1355
ggagtcggtggcagcggcgg

SEQ ID NO: 1356 - DNA, 20 bp, Homo sapiens
  source 1..20: mol_type = genomic DNA; note = Gene: PIM1; note = Location (start to end; relative to TSS): PIM1_23_53; note = Orientation (relative to transcription): sense; note = sgRNA Position: 37170201; note = Sequence Name: 56322-704_101_SL_seq_1356
tgcagcggccgcggtggctg

SEQ ID NO: 1357 - DNA, 20 bp, Homo sapiens
  source 1..20: mol_type = genomic DNA; note = Gene: PIM1; note = Location (start to end; relative to TSS): PIM1_53_83; note = Orientation (relative to transcription): sense; note = sgRNA Position: 37170231; note = Sequence Name: 56322-704_101_SL_seq_1357
agaggagtcggtggcagcgg

SEQ ID NO: 1358 - DNA, 20 bp, Homo sapiens
  source 1..20: mol_type = genomic DNA; note = Gene: PIM1; note = Location (start to end; relative to TSS): PIM1_20_50; note = Orientation (relative to transcription): antisense; note = sgRNA Position: 37170178; note = Sequence Name: 56322-704_101_SL_seq_1358
cggccgctgcagcagacgcc

SEQ ID NO: 1359 - DNA, 20 bp, Homo sapiens
  source 1..20: mol_type = genomic DNA; note = Gene: PIM1; note = Location (start to end; relative to TSS): PIM1_50_80; note = Orientation (relative to transcription): sense; note = sgRNA Position: 37170228; note = Sequence Name: 56322-704_101_SL_seq_1359
ccgagaggagtcggtggcag

SEQ ID NO: 1360 - DNA, 20 bp, Homo sapiens
  source 1..20: mol_type = genomic DNA; note = Gene: PIM2; note = Location (start to end; relative to TSS): PIM2_61_91; note = Orientation (relative to transcription): sense; note = sgRNA Position: 48918939; note = Sequence Name: 56322-704_101_SL_seq_1360
agtttctctgctttccaccc

SEQ ID NO: 1361 - DNA, 20 bp, Homo sapiens
  source 1..20: mol_type = genomic DNA; note = Gene: PIM2; note = Location (start to end; relative to TSS): PIM2_95_125; note = Orientation (relative to transcription): antisense; note = sgRNA Position: 48918925; note = Sequence Name: 56322-704_101_SL_seq_1361
gctggggagccagggctggg

SEQ ID NO: 1362 - DNA, 20 bp, Homo sapiens
  source 1..20: mol_type = genomic DNA; note = Gene: PIM2; note = Location (start to end; relative to TSS): PIM2_22_52; note = Orientation (relative to transcription): sense; note = sgRNA Position: 48918978; note = Sequence Name: 56322-704_101_SL_seq_1362
tctcaacgctgcgccgtctg

SEQ ID NO: 1363 - DNA, 20 bp, Homo sapiens
  source 1..20: mol_type = genomic DNA; note = Gene: PIM2; note = Location (start to end; relative to TSS): PIM2_84_114; note = Orientation (relative to transcription): antisense; note = sgRNA Position: 48918936; note = Sequence Name: 56322-704_101_SL_seq_1363
agggctggggggcgccaggg

SEQ ID NO: 1364 - DNA, 20 bp, Homo sapiens
  source 1..20: mol_type = genomic DNA; note = Gene: PIM2; note = Location (start to end; relative to TSS): PIM2_23_53; note = Orientation (relative to transcription): sense; note = sgRNA Position: 48918977; note = Sequence Name: 56322-704_101_SL_seq_1364
ctcaacgctgcgccgtctgc

SEQ ID NO: 1365 - DNA, 20 bp, Homo sapiens
  source 1..20: mol_type = genomic DNA; note = Gene: PIM2; note = Location (start to end; relative to TSS): PIM2_77_107; note = Orientation (relative to transcription): sense; note = sgRNA Position: 48918923; note = Sequence Name: 56322-704_101_SL_seq_1365
accctggcgccccccagccc

SEQ ID NO: 1366 - DNA, 20 bp, Homo sapiens
  source 1..20: mol_type = genomic DNA; note = Gene: PIM2; note = Location (start to end; relative to TSS): PIM2_-5_25; note = Orientation (relative to transcription): sense; note = sgRNA Position: 48919005; note = Sequence Name: 56322-704_101_SL_seq_1366
agcattggggctggcgcgcg

SEQ ID NO: 1367 - DNA, 20 bp, Homo sapiens
  source 1..20: mol_type = genomic DNA; note = Gene: PIM2; note = Location (start to end; relative to TSS): PIM2_61_91; note = Orientation (relative to transcription): sense; note = sgRNA Position: 48918939; note = Sequence Name: 56322-704_101_SL_seq_1367
agtttctctgctttccaccc

SEQ ID NO: 1368 - DNA, 20 bp, Homo sapiens
  source 1..20: mol_type = genomic DNA; note = Gene: PIM2; note = Location (start to end; relative to TSS): PIM2_-7_23; note = Orientation (relative to transcription): antisense; note = sgRNA Position: 48919027; note = Sequence Name: 56322-704_101_SL_seq_1368
agccccaatgctactgagcc

SEQ ID NO: 1369 - DNA, 20 bp, Homo sapiens
  source 1..20: mol_type = genomic DNA; note = Gene: PIM2; note = Location (start to end; relative to TSS): PIM2_23_53; note = Orientation (relative to transcription): sense; note = sgRNA Position: 48918977; note = Sequence Name: 56322-704_101_SL_seq_1369
ctcaacgctgcgccgtctgc

SEQ ID NO: 1370 - DNA, 20 bp, Homo sapiens
  source 1..20: mol_type = genomic DNA; note = Gene: PIM3; note = Location (start to end; relative to TSS): PIM3_39_69; note = Orientation (relative to transcription): sense; note = sgRNA Position: 49960837; note = Sequence Name: 56322-704_101_SL_seq_1370
tccgggcccactgcgccgcg

SEQ ID NO: 1371 - DNA, 20 bp, Homo sapiens
  source 1..20: mol_type = genomic DNA; note = Gene: PIM3; note = Location (start to end; relative to TSS): PIM3_93_123; note = Orientation (relative to transcription): sense; note = sgRNA Position: 49960891; note = Sequence Name: 56322-704_101_SL_seq_1371
ggcgcgccgctcgcccggat

SEQ ID NO: 1372 - DNA, 20 bp, Homo sapiens
  source 1..20: mol_type = genomic DNA; note = Gene: PIM3; note = Location (start to end; relative to TSS): PIM3_37_67; note = Orientation (relative to transcription): antisense; note = sgRNA Position: 49960815; note = Sequence Name: 56322-704_101_SL_seq_1372
agtgggcccggaaggcccgc

SEQ ID NO: 1373 - DNA, 20 bp, Homo sapiens
  source 1..20: mol_type = genomic DNA; note = Gene: PIM3; note = Location (start to end; relative to TSS): PIM3_88_118; note = Orientation (relative to transcription): sense; note = sgRNA Position: 49960886; note = Sequence Name: 56322-704_101_SL_seq_1373
tccccggcgcgccgctcgcc

SEQ ID NO: 1374 - DNA, 20 bp, Homo sapiens
  source 1..20: mol_type = genomic DNA; note = Gene: PIM3; note = Location (start to end; relative to TSS): PIM3_36_66; note = Orientation (relative to transcription): antisense; note = sgRNA Position: 49960814; note = Sequence Name: 56322-704_101_SL_seq_1374
gtgggcccggaaggcccgcg

SEQ ID NO: 1375 - DNA, 20 bp, Homo sapiens
  source 1..20: mol_type = genomic DNA; note = Gene: PIM3; note = Location (start to end; relative to TSS): PIM3_75_105; note = Orientation (relative to transcription): antisense; note = sgRNA Position: 49960853; note = Sequence Name: 56322-704_101_SL_seq_1375
acaccggccgtccgagcccg

SEQ ID NO: 1376 - DNA, 20 bp, Homo sapiens
  source 1..20: mol_type = genomic DNA; note = Gene: PIM3; note = Location (start to end; relative to TSS): PIM3_38_68; note = Orientation (relative to transcription): antisense; note = sgRNA Position: 49960816; note = Sequence Name: 56322-704_101_SL_seq_1376
cagtgggcccggaaggcccg

SEQ ID NO: 1377 - DNA, 20 bp, Homo sapiens
  source 1..20: mol_type = genomic DNA; note = Gene: PIM3; note = Location (start to end; relative to TSS): PIM3_72_102; note = Orientation (relative to transcription): antisense; note = sgRNA Position: 49960850; note = Sequence Name: 56322-704_101_SL_seq_1377
ccggccgtccgagcccgagg

SEQ ID NO: 1378 - DNA, 20 bp, Homo sapiens
  source 1..20: mol_type = genomic DNA; note = Gene: PIM3; note = Location (start to end; relative to TSS): PIM3_22_52; note = Orientation (relative to transcription): sense; note = sgRNA Position: 49960820; note = Sequence Name: 56322-704_101_SL_seq_1378
gcggtccccgcgggccttcc

SEQ ID NO: 1379 - DNA, 20 bp, Homo sapiens
  source 1..20: mol_type = genomic DNA; note = Gene: PIM3; note = Location (start to end; relative to TSS): PIM3_54_84; note = Orientation (relative to transcription): antisense; note = sgRNA Position: 49960832; note = Sequence Name: 56322-704_101_SL_seq_1379
ggcggtccgcgcggcgcagt

SEQ ID NO: 1380 - DNA, 20 bp, Homo sapiens
  source 1..20: mol_type = genomic DNA; note = Gene: POLR2B; note = Location (start to end; relative to TSS): POLR2B_54_84; note = Orientation (relative to transcription): sense; note = sgRNA Position: 56978976; note = Sequence Name: 56322-704_101_SL_seq_1380
ttaggagctcgagaaccgtt

SEQ ID NO: 1381 - DNA, 20 bp, Homo sapiens
  source 1..20: mol_type = genomic DNA; note = Gene: POLR2B; note = Location (start to end; relative to TSS): POLR2B_107_137; note = Orientation (relative to transcription): sense; note = sgRNA Position: 56979029; note = Sequence Name: 56322-704_101_SL_seq_1381
aacgctcaaaacacacgccg

SEQ ID NO: 1382 - DNA, 20 bp, Homo sapiens
  source 1..20: mol_type = genomic DNA; note = Gene: POLR2B; note = Location (start to end; relative to TSS): POLR2B_36_66; note = Orientation (relative to transcription): sense; note = sgRNA Position: 56978958; note = Sequence Name: 56322-704_101_SL_seq_1382
gtcttttgatttcaagagtt

SEQ ID NO: 1383 - DNA, 20 bp, Homo sapiens
  source 1..20: mol_type = genomic DNA; note = Gene: POLR2B; note = Location (start to end; relative to TSS): POLR2B_77_107; note = Orientation (relative to transcription): sense; note = sgRNA Position: 56978999; note = Sequence Name: 56322-704_101_SL_seq_1383
caatatgtacgacgcggatg

SEQ ID NO: 1384 - DNA, 20 bp, Homo sapiens
  source 1..20: mol_type = genomic DNA; note = Gene: POLR2B; note = Location (start to end; relative to TSS): POLR2B_15_45; note = Orientation (relative to transcription): antisense; note = sgRNA Position: 56978917; note = Sequence Name: 56322-704_101_SL_seq_1384
gcccagaagccagcagcgcc

SEQ ID NO: 1385 - DNA, 20 bp, Homo sapiens
  source 1..20: mol_type = genomic DNA; note = Gene: POLR2B; note = Location (start to end; relative to TSS): POLR2B_71_101; note = Orientation (relative to transcription): sense; note = sgRNA Position: 56978993; note = Sequence Name: 56322-704_101_SL_seq_1385
gtttggcaatatgtacgacg

SEQ ID NO: 1386 - DNA, 20 bp, Homo sapiens
  source 1..20: mol_type = genomic DNA; note = Gene: POLR2B; note = Location (start to end; relative to TSS): POLR2B_8_38; note = Orientation (relative to transcription): sense; note = sgRNA Position: 56978930; note = Sequence Name: 56322-704_101_SL_seq_1386
tggcgctgctggcttctggg

SEQ ID NO: 1387 - DNA, 20 bp, Homo sapiens
  source 1..20: mol_type = genomic DNA; note = Gene: POLR2B; note = Location (start to end; relative to TSS): POLR2B_54_84; note = Orientation (relative to transcription): sense; note = sgRNA Position: 56978976; note = Sequence Name: 56322-704_101_SL_seq_1387
ttaggagctcgagaaccgtt

SEQ ID NO: 1388 - DNA, 20 bp, Homo sapiens
  source 1..20: mol_type = genomic DNA; note = Gene: POLR2B; note = Location (start to end; relative to TSS): POLR2B_-3_27; note = Orientation (relative to transcription): sense; note = sgRNA Position: 56978919; note = Sequence Name: 56322-704_101_SL_seq_1388
tctttagctcctggcgctgc

SEQ ID NO: 1389 - DNA, 20 bp, Homo sapiens
  source 1..20: mol_type = genomic DNA; note = Gene: POLR2B; note = Location (start to end; relative to TSS): POLR2B_36_66; note = Orientation (relative to transcription): sense; note = sgRNA Position: 56978958; note = Sequence Name: 56322-704_101_SL_seq_1389
gtcttttgatttcaagagtt

SEQ ID NO: 1390 - DNA, 20 bp, Homo sapiens
  source 1..20: mol_type = genomic DNA; note = Gene: PRKCA; note = Location (start to end; relative to TSS): PRKCA_43_73; note = Orientation (relative to transcription): antisense; note = sgRNA Position: 66302662; note = Sequence Name: 56322-704_101_SL_seq_1390
gtgctgcgcggagcgggagc

SEQ ID NO: 1391 - DNA, 20 bp, Homo sapiens
  source 1..20: mol_type = genomic DNA; note = Gene: PRKCA; note = Location (start to end; relative to TSS): PRKCA_96_126; note = Orientation (relative to transcription): antisense; note = sgRNA Position: 66302715; note = Sequence Name: 56322-704_101_SL_seq_1391
gtggccgaggtcgcggcgag

SEQ ID NO: 1392 - DNA, 20 bp, Homo sapiens
  source 1..20: mol_type = genomic DNA; note = Gene: PRKCA; note = Location (start to end; relative to TSS): PRKCA_44_74; note = Orientation (relative to transcription): antisense; note = sgRNA Position: 66302663; note = Sequence Name: 56322-704_101_SL_seq_1392
ggtgctgcgcggagcgggag

SEQ ID NO: 1393 - DNA, 20 bp, Homo sapiens
  source 1..20: mol_type = genomic DNA; note = Gene: PRKCA; note = Location (start to end; relative to TSS): PRKCA_95_125; note = Orientation (relative to transcription): antisense; note = sgRNA Position: 66302714; note = Sequence Name: 56322-704_101_SL_seq_1393
tggccgaggtcgcggcgagg

SEQ ID NO: 1394 - DNA, 20 bp, Homo sapiens
  source 1..20: mol_type = genomic DNA; note = Gene: PRKCA; note = Location (start to end; relative to TSS): PRKCA_49_79; note = Orientation (relative to transcription): antisense; note = sgRNA Position: 66302668; note = Sequence Name: 56322-704_101_SL_seq_1394
gggctggtgctgcgcggagc

SEQ ID NO: 1395 - DNA, 20 bp, Homo sapiens
  source 1..20: mol_type = genomic DNA; note = Gene: PRKCA; note = Location (start to end; relative to TSS): PRKCA_90_120; note = Orientation (relative to transcription): sense; note = sgRNA Position: 66302729; note = Sequence Name: 56322-704_101_SL_seq_1395
ctcgccgcgacctcggccac

SEQ ID NO: 1396 - DNA, 20 bp, Homo sapiens
  source 1..20: mol_type = genomic DNA; note = Gene: PRKCA; note = Location (start to end; relative to TSS): PRKCA_28_58; note = Orientation (relative to transcription): antisense; note = sgRNA Position: 66302647; note = Sequence Name: 56322-704_101_SL_seq_1396
ggagcgggagccggagccgc

SEQ ID NO: 1397 - DNA, 20 bp, Homo sapiens
  source 1..20: mol_type = genomic DNA; note = Gene: PRKCA; note = Location (start to end; relative to TSS): PRKCA_65_95; note = Orientation (relative to transcription): antisense; note = sgRNA Position: 66302684; note = Sequence Name: 56322-704_101_SL_seq_1397
ggggccggggagagtcgggc

SEQ ID NO: 1398 - DNA, 20 bp, Homo sapiens
  source 1..20: mol_type = genomic DNA; note = Gene: PRKCA; note = Location (start to end; relative to TSS): PRKCA_16_46; note = Orientation (relative to transcription): antisense; note = sgRNA Position: 66302635; note = Sequence Name: 56322-704_101_SL_seq_1398
ggagccgctggctcgcccgc

SEQ ID NO: 1399 - DNA, 20 bp, Homo sapiens
  source 1..20: mol_type = genomic DNA; note = Gene: PRKCA; note = Location (start to end; relative to TSS): PRKCA_49_79; note = Orientation (relative to transcription): antisense; note = sgRNA Position: 66302668; note = Sequence Name: 56322-704_101_SL_seq_1399
gggctggtgctgcgcggagc

SEQ ID NO: 1400 - DNA, 20 bp, Homo sapiens
  source 1..20: mol_type = genomic DNA; note = Gene: PRKCB; note = Location (start to end; relative to TSS): PRKCB_52_82; note = Orientation (relative to transcription): antisense; note = sgRNA Position: 23836041; note = Sequence Name: 56322-704_101_SL_seq_1400
ttcccctgcgccggctctgg

SEQ ID NO: 1401 - DNA, 20 bp, Homo sapiens
  source 1..20: mol_type = genomic DNA; note = Gene: PRKCB; note = Location (start to end; relative to TSS): PRKCB_85_115; note = Orientation (relative to transcription): antisense; note = sgRNA Position: 23836074; note = Sequence Name: 56322-704_101_SL_seq_1401
ggcggccgctgctgcacccg

SEQ ID NO: 1402 - DNA, 20 bp, Homo sapiens
  source 1..20: mol_type = genomic DNA; note = Gene: PRKCB; note = Location (start to end; relative to TSS): PRKCB_46_76; note = Orientation (relative to transcription): antisense; note = sgRNA Position: 23836035; note = Sequence Name: 56322-704_101_SL_seq_1402
tgcgccggctctggcggccg

SEQ ID NO: 1403 - DNA, 20 bp, Homo sapiens
  source 1..20: mol_type = genomic DNA; note = Gene: PRKCB; note = Location (start to end; relative to TSS): PRKCB_78_108; note = Orientation (relative to transcription): antisense; note = sgRNA Position: 23836067; note = Sequence Name: 56322-704_101_SL_seq_1403
gctgctgcacccggggccgc

SEQ ID NO: 1404 - DNA, 20 bp, Homo sapiens
  source 1..20: mol_type = genomic DNA; note = Gene: PRKCB; note = Location (start to end; relative to TSS): PRKCB_39_69; note = Orientation (relative to transcription): antisense; note = sgRNA Position: 23836028; note = Sequence Name: 56322-704_101_SL_seq_1404
gctctggcggccgcggcgcg

SEQ ID NO: 1405 - DNA, 20 bp, Homo sapiens
  source 1..20: mol_type = genomic DNA; note = Gene: PRKCB; note = Location (start to end; relative to TSS): PRKCB_71_101; note = Orientation (relative to transcription): sense; note = sgRNA Position: 23836080; note = Sequence Name: 56322-704_101_SL_seq_1405
cgcggccccgggtgcagcag

SEQ ID NO: 1406 - DNA, 20 bp, Homo sapiens
  source 1..20: mol_type = genomic DNA; note = Gene: PRKCB; note = Location (start to end; relative to TSS): PRKCB_31_61; note = Orientation (relative to transcription): antisense; note = sgRNA Position: 23836020; note = Sequence Name: 56322-704_101_SL_seq_1406
ggccgcggcgcgcggagccg

SEQ ID NO: 1407 - DNA, 20 bp, Homo sapiens
  source 1..20: mol_type = genomic DNA; note = Gene: PRKCB; note = Location (start to end; relative to TSS): PRKCB_61_91; note = Orientation (relative to transcription): antisense; note = sgRNA Position: 23836050; note = Sequence Name: 56322-704_101_SL_seq_1407
cgcgggcgcttcccctgcgc

SEQ ID NO: 1408 - DNA, 20 bp, Homo sapiens
  source 1..20: mol_type = genomic DNA; note = Gene: PRKCB; note = Location (start to end; relative to TSS): PRKCB_20_50; note = Orientation (relative to transcription): sense; note = sgRNA Position: 23836029; note = Sequence Name: 56322-704_101_SL_seq_1408
agccccggctccgcgcgccg

SEQ ID NO: 1409 - DNA, 20 bp, Homo sapiens
  source 1..20: mol_type = genomic DNA; note = Gene: PRKCB; note = Location (start to end; relative to TSS): PRKCB_52_82; note = Orientation (relative to transcription): antisense; note = sgRNA Position: 23836041; note = Sequence Name: 56322-704_101_SL_seq_1409
ttcccctgcgccggctctgg

SEQ ID NO: 1410 - DNA, 20 bp, Homo sapiens
  source 1..20: mol_type = genomic DNA; note = Gene: PRKCG; note = Location (start to end; relative to TSS): PRKCG_48_78; note = Orientation (relative to transcription): antisense; note = sgRNA Position: 53882251; note = Sequence Name: 56322-704_101_SL_seq_1410
gcaggggcgccggcagccgg

SEQ ID NO: 1411 - DNA, 20 bp, Homo sapiens
  source 1..20: mol_type = genomic DNA; note = Gene: PRKCG; note = Location (start to end; relative to TSS): PRKCG_79_109; note = Orientation (relative to transcription): sense; note = sgRNA Position: 53882302; note = Sequence Name: 56322-704_101_SL_seq_1411
cactcgcccgctccccctgg

SEQ ID NO: 1412 - DNA, 20 bp, Homo sapiens
  source 1..20: mol_type = genomic DNA; note = Gene: PRKCG; note = Location (start to end; relative to TSS): PRKCG_45_75; note = Orientation (relative to transcription): sense; note = sgRNA Position: 53882268; note = Sequence Name: 56322-704_101_SL_seq_1412
gctgccggcgcccctgcctt

SEQ ID NO: 1413 - DNA, 20 bp, Homo sapiens
  source 1..20: mol_type = genomic DNA; note = Gene: PRKCG; note = Location (start to end; relative to TSS): PRKCG_76_106; note = Orientation (relative to transcription): sense; note = sgRNA Position: 53882299; note = Sequence Name: 56322-704_101_SL_seq_1413
ccccactcgcccgctccccc

SEQ ID NO: 1414 - DNA, 20 bp, Homo sapiens
  source 1..20: mol_type = genomic DNA; note = Gene: PRKCG; note = Location (start to end; relative to TSS): PRKCG_39_69; note = Orientation (relative to transcription): antisense; note = sgRNA Position: 53882242; note = Sequence Name: 56322-704_101_SL_seq_1414
ccggcagccggaggcacggg

SEQ ID NO: 1415 - DNA, 20 bp, Homo sapiens
  source 1..20: mol_type = genomic DNA; note = Gene: PRKCG; note = Location (start to end; relative to TSS): PRKCG_70_100; note = Orientation (relative to transcription): antisense; note = sgRNA Position: 53882273; note = Sequence Name: 56322-704_101_SL_seq_1415
gagtggggaggaagagccaa

SEQ ID NO: 1416 - DNA, 20 bp, Homo sapiens
  source 1..20: mol_type = genomic DNA; note = Gene: PRKCG; note = Location (start to end; relative to TSS): PRKCG_23_53; note = Orientation (relative to transcription): sense; note = sgRNA Position: 53882246; note = Sequence Name: 56322-704_101_SL_seq_1416
accgccgccgcccgtgcctc

SEQ ID NO: 1417 - DNA, 20 bp, Homo sapiens
  source 1..20: mol_type = genomic DNA; note = Gene: PRKCG; note = Location (start to end; relative to TSS): PRKCG_58_88; note = Orientation (relative to transcription): antisense; note = sgRNA Position: 53882261; note = Sequence Name: 56322-704_101_SL_seq_1417
agagccaaaggcaggggcgc

SEQ ID NO: 1418 - DNA, 20 bp, Homo sapiens
  source 1..20: mol_type = genomic DNA; note = Gene: PRKCG; note = Location (start to end; relative to TSS): PRKCG_15_45; note = Orientation (relative to transcription): antisense; note = sgRNA Position: 53882218; note = Sequence Name: 56322-704_101_SL_seq_1418
ggcggtgggagctccagctc

SEQ ID NO: 1419 - DNA, 20 bp, Homo sapiens
  source 1..20: mol_type = genomic DNA; note = Gene: PRKCG; note = Location (start to end; relative to TSS): PRKCG_45_75; note = Orientation (relative to transcription): sense; note = sgRNA Position: 53882268; note = Sequence Name: 56322-704_101_SL_seq_1419
gctgccggcgcccctgcctt

SEQ ID NO: 1420 - DNA, 20 bp, Homo sapiens
  source 1..20: mol_type = genomic DNA; note = Gene: PRPF19; note = Location (start to end; relative to TSS): PRPF19_47_77; note = Orientation (relative to transcription): antisense; note = sgRNA Position: 60906534; note = Sequence Name: 56322-704_101_SL_seq_1420
gctagcgtagcgcttcacgt

SEQ ID NO: 1421 - DNA, 20 bp, Homo sapiens
  source 1..20: mol_type = genomic DNA; note = Gene: PRPF19; note = Location (start to end; relative to TSS): PRPF19_91_121; note = Orientation (relative to transcription): sense; note = sgRNA Position: 60906470; note = Sequence Name: 56322-704_101_SL_seq_1421
cggagcagtcccggcagcag

SEQ ID NO: 1422 - DNA, 20 bp, Homo sapiens
  source 1..20: mol_type = genomic DNA; note = Gene: PRPF19; note = Location (start to end; relative to TSS): PRPF19_42_72; note = Orientation (relative to transcription): antisense; note = sgRNA Position: 60906539; note = Sequence Name: 56322-704_101_SL_seq_1422
cgtagcgcttcacgtgggaa

SEQ ID NO: 1423 - DNA, 20 bp, Homo sapiens
  source 1..20: mol_type = genomic DNA; note = Gene: PRPF19; note = Location (start to end; relative to TSS): PRPF19_89_119; note = Orientation (relative to transcription): antisense; note = sgRNA Position: 60906492; note = Sequence Name: 56322-704_101_SL_seq_1423
gggactgctccgcggcgagc

SEQ ID NO: 1424 - DNA, 20 bp, Homo sapiens
  source 1..20: mol_type = genomic DNA; note = Gene: PRPF19; note = Location (start to end; relative to TSS): PRPF19_48_78; note = Orientation (relative to transcription): antisense; note = sgRNA Position: 60906533; note = Sequence Name: 56322-704_101_SL_seq_1424
tgctagcgtagcgcttcacg

SEQ ID NO: 1425 - DNA, 20 bp, Homo sapiens
  source 1..20: mol_type = genomic DNA; note = Gene: PRPF19; note = Location (start to end; relative to TSS): PRPF19_88_118; note = Orientation (relative to transcription): antisense; note = sgRNA Position: 60906493; note = Sequence Name: 56322-704_101_SL_seq_1425
ggactgctccgcggcgagct

SEQ ID NO: 1426 - DNA, 20 bp, Homo sapiens
  source 1..20: mol_type = genomic DNA; note = Gene: PRPF19; note = Location (start to end; relative to TSS): PRPF19_41_71; note = Orientation (relative to transcription): antisense; note = sgRNA Position: 60906540; note = Sequence Name: 56322-704_101_SL_seq_1426
gtagcgcttcacgtgggaat

SEQ ID NO: 1427 - DNA, 20 bp, Homo sapiens
  source 1..20: mol_type = genomic DNA; note = Gene: PRPF19; note = Location (start to end; relative to TSS): PRPF19_82_112; note = Orientation (relative to transcription): sense; note = sgRNA Position: 60906479; note = Sequence Name: 56322-704_101_SL_seq_1427
agctcgccgcggagcagtcc

SEQ ID NO: 1428 - DNA, 20 bp, Homo sapiens
  source 1..20: mol_type = genomic DNA; note = Gene: PRPF19; note = Location (start to end; relative to TSS): PRPF19_40_70; note = Orientation (relative to transcription): antisense; note = sgRNA Position: 60906541; note = Sequence Name: 56322-704_101_SL_seq_1428
tagcgcttcacgtgggaatg

SEQ ID NO: 1429 - DNA, 20 bp, Homo sapiens
  source 1..20: mol_type = genomic DNA; note = Gene: PRPF19; note = Location (start to end; relative to TSS): PRPF19_71_101; note = Orientation (relative to transcription): sense; note = sgRNA Position: 60906490; note = Sequence Name: 56322-704_101_SL_seq_1429
tggcggctcccagctcgccg

SEQ ID NO: 1430 - DNA, 20 bp, Homo sapiens
  source 1..20: mol_type = genomic DNA; note = Gene: PSMA7; note = Location (start to end; relative to TSS): PSMA7_59_89; note = Orientation (relative to transcription): sense; note = sgRNA Position: 62143311; note = Sequence Name: 56322-704_101_SL_seq_1430
ggagcccggccgccgcccgc

SEQ ID NO: 1431 - DNA, 20 bp, Homo sapiens
  source 1..20: mol_type = genomic DNA; note = Gene: PSMA7; note = Location (start to end; relative to TSS): PSMA7_114_144; note = Orientation (relative to transcription): antisense; note = sgRNA Position: 62143276; note = Sequence Name: 56322-704_101_SL_seq_1431
gtggccgtcgggcgagaaga

SEQ ID NO: 1432 - DNA, 20 bp, Homo sapiens
  source 1..20: mol_type = genomic DNA; note = Gene: PSMA7; note = Location (start to end; relative to TSS): PSMA7_31_61; note = Orientation (relative to transcription): sense; note = sgRNA Position: 62143339; note = Sequence Name: 56322-704_101_SL_seq_1432
gtgtgcgcttttgagagtcg

SEQ ID NO: 1433 - DNA, 20 bp, Homo sapiens
  source 1..20: mol_type = genomic DNA; note = Gene: PSMA7; note = Location (start to end; relative to TSS): PSMA7_84_114; note = Orientation (relative to transcription): antisense; note = sgRNA Position: 62143306; note = Sequence Name: 56322-704_101_SL_seq_1433
gcggtcgtagctcatgccgg

SEQ ID NO: 1434 - DNA, 20 bp, Homo sapiens
  source 1..20: mol_type = genomic DNA; note = Gene: PSMA7; note = Location (start to end; relative to TSS): PSMA7_45_75; note = Orientation (relative to transcription): sense; note = sgRNA Position: 62143325; note = Sequence Name: 56322-704_101_SL_seq_1434
gagtcgcggcggaaggagcc

SEQ ID NO: 1435 - DNA, 20 bp, Homo sapiens
  source 1..20: mol_type = genomic DNA; note = Gene: PSMA7; note = Location (start to end; relative to TSS): PSMA7_83_113; note = Orientation (relative to transcription): antisense; note = sgRNA Position: 62143307; note = Sequence Name: 56322-704_101_SL_seq_1435
cggtcgtagctcatgccggc

SEQ ID NO: 1436 - DNA, 20 bp, Homo sapiens
  source 1..20: mol_type = genomic DNA; note = Gene: PSMA7; note = Location (start to end; relative to TSS): PSMA7_38_68; note = Orientation (relative to transcription): sense; note = sgRNA Position: 62143332; note = Sequence Name: 56322-704_101_SL_seq_1436
cttttgagagtcgcggcgga

SEQ ID NO: 1437 - DNA, 20 bp, Homo sapiens
  source 1..20: mol_type = genomic DNA; note = Gene: PSMA7; note = Location (start to end; relative to TSS): PSMA7_80_110; note = Orientation (relative to transcription): antisense; note = sgRNA Position: 62143310; note = Sequence Name: 56322-704_101_SL_seq_1437
tcgtagctcatgccggcggg

SEQ ID NO: 1438 - DNA, 20 bp, Homo sapiens
  source 1..20: mol_type = genomic DNA; note = Gene: PSMA7; note = Location (start to end; relative to TSS): PSMA7_34_64; note = Orientation (relative to transcription): sense; note = sgRNA Position: 62143336; note = Sequence Name: 56322-704_101_SL_seq_1438
tgcgcttttgagagtcgcgg

SEQ ID NO: 1439 - DNA, 20 bp, Homo sapiens
  source 1..20: mol_type = genomic DNA; note = Gene: PSMA7; note = Location (start to end; relative to TSS): PSMA7_77_107; note = Orientation (relative to transcription): antisense; note = sgRNA Position: 62143313; note = Sequence Name: 56322-704_101_SL_seq_1439
tagctcatgccggcgggcgg

SEQ ID NO: 1440 - DNA, 20 bp, Homo sapiens
  source 1..20: mol_type = genomic DNA; note = Gene: PTK2; note = Location (start to end; relative to TSS): PTK2_41_71; note = Orientation (relative to transcription): antisense; note = sgRNA Position: 141001237; note = Sequence Name: 56322-704_101_SL_seq_1440
ggctcacagtggtccgggac

SEQ ID NO: 1441 - DNA, 20 bp, Homo sapiens
  source 1..20: mol_type = genomic DNA; note = Gene: PTK2; note = Location (start to end; relative to TSS): PTK2_113_143; note = Orientation (relative to transcription): antisense; note = sgRNA Position: 141001165; note = Sequence Name: 56322-704_101_SL_seq_1441
aagcgaaggcagacgacgac

SEQ ID NO: 1442 - DNA, 20 bp, Homo sapiens
  source 1..20: mol_type = genomic DNA; note = Gene: PTK2; note = Location (start to end; relative to TSS): PTK2_38_68; note = Orientation (relative to transcription): antisense; note = sgRNA Position: 141001240; note = Sequence Name: 56322-704_101_SL_seq_1442
tcacagtggtccgggaccgg

SEQ ID NO: 1443 - DNA, 20 bp, Homo sapiens
  source 1..20: mol_type = genomic DNA; note = Gene: PTK2; note = Location (start to end; relative to TSS): PTK2_112_142; note = Orientation (relative to transcription): antisense; note = sgRNA Position: 141001166; note = Sequence Name: 56322-704_101_SL_seq_1443
agcgaaggcagacgacgacg

SEQ ID NO: 1444 - DNA, 20 bp, Homo sapiens
  source 1..20: mol_type = genomic DNA; note = Gene: PTK2; note = Location (start to end; relative to TSS): PTK2_37_67; note = Orientation (relative to transcription): sense; note = sgRNA Position: 141001221; note = Sequence Name: 56322-704_101_SL_seq_1444
cccggaccactgtgagcccg

SEQ ID NO: 1445 - DNA, 20 bp, Homo sapiens
  source 1..20: mol_type = genomic DNA; note = Gene: PTK2; note = Location (start to end; relative to TSS): PTK2_109_139; note = Orientation (relative to transcription): antisense; note = sgRNA Position: 141001169; note = Sequence Name: 56322-704_101_SL_seq_1445
gaaggcagacgacgacgggg

SEQ ID NO: 1446 - DNA, 20 bp, Homo sapiens
  source 1..20: mol_type = genomic DNA; note = Gene: PTK2; note = Location (start to end; relative to TSS): PTK2_35_65; note = Orientation (relative to transcription): antisense; note = sgRNA Position: 141001243; note = Sequence Name: 56322-704_101_SL_seq_1446
cagtggtccgggaccggcgg

SEQ ID NO: 1447 - DNA, 20 bp, Homo sapiens
  source 1..20: mol_type = genomic DNA; note = Gene: PTK2; note = Location (start to end; relative to TSS): PTK2_102_132; note = Orientation (relative to transcription): antisense; note = sgRNA Position: 141001176; note = Sequence Name: 56322-704_101_SL_seq_1447
gacgacgacggggcggcgct

SEQ ID NO: 1448 - DNA, 20 bp, Homo sapiens
  source 1..20: mol_type = genomic DNA; note = Gene: PTK2; note = Location (start to end; relative to TSS): PTK2_29_59; note = Orientation (relative to transcription): antisense; note = sgRNA Position: 141001249; note = Sequence Name: 56322-704_101_SL_seq_1448
tccgggaccggcggcggcgg

SEQ ID NO: 1449 - DNA, 20 bp, Homo sapiens
  source 1..20: mol_type = genomic DNA; note = Gene: PTK2; note = Location (start to end; relative to TSS): PTK2_61_91; note = Orientation (relative to transcription): sense; note = sgRNA Position: 141001197; note = Sequence Name: 56322-704_101_SL_seq_1449
gtgaggcgtgggaggaagcg

SEQ ID NO: 1450 - DNA, 20 bp, Homo sapiens
  source 1..20: mol_type = genomic DNA; note = Gene: PTPN11; note = Location (start to end; relative to TSS): PTPN11_46_76; note = Orientation (relative to transcription): sense; note = sgRNA Position: 112419019; note = Sequence Name: 56322-704_101_SL_seq_1450
ccccgcgtccggtcccgagc

SEQ ID NO: 1451 - DNA, 20 bp, Homo sapiens
  source 1..20: mol_type = genomic DNA; note = Gene: PTPN11; note = Location (start to end; relative to TSS): PTPN11_81_111; note = Orientation (relative to transcription): antisense; note = sgRNA Position: 112419034; note = Sequence Name: 56322-704_101_SL_seq_1451
gtcacatcgggctggcccga

SEQ ID NO: 1452 - DNA, 20 bp, Homo sapiens
  source 1..20: mol_type = genomic DNA; note = Gene: PTPN11; note = Location (start to end; relative to TSS): PTPN11_45_75; note = Orientation (relative to transcription): sense; note = sgRNA Position: 112419018; note = Sequence Name: 56322-704_101_SL_seq_1452
gccccgcgtccggtcccgag

SEQ ID NO: 1453 - DNA, 20 bp, Homo sapiens
  source 1..20: mol_type = genomic DNA; note = Gene: PTPN11; note = Location (start to end; relative to TSS): PTPN11_78_108; note = Orientation (relative to transcription): antisense; note = sgRNA Position: 112419031; note = Sequence Name: 56322-704_101_SL_seq_1453
acatcgggctggcccgaggg

SEQ ID NO: 1454 - DNA, 20 bp, Homo sapiens
  source 1..20: mol_type = genomic DNA; note = Gene: PTPN11; note = Location (start to end; relative to TSS): PTPN11_35_65; note = Orientation (relative to transcription): sense; note = sgRNA Position: 112419008; note = Sequence Name: 56322-704_101_SL_seq_1454
ggctggctctgccccgcgtc

SEQ ID NO: 1455 - DNA, 20 bp, Homo sapiens
  source 1..20: mol_type = genomic DNA; note = Gene: PTPN11; note = Location (start to end; relative to TSS): PTPN11_68_98; note = Orientation (relative to transcription): antisense; note = sgRNA Position: 112419021; note = Sequence Name: 56322-704_101_SL_seq_1455
ggcccgagggaggcccgctc

SEQ ID NO: 1456 - DNA, 20 bp, Homo sapiens
  source 1..20: mol_type = genomic DNA; note = Gene: PTPN11; note = Location (start to end; relative to TSS): PTPN11_19_49; note = Orientation (relative to transcription): antisense; note = sgRNA Position: 112418972; note = Sequence Name: 56322-704_101_SL_seq_1456
ccgcgcacagacccccctcc

SEQ ID NO: 1457 - DNA, 20 bp, Homo sapiens
  source 1..20: mol_type = genomic DNA; note = Gene: PTPN11; note = Location (start to end; relative to TSS): PTPN11_55_85; note = Orientation (relative to transcription): antisense; note = sgRNA Position: 112419008; note = Sequence Name: 56322-704_101_SL_seq_1457
cccgctcgggaccggacgcg

SEQ ID NO: 1458 - DNA, 20 bp, Homo sapiens
  source 1..20: mol_type = genomic DNA; note = Gene: PTPN11; note = Location (start to end; relative to TSS): PTPN11_14_44; note = Orientation (relative to transcription): sense; note = sgRNA Position: 112418987; note = Sequence Name: 56322-704_101_SL_seq_1458
gaggggggtctgtgcgcggc

SEQ ID NO: 1459 - DNA, 20 bp, Homo sapiens
  source 1..20: mol_type = genomic DNA; note = Gene: PTPN11; note = Location (start to end; relative to TSS): PTPN11_46_76; note = Orientation (relative to transcription): sense; note = sgRNA Position: 112419019; note = Sequence Name: 56322-704_101_SL_seq_1459
ccccgcgtccggtcccgagc

SEQ ID NO: 1460 - DNA, 20 bp, Homo sapiens
  source 1..20: mol_type = genomic DNA; note = Gene: RAD51; note = Location (start to end; relative to TSS): RAD51_44_74; note = Orientation (relative to transcription): sense; note = sgRNA Position: 40695244; note = Sequence Name: 56322-704_101_SL_seq_1460
ggagagtgcggcgcttcccg

SEQ ID NO: 1461 - DNA, 20 bp, Homo sapiens
  source 1..20: mol_type = genomic DNA; note = Gene: RAD51; note = Location (start to end; relative to TSS): RAD51_74_104; note = Orientation (relative to transcription): sense; note = sgRNA Position: 40695274; note = Sequence Name: 56322-704_101_SL_seq_1461
ctgggaactgcaactcatct

SEQ ID NO: 1462 - DNA, 20 bp, Homo sapiens
  source 1..20: mol_type = genomic DNA; note = Gene: RAD51; note = Location (start to end; relative to TSS): RAD51_42_72; note = Orientation (relative to transcription): antisense; note = sgRNA Position: 40695222; note = Sequence Name: 56322-704_101_SL_seq_1462
gccgcactctccttagggct

SEQ ID NO: 1463 - DNA, 20 bp, Homo sapiens
  source 1..20: mol_type = genomic DNA; note = Gene: RAD51; note = Location (start to end; relative to TSS): RAD51_73_103; note = Orientation (relative to transcription): sense; note = sgRNA Position: 40695273; note = Sequence Name: 56322-704_101_SL_seq_1463
gctgggaactgcaactcatc

SEQ ID NO: 1464 - DNA, 20 bp, Homo sapiens
  source 1..20: mol_type = genomic DNA; note = Gene: RAD51; note = Location (start to end; relative to TSS): RAD51_35_65; note = Orientation (relative to transcription): antisense; note = sgRNA Position: 40695215; note = Sequence Name: 56322-704_101_SL_seq_1464
tctccttagggctcggtctc

SEQ ID NO: 1465 - DNA, 20 bp, Homo sapiens
  source 1..20: mol_type = genomic DNA; note = Gene: RAD51; note = Location (start to end; relative to TSS): RAD51_70_100; note = Orientation (relative to transcription): antisense; note = sgRNA Position: 40695250; note = Sequence Name: 56322-704_101_SL_seq_1465
cagttcccagctgcacgcct

SEQ ID NO: 1466 - DNA, 20 bp, Homo sapiens
  source 1..20: mol_type = genomic DNA; note = Gene: RAD51; note = Location (start to end; relative to TSS): RAD51_32_62; note = Orientation (relative to transcription): sense; note = sgRNA Position: 40695232; note = Sequence Name: 56322-704_101_SL_seq_1466
accgagccctaaggagagtg

SEQ ID NO: 1467 - DNA, 20 bp, Homo sapiens
  source 1..20: mol_type = genomic DNA; note = Gene: RAD51; note = Location (start to end; relative to TSS): RAD51_69_99; note = Orientation (relative to transcription): antisense; note = sgRNA Position: 40695249; note = Sequence Name: 56322-704_101_SL_seq_1467
agttcccagctgcacgcctc

SEQ ID NO: 1468 - DNA, 20 bp, Homo sapiens
  source 1..20: mol_type = genomic DNA; note = Gene: RAD51; note = Location (start to end; relative to TSS): RAD51_22_52; note = Orientation (relative to transcription): antisense; note = sgRNA Position: 40695202; note = Sequence Name: 56322-704_101_SL_seq_1468
cggtctctggccgctgcgcg

SEQ ID NO: 1469 - DNA, 20 bp, Homo sapiens
  source 1..20: mol_type = genomic DNA; note = Gene: RAD51; note = Location (start to end; relative to TSS): RAD51_56_86; note = Orientation (relative to transcription): sense; note = sgRNA Position: 40695256; note = Sequence Name: 56322-704_101_SL_seq_1469
gcttcccgaggcgtgcagct

SEQ ID NO: 1470 - DNA, 20 bp, Homo sapiens
  source 1..20: mol_type = genomic DNA; note = Gene: RAD51C; note = Location (start to end; relative to TSS): RAD51C_59_89; note = Orientation (relative to transcription): antisense; note = sgRNA Position: 58692667; note = Sequence Name: 56322-704_101_SL_seq_1470
aatcccgctgcatttcaaag

SEQ ID NO: 1471 - DNA, 20 bp, Homo sapiens
  source 1..20: mol_type = genomic DNA; note = Gene: RAD51C; note = Location (start to end; relative to TSS): RAD51C_92_122; note = Orientation (relative to transcription): antisense; note = sgRNA Position: 58692700; note = Sequence Name: 56322-704_101_SL_seq_1471
cccgcaccgctggagacagc

SEQ ID NO: 1472 - DNA, 20 bp, Homo sapiens
  source 1..20: mol_type = genomic DNA; note = Gene: RAD51C; note = Location (start to end; relative to TSS): RAD51C_46_76; note = Orientation (relative to transcription): sense; note = sgRNA Position: 58692674; note = Sequence Name: 56322-704_101_SL_seq_1472
cgttccgctttgaaatgcag

SEQ ID NO: 1473 - DNA, 20 bp, Homo sapiens
  source 1..20: mol_type = genomic DNA; note = Gene: RAD51C; note = Location (start to end; relative to TSS): RAD51C_83_113; note = Orientation (relative to transcription): sense; note = sgRNA Position: 58692711; note = Sequence Name: 56322-704_101_SL_seq_1473
cccgctgtctccagcggtgc

SEQ ID NO: 1474 - DNA, 20 bp, Homo sapiens
  source 1..20: mol_type = genomic DNA; note = Gene: RAD51C; note = Location (start to end; relative to TSS): RAD51C_47_77; note = Orientation (relative to transcription): sense; note = sgRNA Position: 58692675; note = Sequence Name: 56322-704_101_SL_seq_1474
gttccgctttgaaatgcagc

SEQ ID NO: 1475 - DNA, 20 bp, Homo sapiens
  source 1..20: mol_type = genomic DNA; note = Gene: RAD51C; note = Location (start to end; relative to TSS): RAD51C_82_112; note = Orientation (relative to transcription): sense; note = sgRNA Position: 58692710; note = Sequence Name: 56322-704_101_SL_seq_1475
tcccgctgtctccagcggtg

SEQ ID NO: 1476 - DNA, 20 bp, Homo sapiens
  source 1..20: mol_type = genomic DNA; note = Gene: RAD51C; note = Location (start to end; relative to TSS): RAD51C_19_49; note = Orientation (relative to transcription): sense; note = sgRNA Position: 58692647; note = Sequence Name: 56322-704_101_SL_seq_1476
caggtgagcctgcgatgcgc

SEQ ID NO: 1477 - DNA, 20 bp, Homo sapiens
  source 1..20: mol_type = genomic DNA; note = Gene: RAD51C; note = Location (start to end; relative to TSS): RAD51C_77_107; note = Orientation (relative to transcription): sense; note = sgRNA Position: 58692705; note = Sequence Name: 56322-704_101_SL_seq_1477
gagtttcccgctgtctccag

SEQ ID NO: 1478 - DNA, 20 bp, Homo sapiens
  source 1..20: mol_type = genomic DNA; note = Gene: RAD51C; note = Location (start to end; relative to TSS): RAD51C_18_48; note = Orientation (relative to transcription): antisense; note = sgRNA Position: 58692626; note = Sequence Name: 56322-704_101_SL_seq_1478
gcaggctcacctgctaaccc

SEQ ID NO: 1479 - DNA, 20 bp, Homo sapiens
  source 1..20: mol_type = genomic DNA; note = Gene: RAD51C; note = Location (start to end; relative to TSS): RAD51C_59_89; note = Orientation (relative to transcription): antisense; note = sgRNA Position: 58692667; note = Sequence Name: 56322-704_101_SL_seq_1479
aatcccgctgcatttcaaag

SEQ ID NO: 1480 - DNA, 20 bp, Homo sapiens
  source 1..20: mol_type = genomic DNA; note = Gene: RAD51D; note = Location (start to end; relative to TSS): RAD51D_38_68; note = Orientation (relative to transcription): sense; note = sgRNA Position: 35119798; note = Sequence Name: 56322-704_101_SL_seq_1480
gaatcccggcggatcccggg

SEQ ID NO: 1481 - DNA, 20 bp, Homo sapiens
  source 1..20: mol_type = genomic DNA; note = Gene: RAD51D; note = Location (start to end; relative to TSS): RAD51D_79_109; note = Orientation (relative to transcription): antisense; note = sgRNA Position: 35119777; note = Sequence Name: 56322-704_101_SL_seq_1481
cggcaccaagggtagggctg

SEQ ID NO: 1482 - DNA, 20 bp, Homo sapiens
  source 1..20: mol_type = genomic DNA; note = Gene: RAD51D; note = Location (start to end; relative to TSS): RAD51D_39_69; note = Orientation (relative to transcription): sense; note = sgRNA Position: 35119797; note = Sequence Name: 56322-704_101_SL_seq_1482
aatcccggcggatcccgggc

SEQ ID NO: 1483 - DNA, 20 bp, Homo sapiens
  source 1..20: mol_type = genomic DNA; note = Gene: RAD51D; note = Location (start to end; relative to TSS): RAD51D_78_108; note = Orientation (relative to transcription): antisense; note = sgRNA Position: 35119778; note = Sequence Name: 56322-704_101_SL_seq_1483
ggcaccaagggtagggctgg

SEQ ID NO: 1484 - DNA, 20 bp, Homo sapiens
  source 1..20: mol_type = genomic DNA; note = Gene: RAD51D; note = Location (start to end; relative to TSS): RAD51D_35_65; note = Orientation (relative to transcription): sense; note = sgRNA Position: 35119801; note = Sequence Name: 56322-704_101_SL_seq_1484
cgggaatcccggcggatccc

SEQ ID NO: 1485 - DNA, 20 bp, Homo sapiens
  source 1..20: mol_type = genomic DNA; note = Gene: RAD51D; note = Location (start to end; relative to TSS): RAD51D_65_95; note = Orientation (relative to transcription): sense; note = sgRNA Position: 35119771; note = Sequence Name: 56322-704_101_SL_seq_1485
atgacccccagccctaccct

SEQ ID NO: 1486 - DNA, 20 bp, Homo sapiens
  source 1..20: mol_type = genomic DNA; note = Gene: RAD51D; note = Location (start to end; relative to TSS): RAD51D_24_54; note = Orientation (relative to transcription): sense; note = sgRNA Position: 35119812; note = Sequence Name: 56322-704_101_SL_seq_1486
ggctctgggcgcgggaatcc

SEQ ID NO: 1487 - DNA, 20 bp, Homo sapiens
  source 1..20: mol_type = genomic DNA; note = Gene: RAD51D; note = Location (start to end; relative to TSS): RAD51D_62_92; note = Orientation (relative to transcription): antisense; note = sgRNA Position: 35119794; note = Sequence Name: 56322-704_101_SL_seq_1487
ctgggggtcatccgcccgcc

SEQ ID NO: 1488 - DNA, 20 bp, Homo sapiens
  source 1..20: mol_type = genomic DNA; note = Gene: RAD51D; note = Location (start to end; relative to TSS): RAD51D_27_57; note = Orientation (relative to transcription): sense; note = sgRNA Position: 35119809; note = Sequence Name: 56322-704_101_SL_seq_1488
tctgggcgcgggaatcccgg

SEQ ID NO: 1489 - DNA, 20 bp, Homo sapiens
  source 1..20: mol_type = genomic DNA; note = Gene: RAD51D; note = Location (start to end; relative to TSS): RAD51D_61_91; note = Orientation (relative to transcription): antisense; note = sgRNA Position: 35119795; note = Sequence Name: 56322-704_101_SL_seq_1489
tgggggtcatccgcccgccc

SEQ ID NO: 1490 - DNA, 20 bp, Homo sapiens
  source 1..20: mol_type = genomic DNA; note = Gene: RAF1; note = Location (start to end; relative to TSS): RAF1_34_64; note = Orientation (relative to transcription): sense; note = sgRNA Position: 12664059; note = Sequence Name: 56322-704_101_SL_seq_1490
gaggaaaacgattgtgaggc

SEQ ID NO: 1491 - DNA, 20 bp, Homo sapiens
  source 1..20: mol_type = genomic DNA; note = Gene: RAF1; note = Location (start to end; relative to TSS): RAF1_84_114; note = Orientation (relative to transcription): sense; note = sgRNA Position: 12664009; note = Sequence Name: 56322-704_101_SL_seq_1491
cccgaaaagggtcagctggc

SEQ ID NO: 1492 - DNA, 20 bp, Homo sapiens
  source 1..20: mol_type = genomic DNA; note = Gene: RAF1; note = Location (start to end; relative to TSS): RAF1_30_60; note = Orientation (relative to transcription): sense; note = sgRNA Position: 12664063; note = Sequence Name: 56322-704_101_SL_seq_1492
gtaagaggaaaacgattgtg

SEQ ID NO: 1493 - DNA, 20 bp, Homo sapiens
  source 1..20: mol_type = genomic DNA; note = Gene: RAF1; note = Location (start to end; relative to TSS): RAF1_81_111; note = Orientation (relative to transcription): antisense; note = sgRNA Position: 12664032; note = Sequence Name: 56322-704_101_SL_seq_1493
cccttttcggggcccaaaaa

SEQ ID NO: 1494 - DNA, 20 bp, Homo sapiens
  source 1..20: mol_type = genomic DNA; note = Gene: RAF1; note = Location (start to end; relative to TSS): RAF1_21_51; note = Orientation (relative to transcription): antisense; note = sgRNA Position: 12664092; note = Sequence Name: 56322-704_101_SL_seq_1494
cttactcccgccatctaaga

SEQ ID NO: 1495 - DNA, 20 bp, Homo sapiens
  source 1..20: mol_type = genomic DNA; note = Gene: RAF1; note = Location (start to end; relative to TSS): RAF1_80_110; note = Orientation (relative to transcription): sense; note = sgRNA Position: 12664013; note = Sequence Name: 56322-704_101_SL_seq_1495
gggccccgaaaagggtcagc

SEQ ID NO: 1496 - DNA, 20 bp, Homo sapiens
  source 1..20: mol_type = genomic DNA; note = Gene: RAF1; note = Location (start to end; relative to TSS): RAF1_18_48; note = Orientation (relative to transcription): antisense; note = sgRNA Position: 12664095; note = Sequence Name: 56322-704_101_SL_seq_1496
actcccgccatctaagatgg

SEQ ID NO: 1497 - DNA, 20 bp, Homo sapiens
  source 1..20: mol_type = genomic DNA; note = Gene: RAF1; note = Location (start to end; relative to TSS): RAF1_72_102; note = Orientation (relative to transcription): sense; note = sgRNA Position: 12664021; note = Sequence Name: 56322-704_101_SL_seq_1497
ccttttttgggccccgaaaa

SEQ ID NO: 1498 - DNA, 20 bp, Homo sapiens
  source 1..20: mol_type = genomic DNA; note = Gene: RAF1; note = Location (start to end; relative to TSS): RAF1_33_63; note = Orientation (relative to transcription): sense; note = sgRNA Position: 12664060; note = Sequence Name: 56322-704_101_SL_seq_1498
agaggaaaacgattgtgagg

SEQ ID NO: 1499 - DNA, 20 bp, Homo sapiens
  source 1..20: mol_type = genomic DNA; note = Gene: RAF1; note = Location (start to end; relative to TSS): RAF1_71_101; note = Orientation (relative to transcription): sense; note = sgRNA Position: 12664022; note = Sequence Name: 56322-704_101_SL_seq_1499
gccttttttgggccccgaaa

SEQ ID NO: 1500 - DNA, 20 bp, Homo sapiens
  source 1..20: mol_type = genomic DNA; note = Gene: RET; note = Location (start to end; relative to TSS): RET_59_89; note = Orientation (relative to transcription): antisense; note = sgRNA Position: 43077134; note = Sequence Name: 56322-704_101_SL_seq_1500
gcggacgcgacggacactgg

SEQ ID NO: 1501 - DNA, 20 bp, Homo sapiens
  source 1..20: mol_type = genomic DNA; note = Gene: RET; note = Location (start to end; relative to TSS): RET_113_143; note = Orientation (relative to transcription): sense; note = sgRNA Position: 43077208; note = Sequence Name: 56322-704_101_SL_seq_1501
cacccgccatccagacccgc

SEQ ID NO: 1502 - DNA, 20 bp, Homo sapiens
  source 1..20: mol_type = genomic DNA; note = Gene: RET; note = Location (start to end; relative to TSS): RET_60_90; note = Orientation (relative to transcription): antisense; note = sgRNA Position: 43077135; note = Sequence Name: 56322-704_101_SL_seq_1502
ggcggacgcgacggacactg

SEQ ID NO: 1503 - DNA, 20 bp, Homo sapiens
  source 1..20: mol_type = genomic DNA; note = Gene: RET; note = Location (start to end; relative to TSS): RET_107_137; note = Orientation (relative to transcription): antisense; note = sgRNA Position: 43077182; note = Sequence Name: 56322-704_101_SL_seq_1503
ggcgggtgcggcgctcagtc

SEQ ID NO: 1504 - DNA, 20 bp, Homo sapiens
  source 1..20: mol_type = genomic DNA; note = Gene: RET; note = Location (start to end; relative to TSS): RET_40_70; note = Orientation (relative to transcription): antisense; note = sgRNA Position: 43077115; note = Sequence Name: 56322-704_101_SL_seq_1504
ggggcgcgacgcacgttccg

SEQ ID NO: 1505 - DNA, 20 bp, Homo sapiens
  source 1..20: mol_type = genomic DNA; note = Gene: RET; note = Location (start to end; relative to TSS): RET_86_116; note = Orientation (relative to transcription): antisense; note = sgRNA Position: 43077161; note = Sequence Name: 56322-704_101_SL_seq_1505
ggccgccccatccccgcccg

SEQ ID NO: 1506 - DNA, 20 bp, Homo sapiens
  source 1..20: mol_type = genomic DNA; note = Gene: RET; note = Location (start to end; relative to TSS): RET_41_71; note = Orientation (relative to transcription): antisense; note = sgRNA Position: 43077116; note = Sequence Name: 56322-704_101_SL_seq_1506
gggggcgcgacgcacgttcc

SEQ ID NO: 1507 - DNA, 20 bp, Homo sapiens
  source 1..20: mol_type = genomic DNA; note = Gene: RET; note = Location (start to end; relative to TSS): RET_78_108; note = Orientation (relative to transcription): antisense; note = sgRNA Position: 43077153; note = Sequence Name: 56322-704_101_SL_seq_1507
catccccgcccggggcgcgg

SEQ ID NO: 1508 - DNA, 20 bp, Homo sapiens
  source 1..20: mol_type = genomic DNA; note = Gene: RET; note = Location (start to end; relative to TSS): RET_14_44; note = Orientation (relative to transcription): sense; note = sgRNA Position: 43077109; note = Sequence Name: 56322-704_101_SL_seq_1508
cgcagcagcgctgagtgccc

SEQ ID NO: 1509 - DNA, 20 bp, Homo sapiens
  source 1..20: mol_type = genomic DNA; note = Gene: RET; note = Location (start to end; relative to TSS): RET_59_89; note = Orientation (relative to transcription): antisense; note = sgRNA Position: 43077134; note = Sequence Name: 56322-704_101_SL_seq_1509
gcggacgcgacggacactgg

SEQ ID NO: 1510 - DNA, 20 bp, Homo sapiens
  source 1..20: mol_type = genomic DNA; note = Gene: ROS1; note = Location (start to end; relative to TSS): ROS1_22_52; note = Orientation (relative to transcription): sense; note = sgRNA Position: 117425896; note = Sequence Name: 56322-704_101_SL_seq_1510
ggtgactttatgggagtaaa

SEQ ID NO: 1511 - DNA, 20 bp, Homo sapiens
  source 1..20: mol_type = genomic DNA; note = Gene: ROS1; note = Location (start to end; relative to TSS): ROS1_154_184; note = Orientation (relative to transcription): antisense; note = sgRNA Position: 117425784; note = Sequence Name: 56322-704_101_SL_seq_1511
tttgtttgttttgctatatt

SEQ ID NO: 1512 - DNA, 20 bp, Homo sapiens
  source 1..20: mol_type = genomic DNA; note = Gene: ROS1; note = Location (start to end; relative to TSS): ROS1_18_48; note = Orientation (relative to transcription): antisense; note = sgRNA Position: 117425920; note = Sequence Name: 56322-704_101_SL_seq_1512
taaagtcacccagtgactaa

SEQ ID NO: 1513 - DNA, 20 bp, Homo sapiens
  source 1..20: mol_type = genomic DNA; note = Gene: ROS1; note = Location (start to end; relative to TSS): ROS1_113_143; note = Orientation (relative to transcription): sense; note = sgRNA Position: 117425805; note = Sequence Name: 56322-704_101_SL_seq_1513
aggctaagtattatttcaaa

SEQ ID NO: 1514 - DNA, 20 bp, Homo sapiens
  source 1..20: mol_type = genomic DNA; note = Gene: ROS1; note = Location (start to end; relative to TSS): ROS1_1_31; note = Orientation (relative to transcription): sense; note = sgRNA Position: 117425917; note = Sequence Name: 56322-704_101_SL_seq_1514
agaactaacctttagtcact

SEQ ID NO: 1515 - DNA, 20 bp, Homo sapiens
  source 1..20: mol_type = genomic DNA; note = Gene: ROS1; note = Location (start to end; relative to TSS): ROS1_93_123; note = Orientation (relative to transcription): sense; note = sgRNA Position: 117425825; note = Sequence Name: 56322-704_101_SL_seq_1515
ttcaaaggtctaaatgaaaa

SEQ ID NO: 1516 - DNA, 20 bp, Homo sapiens
  source 1..20: mol_type = genomic DNA; note = Gene: ROS1; note = Location (start to end; relative to TSS): ROS1_0_30; note = Orientation (relative to transcription): sense; note = sgRNA Position: 117425918; note = Sequence Name: 56322-704_101_SL_seq_1516
aagaactaacctttagtcac

SEQ ID NO: 1517 - DNA, 20 bp, Homo sapiens
  source 1..20: mol_type = genomic DNA; note = Gene: ROS1; note = Location (start to end; relative to TSS): ROS1_78_108; note = Orientation (relative to transcription): sense; note = sgRNA Position: 117425840; note = Sequence Name: 56322-704_101_SL_seq_1517
acaagctttcaagcattcaa

SEQ ID NO: 1518 - DNA, 20 bp, Homo sapiens
  source 1..20: mol_type = genomic DNA; note = Gene: ROS1; note = Location (start to end; relative to TSS): ROS1_-10_20; note = Orientation (relative to transcription): antisense; note = sgRNA Position: 117425948; note = Sequence Name: 56322-704_101_SL_seq_1518
tcttagaagtgcacttcaca

SEQ ID NO: 1519 - DNA, 20 bp, Homo sapiens
  source 1..20: mol_type = genomic DNA; note = Gene: ROS1; note = Location (start to end; relative to TSS): ROS1_22_52; note = Orientation (relative to transcription): sense; note = sgRNA Position: 117425896; note = Sequence Name: 56322-704_101_SL_seq_1519
ggtgactttatgggagtaaa

SEQ ID NO: 1520 - DNA, 20 bp, Homo sapiens
  source 1..20: mol_type = genomic DNA; note = Gene: RPL3; note = Location (start to end; relative to TSS): RPL3_35_65; note = Orientation (relative to transcription): sense; note = sgRNA Position: 39319564; note = Sequence Name: 56322-704_101_SL_seq_1520
ggcggccgtttcattgtcac

SEQ ID NO: 1521 - DNA, 20 bp, Homo sapiens
  source 1..20: mol_type = genomic DNA; note = Gene: RPL3; note = Location (start to end; relative to TSS): RPL3_92_122; note = Orientation (relative to transcription): sense; note = sgRNA Position: 39319507; note = Sequence Name: 56322-704_101_SL_seq_1521
catcccgtcttggccggcgc

SEQ ID NO: 1522 - DNA, 20 bp, Homo sapiens
  source 1..20: mol_type = genomic DNA; note = Gene: RPL3; note = Location (start to end; relative to TSS): RPL3_41_71; note = Orientation (relative to transcription): sense; note = sgRNA Position: 39319558; note = Sequence Name: 56322-704_101_SL_seq_1522
cgtttcattgtcaccggcgt

SEQ ID NO: 1523 - DNA, 20 bp, Homo sapiens
  source 1..20: mol_type = genomic DNA; note = Gene: RPL3; note = Location (start to end; relative to TSS): RPL3_86_116; note = Orientation (relative to transcription): sense; note = sgRNA Position: 39319513; note = Sequence Name: 56322-704_101_SL_seq_1523
cgccgccatcccgtcttggc

SEQ ID NO: 1524 - DNA, 20 bp, Homo sapiens
  source 1..20: mol_type = genomic DNA; note = Gene: RPL3; note = Location (start to end; relative to TSS): RPL3_46_76; note = Orientation (relative to transcription): sense; note = sgRNA Position: 39319553; note = Sequence Name: 56322-704_101_SL_seq_1524
cattgtcaccggcgtcggca

SEQ ID NO: 1525 - DNA, 20 bp, Homo sapiens
  source 1..20: mol_type = genomic DNA; note = Gene: RPL3; note = Location (start to end; relative to TSS): RPL3_84_114; note = Orientation (relative to transcription): antisense; note = sgRNA Position: 39319535; note = Sequence Name: 56322-704_101_SL_seq_1525
gggatggcggcgatgcgtcg

SEQ ID NO: 1526 - DNA, 20 bp, Homo sapiens
  source 1..20: mol_type = genomic DNA; note = Gene: RPL3; note = Location (start to end; relative to TSS): RPL3_49_79; note = Orientation (relative to transcription): antisense; note = sgRNA Position: 39319570; note = Sequence Name: 56322-704_101_SL_seq_1526
cgacgccggtgacaatgaaa

SEQ ID NO: 1527 - DNA, 20 bp, Homo sapiens
  source 1..20: mol_type = genomic DNA; note = Gene: RPL3; note = Location (start to end; relative to TSS): RPL3_82_112; note = Orientation (relative to transcription): sense; note = sgRNA Position: 39319517; note = Sequence Name: 56322-704_101_SL_seq_1527
gcatcgccgccatcccgtct

SEQ ID NO: 1528 - DNA, 20 bp, Homo sapiens
  source 1..20: mol_type = genomic DNA; note = Gene: RPL3; note = Location (start to end; relative to TSS): RPL3_17_47; note = Orientation (relative to transcription): sense; note = sgRNA Position: 39319582; note = Sequence Name: 56322-704_101_SL_seq_1528
gatggtatgtgttgtaatgg

SEQ ID NO: 1529 - DNA, 20 bp, Homo sapiens
  source 1..20: mol_type = genomic DNA; note = Gene: RPL3; note = Location (start to end; relative to TSS): RPL3_49_79; note = Orientation (relative to transcription): antisense; note = sgRNA Position: 39319570; note = Sequence Name: 56322-704_101_SL_seq_1529
cgacgccggtgacaatgaaa

SEQ ID NO: 1530 - DNA, 20 bp, Homo sapiens
  source 1..20: mol_type = genomic DNA; note = Gene: RPL8; note = Location (start to end; relative to TSS): RPL8_43_73; note = Orientation (relative to transcription): antisense; note = sgRNA Position: 144792343; note = Sequence Name: 56322-704_101_SL_seq_1530
cggatactgcccatgccgca

SEQ ID NO: 1531 - DNA, 20 bp, Homo sapiens
  source 1..20: mol_type = genomic DNA; note = Gene: RPL8; note = Location (start to end; relative to TSS): RPL8_73_103; note = Orientation (relative to transcription): antisense; note = sgRNA Position: 144792313; note = Sequence Name: 56322-704_101_SL_seq_1531
ctcagcgcgcctcacggaag

SEQ ID NO: 1532 - DNA, 20 bp, Homo sapiens
  source 1..20: mol_type = genomic DNA; note = Gene: RPL8; note = Location (start to end; relative to TSS): RPL8_35_65; note = Orientation (relative to transcription): antisense; note = sgRNA Position: 144792351; note = Sequence Name: 56322-704_101_SL_seq_1532
gcccatgccgcaaggccgca

SEQ ID NO: 1533 - DNA, 20 bp, Homo sapiens
  source 1..20: mol_type = genomic DNA; note = Gene: RPL8; note = Location (start to end; relative to TSS): RPL8_69_99; note = Orientation (relative to transcription): antisense; note = sgRNA Position: 144792317; note = Sequence Name: 56322-704_101_SL_seq_1533
gcgcgcctcacggaagagga

SEQ ID NO: 1534 - DNA, 20 bp, Homo sapiens
  source 1..20: mol_type = genomic DNA; note = Gene: RPL8; note = Location (start to end; relative to TSS): RPL8_25_55; note = Orientation (relative to transcription): sense; note = sgRNA Position: 144792341; note = Sequence Name: 56322-704_101_SL_seq_1534
tccttgcggccttgcggcat

SEQ ID NO: 1535 - DNA, 20 bp, Homo sapiens
  source 1..20: mol_type = genomic DNA; note = Gene: RPL8; note = Location (start to end; relative to TSS): RPL8_66_96; note = Orientation (relative to transcription): antisense; note = sgRNA Position: 144792320; note = Sequence Name: 56322-704_101_SL_seq_1535
cgcctcacggaagaggatgg

SEQ ID NO: 1536 - DNA, 20 bp, Homo sapiens
  source 1..20: mol_type = genomic DNA; note = Gene: RPL8; note = Location (start to end; relative to TSS): RPL8_24_54; note = Orientation (relative to transcription): sense; note = sgRNA Position: 144792342; note = Sequence Name: 56322-704_101_SL_seq_1536
atccttgcggccttgcggca

SEQ ID NO: 1537 - DNA, 20 bp, Homo sapiens
  source 1..20: mol_type = genomic DNA; note = Gene: RPL8; note = Location (start to end; relative to TSS): RPL8_63_93; note = Orientation (relative to transcription): antisense; note = sgRNA Position: 144792323; note = Sequence Name: 56322-704_101_SL_seq_1537
ctcacggaagaggatggcgg

SEQ ID NO: 1538 - DNA, 20 bp, Homo sapiens
  source 1..20: mol_type = genomic DNA; note = Gene: RPL8; note = Location (start to end; relative to TSS): RPL8_19_49; note = Orientation (relative to transcription): sense; note = sgRNA Position: 144792347; note = Sequence Name: 56322-704_101_SL_seq_1538
aggtcatccttgcggccttg

SEQ ID NO: 1539 - DNA, 20 bp, Homo sapiens
  source 1..20: mol_type = genomic DNA; note = Gene: RPL8; note = Location (start to end; relative to TSS): RPL8_55_85; note = Orientation (relative to transcription): sense; note = sgRNA Position: 144792311; note = Sequence Name: 56322-704_101_SL_seq_1539
cgccgccatcctcttccgtg

SEQ ID NO: 1540 - DNA, 20 bp, Homo sapiens
  source 1..20: mol_type = genomic DNA; note = Gene: SF3B1; note = Location (start to end; relative to TSS): SF3B1_43_73; note = Orientation (relative to transcription): antisense; note = sgRNA Position: 197434981; note = Sequence Name: 56322-704_101_SL_seq_1540
ccgcttaccttcgtgagtct

SEQ ID NO: 1541 - DNA, 20 bp, Homo sapiens
  source 1..20: mol_type = genomic DNA; note = Gene: SF3B1; note = Location (start to end; relative to TSS): SF3B1_93_123; note = Orientation (relative to transcription): sense; note = sgRNA Position: 197434911; note = Sequence Name: 56322-704_101_SL_seq_1541
taataaaagccttttttcct

SEQ ID NO: 1542 - DNA, 20 bp, Homo sapiens
  source 1..20: mol_type = genomic DNA; note = Gene: SF3B1; note = Location (start to end; relative to TSS): SF3B1_27_57; note = Orientation (relative to transcription): sense; note = sgRNA Position: 197434977; note = Sequence Name: 56322-704_101_SL_seq_1542
aagatcgccaagactcacga

SEQ ID NO: 1543 - DNA, 20 bp, Homo sapiens
  source 1..20: mol_type = genomic DNA; note = Gene: SF3B1; note = Location (start to end; relative to TSS): SF3B1_72_102; note = Orientation (relative to transcription): antisense; note = sgRNA Position: 197434952; note = Sequence Name: 56322-704_101_SL_seq_1543
aacgaagaaaacacgtaagc

SEQ ID NO: 1544 - DNA, 20 bp, Homo sapiens
  source 1..20: mol_type = genomic DNA; note = Gene: SF3B1; note = Location (start to end; relative to TSS): SF3B1_34_64; note = Orientation (relative to transcription): sense; note = sgRNA Position: 197434970; note = Sequence Name: 56322-704_101_SL_seq_1544
ccaagactcacgaaggtaag

SEQ ID NO: 1545 - DNA, 20 bp, Homo sapiens
  source 1..20: mol_type = genomic DNA; note = Gene: SF3B1; note = Location (start to end; relative to TSS): SF3B1_71_101; note = Orientation (relative to transcription): antisense; note = sgRNA Position: 197434953; note = Sequence Name: 56322-704_101_SL_seq_1545
acgaagaaaacacgtaagca

SEQ ID NO: 1546 - DNA, 20 bp, Homo sapiens
  source 1..20: mol_type = genomic DNA; note = Gene: SF3B1; note = Location (start to end; relative to TSS): SF3B1_2_32; note = Orientation (relative to transcription): sense; note = sgRNA Position: 197435002; note = Sequence Name: 56322-704_101_SL_seq_1546
gtgtgttcgagtggacaaaa

SEQ ID NO: 1547 - DNA, 20 bp, Homo sapiens
  source 1..20: mol_type = genomic DNA; note = Gene: SF3B1; note = Location (start to end; relative to TSS): SF3B1_34_64; note = Orientation (relative to transcription): sense; note = sgRNA Position: 197434970; note = Sequence Name: 56322-704_101_SL_seq_1547
ccaagactcacgaaggtaag

SEQ ID NO: 1548 - DNA, 20 bp, Homo sapiens
  source 1..20: mol_type = genomic DNA; note = Gene: SF3B1; note = Location (start to end; relative to TSS): SF3B1_-1_29; note = Orientation (relative to transcription): antisense; note = sgRNA Position: 197435025; note = Sequence Name: 56322-704_101_SL_seq_1548
ctcgaacacacagacggaac

SEQ ID NO: 1549 - DNA, 20 bp, Homo sapiens
  source 1..20: mol_type = genomic DNA; note = Gene: SF3B1; note = Location (start to end; relative to TSS): SF3B1_43_73; note = Orientation (relative to transcription): antisense; note = sgRNA Position: 197434981; note = Sequence Name: 56322-704_101_SL_seq_1549
ccgcttaccttcgtgagtct

SEQ ID NO: 1550 - DNA, 20 bp, Homo sapiens
  source 1..20: mol_type = genomic DNA; note = Gene: SF3B3; note = Location (start to end; relative to TSS): SF3B3_37_67; note = Orientation (relative to transcription): sense; note = sgRNA Position: 70523879; note = Sequence Name: 56322-704_101_SL_seq_1550
gtggtggcttaagttttgaa

SEQ ID NO: 1551 - DNA, 20 bp, Homo sapiens
  source 1..20: mol_type = genomic DNA; note = Gene: SF3B3; note = Location (start to end; relative to TSS): SF3B3_89_119; note = Orientation (relative to transcription): antisense; note = sgRNA Position: 70523911; note = Sequence Name: 56322-704_101_SL_seq_1551
ctgcagcgagaaggatggtg

SEQ ID NO: 1552 - DNA, 20 bp, Homo sapiens
  source 1..20: mol_type = genomic DNA; note = Gene: SF3B3; note = Location (start to end; relative to TSS): SF3B3_36_66; note = Orientation (relative to transcription): sense; note = sgRNA Position: 70523878; note = Sequence Name: 56322-704_101_SL_seq_1552
ggtggtggcttaagttttga

SEQ ID NO: 1553 - DNA, 20 bp, Homo sapiens
  source 1..20: mol_type = genomic DNA; note = Gene: SF3B3; note = Location (start to end; relative to TSS): SF3B3_82_112; note = Orientation (relative to transcription): sense; note = sgRNA Position: 70523924; note = Sequence Name: 56322-704_101_SL_seq_1553
acaccatccttctcgctgca

SEQ ID NO: 1554 - DNA, 20 bp, Homo sapiens
  source 1..20: mol_type = genomic DNA; note = Gene: SF3B3; note = Location (start to end; relative to TSS): SF3B3_29_59; note = Orientation (relative to transcription): antisense; note = sgRNA Position: 70523851; note = Sequence Name: 56322-704_101_SL_seq_1554
caccaccaactccaacatac

SEQ ID NO: 1555 - DNA, 20 bp, Homo sapiens
  source 1..20: mol_type = genomic DNA; note = Gene: SF3B3; note = Location (start to end; relative to TSS): SF3B3_81_111; note = Orientation (relative to transcription): sense; note = sgRNA Position: 70523923; note = Sequence Name: 56322-704_101_SL_seq_1555
cacaccatccttctcgctgc

SEQ ID NO: 1556 - DNA, 20 bp, Homo sapiens
  source 1..20: mol_type = genomic DNA; note = Gene: SF3B3; note = Location (start to end; relative to TSS): SF3B3_18_48; note = Orientation (relative to transcription): sense; note = sgRNA Position: 70523860; note = Sequence Name: 56322-704_101_SL_seq_1556
cgccagtatgttggagttgg

SEQ ID NO: 1557 - DNA, 20 bp, Homo sapiens
  source 1..20: mol_type = genomic DNA; note = Gene: SF3B3; note = Location (start to end; relative to TSS): SF3B3_78_108; note = Orientation (relative to transcription): antisense; note = sgRNA Position: 70523900; note = Sequence Name: 56322-704_101_SL_seq_1557
aggatggtgtggatatccaa

SEQ ID NO: 1558 - DNA, 20 bp, Homo sapiens
  source 1..20: mol_type = genomic DNA; note = Gene: SF3B3; note = Location (start to end; relative to TSS): SF3B3_21_51; note = Orientation (relative to transcription): sense; note = sgRNA Position: 70523863; note = Sequence Name: 56322-704_101_SL_seq_1558
cagtatgttggagttggtgg

SEQ ID NO: 1559 - DNA, 20 bp, Homo sapiens
  source 1..20: mol_type = genomic DNA; note = Gene: SF3B3; note = Location (start to end; relative to TSS): SF3B3_53_83; note = Orientation (relative to transcription): sense; note = sgRNA Position: 70523895; note = Sequence Name: 56322-704_101_SL_seq_1559
tgaagggaggtagcatccgt

SEQ ID NO: 1560 - DNA, 20 bp, Homo sapiens
  source 1..20: mol_type = genomic DNA; note = Gene: SMO; note = Location (start to end; relative to TSS): SMO_32_62; note = Orientation (relative to transcription): sense; note = sgRNA Position: 129188691; note = Sequence Name: 56322-704_101_SL_seq_1560
gtcgccggcggggagagttc

SEQ ID NO: 1561 - DNA, 20 bp, Homo sapiens
  source 1..20: mol_type = genomic DNA; note = Gene: SMO; note = Location (start to end; relative to TSS): SMO_116_146; note = Orientation (relative to transcription): sense; note = sgRNA Position: 129188775; note = Sequence Name: 56322-704_101_SL_seq_1561
cggagctgcactcgcacccc

SEQ ID NO: 1562 - DNA, 20 bp, Homo sapiens
  source 1..20: mol_type = genomic DNA; note = Gene: SMO; note = Location (start to end; relative to TSS): SMO_33_63; note = Orientation (relative to transcription): sense; note = sgRNA Position: 129188692; note = Sequence Name: 56322-704_101_SL_seq_1562
tcgccggcggggagagttcg

SEQ ID NO: 1563 - DNA, 20 bp, Homo sapiens
  source 1..20: mol_type = genomic DNA; note = Gene: SMO; note = Location (start to end; relative to TSS): SMO_100_130; note = Orientation (relative to transcription): antisense; note = sgRNA Position: 129188739; note = Sequence Name: 56322-704_101_SL_seq_1563
tccgcccccgcgccagcccg

SEQ ID NO: 1564 - DNA, 20 bp, Homo sapiens
  source 1..20: mol_type = genomic DNA; note = Gene: SMO; note = Location (start to end; relative to TSS): SMO_20_50; note = Orientation (relative to transcription): sense; note = sgRNA Position: 129188679; note = Sequence Name: 56322-704_101_SL_seq_1564
caaaggagccgggtcgccgg

SEQ ID NO: 1565 - DNA, 20 bp, Homo sapiens
  source 1..20: mol_type = genomic DNA; note = Gene: SMO; note = Location (start to end; relative to TSS): SMO_75_105; note = Orientation (relative to transcription): sense; note = sgRNA Position: 129188734; note = Sequence Name: 56322-704_101_SL_seq_1565
gaaggtggctgctgggccgc

SEQ ID NO: 1566 - DNA, 20 bp, Homo sapiens
  source 1..20: mol_type = genomic DNA; note = Gene: SMO; note = Location (start to end; relative to TSS): SMO_21_51; note = Orientation (relative to transcription): sense; note = sgRNA Position: 129188680; note = Sequence Name: 56322-704_101_SL_seq_1566
aaaggagccgggtcgccggc

SEQ ID NO: 1567 - DNA, 20 bp, Homo sapiens
  source 1..20: mol_type = genomic DNA; note = Gene: SMO; note = Location (start to end; relative to TSS): SMO_68_98; note = Orientation (relative to transcription): sense; note = sgRNA Position: 129188727; note = Sequence Name: 56322-704_101_SL_seq_1567
ctggggcgaaggtggctgct

SEQ ID NO: 1568 - DNA, 20 bp, Homo sapiens
  source 1..20: mol_type = genomic DNA; note = Gene: SMO; note = Location (start to end; relative to TSS): SMO_22_52; note = Orientation (relative to transcription): sense; note = sgRNA Position: 129188681; note = Sequence Name: 56322-704_101_SL_seq_1568
aaggagccgggtcgccggcg

SEQ ID NO: 1569 - DNA, 20 bp, Homo sapiens
  source 1..20: mol_type = genomic DNA; note = Gene: SMO; note = Location (start to end; relative to TSS): SMO_60_90; note = Orientation (relative to transcription): sense; note = sgRNA Position: 129188719; note = Sequence Name: 56322-704_101_SL_seq_1569
gcggcgcgctggggcgaagg

SEQ ID NO: 1570 - DNA, 20 bp, Homo sapiens
  source 1..20: mol_type = genomic DNA; note = Gene: SRSF2; note = Location (start to end; relative to TSS): SRSF2_32_62; note = Orientation (relative to transcription): antisense; note = sgRNA Position: 76737295; note = Sequence Name: 56322-704_101_SL_seq_1570
tgccgcagaacagcacggac

SEQ ID NO: 1571 - DNA, 20 bp, Homo sapiens
  source 1..20: mol_type = genomic DNA; note = Gene: SRSF2; note = Location (start to end; relative to TSS): SRSF2_68_98; note = Orientation (relative to transcription): sense; note = sgRNA Position: 76737239; note = Sequence Name: 56322-704_101_SL_seq_1571
gcggaaggcaactgcctgag

SEQ ID NO: 1572 - DNA, 20 bp, Homo sapiens
  source 1..20: mol_type = genomic DNA; note = Gene: SRSF2; note = Location (start to end; relative to TSS): SRSF2_33_63; note = Orientation (relative to transcription): antisense; note = sgRNA Position: 76737294; note = Sequence Name: 56322-704_101_SL_seq_1572
ttgccgcagaacagcacgga

SEQ ID NO: 1573 - DNA, 20 bp, Homo sapiens
  source 1..20: mol_type = genomic DNA; note = Gene: SRSF2; note = Location (start to end; relative to TSS): SRSF2_64_94; note = Orientation (relative to transcription): antisense; note = sgRNA Position: 76737263; note = Sequence Name: 56322-704_101_SL_seq_1573
tgccttccgcgtggggacac

SEQ ID NO: 1574 - DNA, 20 bp, Homo sapiens
  source 1..20: mol_type = genomic DNA; note = Gene: SRSF2; note = Location (start to end; relative to TSS): SRSF2_26_56; note = Orientation (relative to transcription): sense; note = sgRNA Position: 76737281; note = Sequence Name: 56322-704_101_SL_seq_1574
gtccgtgctgttctgcggca

SEQ ID NO: 1575 - DNA, 20 bp, Homo sapiens
  source 1..20: mol_type = genomic DNA; note = Gene: SRSF2; note = Location (start to end; relative to TSS): SRSF2_63_93; note = Orientation (relative to transcription): antisense; note = sgRNA Position: 76737264; note = Sequence Name: 56322-704_101_SL_seq_1575
gccttccgcgtggggacact

SEQ ID NO: 1576 - DNA, 20 bp, Homo sapiens
  source 1..20: mol_type = genomic DNA; note = Gene: SRSF2; note = Location (start to end; relative to TSS): SRSF2_21_51; note = Orientation (relative to transcription): sense; note = sgRNA Position: 76737286; note = Sequence Name: 56322-704_101_SL_seq_1576
agcccgtccgtgctgttctg

SEQ ID NO: 1577 - DNA, 20 bp, Homo sapiens
  source 1..20: mol_type = genomic DNA; note = Gene: SRSF2; note = Location (start to end; relative to TSS): SRSF2_58_88; note = Orientation (relative to transcription): antisense; note = sgRNA Position: 76737269; note = Sequence Name: 56322-704_101_SL_seq_1577
ccgcgtggggacactgggaa

SEQ ID NO: 1578 - DNA, 20 bp, Homo sapiens
  source 1..20: mol_type = genomic DNA; note = Gene: SRSF2; note = Location (start to end; relative to TSS): SRSF2_23_53; note = Orientation (relative to transcription): antisense; note = sgRNA Position: 76737304; note = Sequence Name: 56322-704_101_SL_seq_1578
acagcacggacgggctccgc

SEQ ID NO: 1579 - DNA, 20 bp, Homo sapiens
  source 1..20: mol_type = genomic DNA; note = Gene: SRSF2; note = Location (start to end; relative to TSS): SRSF2_53_83; note = Orientation (relative to transcription): sense; note = sgRNA Position: 76737254; note = Sequence Name: 56322-704_101_SL_seq_1579
tcccagtgtccccacgcgga

SEQ ID NO: 1580 - DNA, 20 bp, Homo sapiens
  source 1..20: mol_type = genomic DNA; note = Gene: TGFBR1; note = Location (start to end; relative to TSS): TGFBR1_48_78; note = Orientation (relative to transcription): sense; note = sgRNA Position: 99105187; note = Sequence Name: 56322-704_101_SL_seq_1580
gggccgggccgggccacagg

SEQ ID NO: 1581 - DNA, 20 bp, Homo sapiens
  source 1..20: mol_type = genomic DNA; note = Gene: TGFBR1; note = Location (start to end; relative to TSS): TGFBR1_91_121; note = Orientation (relative to transcription): antisense; note = sgRNA Position: 99105210; note = Sequence Name: 56322-704_101_SL_seq_1581
agcagcgaccgccgcctcca

SEQ ID NO: 1582 - DNA, 20 bp, Homo sapiens
  source 1..20: mol_type = genomic DNA; note = Gene: TGFBR1; note = Location (start to end; relative to TSS): TGFBR1_28_58; note = Orientation (relative to transcription): sense; note = sgRNA Position: 99105167; note = Sequence Name: 56322-704_101_SL_seq_1582
ggtgaggcagcggcgcggcc

SEQ ID NO: 1583 - DNA, 20 bp, Homo sapiens
  source 1..20: mol_type = genomic DNA; note = Gene: TGFBR1; note = Location (start to end; relative to TSS): TGFBR1_65_95; note = Orientation (relative to transcription): antisense; note = sgRNA Position: 99105184; note = Sequence Name: 56322-704_101_SL_seq_1583
cgccgccaccgcctgtggcc

SEQ ID NO: 1584 - DNA, 20 bp, Homo sapiens
  source 1..20: mol_type = genomic DNA; note = Gene: TGFBR1; note = Location (start to end; relative to TSS): TGFBR1_23_53; note = Orientation (relative to transcription): sense; note = sgRNA Position: 99105162; note = Sequence Name: 56322-704_101_SL_seq_1584
gctggggtgaggcagcggcg

SEQ ID NO: 1585 - DNA, 20 bp, Homo sapiens
  source 1..20: mol_type = genomic DNA; note = Gene: TGFBR1; note = Location (start to end; relative to TSS): TGFBR1_58_88; note = Orientation (relative to transcription): sense; note = sgRNA Position: 99105197; note = Sequence Name: 56322-704_101_SL_seq_1585
gggccacaggcggtggcggc

SEQ ID NO: 1586 - DNA, 20 bp, Homo sapiens
  source 1..20: mol_type = genomic DNA; note = Gene: TGFBR1; note = Location (start to end; relative to TSS): TGFBR1_18_48; note = Orientation (relative to transcription): sense; note = sgRNA Position: 99105157; note = Sequence Name: 56322-704_101_SL_seq_1586
ggtttgctggggtgaggcag

SEQ ID NO: 1587 - DNA, 20 bp, Homo sapiens
  source 1..20: mol_type = genomic DNA; note = Gene: TGFBR1; note = Location (start to end; relative to TSS): TGFBR1_55_85; note = Orientation (relative to transcription): antisense; note = sgRNA Position: 99105174; note = Sequence Name: 56322-704_101_SL_seq_1587
gcctgtggcccggcccggcc

SEQ ID NO: 1588 - DNA, 20 bp, Homo sapiens
  source 1..20: mol_type = genomic DNA; note = Gene: TGFBR1; note = Location (start to end; relative to TSS): TGFBR1_12_42; note = Orientation (relative to transcription): sense; note = sgRNA Position: 99105151; note = Sequence Name: 56322-704_101_SL_seq_1588
aggcgaggtttgctggggtg

SEQ ID NO: 1589 - DNA, 20 bp, Homo sapiens
  source 1..20: mol_type = genomic DNA; note = Gene: TGFBR1; note = Location (start to end; relative to TSS): TGFBR1_48_78; note = Orientation (relative to transcription): sense; note = sgRNA Position: 99105187; note = Sequence Name: 56322-704_101_SL_seq_1589
gggccgggccgggccacagg

SEQ ID NO: 1590 - DNA, 20 bp, Homo sapiens
  source 1..20: mol_type = genomic DNA; note = Gene: TOP2A; note = Location (start to end; relative to TSS): TOP2A_54_84; note = Orientation (relative to transcription): antisense; note = sgRNA Position: 40417838; note = Sequence Name: 56322-704_101_SL_seq_1590
ctgaaagcgactaaacaggc

SEQ ID NO: 1591 - DNA, 20 bp, Homo sapiens
  source 1..20: mol_type = genomic DNA; note = Gene: TOP2A; note = Location (start to end; relative to TSS): TOP2A_87_117; note = Orientation (relative to transcription): antisense; note = sgRNA Position: 40417805; note = Sequence Name: 56322-704_101_SL_seq_1591
ccatggtgacggtcgtgaag

SEQ ID NO: 1592 - DNA, 20 bp, Homo sapiens
  source 1..20: mol_type = genomic DNA; note = Gene: TOP2A; note = Location (start to end; relative to TSS): TOP2A_47_77; note = Orientation (relative to transcription): sense; note = sgRNA Position: 40417825; note = Sequence Name: 56322-704_101_SL_seq_1592
tgcctgtttagtcgctttca

SEQ ID NO: 1593 - DNA, 20 bp, Homo sapiens
  source 1..20: mol_type = genomic DNA; note = Gene: TOP2A; note = Location (start to end; relative to TSS): TOP2A_78_108; note = Orientation (relative to transcription): sense; note = sgRNA Position: 40417794; note = Sequence Name: 56322-704_101_SL_seq_1593
ccccttcacgaccgtcacca

SEQ ID NO: 1594 - DNA, 20 bp, Homo sapiens
  source 1..20: mol_type = genomic DNA; note = Gene: TOP2A; note = Location (start to end; relative to TSS): TOP2A_21_51; note = Orientation (relative to transcription): sense; note = sgRNA Position: 40417851; note = Sequence Name: 56322-704_101_SL_seq_1594
tggtcgggggtggtctcgtg

SEQ ID NO: 1595 - DNA, 20 bp, Homo sapiens
  source 1..20: mol_type = genomic DNA; note = Gene: TOP2A; note = Location (start to end; relative to TSS): TOP2A_58_88; note = Orientation (relative to transcription): antisense; note = sgRNA Position: 40417834; note = Sequence Name: 56322-704_101_SL_seq_1595
aaccctgaaagcgactaaac

SEQ ID NO: 1596 - DNA, 20 bp, Homo sapiens
  source 1..20: mol_type = genomic DNA; note = Gene: TOP2A; note = Location (start to end; relative to TSS): TOP2A_20_50; note = Orientation (relative to transcription): sense; note = sgRNA Position: 40417852; note = Sequence Name: 56322-704_101_SL_seq_1596
ttggtcgggggtggtctcgt

SEQ ID NO: 1597 - DNA, 20 bp, Homo sapiens
  source 1..20: mol_type = genomic DNA; note = Gene: TOP2A; note = Location (start to end; relative to TSS): TOP2A_54_84; note = Orientation (relative to transcription): antisense; note = sgRNA Position: 40417838; note = Sequence Name: 56322-704_101_SL_seq_1597
ctgaaagcgactaaacaggc

SEQ ID NO: 1598 - DNA, 20 bp, Homo sapiens
  source 1..20: mol_type = genomic DNA; note = Gene: TOP2A; note = Location (start to end; relative to TSS): TOP2A_11_41; note = Orientation (relative to transcription): sense; note = sgRNA Position: 40417861; note = Sequence Name: 56322-704_101_SL_seq_1598
agaagcggcttggtcggggg

SEQ ID NO: 1599 - DNA, 20 bp, Homo sapiens
  source 1..20: mol_type = genomic DNA; note = Gene: TOP2A; note = Location (start to end; relative to TSS): TOP2A_47_77; note = Orientation (relative to transcription): sense; note = sgRNA Position: 40417825; note = Sequence Name: 56322-704_101_SL_seq_1599
tgcctgtttagtcgctttca

SEQ ID NO: 1600 - DNA, 20 bp, Homo sapiens
  source 1..20: mol_type = genomic DNA; note = Gene: TSC1; note = Location (start to end; relative to TSS): TSC1_28_58; note = Orientation (relative to transcription): sense; note = sgRNA Position: 132944564; note = Sequence Name: 56322-704_101_SL_seq_1600
gactgtgaggtaaacagctg

SEQ ID NO: 1601 - DNA, 20 bp, Homo sapiens
  source 1..20: mol_type = genomic DNA; note = Gene: TSC1; note = Location (start to end; relative to TSS): TSC1_91_121; note = Orientation (relative to transcription): sense; note = sgRNA Position: 132944501; note = Sequence Name: 56322-704_101_SL_seq_1601
ctttttatgggggcttcctg

SEQ ID NO: 1602 - DNA, 20 bp, Homo sapiens
  source 1..20: mol_type = genomic DNA; note = Gene: TSC1; note = Location (start to end; relative to TSS): TSC1_29_59; note = Orientation (relative to transcription): sense; note = sgRNA Position: 132944563; note = Sequence Name: 56322-704_101_SL_seq_1602
actgtgaggtaaacagctga

SEQ ID NO: 1603 - DNA, 20 bp, Homo sapiens
  source 1..20: mol_type = genomic DNA; note = Gene: TSC1; note = Location (start to end; relative to TSS): TSC1_81_111; note = Orientation (relative to transcription): sense; note = sgRNA Position: 132944511; note = Sequence Name: 56322-704_101_SL_seq_1603
tctccccctcctttttatgg

SEQ ID NO: 1604 - DNA, 20 bp, Homo sapiens
  source 1..20: mol_type = genomic DNA; note = Gene: TSC1; note = Location (start to end; relative to TSS): TSC1_30_60; note = Orientation (relative to transcription): sense; note = sgRNA Position: 132944562; note = Sequence Name: 56322-704_101_SL_seq_1604
ctgtgaggtaaacagctgag

SEQ ID NO: 1605 - DNA, 20 bp, Homo sapiens
  source 1..20: mol_type = genomic DNA; note = Gene: TSC1; note = Location (start to end; relative to TSS): TSC1_80_110; note = Orientation (relative to transcription): sense; note = sgRNA Position: 132944512; note = Sequence Name: 56322-704_101_SL_seq_1605
gtctccccctcctttttatg

SEQ ID NO: 1606 - DNA, 20 bp, Homo sapiens
  source 1..20: mol_type = genomic DNA; note = Gene: TSC1; note = Location (start to end; relative to TSS): TSC1_21_51; note = Orientation (relative to transcription): antisense; note = sgRNA Position: 132944591; note = Sequence Name: 56322-704_101_SL_seq_1606
cacagtccctccagcctaca

SEQ ID NO: 1607 - DNA, 20 bp, Homo sapiens
  source 1..20: mol_type = genomic DNA; note = Gene: TSC1; note = Location (start to end; relative to TSS): TSC1_55_85; note = Orientation (relative to transcription): sense; note = sgRNA Position: 132944537; note = Sequence Name: 56322-704_101_SL_seq_1607
ggagacggtgggtgagtatg

SEQ ID NO: 1608 - DNA, 20 bp, Homo sapiens
  source 1..20: mol_type = genomic DNA; note = Gene: TSC1; note = Location (start to end; relative to TSS): TSC1_22_52; note = Orientation (relative to transcription): antisense; note = sgRNA Position: 132944590; note = Sequence Name: 56322-704_101_SL_seq_1608
tcacagtccctccagcctac

SEQ ID NO: 1609 - DNA, 20 bp, Homo sapiens
  source 1..20: mol_type = genomic DNA; note = Gene: TSC1; note = Location (start to end; relative to TSS): TSC1_54_84; note = Orientation (relative to transcription): sense; note = sgRNA Position: 132944538; note = Sequence Name: 56322-704_101_SL_seq_1609
aggagacggtgggtgagtat

SEQ ID NO: 1610 - DNA, 20 bp, Homo sapiens
  source 1..20: mol_type = genomic DNA; note = Gene: TSC2; note = Location (start to end; relative to TSS): TSC2_21_51; note = Orientation (relative to transcription): antisense; note = sgRNA Position: 2048012; note = Sequence Name: 56322-704_101_SL_seq_1610
cggagaaaggcgcacccccc

SEQ ID NO: 1611 - DNA, 20 bp, Homo sapiens
  source 1..20: mol_type = genomic DNA; note = Gene: TSC2; note = Location (start to end; relative to TSS): TSC2_69_99; note = Orientation (relative to transcription): sense; note = sgRNA Position: 2048080; note = Sequence Name: 56322-704_101_SL_seq_1611
ggggtaagtggcggtcccca

SEQ ID NO: 1612 - DNA, 20 bp, Homo sapiens
  source 1..20: mol_type = genomic DNA; note = Gene: TSC2; note = Location (start to end; relative to TSS): TSC2_23_53; note = Orientation (relative to transcription): sense; note = sgRNA Position: 2048034; note = Sequence Name: 56322-704_101_SL_seq_1612
cgcctttctccgcgtcgggg

SEQ ID NO: 1613 - DNA, 20 bp, Homo sapiens
  source 1..20: mol_type = genomic DNA; note = Gene: TSC2; note = Location (start to end; relative to TSS): TSC2_60_90; note = Orientation (relative to transcription): sense; note = sgRNA Position: 2048071; note = Sequence Name: 56322-704_101_SL_seq_1613
gcgcggcgcggggtaagtgg

SEQ ID NO: 1614 - DNA, 20 bp, Homo sapiens
  source 1..20: mol_type = genomic DNA; note = Gene: TSC2; note = Location (start to end; relative to TSS): TSC2_19_49; note = Orientation (relative to transcription): sense; note = sgRNA Position: 2048030; note = Sequence Name: 56322-704_101_SL_seq_1614
ggtgcgcctttctccgcgtc

SEQ ID NO: 1615 - DNA, 20 bp, Homo sapiens
  source 1..20: mol_type = genomic DNA; note = Gene: TSC2; note = Location (start to end; relative to TSS): TSC2_57_87; note = Orientation (relative to transcription): sense; note = sgRNA Position: 2048068; note = Sequence Name: 56322-704_101_SL_seq_1615
gtggcgcggcgcggggtaag

SEQ ID NO: 1616 - DNA, 20 bp, Homo sapiens
  source 1..20: mol_type = genomic DNA; note = Gene: TSC2; note = Location (start to end; relative to TSS): TSC2_20_50; note = Orientation (relative to transcription): sense; note = sgRNA Position: 2048031; note = Sequence Name: 56322-704_101_SL_seq_1616
gtgcgcctttctccgcgtcg

SEQ ID NO: 1617 - DNA, 20 bp, Homo sapiens
  source 1..20: mol_type = genomic DNA; note = Gene: TSC2; note = Location (start to end; relative to TSS): TSC2_50_80; note = Orientation (relative to transcription): sense; note = sgRNA Position: 2048061; note = Sequence Name: 56322-704_101_SL_seq_1617
gagcgcggtggcgcggcgcg

SEQ ID NO: 1618 - DNA, 20 bp, Homo sapiens
  source 1..20: mol_type = genomic DNA; note = Gene: TSC2; note = Location (start to end; relative to TSS): TSC2_18_48; note = Orientation (relative to transcription): sense; note = sgRNA Position: 2048029; note = Sequence Name: 56322-704_101_SL_seq_1618
gggtgcgcctttctccgcgt

SEQ ID NO: 1619 - DNA, 20 bp, Homo sapiens
  source 1..20: mol_type = genomic DNA; note = Gene: TSC2; note = Location (start to end; relative to TSS): TSC2_48_78; note = Orientation (relative to transcription): sense; note = sgRNA Position: 2048059; note = Sequence Name: 56322-704_101_SL_seq_1619
cggagcgcggtggcgcggcg

SEQ ID NO: 1620 - DNA, 20 bp, Homo sapiens
  source 1..20: mol_type = genomic DNA; note = Gene: TUBA4A; note = Location (start to end; relative to TSS): TUBA4A_33_63; note = Orientation (relative to transcription): sense; note = sgRNA Position: 219253861; note = Sequence Name: 56322-704_101_SL_seq_1620
cgcaccgcccggactcacca

SEQ ID NO: 1621 - DNA, 20 bp, Homo sapiens
  source 1..20: mol_type = genomic DNA; note = Gene: TUBA4A; note = Location (start to end; relative to TSS): TUBA4A_89_119; note = Orientation (relative to transcription): sense; note = sgRNA Position: 219253805; note = Sequence Name: 56322-704_101_SL_seq_1621
ctaattgcccctctcctttg

SEQ ID NO: 1622 - DNA, 20 bp, Homo sapiens
  source 1..20: mol_type = genomic DNA; note = Gene: TUBA4A; note = Location (start to end; relative to TSS): TUBA4A_24_54; note = Orientation (relative to transcription): antisense; note = sgRNA Position: 219253890; note = Sequence Name: 56322-704_101_SL_seq_1622
gtgcgtctcacgttgagtcg

SEQ ID NO: 1623 - DNA, 20 bp, Homo sapiens
  source 1..20: mol_type = genomic DNA; note = Gene: TUBA4A; note = Location (start to end; relative to TSS): TUBA4A_79_109; note = Orientation (relative to transcription): antisense; note = sgRNA Position: 219253835; note = Sequence Name: 56322-704_101_SL_seq_1623
ttaggggacaggcgcgaccc

SEQ ID NO: 1624 - DNA, 20 bp, Homo sapiens
  source 1..20: mol_type = genomic DNA; note = Gene: TUBA4A; note = Location (start to end; relative to TSS): TUBA4A_25_55; note = Orientation (relative to transcription): antisense; note = sgRNA Position: 219253889; note = Sequence Name: 56322-704_101_SL_seq_1624
ggtgcgtctcacgttgagtc

SEQ ID NO: 1625 - DNA, 20 bp, Homo sapiens
  source 1..20: mol_type = genomic DNA; note = Gene: TUBA4A; note = Location (start to end; relative to TSS): TUBA4A_74_104; note = Orientation (relative to transcription): antisense; note = sgRNA Position: 219253840; note = Sequence Name: 56322-704_101_SL_seq_1625
ggacaggcgcgaccccggcc

SEQ ID NO: 1626 - DNA, 20 bp, Homo sapiens
  source 1..20: mol_type = genomic DNA; note = Gene: TUBA4A; note = Location (start to end; relative to TSS): TUBA4A_26_56; note = Orientation (relative to transcription): antisense; note = sgRNA Position: 219253888; note = Sequence Name: 56322-704_101_SL_seq_1626
cggtgcgtctcacgttgagt

SEQ ID NO: 1627 - DNA, 20 bp, Homo sapiens
  source 1..20: mol_type = genomic DNA; note = Gene: TUBA4A; note = Location (start to end; relative to TSS): TUBA4A_59_89; note = Orientation (relative to transcription): antisense; note = sgRNA Position: 219253855; note = Sequence Name: 56322-704_101_SL_seq_1627
cggccgggccgcactcacca

SEQ ID NO: 1628 - DNA, 20 bp, Homo sapiens
  source 1..20: mol_type = genomic DNA; note = Gene: TUBA4A; note = Location (start to end; relative to TSS): TUBA4A_22_52; note = Orientation (relative to transcription): sense; note = sgRNA Position: 219253872; note = Sequence Name: 56322-704_101_SL_seq_1628
tcaacgtgagacgcaccgcc

SEQ ID NO: 1629 - DNA, 20 bp, Homo sapiens
  source 1..20: mol_type = genomic DNA; note = Gene: TUBA4A; note = Location (start to end; relative to TSS): TUBA4A_52_82; note = Orientation (relative to transcription): sense; note = sgRNA Position: 219253842; note = Sequence Name: 56322-704_101_SL_seq_1629
atggtgagtgcggcccggcc

SEQ ID NO: 1630 - DNA, 20 bp, Homo sapiens
  source 1..20: mol_type = genomic DNA; note = Gene: TUBB; note = Location (start to end; relative to TSS): TUBB_45_75; note = Orientation (relative to transcription): antisense; note = sgRNA Position: 30720403; note = Sequence Name: 56322-704_101_SL_seq_1630
aaggttggaatgcgccccag

SEQ ID NO: 1631 - DNA, 20 bp, Homo sapiens
  source 1..20: mol_type = genomic DNA; note = Gene: TUBB; note = Location (start to end; relative to TSS): TUBB_79_109; note = Orientation (relative to transcription): antisense; note = sgRNA Position: 30720437; note = Sequence Name: 56322-704_101_SL_seq_1631
aagtaattttttttctccgc

SEQ ID NO: 1632 - DNA, 20 bp, Homo sapiens
  source 1..20: mol_type = genomic DNA; note = Gene: TUBB; note = Location (start to end; relative to TSS): TUBB_21_51; note = Orientation (relative to transcription): sense; note = sgRNA Position: 30720399; note = Sequence Name: 56322-704_101_SL_seq_1632
acctcgctgctccagcctct

SEQ ID NO: 1633 - DNA, 20 bp, Homo sapiens
  source 1..20: mol_type = genomic DNA; note = Gene: TUBB; note = Location (start to end; relative to TSS): TUBB_64_94; note = Orientation (relative to transcription): antisense; note = sgRNA Position: 30720422; note = Sequence Name: 56322-704_101_SL_seq_1633
tccgcaggtcgcaggctgga

SEQ ID NO: 1634 - DNA, 20 bp, Homo sapiens
  source 1..20: mol_type = genomic DNA; note = Gene: TUBB; note = Location (start to end; relative to TSS): TUBB_22_52; note = Orientation (relative to transcription): sense; note = sgRNA Position: 30720400; note = Sequence Name: 56322-704_101_SL_seq_1634
cctcgctgctccagcctctg

SEQ ID NO: 1635 - DNA, 20 bp, Homo sapiens
  source 1..20: mol_type = genomic DNA; note = Gene: TUBB; note = Location (start to end; relative to TSS): TUBB_60_90; note = Orientation (relative to transcription): antisense; note = sgRNA Position: 30720418; note = Sequence Name: 56322-704_101_SL_seq_1635
caggtcgcaggctggaaggt

SEQ ID NO: 1636 - DNA, 20 bp, Homo sapiens
  source 1..20: mol_type = genomic DNA; note = Gene: TUBB; note = Location (start to end; relative to TSS): TUBB_17_47; note = Orientation (relative to transcription): antisense; note = sgRNA Position: 30720375; note = Sequence Name: 56322-704_101_SL_seq_1636
gcagcgaggtgcaaacgcga

SEQ ID NO: 1637 - DNA, 20 bp, Homo sapiens
  source 1..20: mol_type = genomic DNA; note = Gene: TUBB; note = Location (start to end; relative to TSS): TUBB_54_84; note = Orientation (relative to transcription): sense; note = sgRNA Position: 30720432; note = Sequence Name: 56322-704_101_SL_seq_1637
accttccagcctgcgacctg

SEQ ID NO: 1638 - DNA, 20 bp, Homo sapiens
  source 1..20: mol_type = genomic DNA; note = Gene: TUBB; note = Location (start to end; relative to TSS): TUBB_13_43; note = Orientation (relative to transcription): antisense; note = sgRNA Position: 30720371; note = Sequence Name: 56322-704_101_SL_seq_1638
cgaggtgcaaacgcgacggc

SEQ ID NO: 1639 - DNA, 20 bp, Homo sapiens
  source 1..20: mol_type = genomic DNA; note = Gene: TUBB; note = Location (start to end; relative to TSS): TUBB_45_75; note = Orientation (relative to transcription): antisense; note = sgRNA Position: 30720403; note = Sequence Name: 56322-704_101_SL_seq_1639
aaggttggaatgcgccccag

SEQ ID NO: 1640 - DNA, 20 bp, Homo sapiens
  source 1..20: mol_type = genomic DNA; note = Gene: TYK2; note = Location (start to end; relative to TSS): TYK2_42_72; note = Orientation (relative to transcription): sense; note = sgRNA Position: 10380506; note = Sequence Name: 56322-704_101_SL_seq_1640
ttcccccggaagggtgagtc

SEQ ID NO: 1641 - DNA, 20 bp, Homo sapiens
  source 1..20: mol_type = genomic DNA; note = Gene: TYK2; note = Location (start to end; relative to TSS): TYK2_92_122; note = Orientation (relative to transcription): sense; note = sgRNA Position: 10380456; note = Sequence Name: 56322-704_101_SL_seq_1641
aggtcctcaggaagaagccg

SEQ ID NO: 1642 - DNA, 20 bp, Homo sapiens
  source 1..20: mol_type = genomic DNA; note = Gene: TYK2; note = Location (start to end; relative to TSS): TYK2_32_62; note = Orientation (relative to transcription): sense; note = sgRNA Position: 10380516; note = Sequence Name: 56322-704_101_SL_seq_1642
cgagcttgtgttcccccgga

SEQ ID NO: 1643 - DNA, 20 bp, Homo sapiens
  source 1..20: mol_type = genomic DNA; note = Gene: TYK2; note = Location (start to end; relative to TSS): TYK2_80_110; note = Orientation (relative to transcription): sense; note = sgRNA Position: 10380468; note = Sequence Name: 56322-704_101_SL_seq_1643
gagcgcggccggaggtcctc

SEQ ID NO: 1644 - DNA, 20 bp, Homo sapiens
  source 1..20: mol_type = genomic DNA; note = Gene: TYK2; note = Location (start to end; relative to TSS): TYK2_33_63; note = Orientation (relative to transcription): sense; note = sgRNA Position: 10380515; note = Sequence Name: 56322-704_101_SL_seq_1644
gagcttgtgttcccccggaa

SEQ ID NO: 1645 - DNA, 20 bp, Homo sapiens
  source 1..20: mol_type = genomic DNA; note = Gene: TYK2; note = Location (start to end; relative to TSS): TYK2_72_102; note = Orientation (relative to transcription): sense; note = sgRNA Position: 10380476; note = Sequence Name: 56322-704_101_SL_seq_1645
cgcggaaggagcgcggccgg

SEQ ID NO: 1646 - DNA, 20 bp, Homo sapiens
  source 1..20: mol_type = genomic DNA; note = Gene: TYK2; note = Location (start to end; relative to TSS): TYK2_34_64; note = Orientation (relative to transcription): antisense; note = sgRNA Position: 10380534; note = Sequence Name: 56322-704_101_SL_seq_1646
ggggaacacaagctcgaacc

SEQ ID NO: 1647 - DNA, 20 bp, Homo sapiens
  source 1..20: mol_type = genomic DNA; note = Gene: TYK2; note = Location (start to end; relative to TSS): TYK2_65_95; note = Orientation (relative to transcription): sense; note = sgRNA Position: 10380483; note = Sequence Name: 56322-704_101_SL_seq_1647
acgcgggcgcggaaggagcg

SEQ ID NO: 1648 - DNA, 20 bp, Homo sapiens
  source 1..20: mol_type = genomic DNA; note = Gene: TYK2; note = Location (start to end; relative to TSS): TYK2_28_58; note = Orientation (relative to transcription): sense; note = sgRNA Position: 10380520; note = Sequence Name: 56322-704_101_SL_seq_1648
ggttcgagcttgtgttcccc

SEQ ID NO: 1649 - DNA, 20 bp, Homo sapiens
  source 1..20: mol_type = genomic DNA; note = Gene: TYK2; note = Location (start to end; relative to TSS): TYK2_58_88; note = Orientation (relative to transcription): sense; note = sgRNA Position: 10380490; note = Sequence Name: 56322-704_101_SL_seq_1649
agtctggacgcgggcgcgga

SEQ ID NO: 1650 - DNA, 20 bp, Homo sapiens
  source 1..20: mol_type = genomic DNA; note = Gene: TYMS; note = Location (start to end; relative to TSS): TYMS_26_56; note = Orientation (relative to transcription): antisense; note = sgRNA Position: 657685; note = Sequence Name: 56322-704_101_SL_seq_1650
cgggacggaggcaggccaag

SEQ ID NO: 1651 - DNA, 20 bp, Homo sapiens
  source 1..20: mol_type = genomic DNA; note = Gene: TYMS; note = Location (start to end; relative to TSS): TYMS_72_102; note = Orientation (relative to transcription): sense; note = sgRNA Position: 657751; note = Sequence Name: 56322-704_101_SL_seq_1651
cgccgcgccatgcctgtggc

SEQ ID NO: 1652 - DNA, 20 bp, Homo sapiens
  source 1..20: mol_type = genomic DNA; note = Gene: TYMS; note = Location (start to end; relative to TSS): TYMS_34_64; note = Orientation (relative to transcription): antisense; note = sgRNA Position: 657693; note = Sequence Name: 56322-704_101_SL_seq_1652
tggcgcggcgggacggaggc

SEQ ID NO: 1653 - DNA, 20 bp, Homo sapiens
  source 1..20: mol_type = genomic DNA; note = Gene: TYMS; note = Location (start to end; relative to TSS): TYMS_69_99; note = Orientation (relative to transcription): antisense; note = sgRNA Position: 657728; note = Sequence Name: 56322-704_101_SL_seq_1653
atggcgcggcgggcggggga

SEQ ID NO: 1654 - DNA, 20 bp, Homo sapiens
  source 1..20: mol_type = genomic DNA; note = Gene: TYMS; note = Location (start to end; relative to TSS): TYMS_38_68; note = Orientation (relative to transcription): antisense; note = sgRNA Position: 657697; note = Sequence Name: 56322-704_101_SL_seq_1654
gaagtggcgcggcgggacgg

SEQ ID NO: 1655 - DNA, 20 bp, Homo sapiens
  source 1..20: mol_type = genomic DNA; note = Gene: TYMS; note = Location (start to end; relative to TSS): TYMS_68_98; note = Orientation (relative to transcription): sense; note = sgRNA Position: 657747; note = Sequence Name: 56322-704_101_SL_seq_1655
cgcccgccgcgccatgcctg

SEQ ID NO: 1656 - DNA, 20 bp, Homo sapiens
  source 1..20: mol_type = genomic DNA; note = Gene: TYMS; note = Location (start to end; relative to TSS): TYMS_21_51; note = Orientation (relative to transcription): antisense; note = sgRNA Position: 657680; note = Sequence Name: 56322-704_101_SL_seq_1656
cggaggcaggccaagtggcg

SEQ ID NO: 1657 - DNA, 20 bp, Homo sapiens
  source 1..20: mol_type = genomic DNA; note = Gene: TYMS; note = Location (start to end; relative to TSS): TYMS_54_84; note = Orientation (relative to transcription): antisense; note = sgRNA Position: 657713; note = Sequence Name: 56322-704_101_SL_seq_1657
ggggacggaggcaggcgaag

SEQ ID NO: 1658 - DNA, 20 bp, Homo sapiens
  source 1..20: mol_type = genomic DNA; note = Gene: TYMS; note = Location (start to end; relative to TSS): TYMS_18_48; note = Orientation (relative to transcription): antisense; note = sgRNA Position: 657677; note = Sequence Name: 56322-704_101_SL_seq_1658
aggcaggccaagtggcgcgg

SEQ ID NO: 1659 - DNA, 20 bp, Homo sapiens
  source 1..20: mol_type = genomic DNA; note = Gene: TYMS; note = Location (start to end; relative to TSS): TYMS_49_79; note = Orientation (relative to transcription): antisense; note = sgRNA Position: 657708; note = Sequence Name: 56322-704_101_SL_seq_1659
cggaggcaggcgaagtggcg

SEQ ID NO: 1660 - DNA, 20 bp, Homo sapiens
  source 1..20: mol_type = genomic DNA; note = Gene: WRN; note = Location (start to end; relative to TSS): WRN_49_79; note = Orientation (relative to transcription): sense; note = sgRNA Position: 31033885; note = Sequence Name: 56322-704_101_SL_seq_1660
tgctgatttggtgtctagcc

SEQ ID NO: 1661 - DNA, 20 bp, Homo sapiens
  source 1..20: mol_type = genomic DNA; note = Gene: WRN; note = Location (start to end; relative to TSS): WRN_80_110; note = Orientation (relative to transcription): sense; note = sgRNA Position: 31033916; note = Sequence Name: 56322-704_101_SL_seq_1661
gttgcaggccctgcttgtgg

SEQ ID NO: 1662 - DNA, 20 bp, Homo sapiens
  source 1..20: mol_type = genomic DNA; note = Gene: WRN; note = Location (start to end; relative to TSS): WRN_25_55; note = Orientation (relative to transcription): antisense; note = sgRNA Position: 31033841; note = Sequence Name: 56322-704_101_SL_seq_1662
ccgcgctgccgagtacaagc

SEQ ID NO: 1663 - DNA, 20 bp, Homo sapiens
  source 1..20: mol_type = genomic DNA; note = Gene: WRN; note = Location (start to end; relative to TSS): WRN_76_106; note = Orientation (relative to transcription): antisense; note = sgRNA Position: 31033892; note = Sequence Name: 56322-704_101_SL_seq_1663
ggcctgcaacccaggcatcc

SEQ ID NO: 1664 - DNA, 20 bp, Homo sapiens
  source 1..20: mol_type = genomic DNA; note = Gene: WRN; note = Location (start to end; relative to TSS): WRN_17_47; note = Orientation (relative to transcription): sense; note = sgRNA Position: 31033853; note = Sequence Name: 56322-704_101_SL_seq_1664
cggcttgtactcggcagcgc

SEQ ID NO: 1665 - DNA, 20 bp, Homo sapiens
  source 1..20: mol_type = genomic DNA; note = Gene: WRN; note = Location (start to end; relative to TSS): WRN_58_88; note = Orientation (relative to transcription): sense; note = sgRNA Position: 31033894; note = Sequence Name: 56322-704_101_SL_seq_1665
ggtgtctagcctggatgcct

SEQ ID NO: 1666 - DNA, 20 bp, Homo sapiens
  source 1..20: mol_type = genomic DNA; note = Gene: WRN; note = Location (start to end; relative to TSS): WRN_16_46; note = Orientation (relative to transcription): sense; note = sgRNA Position: 31033852; note = Sequence Name: 56322-704_101_SL_seq_1666
ccggcttgtactcggcagcg

SEQ ID NO: 1667 - DNA, 20 bp, Homo sapiens
  source 1..20: mol_type = genomic DNA; note = Gene: WRN; note = Location (start to end; relative to TSS): WRN_57_87; note = Orientation (relative to transcription): sense; note = sgRNA Position: 31033893; note = Sequence Name: 56322-704_101_SL_seq_1667
tggtgtctagcctggatgcc

SEQ ID NO: 1668 - DNA, 20 bp, Homo sapiens
  source 1..20: mol_type = genomic DNA; note = Gene: WRN; note = Location (start to end; relative to TSS): WRN_14_44; note = Orientation (relative to transcription): antisense; note = sgRNA Position: 31033830; note = Sequence Name: 56322-704_101_SL_seq_1668
agtacaagccggcgcctccc

SEQ ID NO: 1669 - DNA, 20 bp, Homo sapiens
  source 1..20: mol_type = genomic DNA; note = Gene: WRN; note = Location (start to end; relative to TSS): WRN_49_79; note = Orientation (relative to transcription): sense; note = sgRNA Position: 31033885; note = Sequence Name: 56322-704_101_SL_seq_1669
tgctgatttggtgtctagcc

SEQ ID NO: 1670 - DNA, 20 bp, Homo sapiens
  source 1..20: mol_type = genomic DNA; note = Gene: AAK1; note = Location (start to end; relative to TSS): AAK1_47_77; note = Orientation (relative to transcription): antisense; note = sgRNA Position: 69643688; note = Sequence Name: 56322-704_101_SL_seq_1670
gcgagagccggggccgcgct

SEQ ID NO: 1671 - DNA, 20 bp, Homo sapiens
  source 1..20: mol_type = genomic DNA; note = Gene: AAK1; note = Location (start to end; relative to TSS): AAK1_80_110; note = Orientation (relative to transcription): sense; note = sgRNA Position: 69643635; note = Sequence Name: 56322-704_101_SL_seq_1671
tgcgtcgcaggccggcccgg

SEQ ID NO: 1672 - DNA, 20 bp, Homo sapiens
  source 1..20: mol_type = genomic DNA; note = Gene: AAK1; note = Location (start to end; relative to TSS): AAK1_19_49; note = Orientation (relative to transcription): antisense; note = sgRNA Position: 69643716; note = Sequence Name: 56322-704_101_SL_seq_1672
gcccgcccgccagctgatcc

SEQ ID NO: 1673 - DNA, 20 bp, Homo sapiens
  source 1..20: mol_type = genomic DNA; note = Gene: AAK1; note = Location (start to end; relative to TSS): AAK1_68_98; note = Orientation (relative to transcription): sense; note = sgRNA Position: 69643647; note = Sequence Name: 56322-704_101_SL_seq_1673
ccgcctcttctctgcgtcgc

SEQ ID NO: 1674 - DNA, 20 bp, Homo sapiens
  source 1..20: mol_type = genomic DNA; note = Gene: AAK1; note = Location (start to end; relative to TSS): AAK1_18_48; note = Orientation (relative to transcription): antisense; note = sgRNA Position: 69643717; note = Sequence Name: 56322-704_101_SL_seq_1674
cccgcccgccagctgatccc

SEQ ID NO: 1675 - DNA, 20 bp, Homo sapiens
  source 1..20: mol_type = genomic DNA; note = Gene: AAK1; note = Location (start to end; relative to TSS): AAK1_59_89; note = Orientation (relative to transcription): antisense; note = sgRNA Position: 69643676; note = Sequence Name: 56322-704_101_SL_seq_1675
ggcggcgctgcagcgagagc

SEQ ID NO: 1676 - DNA, 20 bp, Homo sapiens
  source 1..20: mol_type = genomic DNA; note = Gene: AAK1; note = Location (start to end; relative to TSS): AAK1_25_55; note = Orientation (relative to transcription): sense; note = sgRNA Position: 69643690; note = Sequence Name: 56322-704_101_SL_seq_1676
gggcgggcgggagccgagcg

SEQ ID NO: 1677 - DNA, 20 bp, Homo sapiens
  source 1..20: mol_type = genomic DNA; note = Gene: AAK1; note = Location (start to end; relative to TSS): AAK1_57_87; note = Orientation (relative to transcription): antisense; note = sgRNA Position: 69643678; note = Sequence Name: 56322-704_101_SL_seq_1677
cggcgctgcagcgagagccg

SEQ ID NO: 1678 - DNA, 20 bp, Homo sapiens
  source 1..20: mol_type = genomic DNA; note = Gene: AAK1; note = Location (start to end; relative to TSS): AAK1_13_43; note = Orientation (relative to transcription): sense; note = sgRNA Position: 69643702; note = Sequence Name: 56322-704_101_SL_seq_1678
ggatcagctggcgggcgggc

SEQ ID NO: 1679 - DNA, 20 bp, Homo sapiens
  source 1..20: mol_type = genomic DNA; note = Gene: AAK1; note = Location (start to end; relative to TSS): AAK1_47_77; note = Orientation (relative to transcription): antisense; note = sgRNA Position: 69643688; note = Sequence Name: 56322-704_101_SL_seq_1679
gcgagagccggggccgcgct

SEQ ID NO: 1680 - DNA, 20 bp, Homo sapiens
  source 1..20: mol_type = genomic DNA; note = Gene: AATK; note = Location (start to end; relative to TSS): AATK_46_76; note = Orientation (relative to transcription): antisense; note = sgRNA Position: 81166171; note = Sequence Name: 56322-704_101_SL_seq_1680
gggggcggcggcgacagacg

SEQ ID NO: 1681 - DNA, 20 bp, Homo sapiens
  source 1..20: mol_type = genomic DNA; note = Gene: AATK; note = Location (start to end; relative to TSS): AATK_116_146; note = Orientation (relative to transcription): antisense; note = sgRNA Position: 81166101; note = Sequence Name: 56322-704_101_SL_seq_1681
gccgcaggtgcggagcgcgc

SEQ ID NO: 1682 - DNA, 20 bp, Homo sapiens
  source 1..20: mol_type = genomic DNA; note = Gene: AATK; note = Location (start to end; relative to TSS): AATK_42_72; note = Orientation (relative to transcription): sense; note = sgRNA Position: 81166155; note = Sequence Name: 56322-704_101_SL_seq_1682
tctgtcgccgccgcccccac

SEQ ID NO: 1683 - DNA, 20 bp, Homo sapiens
  source 1..20: mol_type = genomic DNA; note = Gene: AATK; note = Location (start to end; relative to TSS): AATK_109_139; note = Orientation (relative to transcription): sense; note = sgRNA Position: 81166088; note = Sequence Name: 56322-704_101_SL_seq_1683
ggcgcgctccgcacctgcgg

SEQ ID NO: 1684 - DNA, 20 bp, Homo sapiens
  source 1..20: mol_type = genomic DNA; note = Gene: AATK; note = Location (start to end; relative to TSS): AATK_34_64; note = Orientation (relative to transcription): antisense; note = sgRNA Position: 81166183; note = Sequence Name: 56322-704_101_SL_seq_1684
gacagacgaggcgctccgcc

SEQ ID NO: 1685 - DNA, 20 bp, Homo sapiens
  source 1..20: mol_type = genomic DNA; note = Gene: AATK; note = Location (start to end; relative to TSS): AATK_106_136; note = Orientation (relative to transcription): sense; note = sgRNA Position: 81166091; note = Sequence Name: 56322-704_101_SL_seq_1685
gccggcgcgctccgcacctg

SEQ ID NO: 1686 - DNA, 20 bp, Homo sapiens
  source 1..20: mol_type = genomic DNA; note = Gene: AATK; note = Location (start to end; relative to TSS): AATK_28_58; note = Orientation (relative to transcription): antisense; note = sgRNA Position: 81166189; note = Sequence Name: 56322-704_101_SL_seq_1686
cgaggcgctccgcccggccc

SEQ ID NO: 1687 - DNA, 20 bp, Homo sapiens
  source 1..20: mol_type = genomic DNA; note = Gene: AATK; note = Location (start to end; relative to TSS): AATK_58_88; note = Orientation (relative to transcription): antisense; note = sgRNA Position: 81166159; note = Sequence Name: 56322-704_101_SL_seq_1687
gcccgcaccggtgggggcgg

SEQ ID NO: 1688 - DNA, 20 bp, Homo sapiens
  source 1..20: mol_type = genomic DNA; note = Gene: AATK; note = Location (start to end; relative to TSS): AATK_18_48; note = Orientation (relative to transcription): antisense; note = sgRNA Position: 81166199; note = Sequence Name: 56322-704_101_SL_seq_1688
cgcccggccctggcgccgcg

SEQ ID NO: 1689 - DNA, 20 bp, Homo sapiens
  source 1..20: mol_type = genomic DNA; note = Gene: AATK; note = Location (start to end; relative to TSS): AATK_48_78; note = Orientation (relative to transcription): sense; note = sgRNA Position: 81166149; note = Sequence Name: 56322-704_101_SL_seq_1689
gccgccgcccccaccggtgc

SEQ ID NO: 1690 - DNA, 20 bp, Homo sapiens
  source 1..20: mol_type = genomic DNA; note = Gene: ABL1; note = Location (start to end; relative to TSS): ABL1_41_71; note = Orientation (relative to transcription): antisense; note = sgRNA Position: 130835301; note = Sequence Name: 56322-704_101_SL_seq_1690
cgcgcgcccgcgcccgccca

SEQ ID NO: 1691 - DNA, 20 bp, Homo sapiens
  source 1..20: mol_type = genomic DNA; note = Gene: ABL1; note = Location (start to end; relative to TSS): ABL1_122_152; note = Orientation (relative to transcription): antisense; note = sgRNA Position: 130835382; note = Sequence Name: 56322-704_101_SL_seq_1691
ccgcgggcccggctcaggcc

SEQ ID NO: 1692 - DNA, 20 bp, Homo sapiens
  source 1..20: mol_type = genomic DNA; note = Gene: ABL1; note = Location (start to end; relative to TSS): ABL1_19_49; note = Orientation (relative to transcription): sense; note = sgRNA Position: 130835299; note = Sequence Name: 56322-704_101_SL_seq_1692
gacgcggccgcggccatggg

SEQ ID NO: 1693 - DNA, 20 bp, Homo sapiens
  source 1..20: mol_type = genomic DNA; note = Gene: ABL1; note = Location (start to end; relative to TSS): ABL1_117_147; note = Orientation (relative to transcription): antisense; note = sgRNA Position: 130835377; note = Sequence Name: 56322-704_101_SL_seq_1693
ggcccggctcaggcccggct

SEQ ID NO: 1694 - DNA, 20 bp, Homo sapiens
  source 1..20: mol_type = genomic DNA; note = Gene: ABL1; note = Location (start to end; relative to TSS): ABL1_47_77; note = Orientation (relative to transcription): sense; note = sgRNA Position: 130835327; note = Sequence Name: 56322-704_101_SL_seq_1694
ggcgcgcggggcggcggtga

SEQ ID NO: 1695 - DNA, 20 bp, Homo sapiens
  source 1..20: mol_type = genomic DNA; note = Gene: ABL1; note = Location (start to end; relative to TSS): ABL1_113_143; note = Orientation (relative to transcription): sense; note = sgRNA Position: 130835393; note = Sequence Name: 56322-704_101_SL_seq_1695
ccgggcctgagccgggcccg

SEQ ID NO: 1696 - DNA, 20 bp, Homo sapiens
  source 1..20: mol_type = genomic DNA; note = Gene: ABL1; note = Location (start to end; relative to TSS): ABL1_14_44; note = Orientation (relative to transcription): antisense; note = sgRNA Position: 130835274; note = Sequence Name: 56322-704_101_SL_seq_1696
ggccgcgtctccgcctggcc

SEQ ID NO: 1697 - DNA, 20 bp, Homo sapiens
  source 1..20: mol_type = genomic DNA; note = Gene: ABL1; note = Location (start to end; relative to TSS): ABL1_47_77; note = Orientation (relative to transcription): sense; note = sgRNA Position: 130835327; note = Sequence Name: 56322-704_101_SL_seq_1697
ggcgcgcggggcggcggtga

SEQ ID NO: 1698 - DNA, 20 bp, Homo sapiens
  source 1..20: mol_type = genomic DNA; note = Gene: ABL1; note = Location (start to end; relative to TSS): ABL1_9_39; note = Orientation (relative to transcription): sense; note = sgRNA Position: 130835289; note = Sequence Name: 56322-704_101_SL_seq_1698
gccaggcggagacgcggccg

SEQ ID NO: 1699 - DNA, 20 bp, Homo sapiens
  source 1..20: mol_type = genomic DNA; note = Gene: ABL1; note = Location (start to end; relative to TSS): ABL1_41_71; note = Orientation (relative to transcription): antisense; note = sgRNA Position: 130835301; note = Sequence Name: 56322-704_101_SL_seq_1699
cgcgcgcccgcgcccgccca

SEQ ID NO: 1700 - DNA, 20 bp, Homo sapiens
  source 1..20: mol_type = genomic DNA; note = Gene: ABL2; note = Location (start to end; relative to TSS): ABL2_45_75; note = Orientation (relative to transcription): sense; note = sgRNA Position: 179229608; note = Sequence Name: 56322-704_101_SL_seq_1700
gcggagccgcgacaggagga

SEQ ID NO: 1701 - DNA, 20 bp, Homo sapiens
  source 1..20: mol_type = genomic DNA; note = Gene: ABL2; note = Location (start to end; relative to TSS): ABL2_85_115; note = Orientation (relative to transcription): sense; note = sgRNA Position: 179229568; note = Sequence Name: 56322-704_101_SL_seq_1701
gtcgcctggaggcagcgcgg

SEQ ID NO: 1702 - DNA, 20 bp, Homo sapiens
  source 1..20: mol_type = genomic DNA; note = Gene: ABL2; note = Location (start to end; relative to TSS): ABL2_44_74; note = Orientation (relative to transcription): sense; note = sgRNA Position: 179229609; note = Sequence Name: 56322-704_101_SL_seq_1702
cgcggagccgcgacaggagg

SEQ ID NO: 1703 - DNA, 20 bp, Homo sapiens
  source 1..20: mol_type = genomic DNA; note = Gene: ABL2; note = Location (start to end; relative to TSS): ABL2_82_112; note = Orientation (relative to transcription): sense; note = sgRNA Position: 179229571; note = Sequence Name: 56322-704_101_SL_seq_1703
tgagtcgcctggaggcagcg

SEQ ID NO: 1704 - DNA, 20 bp, Homo sapiens
  source 1..20: mol_type = genomic DNA; note = Gene: ABL2; note = Location (start to end; relative to TSS): ABL2_41_71; note = Orientation (relative to transcription): sense; note = sgRNA Position: 179229612; note = Sequence Name: 56322-704_101_SL_seq_1704
gggcgcggagccgcgacagg

SEQ ID NO: 1705 - DNA, 20 bp, Homo sapiens
  source 1..20: mol_type = genomic DNA; note = Gene: ABL2; note = Location (start to end; relative to TSS): ABL2_74_104; note = Orientation (relative to transcription): sense; note = sgRNA Position: 179229579; note = Sequence Name: 56322-704_101_SL_seq_1705
agaatctgtgagtcgcctgg

SEQ ID NO: 1706 - DNA, 20 bp, Homo sapiens
  source 1..20: mol_type = genomic DNA; note = Gene: ABL2; note = Location (start to end; relative to TSS): ABL2_38_68; note = Orientation (relative to transcription): sense; note = sgRNA Position: 179229615; note = Sequence Name: 56322-704_101_SL_seq_1706
tgggggcgcggagccgcgac

SEQ ID NO: 1707 - DNA, 20 bp, Homo sapiens
  source 1..20: mol_type = genomic DNA; note = Gene: ABL2; note = Location (start to end; relative to TSS): ABL2_71_101; note = Orientation (relative to transcription): sense; note = sgRNA Position: 179229582; note = Sequence Name: 56322-704_101_SL_seq_1707
agcagaatctgtgagtcgcc

SEQ ID NO: 1708 - DNA, 20 bp, Homo sapiens
  source 1..20: mol_type = genomic DNA; note = Gene: ABL2; note = Location (start to end; relative to TSS): ABL2_21_51; note = Orientation (relative to transcription): sense; note = sgRNA Position: 179229632; note = Sequence Name: 56322-704_101_SL_seq_1708
ggcggcggcggcggcgttgg

SEQ ID NO: 1709 - DNA, 20 bp, Homo sapiens
  source 1..20: mol_type = genomic DNA; note = Gene: ABL2; note = Location (start to end; relative to TSS): ABL2_60_90; note = Orientation (relative to transcription): antisense; note = sgRNA Position: 179229613; note = Sequence Name: 56322-704_101_SL_seq_1709
gcttttccctcctcctgtcg

SEQ ID NO: 1710 - DNA, 20 bp, Homo sapiens
  source 1..20: mol_type = genomic DNA; note = Gene: ABR; note = Location (start to end; relative to TSS): ABR_26_56; note = Orientation (relative to transcription): sense; note = sgRNA Position: 1179931; note = Sequence Name: 56322-704_101_SL_seq_1710
cgcggccgctggggccggga

SEQ ID NO: 1711 - DNA, 20 bp, Homo sapiens
  source 1..20: mol_type = genomic DNA; note = Gene: ABR; note = Location (start to end; relative to TSS): ABR_96_126; note = Orientation (relative to transcription): sense; note = sgRNA Position: 1179861; note = Sequence Name: 56322-704_101_SL_seq_1711
gccgccccgcgctcctcccg

SEQ ID NO: 1712 - DNA, 20 bp, Homo sapiens
  source 1..20: mol_type = genomic DNA; note = Gene: ABR; note = Location (start to end; relative to TSS): ABR_40_70; note = Orientation (relative to transcription): antisense; note = sgRNA Position: 1179937; note = Sequence Name: 56322-704_101_SL_seq_1712
ccgaaccctcccggccccag

SEQ ID NO: 1713 - DNA, 20 bp, Homo sapiens
  source 1..20: mol_type = genomic DNA; note = Gene: ABR; note = Location (start to end; relative to TSS): ABR_95_125; note = Orientation (relative to transcription): sense; note = sgRNA Position: 1179862; note = Sequence Name: 56322-704_101_SL_seq_1713
ggccgccccgcgctcctccc

SEQ ID NO: 1714 - DNA, 20 bp, Homo sapiens
  source 1..20: mol_type = genomic DNA; note = Gene: ABR; note = Location (start to end; relative to TSS): ABR_36_66; note = Orientation (relative to transcription): sense; note = sgRNA Position: 1179921; note = Sequence Name: 56322-704_101_SL_seq_1714
ggggccgggagggttcggga

SEQ ID NO: 1715 - DNA, 20 bp, Homo sapiens
  source 1..20: mol_type = genomic DNA; note = Gene: ABR; note = Location (start to end; relative to TSS): ABR_79_109; note = Orientation (relative to transcription): antisense; note = sgRNA Position: 1179898; note = Sequence Name: 56322-704_101_SL_seq_1715
ggcaggggcgagggcggggc

SEQ ID NO: 1716 - DNA, 20 bp, Homo sapiens
  source 1..20: mol_type = genomic DNA; note = Gene: ABR; note = Location (start to end; relative to TSS): ABR_35_65; note = Orientation (relative to transcription): sense; note = sgRNA Position: 1179922; note = Sequence Name: 56322-704_101_SL_seq_1716
tggggccgggagggttcggg

SEQ ID NO: 1717 - DNA, 20 bp, Homo sapiens
  source 1..20: mol_type = genomic DNA; note = Gene: ABR; note = Location (start to end; relative to TSS): ABR_74_104; note = Orientation (relative to transcription): sense; note = sgRNA Position: 1179883; note = Sequence Name: 56322-704_101_SL_seq_1717
ccccgccctcgcccctgccc

SEQ ID NO: 1718 - DNA, 20 bp, Homo sapiens
  source 1..20: mol_type = genomic DNA; note = Gene: ABR; note = Location (start to end; relative to TSS): ABR_19_49; note = Orientation (relative to transcription): antisense; note = sgRNA Position: 1179958; note = Sequence Name: 56322-704_101_SL_seq_1718
ggccgcgccgagcccagctg

SEQ ID NO: 1719 - DNA, 20 bp, Homo sapiens
  source 1..20: mol_type = genomic DNA; note = Gene: ABR; note = Location (start to end; relative to TSS): ABR_49_79; note = Orientation (relative to transcription): antisense; note = sgRNA Position: 1179928; note = Sequence Name: 56322-704_101_SL_seq_1719
aaaaccctcccgaaccctcc

SEQ ID NO: 1720 - DNA, 20 bp, Homo sapiens
  source 1..20: mol_type = genomic DNA; note = Gene: ACVR1; note = Location (start to end; relative to TSS): ACVR1_18_48; note = Orientation (relative to transcription): sense; note = sgRNA Position: 157876288; note = Sequence Name: 56322-704_101_SL_seq_1720
cagcctccccctcggcgcag

SEQ ID NO: 1721 - DNA, 20 bp, Homo sapiens
  source 1..20: mol_type = genomic DNA; note = Gene: ACVR1; note = Location (start to end; relative to TSS): ACVR1_77_107; note = Orientation (relative to transcription): sense; note = sgRNA Position: 157876229; note = Sequence Name: 56322-704_101_SL_seq_1721
cccccgggggcaagcccagc

SEQ ID NO: 1722 - DNA, 20 bp, Homo sapiens
  source 1..20: mol_type = genomic DNA; note = Gene: ACVR1; note = Location (start to end; relative to TSS): ACVR1_19_49; note = Orientation (relative to transcription): sense; note = sgRNA Position: 157876287; note = Sequence Name: 56322-704_101_SL_seq_1722
agcctccccctcggcgcagg

SEQ ID NO: 1723 - DNA, 20 bp, Homo sapiens
  source 1..20: mol_type = genomic DNA; note = Gene: ACVR1; note = Location (start to end; relative to TSS): ACVR1_64_94; note = Orientation (relative to transcription): sense; note = sgRNA Position: 157876242; note = Sequence Name: 56322-704_101_SL_seq_1723
gtctcccccgccgcccccgg

SEQ ID NO: 1724 - DNA, 20 bp, Homo sapiens
  source 1..20: mol_type = genomic DNA; note = Gene: ACVR1; note = Location (start to end; relative to TSS): ACVR1_30_60; note = Orientation (relative to transcription): antisense; note = sgRNA Position: 157876296; note = Sequence Name: 56322-704_101_SL_seq_1724
ttccccctgcgccgaggggg

SEQ ID NO: 1725 - DNA, 20 bp, Homo sapiens
  source 1..20: mol_type = genomic DNA; note = Gene: ACVR1; note = Location (start to end; relative to TSS): ACVR1_63_93; note = Orientation (relative to transcription): sense; note = sgRNA Position: 157876243; note = Sequence Name: 56322-704_101_SL_seq_1725
ggtctcccccgccgcccccg

SEQ ID NO: 1726 - DNA, 20 bp, Homo sapiens
  source 1..20: mol_type = genomic DNA; note = Gene: ACVR1; note = Location (start to end; relative to TSS): ACVR1_21_51; note = Orientation (relative to transcription): antisense; note = sgRNA Position: 157876305; note = Sequence Name: 56322-704_101_SL_seq_1726
cgccgagggggaggctgcgg

SEQ ID NO: 1727 - DNA, 20 bp, Homo sapiens
  source 1..20: mol_type = genomic DNA; note = Gene: ACVR1; note = Location (start to end; relative to TSS): ACVR1_62_92; note = Orientation (relative to transcription): sense; note = sgRNA Position: 157876244; note = Sequence Name: 56322-704_101_SL_seq_1727
cggtctcccccgccgccccc

SEQ ID NO: 1728 - DNA, 20 bp, Homo sapiens
  source 1..20: mol_type = genomic DNA; note = Gene: ACVR1; note = Location (start to end; relative to TSS): ACVR1_24_54; note = Orientation (relative to transcription): antisense; note = sgRNA Position: 157876302; note = Sequence Name: 56322-704_101_SL_seq_1728
ctgcgccgagggggaggctg

SEQ ID NO: 1729 - DNA, 20 bp, Homo sapiens
  source 1..20: mol_type = genomic DNA; note = Gene: ACVR1; note = Location (start to end; relative to TSS): ACVR1_61_91; note = Orientation (relative to transcription): sense; note = sgRNA Position: 157876245; note = Sequence Name: 56322-704_101_SL_seq_1729
acggtctcccccgccgcccc

SEQ ID NO: 1730 - DNA, 20 bp, Homo sapiens
  source 1..20: mol_type = genomic DNA; note = Gene: ACVR1B; note = Location (start to end; relative to TSS): ACVR1B_30_60; note = Orientation (relative to transcription): sense; note = sgRNA Position: 51951755; note = Sequence Name: 56322-704_101_SL_seq_1730
gttactatggcggagtcggc

SEQ ID NO: 1731 - DNA, 20 bp, Homo sapiens
  source 1..20: mol_type = genomic DNA; note = Gene: ACVR1B; note = Location (start to end; relative to TSS): ACVR1B_72_102; note = Orientation (relative to transcription): sense; note = sgRNA Position: 51951797; note = Sequence Name: 56322-704_101_SL_seq_1731
cttgttgtcctcctgctcgc

SEQ ID NO: 1732 - DNA, 20 bp, Homo sapiens
  source 1..20: mol_type = genomic DNA; note = Gene: ACVR1B; note = Location (start to end; relative to TSS): ACVR1B_20_50; note = Orientation (relative to transcription): sense; note = sgRNA Position: 51951745; note = Sequence Name: 56322-704_101_SL_seq_1732
ggcggcggtggttactatgg

SEQ ID NO: 1733 - DNA, 20 bp, Homo sapiens
  source 1..20: mol_type = genomic DNA; note = Gene: ACVR1B; note = Location (start to end; relative to TSS): ACVR1B_70_100; note = Orientation (relative to transcription): antisense; note = sgRNA Position: 51951775; note = Sequence Name: 56322-704_101_SL_seq_1733
gaggacaacaagggggaaga

SEQ ID NO: 1734 - DNA, 20 bp, Homo sapiens
  source 1..20: mol_type = genomic DNA; note = Gene: ACVR1B; note = Location (start to end; relative to TSS): ACVR1B_26_56; note = Orientation (relative to transcription): sense; note = sgRNA Position: 51951751; note = Sequence Name: 56322-704_101_SL_seq_1734
ggtggttactatggcggagt

SEQ ID NO: 1735 - DNA, 20 bp, Homo sapiens
  source 1..20: mol_type = genomic DNA; note = Gene: ACVR1B; note = Location (start to end; relative to TSS): ACVR1B_67_97; note = Orientation (relative to transcription): antisense; note = sgRNA Position: 51951772; note = Sequence Name: 56322-704_101_SL_seq_1735
gacaacaagggggaagaagg

SEQ ID NO: 1736 - DNA, 20 bp, Homo sapiens
  source 1..20: mol_type = genomic DNA; note = Gene: ACVR1B; note = Location (start to end; relative to TSS): ACVR1B_17_47; note = Orientation (relative to transcription): sense; note = sgRNA Position: 51951742; note = Sequence Name: 56322-704_101_SL_seq_1736
ggcggcggcggtggttacta

SEQ ID NO: 1737 - DNA, 20 bp, Homo sapiens
  source 1..20: mol_type = genomic DNA; note = Gene: ACVR1B; note = Location (start to end; relative to TSS): ACVR1B_64_94; note = Orientation (relative to transcription): antisense; note = sgRNA Position: 51951769; note = Sequence Name: 56322-704_101_SL_seq_1737
aacaagggggaagaaggagg

SEQ ID NO: 1738 - DNA, 20 bp, Homo sapiens
  source 1..20: mol_type = genomic DNA; note = Gene: ACVR1B; note = Location (start to end; relative to TSS): ACVR1B_8_38; note = Orientation (relative to transcription): sense; note = sgRNA Position: 51951733; note = Sequence Name: 56322-704_101_SL_seq_1738
ggcggcggcggcggcggcgg

SEQ ID NO: 1739 - DNA, 20 bp, Homo sapiens
  source 1..20: mol_type = genomic DNA; note = Gene: ACVR1B; note = Location (start to end; relative to TSS): ACVR1B_58_88; note = Orientation (relative to transcription): antisense; note = sgRNA Position: 51951763; note = Sequence Name: 56322-704_101_SL_seq_1739
ggggaagaaggaggaggctc

SEQ ID NO: 1740 - DNA, 20 bp, Homo sapiens
  source 1..20: mol_type = genomic DNA; note = Gene: ACVR1C; note = Location (start to end; relative to TSS): ACVR1C_28_58; note = Orientation (relative to transcription): antisense; note = sgRNA Position: 157628832; note = Sequence Name: 56322-704_101_SL_seq_1740
cccccatcccacgccccctg

SEQ ID NO: 1741 - DNA, 20 bp, Homo sapiens
  source 1..20: mol_type = genomic DNA; note = Gene: ACVR1C; note = Location (start to end; relative to TSS): ACVR1C_81_111; note = Orientation (relative to transcription): sense; note = sgRNA Position: 157628759; note = Sequence Name: 56322-704_101_SL_seq_1741
cgcgcacttcaaaagggtgt

SEQ ID NO: 1742 - DNA, 20 bp, Homo sapiens
  source 1..20: mol_type = genomic DNA; note = Gene: ACVR1C; note = Location (start to end; relative to TSS): ACVR1C_27_57; note = Orientation (relative to transcription): sense; note = sgRNA Position: 157628813; note = Sequence Name: 56322-704_101_SL_seq_1742
ggcgtgggatgggggcggcc

SEQ ID NO: 1743 - DNA, 20 bp, Homo sapiens
  source 1..20: mol_type = genomic DNA; note = Gene: ACVR1C; note = Location (start to end; relative to TSS): ACVR1C_75_105; note = Orientation (relative to transcription): sense; note = sgRNA Position: 157628765; note = Sequence Name: 56322-704_101_SL_seq_1743
gccaaccgcgcacttcaaaa

SEQ ID NO: 1744 - DNA, 20 bp, Homo sapiens
  source 1..20: mol_type = genomic DNA; note = Gene: ACVR1C; note = Location (start to end; relative to TSS): ACVR1C_24_54; note = Orientation (relative to transcription): antisense; note = sgRNA Position: 157628836; note = Sequence Name: 56322-704_101_SL_seq_1744
catcccacgccccctgcggc

SEQ ID NO: 1745 - DNA, 20 bp, Homo sapiens
  source 1..20: mol_type = genomic DNA; note = Gene: ACVR1C; note = Location (start to end; relative to TSS): ACVR1C_70_100; note = Orientation (relative to transcription): antisense; note = sgRNA Position: 157628790; note = Sequence Name: 56322-704_101_SL_seq_1745
gcggttggctctagtcagtg

SEQ ID NO: 1746 - DNA, 20 bp, Homo sapiens
  source 1..20: mol_type = genomic DNA; note = Gene: ACVR1C; note = Location (start to end; relative to TSS): ACVR1C_22_52; note = Orientation (relative to transcription): sense; note = sgRNA Position: 157628818; note = Sequence Name: 56322-704_101_SL_seq_1746
cagggggcgtgggatggggg

SEQ ID NO: 1747 - DNA, 20 bp, Homo sapiens
  source 1..20: mol_type = genomic DNA; note = Gene: ACVR1C; note = Location (start to end; relative to TSS): ACVR1C_69_99; note = Orientation (relative to transcription): antisense; note = sgRNA Position: 157628791; note = Sequence Name: 56322-704_101_SL_seq_1747
cggttggctctagtcagtgt

SEQ ID NO: 1748 - DNA, 20 bp, Homo sapiens
  source 1..20: mol_type = genomic DNA; note = Gene: ACVR1C; note = Location (start to end; relative to TSS): ACVR1C_21_51; note = Orientation (relative to transcription): antisense; note = sgRNA Position: 157628839; note = Sequence Name: 56322-704_101_SL_seq_1748
cccacgccccctgcggctgg

SEQ ID NO: 1749 - DNA, 20 bp, Homo sapiens
  source 1..20: mol_type = genomic DNA; note = Gene: ACVR1C; note = Location (start to end; relative to TSS): ACVR1C_54_84; note = Orientation (relative to transcription): antisense; note = sgRNA Position: 157628806; note = Sequence Name: 56322-704_101_SL_seq_1749
agtgtgggcgcccccctccc

SEQ ID NO: 1750 - DNA, 20 bp, Homo sapiens
  source 1..20: mol_type = genomic DNA; note = Gene: ACVR2A; note = Location (start to end; relative to TSS): ACVR2A_66_96; note = Orientation (relative to transcription): antisense; note = sgRNA Position: 147845101; note = Sequence Name: 56322-704_101_SL_seq_1750
cgctagatatccagttccct

SEQ ID NO: 1751 - DNA, 20 bp, Homo sapiens
  source 1..20: mol_type = genomic DNA; note = Gene: ACVR2A; note = Location (start to end; relative to TSS): ACVR2A_96_126; note = Orientation (relative to transcription): antisense; note = sgRNA Position: 147845131; note = Sequence Name: 56322-704_101_SL_seq_1751
cgaggcgccggggaatccgg

SEQ ID NO: 1752 - DNA, 20 bp, Homo sapiens
  source 1..20: mol_type = genomic DNA; note = Gene: ACVR2A; note = Location (start to end; relative to TSS): ACVR2A_30_60; note = Orientation (relative to transcription): sense; note = sgRNA Position: 147845085; note = Sequence Name: 56322-704_101_SL_seq_1752
caccaggaggtttgtctccg

SEQ ID NO: 1753 - DNA, 20 bp, Homo sapiens
  source 1..20: mol_type = genomic DNA; note = Gene: ACVR2A; note = Location (start to end; relative to TSS): ACVR2A_80_110; note = Orientation (relative to transcription): sense; note = sgRNA Position: 147845135; note = Sequence Name: 56322-704_101_SL_seq_1753
agaacttcctccggattccc

SEQ ID NO: 1754 - DNA, 20 bp, Homo sapiens
  source 1..20: mol_type = genomic DNA; note = Gene: ACVR2A; note = Location (start to end; relative to TSS): ACVR2A_17_47; note = Orientation (relative to transcription): sense; note = sgRNA Position: 147845072; note = Sequence Name: 56322-704_101_SL_seq_1754
acggttgattttacaccagg

SEQ ID NO: 1755 - DNA, 20 bp, Homo sapiens
  source 1..20: mol_type = genomic DNA; note = Gene: ACVR2A; note = Location (start to end; relative to TSS): ACVR2A_71_101; note = Orientation (relative to transcription): sense; note = sgRNA Position: 147845126; note = Sequence Name: 56322-704_101_SL_seq_1755
tatctagcgagaacttcctc

SEQ ID NO: 1756 - DNA, 20 bp, Homo sapiens
  source 1..20: mol_type = genomic DNA; note = Gene: ACVR2A; note = Location (start to end; relative to TSS): ACVR2A_14_44; note = Orientation (relative to transcription): sense; note = sgRNA Position: 147845069; note = Sequence Name: 56322-704_101_SL_seq_1756
atgacggttgattttacacc

SEQ ID NO: 1757 - DNA, 20 bp, Homo sapiens
  source 1..20: mol_type = genomic DNA; note = Gene: ACVR2A; note = Location (start to end; relative to TSS): ACVR2A_67_97; note = Orientation (relative to transcription): antisense; note = sgRNA Position: 147845102; note = Sequence Name: 56322-704_101_SL_seq_1757
tcgctagatatccagttccc

SEQ ID NO: 1758 - DNA, 20 bp, Homo sapiens
  source 1..20: mol_type = genomic DNA; note = Gene: ACVR2A; note = Location (start to end; relative to TSS): ACVR2A_10_40; note = Orientation (relative to transcription): antisense; note = sgRNA Position: 147845045; note = Sequence Name: 56322-704_101_SL_seq_1758
caaccgtcataaaacatatt

SEQ ID NO: 1759 - DNA, 20 bp, Homo sapiens
  source 1..20: mol_type = genomic DNA; note = Gene: ACVR2A; note = Location (start to end; relative to TSS): ACVR2A_66_96; note = Orientation (relative to transcription): antisense; note = sgRNA Position: 147845101; note = Sequence Name: 56322-704_101_SL_seq_1759
cgctagatatccagttccct

SEQ ID NO: 1760 - DNA, 20 bp, Homo sapiens
  source 1..20: mol_type = genomic DNA; note = Gene: ACVR2B; note = Location (start to end; relative to TSS): ACVR2B_51_81; note = Orientation (relative to transcription): sense; note = sgRNA Position: 38453967; note = Sequence Name: 56322-704_101_SL_seq_1760
cccacccctccccccgttca

SEQ ID NO: 1761 - DNA, 20 bp, Homo sapiens
  source 1..20: mol_type = genomic DNA; note = Gene: ACVR2B; note = Location (start to end; relative to TSS): ACVR2B_81_111; note = Orientation (relative to transcription): sense; note = sgRNA Position: 38453997; note = Sequence Name: 56322-704_101_SL_seq_1761
ggactcggcccctgcgcccg

SEQ ID NO: 1762 - DNA, 20 bp, Homo sapiens
  source 1..20: mol_type = genomic DNA; note = Gene: ACVR2B; note = Location (start to end; relative to TSS): ACVR2B_29_59; note = Orientation (relative to transcription): antisense; note = sgRNA Position: 38453925; note = Sequence Name: 56322-704_101_SL_seq_1762
gagctgaaccgagtccaaaa

SEQ ID NO: 1763 - DNA, 20 bp, Homo sapiens
  source 1..20: mol_type = genomic DNA; note = Gene: ACVR2B; note = Location (start to end; relative to TSS): ACVR2B_60_90; note = Orientation (relative to transcription): sense; note = sgRNA Position: 38453976; note = Sequence Name: 56322-704_101_SL_seq_1763
ccccccgttcatggcccctc

SEQ ID NO: 1764 - DNA, 20 bp, Homo sapiens
  source 1..20: mol_type = genomic DNA; note = Gene: ACVR2B; note = Location (start to end; relative to TSS): ACVR2B_18_48; note = Orientation (relative to transcription): antisense; note = sgRNA Position: 38453914; note = Sequence Name: 56322-704_101_SL_seq_1764
agtccaaaatggctcctgag

SEQ ID NO: 1765 - DNA, 20 bp, Homo sapiens
  source 1..20: mol_type = genomic DNA; note = Gene: ACVR2B; note = Location (start to end; relative to TSS): ACVR2B_57_87; note = Orientation (relative to transcription): antisense; note = sgRNA Position: 38453953; note = Sequence Name: 56322-704_101_SL_seq_1765
tgaacggggggaggggtggg

SEQ ID NO: 1766 - DNA, 20 bp, Homo sapiens
  source 1..20: mol_type = genomic DNA; note = Gene: ACVR2B; note = Location (start to end; relative to TSS): ACVR2B_15_45; note = Orientation (relative to transcription): antisense; note = sgRNA Position: 38453911; note = Sequence Name: 56322-704_101_SL_seq_1766
ccaaaatggctcctgagcgg

SEQ ID NO: 1767 - DNA, 20 bp, Homo sapiens
  source 1..20: mol_type = genomic DNA; note = Gene: ACVR2B; note = Location (start to end; relative to TSS): ACVR2B_56_86; note = Orientation (relative to transcription): antisense; note = sgRNA Position: 38453952; note = Sequence Name: 56322-704_101_SL_seq_1767
gaacggggggaggggtgggg

SEQ ID NO: 1768 - DNA, 20 bp, Homo sapiens
  source 1..20: mol_type = genomic DNA; note = Gene: ACVR2B; note = Location (start to end; relative to TSS): ACVR2B_12_42; note = Orientation (relative to transcription): sense; note = sgRNA Position: 38453928; note = Sequence Name: 56322-704_101_SL_seq_1768
ctcaggagccattttggact

SEQ ID NO: 1769 - DNA, 20 bp, Homo sapiens
  source 1..20: mol_type = genomic DNA; note = Gene: ACVR2B; note = Location (start to end; relative to TSS): ACVR2B_51_81; note = Orientation (relative to transcription): sense; note = sgRNA Position: 38453967; note = Sequence Name: 56322-704_101_SL_seq_1769
cccacccctccccccgttca

SEQ ID NO: 1770 - DNA, 20 bp, Homo sapiens
  source 1..20: mol_type = genomic DNA; note = Gene: ACVRL1; note = Location (start to end; relative to TSS): ACVRL1_47_77; note = Orientation (relative to transcription): antisense; note = sgRNA Position: 51907557; note = Sequence Name: 56322-704_101_SL_seq_1770
ccccggaccgggctggagcc

SEQ ID NO: 1771 - DNA, 20 bp, Homo sapiens
  source 1..20: mol_type = genomic DNA; note = Gene: ACVRL1; note = Location (start to end; relative to TSS): ACVRL1_81_111; note = Orientation (relative to transcription): antisense; note = sgRNA Position: 51907591; note = Sequence Name: 56322-704_101_SL_seq_1771
cagcgctggacggcgggctg

SEQ ID NO: 1772 - DNA, 20 bp, Homo sapiens
  source 1..20: mol_type = genomic DNA; note = Gene: ACVRL1; note = Location (start to end; relative to TSS): ACVRL1_32_62; note = Orientation (relative to transcription): antisense; note = sgRNA Position: 51907542; note = Sequence Name: 56322-704_101_SL_seq_1772
gagccggggaggggctcgct

SEQ ID NO: 1773 - DNA, 20 bp, Homo sapiens
  source 1..20: mol_type = genomic DNA; note = Gene: ACVRL1; note = Location (start to end; relative to TSS): ACVRL1_73_103; note = Orientation (relative to transcription): sense; note = sgRNA Position: 51907603; note = Sequence Name: 56322-704_101_SL_seq_1773
cccagcccgccgtccagcgc

SEQ ID NO: 1774 - DNA, 20 bp, Homo sapiens
  source 1..20: mol_type = genomic DNA; note = Gene: ACVRL1; note = Location (start to end; relative to TSS): ACVRL1_31_61; note = Orientation (relative to transcription): sense; note = sgRNA Position: 51907561; note = Sequence Name: 56322-704_101_SL_seq_1774
gcccctccccggctccagcc

SEQ ID NO: 1775 - DNA, 20 bp, Homo sapiens
  source 1..20: mol_type = genomic DNA; note = Gene: ACVRL1; note = Location (start to end; relative to TSS): ACVRL1_64_94; note = Orientation (relative to transcription): antisense; note = sgRNA Position: 51907574; note = Sequence Name: 56322-704_101_SL_seq_1775
ctggggtccgggcgcggccc

SEQ ID NO: 1776 - DNA, 20 bp, Homo sapiens
  source 1..20: mol_type = genomic DNA; note = Gene: ACVRL1; note = Location (start to end; relative to TSS): ACVRL1_20_50; note = Orientation (relative to transcription): sense; note = sgRNA Position: 51907550; note = Sequence Name: 56322-704_101_SL_seq_1776
gcgccgagcgagcccctccc

SEQ ID NO: 1777 - DNA, 20 bp, Homo sapiens
  source 1..20: mol_type = genomic DNA; note = Gene: ACVRL1; note = Location (start to end; relative to TSS): ACVRL1_54_84; note = Orientation (relative to transcription): antisense; note = sgRNA Position: 51907564; note = Sequence Name: 56322-704_101_SL_seq_1777
ggcgcggccccggaccgggc

SEQ ID NO: 1778 - DNA, 20 bp, Homo sapiens
  source 1..20: mol_type = genomic DNA; note = Gene: ACVRL1; note = Location (start to end; relative to TSS): ACVRL1_18_48; note = Orientation (relative to transcription): antisense; note = sgRNA Position: 51907528; note = Sequence Name: 56322-704_101_SL_seq_1778
ctcgctcggcgcagctggcg

SEQ ID NO: 1779 - DNA, 20 bp, Homo sapiens
  source 1..20: mol_type = genomic DNA; note = Gene: ACVRL1; note = Location (start to end; relative to TSS): ACVRL1_48_78; note = Orientation (relative to transcription): sense; note = sgRNA Position: 51907578; note = Sequence Name: 56322-704_101_SL_seq_1779
gcccggtccggggccgcgcc

SEQ ID NO: 1780 - DNA, 20 bp, Homo sapiens
  source 1..20: mol_type = genomic DNA; note = Gene: ADCK1; note = Location (start to end; relative to TSS): ADCK1_31_61; note = Orientation (relative to transcription): sense; note = sgRNA Position: 77800166; note = Sequence Name: 56322-704_101_SL_seq_1780
ccgcggctctgcttccctcg

SEQ ID NO: 1781 - DNA, 20 bp, Homo sapiens
  source 1..20: mol_type = genomic DNA; note = Gene: ADCK1; note = Location (start to end; relative to TSS): ADCK1_89_119; note = Orientation (relative to transcription): sense; note = sgRNA Position: 77800224; note = Sequence Name: 56322-704_101_SL_seq_1781
ctcgggccgaccagcctggc

SEQ ID NO: 1782 - DNA, 20 bp, Homo sapiens
  source 1..20: mol_type = genomic DNA; note = Gene: ADCK1; note = Location (start to end; relative to TSS): ADCK1_39_69; note = Orientation (relative to transcription): sense; note = sgRNA Position: 77800174; note = Sequence Name: 56322-704_101_SL_seq_1782
ctgcttccctcggggtgagt

SEQ ID NO: 1783 - DNA, 20 bp, Homo sapiens
  source 1..20: mol_type = genomic DNA; note = Gene: ADCK1; note = Location (start to end; relative to TSS): ADCK1_87_117; note = Orientation (relative to transcription): antisense; note = sgRNA Position: 77800202; note = Sequence Name: 56322-704_101_SL_seq_1783
ggtcggcccgagctctgcgc

SEQ ID NO: 1784 - DNA, 20 bp, Homo sapiens
  source 1..20: mol_type = genomic DNA; note = Gene: ADCK1; note = Location (start to end; relative to TSS): ADCK1_41_71; note = Orientation (relative to transcription): sense; note = sgRNA Position: 77800176; note = Sequence Name: 56322-704_101_SL_seq_1784
gcttccctcggggtgagtag

SEQ ID NO: 1785 - DNA, 20 bp, Homo sapiens
  source 1..20: mol_type = genomic DNA; note = Gene: ADCK1; note = Location (start to end; relative to TSS): ADCK1_85_115; note = Orientation (relative to transcription): sense; note = sgRNA Position: 77800220; note = Sequence Name: 56322-704_101_SL_seq_1785
agagctcgggccgaccagcc

SEQ ID NO: 1786 - DNA, 20 bp, Homo sapiens
  source 1..20: mol_type = genomic DNA; note = Gene: ADCK1; note = Location (start to end; relative to TSS): ADCK1_30_60; note = Orientation (relative to transcription): sense; note = sgRNA Position: 77800165; note = Sequence Name: 56322-704_101_SL_seq_1786
gccgcggctctgcttccctc

SEQ ID NO: 1787 - DNA, 20 bp, Homo sapiens
  source 1..20: mol_type = genomic DNA; note = Gene: ADCK1; note = Location (start to end; relative to TSS): ADCK1_80_110; note = Orientation (relative to transcription): antisense; note = sgRNA Position: 77800195; note = Sequence Name: 56322-704_101_SL_seq_1787
ccgagctctgcgccggcctc

SEQ ID NO: 1788 - DNA, 20 bp, Homo sapiens
  source 1..20: mol_type = genomic DNA; note = Gene: ADCK1; note = Location (start to end; relative to TSS): ADCK1_29_59; note = Orientation (relative to transcription): sense; note = sgRNA Position: 77800164; note = Sequence Name: 56322-704_101_SL_seq_1788
cgccgcggctctgcttccct

SEQ ID NO: 1789 - DNA, 20 bp, Homo sapiens
  source 1..20: mol_type = genomic DNA; note = Gene: ADCK1; note = Location (start to end; relative to TSS): ADCK1_59_89; note = Orientation (relative to transcription): sense; note = sgRNA Position: 77800194; note = Sequence Name: 56322-704_101_SL_seq_1789
aggggcagctcgccggaggc

SEQ ID NO: 1790 - DNA, 20 bp, Homo sapiens
  source 1..20: mol_type = genomic DNA; note = Gene: ADCK2; note = Location (start to end; relative to TSS): ADCK2_47_77; note = Orientation (relative to transcription): sense; note = sgRNA Position: 140673018; note = Sequence Name: 56322-704_101_SL_seq_1790
ggcccctgcctccgcccgcg

SEQ ID NO: 1791 - DNA, 20 bp, Homo sapiens
  source 1..20: mol_type = genomic DNA; note = Gene: ADCK2; note = Location (start to end; relative to TSS): ADCK2_77_107; note = Orientation (relative to transcription): sense; note = sgRNA Position: 140673048; note = Sequence Name: 56322-704_101_SL_seq_1791
gctcaggtcgcgggcgcccg

SEQ ID NO: 1792 - DNA, 20 bp, Homo sapiens
  source 1..20: mol_type = genomic DNA; note = Gene: ADCK2; note = Location (start to end; relative to TSS): ADCK2_42_72; note = Orientation (relative to transcription): antisense; note = sgRNA Position: 140672993; note = Sequence Name: 56322-704_101_SL_seq_1792
gcaggggccgggcagccgca

SEQ ID NO: 1793 - DNA, 20 bp, Homo sapiens
  source 1..20: mol_type = genomic DNA; note = Gene: ADCK2; note = Location (start to end; relative to TSS): ADCK2_75_105; note = Orientation (relative to transcription): sense; note = sgRNA Position: 140673046; note = Sequence Name: 56322-704_101_SL_seq_1793
tcgctcaggtcgcgggcgcc

SEQ ID NO: 1794 - DNA, 20 bp, Homo sapiens
  source 1..20: mol_type = genomic DNA; note = Gene: ADCK2; note = Location (start to end; relative to TSS): ADCK2_24_54; note = Orientation (relative to transcription): antisense; note = sgRNA Position: 140672975; note = Sequence Name: 56322-704_101_SL_seq_1794
cagggtcaccgtgcgcccag

SEQ ID NO: 1795 - DNA, 20 bp, Homo sapiens
  source 1..20: mol_type = genomic DNA; note = Gene: ADCK2; note = Location (start to end; relative to TSS): ADCK2_68_98; note = Orientation (relative to transcription): sense; note = sgRNA Position: 140673039; note = Sequence Name: 56322-704_101_SL_seq_1795
ggccccctcgctcaggtcgc

SEQ ID NO: 1796 - DNA, 20 bp, Homo sapiens
  source 1..20: mol_type = genomic DNA; note = Gene: ADCK2; note = Location (start to end; relative to TSS): ADCK2_18_48; note = Orientation (relative to transcription): sense; note = sgRNA Position: 140672989; note = Sequence Name: 56322-704_101_SL_seq_1796
ctgggcgcacggtgaccctg

SEQ ID NO: 1797 - DNA, 20 bp, Homo sapiens
  source 1..20: mol_type = genomic DNA; note = Gene: ADCK2; note = Location (start to end; relative to TSS): ADCK2_67_97; note = Orientation (relative to transcription): antisense; note = sgRNA Position: 140673018; note = Sequence Name: 56322-704_101_SL_seq_1797
gagcgagggggccgcgcggg

SEQ ID NO: 1798 - DNA, 20 bp, Homo sapiens
  source 1..20: mol_type = genomic DNA; note = Gene: ADCK2; note = Location (start to end; relative to TSS): ADCK2_26_56; note = Orientation (relative to transcription): sense; note = sgRNA Position: 140672997; note = Sequence Name: 56322-704_101_SL_seq_1798
acggtgaccctgcggctgcc

SEQ ID NO: 1799 - DNA, 20 bp, Homo sapiens
  source 1..20: mol_type = genomic DNA; note = Gene: ADCK2; note = Location (start to end; relative to TSS): ADCK2_61_91; note = Orientation (relative to transcription): sense; note = sgRNA Position: 140673032; note = Sequence Name: 56322-704_101_SL_seq_1799
cccgcgcggccccctcgctc

SEQ ID NO: 1800 - DNA, 20 bp, Homo sapiens
  source 1..20: mol_type = genomic DNA; note = Gene: ADCK5; note = Location (start to end; relative to TSS): ADCK5_45_75; note = Orientation (relative to transcription): sense; note = sgRNA Position: 144374118; note = Sequence Name: 56322-704_101_SL_seq_1800
gcgaccggtgaggactctcc

SEQ ID NO: 1801 - DNA, 20 bp, Homo sapiens
  source 1..20: mol_type = genomic DNA; note = Gene: ADCK5; note = Location (start to end; relative to TSS): ADCK5_77_107; note = Orientation (relative to transcription): antisense; note = sgRNA Position: 144374130; note = Sequence Name: 56322-704_101_SL_seq_1801
tgcaggatctcgggcgcccc

SEQ ID NO: 1802 - DNA, 20 bp, Homo sapiens
  source 1..20: mol_type = genomic DNA; note = Gene: ADCK5; note = Location (start to end; relative to TSS): ADCK5_35_65; note = Orientation (relative to transcription): sense; note = sgRNA Position: 144374108; note = Sequence Name: 56322-704_101_SL_seq_1802
cggagatgtggcgaccggtg

SEQ ID NO: 1803 - DNA, 20 bp, Homo sapiens
  source 1..20: mol_type = genomic DNA; note = Gene: ADCK5; note = Location (start to end; relative to TSS): ADCK5_73_103; note = Orientation (relative to transcription): antisense; note = sgRNA Position: 144374126; note = Sequence Name: 56322-704_101_SL_seq_1803
ggatctcgggcgccccgggc

SEQ ID NO: 1804 - DNA, 20 bp, Homo sapiens
  source 1..20: mol_type = genomic DNA; note = Gene: ADCK5; note = Location (start to end; relative to TSS): ADCK5_30_60; note = Orientation (relative to transcription): sense; note = sgRNA Position: 144374103; note = Sequence Name: 56322-704_101_SL_seq_1804
gtggtcggagatgtggcgac

SEQ ID NO: 1805 - DNA, 20 bp, Homo sapiens
  source 1..20: mol_type = genomic DNA; note = Gene: ADCK5; note = Location (start to end; relative to TSS): ADCK5_72_102; note = Orientation (relative to transcription): antisense; note = sgRNA Position: 144374125; note = Sequence Name: 56322-704_101_SL_seq_1805
gatctcgggcgccccgggcc

SEQ ID NO: 1806 - DNA, 20 bp, Homo sapiens
  source 1..20: mol_type = genomic DNA; note = Gene: ADCK5; note = Location (start to end; relative to TSS): ADCK5_23_53; note = Orientation (relative to transcription): sense; note = sgRNA Position: 144374096; note = Sequence Name: 56322-704_101_SL_seq_1806
cggagcagtggtcggagatg

SEQ ID NO: 1807 - DNA, 20 bp, Homo sapiens
  source 1..20: mol_type = genomic DNA; note = Gene: ADCK5; note = Location (start to end; relative to TSS): ADCK5_58_88; note = Orientation (relative to transcription): antisense; note = sgRNA Position: 144374111; note = Sequence Name: 56322-704_101_SL_seq_1807
cgggccgggagagtcctcac

SEQ ID NO: 1808 - DNA, 20 bp, Homo sapiens
  source 1..20: mol_type = genomic DNA; note = Gene: ADCK5; note = Location (start to end; relative to TSS): ADCK5_16_46; note = Orientation (relative to transcription): antisense; note = sgRNA Position: 144374069; note = Sequence Name: 56322-704_101_SL_seq_1808
tgctccgctcttctcccgcc

SEQ ID NO: 1809 - DNA, 20 bp, Homo sapiens
  source 1..20: mol_type = genomic DNA; note = Gene: ADCK5; note = Location (start to end; relative to TSS): ADCK5_50_80; note = Orientation (relative to transcription): sense; note = sgRNA Position: 144374123; note = Sequence Name: 56322-704_101_SL_seq_1809
cggtgaggactctcccggcc

SEQ ID NO: 1810 - DNA, 20 bp, Homo sapiens
  source 1..20: mol_type = genomic DNA; note = Gene: ADK; note = Location (start to end; relative to TSS): ADK_45_75; note = Orientation (relative to transcription): sense; note = sgRNA Position: 74151292; note = Sequence Name: 56322-704_101_SL_seq_1810
gaagatggcagctgctgagg

SEQ ID NO: 1811 - DNA, 20 bp, Homo sapiens
  source 1..20: mol_type = genomic DNA; note = Gene: ADK; note = Location (start to end; relative to TSS): ADK_92_122; note = Orientation (relative to transcription): sense; note = sgRNA Position: 74151339; note = Sequence Name: 56322-704_101_SL_seq_1811
tggaggcgccgcaagcgctg

SEQ ID NO: 1812 - DNA, 20 bp, Homo sapiens
  source 1..20: mol_type = genomic DNA; note = Gene: ADK; note = Location (start to end; relative to TSS): ADK_42_72; note = Orientation (relative to transcription): sense; note = sgRNA Position: 74151289; note = Sequence Name: 56322-704_101_SL_seq_1812
cgcgaagatggcagctgctg

SEQ ID NO: 1813 - DNA, 20 bp, Homo sapiens
  source 1..20: mol_type = genomic DNA; note = Gene: ADK; note = Location (start to end; relative to TSS): ADK_79_109; note = Orientation (relative to transcription): antisense; note = sgRNA Position: 74151306; note = Sequence Name: 56322-704_101_SL_seq_1813
accttcagctttttgggctt

SEQ ID NO: 1814 - DNA, 20 bp, Homo sapiens
  source 1..20: mol_type = genomic DNA; note = Gene: ADK; note = Location (start to end; relative to TSS): ADK_34_64; note = Orientation (relative to transcription): antisense; note = sgRNA Position: 74151261; note = Sequence Name: 56322-704_101_SL_seq_1814
ttcgcgctcccaccccactt

SEQ ID NO: 1815 - DNA, 20 bp, Homo sapiens
  source 1..20: mol_type = genomic DNA; note = Gene: ADK; note = Location (start to end; relative to TSS): ADK_75_105; note = Orientation (relative to transcription): sense; note = sgRNA Position: 74151322; note = Sequence Name: 56322-704_101_SL_seq_1815
gcccaaaaagctgaaggtgg

SEQ ID NO: 1816 - DNA, 20 bp, Homo sapiens
  source 1..20: mol_type = genomic DNA; note = Gene: ADK; note = Location (start to end; relative to TSS): ADK_30_60; note = Orientation (relative to transcription): sense; note = sgRNA Position: 74151277; note = Sequence Name: 56322-704_101_SL_seq_1816
gtggggtgggagcgcgaaga

SEQ ID NO: 1817 - DNA, 20 bp, Homo sapiens
  source 1..20: mol_type = genomic DNA; note = Gene: ADK; note = Location (start to end; relative to TSS): ADK_72_102; note = Orientation (relative to transcription): sense; note = sgRNA Position: 74151319; note = Sequence Name: 56322-704_101_SL_seq_1817
gaagcccaaaaagctgaagg

SEQ ID NO: 1818 - DNA, 20 bp, Homo sapiens
  source 1..20: mol_type = genomic DNA; note = Gene: ADK; note = Location (start to end; relative to TSS): ADK_17_47; note = Orientation (relative to transcription): sense; note = sgRNA Position: 74151264; note = Sequence Name: 56322-704_101_SL_seq_1818
ctgtagagccaaagtggggt

SEQ ID NO: 1819 - DNA, 20 bp, Homo sapiens
  source 1..20: mol_type = genomic DNA; note = Gene: ADK; note = Location (start to end; relative to TSS): ADK_69_99; note = Orientation (relative to transcription): sense; note = sgRNA Position: 74151316; note = Sequence Name: 56322-704_101_SL_seq_1819
gccgaagcccaaaaagctga

SEQ ID NO: 1820 - DNA, 20 bp, Homo sapiens
  source 1..20: mol_type = genomic DNA; note = Gene: AGK; note = Location (start to end; relative to TSS): AGK_32_62; note = Orientation (relative to transcription): sense; note = sgRNA Position: 141551468; note = Sequence Name: 56322-704_101_SL_seq_1820
ccaggcggggagcgcagtgc

SEQ ID NO: 1821 - DNA, 20 bp, Homo sapiens
  source 1..20: mol_type = genomic DNA; note = Gene: AGK; note = Location (start to end; relative to TSS): AGK_63_93; note = Orientation (relative to transcription): sense; note = sgRNA Position: 141551499; note = Sequence Name: 56322-704_101_SL_seq_1821
actgagcgcgcgagcggggt

SEQ ID NO: 1822 - DNA, 20 bp, Homo sapiens
  source 1..20: mol_type = genomic DNA; note = Gene: AGK; note = Location (start to end; relative to TSS): AGK_31_61; note = Orientation (relative to transcription): sense; note = sgRNA Position: 141551467; note = Sequence Name: 56322-704_101_SL_seq_1822
cccaggcggggagcgcagtg

SEQ ID NO: 1823 - DNA, 20 bp, Homo sapiens
  source 1..20: mol_type = genomic DNA; note = Gene: AGK; note = Location (start to end; relative to TSS): AGK_62_92; note = Orientation (relative to transcription): sense; note = sgRNA Position: 141551498; note = Sequence Name: 56322-704_101_SL_seq_1823
gactgagcgcgcgagcgggg

SEQ ID NO: 1824 - DNA, 20 bp, Homo sapiens
  source 1..20: mol_type = genomic DNA; note = Gene: AGK; note = Location (start to end; relative to TSS): AGK_18_48; note = Orientation (relative to transcription): sense; note = sgRNA Position: 141551454; note = Sequence Name: 56322-704_101_SL_seq_1824
gagtgcagcggcgcccaggc

SEQ ID NO: 1825 - DNA, 20 bp, Homo sapiens
  source 1..20: mol_type = genomic DNA; note = Gene: AGK; note = Location (start to end; relative to TSS): AGK_59_89; note = Orientation (relative to transcription): sense; note = sgRNA Position: 141551495; note = Sequence Name: 56322-704_101_SL_seq_1825
tgggactgagcgcgcgagcg

SEQ ID NO: 1826 - DNA, 20 bp, Homo sapiens
  source 1..20: mol_type = genomic DNA; note = Gene: AGK; note = Location (start to end; relative to TSS): AGK_19_49; note = Orientation (relative to transcription): sense; note = sgRNA Position: 141551455; note = Sequence Name: 56322-704_101_SL_seq_1826
agtgcagcggcgcccaggcg

SEQ ID NO: 1827 - DNA, 20 bp, Homo sapiens
  source 1..20: mol_type = genomic DNA; note = Gene: AGK; note = Location (start to end; relative to TSS): AGK_58_88; note = Orientation (relative to transcription): sense; note = sgRNA Position: 141551494; note = Sequence Name: 56322-704_101_SL_seq_1827
ctgggactgagcgcgcgagc

SEQ ID NO: 1828 - DNA, 20 bp, Homo sapiens
  source 1..20: mol_type = genomic DNA; note = Gene: AGK; note = Location (start to end; relative to TSS): AGK_20_50; note = Orientation (relative to transcription): antisense; note = sgRNA Position: 141551436; note = Sequence Name: 56322-704_101_SL_seq_1828
gggcgccgctgcactcacca

SEQ ID NO: 1829 - DNA, 20 bp, Homo sapiens
  source 1..20: mol_type = genomic DNA; note = Gene: AGK; note = Location (start to end; relative to TSS): AGK_57_87; note = Orientation (relative to transcription): sense; note = sgRNA Position: 141551493; note = Sequence Name: 56322-704_101_SL_seq_1829
gctgggactgagcgcgcgag

SEQ ID NO: 1830 - DNA, 20 bp, Homo sapiens
  source 1..20: mol_type = genomic DNA; note = Gene: AK1; note = Location (start to end; relative to TSS): AK1_45_75; note = Orientation (relative to transcription): antisense; note = sgRNA Position: 127877626; note = Sequence Name: 56322-704_101_SL_seq_1830
gggcacgcactgacctgggg

SEQ ID NO: 1831 - DNA, 20 bp, Homo sapiens
  source 1..20: mol_type = genomic DNA; note = Gene: AK1; note = Location (start to end; relative to TSS): AK1_85_115; note = Orientation (relative to transcription): sense; note = sgRNA Position: 127877566; note = Sequence Name: 56322-704_101_SL_seq_1831
ggggaggggcagcggcaccg

SEQ ID NO: 1832 - DNA, 20 bp, Homo sapiens
  source 1..20: mol_type = genomic DNA; note = Gene: AK1; note = Location (start to end; relative to TSS): AK1_33_63; note = Orientation (relative to transcription): antisense; note = sgRNA Position: 127877638; note = Sequence Name: 56322-704_101_SL_seq_1832
acctggggaggggtgcgggt

SEQ ID NO: 1833 - DNA, 20 bp, Homo sapiens
  source 1..20: mol_type = genomic DNA; note = Gene: AK1; note = Location (start to end; relative to TSS): AK1_66_96; note = Orientation (relative to transcription): antisense; note = sgRNA Position: 127877605; note = Sequence Name: 56322-704_101_SL_seq_1833
ggcgcccccccagacacgcg

SEQ ID NO: 1834 - DNA, 20 bp, Homo sapiens
  source 1..20: mol_type = genomic DNA; note = Gene: AK1; note = Location (start to end; relative to TSS): AK1_27_57; note = Orientation (relative to transcription): antisense; note = sgRNA Position: 127877644; note = Sequence Name: 56322-704_101_SL_seq_1834
ggaggggtgcgggtgggcgc

SEQ ID NO: 1835 - DNA, 20 bp, Homo sapiens
  source 1..20: mol_type = genomic DNA; note = Gene: AK1; note = Location (start to end; relative to TSS): AK1_65_95; note = Orientation (relative to transcription): antisense; note = sgRNA Position: 127877606; note = Sequence Name: 56322-704_101_SL_seq_1835
gcgcccccccagacacgcgc

SEQ ID NO: 1836 - DNA, 20 bp, Homo sapiens
  source 1..20: mol_type = genomic DNA; note = Gene: AK1; note = Location (start to end; relative to TSS): AK1_25_55; note = Orientation (relative to transcription): antisense; note = sgRNA Position: 127877646; note = Sequence Name: 56322-704_101_SL_seq_1836
aggggtgcgggtgggcgccg

SEQ ID NO: 1837 - DNA, 20 bp, Homo sapiens
  source 1..20: mol_type = genomic DNA; note = Gene: AK1; note = Location (start to end; relative to TSS): AK1_64_94; note = Orientation (relative to transcription): sense; note = sgRNA Position: 127877587; note = Sequence Name: 56322-704_101_SL_seq_1837
tgtctgggggggcgcctctg

SEQ ID NO: 1838 - DNA, 20 bp, Homo sapiens
  source 1..20: mol_type = genomic DNA; note = Gene: AK1; note = Location (start to end; relative to TSS): AK1_23_53; note = Orientation (relative to transcription): sense; note = sgRNA Position: 127877628; note = Sequence Name: 56322-704_101_SL_seq_1838
gcccacccgcacccctcccc

SEQ ID NO: 1839 - DNA, 20 bp, Homo sapiens
  source 1..20: mol_type = genomic DNA; note = Gene: AK1; note = Location (start to end; relative to TSS): AK1_53_83; note = Orientation (relative to transcription): sense; note = sgRNA Position: 127877598; note = Sequence Name: 56322-704_101_SL_seq_1839
gtgcccgcgcgtgtctgggg

SEQ ID NO: 1840 - DNA, 20 bp, Homo sapiens
  source 1..20: mol_type = genomic DNA; note = Gene: AK2; note = Location (start to end; relative to TSS): AK2_46_76; note = Orientation (relative to transcription): sense; note = sgRNA Position: 33036813; note = Sequence Name: 56322-704_101_SL_seq_1840
catggctcccagcgtgccag

SEQ ID NO: 1841 - DNA, 20 bp, Homo sapiens
  source 1..20: mol_type = genomic DNA; note = Gene: AK2; note = Location (start to end; relative to TSS): AK2_76_106; note = Orientation (relative to transcription): sense; note = sgRNA Position: 33036783; note = Sequence Name: 56322-704_101_SL_seq_1841
cgagtatcctaaaggcatcc

SEQ ID NO: 1842 - DNA, 20 bp, Homo sapiens
  source 1..20: mol_type = genomic DNA; note = Gene: AK2; note = Location (start to end; relative to TSS): AK2_22_52; note = Orientation (relative to transcription): sense; note = sgRNA Position: 33036837; note = Sequence Name: 56322-704_101_SL_seq_1842
gtggcagtgagagacttcgg

SEQ ID NO: 1843 - DNA, 20 bp, Homo sapiens
  source 1..20: mol_type = genomic DNA; note = Gene: AK2; note = Location (start to end; relative to TSS): AK2_71_101; note = Orientation (relative to transcription): antisense; note = sgRNA Position: 33036808; note = Sequence Name: 56322-704_101_SL_seq_1843
ggatactcgggttctgccgc

SEQ ID NO: 1844 - DNA, 20 bp, Homo sapiens
  source 1..20: mol_type = genomic DNA; note = Gene: AK2; note = Location (start to end; relative to TSS): AK2_19_49; note = Orientation (relative to transcription): sense; note = sgRNA Position: 33036840; note = Sequence Name: 56322-704_101_SL_seq_1844
ctggtggcagtgagagactt

SEQ ID NO: 1845 - DNA, 20 bp, Homo sapiens
  source 1..20: mol_type = genomic DNA; note = Gene: AK2; note = Location (start to end; relative to TSS): AK2_68_98; note = Orientation (relative to transcription): sense; note = sgRNA Position: 33036791; note = Sequence Name: 56322-704_101_SL_seq_1845
gcagaacccgagtatcctaa

SEQ ID NO: 1846 - DNA, 20 bp, Homo sapiens
  source 1..20: mol_type = genomic DNA; note = Gene: AK2; note = Location (start to end; relative to TSS): AK2_28_58; note = Orientation (relative to transcription): sense; note = sgRNA Position: 33036831; note = Sequence Name: 56322-704_101_SL_seq_1846
gtgagagacttcggcggaca

SEQ ID NO: 1847 - DNA, 20 bp, Homo sapiens
  source 1..20: mol_type = genomic DNA; note = Gene: AK2; note = Location (start to end; relative to TSS): AK2_62_92; note = Orientation (relative to transcription): antisense; note = sgRNA Position: 33036817; note = Sequence Name: 56322-704_101_SL_seq_1847
ggttctgccgctggcacgct

SEQ ID NO: 1848 - DNA, 20 bp, Homo sapiens
  source 1..20: mol_type = genomic DNA; note = Gene: AK2; note = Location (start to end; relative to TSS): AK2_11_41; note = Orientation (relative to transcription): antisense; note = sgRNA Position: 33036868; note = Sequence Name: 56322-704_101_SL_seq_1848
caccagttcgcacgcctcac

SEQ ID NO: 1849 - DNA, 20 bp, Homo sapiens
  source 1..20: mol_type = genomic DNA; note = Gene: AK2; note = Location (start to end; relative to TSS): AK2_46_76; note = Orientation (relative to transcription): sense; note = sgRNA Position: 33036813; note = Sequence Name: 56322-704_101_SL_seq_1849
catggctcccagcgtgccag

SEQ ID NO: 1850 - DNA, 20 bp, Homo sapiens
  source 1..20: mol_type = genomic DNA; note = Gene: AK3; note = Location (start to end; relative to TSS): AK3_40_70; note = Orientation (relative to transcription): sense; note = sgRNA Position: 4741138; note = Sequence Name: 56322-704_101_SL_seq_1850
agcgggtgagcgcgcaggcc

SEQ ID NO: 1851 - DNA, 20 bp, Homo sapiens
  source 1..20: mol_type = genomic DNA; note = Gene: AK3; note = Location (start to end; relative to TSS): AK3_72_102; note = Orientation (relative to transcription): antisense; note = sgRNA Position: 4741126; note = Sequence Name: 56322-704_101_SL_seq_1851
ccgcgcgggtaccagggctt

SEQ ID NO: 1852 - DNA, 20 bp, Homo sapiens
  source 1..20: mol_type = genomic DNA; note = Gene: AK3; note = Location (start to end; relative to TSS): AK3_35_65; note = Orientation (relative to transcription): sense; note = sgRNA Position: 4741143; note = Sequence Name: 56322-704_101_SL_seq_1852
tgccgagcgggtgagcgcgc

SEQ ID NO: 1853 - DNA, 20 bp, Homo sapiens
  source 1..20: mol_type = genomic DNA; note = Gene: AK3; note = Location (start to end; relative to TSS): AK3_68_98; note = Orientation (relative to transcription): sense; note = sgRNA Position: 4741110; note = Sequence Name: 56322-704_101_SL_seq_1853
gccctggtacccgcgcggtg

SEQ ID NO: 1854 - DNA, 20 bp, Homo sapiens
  source 1..20: mol_type = genomic DNA; note = Gene: AK3; note = Location (start to end; relative to TSS): AK3_29_59; note = Orientation (relative to transcription): antisense; note = sgRNA Position: 4741169; note = Sequence Name: 56322-704_101_SL_seq_1854
gctcggcagcctgcgccggc

SEQ ID NO: 1855 - DNA, 20 bp, Homo sapiens
  source 1..20: mol_type = genomic DNA; note = Gene: AK3; note = Location (start to end; relative to TSS): AK3_67_97; note = Orientation (relative to transcription): antisense; note = sgRNA Position: 4741131; note = Sequence Name: 56322-704_101_SL_seq_1855
cgggtaccagggctttggcc

SEQ ID NO: 1856 - DNA, 20 bp, Homo sapiens
  source 1..20: mol_type = genomic DNA; note = Gene: AK3; note = Location (start to end; relative to TSS): AK3_33_63; note = Orientation (relative to transcription): antisense; note = sgRNA Position: 4741165; note = Sequence Name: 56322-704_101_SL_seq_1856
acccgctcggcagcctgcgc

SEQ ID NO: 1857 - DNA, 20 bp, Homo sapiens
  source 1..20: mol_type = genomic DNA; note = Gene: AK3; note = Location (start to end; relative to TSS): AK3_63_93; note = Orientation (relative to transcription): sense; note = sgRNA Position: 4741115; note = Sequence Name: 56322-704_101_SL_seq_1857
ccaaagccctggtacccgcg

SEQ ID NO: 1858 - DNA, 20 bp, Homo sapiens
  source 1..20: mol_type = genomic DNA; note = Gene: AK3; note = Location (start to end; relative to TSS): AK3_22_52; note = Orientation (relative to transcription): sense; note = sgRNA Position: 4741156; note = Sequence Name: 56322-704_101_SL_seq_1858
ggccggcgcaggctgccgag

SEQ ID NO: 1859 - DNA, 20 bp, Homo sapiens
  source 1..20: mol_type = genomic DNA; note = Gene: AK3; note = Location (start to end; relative to TSS): AK3_52_82; note = Orientation (relative to transcription): sense; note = sgRNA Position: 4741126; note = Sequence Name: 56322-704_101_SL_seq_1859
cgcaggccaggccaaagccc

SEQ ID NO: 1860 - DNA, 20 bp, Homo sapiens
  source 1..20: mol_type = genomic DNA; note = Gene: AK4; note = Location (start to end; relative to TSS): AK4_46_76; note = Orientation (relative to transcription): sense; note = sgRNA Position: 65148275; note = Sequence Name: 56322-704_101_SL_seq_1860
gtctctccttccccctgtag

SEQ ID NO: 1861 - DNA, 20 bp, Homo sapiens
  source 1..20: mol_type = genomic DNA; note = Gene: AK4; note = Location (start to end; relative to TSS): AK4_81_111; note = Orientation (relative to transcription): antisense; note = sgRNA Position: 65148290; note = Sequence Name: 56322-704_101_SL_seq_1861
ccgctctcactgggactcgc

SEQ ID NO: 1862 - DNA, 20 bp, Homo sapiens
  source 1..20: mol_type = genomic DNA; note = Gene: AK4; note = Location (start to end; relative to TSS): AK4_45_75; note = Orientation (relative to transcription): sense; note = sgRNA Position: 65148274; note = Sequence Name: 56322-704_101_SL_seq_1862
agtctctccttccccctgta

SEQ ID NO: 1863 - DNA, 20 bp, Homo sapiens
  source 1..20: mol_type = genomic DNA; note = Gene: AK4; note = Location (start to end; relative to TSS): AK4_76_106; note = Orientation (relative to transcription): sense; note = sgRNA Position: 65148305; note = Sequence Name: 56322-704_101_SL_seq_1863
cgagtcccagtgagagcgga

SEQ ID NO: 1864 - DNA, 20 bp, Homo sapiens
  source 1..20: mol_type = genomic DNA; note = Gene: AK4; note = Location (start to end; relative to TSS): AK4_44_74; note = Orientation (relative to transcription): sense; note = sgRNA Position: 65148273; note = Sequence Name: 56322-704_101_SL_seq_1864
aagtctctccttccccctgt

SEQ ID NO: 1865 - DNA, 20 bp, Homo sapiens
  source 1..20: mol_type = genomic DNA; note = Gene: AK4; note = Location (start to end; relative to TSS): AK4_75_105; note = Orientation (relative to transcription): sense; note = sgRNA Position: 65148304; note = Sequence Name: 56322-704_101_SL_seq_1865
gcgagtcccagtgagagcgg

SEQ ID NO: 1866 - DNA, 20 bp, Homo sapiens
  source 1..20: mol_type = genomic DNA; note = Gene: AK4; note = Location (start to end; relative to TSS): AK4_20_50; note = Orientation (relative to transcription): antisense; note = sgRNA Position: 65148229; note = Sequence Name: 56322-704_101_SL_seq_1866
ccctcccctcagcccagcgc

SEQ ID NO: 1867 - DNA, 20 bp, Homo sapiens
  source 1..20: mol_type = genomic DNA; note = Gene: AK4; note = Location (start to end; relative to TSS): AK4_53_83; note = Orientation (relative to transcription): sense; note = sgRNA Position: 65148282; note = Sequence Name: 56322-704_101_SL_seq_1867
cttccccctgtaggggcggc

SEQ ID NO: 1868 - DNA, 20 bp, Homo sapiens
  source 1..20: mol_type = genomic DNA; note = Gene: AK4; note = Location (start to end; relative to TSS): AK4_19_49; note = Orientation (relative to transcription): antisense; note = sgRNA Position: 65148228; note = Sequence Name: 56322-704_101_SL_seq_1868
cctcccctcagcccagcgcc

SEQ ID NO: 1869 - DNA, 20 bp, Homo sapiens
  source 1..20: mol_type = genomic DNA; note = Gene: AK4; note = Location (start to end; relative to TSS): AK4_49_79; note = Orientation (relative to transcription): sense; note = sgRNA Position: 65148278; note = Sequence Name: 56322-704_101_SL_seq_1869
tctccttccccctgtagggg

SEQ ID NO: 1870 - DNA, 20 bp, Homo sapiens
  source 1..20: mol_type = genomic DNA; note = Gene: AK5; note = Location (start to end; relative to TSS): AK5_37_67; note = Orientation (relative to transcription): sense; note = sgRNA Position: 77282082; note = Sequence Name: 56322-704_101_SL_seq_1870
cggcgcctgcagctccggct

SEQ ID NO: 1871 - DNA, 20 bp, Homo sapiens
  source 1..20: mol_type = genomic DNA; note = Gene: AK5; note = Location (start to end; relative to TSS): AK5_89_119; note = Orientation (relative to transcription): sense; note = sgRNA Position: 77282134; note = Sequence Name: 56322-704_101_SL_seq_1871
gcgcggagaccacagccccc

SEQ ID NO: 1872 - DNA, 20 bp, Homo sapiens
  source 1..20: mol_type = genomic DNA; note = Gene: AK5; note = Location (start to end; relative to TSS): AK5_40_70; note = Orientation (relative to transcription): sense; note = sgRNA Position: 77282085; note = Sequence Name: 56322-704_101_SL_seq_1872
cgcctgcagctccggctcgg

SEQ ID NO: 1873 - DNA, 20 bp, Homo sapiens
  source 1..20: mol_type = genomic DNA; note = Gene: AK5; note = Location (start to end; relative to TSS): AK5_88_118; note = Orientation (relative to transcription): sense; note = sgRNA Position: 77282133; note = Sequence Name: 56322-704_101_SL_seq_1873
agcgcggagaccacagcccc

SEQ ID NO: 1874 - DNA, 20 bp, Homo sapiens
  source 1..20: mol_type = genomic DNA; note = Gene: AK5; note = Location (start to end; relative to TSS): AK5_39_69; note = Orientation (relative to transcription): sense; note = sgRNA Position: 77282084; note = Sequence Name: 56322-704_101_SL_seq_1874
gcgcctgcagctccggctcg

SEQ ID NO: 1875 - DNA, 20 bp, Homo sapiens
  source 1..20: mol_type = genomic DNA; note = Gene: AK5; note = Location (start to end; relative to TSS): AK5_72_102; note = Orientation (relative to transcription): sense; note = sgRNA Position: 77282117; note = Sequence Name: 56322-704_101_SL_seq_1875
aagcgggggcggcgggagcg

SEQ ID NO: 1876 - DNA, 20 bp, Homo sapiens
  source 1..20: mol_type = genomic DNA; note = Gene: AK5; note = Location (start to end; relative to TSS): AK5_32_62; note = Orientation (relative to transcription): sense; note = sgRNA Position: 77282077; note = Sequence Name: 56322-704_101_SL_seq_1876
ctgctcggcgcctgcagctc

SEQ ID NO: 1877 - DNA, 20 bp, Homo sapiens
  source 1..20: mol_type = genomic DNA; note = Gene: AK5; note = Location (start to end; relative to TSS): AK5_65_95; note = Orientation (relative to transcription): sense; note = sgRNA Position: 77282110; note = Sequence Name: 56322-704_101_SL_seq_1877
ggaaccgaagcgggggcggc

SEQ ID NO: 1878 - DNA, 20 bp, Homo sapiens
  source 1..20: mol_type = genomic DNA; note = Gene: AK5; note = Location (start to end; relative to TSS): AK5_21_51; note = Orientation (relative to transcription): antisense; note = sgRNA Position: 77282046; note = Sequence Name: 56322-704_101_SL_seq_1878
cagctgtgccgcggcttccc

SEQ ID NO: 1879 - DNA, 20 bp, Homo sapiens
  source 1..20: mol_type = genomic DNA; note = Gene: AK5; note = Location (start to end; relative to TSS): AK5_51_81; note = Orientation (relative to transcription): antisense; note = sgRNA Position: 77282076; note = Sequence Name: 56322-704_101_SL_seq_1879
agcccccgagccggagctgc

SEQ ID NO: 1880 - DNA, 20 bp, Homo sapiens
  source 1..20: mol_type = genomic DNA; note = Gene: AK6; note = Location (start to end; relative to TSS): AK6_40_70; note = Orientation (relative to transcription): antisense; note = sgRNA Position: 69369476; note = Sequence Name: 56322-704_101_SL_seq_1880
tgaccggtgagcaggatgtt

SEQ ID NO: 1881 - DNA, 20 bp, Homo sapiens
  source 1..20: mol_type = genomic DNA; note = Gene: AK6; note = Location (start to end; relative to TSS): AK6_104_134; note = Orientation (relative to transcription): sense; note = sgRNA Position: 69369392; note = Sequence Name: 56322-704_101_SL_seq_1881
gctctgggcatcgggcgccc

SEQ ID NO: 1882 - DNA, 20 bp, Homo sapiens
  source 1..20: mol_type = genomic DNA; note = Gene: AK6; note = Location (start to end; relative to TSS): AK6_34_64; note = Orientation (relative to transcription): sense; note = sgRNA Position: 69369462; note = Sequence Name: 56322-704_101_SL_seq_1882
aacatcctgctcaccggtca

SEQ ID NO: 1883 - DNA, 20 bp, Homo sapiens
  source 1..20: mol_type = genomic DNA; note = Gene: AK6; note = Location (start to end; relative to TSS): AK6_73_103; note = Orientation (relative to transcription): antisense; note = sgRNA Position: 69369443; note = Sequence Name: 56322-704_101_SL_seq_1883
tgccccagcccagtccctcc

SEQ ID NO: 1884 - DNA, 20 bp, Homo sapiens
  source 1..20: mol_type = genomic DNA; note = Gene: AK6; note = Location (start to end; relative to TSS): AK6_33_63; note = Orientation (relative to transcription): sense; note = sgRNA Position: 69369463; note = Sequence Name: 56322-704_101_SL_seq_1884
gaacatcctgctcaccggtc

SEQ ID NO: 1885 - DNA, 20 bp, Homo sapiens
  source 1..20: mol_type = genomic DNA; note = Gene: AK6; note = Location (start to end; relative to TSS): AK6_66_96; note = Orientation (relative to transcription): sense; note = sgRNA Position: 69369430; note = Sequence Name: 56322-704_101_SL_seq_1885
gggagggactgggctggggc

SEQ ID NO: 1886 - DNA, 20 bp, Homo sapiens
  source 1..20: mol_type = genomic DNA; note = Gene: AK6; note = Location (start to end; relative to TSS): AK6_29_59; note = Orientation (relative to transcription): antisense; note = sgRNA Position: 69369487; note = Sequence Name: 56322-704_101_SL_seq_1886
caggatgttcggaagcaaca

SEQ ID NO: 1887 - DNA, 20 bp, Homo sapiens
  source 1..20: mol_type = genomic DNA; note = Gene: AK6; note = Location (start to end; relative to TSS): AK6_62_92; note = Orientation (relative to transcription): sense; note = sgRNA Position: 69369434; note = Sequence Name: 56322-704_101_SL_seq_1887
ggccgggagggactgggctg

SEQ ID NO: 1888 - DNA, 20 bp, Homo sapiens
  source 1..20: mol_type = genomic DNA; note = Gene: AK6; note = Location (start to end; relative to TSS): AK6_28_58; note = Orientation (relative to transcription): sense; note = sgRNA Position: 69369468; note = Sequence Name: 56322-704_101_SL_seq_1888
cttccgaacatcctgctcac

SEQ ID NO: 1889 - DNA, 20 bp, Homo sapiens
  source 1..20: mol_type = genomic DNA; note = Gene: AK6; note = Location (start to end; relative to TSS): AK6_62_92; note = Orientation (relative to transcription): sense; note = sgRNA Position: 69369434; note = Sequence Name: 56322-704_101_SL_seq_1889
ggccgggagggactgggctg

SEQ ID NO: 1890 - DNA, 20 bp, Homo sapiens
  source 1..20: mol_type = genomic DNA; note = Gene: AK7; note = Location (start to end; relative to TSS): AK7_43_73; note = Orientation (relative to transcription): sense; note = sgRNA Position: 96392197; note = Sequence Name: 56322-704_101_SL_seq_1890
ctctcacggagaaggttatc

SEQ ID NO: 1891 - DNA, 20 bp, Homo sapiens
  source 1..20: mol_type = genomic DNA; note = Gene: AK7; note = Location (start to end; relative to TSS): AK7_87_117; note = Orientation (relative to transcription): sense; note = sgRNA Position: 96392241; note = Sequence Name: 56322-704_101_SL_seq_1891
ctgttggattcctacagcag

SEQ ID NO: 1892 - DNA, 20 bp, Homo sapiens
  source 1..20: mol_type = genomic DNA; note = Gene: AK7; note = Location (start to end; relative to TSS): AK7_25_55; note = Orientation (relative to transcription): antisense; note = sgRNA Position: 96392159; note = Sequence Name: 56322-704_101_SL_seq_1892
agtttcctcttcttcagcca

SEQ ID NO: 1893 - DNA, 20 bp, Homo sapiens
  source 1..20: mol_type = genomic DNA; note = Gene: AK7; note = Location (start to end; relative to TSS): AK7_77_107; note = Orientation (relative to transcription): antisense; note = sgRNA Position: 96392211; note = Sequence Name: 56322-704_101_SL_seq_1893
acaggtttataaacaccctc

SEQ ID NO: 1894 - DNA, 20 bp, Homo sapiens
  source 1..20: mol_type = genomic DNA; note = Gene: AK7; note = Location (start to end; relative to TSS): AK7_35_65; note = Orientation (relative to transcription): sense; note = sgRNA Position: 96392189; note = Sequence Name: 56322-704_101_SL_seq_1894
aactgctgctctcacggaga

SEQ ID NO: 1895 - DNA, 20 bp, Homo sapiens
  source 1..20: mol_type = genomic DNA; note = Gene: AK7; note = Location (start to end; relative to TSS): AK7_76_106; note = Orientation (relative to transcription): antisense; note = sgRNA Position: 96392210; note = Sequence Name: 56322-704_101_SL_seq_1895
caggtttataaacaccctct

SEQ ID NO: 1896 - DNA, 20 bp, Homo sapiens
  source 1..20: mol_type = genomic DNA; note = Gene: AK7; note = Location (start to end; relative to TSS): AK7_29_59; note = Orientation (relative to transcription): sense; note = sgRNA Position: 96392183; note = Sequence Name: 56322-704_101_SL_seq_1896
agaggaaactgctgctctca

SEQ ID NO: 1897 - DNA, 20 bp, Homo sapiens
  source 1..20: mol_type = genomic DNA; note = Gene: AK7; note = Location (start to end; relative to TSS): AK7_71_101; note = Orientation (relative to transcription): sense; note = sgRNA Position: 96392225; note = Sequence Name: 56322-704_101_SL_seq_1897
gagggtgtttataaacctgt

SEQ ID NO: 1898 - DNA, 20 bp, Homo sapiens
  source 1..20: mol_type = genomic DNA; note = Gene: AK7; note = Location (start to end; relative to TSS): AK7_21_51; note = Orientation (relative to transcription): antisense; note = sgRNA Position: 96392155; note = Sequence Name: 56322-704_101_SL_seq_1898
tcctcttcttcagccatggt

SEQ ID NO: 1899 - DNA, 20 bp, Homo sapiens
  source 1..20: mol_type = genomic DNA; note = Gene: AK7; note = Location (start to end; relative to TSS): AK7_52_82; note = Orientation (relative to transcription): sense; note = sgRNA Position: 96392206; note = Sequence Name: 56322-704_101_SL_seq_1899
agaaggttatccggacccag

SEQ ID NO: 1900 - DNA, 20 bp, Homo sapiens
  source 1..20: mol_type = genomic DNA; note = Gene: AK8; note = Location (start to end; relative to TSS): AK8_47_77; note = Orientation (relative to transcription): antisense; note = sgRNA Position: 132878233; note = Sequence Name: 56322-704_101_SL_seq_1900
tctcgggggggatacggtgc

SEQ ID NO: 1901 - DNA, 20 bp, Homo sapiens
  source 1..20: mol_type = genomic DNA; note = Gene: AK8; note = Location (start to end; relative to TSS): AK8_92_122; note = Orientation (relative to transcription): antisense; note = sgRNA Position: 132878188; note = Sequence Name: 56322-704_101_SL_seq_1901
cctgcatcaactcgaagatg

SEQ ID NO: 1902 - DNA, 20 bp, Homo sapiens
  source 1..20: mol_type = genomic DNA; note = Gene: AK8; note = Location (start to end; relative to TSS): AK8_46_76; note = Orientation (relative to transcription): antisense; note = sgRNA Position: 132878234; note = Sequence Name: 56322-704_101_SL_seq_1902
ctcgggggggatacggtgcg

SEQ ID NO: 1903 - DNA, 20 bp, Homo sapiens
  source 1..20: mol_type = genomic DNA; note = Gene: AK8; note = Location (start to end; relative to TSS): AK8_90_120; note = Orientation (relative to transcription): sense; note = sgRNA Position: 132878170; note = Sequence Name: 56322-704_101_SL_seq_1903
ttcgagttgatgcaggtgac

SEQ ID NO: 1904 - DNA, 20 bp, Homo sapiens
  source 1..20: mol_type = genomic DNA; note = Gene: AK8; note = Location (start to end; relative to TSS): AK8_48_78; note = Orientation (relative to transcription): antisense; note = sgRNA Position: 132878232; note = Sequence Name: 56322-704_101_SL_seq_1904
atctcgggggggatacggtg

SEQ ID NO: 1905 - DNA, 20 bp, Homo sapiens
  source 1..20: mol_type = genomic DNA; note = Gene: AK8; note = Location (start to end; relative to TSS): AK8_83_113; note = Orientation (relative to transcription): sense; note = sgRNA Position: 132878177; note = Sequence Name: 56322-704_101_SL_seq_1905
ccacatcttcgagttgatgc

SEQ ID NO: 1906 - DNA, 20 bp, Homo sapiens
  source 1..20: mol_type = genomic DNA; note = Gene: AK8; note = Location (start to end; relative to TSS): AK8_37_67; note = Orientation (relative to transcription): antisense; note = sgRNA Position: 132878243; note = Sequence Name: 56322-704_101_SL_seq_1906
gatacggtgcggggcgatag

SEQ ID NO: 1907 - DNA, 20 bp, Homo sapiens
  source 1..20: mol_type = genomic DNA; note = Gene: AK8; note = Location (start to end; relative to TSS): AK8_72_102; note = Orientation (relative to transcription): antisense; note = sgRNA Position: 132878208; note = Sequence Name: 56322-704_101_SL_seq_1907
tggttctcctccccgtactg

SEQ ID NO: 1908 - DNA, 20 bp, Homo sapiens
  source 1..20: mol_type = genomic DNA; note = Gene: AK8; note = Location (start to end; relative to TSS): AK8_17_47; note = Orientation (relative to transcription): antisense; note = sgRNA Position: 132878263; note = Sequence Name: 56322-704_101_SL_seq_1908
tggcgtccatgtagccgtct

SEQ ID NO: 1909 - DNA, 20 bp, Homo sapiens
  source 1..20: mol_type = genomic DNA; note = Gene: AK8; note = Location (start to end; relative to TSS): AK8_47_77; note = Orientation (relative to transcription): antisense; note = sgRNA Position: 132878233; note = Sequence Name: 56322-704_101_SL_seq_1909
tctcgggggggatacggtgc

SEQ ID NO: 1910 - DNA, 20 bp, Homo sapiens
  source 1..20: mol_type = genomic DNA; note = Gene: AK9; note = Location (start to end; relative to TSS): AK9_39_69; note = Orientation (relative to transcription): sense; note = sgRNA Position: 109691139; note = Sequence Name: 56322-704_101_SL_seq_1910
ccatctttggtaaggattgg

SEQ ID NO: 1911 - DNA, 20 bp, Homo sapiens
  source 1..20: mol_type = genomic DNA; note = Gene: AK9; note = Location (start to end; relative to TSS): AK9_120_150; note = Orientation (relative to transcription): antisense; note = sgRNA Position: 109691078; note = Sequence Name: 56322-704_101_SL_seq_1911
gcttttttccaaagagaggg

SEQ ID NO: 1912 - DNA, 20 bp, Homo sapiens
  source 1..20: mol_type = genomic DNA; note = Gene: AK9; note = Location (start to end; relative to TSS): AK9_48_78; note = Orientation (relative to transcription): sense; note = sgRNA Position: 109691130; note = Sequence Name: 56322-704_101_SL_seq_1912
gtaaggattggaggaaaaca

SEQ ID NO: 1913 - DNA, 20 bp, Homo sapiens
  source 1..20: mol_type = genomic DNA; note = Gene: AK9; note = Location (start to end; relative to TSS): AK9_117_147; note = Orientation (relative to transcription): sense; note = sgRNA Position: 109691061; note = Sequence Name: 56322-704_101_SL_seq_1913
tctctttggaaaaaagcgga

SEQ ID NO: 1914 - DNA, 20 bp, Homo sapiens
  source 1..20: mol_type = genomic DNA; note = Gene: AK9; note = Location (start to end; relative to TSS): AK9_36_66; note = Orientation (relative to transcription): sense; note = sgRNA Position: 109691142; note = Sequence Name: 56322-704_101_SL_seq_1914
gcaccatctttggtaaggat

SEQ ID NO: 1915 - DNA, 20 bp, Homo sapiens
  source 1..20: mol_type = genomic DNA; note = Gene: AK9; note = Location (start to end; relative to TSS): AK9_113_143; note = Orientation (relative to transcription): sense; note = sgRNA Position: 109691065; note = Sequence Name: 56322-704_101_SL_seq_1915
tccctctctttggaaaaaag

SEQ ID NO: 1916 - DNA, 20 bp, Homo sapiens
  source 1..20: mol_type = genomic DNA; note = Gene: AK9; note = Location (start to end; relative to TSS): AK9_31_61; note = Orientation (relative to transcription): sense; note = sgRNA Position: 109691147; note = Sequence Name: 56322-704_101_SL_seq_1916
gaagggcaccatctttggta

SEQ ID NO: 1917 - DNA, 20 bp, Homo sapiens
  source 1..20: mol_type = genomic DNA; note = Gene: AK9; note = Location (start to end; relative to TSS): AK9_67_97; note = Orientation (relative to transcription): sense; note = sgRNA Position: 109691111; note = Sequence Name: 56322-704_101_SL_seq_1917
atgggcggagaaaaagtcga

SEQ ID NO: 1918 - DNA, 20 bp, Homo sapiens
  source 1..20: mol_type = genomic DNA; note = Gene: AK9; note = Location (start to end; relative to TSS): AK9_26_56; note = Orientation (relative to transcription): antisense; note = sgRNA Position: 109691172; note = Sequence Name: 56322-704_101_SL_seq_1918
gtgcccttcgcttcctctct

SEQ ID NO: 1919 - DNA, 20 bp, Homo sapiens
  source 1..20: mol_type = genomic DNA; note = Gene: AK9; note = Location (start to end; relative to TSS): AK9_67_97; note = Orientation (relative to transcription): sense; note = sgRNA Position: 109691111; note = Sequence Name: 56322-704_101_SL_seq_1919
atgggcggagaaaaagtcga

SEQ ID NO: 1920 - DNA, 20 bp, Homo sapiens
  source 1..20: mol_type = genomic DNA; note = Gene: AKT1; note = Location (start to end; relative to TSS): AKT1_61_91; note = Orientation (relative to transcription): sense; note = sgRNA Position: 104795663; note = Sequence Name: 56322-704_101_SL_seq_1920
ggcggccgagcaccgagcgc

SEQ ID NO: 1921 - DNA, 20 bp, Homo sapiens
  source 1..20: mol_type = genomic DNA; note = Gene: AKT1; note = Location (start to end; relative to TSS): AKT1_103_133; note = Orientation (relative to transcription): antisense; note = sgRNA Position: 104795641; note = Sequence Name: 56322-704_101_SL_seq_1921
cctcgcgtgccgccgccgct

SEQ ID NO: 1922 - DNA, 20 bp, Homo sapiens
  source 1..20: mol_type = genomic DNA; note = Gene: AKT1; note = Location (start to end; relative to TSS): AKT1_62_92; note = Orientation (relative to transcription): sense; note = sgRNA Position: 104795662; note = Sequence Name: 56322-704_101_SL_seq_1922
gcggccgagcaccgagcgct

SEQ ID NO: 1923 - DNA, 20 bp, Homo sapiens
  source 1..20: mol_type = genomic DNA; note = Gene: AKT1; note = Location (start to end; relative to TSS): AKT1_94_124; note = Orientation (relative to transcription): sense; note = sgRNA Position: 104795630; note = Sequence Name: 56322-704_101_SL_seq_1923
ccgagcggcggcggcacgcg

SEQ ID NO: 1924 - DNA, 20 bp, Homo sapiens
  source 1..20: mol_type = genomic DNA; note = Gene: AKT1; note = Location (start to end; relative to TSS): AKT1_33_63; note = Orientation (relative to transcription): sense; note = sgRNA Position: 104795691; note = Sequence Name: 56322-704_101_SL_seq_1924
cacgcagcgcggcccgaaga

SEQ ID NO: 1925 - DNA, 20 bp, Homo sapiens
  source 1..20: mol_type = genomic DNA; note = Gene: AKT1; note = Location (start to end; relative to TSS): AKT1_69_99; note = Orientation (relative to transcription): sense; note = sgRNA Position: 104795655; note = Sequence Name: 56322-704_101_SL_seq_1925
agcaccgagcgctgggcacc

SEQ ID NO: 1926 - DNA, 20 bp, Homo sapiens
  source 1..20: mol_type = genomic DNA; note = Gene: AKT1; note = Location (start to end; relative to TSS): AKT1_22_52; note = Orientation (relative to transcription): sense; note = sgRNA Position: 104795702; note = Sequence Name: 56322-704_101_SL_seq_1926
ctggcccagcgcacgcagcg

SEQ ID NO: 1927 - DNA, 20 bp, Homo sapiens
  source 1..20: mol_type = genomic DNA; note = Gene: AKT1; note = Location (start to end; relative to TSS): AKT1_62_92; note = Orientation (relative to transcription): sense; note = sgRNA Position: 104795662; note = Sequence Name: 56322-704_101_SL_seq_1927
gcggccgagcaccgagcgct

SEQ ID NO: 1928 - DNA, 20 bp, Homo sapiens
  source 1..20: mol_type = genomic DNA; note = Gene: AKT1; note = Location (start to end; relative to TSS): AKT1_14_44; note = Orientation (relative to transcription): antisense; note = sgRNA Position: 104795730; note = Sequence Name: 56322-704_101_SL_seq_1928
ggccagccgcctgccgcgct

SEQ ID NO: 1929 - DNA, 20 bp, Homo sapiens
  source 1..20: mol_type = genomic DNA; note = Gene: AKT1; note = Location (start to end; relative to TSS): AKT1_61_91; note = Orientation (relative to transcription): sense; note = sgRNA Position: 104795663; note = Sequence Name: 56322-704_101_SL_seq_1929
ggcggccgagcaccgagcgc

SEQ ID NO: 1930 - DNA, 20 bp, Homo sapiens
  source 1..20: mol_type = genomic DNA; note = Gene: AKT2; note = Location (start to end; relative to TSS): AKT2_58_88; note = Orientation (relative to transcription): antisense; note = sgRNA Position: 40285283; note = Sequence Name: 56322-704_101_SL_seq_1930
cccggcagcggcaacggcgc

SEQ ID NO: 1931 - DNA, 20 bp, Homo sapiens
  source 1..20: mol_type = genomic DNA; note = Gene: AKT2; note = Location (start to end; relative to TSS): AKT2_88_118; note = Orientation (relative to transcription): sense; note = sgRNA Position: 40285233; note = Sequence Name: 56322-704_101_SL_seq_1931
aaccagcgcagcgtggcgat

SEQ ID NO: 1932 - DNA, 20 bp, Homo sapiens
  source 1..20: mol_type = genomic DNA; note = Gene: AKT2; note = Location (start to end; relative to TSS): AKT2_49_79; note = Orientation (relative to transcription): sense; note = sgRNA Position: 40285272; note = Sequence Name: 56322-704_101_SL_seq_1932
ccggcgccgttgccgctgcc

SEQ ID NO: 1933 - DNA, 20 bp, Homo sapiens
  source 1..20: mol_type = genomic DNA; note = Gene: AKT2; note = Location (start to end; relative to TSS): AKT2_81_111; note = Orientation (relative to transcription): sense; note = sgRNA Position: 40285240; note = Sequence Name: 56322-704_101_SL_seq_1933
gaaagggaaccagcgcagcg

SEQ ID NO: 1934 - DNA, 20 bp, Homo sapiens
  source 1..20: mol_type = genomic DNA; note = Gene: AKT2; note = Location (start to end; relative to TSS): AKT2_23_53; note = Orientation (relative to transcription): antisense; note = sgRNA Position: 40285318; note = Sequence Name: 56322-704_101_SL_seq_1934
cggcggcgacgcctcctccg

SEQ ID NO: 1935 - DNA, 20 bp, Homo sapiens
  source 1..20: mol_type = genomic DNA; note = Gene: AKT2; note = Location (start to end; relative to TSS): AKT2_59_89; note = Orientation (relative to transcription): sense; note = sgRNA Position: 40285262; note = Sequence Name: 56322-704_101_SL_seq_1935
tgccgctgccgggaaacaca

SEQ ID NO: 1936 - DNA, 20 bp, Homo sapiens
  source 1..20: mol_type = genomic DNA; note = Gene: AKT2; note = Location (start to end; relative to TSS): AKT2_19_49; note = Orientation (relative to transcription): antisense; note = sgRNA Position: 40285322; note = Sequence Name: 56322-704_101_SL_seq_1936
ggcgacgcctcctccgaggc

SEQ ID NO: 1937 - DNA, 20 bp, Homo sapiens
  source 1..20: mol_type = genomic DNA; note = Gene: AKT2; note = Location (start to end; relative to TSS): AKT2_58_88; note = Orientation (relative to transcription): antisense; note = sgRNA Position: 40285283; note = Sequence Name: 56322-704_101_SL_seq_1937
cccggcagcggcaacggcgc

SEQ ID NO: 1938 - DNA, 20 bp, Homo sapiens
  source 1..20: mol_type = genomic DNA; note = Gene: AKT2; note = Location (start to end; relative to TSS): AKT2_11_41; note = Orientation (relative to transcription): antisense; note = sgRNA Position: 40285330; note = Sequence Name: 56322-704_101_SL_seq_1938
ctcctccgaggcaggcccaa

SEQ ID NO: 1939 - DNA, 20 bp, Homo sapiens
  source 1..20: mol_type = genomic DNA; note = Gene: AKT2; note = Location (start to end; relative to TSS): AKT2_49_79; note = Orientation (relative to transcription): sense; note = sgRNA Position: 40285272; note = Sequence Name: 56322-704_101_SL_seq_1939
ccggcgccgttgccgctgcc

SEQ ID NO: 1940 - DNA, 20 bp, Homo sapiens
  source 1..20: mol_type = genomic DNA; note = Gene: AKT3; note = Location (start to end; relative to TSS): AKT3_28_58; note = Orientation (relative to transcription): antisense; note = sgRNA Position: 243850211; note = Sequence Name: 56322-704_101_SL_seq_1940
tggcctcctggagcccggtg

SEQ ID NO: 1941 - DNA, 20 bp, Homo sapiens
  source 1..20: mol_type = genomic DNA; note = Gene: AKT3; note = Location (start to end; relative to TSS): AKT3_63_93; note = Orientation (relative to transcription): sense; note = sgRNA Position: 243850156; note = Sequence Name: 56322-704_101_SL_seq_1941
aggacaggaggggaggagga

SEQ ID NO: 1942 - DNA, 20 bp, Homo sapiens
  source 1..20: mol_type = genomic DNA; note = Gene: AKT3; note = Location (start to end; relative to TSS): AKT3_24_54; note = Orientation (relative to transcription): antisense; note = sgRNA Position: 243850215; note = Sequence Name: 56322-704_101_SL_seq_1942
ctcctggagcccggtgcggc

SEQ ID NO: 1943 - DNA, 20 bp, Homo sapiens
  source 1..20: mol_type = genomic DNA; note = Gene: AKT3; note = Location (start to end; relative to TSS): AKT3_56_86; note = Orientation (relative to transcription): sense; note = sgRNA Position: 243850163; note = Sequence Name: 56322-704_101_SL_seq_1943
tggggggaggacaggagggg

SEQ ID NO: 1944 - DNA, 20 bp, Homo sapiens
  source 1..20: mol_type = genomic DNA; note = Gene: AKT3; note = Location (start to end; relative to TSS): AKT3_23_53; note = Orientation (relative to transcription): sense; note = sgRNA Position: 243850196; note = Sequence Name: 56322-704_101_SL_seq_1944
accgggctccaggaggccag

SEQ ID NO: 1945 - DNA, 20 bp, Homo sapiens
  source 1..20: mol_type = genomic DNA; note = Gene: AKT3; note = Location (start to end; relative to TSS): AKT3_53_83; note = Orientation (relative to transcription): sense; note = sgRNA Position: 243850166; note = Sequence Name: 56322-704_101_SL_seq_1945
gggtggggggaggacaggag

SEQ ID NO: 1946 - DNA, 20 bp, Homo sapiens
  source 1..20: mol_type = genomic DNA; note = Gene: AKT3; note = Location (start to end; relative to TSS): AKT3_20_50; note = Orientation (relative to transcription): antisense; note = sgRNA Position: 243850219; note = Sequence Name: 56322-704_101_SL_seq_1946
tggagcccggtgcggccggc

SEQ ID NO: 1947 - DNA, 20 bp, Homo sapiens
  source 1..20: mol_type = genomic DNA; note = Gene: AKT3; note = Location (start to end; relative to TSS): AKT3_52_82; note = Orientation (relative to transcription): sense; note = sgRNA Position: 243850167; note = Sequence Name: 56322-704_101_SL_seq_1947
ggggtggggggaggacagga

SEQ ID NO: 1948 - DNA, 20 bp, Homo sapiens
  source 1..20: mol_type = genomic DNA; note = Gene: AKT3; note = Location (start to end; relative to TSS): AKT3_21_51; note = Orientation (relative to transcription): antisense; note = sgRNA Position: 243850218; note = Sequence Name: 56322-704_101_SL_seq_1948
ctggagcccggtgcggccgg

SEQ ID NO: 1949 - DNA, 20 bp, Homo sapiens
  source 1..20: mol_type = genomic DNA; note = Gene: AKT3; note = Location (start to end; relative to TSS): AKT3_51_81; note = Orientation (relative to transcription): sense; note = sgRNA Position: 243850168; note = Sequence Name: 56322-704_101_SL_seq_1949
tggggtggggggaggacagg

SEQ ID NO: 1950 - DNA, 20 bp, Homo sapiens
  source 1..20: mol_type = genomic DNA; note = Gene: ALK; note = Location (start to end; relative to TSS): ALK_42_72; note = Orientation (relative to transcription): sense; note = sgRNA Position: 29921520; note = Sequence Name: 56322-704_101_SL_seq_1950
ctcccgccgcctctgttcgg

SEQ ID NO: 1951 - DNA, 20 bp, Homo sapiens
  source 1..20: mol_type = genomic DNA; note = Gene: ALK; note = Location (start to end; relative to TSS): ALK_100_130; note = Orientation (relative to transcription): sense; note = sgRNA Position: 29921462; note = Sequence Name: 56322-704_101_SL_seq_1951
tggtcggccacccaaagccg

SEQ ID NO: 1952 - DNA, 20 bp, Homo sapiens
  source 1..20: mol_type = genomic DNA; note = Gene: ALK; note = Location (start to end; relative to TSS): ALK_43_73; note = Orientation (relative to transcription): sense; note = sgRNA Position: 29921519; note = Sequence Name: 56322-704_101_SL_seq_1952
tcccgccgcctctgttcgga

SEQ ID NO: 1953 - DNA, 20 bp, Homo sapiens
  source 1..20: mol_type = genomic DNA; note = Gene: ALK; note = Location (start to end; relative to TSS): ALK_85_115; note = Orientation (relative to transcription): antisense; note = sgRNA Position: 29921497; note = Sequence Name: 56322-704_101_SL_seq_1953
agggcggccggaaagcacct

SEQ ID NO: 1954 - DNA, 20 bp, Homo sapiens
  source 1..20: mol_type = genomic DNA; note = Gene: ALK; note = Location (start to end; relative to TSS): ALK_39_69; note = Orientation (relative to transcription): sense; note = sgRNA Position: 29921523; note = Sequence Name: 56322-704_101_SL_seq_1954
tacctcccgccgcctctgtt

SEQ ID NO: 1955 - DNA, 20 bp, Homo sapiens
  source 1..20: mol_type = genomic DNA; note = Gene: ALK; note = Location (start to end; relative to TSS): ALK_84_114; note = Orientation (relative to transcription): sense; note = sgRNA Position: 29921478; note = Sequence Name: 56322-704_101_SL_seq_1955
ctttccggccgccctctggt

SEQ ID NO: 1956 - DNA, 20 bp, Homo sapiens
  source 1..20: mol_type = genomic DNA; note = Gene: ALK; note = Location (start to end; relative to TSS): ALK_49_79; note = Orientation (relative to transcription): sense; note = sgRNA Position: 29921513; note = Sequence Name: 56322-704_101_SL_seq_1956
cgcctctgttcggagggtcg

SEQ ID NO: 1957 - DNA, 20 bp, Homo sapiens
  source 1..20: mol_type = genomic DNA; note = Gene: ALK; note = Location (start to end; relative to TSS): ALK_80_110; note = Orientation (relative to transcription): sense; note = sgRNA Position: 29921482; note = Sequence Name: 56322-704_101_SL_seq_1957
ggtgctttccggccgccctc

SEQ ID NO: 1958 - DNA, 20 bp, Homo sapiens
  source 1..20: mol_type = genomic DNA; note = Gene: ALK; note = Location (start to end; relative to TSS): ALK_16_46; note = Orientation (relative to transcription): sense; note = sgRNA Position: 29921546; note = Sequence Name: 56322-704_101_SL_seq_1958
gcggcagcggtggtagcagc

SEQ ID NO: 1959 - DNA, 20 bp, Homo sapiens
  source 1..20: mol_type = genomic DNA; note = Gene: ALK; note = Location (start to end; relative to TSS): ALK_49_79; note = Orientation (relative to transcription): sense; note = sgRNA Position: 29921513; note = Sequence Name: 56322-704_101_SL_seq_1959
cgcctctgttcggagggtcg

SEQ ID NO: 1960 - DNA, 20 bp, Homo sapiens
  source 1..20: mol_type = genomic DNA; note = Gene: ALPK1; note = Location (start to end; relative to TSS): ALPK1_108_138; note = Orientation (relative to transcription): sense; note = sgRNA Position: 112297503; note = Sequence Name: 56322-704_101_SL_seq_1960
aaatgacaaaacgcagtaga

SEQ ID NO: 1961 - DNA, 20 bp, Homo sapiens
  source 1..20: mol_type = genomic DNA; note = Gene: ALPK1; note = Location (start to end; relative to TSS): ALPK1_236_266; note = Orientation (relative to transcription): sense; note = sgRNA Position: 112297631; note = Sequence Name: 56322-704_101_SL_seq_1961
ataatagaaactttccagaa

SEQ ID NO: 1962 - DNA, 20 bp, Homo sapiens
  source 1..20: mol_type = genomic DNA; note = Gene: ALPK1; note = Location (start to end; relative to TSS): ALPK1_122_152; note = Orientation (relative to transcription): sense; note = sgRNA Position: 112297517; note = Sequence Name: 56322-704_101_SL_seq_1962
agtagatggcataatatatg

SEQ ID NO: 1963 - DNA, 20 bp, Homo sapiens
  source 1..20: mol_type = genomic DNA; note = Gene: ALPK1; note = Location (start to end; relative to TSS): ALPK1_232_262; note = Orientation (relative to transcription): antisense; note = sgRNA Position: 112297607; note = Sequence Name: 56322-704_101_SL_seq_1963
tttctattatagaagtgcaa

SEQ ID NO: 1964 - DNA, 20 bp, Homo sapiens
  source 1..20: mol_type = genomic DNA; note = Gene: ALPK1; note = Location (start to end; relative to TSS): ALPK1_85_115; note = Orientation (relative to transcription): antisense; note = sgRNA Position: 112297460; note = Sequence Name: 56322-704_101_SL_seq_1964
tactcacttttatcttaaag

SEQ ID NO: 1965 - DNA, 20 bp, Homo sapiens
  source 1..20: mol_type = genomic DNA; note = Gene: ALPK1; note = Location (start to end; relative to TSS): ALPK1_122_152; note = Orientation (relative to transcription): sense; note = sgRNA Position: 112297517; note = Sequence Name: 56322-704_101_SL_seq_1965
agtagatggcataatatatg

SEQ ID NO: 1966 - DNA, 20 bp, Homo sapiens
  source 1..20: mol_type = genomic DNA; note = Gene: ALPK1; note = Location (start to end; relative to TSS): ALPK1_-22_8; note = Orientation (relative to transcription): antisense; note = sgRNA Position: 112297353; note = Sequence Name: 56322-704_101_SL_seq_1966
cggcttcagtttcaggaagt

SEQ ID NO: 1967 - DNA, 20 bp, Homo sapiens
  source 1..20: mol_type = genomic DNA; note = Gene: ALPK1; note = Location (start to end; relative to TSS): ALPK1_108_138; note = Orientation (relative to transcription): sense; note = sgRNA Position: 112297503; note = Sequence Name: 56322-704_101_SL_seq_1967
aaatgacaaaacgcagtaga

SEQ ID NO: 1968 - DNA, 20 bp, Homo sapiens
  source 1..20: mol_type = genomic DNA; note = Gene: ALPK1; note = Location (start to end; relative to TSS): ALPK1_-74_-44; note = Orientation (relative to transcription): sense; note = sgRNA Position: 112297321; note = Sequence Name: 56322-704_101_SL_seq_1968
ttctgagacagtcacaggat

SEQ ID NO: 1969 - DNA, 20 bp, Homo sapiens
  source 1..20: mol_type = genomic DNA; note = Gene: ALPK1; note = Location (start to end; relative to TSS): ALPK1_85_115; note = Orientation (relative to transcription): antisense; note = sgRNA Position: 112297460; note = Sequence Name: 56322-704_101_SL_seq_1969
tactcacttttatcttaaag

SEQ ID NO: 1970 - DNA, 20 bp, Homo sapiens
  source 1..20: mol_type = genomic DNA; note = Gene: ALPK2; note = Location (start to end; relative to TSS): ALPK2_47_77; note = Orientation (relative to transcription): sense; note = sgRNA Position: 58629020; note = Sequence Name: 56322-704_101_SL_seq_1970
gcaatgacctagttcactga

SEQ ID NO: 1971 - DNA, 20 bp, Homo sapiens
  source 1..20: mol_type = genomic DNA; note = Gene: ALPK2; note = Location (start to end; relative to TSS): ALPK2_106_136; note = Orientation (relative to transcription): sense; note = sgRNA Position: 58628961; note = Sequence Name: 56322-704_101_SL_seq_1971
ggcatggaatttcccctctt

SEQ ID NO: 1972 - DNA, 20 bp, Homo sapiens
  source 1..20: mol_type = genomic DNA; note = Gene: ALPK2; note = Location (start to end; relative to TSS): ALPK2_48_78; note = Orientation (relative to transcription): sense; note = sgRNA Position: 58629019; note = Sequence Name: 56322-704_101_SL_seq_1972
caatgacctagttcactgaa

SEQ ID NO: 1973 - DNA, 20 bp, Homo sapiens
  source 1..20: mol_type = genomic DNA; note = Gene: ALPK2; note = Location (start to end; relative to TSS): ALPK2_101_131; note = Orientation (relative to transcription): antisense; note = sgRNA Position: 58628986; note = Sequence Name: 56322-704_101_SL_seq_1973
ttccatgcccggggaagttc

SEQ ID NO: 1974 - DNA, 20 bp, Homo sapiens
  source 1..20: mol_type = genomic DNA; note = Gene: ALPK2; note = Location (start to end; relative to TSS): ALPK2_51_81; note = Orientation (relative to transcription): sense; note = sgRNA Position: 58629016; note = Sequence Name: 56322-704_101_SL_seq_1974
tgacctagttcactgaaggg

SEQ ID NO: 1975 - DNA, 20 bp, Homo sapiens
  source 1..20: mol_type = genomic DNA; note = Gene: ALPK2; note = Location (start to end; relative to TSS): ALPK2_90_120; note = Orientation (relative to transcription): sense; note = sgRNA Position: 58628977; note = Sequence Name: 56322-704_101_SL_seq_1975
ttccagaacttccccgggca

SEQ ID NO: 1976 - DNA, 20 bp, Homo sapiens
  source 1..20: mol_type = genomic DNA; note = Gene: ALPK2; note = Location (start to end; relative to TSS): ALPK2_52_82; note = Orientation (relative to transcription): sense; note = sgRNA Position: 58629015; note = Sequence Name: 56322-704_101_SL_seq_1976
gacctagttcactgaagggc

SEQ ID NO: 1977 - DNA, 20 bp, Homo sapiens
  source 1..20: mol_type = genomic DNA; note = Gene: ALPK2; note = Location (start to end; relative to TSS): ALPK2_85_115; note = Orientation (relative to transcription): sense; note = sgRNA Position: 58628982; note = Sequence Name: 56322-704_101_SL_seq_1977
tcttcttccagaacttcccc

SEQ ID NO: 1978 - DNA, 20 bp, Homo sapiens
  source 1..20: mol_type = genomic DNA; note = Gene: ALPK2; note = Location (start to end; relative to TSS): ALPK2_53_83; note = Orientation (relative to transcription): sense; note = sgRNA Position: 58629014; note = Sequence Name: 56322-704_101_SL_seq_1978
acctagttcactgaagggcg

SEQ ID NO: 1979 - DNA, 20 bp, Homo sapiens
  source 1..20: mol_type = genomic DNA; note = Gene: ALPK2; note = Location (start to end; relative to TSS): ALPK2_84_114; note = Orientation (relative to transcription): sense; note = sgRNA Position: 58628983; note = Sequence Name: 56322-704_101_SL_seq_1979
ctcttcttccagaacttccc

SEQ ID NO: 1980 - DNA, 20 bp, Homo sapiens
  source 1..20: mol_type = genomic DNA; note = Gene: ALPK3; note = Location (start to end; relative to TSS): ALPK3_32_62; note = Orientation (relative to transcription): antisense; note = sgRNA Position: 84817394; note = Sequence Name: 56322-704_101_SL_seq_1980
ctcgcctgtcctccaggccc

SEQ ID NO: 1981 - DNA, 20 bp, Homo sapiens
  source 1..20: mol_type = genomic DNA; note = Gene: ALPK3; note = Location (start to end; relative to TSS): ALPK3_71_101; note = Orientation (relative to transcription): sense; note = sgRNA Position: 84817453; note = Sequence Name: 56322-704_101_SL_seq_1981
tcggggagggcggtgccatg

SEQ ID NO: 1982 - DNA, 20 bp, Homo sapiens
  source 1..20: mol_type = genomic DNA; note = Gene: ALPK3; note = Location (start to end; relative to TSS): ALPK3_38_68; note = Orientation (relative to transcription): antisense; note = sgRNA Position: 84817400; note = Sequence Name: 56322-704_101_SL_seq_1982
cgctgcctcgcctgtcctcc

SEQ ID NO: 1983 - DNA, 20 bp, Homo sapiens
  source 1..20: mol_type = genomic DNA; note = Gene: ALPK3; note = Location (start to end; relative to TSS): ALPK3_70_100; note = Orientation (relative to transcription): sense; note = sgRNA Position: 84817452; note = Sequence Name: 56322-704_101_SL_seq_1983
gtcggggagggcggtgccat

SEQ ID NO: 1984 - DNA, 20 bp, Homo sapiens
  source 1..20: mol_type = genomic DNA; note = Gene: ALPK3; note = Location (start to end; relative to TSS): ALPK3_39_69; note = Orientation (relative to transcription): sense; note = sgRNA Position: 84817421; note = Sequence Name: 56322-704_101_SL_seq_1984
aggcgaggcagcggcgagtg

SEQ ID NO: 1985 - DNA, 20 bp, Homo sapiens
  source 1..20: mol_type = genomic DNA; note = Gene: ALPK3; note = Location (start to end; relative to TSS): ALPK3_69_99; note = Orientation (relative to transcription): sense; note = sgRNA Position: 84817451; note = Sequence Name: 56322-704_101_SL_seq_1985
ggtcggggagggcggtgcca

SEQ ID NO: 1986 - DNA, 20 bp, Homo sapiens
  source 1..20: mol_type = genomic DNA; note = Gene: ALPK3; note = Location (start to end; relative to TSS): ALPK3_30_60; note = Orientation (relative to transcription): sense; note = sgRNA Position: 84817412; note = Sequence Name: 56322-704_101_SL_seq_1986
ctggaggacaggcgaggcag

SEQ ID NO: 1987 - DNA, 20 bp, Homo sapiens
  source 1..20: mol_type = genomic DNA; note = Gene: ALPK3; note = Location (start to end; relative to TSS): ALPK3_61_91; note = Orientation (relative to transcription): sense; note = sgRNA Position: 84817443; note = Sequence Name: 56322-704_101_SL_seq_1987
gggccggcggtcggggaggg

SEQ ID NO: 1988 - DNA, 20 bp, Homo sapiens
  source 1..20: mol_type = genomic DNA; note = Gene: ALPK3; note = Location (start to end; relative to TSS): ALPK3_24_54; note = Orientation (relative to transcription): sense; note = sgRNA Position: 84817406; note = Sequence Name: 56322-704_101_SL_seq_1988
cggggcctggaggacaggcg

SEQ ID NO: 1989 - DNA, 20 bp, Homo sapiens
  source 1..20: mol_type = genomic DNA; note = Gene: ALPK3; note = Location (start to end; relative to TSS): ALPK3_58_88; note = Orientation (relative to transcription): sense; note = sgRNA Position: 84817440; note = Sequence Name: 56322-704_101_SL_seq_1989
gcggggccggcggtcgggga

SEQ ID NO: 1990 - DNA, 20 bp, Homo sapiens
  source 1..20: mol_type = genomic DNA; note = Gene: AMHR2; note = Location (start to end; relative to TSS): AMHR2_65_95; note = Orientation (relative to transcription): antisense; note = sgRNA Position: 53423926; note = Sequence Name: 56322-704_101_SL_seq_1990
cctagcatcttgctggagga

SEQ ID NO: 1991 - DNA, 20 bp, Homo sapiens
  source 1..20: mol_type = genomic DNA; note = Gene: AMHR2; note = Location (start to end; relative to TSS): AMHR2_112_142; note = Orientation (relative to transcription): sense; note = sgRNA Position: 53423993; note = Sequence Name: 56322-704_101_SL_seq_1991
tgtggaaggtaagtgtctac

SEQ ID NO: 1992 - DNA, 20 bp, Homo sapiens
  source 1..20: mol_type = genomic DNA; note = Gene: AMHR2; note = Location (start to end; relative to TSS): AMHR2_56_86; note = Orientation (relative to transcription): sense; note = sgRNA Position: 53423937; note = Sequence Name: 56322-704_101_SL_seq_1992
ccatcctccagcaagatgct

SEQ ID NO: 1993 - DNA, 20 bp, Homo sapiens
  source 1..20: mol_type = genomic DNA; note = Gene: AMHR2; note = Location (start to end; relative to TSS): AMHR2_98_128; note = Orientation (relative to transcription): sense; note = sgRNA Position: 53423979; note = Sequence Name: 56322-704_101_SL_seq_1993
ttacttcccacagctgtgga

SEQ ID NO: 1994 - DNA, 20 bp, Homo sapiens
  source 1..20: mol_type = genomic DNA; note = Gene: AMHR2; note = Location (start to end; relative to TSS): AMHR2_57_87; note = Orientation (relative to transcription): sense; note = sgRNA Position: 53423938; note = Sequence Name: 56322-704_101_SL_seq_1994
catcctccagcaagatgcta

SEQ ID NO: 1995 - DNA, 20 bp, Homo sapiens
  source 1..20: mol_type = genomic DNA; note = Gene: AMHR2; note = Location (start to end; relative to TSS): AMHR2_94_124; note = Orientation (relative to transcription): sense; note = sgRNA Position: 53423975; note = Sequence Name: 56322-704_101_SL_seq_1995
ggcattacttcccacagctg

SEQ ID NO: 1996 - DNA, 20 bp, Homo sapiens
  source 1..20: mol_type = genomic DNA; note = Gene: AMHR2; note = Location (start to end; relative to TSS): AMHR2_20_50; note = Orientation (relative to transcription): antisense; note = sgRNA Position: 53423881; note = Sequence Name: 56322-704_101_SL_seq_1996
taagccagcacagctgcccc

SEQ ID NO: 1997 - DNA, 20 bp, Homo sapiens
  source 1..20: mol_type = genomic DNA; note = Gene: AMHR2; note = Location (start to end; relative to TSS): AMHR2_57_87; note = Orientation (relative to transcription): sense; note = sgRNA Position: 53423938; note = Sequence Name: 56322-704_101_SL_seq_1997
catcctccagcaagatgcta

SEQ ID NO: 1998 - DNA, 20 bp, Homo sapiens
  source 1..20: mol_type = genomic DNA; note = Gene: AMHR2; note = Location (start to end; relative to TSS): AMHR2_7_37; note = Orientation (relative to transcription): sense; note = sgRNA Position: 53423888; note = Sequence Name: 56322-704_101_SL_seq_1998
ttggccaggggcagctgtgc

SEQ ID NO: 1999 - DNA, 20 bp, Homo sapiens
  source 1..20: mol_type = genomic DNA; note = Gene: AMHR2; note = Location (start to end; relative to TSS): AMHR2_56_86; note = Orientation (relative to transcription): sense; note = sgRNA Position: 53423937; note = Sequence Name: 56322-704_101_SL_seq_1999
ccatcctccagcaagatgct

SEQ ID NO: 2000 - DNA, 20 bp, Homo sapiens
  source 1..20: mol_type = genomic DNA; note = Gene: ANKK1; note = Location (start to end; relative to TSS): ANKK1_47_77; note = Orientation (relative to transcription): antisense; note = sgRNA Position: 113387832; note = Sequence Name: 56322-704_101_SL_seq_2000
cgctgtggctgctgcctggg

SEQ ID NO: 2001 - DNA, 20 bp, Homo sapiens
  source 1..20: mol_type = genomic DNA; note = Gene: ANKK1; note = Location (start to end; relative to TSS): ANKK1_78_108; note = Orientation (relative to transcription): sense; note = sgRNA Position: 113387883; note = Sequence Name: 56322-704_101_SL_seq_2001
ggacaggaagagaggggcaa

SEQ ID NO: 2002 - DNA, 20 bp, Homo sapiens
  source 1..20: mol_type = genomic DNA; note = Gene: ANKK1; note = Location (start to end; relative to TSS): ANKK1_41_71; note = Orientation (relative to transcription): sense; note = sgRNA Position: 113387846; note = Sequence Name: 56322-704_101_SL_seq_2002
cccaggcagcagccacagcg

SEQ ID NO: 2003 - DNA, 20 bp, Homo sapiens
  source 1..20: mol_type = genomic DNA; note = Gene: ANKK1; note = Location (start to end; relative to TSS): ANKK1_72_102; note = Orientation (relative to transcription): sense; note = sgRNA Position: 113387877; note = Sequence Name: 56322-704_101_SL_seq_2003
gcgcggggacaggaagagag

SEQ ID NO: 2004 - DNA, 20 bp, Homo sapiens
  source 1..20: mol_type = genomic DNA; note = Gene: ANKK1; note = Location (start to end; relative to TSS): ANKK1_39_69; note = Orientation (relative to transcription): sense; note = sgRNA Position: 113387844; note = Sequence Name: 56322-704_101_SL_seq_2004
cacccaggcagcagccacag

SEQ ID NO: 2005 - DNA, 20 bp, Homo sapiens
  source 1..20: mol_type = genomic DNA; note = Gene: ANKK1; note = Location (start to end; relative to TSS): ANKK1_71_101; note = Orientation (relative to transcription): sense; note = sgRNA Position: 113387876; note = Sequence Name: 56322-704_101_SL_seq_2005
ggcgcggggacaggaagaga

SEQ ID NO: 2006 - DNA, 20 bp, Homo sapiens
  source 1..20: mol_type = genomic DNA; note = Gene: ANKK1; note = Location (start to end; relative to TSS): ANKK1_40_70; note = Orientation (relative to transcription): antisense; note = sgRNA Position: 113387825; note = Sequence Name: 56322-704_101_SL_seq_2006
gctgctgcctgggtggccga

SEQ ID NO: 2007 - DNA, 20 bp, Homo sapiens
  source 1..20: mol_type = genomic DNA; note = Gene: ANKK1; note = Location (start to end; relative to TSS): ANKK1_70_100; note = Orientation (relative to transcription): sense; note = sgRNA Position: 113387875; note = Sequence Name: 56322-704_101_SL_seq_2007
cggcgcggggacaggaagag

SEQ ID NO: 2008 - DNA, 20 bp, Homo sapiens
  source 1..20: mol_type = genomic DNA; note = Gene: ANKK1; note = Location (start to end; relative to TSS): ANKK1_24_54; note = Orientation (relative to transcription): sense; note = sgRNA Position: 113387829; note = Sequence Name: 56322-704_101_SL_seq_2008
ggcggctccttcggccaccc

SEQ ID NO: 2009 - DNA, 20 bp, Homo sapiens
  source 1..20: mol_type = genomic DNA; note = Gene: ANKK1; note = Location (start to end; relative to TSS): ANKK1_55_85; note = Orientation (relative to transcription): sense; note = sgRNA Position: 113387860; note = Sequence Name: 56322-704_101_SL_seq_2009
acagcggggagtgcgcggcg

SEQ ID NO: 2010 - DNA, 20 bp, Homo sapiens
  source 1..20: mol_type = genomic DNA; note = Gene: ARAF; note = Location (start to end; relative to TSS): ARAF_32_62; note = Orientation (relative to transcription): sense; note = sgRNA Position: 47561263; note = Sequence Name: 56322-704_101_SL_seq_2010
tgacaggtgagggcgggccc

SEQ ID NO: 2011 - DNA, 20 bp, Homo sapiens
  source 1..20: mol_type = genomic DNA; note = Gene: ARAF; note = Location (start to end; relative to TSS): ARAF_66_96; note = Orientation (relative to transcription): sense; note = sgRNA Position: 47561297; note = Sequence Name: 56322-704_101_SL_seq_2011
tctggagcggctgccgggca

SEQ ID NO: 2012 - DNA, 20 bp, Homo sapiens
  source 1..20: mol_type = genomic DNA; note = Gene: ARAF; note = Location (start to end; relative to TSS): ARAF_25_55; note = Orientation (relative to transcription): sense; note = sgRNA Position: 47561256; note = Sequence Name: 56322-704_101_SL_seq_2012
agcggcgtgacaggtgaggg

SEQ ID NO: 2013 - DNA, 20 bp, Homo sapiens
  source 1..20: mol_type = genomic DNA; note = Gene: ARAF; note = Location (start to end; relative to TSS): ARAF_61_91; note = Orientation (relative to transcription): sense; note = sgRNA Position: 47561292; note = Sequence Name: 56322-704_101_SL_seq_2013
cggtttctggagcggctgcc

SEQ ID NO: 2014 - DNA, 20 bp, Homo sapiens
  source 1..20: mol_type = genomic DNA; note = Gene: ARAF; note = Location (start to end; relative to TSS): ARAF_26_56; note = Orientation (relative to transcription): sense; note = sgRNA Position: 47561257; note = Sequence Name: 56322-704_101_SL_seq_2014
gcggcgtgacaggtgagggc

SEQ ID NO: 2015 - DNA, 20 bp, Homo sapiens
  source 1..20: mol_type = genomic DNA; note = Gene: ARAF; note = Location (start to end; relative to TSS): ARAF_59_89; note = Orientation (relative to transcription): antisense; note = sgRNA Position: 47561270; note = Sequence Name: 56322-704_101_SL_seq_2015
ctccagaaaccgagccctcc

SEQ ID NO: 2016 - DNA, 20 bp, Homo sapiens
  source 1..20: mol_type = genomic DNA; note = Gene: ARAF; note = Location (start to end; relative to TSS): ARAF_22_52; note = Orientation (relative to transcription): sense; note = sgRNA Position: 47561253; note = Sequence Name: 56322-704_101_SL_seq_2016
tgtagcggcgtgacaggtga

SEQ ID NO: 2017 - DNA, 20 bp, Homo sapiens
  source 1..20: mol_type = genomic DNA; note = Gene: ARAF; note = Location (start to end; relative to TSS): ARAF_58_88; note = Orientation (relative to transcription): antisense; note = sgRNA Position: 47561269; note = Sequence Name: 56322-704_101_SL_seq_2017
tccagaaaccgagccctccc

SEQ ID NO: 2018 - DNA, 20 bp, Homo sapiens
  source 1..20: mol_type = genomic DNA; note = Gene: ARAF; note = Location (start to end; relative to TSS): ARAF_21_51; note = Orientation (relative to transcription): sense; note = sgRNA Position: 47561252; note = Sequence Name: 56322-704_101_SL_seq_2018
ctgtagcggcgtgacaggtg

SEQ ID NO: 2019 - DNA, 20 bp, Homo sapiens
  source 1..20: mol_type = genomic DNA; note = Gene: ARAF; note = Location (start to end; relative to TSS): ARAF_53_83; note = Orientation (relative to transcription): sense; note = sgRNA Position: 47561284; note = Sequence Name: 56322-704_101_SL_seq_2019
ggagggctcggtttctggag

SEQ ID NO: 2020 - DNA, 20 bp, Homo sapiens
  source 1..20: mol_type = genomic DNA; note = Gene: ATM; note = Location (start to end; relative to TSS): ATM_32_62; note = Orientation (relative to transcription): sense; note = sgRNA Position: 108223125; note = Sequence Name: 56322-704_101_SL_seq_2020
gggaggaggcgagaggagtc

SEQ ID NO: 2021 - DNA, 20 bp, Homo sapiens
  source 1..20: mol_type = genomic DNA; note = Gene: ATM; note = Location (start to end; relative to TSS): ATM_89_119; note = Orientation (relative to transcription): sense; note = sgRNA Position: 108223182; note = Sequence Name: 56322-704_101_SL_seq_2021
ctttgaccttccgagtgcag

SEQ ID NO: 2022 - DNA, 20 bp, Homo sapiens
  source 1..20: mol_type = genomic DNA; note = Gene: ATM; note = Location (start to end; relative to TSS): ATM_31_61; note = Orientation (relative to transcription): antisense; note = sgRNA Position: 108223104; note = Sequence Name: 56322-704_101_SL_seq_2022
ctcgcctcctcccgcggcca

SEQ ID NO: 2023 - DNA, 20 bp, Homo sapiens
  source 1..20: mol_type = genomic DNA; note = Gene: ATM; note = Location (start to end; relative to TSS): ATM_83_113; note = Orientation (relative to transcription): antisense; note = sgRNA Position: 108223156; note = Sequence Name: 56322-704_101_SL_seq_2023
ggtcaaagtagtatcaaccg

SEQ ID NO: 2024 - DNA, 20 bp, Homo sapiens
  source 1..20: mol_type = genomic DNA; note = Gene: ATM; note = Location (start to end; relative to TSS): ATM_37_67; note = Orientation (relative to transcription): antisense; note = sgRNA Position: 108223110; note = Sequence Name: 56322-704_101_SL_seq_2024
actcctctcgcctcctcccg

SEQ ID NO: 2025 - DNA, 20 bp, Homo sapiens
  source 1..20: mol_type = genomic DNA; note = Gene: ATM; note = Location (start to end; relative to TSS): ATM_80_110; note = Orientation (relative to transcription): antisense; note = sgRNA Position: 108223153; note = Sequence Name: 56322-704_101_SL_seq_2025
caaagtagtatcaaccgcgg

SEQ ID NO: 2026 - DNA, 20 bp, Homo sapiens
  source 1..20: mol_type = genomic DNA; note = Gene: ATM; note = Location (start to end; relative to TSS): ATM_25_55; note = Orientation (relative to transcription): sense; note = sgRNA Position: 108223118; note = Sequence Name: 56322-704_101_SL_seq_2026
tggccgcgggaggaggcgag

SEQ ID NO: 2027 - DNA, 20 bp, Homo sapiens
  source 1..20: mol_type = genomic DNA; note = Gene: ATM; note = Location (start to end; relative to TSS): ATM_77_107; note = Orientation (relative to transcription): antisense; note = sgRNA Position: 108223150; note = Sequence Name: 56322-704_101_SL_seq_2027
agtagtatcaaccgcggcgg

SEQ ID NO: 2028 - DNA, 20 bp, Homo sapiens
  source 1..20: mol_type = genomic DNA; note = Gene: ATM; note = Location (start to end; relative to TSS): ATM_18_48; note = Orientation (relative to transcription): sense; note = sgRNA Position: 108223111; note = Sequence Name: 56322-704_101_SL_seq_2028
gaagccgtggccgcgggagg

SEQ ID NO: 2029 - DNA, 20 bp, Homo sapiens
  source 1..20: mol_type = genomic DNA; note = Gene: ATM; note = Location (start to end; relative to TSS): ATM_57_87; note = Orientation (relative to transcription): sense; note = sgRNA Position: 108223150; note = Sequence Name: 56322-704_101_SL_seq_2029
ctgcgctgcagccaccgccg

SEQ ID NO: 2030 - DNA, 20 bp, Homo sapiens
  source 1..20: mol_type = genomic DNA; note = Gene: ATR; note = Location (start to end; relative to TSS): ATR_44_74; note = Orientation (relative to transcription): antisense; note = sgRNA Position: 142578685; note = Sequence Name: 56322-704_101_SL_seq_2030
ggatcatggaagccagctcc

SEQ ID NO: 2031 - DNA, 20 bp, Homo sapiens
  source 1..20: mol_type = genomic DNA; note = Gene: ATR; note = Location (start to end; relative to TSS): ATR_101_131; note = Orientation (relative to transcription): antisense; note = sgRNA Position: 142578628; note = Sequence Name: 56322-704_101_SL_seq_2031
ggaggatgcaggacccaggc

SEQ ID NO: 2032 - DNA, 20 bp, Homo sapiens
  source 1..20: mol_type = genomic DNA; note = Gene: ATR; note = Location (start to end; relative to TSS): ATR_46_76; note = Orientation (relative to transcription): sense; note = sgRNA Position: 142578663; note = Sequence Name: 56322-704_101_SL_seq_2032
cttccatgatccccgccctg

SEQ ID NO: 2033 - DNA, 20 bp, Homo sapiens
  source 1..20: mol_type = genomic DNA; note = Gene: ATR; note = Location (start to end; relative to TSS): ATR_100_130; note = Orientation (relative to transcription): antisense; note = sgRNA Position: 142578629; note = Sequence Name: 56322-704_101_SL_seq_2033
gaggatgcaggacccaggct

SEQ ID NO: 2034 - DNA, 20 bp, Homo sapiens
  source 1..20: mol_type = genomic DNA; note = Gene: ATR; note = Location (start to end; relative to TSS): ATR_47_77; note = Orientation (relative to transcription): sense; note = sgRNA Position: 142578662; note = Sequence Name: 56322-704_101_SL_seq_2034
ttccatgatccccgccctgc

SEQ ID NO: 2035 - DNA, 20 bp, Homo sapiens
  source 1..20: mol_type = genomic DNA; note = Gene: ATR; note = Location (start to end; relative to TSS): ATR_79_109; note = Orientation (relative to transcription): sense; note = sgRNA Position: 142578630; note = Sequence Name: 56322-704_101_SL_seq_2035
ggtagggctaggcccagcct

SEQ ID NO: 2036 - DNA, 20 bp, Homo sapiens
  source 1..20: mol_type = genomic DNA; note = Gene: ATR; note = Location (start to end; relative to TSS): ATR_23_53; note = Orientation (relative to transcription): antisense; note = sgRNA Position: 142578706; note = Sequence Name: 56322-704_101_SL_seq_2036
ggccatgttcccccatgctg

SEQ ID NO: 2037 - DNA, 20 bp, Homo sapiens
  source 1..20: mol_type = genomic DNA; note = Gene: ATR; note = Location (start to end; relative to TSS): ATR_54_84; note = Orientation (relative to transcription): sense; note = sgRNA Position: 142578655; note = Sequence Name: 56322-704_101_SL_seq_2037
atccccgccctgcgggagct

SEQ ID NO: 2038 - DNA, 20 bp, Homo sapiens
  source 1..20: mol_type = genomic DNA; note = Gene: ATR; note = Location (start to end; relative to TSS): ATR_17_47; note = Orientation (relative to transcription): sense; note = sgRNA Position: 142578692; note = Sequence Name: 56322-704_101_SL_seq_2038
cagcatgggggaacatggcc

SEQ ID NO: 2039 - DNA, 20 bp, Homo sapiens
  source 1..20: mol_type = genomic DNA; note = Gene: ATR; note = Location (start to end; relative to TSS): ATR_47_77; note = Orientation (relative to transcription): sense; note = sgRNA Position: 142578662; note = Sequence Name: 56322-704_101_SL_seq_2039
ttccatgatccccgccctgc

SEQ ID NO: 2040 - DNA, 20 bp, Homo sapiens
  source 1..20: mol_type = genomic DNA; note = Gene: AURKA; note = Location (start to end; relative to TSS): AURKA_32_62; note = Orientation (relative to transcription): sense; note = sgRNA Position: 56392159; note = Sequence Name: 56322-704_101_SL_seq_2040
ggtcgcaggtgggagccgac

SEQ ID NO: 2041 - DNA, 20 bp, Homo sapiens
  source 1..20: mol_type = genomic DNA; note = Gene: AURKA; note = Location (start to end; relative to TSS): AURKA_70_100; note = Orientation (relative to transcription): sense; note = sgRNA Position: 56392121; note = Sequence Name: 56322-704_101_SL_seq_2041
ggatatctcagtggcggacg

SEQ ID NO: 2042 - DNA, 20 bp, Homo sapiens
  source 1..20: mol_type = genomic DNA; note = Gene: AURKA; note = Location (start to end; relative to TSS): AURKA_31_61; note = Orientation (relative to transcription): sense; note = sgRNA Position: 56392160; note = Sequence Name: 56322-704_101_SL_seq_2042
gggtcgcaggtgggagccga

SEQ ID NO: 2043 - DNA, 20 bp, Homo sapiens
  source 1..20: mol_type = genomic DNA; note = Gene: AURKA; note = Location (start to end; relative to TSS): AURKA_64_94; note = Orientation (relative to transcription): sense; note = sgRNA Position: 56392127; note = Sequence Name: 56322-704_101_SL_seq_2043
cgtgggggatatctcagtgg

SEQ ID NO: 2044 - DNA, 20 bp, Homo sapiens
  source 1..20: mol_type = genomic DNA; note = Gene: AURKA; note = Location (start to end; relative to TSS): AURKA_21_51; note = Orientation (relative to transcription): sense; note = sgRNA Position: 56392170; note = Sequence Name: 56322-704_101_SL_seq_2044
ttgggtccttgggtcgcagg

SEQ ID NO: 2045 - DNA, 20 bp, Homo sapiens
  source 1..20: mol_type = genomic DNA; note = Gene: AURKA; note = Location (start to end; relative to TSS): AURKA_61_91; note = Orientation (relative to transcription): sense; note = sgRNA Position: 56392130; note = Sequence Name: 56322-704_101_SL_seq_2045
gaccgtgggggatatctcag

SEQ ID NO: 2046 - DNA, 20 bp, Homo sapiens
  source 1..20: mol_type = genomic DNA; note = Gene: AURKA; note = Location (start to end; relative to TSS): AURKA_22_52; note = Orientation (relative to transcription): sense; note = sgRNA Position: 56392169; note = Sequence Name: 56322-704_101_SL_seq_2046
tgggtccttgggtcgcaggt

SEQ ID NO: 2047 - DNA, 20 bp, Homo sapiens
  source 1..20: mol_type = genomic DNA; note = Gene: AURKA; note = Location (start to end; relative to TSS): AURKA_56_86; note = Orientation (relative to transcription): antisense; note = sgRNA Position: 56392155; note = Sequence Name: 56322-704_101_SL_seq_2047
cccacggtctacccacccgt

SEQ ID NO: 2048 - DNA, 20 bp, Homo sapiens
  source 1..20: mol_type = genomic DNA; note = Gene: AURKA; note = Location (start to end; relative to TSS): AURKA_18_48; note = Orientation (relative to transcription): sense; note = sgRNA Position: 56392173; note = Sequence Name: 56322-704_101_SL_seq_2048
gacttgggtccttgggtcgc

SEQ ID NO: 2049 - DNA, 20 bp, Homo sapiens
  source 1..20: mol_type = genomic DNA; note = Gene: AURKA; note = Location (start to end; relative to TSS): AURKA_48_78; note = Orientation (relative to transcription): sense; note = sgRNA Position: 56392143; note = Sequence Name: 56322-704_101_SL_seq_2049
cgacgggtgggtagaccgtg

SEQ ID NO: 2050 - DNA, 20 bp, Homo sapiens
  source 1..20: mol_type = genomic DNA; note = Gene: AURKB; note = Location (start to end; relative to TSS): AURKB_41_71; note = Orientation (relative to transcription): antisense; note = sgRNA Position: 8210530; note = Sequence Name: 56322-704_101_SL_seq_2050
acaggaggccagctcacctg

SEQ ID NO: 2051 - DNA, 20 bp, Homo sapiens
  source 1..20: mol_type = genomic DNA; note = Gene: AURKB; note = Location (start to end; relative to TSS): AURKB_79_109; note = Orientation (relative to transcription): sense; note = sgRNA Position: 8210472; note = Sequence Name: 56322-704_101_SL_seq_2051
cagatgatcaggtagatcag

SEQ ID NO: 2052 - DNA, 20 bp, Homo sapiens
  source 1..20: mol_type = genomic DNA; note = Gene: AURKB; note = Location (start to end; relative to TSS): AURKB_42_72; note = Orientation (relative to transcription): antisense; note = sgRNA Position: 8210529; note = Sequence Name: 56322-704_101_SL_seq_2052
gacaggaggccagctcacct

SEQ ID NO: 2053 - DNA, 20 bp, Homo sapiens
  source 1..20: mol_type = genomic DNA; note = Gene: AURKB; note = Location (start to end; relative to TSS): AURKB_77_107; note = Orientation (relative to transcription): antisense; note = sgRNA Position: 8210494; note = Sequence Name: 56322-704_101_SL_seq_2053
cctgatcatctgcccactcc

SEQ ID NO: 2054 - DNA, 20 bp, Homo sapiens
  source 1..20: mol_type = genomic DNA; note = Gene: AURKB; note = Location (start to end; relative to TSS): AURKB_34_64; note = Orientation (relative to transcription): antisense; note = sgRNA Position: 8210537; note = Sequence Name: 56322-704_101_SL_seq_2054
gccagctcacctggggtcca

SEQ ID NO: 2055 - DNA, 20 bp, Homo sapiens
  source 1..20: mol_type = genomic DNA; note = Gene: AURKB; note = Location (start to end; relative to TSS): AURKB_70_100; note = Orientation (relative to transcription): antisense; note = sgRNA Position: 8210501; note = Sequence Name: 56322-704_101_SL_seq_2055
atctgcccactcccggcgca

SEQ ID NO: 2056 - DNA, 20 bp, Homo sapiens
  source 1..20: mol_type = genomic DNA; note = Gene: AURKB; note = Location (start to end; relative to TSS): AURKB_38_68; note = Orientation (relative to transcription): sense; note = sgRNA Position: 8210513; note = Sequence Name: 56322-704_101_SL_seq_2056
gtgagctggcctcctgtcgc

SEQ ID NO: 2057 - DNA, 20 bp, Homo sapiens
  source 1..20: mol_type = genomic DNA; note = Gene: AURKB; note = Location (start to end; relative to TSS): AURKB_68_98; note = Orientation (relative to transcription): sense; note = sgRNA Position: 8210483; note = Sequence Name: 56322-704_101_SL_seq_2057
ccgggagtgggcagatgatc

SEQ ID NO: 2058 - DNA, 20 bp, Homo sapiens
  source 1..20: mol_type = genomic DNA; note = Gene: AURKB; note = Location (start to end; relative to TSS): AURKB_24_54; note = Orientation (relative to transcription): sense; note = sgRNA Position: 8210527; note = Sequence Name: 56322-704_101_SL_seq_2058
gccttggaccccaggtgagc

SEQ ID NO: 2059 - DNA, 20 bp, Homo sapiens
  source 1..20: mol_type = genomic DNA; note = Gene: AURKB; note = Location (start to end; relative to TSS): AURKB_55_85; note = Orientation (relative to transcription): sense; note = sgRNA Position: 8210496; note = Sequence Name: 56322-704_101_SL_seq_2059
cgcaggccttgcgccgggag

SEQ ID NO: 2060 - DNA, 20 bp, Homo sapiens
  source 1..20: mol_type = genomic DNA; note = Gene: AURKC; note = Location (start to end; relative to TSS): AURKC_55_85; note = Orientation (relative to transcription): antisense; note = sgRNA Position: 57231084; note = Sequence Name: 56322-704_101_SL_seq_2060
tacacaggcttcgggatccg

SEQ ID NO: 2061 - DNA, 20 bp, Homo sapiens
  source 1..20: mol_type = genomic DNA; note = Gene: AURKC; note = Location (start to end; relative to TSS): AURKC_87_117; note = Orientation (relative to transcription): sense; note = sgRNA Position: 57231136; note = Sequence Name: 56322-704_101_SL_seq_2061
ggctgcaggacgagcaggat

SEQ ID NO: 2062 - DNA, 20 bp, Homo sapiens
  source 1..20: mol_type = genomic DNA; note = Gene: AURKC; note = Location (start to end; relative to TSS): AURKC_37_67; note = Orientation (relative to transcription): antisense; note = sgRNA Position: 57231066; note = Sequence Name: 56322-704_101_SL_seq_2062
cgcggcgtcgtgagcagccg

SEQ ID NO: 2063 - DNA, 20 bp, Homo sapiens
  source 1..20: mol_type = genomic DNA; note = Gene: AURKC; note = Location (start to end; relative to TSS): AURKC_70_100; note = Orientation (relative to transcription): antisense; note = sgRNA Position: 57231099; note = Sequence Name: 56322-704_101_SL_seq_2063
ctgatgtctcactgctacac

SEQ ID NO: 2064 - DNA, 20 bp, Homo sapiens
  source 1..20: mol_type = genomic DNA; note = Gene: AURKC; note = Location (start to end; relative to TSS): AURKC_29_59; note = Orientation (relative to transcription): antisense; note = sgRNA Position: 57231058; note = Sequence Name: 56322-704_101_SL_seq_2064
cgtgagcagccgtggctgcg

SEQ ID NO: 2065 - DNA, 20 bp, Homo sapiens
  source 1..20: mol_type = genomic DNA; note = Gene: AURKC; note = Location (start to end; relative to TSS): AURKC_64_94; note = Orientation (relative to transcription): antisense; note = sgRNA Position: 57231093; note = Sequence Name: 56322-704_101_SL_seq_2065
tctcactgctacacaggctt

SEQ ID NO: 2066 - DNA, 20 bp, Homo sapiens
  source 1..20: mol_type = genomic DNA; note = Gene: AURKC; note = Location (start to end; relative to TSS): AURKC_12_42; note = Orientation (relative to transcription): antisense; note = sgRNA Position: 57231041; note = Sequence Name: 56322-704_101_SL_seq_2066
gcgcggccttcttttatacc

SEQ ID NO: 2067 - DNA, 20 bp, Homo sapiens
  source 1..20: mol_type = genomic DNA; note = Gene: AURKC; note = Location (start to end; relative to TSS): AURKC_63_93; note = Orientation (relative to transcription): antisense; note = sgRNA Position: 57231092; note = Sequence Name: 56322-704_101_SL_seq_2067
ctcactgctacacaggcttc

SEQ ID NO: 2068 - DNA, 20 bp, Homo sapiens
  source 1..20: mol_type = genomic DNA; note = Gene: AURKC; note = Location (start to end; relative to TSS): AURKC_11_41; note = Orientation (relative to transcription): sense; note = sgRNA Position: 57231060; note = Sequence Name: 56322-704_101_SL_seq_2068
aaaagaaggccgcgcagcca

SEQ ID NO: 2069 - DNA, 20 bp, Homo sapiens
  source 1..20: mol_type = genomic DNA; note = Gene: AURKC; note = Location (start to end; relative to TSS): AURKC_55_85; note = Orientation (relative to transcription): antisense; note = sgRNA Position: 57231084; note = Sequence Name: 56322-704_101_SL_seq_2069
tacacaggcttcgggatccg

SEQ ID NO: 2070 - DNA, 20 bp, Homo sapiens
  source 1..20: mol_type = genomic DNA; note = Gene: AXL; note = Location (start to end; relative to TSS): AXL_39_69; note = Orientation (relative to transcription): antisense; note = sgRNA Position: 41219268; note = Sequence Name: 56322-704_101_SL_seq_2070
cctgcctggcacagcggcag

SEQ ID NO: 2071 - DNA, 20 bp, Homo sapiens
  source 1..20: mol_type = genomic DNA; note = Gene: AXL; note = Location (start to end; relative to TSS): AXL_73_103; note = Orientation (relative to transcription): antisense; note = sgRNA Position: 41219302; note = Sequence Name: 56322-704_101_SL_seq_2071
ccccccagctccaggctccc

SEQ ID NO: 2072 - DNA, 20 bp, Homo sapiens
  source 1..20: mol_type = genomic DNA; note = Gene: AXL; note = Location (start to end; relative to TSS): AXL_36_66; note = Orientation (relative to transcription): antisense; note = sgRNA Position: 41219265; note = Sequence Name: 56322-704_101_SL_seq_2072
gcctggcacagcggcagggg

SEQ ID NO: 2073 - DNA, 20 bp, Homo sapiens
  source 1..20: mol_type = genomic DNA; note = Gene: AXL; note = Location (start to end; relative to TSS): AXL_68_98; note = Orientation (relative to transcription): sense; note = sgRNA Position: 41219317; note = Sequence Name: 56322-704_101_SL_seq_2073
ggagcctggagctgggggga

SEQ ID NO: 2074 - DNA, 20 bp, Homo sapiens
  source 1..20: mol_type = genomic DNA; note = Gene: AXL; note = Location (start to end; relative to TSS): AXL_26_56; note = Orientation (relative to transcription): sense; note = sgRNA Position: 41219275; note = Sequence Name: 56322-704_101_SL_seq_2074
gcctcccctgccgctgtgcc

SEQ ID NO: 2075 - DNA, 20 bp, Homo sapiens
  source 1..20: mol_type = genomic DNA; note = Gene: AXL; note = Location (start to end; relative to TSS): AXL_62_92; note = Orientation (relative to transcription): sense; note = sgRNA Position: 41219311; note = Sequence Name: 56322-704_101_SL_seq_2075
atccggggagcctggagctg

SEQ ID NO: 2076 - DNA, 20 bp, Homo sapiens
  source 1..20: mol_type = genomic DNA; note = Gene: AXL; note = Location (start to end; relative to TSS): AXL_30_60; note = Orientation (relative to transcription): sense; note = sgRNA Position: 41219279; note = Sequence Name: 56322-704_101_SL_seq_2076
cccctgccgctgtgccaggc

SEQ ID NO: 2077 - DNA, 20 bp, Homo sapiens
  source 1..20: mol_type = genomic DNA; note = Gene: AXL; note = Location (start to end; relative to TSS): AXL_61_91; note = Orientation (relative to transcription): sense; note = sgRNA Position: 41219310; note = Sequence Name: 56322-704_101_SL_seq_2077
aatccggggagcctggagct

SEQ ID NO: 2078 - DNA, 20 bp, Homo sapiens
  source 1..20: mol_type = genomic DNA; note = Gene: AXL; note = Location (start to end; relative to TSS): AXL_23_53; note = Orientation (relative to transcription): antisense; note = sgRNA Position: 41219252; note = Sequence Name: 56322-704_101_SL_seq_2078
gcaggggaggcccttgccac

SEQ ID NO: 2079 - DNA, 20 bp, Homo sapiens
  source 1..20: mol_type = genomic DNA; note = Gene: AXL; note = Location (start to end; relative to TSS): AXL_53_83; note = Orientation (relative to transcription): antisense; note = sgRNA Position: 41219282; note = Sequence Name: 56322-704_101_SL_seq_2079
cggatttggcactgcctgcc

SEQ ID NO: 2080 - DNA, 20 bp, Homo sapiens
  source 1..20: mol_type = genomic DNA; note = Gene: BAZ1A; note = Location (start to end; relative to TSS): BAZ1A_30_60; note = Orientation (relative to transcription): sense; note = sgRNA Position: 34875306; note = Sequence Name: 56322-704_101_SL_seq_2080
tccgagaggcggggaagtgg

SEQ ID NO: 2081 - DNA, 20 bp, Homo sapiens
  source 1..20: mol_type = genomic DNA; note = Gene: BAZ1A; note = Location (start to end; relative to TSS): BAZ1A_71_101; note = Orientation (relative to transcription): sense; note = sgRNA Position: 34875265; note = Sequence Name: 56322-704_101_SL_seq_2081
gcggagtcgggcagtggcag

SEQ ID NO: 2082 - DNA, 20 bp, Homo sapiens
  source 1..20: mol_type = genomic DNA; note = Gene: BAZ1A; note = Location (start to end; relative to TSS): BAZ1A_27_57; note = Orientation (relative to transcription): sense; note = sgRNA Position: 34875309; note = Sequence Name: 56322-704_101_SL_seq_2082
agctccgagaggcggggaag

SEQ ID NO: 2083 - DNA, 20 bp, Homo sapiens
  source 1..20: mol_type = genomic DNA; note = Gene: BAZ1A; note = Location (start to end; relative to TSS): BAZ1A_65_95; note = Orientation (relative to transcription): sense; note = sgRNA Position: 34875271; note = Sequence Name: 56322-704_101_SL_seq_2083
ccccgcgcggagtcgggcag

SEQ ID NO: 2084 - DNA, 20 bp, Homo sapiens
  source 1..20: mol_type = genomic DNA; note = Gene: BAZ1A; note = Location (start to end; relative to TSS): BAZ1A_21_51; note = Orientation (relative to transcription): sense; note = sgRNA Position: 34875315; note = Sequence Name: 56322-704_101_SL_seq_2084
cccaggagctccgagaggcg

SEQ ID NO: 2085 - DNA, 20 bp, Homo sapiens
  source 1..20: mol_type = genomic DNA; note = Gene: BAZ1A; note = Location (start to end; relative to TSS): BAZ1A_59_89; note = Orientation (relative to transcription): sense; note = sgRNA Position: 34875277; note = Sequence Name: 56322-704_101_SL_seq_2085
gcaattccccgcgcggagtc

SEQ ID NO: 2086 - DNA, 20 bp, Homo sapiens
  source 1..20: mol_type = genomic DNA; note = Gene: BAZ1A; note = Location (start to end; relative to TSS): BAZ1A_20_50; note = Orientation (relative to transcription): sense; note = sgRNA Position: 34875316; note = Sequence Name: 56322-704_101_SL_seq_2086
tcccaggagctccgagaggc

SEQ ID NO: 2087 - DNA, 20 bp, Homo sapiens
  source 1..20: mol_type = genomic DNA; note = Gene: BAZ1A; note = Location (start to end; relative to TSS): BAZ1A_58_88; note = Orientation (relative to transcription): sense; note = sgRNA Position: 34875278; note = Sequence Name: 56322-704_101_SL_seq_2087
cgcaattccccgcgcggagt

SEQ ID NO: 2088 - DNA, 20 bp, Homo sapiens
  source 1..20: mol_type = genomic DNA; note = Gene: BAZ1A; note = Location (start to end; relative to TSS): BAZ1A_19_49; note = Orientation (relative to transcription): sense; note = sgRNA Position: 34875317; note = Sequence Name: 56322-704_101_SL_seq_2088
ttcccaggagctccgagagg

SEQ ID NO: 2089 - DNA, 20 bp, Homo sapiens
  source 1..20: mol_type = genomic DNA; note = Gene: BAZ1A; note = Location (start to end; relative to TSS): BAZ1A_52_82; note = Orientation (relative to transcription): sense; note = sgRNA Position: 34875284; note = Sequence Name: 56322-704_101_SL_seq_2089
gtgggacgcaattccccgcg

SEQ ID NO: 2090 - DNA, 20 bp, Homo sapiens
  source 1..20: mol_type = genomic DNA; note = Gene: BAZ1B; note = Location (start to end; relative to TSS): BAZ1B_37_67; note = Orientation (relative to transcription): sense; note = sgRNA Position: 73522232; note = Sequence Name: 56322-704_101_SL_seq_2090
catttttcaataatttcctc

SEQ ID NO: 2091 - DNA, 20 bp, Homo sapiens
  source 1..20: mol_type = genomic DNA; note = Gene: BAZ1B; note = Location (start to end; relative to TSS): BAZ1B_85_115; note = Orientation (relative to transcription): sense; note = sgRNA Position: 73522184; note = Sequence Name: 56322-704_101_SL_seq_2091
ccggccgccgggacccgaag

SEQ ID NO: 2092 - DNA, 20 bp, Homo sapiens
  source 1..20: mol_type = genomic DNA; note = Gene: BAZ1B; note = Location (start to end; relative to TSS): BAZ1B_41_71; note = Orientation (relative to transcription): antisense; note = sgRNA Position: 73522248; note = Sequence Name: 56322-704_101_SL_seq_2092
ggaaattattgaaaaatggc

SEQ ID NO: 2093 - DNA, 20 bp, Homo sapiens
  source 1..20: mol_type = genomic DNA; note = Gene: BAZ1B; note = Location (start to end; relative to TSS): BAZ1B_74_104; note = Orientation (relative to transcription): sense; note = sgRNA Position: 73522195; note = Sequence Name: 56322-704_101_SL_seq_2093
agtcgtgactgccggccgcc

SEQ ID NO: 2094 - DNA, 20 bp, Homo sapiens
  source 1..20: mol_type = genomic DNA; note = Gene: BAZ1B; note = Location (start to end; relative to TSS): BAZ1B_42_72; note = Orientation (relative to transcription): antisense; note = sgRNA Position: 73522247; note = Sequence Name: 56322-704_101_SL_seq_2094
aggaaattattgaaaaatgg

SEQ ID NO: 2095 - DNA, 20 bp, Homo sapiens
  source 1..20: mol_type = genomic DNA; note = Gene: BAZ1B; note = Location (start to end; relative to TSS): BAZ1B_73_103; note = Orientation (relative to transcription): sense; note = sgRNA Position: 73522196; note = Sequence Name: 56322-704_101_SL_seq_2095
gagtcgtgactgccggccgc

SEQ ID NO: 2096 - DNA, 20 bp, Homo sapiens
  source 1..20: mol_type = genomic DNA; note = Gene: BAZ1B; note = Location (start to end; relative to TSS): BAZ1B_20_50; note = Orientation (relative to transcription): antisense; note = sgRNA Position: 73522269; note = Sequence Name: 56322-704_101_SL_seq_2096
ggagattcccctcctccccc

SEQ ID NO: 2097 - DNA, 20 bp, Homo sapiens
  source 1..20: mol_type = genomic DNA; note = Gene: BAZ1B; note = Location (start to end; relative to TSS): BAZ1B_62_92; note = Orientation (relative to transcription): antisense; note = sgRNA Position: 73522227; note = Sequence Name: 56322-704_101_SL_seq_2097
ctcctcctcagcagcaccgg

SEQ ID NO: 2098 - DNA, 20 bp, Homo sapiens
  source 1..20: mol_type = genomic DNA; note = Gene: BAZ1B; note = Location (start to end; relative to TSS): BAZ1B_21_51; note = Orientation (relative to transcription): antisense; note = sgRNA Position: 73522268; note = Sequence Name: 56322-704_101_SL_seq_2098
gggagattcccctcctcccc

SEQ ID NO: 2099 - DNA, 20 bp, Homo sapiens
  source 1..20: mol_type = genomic DNA; note = Gene: BAZ1B; note = Location (start to end; relative to TSS): BAZ1B_51_81; note = Orientation (relative to transcription): sense; note = sgRNA Position: 73522218; note = Sequence Name: 56322-704_101_SL_seq_2099
ttcctccggtgctgctgagg

SEQ ID NO: 2100 - DNA, 20 bp, Homo sapiens
  source 1..20: mol_type = genomic DNA; note = Gene: BCKDK; note = Location (start to end; relative to TSS): BCKDK_43_73; note = Orientation (relative to transcription): sense; note = sgRNA Position: 31108455; note = Sequence Name: 56322-704_101_SL_seq_2100
gagcccttccgctgggaccc

SEQ ID NO: 2101 - DNA, 20 bp, Homo sapiens
  source 1..20: mol_type = genomic DNA; note = Gene: BCKDK; note = Location (start to end; relative to TSS): BCKDK_75_105; note = Orientation (relative to transcription): antisense; note = sgRNA Position: 31108467; note = Sequence Name: 56322-704_101_SL_seq_2101
ttaccgcggggccggagcca

SEQ ID NO: 2102 - DNA, 20 bp, Homo sapiens
  source 1..20: mol_type = genomic DNA; note = Gene: BCKDK; note = Location (start to end; relative to TSS): BCKDK_42_72; note = Orientation (relative to transcription): sense; note = sgRNA Position: 31108454; note = Sequence Name: 56322-704_101_SL_seq_2102
cgagcccttccgctgggacc

SEQ ID NO: 2103 - DNA, 20 bp, Homo sapiens
  source 1..20: mol_type = genomic DNA; note = Gene: BCKDK; note = Location (start to end; relative to TSS): BCKDK_72_102; note = Orientation (relative to transcription): sense; note = sgRNA Position: 31108484; note = Sequence Name: 56322-704_101_SL_seq_2103
ctccggccccgcggtaagtg

SEQ ID NO: 2104 - DNA, 20 bp, Homo sapiens
  source 1..20: mol_type = genomic DNA; note = Gene: BCKDK; note = Location (start to end; relative to TSS): BCKDK_35_65; note = Orientation (relative to transcription): sense; note = sgRNA Position: 31108447; note = Sequence Name: 56322-704_101_SL_seq_2104
gactgttcgagcccttccgc

SEQ ID NO: 2105 - DNA, 20 bp, Homo sapiens
  source 1..20: mol_type = genomic DNA; note = Gene: BCKDK; note = Location (start to end; relative to TSS): BCKDK_70_100; note = Orientation (relative to transcription): sense; note = sgRNA Position: 31108482; note = Sequence Name: 56322-704_101_SL_seq_2105
ggctccggccccgcggtaag

SEQ ID NO: 2106 - DNA, 20 bp, Homo sapiens
  source 1..20: mol_type = genomic DNA; note = Gene: BCKDK; note = Location (start to end; relative to TSS): BCKDK_36_66; note = Orientation (relative to transcription): sense; note = sgRNA Position: 31108448; note = Sequence Name: 56322-704_101_SL_seq_2106
actgttcgagcccttccgct

SEQ ID NO: 2107 - DNA, 20 bp, Homo sapiens
  source 1..20: mol_type = genomic DNA; note = Gene: BCKDK; note = Location (start to end; relative to TSS): BCKDK_69_99; note = Orientation (relative to transcription): antisense; note = sgRNA Position: 31108461; note = Sequence Name: 56322-704_101_SL_seq_2107
cggggccggagccagggccc

SEQ ID NO: 2108 - DNA, 20 bp, Homo sapiens
  source 1..20: mol_type = genomic DNA; note = Gene: BCKDK; note = Location (start to end; relative to TSS): BCKDK_33_63; note = Orientation (relative to transcription): antisense; note = sgRNA Position: 31108425; note = Sequence Name: 56322-704_101_SL_seq_2108
gctcgaacagtccactcgcc

SEQ ID NO: 2109 - DNA, 20 bp, Homo sapiens
  source 1..20: mol_type = genomic DNA; note = Gene: BCKDK; note = Location (start to end; relative to TSS): BCKDK_63_93; note = Orientation (relative to transcription): sense; note = sgRNA Position: 31108475; note = Sequence Name: 56322-704_101_SL_seq_2109
gggccctggctccggccccg

SEQ ID NO: 2110 - DNA, 20 bp, Homo sapiens
  source 1..20: mol_type = genomic DNA; note = Gene: BCR; note = Location (start to end; relative to TSS): BCR_29_59; note = Orientation (relative to transcription): sense; note = sgRNA Position: 23180564; note = Sequence Name: 56322-704_101_SL_seq_2110
ctggctgagcttagcgtccg

SEQ ID NO: 2111 - DNA, 20 bp, Homo sapiens
  source 1..20: mol_type = genomic DNA; note = Gene: BCR; note = Location (start to end; relative to TSS): BCR_97_127; note = Orientation (relative to transcription): sense; note = sgRNA Position: 23180632; note = Sequence Name: 56322-704_101_SL_seq_2111
cggtgcggaagcgagaggcg

SEQ ID NO: 2112 - DNA, 20 bp, Homo sapiens
  source 1..20: mol_type = genomic DNA; note = Gene: BCR; note = Location (start to end; relative to TSS): BCR_32_62; note = Orientation (relative to transcription): sense; note = sgRNA Position: 23180567; note = Sequence Name: 56322-704_101_SL_seq_2112
gctgagcttagcgtccgagg

SEQ ID NO: 2113 - DNA, 20 bp, Homo sapiens
  source 1..20: mol_type = genomic DNA; note = Gene: BCR; note = Location (start to end; relative to TSS): BCR_92_122; note = Orientation (relative to transcription): sense; note = sgRNA Position: 23180627; note = Sequence Name: 56322-704_101_SL_seq_2113
tggggcggtgcggaagcgag

SEQ ID NO: 2114 - DNA, 20 bp, Homo sapiens
  source 1..20: mol_type = genomic DNA; note = Gene: BCR; note = Location (start to end; relative to TSS): BCR_34_64; note = Orientation (relative to transcription): antisense; note = sgRNA Position: 23180549; note = Sequence Name: 56322-704_101_SL_seq_2114
ggacgctaagctcagccagc

SEQ ID NO: 2115 - DNA, 20 bp, Homo sapiens
  source 1..20: mol_type = genomic DNA; note = Gene: BCR; note = Location (start to end; relative to TSS): BCR_82_112; note = Orientation (relative to transcription): sense; note = sgRNA Position: 23180617; note = Sequence Name: 56322-704_101_SL_seq_2115
ggcggggctgtggggcggtg

SEQ ID NO: 2116 - DNA, 20 bp, Homo sapiens
  source 1..20: mol_type = genomic DNA; note = Gene: BCR; note = Location (start to end; relative to TSS): BCR_35_65; note = Orientation (relative to transcription): sense; note = sgRNA Position: 23180570; note = Sequence Name: 56322-704_101_SL_seq_2116
gagcttagcgtccgaggagg

SEQ ID NO: 2117 - DNA, 20 bp, Homo sapiens
  source 1..20: mol_type = genomic DNA; note = Gene: BCR; note = Location (start to end; relative to TSS): BCR_77_107; note = Orientation (relative to transcription): sense; note = sgRNA Position: 23180612; note = Sequence Name: 56322-704_101_SL_seq_2117
gcggcggcggggctgtgggg

SEQ ID NO: 2118 - DNA, 20 bp, Homo sapiens
  source 1..20: mol_type = genomic DNA; note = Gene: BCR; note = Location (start to end; relative to TSS): BCR_38_68; note = Orientation (relative to transcription): sense; note = sgRNA Position: 23180573; note = Sequence Name: 56322-704_101_SL_seq_2118
cttagcgtccgaggaggcgg

SEQ ID NO: 2119 - DNA, 20 bp, Homo sapiens
  source 1..20: mol_type = genomic DNA; note = Gene: BCR; note = Location (start to end; relative to TSS): BCR_74_104; note = Orientation (relative to transcription): sense; note = sgRNA Position: 23180609; note = Sequence Name: 56322-704_101_SL_seq_2119
acggcggcggcggggctgtg

SEQ ID NO: 2120 - DNA, 20 bp, Homo sapiens
  source 1..20: mol_type = genomic DNA; note = Gene: BLK; note = Location (start to end; relative to TSS): BLK_54_84; note = Orientation (relative to transcription): sense; note = sgRNA Position: 11494467; note = Sequence Name: 56322-704_101_SL_seq_2120
tgagatgagaagaattcatc

SEQ ID NO: 2121 - DNA, 20 bp, Homo sapiens
  source 1..20: mol_type = genomic DNA; note = Gene: BLK; note = Location (start to end; relative to TSS): BLK_123_153; note = Orientation (relative to transcription): sense; note = sgRNA Position: 11494536; note = Sequence Name: 56322-704_101_SL_seq_2121
taggagcctgctccactgta

SEQ ID NO: 2122 - DNA, 20 bp, Homo sapiens
  source 1..20: mol_type = genomic DNA; note = Gene: BLK; note = Location (start to end; relative to TSS): BLK_55_85; note = Orientation (relative to transcription): sense; note = sgRNA Position: 11494468; note = Sequence Name: 56322-704_101_SL_seq_2122
gagatgagaagaattcatct

SEQ ID NO: 2123 - DNA, 20 bp, Homo sapiens
  source 1..20: mol_type = genomic DNA; note = Gene: BLK; note = Location (start to end; relative to TSS): BLK_104_134; note = Orientation (relative to transcription): sense; note = sgRNA Position: 11494517; note = Sequence Name: 56322-704_101_SL_seq_2123
ggaagttgctcgttgtcgct

SEQ ID NO: 2124 - DNA, 20 bp, Homo sapiens
  source 1..20: mol_type = genomic DNA; note = Gene: BLK; note = Location (start to end; relative to TSS): BLK_42_72; note = Orientation (relative to transcription): antisense; note = sgRNA Position: 11494435; note = Sequence Name: 56322-704_101_SL_seq_2124
caatcagttttcatggcttg

SEQ ID NO: 2125 - DNA, 20 bp, Homo sapiens
  source 1..20: mol_type = genomic DNA; note = Gene: BLK; note = Location (start to end; relative to TSS): BLK_83_113; note = Orientation (relative to transcription): sense; note = sgRNA Position: 11494496; note = Sequence Name: 56322-704_101_SL_seq_2125
cttttgctttaggatggtgt

SEQ ID NO: 2126 - DNA, 20 bp, Homo sapiens
  source 1..20: mol_type = genomic DNA; note = Gene: BLK; note = Location (start to end; relative to TSS): BLK_31_61; note = Orientation (relative to transcription): antisense; note = sgRNA Position: 11494424; note = Sequence Name: 56322-704_101_SL_seq_2126
catggcttgtggctttctgc

SEQ ID NO: 2127 - DNA, 20 bp, Homo sapiens
  source 1..20: mol_type = genomic DNA; note = Gene: BLK; note = Location (start to end; relative to TSS): BLK_77_107; note = Orientation (relative to transcription): sense; note = sgRNA Position: 11494490; note = Sequence Name: 56322-704_101_SL_seq_2127
gactggcttttgctttagga

SEQ ID NO: 2128 - DNA, 20 bp, Homo sapiens
  source 1..20: mol_type = genomic DNA; note = Gene: BLK; note = Location (start to end; relative to TSS): BLK_18_48; note = Orientation (relative to transcription): antisense; note = sgRNA Position: 11494411; note = Sequence Name: 56322-704_101_SL_seq_2128
tttctgccggcagcagacag

SEQ ID NO: 2129 - DNA, 20 bp, Homo sapiens
  source 1..20: mol_type = genomic DNA; note = Gene: BLK; note = Location (start to end; relative to TSS): BLK_54_84; note = Orientation (relative to transcription): sense; note = sgRNA Position: 11494467; note = Sequence Name: 56322-704_101_SL_seq_2129
tgagatgagaagaattcatc

SEQ ID NO: 2130 - DNA, 20 bp, Homo sapiens
  source 1..20: mol_type = genomic DNA; note = Gene: BLVRA; note = Location (start to end; relative to TSS): BLVRA_38_68; note = Orientation (relative to transcription): sense; note = sgRNA Position: 43758744; note = Sequence Name: 56322-704_101_SL_seq_2130
cgcgtcaggtgaggcgcgcg

SEQ ID NO: 2131 - DNA, 20 bp, Homo sapiens
  source 1..20: mol_type = genomic DNA; note = Gene: BLVRA; note = Location (start to end; relative to TSS): BLVRA_79_109; note = Orientation (relative to transcription): sense; note = sgRNA Position: 43758785; note = Sequence Name: 56322-704_101_SL_seq_2131
aggggagcgggggtcgcgcg

SEQ ID NO: 2132 - DNA, 20 bp, Homo sapiens
  source 1..20: mol_type = genomic DNA; note = Gene: BLVRA; note = Location (start to end; relative to TSS): BLVRA_29_59; note = Orientation (relative to transcription): sense; note = sgRNA Position: 43758735; note = Sequence Name: 56322-704_101_SL_seq_2132
agcggtgcccgcgtcaggtg

SEQ ID NO: 2133 - DNA, 20 bp, Homo sapiens
  source 1..20: mol_type = genomic DNA; note = Gene: BLVRA; note = Location (start to end; relative to TSS): BLVRA_69_99; note = Orientation (relative to transcription): sense; note = sgRNA Position: 43758775; note = Sequence Name: 56322-704_101_SL_seq_2133
ggtcgcgcgcaggggagcgg

SEQ ID NO: 2134 - DNA, 20 bp, Homo sapiens
  source 1..20: mol_type = genomic DNA; note = Gene: BLVRA; note = Location (start to end; relative to TSS): BLVRA_24_54; note = Orientation (relative to transcription): sense; note = sgRNA Position: 43758730; note = Sequence Name: 56322-704_101_SL_seq_2134
cggagagcggtgcccgcgtc

SEQ ID NO: 2135 - DNA, 20 bp, Homo sapiens
  source 1..20: mol_type = genomic DNA; note = Gene: BLVRA; note = Location (start to end; relative to TSS): BLVRA_68_98; note = Orientation (relative to transcription): sense; note = sgRNA Position: 43758774; note = Sequence Name: 56322-704_101_SL_seq_2135
gggtcgcgcgcaggggagcg

SEQ ID NO: 2136 - DNA, 20 bp, Homo sapiens
  source 1..20: mol_type = genomic DNA; note = Gene: BLVRA; note = Location (start to end; relative to TSS): BLVRA_21_51; note = Orientation (relative to transcription): antisense; note = sgRNA Position: 43758707; note = Sequence Name: 56322-704_101_SL_seq_2136
accgctctccgtgcagcctc

SEQ ID NO: 2137 - DNA, 20 bp, Homo sapiens
  source 1..20: mol_type = genomic DNA; note = Gene: BLVRA; note = Location (start to end; relative to TSS): BLVRA_61_91; note = Orientation (relative to transcription): sense; note = sgRNA Position: 43758767; note = Sequence Name: 56322-704_101_SL_seq_2137
ggaacgggggtcgcgcgcag

SEQ ID NO: 2138 - DNA, 20 bp, Homo sapiens
  source 1..20: mol_type = genomic DNA; note = Gene: BLVRA; note = Location (start to end; relative to TSS): BLVRA_20_50; note = Orientation (relative to transcription): antisense; note = sgRNA Position: 43758706; note = Sequence Name: 56322-704_101_SL_seq_2138
ccgctctccgtgcagcctcc

SEQ ID NO: 2139 - DNA, 20 bp, Homo sapiens
  source 1..20: mol_type = genomic DNA; note = Gene: BLVRA; note = Location (start to end; relative to TSS): BLVRA_60_90; note = Orientation (relative to transcription): sense; note = sgRNA Position: 43758766; note = Sequence Name: 56322-704_101_SL_seq_2139
gggaacgggggtcgcgcgca

SEQ ID NO: 2140 - DNA, 20 bp, Homo sapiens
  source 1..20: mol_type = genomic DNA; note = Gene: BMP2K; note = Location (start to end; relative to TSS): BMP2K_37_67; note = Orientation (relative to transcription): sense; note = sgRNA Position: 78776413; note = Sequence Name: 56322-704_101_SL_seq_2140
cttggggagcgcggaatgtg

SEQ ID NO: 2141 - DNA, 20 bp, Homo sapiens
  source 1..20: mol_type = genomic DNA; note = Gene: BMP2K; note = Location (start to end; relative to TSS): BMP2K_73_103; note = Orientation (relative to transcription): sense; note = sgRNA Position: 78776449; note = Sequence Name: 56322-704_101_SL_seq_2141
agcacgctcggacgggccag

SEQ ID NO: 2142 - DNA, 20 bp, Homo sapiens
  source 1..20: mol_type = genomic DNA; note = Gene: BMP2K; note = Location (start to end; relative to TSS): BMP2K_34_64; note = Orientation (relative to transcription): antisense; note = sgRNA Position: 78776390; note = Sequence Name: 56322-704_101_SL_seq_2142
cgctccccaagcgcacagcc

SEQ ID NO: 2143 - DNA, 20 bp, Homo sapiens
  source 1..20: mol_type = genomic DNA; note = Gene: BMP2K; note = Location (start to end; relative to TSS): BMP2K_72_102; note = Orientation (relative to transcription): sense; note = sgRNA Position: 78776448; note = Sequence Name: 56322-704_101_SL_seq_2143
cagcacgctcggacgggcca

SEQ ID NO: 2144 - DNA, 20 bp, Homo sapiens
  source 1..20: mol_type = genomic DNA; note = Gene: BMP2K; note = Location (start to end; relative to TSS): BMP2K_33_63; note = Orientation (relative to transcription): antisense; note = sgRNA Position: 78776389; note = Sequence Name: 56322-704_101_SL_seq_2144
gctccccaagcgcacagcct

SEQ ID NO: 2145 - DNA, 20 bp, Homo sapiens
  source 1..20: mol_type = genomic DNA; note = Gene: BMP2K; note = Location (start to end; relative to TSS): BMP2K_66_96; note = Orientation (relative to transcription): sense; note = sgRNA Position: 78776442; note = Sequence Name: 56322-704_101_SL_seq_2145
gggccgcagcacgctcggac

SEQ ID NO: 2146 - DNA, 20 bp, Homo sapiens
  source 1..20: mol_type = genomic DNA; note = Gene: BMP2K; note = Location (start to end; relative to TSS): BMP2K_28_58; note = Orientation (relative to transcription): sense; note = sgRNA Position: 78776404; note = Sequence Name: 56322-704_101_SL_seq_2146
ggctgtgcgcttggggagcg

SEQ ID NO: 2147 - DNA, 20 bp, Homo sapiens
  source 1..20: mol_type = genomic DNA; note = Gene: BMP2K; note = Location (start to end; relative to TSS): BMP2K_65_95; note = Orientation (relative to transcription): sense; note = sgRNA Position: 78776441; note = Sequence Name: 56322-704_101_SL_seq_2147
cgggccgcagcacgctcgga

SEQ ID NO: 2148 - DNA, 20 bp, Homo sapiens
  source 1..20: mol_type = genomic DNA; note = Gene: BMP2K; note = Location (start to end; relative to TSS): BMP2K_21_51; note = Orientation (relative to transcription): sense; note = sgRNA Position: 78776397; note = Sequence Name: 56322-704_101_SL_seq_2148
gggcccaggctgtgcgcttg

SEQ ID NO: 2149 - DNA, 20 bp, Homo sapiens
  source 1..20: mol_type = genomic DNA; note = Gene: BMP2K; note = Location (start to end; relative to TSS): BMP2K_61_91; note = Orientation (relative to transcription): sense; note = sgRNA Position: 78776437; note = Sequence Name: 56322-704_101_SL_seq_2149
ttggcgggccgcagcacgct

SEQ ID NO: 2150 - DNA, 20 bp, Homo sapiens
  source 1..20: mol_type = genomic DNA; note = Gene: BMPR1A; note = Location (start to end; relative to TSS): BMPR1A_40_70; note = Orientation (relative to transcription): sense; note = sgRNA Position: 86756685; note = Sequence Name: 56322-704_101_SL_seq_2150
gccgggcttggcgaaggaga

SEQ ID NO: 2151 - DNA, 20 bp, Homo sapiens
  source 1..20: mol_type = genomic DNA; note = Gene: BMPR1A; note = Location (start to end; relative to TSS): BMPR1A_76_106; note = Orientation (relative to transcription): sense; note = sgRNA Position: 86756721; note = Sequence Name: 56322-704_101_SL_seq_2151
cgaggagggaggagggccaa

SEQ ID NO: 2152 - DNA, 20 bp, Homo sapiens
  source 1..20: mol_type = genomic DNA; note = Gene: BMPR1A; note = Location (start to end; relative to TSS): BMPR1A_41_71; note = Orientation (relative to transcription): sense; note = sgRNA Position: 86756686; note = Sequence Name: 56322-704_101_SL_seq_2152
ccgggcttggcgaaggagaa

SEQ ID NO: 2153 - DNA, 20 bp, Homo sapiens
  source 1..20: mol_type = genomic DNA; note = Gene: BMPR1A; note = Location (start to end; relative to TSS): BMPR1A_75_105; note = Orientation (relative to transcription): sense; note = sgRNA Position: 86756720; note = Sequence Name: 56322-704_101_SL_seq_2153
gcgaggagggaggagggcca

SEQ ID NO: 2154 - DNA, 20 bp, Homo sapiens
  source 1..20: mol_type = genomic DNA; note = Gene: BMPR1A; note = Location (start to end; relative to TSS): BMPR1A_34_64; note = Orientation (relative to transcription): sense; note = sgRNA Position: 86756679; note = Sequence Name: 56322-704_101_SL_seq_2154
ccgcctgccgggcttggcga

SEQ ID NO: 2155 - DNA, 20 bp, Homo sapiens
  source 1..20: mol_type = genomic DNA; note = Gene: BMPR1A; note = Location (start to end; relative to TSS): BMPR1A_65_95; note = Orientation (relative to transcription): sense; note = sgRNA Position: 86756710; note = Sequence Name: 56322-704_101_SL_seq_2155
ggaggcaggagcgaggaggg

SEQ ID NO: 2156 - DNA, 20 bp, Homo sapiens
  source 1..20: mol_type = genomic DNA; note = Gene: BMPR1A; note = Location (start to end; relative to TSS): BMPR1A_22_52; note = Orientation (relative to transcription): sense; note = sgRNA Position: 86756667; note = Sequence Name: 56322-704_101_SL_seq_2156
agagattggaatccgcctgc

SEQ ID NO: 2157 - DNA, 20 bp, Homo sapiens
  source 1..20: mol_type = genomic DNA; note = Gene: BMPR1A; note = Location (start to end; relative to TSS): BMPR1A_61_91; note = Orientation (relative to transcription): sense; note = sgRNA Position: 86756706; note = Sequence Name: 56322-704_101_SL_seq_2157
gggaggaggcaggagcgagg

SEQ ID NO: 2158 - DNA, 20 bp, Homo sapiens
  source 1..20: mol_type = genomic DNA; note = Gene: BMPR1A; note = Location (start to end; relative to TSS): BMPR1A_28_58; note = Orientation (relative to transcription): sense; note = sgRNA Position: 86756673; note = Sequence Name: 56322-704_101_SL_seq_2158
tggaatccgcctgccgggct

SEQ ID NO: 2159 - DNA, 20 bp, Homo sapiens
  source 1..20: mol_type = genomic DNA; note = Gene: BMPR1A; note = Location (start to end; relative to TSS): BMPR1A_58_88; note = Orientation (relative to transcription): sense; note = sgRNA Position: 86756703; note = Sequence Name: 56322-704_101_SL_seq_2159
gaagggaggaggcaggagcg

SEQ ID NO: 2160 - DNA, 20 bp, Homo sapiens
  source 1..20: mol_type = genomic DNA; note = Gene: BMPR1B; note = Location (start to end; relative to TSS): BMPR1B_45_75; note = Orientation (relative to transcription): antisense; note = sgRNA Position: 94758006; note = Sequence Name: 56322-704_101_SL_seq_2160
gcactgcccggcgtcccgcg

SEQ ID NO: 2161 - DNA, 20 bp, Homo sapiens
  source 1..20: mol_type = genomic DNA; note = Gene: BMPR1B; note = Location (start to end; relative to TSS): BMPR1B_82_112; note = Orientation (relative to transcription): sense; note = sgRNA Position: 94758063; note = Sequence Name: 56322-704_101_SL_seq_2161
gggagccgggagcgcagccg

SEQ ID NO: 2162 - DNA, 20 bp, Homo sapiens
  source 1..20: mol_type = genomic DNA; note = Gene: BMPR1B; note = Location (start to end; relative to TSS): BMPR1B_38_68; note = Orientation (relative to transcription): sense; note = sgRNA Position: 94758019; note = Sequence Name: 56322-704_101_SL_seq_2162
tcgcgggacgccgggcagtg

SEQ ID NO: 2163 - DNA, 20 bp, Homo sapiens
  source 1..20: mol_type = genomic DNA; note = Gene: BMPR1B; note = Location (start to end; relative to TSS): BMPR1B_69_99; note = Orientation (relative to transcription): sense; note = sgRNA Position: 94758050; note = Sequence Name: 56322-704_101_SL_seq_2163
gcgctgaggacgcgggagcc

SEQ ID NO: 2164 - DNA, 20 bp, Homo sapiens
  source 1..20: mol_type = genomic DNA; note = Gene: BMPR1B; note = Location (start to end; relative to TSS): BMPR1B_30_60; note = Orientation (relative to transcription): sense; note = sgRNA Position: 94758011; note = Sequence Name: 56322-704_101_SL_seq_2164
gcggggcctcgcgggacgcc

SEQ ID NO: 2165 - DNA, 20 bp, Homo sapiens
  source 1..20: mol_type = genomic DNA; note = Gene: BMPR1B; note = Location (start to end; relative to TSS): BMPR1B_62_92; note = Orientation (relative to transcription): sense; note = sgRNA Position: 94758043; note = Sequence Name: 56322-704_101_SL_seq_2165
gaccgcggcgctgaggacgc

SEQ ID NO: 2166 - DNA, 20 bp, Homo sapiens
  source 1..20: mol_type = genomic DNA; note = Gene: BMPR1B; note = Location (start to end; relative to TSS): BMPR1B_29_59; note = Orientation (relative to transcription): sense; note = sgRNA Position: 94758010; note = Sequence Name: 56322-704_101_SL_seq_2166
ggcggggcctcgcgggacgc

SEQ ID NO: 2167 - DNA, 20 bp, Homo sapiens
  source 1..20: mol_type = genomic DNA; note = Gene: BMPR1B; note = Location (start to end; relative to TSS): BMPR1B_61_91; note = Orientation (relative to transcription): sense; note = sgRNA Position: 94758042; note = Sequence Name: 56322-704_101_SL_seq_2167
agaccgcggcgctgaggacg

SEQ ID NO: 2168 - DNA, 20 bp, Homo sapiens
  source 1..20: mol_type = genomic DNA; note = Gene: BMPR1B; note = Location (start to end; relative to TSS): BMPR1B_22_52; note = Orientation (relative to transcription): sense; note = sgRNA Position: 94758003; note = Sequence Name: 56322-704_101_SL_seq_2168
cggagtcggcggggcctcgc

SEQ ID NO: 2169 - DNA, 20 bp, Homo sapiens
  source 1..20: mol_type = genomic DNA; note = Gene: BMPR1B; note = Location (start to end; relative to TSS): BMPR1B_55_85; note = Orientation (relative to transcription): sense; note = sgRNA Position: 94758036; note = Sequence Name: 56322-704_101_SL_seq_2169
gtgcggagaccgcggcgctg

SEQ ID NO: 2170 - DNA, 20 bp, Homo sapiens
  source 1..20: mol_type = genomic DNA; note = Gene: BMPR2; note = Location (start to end; relative to TSS): BMPR2_32_62; note = Orientation (relative to transcription): antisense; note = sgRNA Position: 202376365; note = Sequence Name: 56322-704_101_SL_seq_2170
cctccgggaggcacttccag

SEQ ID NO: 2171 - DNA, 20 bp, Homo sapiens
  source 1..20: mol_type = genomic DNA; note = Gene: BMPR2; note = Location (start to end; relative to TSS): BMPR2_82_112; note = Orientation (relative to transcription): antisense; note = sgRNA Position: 202376415; note = Sequence Name: 56322-704_101_SL_seq_2171
aggtagccggggaagggggt

SEQ ID NO: 2172 - DNA, 20 bp, Homo sapiens
  source 1..20: mol_type = genomic DNA; note = Gene: BMPR2; note = Location (start to end; relative to TSS): BMPR2_31_61; note = Orientation (relative to transcription): sense; note = sgRNA Position: 202376384; note = Sequence Name: 56322-704_101_SL_seq_2172
agtgcctcccggagggacgc

SEQ ID NO: 2173 - DNA, 20 bp, Homo sapiens
  source 1..20: mol_type = genomic DNA; note = Gene: BMPR2; note = Location (start to end; relative to TSS): BMPR2_78_108; note = Orientation (relative to transcription): antisense; note = sgRNA Position: 202376411; note = Sequence Name: 56322-704_101_SL_seq_2173
agccggggaagggggtgggc

SEQ ID NO: 2174 - DNA, 20 bp, Homo sapiens
  source 1..20: mol_type = genomic DNA; note = Gene: BMPR2; note = Location (start to end; relative to TSS): BMPR2_24_54; note = Orientation (relative to transcription): sense; note = sgRNA Position: 202376377; note = Sequence Name: 56322-704_101_SL_seq_2174
cactggaagtgcctcccgga

SEQ ID NO: 2175 - DNA, 20 bp, Homo sapiens
  source 1..20: mol_type = genomic DNA; note = Gene: BMPR2; note = Location (start to end; relative to TSS): BMPR2_77_107; note = Orientation (relative to transcription): antisense; note = sgRNA Position: 202376410; note = Sequence Name: 56322-704_101_SL_seq_2175
gccggggaagggggtgggca

SEQ ID NO: 2176 - DNA, 20 bp, Homo sapiens
  source 1..20: mol_type = genomic DNA; note = Gene: BMPR2; note = Location (start to end; relative to TSS): BMPR2_23_53; note = Orientation (relative to transcription): sense; note = sgRNA Position: 202376376; note = Sequence Name: 56322-704_101_SL_seq_2176
ccactggaagtgcctcccgg

SEQ ID NO: 2177 - DNA, 20 bp, Homo sapiens
  source 1..20: mol_type = genomic DNA; note = Gene: BMPR2; note = Location (start to end; relative to TSS): BMPR2_74_104; note = Orientation (relative to transcription): antisense; note = sgRNA Position: 202376407; note = Sequence Name: 56322-704_101_SL_seq_2177
ggggaagggggtgggcaggg

SEQ ID NO: 2178 - DNA, 20 bp, Homo sapiens
  source 1..20: mol_type = genomic DNA; note = Gene: BMPR2; note = Location (start to end; relative to TSS): BMPR2_20_50; note = Orientation (relative to transcription): sense; note = sgRNA Position: 202376373; note = Sequence Name: 56322-704_101_SL_seq_2178
gagccactggaagtgcctcc

SEQ ID NO: 2179 - DNA, 20 bp, Homo sapiens
  source 1..20: mol_type = genomic DNA; note = Gene: BMPR2; note = Location (start to end; relative to TSS): BMPR2_67_97; note = Orientation (relative to transcription): sense; note = sgRNA Position: 202376420; note = Sequence Name: 56322-704_101_SL_seq_2179
tccctgcccacccccttccc

SEQ ID NO: 2180 - DNA, 20 bp, Homo sapiens
  source 1..20: mol_type = genomic DNA; note = Gene: BMX; note = Location (start to end; relative to TSS): BMX_33_63; note = Orientation (relative to transcription): sense; note = sgRNA Position: 15500866; note = Sequence Name: 56322-704_101_SL_seq_2180
gcttctggaaacaggacagc

SEQ ID NO: 2181 - DNA, 20 bp, Homo sapiens
  source 1..20: mol_type = genomic DNA; note = Gene: BMX; note = Location (start to end; relative to TSS): BMX_79_109; note = Orientation (relative to transcription): sense; note = sgRNA Position: 15500912; note = Sequence Name: 56322-704_101_SL_seq_2181
ccaagcaccgcggcggaccc

SEQ ID NO: 2182 - DNA, 20 bp, Homo sapiens
  source 1..20: mol_type = genomic DNA; note = Gene: BMX; note = Location (start to end; relative to TSS): BMX_34_64; note = Orientation (relative to transcription): sense; note = sgRNA Position: 15500867; note = Sequence Name: 56322-704_101_SL_seq_2182
cttctggaaacaggacagcc

SEQ ID NO: 2183 - DNA, 20 bp, Homo sapiens
  source 1..20: mol_type = genomic DNA; note = Gene: BMX; note = Location (start to end; relative to TSS): BMX_72_102; note = Orientation (relative to transcription): sense; note = sgRNA Position: 15500905; note = Sequence Name: 56322-704_101_SL_seq_2183
cagcagaccaagcaccgcgg

SEQ ID NO: 2184 - DNA, 20 bp, Homo sapiens
  source 1..20: mol_type = genomic DNA; note = Gene: BMX; note = Location (start to end; relative to TSS): BMX_18_48; note = Orientation (relative to transcription): sense; note = sgRNA Position: 15500851; note = Sequence Name: 56322-704_101_SL_seq_2184
aatgtgaaacaatttgcttc

SEQ ID NO: 2185 - DNA, 20 bp, Homo sapiens
  source 1..20: mol_type = genomic DNA; note = Gene: BMX; note = Location (start to end; relative to TSS): BMX_69_99; note = Orientation (relative to transcription): sense; note = sgRNA Position: 15500902; note = Sequence Name: 56322-704_101_SL_seq_2185
caacagcagaccaagcaccg

SEQ ID NO: 2186 - DNA, 20 bp, Homo sapiens
  source 1..20: mol_type = genomic DNA; note = Gene: BMX; note = Location (start to end; relative to TSS): BMX_20_50; note = Orientation (relative to transcription): antisense; note = sgRNA Position: 15500833; note = Sequence Name: 56322-704_101_SL_seq_2186
caaattgtttcacattttcc

SEQ ID NO: 2187 - DNA, 20 bp, Homo sapiens
  source 1..20: mol_type = genomic DNA; note = Gene: BMX; note = Location (start to end; relative to TSS): BMX_67_97; note = Orientation (relative to transcription): antisense; note = sgRNA Position: 15500880; note = Sequence Name: 56322-704_101_SL_seq_2187
ggtctgctgttgcaggaaca

SEQ ID NO: 2188 - DNA, 20 bp, Homo sapiens
  source 1..20: mol_type = genomic DNA; note = Gene: BMX; note = Location (start to end; relative to TSS): BMX_25_55; note = Orientation (relative to transcription): sense; note = sgRNA Position: 15500858; note = Sequence Name: 56322-704_101_SL_seq_2188
aacaatttgcttctggaaac

SEQ ID NO: 2189 - DNA, 20 bp, Homo sapiens
  source 1..20: mol_type = genomic DNA; note = Gene: BMX; note = Location (start to end; relative to TSS): BMX_61_91; note = Orientation (relative to transcription): antisense; note = sgRNA Position: 15500874; note = Sequence Name: 56322-704_101_SL_seq_2189
ctgttgcaggaacacggccc

SEQ ID NO: 2190 - DNA, 20 bp, Homo sapiens
  source 1..20: mol_type = genomic DNA; note = Gene: BRAF; note = Location (start to end; relative to TSS): BRAF_45_75; note = Orientation (relative to transcription): antisense; note = sgRNA Position: 140924880; note = Sequence Name: 56322-704_101_SL_seq_2190
gcctgggccacctcaggtac

SEQ ID NO: 2191 - DNA, 20 bp, Homo sapiens
  source 1..20: mol_type = genomic DNA; note = Gene: BRAF; note = Location (start to end; relative to TSS): BRAF_88_118; note = Orientation (relative to transcription): antisense; note = sgRNA Position: 140924837; note = Sequence Name: 56322-704_101_SL_seq_2191
ggcgcggggaggagcggccc

SEQ ID NO: 2192 - DNA, 20 bp, Homo sapiens
  source 1..20: mol_type = genomic DNA; note = Gene: BRAF; note = Location (start to end; relative to TSS): BRAF_35_65; note = Orientation (relative to transcription): sense; note = sgRNA Position: 140924870; note = Sequence Name: 56322-704_101_SL_seq_2192
gccggtacctgaggtggccc

SEQ ID NO: 2193 - DNA, 20 bp, Homo sapiens
  source 1..20: mol_type = genomic DNA; note = Gene: BRAF; note = Location (start to end; relative to TSS): BRAF_85_115; note = Orientation (relative to transcription): antisense; note = sgRNA Position: 140924840; note = Sequence Name: 56322-704_101_SL_seq_2193
gcggggaggagcggcccggg

SEQ ID NO: 2194 - DNA, 20 bp, Homo sapiens
  source 1..20: mol_type = genomic DNA; note = Gene: BRAF; note = Location (start to end; relative to TSS): BRAF_38_68; note = Orientation (relative to transcription): antisense; note = sgRNA Position: 140924887; note = Sequence Name: 56322-704_101_SL_seq_2194
ccacctcaggtaccggcccg

SEQ ID NO: 2195 - DNA, 20 bp, Homo sapiens
  source 1..20: mol_type = genomic DNA; note = Gene: BRAF; note = Location (start to end; relative to TSS): BRAF_73_103; note = Orientation (relative to transcription): antisense; note = sgRNA Position: 140924852; note = Sequence Name: 56322-704_101_SL_seq_2195
ggcccgggcggcgccgcggg

SEQ ID NO: 2196 - DNA, 20 bp, Homo sapiens
  source 1..20: mol_type = genomic DNA; note = Gene: BRAF; note = Location (start to end; relative to TSS): BRAF_29_59; note = Orientation (relative to transcription): sense; note = sgRNA Position: 140924876; note = Sequence Name: 56322-704_101_SL_seq_2196
ccgcgggccggtacctgagg

SEQ ID NO: 2197 - DNA, 20 bp, Homo sapiens
  source 1..20: mol_type = genomic DNA; note = Gene: BRAF; note = Location (start to end; relative to TSS): BRAF_69_99; note = Orientation (relative to transcription): antisense; note = sgRNA Position: 140924856; note = Sequence Name: 56322-704_101_SL_seq_2197
cgggcggcgccgcgggcgga

SEQ ID NO: 2198 - DNA, 20 bp, Homo sapiens
  source 1..20: mol_type = genomic DNA; note = Gene: BRAF; note = Location (start to end; relative to TSS): BRAF_26_56; note = Orientation (relative to transcription): sense; note = sgRNA Position: 140924879; note = Sequence Name: 56322-704_101_SL_seq_2198
gggccgcgggccggtacctg

SEQ ID NO: 2199 - DNA, 20 bp, Homo sapiens
  source 1..20: mol_type = genomic DNA; note = Gene: BRAF; note = Location (start to end; relative to TSS): BRAF_61_91; note = Orientation (relative to transcription): antisense; note = sgRNA Position: 140924864; note = Sequence Name: 56322-704_101_SL_seq_2199
gccgcgggcggagggcgcct

SEQ ID NO: 2200 - DNA, 20 bp, Homo sapiens
  source 1..20: mol_type = genomic DNA; note = Gene: BRD2; note = Location (start to end; relative to TSS): BRD2_20_50; note = Orientation (relative to transcription): antisense; note = sgRNA Position: 32968620; note = Sequence Name: 56322-704_101_SL_seq_2200
ctctccatacgagttcagca

SEQ ID NO: 2201 - DNA, 20 bp, Homo sapiens
  source 1..20: mol_type = genomic DNA; note = Gene: BRD2; note = Location (start to end; relative to TSS): BRD2_63_93; note = Orientation (relative to transcription): antisense; note = sgRNA Position: 32968663; note = Sequence Name: 56322-704_101_SL_seq_2201
agcttcctatcccgcagtcc

SEQ ID NO: 2202 - DNA, 20 bp, Homo sapiens
  source 1..20: mol_type = genomic DNA; note = Gene: BRD2; note = Location (start to end; relative to TSS): BRD2_21_51; note = Orientation (relative to transcription): sense; note = sgRNA Position: 32968641; note = Sequence Name: 56322-704_101_SL_seq_2202
ctcgtatggagaggcgagtg

SEQ ID NO: 2203 - DNA, 20 bp, Homo sapiens
  source 1..20: mol_type = genomic DNA; note = Gene: BRD2; note = Location (start to end; relative to TSS): BRD2_58_88; note = Orientation (relative to transcription): sense; note = sgRNA Position: 32968678; note = Sequence Name: 56322-704_101_SL_seq_2203
gactgcgggataggaagctg

SEQ ID NO: 2204 - DNA, 20 bp, Homo sapiens
  source 1..20: mol_type = genomic DNA; note = Gene: BRD2; note = Location (start to end; relative to TSS): BRD2_22_52; note = Orientation (relative to transcription): sense; note = sgRNA Position: 32968642; note = Sequence Name: 56322-704_101_SL_seq_2204
tcgtatggagaggcgagtgg

SEQ ID NO: 2205 - DNA, 20 bp, Homo sapiens
  source 1..20: mol_type = genomic DNA; note = Gene: BRD2; note = Location (start to end; relative to TSS): BRD2_57_87; note = Orientation (relative to transcription): sense; note = sgRNA Position: 32968677; note = Sequence Name: 56322-704_101_SL_seq_2205
ggactgcgggataggaagct

SEQ ID NO: 2206 - DNA, 20 bp, Homo sapiens
  source 1..20: mol_type = genomic DNA; note = Gene: BRD2; note = Location (start to end; relative to TSS): BRD2_23_53; note = Orientation (relative to transcription): sense; note = sgRNA Position: 32968643; note = Sequence Name: 56322-704_101_SL_seq_2206
cgtatggagaggcgagtggg

SEQ ID NO: 2207 - DNA, 20 bp, Homo sapiens
  source 1..20: mol_type = genomic DNA; note = Gene: BRD2; note = Location (start to end; relative to TSS): BRD2_56_86; note = Orientation (relative to transcription): sense; note = sgRNA Position: 32968676; note = Sequence Name: 56322-704_101_SL_seq_2207
aggactgcgggataggaagc

SEQ ID NO: 2208 - DNA, 20 bp, Homo sapiens
  source 1..20: mol_type = genomic DNA; note = Gene: BRD2; note = Location (start to end; relative to TSS): BRD2_19_49; note = Orientation (relative to transcription): sense; note = sgRNA Position: 32968639; note = Sequence Name: 56322-704_101_SL_seq_2208
aactcgtatggagaggcgag

SEQ ID NO: 2209 - DNA, 20 bp, Homo sapiens
  source 1..20: mol_type = genomic DNA; note = Gene: BRD2; note = Location (start to end; relative to TSS): BRD2_49_79; note = Orientation (relative to transcription): sense; note = sgRNA Position: 32968669; note = Sequence Name: 56322-704_101_SL_seq_2209
agagtccaggactgcgggat

SEQ ID NO: 2210 - DNA, 20 bp, Homo sapiens
  source 1..20: mol_type = genomic DNA; note = Gene: BRD3; note = Location (start to end; relative to TSS): BRD3_37_67; note = Orientation (relative to transcription): sense; note = sgRNA Position: 134067965; note = Sequence Name: 56322-704_101_SL_seq_2210
ggccgggaggggacggccgc

SEQ ID NO: 2211 - DNA, 20 bp, Homo sapiens
  source 1..20: mol_type = genomic DNA; note = Gene: BRD3; note = Location (start to end; relative to TSS): BRD3_84_114; note = Orientation (relative to transcription): sense; note = sgRNA Position: 134067918; note = Sequence Name: 56322-704_101_SL_seq_2211
ctcttgcttccttgcgcgcg

SEQ ID NO: 2212 - DNA, 20 bp, Homo sapiens
  source 1..20: mol_type = genomic DNA; note = Gene: BRD3; note = Location (start to end; relative to TSS): BRD3_35_65; note = Orientation (relative to transcription): antisense; note = sgRNA Position: 134067987; note = Sequence Name: 56322-704_101_SL_seq_2212
cccctcccggcccgcgcggc

SEQ ID NO: 2213 - DNA, 20 bp, Homo sapiens
  source 1..20: mol_type = genomic DNA; note = Gene: BRD3; note = Location (start to end; relative to TSS): BRD3_79_109; note = Orientation (relative to transcription): antisense; note = sgRNA Position: 134067943; note = Sequence Name: 56322-704_101_SL_seq_2213
aagcaagagaaaggcgtact

SEQ ID NO: 2214 - DNA, 20 bp, Homo sapiens
  source 1..20: mol_type = genomic DNA; note = Gene: BRD3; note = Location (start to end; relative to TSS): BRD3_25_55; note = Orientation (relative to transcription): sense; note = sgRNA Position: 134067977; note = Sequence Name: 56322-704_101_SL_seq_2214
gccggccgcgcgggccggga

SEQ ID NO: 2215 - DNA, 20 bp, Homo sapiens
  source 1..20: mol_type = genomic DNA; note = Gene: BRD3; note = Location (start to end; relative to TSS): BRD3_71_101; note = Orientation (relative to transcription): antisense; note = sgRNA Position: 134067951; note = Sequence Name: 56322-704_101_SL_seq_2215
gaaaggcgtacttggcctcg

SEQ ID NO: 2216 - DNA, 20 bp, Homo sapiens
  source 1..20: mol_type = genomic DNA; note = Gene: BRD3; note = Location (start to end; relative to TSS): BRD3_24_54; note = Orientation (relative to transcription): antisense; note = sgRNA Position: 134067998; note = Sequence Name: 56322-704_101_SL_seq_2216
ccgcgcggccggctcctctt

SEQ ID NO: 2217 - DNA, 20 bp, Homo sapiens
  source 1..20: mol_type = genomic DNA; note = Gene: BRD3; note = Location (start to end; relative to TSS): BRD3_65_95; note = Orientation (relative to transcription): antisense; note = sgRNA Position: 134067957; note = Sequence Name: 56322-704_101_SL_seq_2217
cgtacttggcctcgcggctc

SEQ ID NO: 2218 - DNA, 20 bp, Homo sapiens
  source 1..20: mol_type = genomic DNA; note = Gene: BRD3; note = Location (start to end; relative to TSS): BRD3_20_50; note = Orientation (relative to transcription): sense; note = sgRNA Position: 134067982; note = Sequence Name: 56322-704_101_SL_seq_2218
gaggagccggccgcgcgggc

SEQ ID NO: 2219 - DNA, 20 bp, Homo sapiens
  source 1..20: mol_type = genomic DNA; note = Gene: BRD3; note = Location (start to end; relative to TSS): BRD3_62_92; note = Orientation (relative to transcription): antisense; note = sgRNA Position: 134067960; note = Sequence Name: 56322-704_101_SL_seq_2219
acttggcctcgcggctccgg

SEQ ID NO: 2220 - DNA, 20 bp, Homo sapiens
  source 1..20: mol_type = genomic DNA; note = Gene: BRD4; note = Location (start to end; relative to TSS): BRD4_57_87; note = Orientation (relative to transcription): sense; note = sgRNA Position: 15332458; note = Sequence Name: 56322-704_101_SL_seq_2220
ccgaggagccgaagcagtgg

SEQ ID NO: 2221 - DNA, 20 bp, Homo sapiens
  source 1..20: mol_type = genomic DNA; note = Gene: BRD4; note = Location (start to end; relative to TSS): BRD4_104_134; note = Orientation (relative to transcription): sense; note = sgRNA Position: 15332411; note = Sequence Name: 56322-704_101_SL_seq_2221
gcggtgcccgcgggcgagcg

SEQ ID NO: 2222 - DNA, 20 bp, Homo sapiens
  source 1..20: mol_type = genomic DNA; note = Gene: BRD4; note = Location (start to end; relative to TSS): BRD4_59_89; note = Orientation (relative to transcription): antisense; note = sgRNA Position: 15332476; note = Sequence Name: 56322-704_101_SL_seq_2222
tgcttcggctcctcggctgc

SEQ ID NO: 2223 - DNA, 20 bp, Homo sapiens
  source 1..20: mol_type = genomic DNA; note = Gene: BRD4; note = Location (start to end; relative to TSS): BRD4_95_125; note = Orientation (relative to transcription): sense; note = sgRNA Position: 15332420; note = Sequence Name: 56322-704_101_SL_seq_2223
cggctgccggcggtgcccgc

SEQ ID NO: 2224 - DNA, 20 bp, Homo sapiens
  source 1..20: mol_type = genomic DNA; note = Gene: BRD4; note = Location (start to end; relative to TSS): BRD4_60_90; note = Orientation (relative to transcription): sense; note = sgRNA Position: 15332455; note = Sequence Name: 56322-704_101_SL_seq_2224
aggagccgaagcagtggcgg

SEQ ID NO: 2225 - DNA, 20 bp, Homo sapiens
  source 1..20: mol_type = genomic DNA; note = Gene: BRD4; note = Location (start to end; relative to TSS): BRD4_94_124; note = Orientation (relative to transcription): sense; note = sgRNA Position: 15332421; note = Sequence Name: 56322-704_101_SL_seq_2225
gcggctgccggcggtgcccg

SEQ ID NO: 2226 - DNA, 20 bp, Homo sapiens
  source 1..20: mol_type = genomic DNA; note = Gene: BRD4; note = Location (start to end; relative to TSS): BRD4_54_84; note = Orientation (relative to transcription): sense; note = sgRNA Position: 15332461; note = Sequence Name: 56322-704_101_SL_seq_2226
cagccgaggagccgaagcag

SEQ ID NO: 2227 - DNA, 20 bp, Homo sapiens
  source 1..20: mol_type = genomic DNA; note = Gene: BRD4; note = Location (start to end; relative to TSS): BRD4_85_115; note = Orientation (relative to transcription): sense; note = sgRNA Position: 15332430; note = Sequence Name: 56322-704_101_SL_seq_2227
gcggctgcggcggctgccgg

SEQ ID NO: 2228 - DNA, 20 bp, Homo sapiens
  source 1..20: mol_type = genomic DNA; note = Gene: BRD4; note = Location (start to end; relative to TSS): BRD4_40_70; note = Orientation (relative to transcription): sense; note = sgRNA Position: 15332475; note = Sequence Name: 56322-704_101_SL_seq_2228
gttctggtctcccgcagccg

SEQ ID NO: 2229 - DNA, 20 bp, Homo sapiens
  source 1..20: mol_type = genomic DNA; note = Gene: BRD4; note = Location (start to end; relative to TSS): BRD4_72_102; note = Orientation (relative to transcription): sense; note = sgRNA Position: 15332443; note = Sequence Name: 56322-704_101_SL_seq_2229
agtggcggcggcagcggctg

SEQ ID NO: 2230 - DNA, 20 bp, Homo sapiens
  source 1..20: mol_type = genomic DNA; note = Gene: BRDT; note = Location (start to end; relative to TSS): BRDT_40_70; note = Orientation (relative to transcription): antisense; note = sgRNA Position: 91949447; note = Sequence Name: 56322-704_101_SL_seq_2230
gcacaaaatgaagcggtgca

SEQ ID NO: 2231 - DNA, 20 bp, Homo sapiens
  source 1..20: mol_type = genomic DNA; note = Gene: BRDT; note = Location (start to end; relative to TSS): BRDT_108_138; note = Orientation (relative to transcription): sense; note = sgRNA Position: 91949535; note = Sequence Name: 56322-704_101_SL_seq_2231
aggtaatgtaccctccacag

SEQ ID NO: 2232 - DNA, 20 bp, Homo sapiens
  source 1..20: mol_type = genomic DNA; note = Gene: BRDT; note = Location (start to end; relative to TSS): BRDT_41_71; note = Orientation (relative to transcription): antisense; note = sgRNA Position: 91949448; note = Sequence Name: 56322-704_101_SL_seq_2232
tgcacaaaatgaagcggtgc

SEQ ID NO: 2233 - DNA, 20 bp, Homo sapiens
  source 1..20: mol_type = genomic DNA; note = Gene: BRDT; note = Location (start to end; relative to TSS): BRDT_107_137; note = Orientation (relative to transcription): sense; note = sgRNA Position: 91949534; note = Sequence Name: 56322-704_101_SL_seq_2233
caggtaatgtaccctccaca

SEQ ID NO: 2234 - DNA, 20 bp, Homo sapiens
  source 1..20: mol_type = genomic DNA; note = Gene: BRDT; note = Location (start to end; relative to TSS): BRDT_42_72; note = Orientation (relative to transcription): sense; note = sgRNA Position: 91949469; note = Sequence Name: 56322-704_101_SL_seq_2234
ttcattttgtgcagcctgaa

SEQ ID NO: 2235 - DNA, 20 bp, Homo sapiens
  source 1..20: mol_type = genomic DNA; note = Gene: BRDT; note = Location (start to end; relative to TSS): BRDT_106_136; note = Orientation (relative to transcription): sense; note = sgRNA Position: 91949533; note = Sequence Name: 56322-704_101_SL_seq_2235
acaggtaatgtaccctccac

SEQ ID NO: 2236 - DNA, 20 bp, Homo sapiens
  source 1..20: mol_type = genomic DNA; note = Gene: BRDT; note = Location (start to end; relative to TSS): BRDT_43_73; note = Orientation (relative to transcription): sense; note = sgRNA Position: 91949470; note = Sequence Name: 56322-704_101_SL_seq_2236
tcattttgtgcagcctgaaa

SEQ ID NO: 2237 - DNA, 20 bp, Homo sapiens
  source 1..20: mol_type = genomic DNA; note = Gene: BRDT; note = Location (start to end; relative to TSS): BRDT_88_118; note = Orientation (relative to transcription): sense; note = sgRNA Position: 91949515; note = Sequence Name: 56322-704_101_SL_seq_2237
gtaatatacaggtaacatac

SEQ ID NO: 2238 - DNA, 20 bp, Homo sapiens
  source 1..20: mol_type = genomic DNA; note = Gene: BRDT; note = Location (start to end; relative to TSS): BRDT_44_74; note = Orientation (relative to transcription): sense; note = sgRNA Position: 91949471; note = Sequence Name: 56322-704_101_SL_seq_2238
cattttgtgcagcctgaaag

SEQ ID NO: 2239 - DNA, 20 bp, Homo sapiens
  source 1..20: mol_type = genomic DNA; note = Gene: BRDT; note = Location (start to end; relative to TSS): BRDT_77_107; note = Orientation (relative to transcription): sense; note = sgRNA Position: 91949504; note = Sequence Name: 56322-704_101_SL_seq_2239
aggtcggttttgtaatatac

SEQ ID NO: 2240 - DNA, 20 bp, Homo sapiens
  source 1..20: mol_type = genomic DNA; note = Gene: BRSK1; note = Location (start to end; relative to TSS): BRSK1_36_66; note = Orientation (relative to transcription): sense; note = sgRNA Position: 55284059; note = Sequence Name: 56322-704_101_SL_seq_2240
gggaggcggagaggaggagg

SEQ ID NO: 2241 - DNA, 20 bp, Homo sapiens
  source 1..20: mol_type = genomic DNA; note = Gene: BRSK1; note = Location (start to end; relative to TSS): BRSK1_77_107; note = Orientation (relative to transcription): sense; note = sgRNA Position: 55284100; note = Sequence Name: 56322-704_101_SL_seq_2241
tgggggggcgggggggacct

SEQ ID NO: 2242 - DNA, 20 bp, Homo sapiens
  source 1..20: mol_type = genomic DNA; note = Gene: BRSK1; note = Location (start to end; relative to TSS): BRSK1_33_63; note = Orientation (relative to transcription): sense; note = sgRNA Position: 55284056; note = Sequence Name: 56322-704_101_SL_seq_2242
ggggggaggcggagaggagg

SEQ ID NO: 2243 - DNA, 20 bp, Homo sapiens
  source 1..20: mol_type = genomic DNA; note = Gene: BRSK1; note = Location (start to end; relative to TSS): BRSK1_77_107; note = Orientation (relative to transcription): sense; note = sgRNA Position: 55284100; note = Sequence Name: 56322-704_101_SL_seq_2243
tgggggggcgggggggacct

SEQ ID NO: 2244 - DNA, 20 bp, Homo sapiens
  source 1..20: mol_type = genomic DNA; note = Gene: BRSK1; note = Location (start to end; relative to TSS): BRSK1_30_60; note = Orientation (relative to transcription): sense; note = sgRNA Position: 55284053; note = Sequence Name: 56322-704_101_SL_seq_2244
ggcggggggaggcggagagg

SEQ ID NO: 2245 - DNA, 20 bp, Homo sapiens
  source 1..20: mol_type = genomic DNA; note = Gene: BRSK1; note = Location (start to end; relative to TSS): BRSK1_60_90; note = Orientation (relative to transcription): sense; note = sgRNA Position: 55284083; note = Sequence Name: 56322-704_101_SL_seq_2245
ggaggagagagggcgcgtgg

SEQ ID NO: 2246 - DNA, 20 bp, Homo sapiens
  source 1..20: mol_type = genomic DNA; note = Gene: BRSK1; note = Location (start to end; relative to TSS): BRSK1_27_57; note = Orientation (relative to transcription): sense; note = sgRNA Position: 55284050; note = Sequence Name: 56322-704_101_SL_seq_2246
ggtggcggggggaggcggag

SEQ ID NO: 2247 - DNA, 20 bp, Homo sapiens
  source 1..20: mol_type = genomic DNA; note = Gene: BRSK1; note = Location (start to end; relative to TSS): BRSK1_57_87; note = Orientation (relative to transcription): sense; note = sgRNA Position: 55284080; note = Sequence Name: 56322-704_101_SL_seq_2247
ggcggaggagagagggcgcg

SEQ ID NO: 2248 - DNA, 20 bp, Homo sapiens
  source 1..20: mol_type = genomic DNA; note = Gene: BRSK1; note = Location (start to end; relative to TSS): BRSK1_19_49; note = Orientation (relative to transcription): antisense; note = sgRNA Position: 55284022; note = Sequence Name: 56322-704_101_SL_seq_2248
gccacctcgtcctttctctc

SEQ ID NO: 2249 - DNA, 20 bp, Homo sapiens
  source 1..20: mol_type = genomic DNA; note = Gene: BRSK1; note = Location (start to end; relative to TSS): BRSK1_49_79; note = Orientation (relative to transcription): sense; note = sgRNA Position: 55284072; note = Sequence Name: 56322-704_101_SL_seq_2249
gaggaggaggcggaggagag

SEQ ID NO: 2250 - DNA, 20 bp, Homo sapiens
  source 1..20: mol_type = genomic DNA; note = Gene: BRSK2; note = Location (start to end; relative to TSS): BRSK2_64_94; note = Orientation (relative to transcription): antisense; note = sgRNA Position: 1390004; note = Sequence Name: 56322-704_101_SL_seq_2250
cgccgccgccgccgccgccg

SEQ ID NO: 2251 - DNA, 20 bp, Homo sapiens
  source 1..20: mol_type = genomic DNA; note = Gene: BRSK2; note = Location (start to end; relative to TSS): BRSK2_105_135; note = Orientation (relative to transcription): antisense; note = sgRNA Position: 1390045; note = Sequence Name: 56322-704_101_SL_seq_2251
tcgagaggacagggcgggcg

SEQ ID NO: 2252 - DNA, 20 bp, Homo sapiens
  source 1..20: mol_type = genomic DNA; note = Gene: BRSK2; note = Location (start to end; relative to TSS): BRSK2_20_50; note = Orientation (relative to transcription): antisense; note = sgRNA Position: 1389960; note = Sequence Name: 56322-704_101_SL_seq_2252
ccccagcgcacgcccgtcag

SEQ ID NO: 2253 - DNA, 20 bp, Homo sapiens
  source 1..20: mol_type = genomic DNA; note = Gene: BRSK2; note = Location (start to end; relative to TSS): BRSK2_104_134; note = Orientation (relative to transcription): sense; note = sgRNA Position: 1390064; note = Sequence Name: 56322-704_101_SL_seq_2253
gccctgtcctctcgacgagg

SEQ ID NO: 2254 - DNA, 20 bp, Homo sapiens
  source 1..20: mol_type = genomic DNA; note = Gene: BRSK2; note = Location (start to end; relative to TSS): BRSK2_12_42; note = Orientation (relative to transcription): sense; note = sgRNA Position: 1389972; note = Sequence Name: 56322-704_101_SL_seq_2254
cgctgacgggcgtgcgctgg

SEQ ID NO: 2255 - DNA, 20 bp, Homo sapiens
  source 1..20: mol_type = genomic DNA; note = Gene: BRSK2; note = Location (start to end; relative to TSS): BRSK2_101_131; note = Orientation (relative to transcription): sense; note = sgRNA Position: 1390061; note = Sequence Name: 56322-704_101_SL_seq_2255
cccgccctgtcctctcgacg

SEQ ID NO: 2256 - DNA, 20 bp, Homo sapiens
  source 1..20: mol_type = genomic DNA; note = Gene: BRSK2; note = Location (start to end; relative to TSS): BRSK2_11_41; note = Orientation (relative to transcription): sense; note = sgRNA Position: 1389971; note = Sequence Name: 56322-704_101_SL_seq_2256
ccgctgacgggcgtgcgctg

SEQ ID NO: 2257 - DNA, 20 bp, Homo sapiens
  source 1..20: mol_type = genomic DNA; note = Gene: BRSK2; note = Location (start to end; relative to TSS): BRSK2_97_127; note = Orientation (relative to transcription): antisense; note = sgRNA Position: 1390037; note = Sequence Name: 56322-704_101_SL_seq_2257
acagggcgggcgggggcacc

SEQ ID NO: 2258 - DNA, 20 bp, Homo sapiens
  source 1..20: mol_type = genomic DNA; note = Gene: BRSK2; note = Location (start to end; relative to TSS): BRSK2_-1_29; note = Orientation (relative to transcription): sense; note = sgRNA Position: 1389959; note = Sequence Name: 56322-704_101_SL_seq_2258
tcggctgcgcggccgctgac

SEQ ID NO: 2259 - DNA, 20 bp, Homo sapiens
  source 1..20: mol_type = genomic DNA; note = Gene: BRSK2; note = Location (start to end; relative to TSS): BRSK2_64_94; note = Orientation (relative to transcription): antisense; note = sgRNA Position: 1390004; note = Sequence Name: 56322-704_101_SL_seq_2259
cgccgccgccgccgccgccg

SEQ ID NO: 2260 - DNA, 20 bp, Homo sapiens
  source 1..20: mol_type = genomic DNA; note = Gene: BTK; note = Location (start to end; relative to TSS): BTK_66_96; note = Orientation (relative to transcription): antisense; note = sgRNA Position: 101386121; note = Sequence Name: 56322-704_101_SL_seq_2260
gatgccaggacttggaaggt

SEQ ID NO: 2261 - DNA, 20 bp, Homo sapiens
  source 1..20: mol_type = genomic DNA; note = Gene: BTK; note = Location (start to end; relative to TSS): BTK_100_130; note = Orientation (relative to transcription): sense; note = sgRNA Position: 101386067; note = Sequence Name: 56322-704_101_SL_seq_2261
cctgcattaagtcaggactg

SEQ ID NO: 2262 - DNA, 20 bp, Homo sapiens
  source 1..20: mol_type = genomic DNA; note = Gene: BTK; note = Location (start to end; relative to TSS): BTK_53_83; note = Orientation (relative to transcription): sense; note = sgRNA Position: 101386114; note = Sequence Name: 56322-704_101_SL_seq_2262
gagtcccaccttccaagtcc

SEQ ID NO: 2263 - DNA, 20 bp, Homo sapiens
  source 1..20: mol_type = genomic DNA; note = Gene: BTK; note = Location (start to end; relative to TSS): BTK_93_123; note = Orientation (relative to transcription): sense; note = sgRNA Position: 101386074; note = Sequence Name: 56322-704_101_SL_seq_2263
gaagctacctgcattaagtc

SEQ ID NO: 2264 - DNA, 20 bp, Homo sapiens
  source 1..20: mol_type = genomic DNA; note = Gene: BTK; note = Location (start to end; relative to TSS): BTK_44_74; note = Orientation (relative to transcription): antisense; note = sgRNA Position: 101386143; note = Sequence Name: 56322-704_101_SL_seq_2264
gactcgatcgcagcagacac

SEQ ID NO: 2265 - DNA, 20 bp, Homo sapiens
  source 1..20: mol_type = genomic DNA; note = Gene: BTK; note = Location (start to end; relative to TSS): BTK_74_104; note = Orientation (relative to transcription): antisense; note = sgRNA Position: 101386113; note = Sequence Name: 56322-704_101_SL_seq_2265
tgcattgagatgccaggact

SEQ ID NO: 2266 - DNA, 20 bp, Homo sapiens
  source 1..20: mol_type = genomic DNA; note = Gene: BTK; note = Location (start to end; relative to TSS): BTK_38_68; note = Orientation (relative to transcription): antisense; note = sgRNA Position: 101386149; note = Sequence Name: 56322-704_101_SL_seq_2266
atcgcagcagacactggccc

SEQ ID NO: 2267 - DNA, 20 bp, Homo sapiens
  source 1..20: mol_type = genomic DNA; note = Gene: BTK; note = Location (start to end; relative to TSS): BTK_70_100; note = Orientation (relative to transcription): antisense; note = sgRNA Position: 101386117; note = Sequence Name: 56322-704_101_SL_seq_2267
ttgagatgccaggacttgga

SEQ ID NO: 2268 - DNA, 20 bp, Homo sapiens
  source 1..20: mol_type = genomic DNA; note = Gene: BTK; note = Location (start to end; relative to TSS): BTK_11_41; note = Orientation (relative to transcription): sense; note = sgRNA Position: 101386156; note = Sequence Name: 56322-704_101_SL_seq_2268
gactgtaagaatatgtctcc

SEQ ID NO: 2269 - DNA, 20 bp, Homo sapiens
  source 1..20: mol_type = genomic DNA; note = Gene: BTK; note = Location (start to end; relative to TSS): BTK_44_74; note = Orientation (relative to transcription): antisense; note = sgRNA Position: 101386143; note = Sequence Name: 56322-704_101_SL_seq_2269
gactcgatcgcagcagacac

SEQ ID NO: 2270 - DNA, 20 bp, Homo sapiens
  source 1..20: mol_type = genomic DNA; note = Gene: BUB1; note = Location (start to end; relative to TSS): BUB1_60_90; note = Orientation (relative to transcription): antisense; note = sgRNA Position: 110677999; note = Sequence Name: 56322-704_101_SL_seq_2270
tccggggtgtccatggccag

SEQ ID NO: 2271 - DNA, 20 bp, Homo sapiens
  source 1..20: mol_type = genomic DNA; note = Gene: BUB1; note = Location (start to end; relative to TSS): BUB1_98_128; note = Orientation (relative to transcription): sense; note = sgRNA Position: 110677941; note = Sequence Name: 56322-704_101_SL_seq_2271
ctggtggggtggggaagccc

SEQ ID NO: 2272 - DNA, 20 bp, Homo sapiens
  source 1..20: mol_type = genomic DNA; note = Gene: BUB1; note = Location (start to end; relative to TSS): BUB1_50_80; note = Orientation (relative to transcription): sense; note = sgRNA Position: 110677989; note = Sequence Name: 56322-704_101_SL_seq_2272
tcctctggccatggacaccc

SEQ ID NO: 2273 - DNA, 20 bp, Homo sapiens
  source 1..20: mol_type = genomic DNA; note = Gene: BUB1; note = Location (start to end; relative to TSS): BUB1_82_112; note = Orientation (relative to transcription): sense; note = sgRNA Position: 110677957; note = Sequence Name: 56322-704_101_SL_seq_2273
ttcagtaagtgtccgtctgg

SEQ ID NO: 2274 - DNA, 20 bp, Homo sapiens
  source 1..20: mol_type = genomic DNA; note = Gene: BUB1; note = Location (start to end; relative to TSS): BUB1_41_71; note = Orientation (relative to transcription): sense; note = sgRNA Position: 110677998; note = Sequence Name: 56322-704_101_SL_seq_2274
cggccagcgtcctctggcca

SEQ ID NO: 2275 - DNA, 20 bp, Homo sapiens
  source 1..20: mol_type = genomic DNA; note = Gene: BUB1; note = Location (start to end; relative to TSS): BUB1_76_106; note = Orientation (relative to transcription): antisense; note = sgRNA Position: 110677983; note = Sequence Name: 56322-704_101_SL_seq_2275
ttactgaaggacattttccg

SEQ ID NO: 2276 - DNA, 20 bp, Homo sapiens
  source 1..20: mol_type = genomic DNA; note = Gene: BUB1; note = Location (start to end; relative to TSS): BUB1_21_51; note = Orientation (relative to transcription): sense; note = sgRNA Position: 110678018; note = Sequence Name: 56322-704_101_SL_seq_2276
ggttcaggtttggccgctgc

SEQ ID NO: 2277 - DNA, 20 bp, Homo sapiens
  source 1..20: mol_type = genomic DNA; note = Gene: BUB1; note = Location (start to end; relative to TSS): BUB1_60_90; note = Orientation (relative to transcription): antisense; note = sgRNA Position: 110677999; note = Sequence Name: 56322-704_101_SL_seq_2277
tccggggtgtccatggccag

SEQ ID NO: 2278 - DNA, 20 bp, Homo sapiens
  source 1..20: mol_type = genomic DNA; note = Gene: BUB1; note = Location (start to end; relative to TSS): BUB1_11_41; note = Orientation (relative to transcription): sense; note = sgRNA Position: 110678028; note = Sequence Name: 56322-704_101_SL_seq_2278
tctagtttgcggttcaggtt

SEQ ID NO: 2279 - DNA, 20 bp, Homo sapiens
  source 1..20: mol_type = genomic DNA; note = Gene: BUB1; note = Location (start to end; relative to TSS): BUB1_41_71; note = Orientation (relative to transcription): sense; note = sgRNA Position: 110677998; note = Sequence Name: 56322-704_101_SL_seq_2279
cggccagcgtcctctggcca

SEQ ID NO: 2280 - DNA, 20 bp, Homo sapiens
  source 1..20: mol_type = genomic DNA; note = Gene: BUB1B; note = Location (start to end; relative to TSS): BUB1B_41_71; note = Orientation (relative to transcription): sense; note = sgRNA Position: 40161136; note = Sequence Name: 56322-704_101_SL_seq_2280
gcttctgtagctccgagggc

SEQ ID NO: 2281 - DNA, 20 bp, Homo sapiens
  source 1..20: mol_type = genomic DNA; note = Gene: BUB1B; note = Location (start to end; relative to TSS): BUB1B_102_132; note = Orientation (relative to transcription): antisense; note = sgRNA Position: 40161177; note = Sequence Name: 56322-704_101_SL_seq_2281
ctgctgcaggcctttcctct

SEQ ID NO: 2282 - DNA, 20 bp, Homo sapiens
  source 1..20: mol_type = genomic DNA; note = Gene: BUB1B; note = Location (start to end; relative to TSS): BUB1B_42_72; note = Orientation (relative to transcription): antisense; note = sgRNA Position: 40161117; note = Sequence Name: 56322-704_101_SL_seq_2282
cggagctacagaagcgacca

SEQ ID NO: 2283 - DNA, 20 bp, Homo sapiens
  source 1..20: mol_type = genomic DNA; note = Gene: BUB1B; note = Location (start to end; relative to TSS): BUB1B_100_130; note = Orientation (relative to transcription): sense; note = sgRNA Position: 40161195; note = Sequence Name: 56322-704_101_SL_seq_2283
gaaaggcctgcagcaggacg

SEQ ID NO: 2284 - DNA, 20 bp, Homo sapiens
  source 1..20: mol_type = genomic DNA; note = Gene: BUB1B; note = Location (start to end; relative to TSS): BUB1B_47_77; note = Orientation (relative to transcription): sense; note = sgRNA Position: 40161142; note = Sequence Name: 56322-704_101_SL_seq_2284
gtagctccgagggcaggttg

SEQ ID NO: 2285 - DNA, 20 bp, Homo sapiens
  source 1..20: mol_type = genomic DNA; note = Gene: BUB1B; note = Location (start to end; relative to TSS): BUB1B_86_116; note = Orientation (relative to transcription): antisense; note = sgRNA Position: 40161161; note = Sequence Name: 56322-704_101_SL_seq_2285
ctctgggccacagaccgcct

SEQ ID NO: 2286 - DNA, 20 bp, Homo sapiens
  source 1..20: mol_type = genomic DNA; note = Gene: BUB1B; note = Location (start to end; relative to TSS): BUB1B_36_66; note = Orientation (relative to transcription): sense; note = sgRNA Position: 40161131; note = Sequence Name: 56322-704_101_SL_seq_2286
tggtcgcttctgtagctccg

SEQ ID NO: 2287 - DNA, 20 bp, Homo sapiens
  source 1..20: mol_type = genomic DNA; note = Gene: BUB1B; note = Location (start to end; relative to TSS): BUB1B_78_108; note = Orientation (relative to transcription): sense; note = sgRNA Position: 40161173; note = Sequence Name: 56322-704_101_SL_seq_2287
ccaggcggtctgtggcccag

SEQ ID NO: 2288 - DNA, 20 bp, Homo sapiens
  source 1..20: mol_type = genomic DNA; note = Gene: BUB1B; note = Location (start to end; relative to TSS): BUB1B_37_67; note = Orientation (relative to transcription): sense; note = sgRNA Position: 40161132; note = Sequence Name: 56322-704_101_SL_seq_2288
ggtcgcttctgtagctccga

SEQ ID NO: 2289 - DNA, 20 bp, Homo sapiens
  source 1..20: mol_type = genomic DNA; note = Gene: BUB1B; note = Location (start to end; relative to TSS): BUB1B_70_100; note = Orientation (relative to transcription): sense; note = sgRNA Position: 40161165; note = Sequence Name: 56322-704_101_SL_seq_2289
aagaaagcccaggcggtctg

SEQ ID NO: 2290 - DNA, 20 bp, Homo sapiens
  source 1..20: mol_type = genomic DNA; note = Gene: CAMK1; note = Location (start to end; relative to TSS): CAMK1_50_80; note = Orientation (relative to transcription): antisense; note = sgRNA Position: 9769893; note = Sequence Name: 56322-704_101_SL_seq_2290
ttggcgccgagctgtggccg

SEQ ID NO: 2291 - DNA, 20 bp, Homo sapiens
  source 1..20: mol_type = genomic DNA; note = Gene: CAMK1; note = Location (start to end; relative to TSS): CAMK1_83_113; note = Orientation (relative to transcription): antisense; note = sgRNA Position: 9769860; note = Sequence Name: 56322-704_101_SL_seq_2291
ccgccgcggggctggctggg

SEQ ID NO: 2292 - DNA, 20 bp, Homo sapiens
  source 1..20: mol_type = genomic DNA; note = Gene: CAMK1; note = Location (start to end; relative to TSS): CAMK1_35_65; note = Orientation (relative to transcription): sense; note = sgRNA Position: 9769888; note = Sequence Name: 56322-704_101_SL_seq_2292
tgaggaccgcggccacagct

SEQ ID NO: 2293 - DNA, 20 bp, Homo sapiens
  source 1..20: mol_type = genomic DNA; note = Gene: CAMK1; note = Location (start to end; relative to TSS): CAMK1_71_101; note = Orientation (relative to transcription): sense; note = sgRNA Position: 9769852; note = Sequence Name: 56322-704_101_SL_seq_2293
gggcctcccagccagccccg

SEQ ID NO: 2294 - DNA, 20 bp, Homo sapiens
  source 1..20: mol_type = genomic DNA; note = Gene: CAMK1; note = Location (start to end; relative to TSS): CAMK1_28_58; note = Orientation (relative to transcription): antisense; note = sgRNA Position: 9769915; note = Sequence Name: 56322-704_101_SL_seq_2294
gtcctcaccgctgcgtgcct

SEQ ID NO: 2295 - DNA, 20 bp, Homo sapiens
  source 1..20: mol_type = genomic DNA; note = Gene: CAMK1; note = Location (start to end; relative to TSS): CAMK1_69_99; note = Orientation (relative to transcription): antisense; note = sgRNA Position: 9769874; note = Sequence Name: 56322-704_101_SL_seq_2295
gctgggaggcccgcggtggt

SEQ ID NO: 2296 - DNA, 20 bp, Homo sapiens
  source 1..20: mol_type = genomic DNA; note = Gene: CAMK1; note = Location (start to end; relative to TSS): CAMK1_24_54; note = Orientation (relative to transcription): sense; note = sgRNA Position: 9769899; note = Sequence Name: 56322-704_101_SL_seq_2296
gcacgcagcggtgaggaccg

SEQ ID NO: 2297 - DNA, 20 bp, Homo sapiens
  source 1..20: mol_type = genomic DNA; note = Gene: CAMK1; note = Location (start to end; relative to TSS): CAMK1_56_86; note = Orientation (relative to transcription): antisense; note = sgRNA Position: 9769887; note = Sequence Name: 56322-704_101_SL_seq_2297
cggtggttggcgccgagctg

SEQ ID NO: 2298 - DNA, 20 bp, Homo sapiens
  source 1..20: mol_type = genomic DNA; note = Gene: CAMK1; note = Location (start to end; relative to TSS): CAMK1_17_47; note = Orientation (relative to transcription): sense; note = sgRNA Position: 9769906; note = Sequence Name: 56322-704_101_SL_seq_2298
ggcccaggcacgcagcggtg

SEQ ID NO: 2299 - DNA, 20 bp, Homo sapiens
  source 1..20: mol_type = genomic DNA; note = Gene: CAMK1; note = Location (start to end; relative to TSS): CAMK1_50_80; note = Orientation (relative to transcription): antisense; note = sgRNA Position: 9769893; note = Sequence Name: 56322-704_101_SL_seq_2299
ttggcgccgagctgtggccg

SEQ ID NO: 2300 - DNA, 20 bp, Homo sapiens
  source 1..20: mol_type = genomic DNA; note = Gene: CAMK1D; note = Location (start to end; relative to TSS): CAMK1D_39_69; note = Orientation (relative to transcription): antisense; note = sgRNA Position: 12349592; note = Sequence Name: 56322-704_101_SL_seq_2300
ttcctgccgccgccgcgcgc

SEQ ID NO: 2301 - DNA, 20 bp, Homo sapiens
  source 1..20: mol_type = genomic DNA; note = Gene: CAMK1D; note = Location (start to end; relative to TSS): CAMK1D_70_100; note = Orientation (relative to transcription): sense; note = sgRNA Position: 12349643; note = Sequence Name: 56322-704_101_SL_seq_2301
gcagaaataagagccaggga

SEQ ID NO: 2302 - DNA, 20 bp, Homo sapiens
  source 1..20: mol_type = genomic DNA; note = Gene: CAMK1D; note = Location (start to end; relative to TSS): CAMK1D_18_48; note = Orientation (relative to transcription): sense; note = sgRNA Position: 12349591; note = Sequence Name: 56322-704_101_SL_seq_2302
gcggcaaaggagccggcgcg

SEQ ID NO: 2303 - DNA, 20 bp, Homo sapiens
  source 1..20: mol_type = genomic DNA; note = Gene: CAMK1D; note = Location (start to end; relative to TSS): CAMK1D_69_99; note = Orientation (relative to transcription): sense; note = sgRNA Position: 12349642; note = Sequence Name: 56322-704_101_SL_seq_2303
agcagaaataagagccaggg

SEQ ID NO: 2304 - DNA, 20 bp, Homo sapiens
  source 1..20: mol_type = genomic DNA; note = Gene: CAMK1D; note = Location (start to end; relative to TSS): CAMK1D_21_51; note = Orientation (relative to transcription): sense; note = sgRNA Position: 12349594; note = Sequence Name: 56322-704_101_SL_seq_2304
gcaaaggagccggcgcgcgg

SEQ ID NO: 2305 - DNA, 20 bp, Homo sapiens
  source 1..20: mol_type = genomic DNA; note = Gene: CAMK1D; note = Location (start to end; relative to TSS): CAMK1D_66_96; note = Orientation (relative to transcription): sense; note = sgRNA Position: 12349639; note = Sequence Name: 56322-704_101_SL_seq_2305
aacagcagaaataagagcca

SEQ ID NO: 2306 - DNA, 20 bp, Homo sapiens
  source 1..20: mol_type = genomic DNA; note = Gene: CAMK1D; note = Location (start to end; relative to TSS): CAMK1D_11_41; note = Orientation (relative to transcription): sense; note = sgRNA Position: 12349584; note = Sequence Name: 56322-704_101_SL_seq_2306
gcaggcggcggcaaaggagc

SEQ ID NO: 2307 - DNA, 20 bp, Homo sapiens
  source 1..20: mol_type = genomic DNA; note = Gene: CAMK1D; note = Location (start to end; relative to TSS): CAMK1D_65_95; note = Orientation (relative to transcription): sense; note = sgRNA Position: 12349638; note = Sequence Name: 56322-704_101_SL_seq_2307
gaacagcagaaataagagcc

SEQ ID NO: 2308 - DNA, 20 bp, Homo sapiens
  source 1..20: mol_type = genomic DNA; note = Gene: CAMK1D; note = Location (start to end; relative to TSS): CAMK1D_5_35; note = Orientation (relative to transcription): sense; note = sgRNA Position: 12349578; note = Sequence Name: 56322-704_101_SL_seq_2308
aggctggcaggcggcggcaa

SEQ ID NO: 2309 - DNA, 20 bp, Homo sapiens
  source 1..20: mol_type = genomic DNA; note = Gene: CAMK1D; note = Location (start to end; relative to TSS): CAMK1D_39_69; note = Orientation (relative to transcription): antisense; note = sgRNA Position: 12349592; note = Sequence Name: 56322-704_101_SL_seq_2309
ttcctgccgccgccgcgcgc

SEQ ID NO: 2310 - DNA, 20 bp, Homo sapiens
  source 1..20: mol_type = genomic DNA; note = Gene: CAMK1G; note = Location (start to end; relative to TSS): CAMK1G_53_83; note = Orientation (relative to transcription): antisense; note = sgRNA Position: 209583773; note = Sequence Name: 56322-704_101_SL_seq_2310
aagcagggttgtcttaccca

SEQ ID NO: 2311 - DNA, 20 bp, Homo sapiens
  source 1..20: mol_type = genomic DNA; note = Gene: CAMK1G; note = Location (start to end; relative to TSS): CAMK1G_105_135; note = Orientation (relative to transcription): sense; note = sgRNA Position: 209583845; note = Sequence Name: 56322-704_101_SL_seq_2311
agcgtgcagcacctagtgag

SEQ ID NO: 2312 - DNA, 20 bp, Homo sapiens
  source 1..20: mol_type = genomic DNA; note = Gene: CAMK1G; note = Location (start to end; relative to TSS): CAMK1G_47_77; note = Orientation (relative to transcription): antisense; note = sgRNA Position: 209583767; note = Sequence Name: 56322-704_101_SL_seq_2312
ggttgtcttacccagggact

SEQ ID NO: 2313 - DNA, 20 bp, Homo sapiens
  source 1..20: mol_type = genomic DNA; note = Gene: CAMK1G; note = Location (start to end; relative to TSS): CAMK1G_99_129; note = Orientation (relative to transcription): antisense; note = sgRNA Position: 209583819; note = Sequence Name: 56322-704_101_SL_seq_2313
tgcacgcttcccattaagca

SEQ ID NO: 2314 - DNA, 20 bp, Homo sapiens
  source 1..20: mol_type = genomic DNA; note = Gene: CAMK1G; note = Location (start to end; relative to TSS): CAMK1G_46_76; note = Orientation (relative to transcription): antisense; note = sgRNA Position: 209583766; note = Sequence Name: 56322-704_101_SL_seq_2314
gttgtcttacccagggactc

SEQ ID NO: 2315 - DNA, 20 bp, Homo sapiens
  source 1..20: mol_type = genomic DNA; note = Gene: CAMK1G; note = Location (start to end; relative to TSS): CAMK1G_80_110; note = Orientation (relative to transcription): sense; note = sgRNA Position: 209583820; note = Sequence Name: 56322-704_101_SL_seq_2315
tagagggtctccttgcttaa

SEQ ID NO: 2316 - DNA, 20 bp, Homo sapiens
  source 1..20: mol_type = genomic DNA; note = Gene: CAMK1G; note = Location (start to end; relative to TSS): CAMK1G_28_58; note = Orientation (relative to transcription): sense; note = sgRNA Position: 209583768; note = Sequence Name: 56322-704_101_SL_seq_2316
aggattcttcccgagtccct

SEQ ID NO: 2317 - DNA, 20 bp, Homo sapiens
  source 1..20: mol_type = genomic DNA; note = Gene: CAMK1G; note = Location (start to end; relative to TSS): CAMK1G_64_94; note = Orientation (relative to transcription): sense; note = sgRNA Position: 209583804; note = Sequence Name: 56322-704_101_SL_seq_2317
cttcttttcttggctttaga

SEQ ID NO: 2318 - DNA, 20 bp, Homo sapiens
  source 1..20: mol_type = genomic DNA; note = Gene: CAMK1G; note = Location (start to end; relative to TSS): CAMK1G_27_57; note = Orientation (relative to transcription): sense; note = sgRNA Position: 209583767; note = Sequence Name: 56322-704_101_SL_seq_2318
caggattcttcccgagtccc

SEQ ID NO: 2319 - DNA, 20 bp, Homo sapiens
  source 1..20: mol_type = genomic DNA; note = Gene: CAMK1G; note = Location (start to end; relative to TSS): CAMK1G_63_93; note = Orientation (relative to transcription): sense; note = sgRNA Position: 209583803; note = Sequence Name: 56322-704_101_SL_seq_2319
gcttcttttcttggctttag

SEQ ID NO: 2320 - DNA, 20 bp, Homo sapiens
  source 1..20: mol_type = genomic DNA; note = Gene: CAMK2A; note = Location (start to end; relative to TSS): CAMK2A_44_74; note = Orientation (relative to transcription): sense; note = sgRNA Position: 150289705; note = Sequence Name: 56322-704_101_SL_seq_2320
cgggcaggcaagtggtccct

SEQ ID NO: 2321 - DNA, 20 bp, Homo sapiens
  source 1..20: mol_type = genomic DNA; note = Gene: CAMK2A; note = Location (start to end; relative to TSS): CAMK2A_104_134; note = Orientation (relative to transcription): antisense; note = sgRNA Position: 150289665; note = Sequence Name: 56322-704_101_SL_seq_2321
aggcttgggactgggggacc

SEQ ID NO: 2322 - DNA, 20 bp, Homo sapiens
  source 1..20: mol_type = genomic DNA; note = Gene: CAMK2A; note = Location (start to end; relative to TSS): CAMK2A_24_54; note = Orientation (relative to transcription): sense; note = sgRNA Position: 150289725; note = Sequence Name: 56322-704_101_SL_seq_2322
tctgtttgcactcggcagca

SEQ ID NO: 2323 - DNA, 20 bp, Homo sapiens
  source 1..20: mol_type = genomic DNA; note = Gene: CAMK2A; note = Location (start to end; relative to TSS): CAMK2A_97_127; note = Orientation (relative to transcription): antisense; note = sgRNA Position: 150289672; note = Sequence Name: 56322-704_101_SL_seq_2323
ggactgggggaccaggactg

SEQ ID NO: 2324 - DNA, 20 bp, Homo sapiens
  source 1..20: mol_type = genomic DNA; note = Gene: CAMK2A; note = Location (start to end; relative to TSS): CAMK2A_29_59; note = Orientation (relative to transcription): sense; note = sgRNA Position: 150289720; note = Sequence Name: 56322-704_101_SL_seq_2324
ttgcactcggcagcacgggc

SEQ ID NO: 2325 - DNA, 20 bp, Homo sapiens
  source 1..20: mol_type = genomic DNA; note = Gene: CAMK2A; note = Location (start to end; relative to TSS): CAMK2A_77_107; note = Orientation (relative to transcription): sense; note = sgRNA Position: 150289672; note = Sequence Name: 56322-704_101_SL_seq_2325
gagcagcagcgcctcagtcc

SEQ ID NO: 2326 - DNA, 20 bp, Homo sapiens
  source 1..20: mol_type = genomic DNA; note = Gene: CAMK2A; note = Location (start to end; relative to TSS): CAMK2A_36_66; note = Orientation (relative to transcription): sense; note = sgRNA Position: 150289713; note = Sequence Name: 56322-704_101_SL_seq_2326
cggcagcacgggcaggcaag

SEQ ID NO: 2327 - DNA, 20 bp, Homo sapiens
  source 1..20: mol_type = genomic DNA; note = Gene: CAMK2A; note = Location (start to end; relative to TSS): CAMK2A_70_100; note = Orientation (relative to transcription): antisense; note = sgRNA Position: 150289699; note = Sequence Name: 56322-704_101_SL_seq_2327
gctgctctgctcccgaacct

SEQ ID NO: 2328 - DNA, 20 bp, Homo sapiens
  source 1..20: mol_type = genomic DNA; note = Gene: CAMK2A; note = Location (start to end; relative to TSS): CAMK2A_25_55; note = Orientation (relative to transcription): sense; note = sgRNA Position: 150289724; note = Sequence Name: 56322-704_101_SL_seq_2328
ctgtttgcactcggcagcac

SEQ ID NO: 2329 - DNA, 20 bp, Homo sapiens
  source 1..20: mol_type = genomic DNA; note = Gene: CAMK2A; note = Location (start to end; relative to TSS): CAMK2A_69_99; note = Orientation (relative to transcription): antisense; note = sgRNA Position: 150289700; note = Sequence Name: 56322-704_101_SL_seq_2329
ctgctctgctcccgaaccta

SEQ ID NO: 2330 - DNA, 20 bp, Homo sapiens
  source 1..20: mol_type = genomic DNA; note = Gene: CAMK2B; note = Location (start to end; relative to TSS): CAMK2B_43_73; note = Orientation (relative to transcription): antisense; note = sgRNA Position: 44325547; note = Sequence Name: 56322-704_101_SL_seq_2330
tcggctcgcggcgccaggcg

SEQ ID NO: 2331 - DNA, 20 bp, Homo sapiens
  source 1..20: mol_type = genomic DNA; note = Gene: CAMK2B; note = Location (start to end; relative to TSS): CAMK2B_82_112; note = Orientation (relative to transcription): sense; note = sgRNA Position: 44325488; note = Sequence Name: 56322-704_101_SL_seq_2331
tcgccgccgtgcccgcgagc

SEQ ID NO: 2332 - DNA, 20 bp, Homo sapiens
  source 1..20: mol_type = genomic DNA; note = Gene: CAMK2B; note = Location (start to end; relative to TSS): CAMK2B_36_66; note = Orientation (relative to transcription): sense; note = sgRNA Position: 44325534; note = Sequence Name: 56322-704_101_SL_seq_2332
ccgcctggcgccgcgagccg

SEQ ID NO: 2333 - DNA, 20 bp, Homo sapiens
  source 1..20: mol_type = genomic DNA; note = Gene: CAMK2B; note = Location (start to end; relative to TSS): CAMK2B_81_111; note = Orientation (relative to transcription): sense; note = sgRNA Position: 44325489; note = Sequence Name: 56322-704_101_SL_seq_2333
gtcgccgccgtgcccgcgag

SEQ ID NO: 2334 - DNA, 20 bp, Homo sapiens
  source 1..20: mol_type = genomic DNA; note = Gene: CAMK2B; note = Location (start to end; relative to TSS): CAMK2B_45_75; note = Orientation (relative to transcription): antisense; note = sgRNA Position: 44325545; note = Sequence Name: 56322-704_101_SL_seq_2334
cctcggctcgcggcgccagg

SEQ ID NO: 2335 - DNA, 20 bp, Homo sapiens
  source 1..20: mol_type = genomic DNA; note = Gene: CAMK2B; note = Location (start to end; relative to TSS): CAMK2B_79_109; note = Orientation (relative to transcription): antisense; note = sgRNA Position: 44325511; note = Sequence Name: 56322-704_101_SL_seq_2335
cacggcggcgacacgggcgc

SEQ ID NO: 2336 - DNA, 20 bp, Homo sapiens
  source 1..20: mol_type = genomic DNA; note = Gene: CAMK2B; note = Location (start to end; relative to TSS): CAMK2B_22_52; note = Orientation (relative to transcription): antisense; note = sgRNA Position: 44325568; note = Sequence Name: 56322-704_101_SL_seq_2336
gggccgggctgggctgcgcc

SEQ ID NO: 2337 - DNA, 20 bp, Homo sapiens
  source 1..20: mol_type = genomic DNA; note = Gene: CAMK2B; note = Location (start to end; relative to TSS): CAMK2B_62_92; note = Orientation (relative to transcription): antisense; note = sgRNA Position: 44325528; note = Sequence Name: 56322-704_101_SL_seq_2337
cgcgggcgcgggagacacct

SEQ ID NO: 2338 - DNA, 20 bp, Homo sapiens
  source 1..20: mol_type = genomic DNA; note = Gene: CAMK2B; note = Location (start to end; relative to TSS): CAMK2B_21_51; note = Orientation (relative to transcription): sense; note = sgRNA Position: 44325549; note = Sequence Name: 56322-704_101_SL_seq_2338
agcccagcccggcccccgcc

SEQ ID NO: 2339 - DNA, 20 bp, Homo sapiens
  source 1..20: mol_type = genomic DNA; note = Gene: CAMK2B; note = Location (start to end; relative to TSS): CAMK2B_55_85; note = Orientation (relative to transcription): antisense; note = sgRNA Position: 44325535; note = Sequence Name: 56322-704_101_SL_seq_2339
gcgggagacacctcggctcg

SEQ ID NO: 2340 - DNA, 20 bp, Homo sapiens
  source 1..20: mol_type = genomic DNA; note = Gene: CAMK2D; note = Location (start to end; relative to TSS): CAMK2D_47_77; note = Orientation (relative to transcription): sense; note = sgRNA Position: 113761667; note = Sequence Name: 56322-704_101_SL_seq_2340
gccaaggtgcctcgcttcgc

SEQ ID NO: 2341 - DNA, 20 bp, Homo sapiens
  source 1..20: mol_type = genomic DNA; note = Gene: CAMK2D; note = Location (start to end; relative to TSS): CAMK2D_81_111; note = Orientation (relative to transcription): antisense; note = sgRNA Position: 113761653; note = Sequence Name: 56322-704_101_SL_seq_2341
ttccctccggcgggcggcag

SEQ ID NO: 2342 - DNA, 20 bp, Homo sapiens
  source 1..20: mol_type = genomic DNA; note = Gene: CAMK2D; note = Location (start to end; relative to TSS): CAMK2D_31_61; note = Orientation (relative to transcription): sense; note = sgRNA Position: 113761683; note = Sequence Name: 56322-704_101_SL_seq_2342
tgagcagcgcgaggccgcca

SEQ ID NO: 2343 - DNA, 20 bp, Homo sapiens
  source 1..20: mol_type = genomic DNA; note = Gene: CAMK2D; note = Location (start to end; relative to TSS): CAMK2D_65_95; note = Orientation (relative to transcription): antisense; note = sgRNA Position: 113761669; note = Sequence Name: 56322-704_101_SL_seq_2343
gcagcggctccggcgaagcg

SEQ ID NO: 2344 - DNA, 20 bp, Homo sapiens
  source 1..20: mol_type = genomic DNA; note = Gene: CAMK2D; note = Location (start to end; relative to TSS): CAMK2D_27_57; note = Orientation (relative to transcription): antisense; note = sgRNA Position: 113761707; note = Sequence Name: 56322-704_101_SL_seq_2344
gcgctgctcacgagcccgcg

SEQ ID NO: 2345 - DNA, 20 bp, Homo sapiens
  source 1..20: mol_type = genomic DNA; note = Gene: CAMK2D; note = Location (start to end; relative to TSS): CAMK2D_57_87; note = Orientation (relative to transcription): antisense; note = sgRNA Position: 113761677; note = Sequence Name: 56322-704_101_SL_seq_2345
tccggcgaagcgaggcacct

SEQ ID NO: 2346 - DNA, 20 bp, Homo sapiens
  source 1..20: mol_type = genomic DNA; note = Gene: CAMK2D; note = Location (start to end; relative to TSS): CAMK2D_22_52; note = Orientation (relative to transcription): sense; note = sgRNA Position: 113761692; note = Sequence Name: 56322-704_101_SL_seq_2346
gcgggctcgtgagcagcgcg

SEQ ID NO: 2347 - DNA, 20 bp, Homo sapiens
  source 1..20: mol_type = genomic DNA; note = Gene: CAMK2D; note = Location (start to end; relative to TSS): CAMK2D_54_84; note = Orientation (relative to transcription): antisense; note = sgRNA Position: 113761680; note = Sequence Name: 56322-704_101_SL_seq_2347
ggcgaagcgaggcaccttgg

SEQ ID NO: 2348 - DNA, 20 bp, Homo sapiens
  source 1..20: mol_type = genomic DNA; note = Gene: CAMK2D; note = Location (start to end; relative to TSS): CAMK2D_16_46; note = Orientation (relative to transcription): antisense; note = sgRNA Position: 113761718; note = Sequence Name: 56322-704_101_SL_seq_2348
gagcccgcgcggcttcaaga

SEQ ID NO: 2349 - DNA, 20 bp, Homo sapiens
  source 1..20: mol_type = genomic DNA; note = Gene: CAMK2D; note = Location (start to end; relative to TSS): CAMK2D_47_77; note = Orientation (relative to transcription): sense; note = sgRNA Position: 113761667; note = Sequence Name: 56322-704_101_SL_seq_2349
gccaaggtgcctcgcttcgc

SEQ ID NO: 2350 - DNA, 20 bp, Homo sapiens
  source 1..20: mol_type = genomic DNA; note = Gene: CAMK2G; note = Location (start to end; relative to TSS): CAMK2G_21_51; note = Orientation (relative to transcription): antisense; note = sgRNA Position: 73874530; note = Sequence Name: 56322-704_101_SL_seq_2350
agtcaccgccgcccggccga

SEQ ID NO: 2351 - DNA, 20 bp, Homo sapiens
  source 1..20: mol_type = genomic DNA; note = Gene: CAMK2G; note = Location (start to end; relative to TSS): CAMK2G_83_113; note = Orientation (relative to transcription): antisense; note = sgRNA Position: 73874468; note = Sequence Name: 56322-704_101_SL_seq_2351
gtggtggccatgctggcggg

SEQ ID NO: 2352 - DNA, 20 bp, Homo sapiens
  source 1..20: mol_type = genomic DNA; note = Gene: CAMK2G; note = Location (start to end; relative to TSS): CAMK2G_22_52; note = Orientation (relative to transcription): antisense; note = sgRNA Position: 73874529; note = Sequence Name: 56322-704_101_SL_seq_2352
cagtcaccgccgcccggccg

SEQ ID NO: 2353 - DNA, 20 bp, Homo sapiens
  source 1..20: mol_type = genomic DNA; note = Gene: CAMK2G; note = Location (start to end; relative to TSS): CAMK2G_82_112; note = Orientation (relative to transcription): antisense; note = sgRNA Position: 73874469; note = Sequence Name: 56322-704_101_SL_seq_2353
tggtggccatgctggcgggc

SEQ ID NO: 2354 - DNA, 20 bp, Homo sapiens
  source 1..20: mol_type = genomic DNA; note = Gene: CAMK2G; note = Location (start to end; relative to TSS): CAMK2G_27_57; note = Orientation (relative to transcription): sense; note = sgRNA Position: 73874504; note = Sequence Name: 56322-704_101_SL_seq_2354
cggtgactgtgcaccgacgt

SEQ ID NO: 2355 - DNA, 20 bp, Homo sapiens
  source 1..20: mol_type = genomic DNA; note = Gene: CAMK2G; note = Location (start to end; relative to TSS): CAMK2G_79_109; note = Orientation (relative to transcription): antisense; note = sgRNA Position: 73874472; note = Sequence Name: 56322-704_101_SL_seq_2355
tggccatgctggcgggcggg

SEQ ID NO: 2356 - DNA, 20 bp, Homo sapiens
  source 1..20: mol_type = genomic DNA; note = Gene: CAMK2G; note = Location (start to end; relative to TSS): CAMK2G_28_58; note = Orientation (relative to transcription): antisense; note = sgRNA Position: 73874523; note = Sequence Name: 56322-704_101_SL_seq_2356
ggtgcacagtcaccgccgcc

SEQ ID NO: 2357 - DNA, 20 bp, Homo sapiens
  source 1..20: mol_type = genomic DNA; note = Gene: CAMK2G; note = Location (start to end; relative to TSS): CAMK2G_70_100; note = Orientation (relative to transcription): antisense; note = sgRNA Position: 73874481; note = Sequence Name: 56322-704_101_SL_seq_2357
tggcgggcgggcggacgcgg

SEQ ID NO: 2358 - DNA, 20 bp, Homo sapiens
  source 1..20: mol_type = genomic DNA; note = Gene: CAMK2G; note = Location (start to end; relative to TSS): CAMK2G_32_62; note = Orientation (relative to transcription): sense; note = sgRNA Position: 73874499; note = Sequence Name: 56322-704_101_SL_seq_2358
actgtgcaccgacgtcggcg

SEQ ID NO: 2359 - DNA, 20 bp, Homo sapiens
  source 1..20: mol_type = genomic DNA; note = Gene: CAMK2G; note = Location (start to end; relative to TSS): CAMK2G_67_97; note = Orientation (relative to transcription): sense; note = sgRNA Position: 73874464; note = Sequence Name: 56322-704_101_SL_seq_2359
cgtccgcccgcccgccagca

SEQ ID NO: 2360 - DNA, 20 bp, Homo sapiens
  source 1..20: mol_type = genomic DNA; note = Gene: CAMK4; note = Location (start to end; relative to TSS): CAMK4_22_52; note = Orientation (relative to transcription): sense; note = sgRNA Position: 111224432; note = Sequence Name: 56322-704_101_SL_seq_2360
tggcggccggcttctcgctc

SEQ ID NO: 2361 - DNA, 20 bp, Homo sapiens
  source 1..20: mol_type = genomic DNA; note = Gene: CAMK4; note = Location (start to end; relative to TSS): CAMK4_117_147; note = Orientation (relative to transcription): sense; note = sgRNA Position: 111224527; note = Sequence Name: 56322-704_101_SL_seq_2361
ctccgcctcgtcctgctctt

SEQ ID NO: 2362 - DNA, 20 bp, Homo sapiens
  source 1..20: mol_type = genomic DNA; note = Gene: CAMK4; note = Location (start to end; relative to TSS): CAMK4_28_58; note = Orientation (relative to transcription): sense; note = sgRNA Position: 111224438; note = Sequence Name: 56322-704_101_SL_seq_2362
ccggcttctcgctcgggcag

SEQ ID NO: 2363 - DNA, 20 bp, Homo sapiens
  source 1..20: mol_type = genomic DNA; note = Gene: CAMK4; note = Location (start to end; relative to TSS): CAMK4_89_119; note = Orientation (relative to transcription): antisense; note = sgRNA Position: 111224479; note = Sequence Name: 56322-704_101_SL_seq_2363
gactttgagcatcttcgcag

SEQ ID NO: 2364 - DNA, 20 bp, Homo sapiens
  source 1..20: mol_type = genomic DNA; note = Gene: CAMK4; note = Location (start to end; relative to TSS): CAMK4_31_61; note = Orientation (relative to transcription): sense; note = sgRNA Position: 111224441; note = Sequence Name: 56322-704_101_SL_seq_2364
gcttctcgctcgggcagcgg

SEQ ID NO: 2365 - DNA, 20 bp, Homo sapiens
  source 1..20: mol_type = genomic DNA; note = Gene: CAMK4; note = Location (start to end; relative to TSS): CAMK4_88_118; note = Orientation (relative to transcription): antisense; note = sgRNA Position: 111224478; note = Sequence Name: 56322-704_101_SL_seq_2365
actttgagcatcttcgcagc

SEQ ID NO: 2366 - DNA, 20 bp, Homo sapiens
  source 1..20: mol_type = genomic DNA; note = Gene: CAMK4; note = Location (start to end; relative to TSS): CAMK4_34_64; note = Orientation (relative to transcription): sense; note = sgRNA Position: 111224444; note = Sequence Name: 56322-704_101_SL_seq_2366
tctcgctcgggcagcggcgg

SEQ ID NO: 2367 - DNA, 20 bp, Homo sapiens
  source 1..20: mol_type = genomic DNA; note = Gene: CAMK4; note = Location (start to end; relative to TSS): CAMK4_84_114; note = Orientation (relative to transcription): sense; note = sgRNA Position: 111224494; note = Sequence Name: 56322-704_101_SL_seq_2367
tgcgaagatgctcaaagtca

SEQ ID NO: 2368 - DNA, 20 bp, Homo sapiens
  source 1..20: mol_type = genomic DNA; note = Gene: CAMK4; note = Location (start to end; relative to TSS): CAMK4_37_67; note = Orientation (relative to transcription): antisense; note = sgRNA Position: 111224427; note = Sequence Name: 56322-704_101_SL_seq_2368
ccgctgcccgagcgagaagc

SEQ ID NO: 2369 - DNA, 20 bp, Homo sapiens
  source 1..20: mol_type = genomic DNA; note = Gene: CAMK4; note = Location (start to end; relative to TSS): CAMK4_81_111; note = Orientation (relative to transcription): antisense; note = sgRNA Position: 111224471; note = Sequence Name: 56322-704_101_SL_seq_2369
gcatcttcgcagcgggactc

SEQ ID NO: 2370 - DNA, 20 bp, Homo sapiens
  source 1..20: mol_type = genomic DNA; note = Gene: CAMKK1; note = Location (start to end; relative to TSS): CAMKK1_57_87; note = Orientation (relative to transcription): sense; note = sgRNA Position: 3892972; note = Sequence Name: 56322-704_101_SL_seq_2370
agcgagtggggccgcccgcc

SEQ ID NO: 2371 - DNA, 20 bp, Homo sapiens
  source 1..20: mol_type = genomic DNA; note = Gene: CAMKK1; note = Location (start to end; relative to TSS): CAMKK1_89_119; note = Orientation (relative to transcription): antisense; note = sgRNA Position: 3892960; note = Sequence Name: 56322-704_101_SL_seq_2371
gcgccgggcgacagtgtccg

SEQ ID NO: 2372 - DNA, 20 bp, Homo sapiens
  source 1..20: mol_type = genomic DNA; note = Gene: CAMKK1; note = Location (start to end; relative to TSS): CAMKK1_43_73; note = Orientation (relative to transcription): sense; note = sgRNA Position: 3892986; note = Sequence Name: 56322-704_101_SL_seq_2372
gggcgcgcagcaggagcgag

SEQ ID NO: 2373 - DNA, 20 bp, Homo sapiens
  source 1..20: mol_type = genomic DNA; note = Gene: CAMKK1; note = Location (start to end; relative to TSS): CAMKK1_81_111; note = Orientation (relative to transcription): antisense; note = sgRNA Position: 3892968; note = Sequence Name: 56322-704_101_SL_seq_2373
cgacagtgtccgcggcccgg

SEQ ID NO: 2374 - DNA, 20 bp, Homo sapiens
  source 1..20: mol_type = genomic DNA; note = Gene: CAMKK1; note = Location (start to end; relative to TSS): CAMKK1_44_74; note = Orientation (relative to transcription): sense; note = sgRNA Position: 3892985; note = Sequence Name: 56322-704_101_SL_seq_2374
ggcgcgcagcaggagcgagt

SEQ ID NO: 2375 - DNA, 20 bp, Homo sapiens
  source 1..20: mol_type = genomic DNA; note = Gene: CAMKK1; note = Location (start to end; relative to TSS): CAMKK1_80_110; note = Orientation (relative to transcription): antisense; note = sgRNA Position: 3892969; note = Sequence Name: 56322-704_101_SL_seq_2375
gacagtgtccgcggcccggc

SEQ ID NO: 2376 - DNA, 20 bp, Homo sapiens
  source 1..20: mol_type = genomic DNA; note = Gene: CAMKK1; note = Location (start to end; relative to TSS): CAMKK1_45_75; note = Orientation (relative to transcription): sense; note = sgRNA Position: 3892984; note = Sequence Name: 56322-704_101_SL_seq_2376
gcgcgcagcaggagcgagtg

SEQ ID NO: 2377 - DNA, 20 bp, Homo sapiens
  source 1..20: mol_type = genomic DNA; note = Gene: CAMKK1; note = Location (start to end; relative to TSS): CAMKK1_77_107; note = Orientation (relative to transcription): antisense; note = sgRNA Position: 3892972; note = Sequence Name: 56322-704_101_SL_seq_2377
agtgtccgcggcccggcggg

SEQ ID NO: 2378 - DNA, 20 bp, Homo sapiens
  source 1..20: mol_type = genomic DNA; note = Gene: CAMKK1; note = Location (start to end; relative to TSS): CAMKK1_16_46; note = Orientation (relative to transcription): antisense; note = sgRNA Position: 3893033; note = Sequence Name: 56322-704_101_SL_seq_2378
cccgccccaccgcctcgctg

SEQ ID NO: 2379 - DNA, 20 bp, Homo sapiens
  source 1..20: mol_type = genomic DNA; note = Gene: CAMKK1; note = Location (start to end; relative to TSS): CAMKK1_57_87; note = Orientation (relative to transcription): sense; note = sgRNA Position: 3892972; note = Sequence Name: 56322-704_101_SL_seq_2379
agcgagtggggccgcccgcc

SEQ ID NO: 2380 - DNA, 20 bp, Homo sapiens
  source 1..20: mol_type = genomic DNA; note = Gene: CAMKK2; note = Location (start to end; relative to TSS): CAMKK2_50_80; note = Orientation (relative to transcription): sense; note = sgRNA Position: 121296635; note = Sequence Name: 56322-704_101_SL_seq_2380
ggcgcggagcccaggtgagc

SEQ ID NO: 2381 - DNA, 20 bp, Homo sapiens
  source 1..20: mol_type = genomic DNA; note = Gene: CAMKK2; note = Location (start to end; relative to TSS): CAMKK2_88_118; note = Orientation (relative to transcription): antisense; note = sgRNA Position: 121296617; note = Sequence Name: 56322-704_101_SL_seq_2381
tgcgtcccttgccccgggcc

SEQ ID NO: 2382 - DNA, 20 bp, Homo sapiens
  source 1..20: mol_type = genomic DNA; note = Gene: CAMKK2; note = Location (start to end; relative to TSS): CAMKK2_34_64; note = Orientation (relative to transcription): sense; note = sgRNA Position: 121296651; note = Sequence Name: 56322-704_101_SL_seq_2382
cgcgggaggcggcggcggcg

SEQ ID NO: 2383 - DNA, 20 bp, Homo sapiens
  source 1..20: mol_type = genomic DNA; note = Gene: CAMKK2; note = Location (start to end; relative to TSS): CAMKK2_66_96; note = Orientation (relative to transcription): sense; note = sgRNA Position: 121296619; note = Sequence Name: 56322-704_101_SL_seq_2383
gagctggcggtagccgggcc

SEQ ID NO: 2384 - DNA, 20 bp, Homo sapiens
  source 1..20: mol_type = genomic DNA; note = Gene: CAMKK2; note = Location (start to end; relative to TSS): CAMKK2_24_54; note = Orientation (relative to transcription): antisense; note = sgRNA Position: 121296681; note = Sequence Name: 56322-704_101_SL_seq_2384
cgcgctctgcgcccccagct

SEQ ID NO: 2385 - DNA, 20 bp, Homo sapiens
  source 1..20: mol_type = genomic DNA; note = Gene: CAMKK2; note = Location (start to end; relative to TSS): CAMKK2_60_90; note = Orientation (relative to transcription): sense; note = sgRNA Position: 121296625; note = Sequence Name: 56322-704_101_SL_seq_2385
ccaggtgagctggcggtagc

SEQ ID NO: 2386 - DNA, 20 bp, Homo sapiens
  source 1..20: mol_type = genomic DNA; note = Gene: CAMKK2; note = Location (start to end; relative to TSS): CAMKK2_19_49; note = Orientation (relative to transcription): antisense; note = sgRNA Position: 121296686; note = Sequence Name: 56322-704_101_SL_seq_2386
tctgcgcccccagctcggct

SEQ ID NO: 2387 - DNA, 20 bp, Homo sapiens
  source 1..20: mol_type = genomic DNA; note = Gene: CAMKK2; note = Location (start to end; relative to TSS): CAMKK2_53_83; note = Orientation (relative to transcription): sense; note = sgRNA Position: 121296632; note = Sequence Name: 56322-704_101_SL_seq_2387
gcggagcccaggtgagctgg

SEQ ID NO: 2388 - DNA, 20 bp, Homo sapiens
  source 1..20: mol_type = genomic DNA; note = Gene: CAMKK2; note = Location (start to end; relative to TSS): CAMKK2_14_44; note = Orientation (relative to transcription): antisense; note = sgRNA Position: 121296691; note = Sequence Name: 56322-704_101_SL_seq_2388
gcccccagctcggctcggct

SEQ ID NO: 2389 - DNA, 20 bp, Homo sapiens
  source 1..20: mol_type = genomic DNA; note = Gene: CAMKK2; note = Location (start to end; relative to TSS): CAMKK2_50_80; note = Orientation (relative to transcription): sense; note = sgRNA Position: 121296635; note = Sequence Name: 56322-704_101_SL_seq_2389
ggcgcggagcccaggtgagc

SEQ ID NO: 2390 - DNA, 20 bp, Homo sapiens
  source 1..20: mol_type = genomic DNA; note = Gene: CAMKV; note = Location (start to end; relative to TSS): CAMKV_50_80; note = Orientation (relative to transcription): antisense; note = sgRNA Position: 49869852; note = Sequence Name: 56322-704_101_SL_seq_2390
gaatccgctccgagcacgcg

SEQ ID NO: 2391 - DNA, 20 bp, Homo sapiens
  source 1..20: mol_type = genomic DNA; note = Gene: CAMKV; note = Location (start to end; relative to TSS): CAMKV_83_113; note = Orientation (relative to transcription): antisense; note = sgRNA Position: 49869819; note = Sequence Name: 56322-704_101_SL_seq_2391
gcggggcgccgagggctccg

SEQ ID NO: 2392 - DNA, 20 bp, Homo sapiens
  source 1..20: mol_type = genomic DNA; note = Gene: CAMKV; note = Location (start to end; relative to TSS): CAMKV_41_71; note = Orientation (relative to transcription): antisense; note = sgRNA Position: 49869861; note = Sequence Name: 56322-704_101_SL_seq_2392
ccgagcacgcggggcagacg

SEQ ID NO: 2393 - DNA, 20 bp, Homo sapiens
  source 1..20: mol_type = genomic DNA; note = Gene: CAMKV; note = Location (start to end; relative to TSS): CAMKV_79_109; note = Orientation (relative to transcription): antisense; note = sgRNA Position: 49869823; note = Sequence Name: 56322-704_101_SL_seq_2393
ggcgccgagggctccgggga

SEQ ID NO: 2394 - DNA, 20 bp, Homo sapiens
  source 1..20: mol_type = genomic DNA; note = Gene: CAMKV; note = Location (start to end; relative to TSS): CAMKV_37_67; note = Orientation (relative to transcription): sense; note = sgRNA Position: 49869845; note = Sequence Name: 56322-704_101_SL_seq_2394
tctgccccgcgtgctcggag

SEQ ID NO: 2395 - DNA, 20 bp, Homo sapiens
  source 1..20: mol_type = genomic DNA; note = Gene: CAMKV; note = Location (start to end; relative to TSS): CAMKV_75_105; note = Orientation (relative to transcription): antisense; note = sgRNA Position: 49869827; note = Sequence Name: 56322-704_101_SL_seq_2395
ccgagggctccggggacggc

SEQ ID NO: 2396 - DNA, 20 bp, Homo sapiens
  source 1..20: mol_type = genomic DNA; note = Gene: CAMKV; note = Location (start to end; relative to TSS): CAMKV_32_62; note = Orientation (relative to transcription): sense; note = sgRNA Position: 49869850; note = Sequence Name: 56322-704_101_SL_seq_2396
ccgcgtctgccccgcgtgct

SEQ ID NO: 2397 - DNA, 20 bp, Homo sapiens
  source 1..20: mol_type = genomic DNA; note = Gene: CAMKV; note = Location (start to end; relative to TSS): CAMKV_66_96; note = Orientation (relative to transcription): sense; note = sgRNA Position: 49869816; note = Sequence Name: 56322-704_101_SL_seq_2397
cccgccgtccccggagccct

SEQ ID NO: 2398 - DNA, 20 bp, Homo sapiens
  source 1..20: mol_type = genomic DNA; note = Gene: CAMKV; note = Location (start to end; relative to TSS): CAMKV_20_50; note = Orientation (relative to transcription): antisense; note = sgRNA Position: 49869882; note = Sequence Name: 56322-704_101_SL_seq_2398
ggcgccagatgcagccgctt

SEQ ID NO: 2399 - DNA, 20 bp, Homo sapiens
  source 1..20: mol_type = genomic DNA; note = Gene: CAMKV; note = Location (start to end; relative to TSS): CAMKV_50_80; note = Orientation (relative to transcription): antisense; note = sgRNA Position: 49869852; note = Sequence Name: 56322-704_101_SL_seq_2399
gaatccgctccgagcacgcg

SEQ ID NO: 2400 - DNA, 20 bp, Homo sapiens
  source 1..20: mol_type = genomic DNA; note = Gene: CASK; note = Location (start to end; relative to TSS): CASK_59_89; note = Orientation (relative to transcription): antisense; note = sgRNA Position: 41923491; note = Sequence Name: 56322-704_101_SL_seq_2400
cgctggggaccaggaggcgg

SEQ ID NO: 2401 - DNA, 20 bp, Homo sapiens
  source 1..20: mol_type = genomic DNA; note = Gene: CASK; note = Location (start to end; relative to TSS): CASK_93_123; note = Orientation (relative to transcription): antisense; note = sgRNA Position: 41923457; note = Sequence Name: 56322-704_101_SL_seq_2401
gccgcggagggaggtggcgg

SEQ ID NO: 2402 - DNA, 20 bp, Homo sapiens
  source 1..20: mol_type = genomic DNA; note = Gene: CASK; note = Location (start to end; relative to TSS): CASK_41_71; note = Orientation (relative to transcription): sense; note = sgRNA Position: 41923489; note = Sequence Name: 56322-704_101_SL_seq_2402
gcgtctctgccgccgcctcc

SEQ ID NO: 2403 - DNA, 20 bp, Homo sapiens
  source 1..20: mol_type = genomic DNA; note = Gene: CASK; note = Location (start to end; relative to TSS): CASK_74_104; note = Orientation (relative to transcription): antisense; note = sgRNA Position: 41923476; note = Sequence Name: 56322-704_101_SL_seq_2403
gcggcggcggatcggcgctg

SEQ ID NO: 2404 - DNA, 20 bp, Homo sapiens
  source 1..20: mol_type = genomic DNA; note = Gene: CASK; note = Location (start to end; relative to TSS): CASK_17_47; note = Orientation (relative to transcription): sense; note = sgRNA Position: 41923513; note = Sequence Name: 56322-704_101_SL_seq_2404
cgggaggaggagaaagagga

SEQ ID NO: 2405 - DNA, 20 bp, Homo sapiens
  source 1..20: mol_type = genomic DNA; note = Gene: CASK; note = Location (start to end; relative to TSS): CASK_65_95; note = Orientation (relative to transcription): antisense; note = sgRNA Position: 41923485; note = Sequence Name: 56322-704_101_SL_seq_2405
gatcggcgctggggaccagg

SEQ ID NO: 2406 - DNA, 20 bp, Homo sapiens
  source 1..20: mol_type = genomic DNA; note = Gene: CASK; note = Location (start to end; relative to TSS): CASK_16_46; note = Orientation (relative to transcription): sense; note = sgRNA Position: 41923514; note = Sequence Name: 56322-704_101_SL_seq_2406
gcgggaggaggagaaagagg

SEQ ID NO: 2407 - DNA, 20 bp, Homo sapiens
  source 1..20: mol_type = genomic DNA; note = Gene: CASK; note = Location (start to end; relative to TSS): CASK_62_92; note = Orientation (relative to transcription): antisense; note = sgRNA Position: 41923488; note = Sequence Name: 56322-704_101_SL_seq_2407
cggcgctggggaccaggagg

SEQ ID NO: 2408 - DNA, 20 bp, Homo sapiens
  source 1..20: mol_type = genomic DNA; note = Gene: CASK; note = Location (start to end; relative to TSS): CASK_13_43; note = Orientation (relative to transcription): sense; note = sgRNA Position: 41923517; note = Sequence Name: 56322-704_101_SL_seq_2408
gctgcgggaggaggagaaag

SEQ ID NO: 2409 - DNA, 20 bp, Homo sapiens
  source 1..20: mol_type = genomic DNA; note = Gene: CASK; note = Location (start to end; relative to TSS): CASK_59_89; note = Orientation (relative to transcription): antisense; note = sgRNA Position: 41923491; note = Sequence Name: 56322-704_101_SL_seq_2409
cgctggggaccaggaggcgg

SEQ ID NO: 2410 - DNA, 20 bp, Homo sapiens
  source 1..20: mol_type = genomic DNA; note = Gene: CDC42BPA; note = Location (start to end; relative to TSS): CDC42BPA_43_73; note = Orientation (relative to transcription): sense; note = sgRNA Position: 227318425; note = Sequence Name: 56322-704_101_SL_seq_2410
gaggagcctcgctgagccca

SEQ ID NO: 2411 - DNA, 20 bp, Homo sapiens
  source 1..20: mol_type = genomic DNA; note = Gene: CDC42BPA; note = Location (start to end; relative to TSS): CDC42BPA_73_103; note = Orientation (relative to transcription): sense; note = sgRNA Position: 227318395; note = Sequence Name: 56322-704_101_SL_seq_2411
gcgagaggagagggaaggcg

SEQ ID NO: 2412 - DNA, 20 bp, Homo sapiens
  source 1..20: mol_type = genomic DNA; note = Gene: CDC42BPA; note = Location (start to end; relative to TSS): CDC42BPA_42_72; note = Orientation (relative to transcription): sense; note = sgRNA Position: 227318426; note = Sequence Name: 56322-704_101_SL_seq_2412
ggaggagcctcgctgagccc

SEQ ID NO: 2413 - DNA, 20 bp, Homo sapiens
  source 1..20: mol_type = genomic DNA; note = Gene: CDC42BPA; note = Location (start to end; relative to TSS): CDC42BPA_72_102; note = Orientation (relative to transcription): sense; note = sgRNA Position: 227318396; note = Sequence Name: 56322-704_101_SL_seq_2413
cgcgagaggagagggaaggc

SEQ ID NO: 2414 - DNA, 20 bp, Homo sapiens
  source 1..20: mol_type = genomic DNA; note = Gene: CDC42BPA; note = Location (start to end; relative to TSS): CDC42BPA_33_63; note = Orientation (relative to transcription): antisense; note = sgRNA Position: 227318455; note = Sequence Name: 56322-704_101_SL_seq_2414
cctccagtcccgccgcacag

SEQ ID NO: 2415 - DNA, 20 bp, Homo sapiens
  source 1..20: mol_type = genomic DNA; note = Gene: CDC42BPA; note = Location (start to end; relative to TSS): CDC42BPA_64_94; note = Orientation (relative to transcription): sense; note = sgRNA Position: 227318404; note = Sequence Name: 56322-704_101_SL_seq_2415
ggcgcgagcgcgagaggaga

SEQ ID NO: 2416 - DNA, 20 bp, Homo sapiens
  source 1..20: mol_type = genomic DNA; note = Gene: CDC42BPA; note = Location (start to end; relative to TSS): CDC42BPA_21_51; note = Orientation (relative to transcription): sense; note = sgRNA Position: 227318447; note = Sequence Name: 56322-704_101_SL_seq_2416
ccgcctctgtgcggcgggac

SEQ ID NO: 2417 - DNA, 20 bp, Homo sapiens
  source 1..20: mol_type = genomic DNA; note = Gene: CDC42BPA; note = Location (start to end; relative to TSS): CDC42BPA_63_93; note = Orientation (relative to transcription): sense; note = sgRNA Position: 227318405; note = Sequence Name: 56322-704_101_SL_seq_2417
gggcgcgagcgcgagaggag

SEQ ID NO: 2418 - DNA, 20 bp, Homo sapiens
  source 1..20: mol_type = genomic DNA; note = Gene: CDC42BPA; note = Location (start to end; relative to TSS): CDC42BPA_24_54; note = Orientation (relative to transcription): sense; note = sgRNA Position: 227318444; note = Sequence Name: 56322-704_101_SL_seq_2418
cctctgtgcggcgggactgg

SEQ ID NO: 2419 - DNA, 20 bp, Homo sapiens
  source 1..20: mol_type = genomic DNA; note = Gene: CDC42BPA; note = Location (start to end; relative to TSS): CDC42BPA_58_88; note = Orientation (relative to transcription): antisense; note = sgRNA Position: 227318430; note = Sequence Name: 56322-704_101_SL_seq_2419
ctcgcgccctgggctcagcg

SEQ ID NO: 2420 - DNA, 20 bp, Homo sapiens
  source 1..20: mol_type = genomic DNA; note = Gene: CDC42BPB; note = Location (start to end; relative to TSS): CDC42BPB_29_59; note = Orientation (relative to transcription): sense; note = sgRNA Position: 103057496; note = Sequence Name: 56322-704_101_SL_seq_2420
tcctcgccgctcctagtctg

SEQ ID NO: 2421 - DNA, 20 bp, Homo sapiens
  source 1..20: mol_type = genomic DNA; note = Gene: CDC42BPB; note = Location (start to end; relative to TSS): CDC42BPB_102_132; note = Orientation (relative to transcription): sense; note = sgRNA Position: 103057423; note = Sequence Name: 56322-704_101_SL_seq_2421
gcgggccgcccgagctggga

SEQ ID NO: 2422 - DNA, 20 bp, Homo sapiens
  source 1..20: mol_type = genomic DNA; note = Gene: CDC42BPB; note = Location (start to end; relative to TSS): CDC42BPB_32_62; note = Orientation (relative to transcription): sense; note = sgRNA Position: 103057493; note = Sequence Name: 56322-704_101_SL_seq_2422
tcgccgctcctagtctgcgg

SEQ ID NO: 2423 - DNA, 20 bp, Homo sapiens
  source 1..20: mol_type = genomic DNA; note = Gene: CDC42BPB; note = Location (start to end; relative to TSS): CDC42BPB_101_131; note = Orientation (relative to transcription): sense; note = sgRNA Position: 103057424; note = Sequence Name: 56322-704_101_SL_seq_2423
ggcgggccgcccgagctggg

SEQ ID NO: 2424 - DNA, 20 bp, Homo sapiens
  source 1..20: mol_type = genomic DNA; note = Gene: CDC42BPB; note = Location (start to end; relative to TSS): CDC42BPB_35_65; note = Orientation (relative to transcription): sense; note = sgRNA Position: 103057490; note = Sequence Name: 56322-704_101_SL_seq_2424
ccgctcctagtctgcggcgg

SEQ ID NO: 2425 - DNA, 20 bp, Homo sapiens
  source 1..20: mol_type = genomic DNA; note = Gene: CDC42BPB; note = Location (start to end; relative to TSS): CDC42BPB_98_128; note = Orientation (relative to transcription): sense; note = sgRNA Position: 103057427; note = Sequence Name: 56322-704_101_SL_seq_2425
gggggcgggccgcccgagct

SEQ ID NO: 2426 - DNA, 20 bp, Homo sapiens
  source 1..20: mol_type = genomic DNA; note = Gene: CDC42BPB; note = Location (start to end; relative to TSS): CDC42BPB_38_68; note = Orientation (relative to transcription): sense; note = sgRNA Position: 103057487; note = Sequence Name: 56322-704_101_SL_seq_2426
ctcctagtctgcggcggcgg

SEQ ID NO: 2427 - DNA, 20 bp, Homo sapiens
  source 1..20: mol_type = genomic DNA; note = Gene: CDC42BPB; note = Location (start to end; relative to TSS): CDC42BPB_84_114; note = Orientation (relative to transcription): antisense; note = sgRNA Position: 103057461; note = Sequence Name: 56322-704_101_SL_seq_2427
gccgccctcagccccgcccg

SEQ ID NO: 2428 - DNA, 20 bp, Homo sapiens
  source 1..20: mol_type = genomic DNA; note = Gene: CDC42BPB; note = Location (start to end; relative to TSS): CDC42BPB_39_69; note = Orientation (relative to transcription): antisense; note = sgRNA Position: 103057506; note = Sequence Name: 56322-704_101_SL_seq_2428
gccgcagactaggagcggcg

SEQ ID NO: 2429 - DNA, 20 bp, Homo sapiens
  source 1..20: mol_type = genomic DNA; note = Gene: CDC42BPB; note = Location (start to end; relative to TSS): CDC42BPB_71_101; note = Orientation (relative to transcription): sense; note = sgRNA Position: 103057454; note = Sequence Name: 56322-704_101_SL_seq_2429
gcggccgcgggcggggctga

SEQ ID NO: 2430 - DNA, 20 bp, Homo sapiens
  source 1..20: mol_type = genomic DNA; note = Gene: CDC42BPG; note = Location (start to end; relative to TSS): CDC42BPG_45_75; note = Orientation (relative to transcription): sense; note = sgRNA Position: 64844584; note = Sequence Name: 56322-704_101_SL_seq_2430
gtagccgagcagcgaggctc

SEQ ID NO: 2431 - DNA, 20 bp, Homo sapiens
  source 1..20: mol_type = genomic DNA; note = Gene: CDC42BPG; note = Location (start to end; relative to TSS): CDC42BPG_83_113; note = Orientation (relative to transcription): antisense; note = sgRNA Position: 64844566; note = Sequence Name: 56322-704_101_SL_seq_2431
cgcgcgcagccgccgctcca

SEQ ID NO: 2432 - DNA, 20 bp, Homo sapiens
  source 1..20: mol_type = genomic DNA; note = Gene: CDC42BPG; note = Location (start to end; relative to TSS): CDC42BPG_47_77; note = Orientation (relative to transcription): antisense; note = sgRNA Position: 64844602; note = Sequence Name: 56322-704_101_SL_seq_2432
ctcgctgctcggctacagtc

SEQ ID NO: 2433 - DNA, 20 bp, Homo sapiens
  source 1..20: mol_type = genomic DNA; note = Gene: CDC42BPG; note = Location (start to end; relative to TSS): CDC42BPG_77_107; note = Orientation (relative to transcription): antisense; note = sgRNA Position: 64844572; note = Sequence Name: 56322-704_101_SL_seq_2433
cagccgccgctccatggctg

SEQ ID NO: 2434 - DNA, 20 bp, Homo sapiens
  source 1..20: mol_type = genomic DNA; note = Gene: CDC42BPG; note = Location (start to end; relative to TSS): CDC42BPG_39_69; note = Orientation (relative to transcription): sense; note = sgRNA Position: 64844590; note = Sequence Name: 56322-704_101_SL_seq_2434
cagactgtagccgagcagcg

SEQ ID NO: 2435 - DNA, 20 bp, Homo sapiens
  source 1..20: mol_type = genomic DNA; note = Gene: CDC42BPG; note = Location (start to end; relative to TSS): CDC42BPG_73_103; note = Orientation (relative to transcription): antisense; note = sgRNA Position: 64844576; note = Sequence Name: 56322-704_101_SL_seq_2435
cgccgctccatggctgcggc

SEQ ID NO: 2436 - DNA, 20 bp, Homo sapiens
  source 1..20: mol_type = genomic DNA; note = Gene: CDC42BPG; note = Location (start to end; relative to TSS): CDC42BPG_24_54; note = Orientation (relative to transcription): antisense; note = sgRNA Position: 64844625; note = Sequence Name: 56322-704_101_SL_seq_2436
ccgcccgcatgcccgcctgt

SEQ ID NO: 2437 - DNA, 20 bp, Homo sapiens
  source 1..20: mol_type = genomic DNA; note = Gene: CDC42BPG; note = Location (start to end; relative to TSS): CDC42BPG_58_88; note = Orientation (relative to transcription): antisense; note = sgRNA Position: 64844591; note = Sequence Name: 56322-704_101_SL_seq_2437
gcggccggagcctcgctgct

SEQ ID NO: 2438 - DNA, 20 bp, Homo sapiens
  source 1..20: mol_type = genomic DNA; note = Gene: CDC42BPG; note = Location (start to end; relative to TSS): CDC42BPG_23_53; note = Orientation (relative to transcription): antisense; note = sgRNA Position: 64844626; note = Sequence Name: 56322-704_101_SL_seq_2438
cgcccgcatgcccgcctgtc

SEQ ID NO: 2439 - DNA, 20 bp, Homo sapiens
  source 1..20: mol_type = genomic DNA; note = Gene: CDC42BPG; note = Location (start to end; relative to TSS): CDC42BPG_57_87; note = Orientation (relative to transcription): sense; note = sgRNA Position: 64844572; note = Sequence Name: 56322-704_101_SL_seq_2439
cgaggctccggccgcagcca

SEQ ID NO: 2440 - DNA, 20 bp, Homo sapiens
  source 1..20: mol_type = genomic DNA; note = Gene: CDC7; note = Location (start to end; relative to TSS): CDC7_38_68; note = Orientation (relative to transcription): sense; note = sgRNA Position: 91500915; note = Sequence Name: 56322-704_101_SL_seq_2440
gacggcgacccaggcatctg

SEQ ID NO: 2441 - DNA, 20 bp, Homo sapiens
  source 1..20: mol_type = genomic DNA; note = Gene: CDC7; note = Location (start to end; relative to TSS): CDC7_88_118; note = Orientation (relative to transcription): antisense; note = sgRNA Position: 91500945; note = Sequence Name: 56322-704_101_SL_seq_2441
gtcggaaactcacggtttaa

SEQ ID NO: 2442 - DNA, 20 bp, Homo sapiens
  source 1..20: mol_type = genomic DNA; note = Gene: CDC7; note = Location (start to end; relative to TSS): CDC7_37_67; note = Orientation (relative to transcription): sense; note = sgRNA Position: 91500914; note = Sequence Name: 56322-704_101_SL_seq_2442
agacggcgacccaggcatct

SEQ ID NO: 2443 - DNA, 20 bp, Homo sapiens
  source 1..20: mol_type = genomic DNA; note = Gene: CDC7; note = Location (start to end; relative to TSS): CDC7_81_111; note = Orientation (relative to transcription): sense; note = sgRNA Position: 91500958; note = Sequence Name: 56322-704_101_SL_seq_2443
cttaaaccgtgagtttccga

SEQ ID NO: 2444 - DNA, 20 bp, Homo sapiens
  source 1..20: mol_type = genomic DNA; note = Gene: CDC7; note = Location (start to end; relative to TSS): CDC7_29_59; note = Orientation (relative to transcription): sense; note = sgRNA Position: 91500906; note = Sequence Name: 56322-704_101_SL_seq_2444
tctcttggagacggcgaccc

SEQ ID NO: 2445 - DNA, 20 bp, Homo sapiens
  source 1..20: mol_type = genomic DNA; note = Gene: CDC7; note = Location (start to end; relative to TSS): CDC7_72_102; note = Orientation (relative to transcription): antisense; note = sgRNA Position: 91500929; note = Sequence Name: 56322-704_101_SL_seq_2445
ttaagggagtacgacttctg

SEQ ID NO: 2446 - DNA, 20 bp, Homo sapiens
  source 1..20: mol_type = genomic DNA; note = Gene: CDC7; note = Location (start to end; relative to TSS): CDC7_20_50; note = Orientation (relative to transcription): sense; note = sgRNA Position: 91500897; note = Sequence Name: 56322-704_101_SL_seq_2446
aggtggggatctcttggaga

SEQ ID NO: 2447 - DNA, 20 bp, Homo sapiens
  source 1..20: mol_type = genomic DNA; note = Gene: CDC7; note = Location (start to end; relative to TSS): CDC7_56_86; note = Orientation (relative to transcription): antisense; note = sgRNA Position: 91500913; note = Sequence Name: 56322-704_101_SL_seq_2447
tctgtggctccccagatgcc

SEQ ID NO: 2448 - DNA, 20 bp, Homo sapiens
  source 1..20: mol_type = genomic DNA; note = Gene: CDC7; note = Location (start to end; relative to TSS): CDC7_15_45; note = Orientation (relative to transcription): antisense; note = sgRNA Position: 91500872; note = Sequence Name: 56322-704_101_SL_seq_2448
tccccacctaccgagtcgat

SEQ ID NO: 2449 - DNA, 20 bp, Homo sapiens
  source 1..20: mol_type = genomic DNA; note = Gene: CDC7; note = Location (start to end; relative to TSS): CDC7_55_85; note = Orientation (relative to transcription): antisense; note = sgRNA Position: 91500912; note = Sequence Name: 56322-704_101_SL_seq_2449
ctgtggctccccagatgcct

SEQ ID NO: 2450 - DNA, 20 bp, Homo sapiens
  source 1..20: mol_type = genomic DNA; note = Gene: CDK1; note = Location (start to end; relative to TSS): CDK1_61_91; note = Orientation (relative to transcription): sense; note = sgRNA Position: 60778565; note = Sequence Name: 56322-704_101_SL_seq_2450
gccgccgcggaataataagc

SEQ ID NO: 2451 - DNA, 20 bp, Homo sapiens
  source 1..20: mol_type = genomic DNA; note = Gene: CDK1; note = Location (start to end; relative to TSS): CDK1_93_123; note = Orientation (relative to transcription): sense; note = sgRNA Position: 60778597; note = Sequence Name: 56322-704_101_SL_seq_2451
ctggggtcagggtcgtgtct

SEQ ID NO: 2452 - DNA, 20 bp, Homo sapiens
  source 1..20: mol_type = genomic DNA; note = Gene: CDK1; note = Location (start to end; relative to TSS): CDK1_48_78; note = Orientation (relative to transcription): sense; note = sgRNA Position: 60778552; note = Sequence Name: 56322-704_101_SL_seq_2452
agctgccgctgcggccgccg

SEQ ID NO: 2453 - DNA, 20 bp, Homo sapiens
  source 1..20: mol_type = genomic DNA; note = Gene: CDK1; note = Location (start to end; relative to TSS): CDK1_81_111; note = Orientation (relative to transcription): sense; note = sgRNA Position: 60778585; note = Sequence Name: 56322-704_101_SL_seq_2453
cgggtacagtggctggggtc

SEQ ID NO: 2454 - DNA, 20 bp, Homo sapiens
  source 1..20: mol_type = genomic DNA; note = Gene: CDK1; note = Location (start to end; relative to TSS): CDK1_39_69; note = Orientation (relative to transcription): sense; note = sgRNA Position: 60778543; note = Sequence Name: 56322-704_101_SL_seq_2454
ggttgttgtagctgccgctg

SEQ ID NO: 2455 - DNA, 20 bp, Homo sapiens
  source 1..20: mol_type = genomic DNA; note = Gene: CDK1; note = Location (start to end; relative to TSS): CDK1_70_100; note = Orientation (relative to transcription): sense; note = sgRNA Position: 60778574; note = Sequence Name: 56322-704_101_SL_seq_2455
gaataataagccgggtacag

SEQ ID NO: 2456 - DNA, 20 bp, Homo sapiens
  source 1..20: mol_type = genomic DNA; note = Gene: CDK1; note = Location (start to end; relative to TSS): CDK1_18_48; note = Orientation (relative to transcription): sense; note = sgRNA Position: 60778522; note = Sequence Name: 56322-704_101_SL_seq_2456
aaattgagcggagagcgacg

SEQ ID NO: 2457 - DNA, 20 bp, Homo sapiens
  source 1..20: mol_type = genomic DNA; note = Gene: CDK1; note = Location (start to end; relative to TSS): CDK1_48_78; note = Orientation (relative to transcription): sense; note = sgRNA Position: 60778552; note = Sequence Name: 56322-704_101_SL_seq_2457
agctgccgctgcggccgccg

SEQ ID NO: 2458 - DNA, 20 bp, Homo sapiens
  source 1..20: mol_type = genomic DNA; note = Gene: CDK1; note = Location (start to end; relative to TSS): CDK1_6_36; note = Orientation (relative to transcription): sense; note = sgRNA Position: 60778510; note = Sequence Name: 56322-704_101_SL_seq_2458
gctggctcttggaaattgag

SEQ ID NO: 2459 - DNA, 20 bp, Homo sapiens
  source 1..20: mol_type = genomic DNA; note = Gene: CDK1; note = Location (start to end; relative to TSS): CDK1_39_69; note = Orientation (relative to transcription): sense; note = sgRNA Position: 60778543; note = Sequence Name: 56322-704_101_SL_seq_2459
ggttgttgtagctgccgctg

SEQ ID NO: 2460 - DNA, 20 bp, Homo sapiens
  source 1..20: mol_type = genomic DNA; note = Gene: CDK10; note = Location (start to end; relative to TSS): CDK10_49_79; note = Orientation (relative to transcription): sense; note = sgRNA Position: 89686764; note = Sequence Name: 56322-704_101_SL_seq_2460
ctgaagtgtattcgtaagga

SEQ ID NO: 2461 - DNA, 20 bp, Homo sapiens
  source 1..20: mol_type = genomic DNA; note = Gene: CDK10; note = Location (start to end; relative to TSS): CDK10_85_115; note = Orientation (relative to transcription): sense; note = sgRNA Position: 89686800; note = Sequence Name: 56322-704_101_SL_seq_2461
cctccggaacacagggtgcg

SEQ ID NO: 2462 - DNA, 20 bp, Homo sapiens
  source 1..20: mol_type = genomic DNA; note = Gene: CDK10; note = Location (start to end; relative to TSS): CDK10_48_78; note = Orientation (relative to transcription): sense; note = sgRNA Position: 89686763; note = Sequence Name: 56322-704_101_SL_seq_2462
tctgaagtgtattcgtaagg

SEQ ID NO: 2463 - DNA, 20 bp, Homo sapiens
  source 1..20: mol_type = genomic DNA; note = Gene: CDK10; note = Location (start to end; relative to TSS): CDK10_78_108; note = Orientation (relative to transcription): sense; note = sgRNA Position: 89686793; note = Sequence Name: 56322-704_101_SL_seq_2463
cacggtgcctccggaacaca

SEQ ID NO: 2464 - DNA, 20 bp, Homo sapiens
  source 1..20: mol_type = genomic DNA; note = Gene: CDK10; note = Location (start to end; relative to TSS): CDK10_45_75; note = Orientation (relative to transcription): sense; note = sgRNA Position: 89686760; note = Sequence Name: 56322-704_101_SL_seq_2464
ccgtctgaagtgtattcgta

SEQ ID NO: 2465 - DNA, 20 bp, Homo sapiens
  source 1..20: mol_type = genomic DNA; note = Gene: CDK10; note = Location (start to end; relative to TSS): CDK10_77_107; note = Orientation (relative to transcription): sense; note = sgRNA Position: 89686792; note = Sequence Name: 56322-704_101_SL_seq_2465
tcacggtgcctccggaacac

SEQ ID NO: 2466 - DNA, 20 bp, Homo sapiens
  source 1..20: mol_type = genomic DNA; note = Gene: CDK10; note = Location (start to end; relative to TSS): CDK10_31_61; note = Orientation (relative to transcription): antisense; note = sgRNA Position: 89686726; note = Sequence Name: 56322-704_101_SL_seq_2466
atctgctcgcactccagatc

SEQ ID NO: 2467 - DNA, 20 bp, Homo sapiens
  source 1..20: mol_type = genomic DNA; note = Gene: CDK10; note = Location (start to end; relative to TSS): CDK10_69_99; note = Orientation (relative to transcription): sense; note = sgRNA Position: 89686784; note = Sequence Name: 56322-704_101_SL_seq_2467
gggcttcttcacggtgcctc

SEQ ID NO: 2468 - DNA, 20 bp, Homo sapiens
  source 1..20: mol_type = genomic DNA; note = Gene: CDK10; note = Location (start to end; relative to TSS): CDK10_10_40; note = Orientation (relative to transcription): antisense; note = sgRNA Position: 89686705; note = Sequence Name: 56322-704_101_SL_seq_2468
ggctccgccatgccgagcgc

SEQ ID NO: 2469 - DNA, 20 bp, Homo sapiens
  source 1..20: mol_type = genomic DNA; note = Gene: CDK10; note = Location (start to end; relative to TSS): CDK10_45_75; note = Orientation (relative to transcription): sense; note = sgRNA Position: 89686760; note = Sequence Name: 56322-704_101_SL_seq_2469
ccgtctgaagtgtattcgta

SEQ ID NO: 2470 - DNA, 20 bp, Homo sapiens
  source 1..20: mol_type = genomic DNA; note = Gene: CDK11A; note = Location (start to end; relative to TSS): CDK11A_41_71; note = Orientation (relative to transcription): sense; note = sgRNA Position: 1724292; note = Sequence Name: 56322-704_101_SL_seq_2470
gccggttgctgtttcttctc

SEQ ID NO: 2471 - DNA, 20 bp, Homo sapiens
  source 1..20: mol_type = genomic DNA; note = Gene: CDK11A; note = Location (start to end; relative to TSS): CDK11A_85_115; note = Orientation (relative to transcription): sense; note = sgRNA Position: 1724248; note = Sequence Name: 56322-704_101_SL_seq_2471
cgtaggggtgagttccgact

SEQ ID NO: 2472 - DNA, 20 bp, Homo sapiens
  source 1..20: mol_type = genomic DNA; note = Gene: CDK11A; note = Location (start to end; relative to TSS): CDK11A_48_78; note = Orientation (relative to transcription): sense; note = sgRNA Position: 1724285; note = Sequence Name: 56322-704_101_SL_seq_2472
gctgtttcttctcaggctca

SEQ ID NO: 2473 - DNA, 20 bp, Homo sapiens
  source 1..20: mol_type = genomic DNA; note = Gene: CDK11A; note = Location (start to end; relative to TSS): CDK11A_84_114; note = Orientation (relative to transcription): sense; note = sgRNA Position: 1724249; note = Sequence Name: 56322-704_101_SL_seq_2473
ccgtaggggtgagttccgac

SEQ ID NO: 2474 - DNA, 20 bp, Homo sapiens
  source 1..20: mol_type = genomic DNA; note = Gene: CDK11A; note = Location (start to end; relative to TSS): CDK11A_51_81; note = Orientation (relative to transcription): antisense; note = sgRNA Position: 1724302; note = Sequence Name: 56322-704_101_SL_seq_2474
gcctgagaagaaacagcaac

SEQ ID NO: 2475 - DNA, 20 bp, Homo sapiens
  source 1..20: mol_type = genomic DNA; note = Gene: CDK11A; note = Location (start to end; relative to TSS): CDK11A_81_111; note = Orientation (relative to transcription): antisense; note = sgRNA Position: 1724272; note = Sequence Name: 56322-704_101_SL_seq_2475
cacccctacggggccgcggc

SEQ ID NO: 2476 - DNA, 20 bp, Homo sapiens
  source 1..20: mol_type = genomic DNA; note = Gene: CDK11A; note = Location (start to end; relative to TSS): CDK11A_23_53; note = Orientation (relative to transcription): sense; note = sgRNA Position: 1724310; note = Sequence Name: 56322-704_101_SL_seq_2476
aggatacttctggcgagcgc

SEQ ID NO: 2477 - DNA, 20 bp, Homo sapiens
  source 1..20: mol_type = genomic DNA; note = Gene: CDK11A; note = Location (start to end; relative to TSS): CDK11A_53_83; note = Orientation (relative to transcription): sense; note = sgRNA Position: 1724280; note = Sequence Name: 56322-704_101_SL_seq_2477
ttcttctcaggctcagggac

SEQ ID NO: 2478 - DNA, 20 bp, Homo sapiens
  source 1..20: mol_type = genomic DNA; note = Gene: CDK11A; note = Location (start to end; relative to TSS): CDK11A_13_43; note = Orientation (relative to transcription): sense; note = sgRNA Position: 1724320; note = Sequence Name: 56322-704_101_SL_seq_2478
acaggaagtgaggatacttc

SEQ ID NO: 2479 - DNA, 20 bp, Homo sapiens
  source 1..20: mol_type = genomic DNA; note = Gene: CDK11A; note = Location (start to end; relative to TSS): CDK11A_48_78; note = Orientation (relative to transcription): sense; note = sgRNA Position: 1724285; note = Sequence Name: 56322-704_101_SL_seq_2479
gctgtttcttctcaggctca

SEQ ID NO: 2480 - DNA, 20 bp, Homo sapiens
  source 1..20: mol_type = genomic DNA; note = Gene: CDK11B; note = Location (start to end; relative to TSS): CDK11B_32_62; note = Orientation (relative to transcription): sense; note = sgRNA Position: 1658948; note = Sequence Name: 56322-704_101_SL_seq_2480
tctggctccgggaccggcgg

SEQ ID NO: 2481 - DNA, 20 bp, Homo sapiens
  source 1..20: mol_type = genomic DNA; note = Gene: CDK11B; note = Location (start to end; relative to TSS): CDK11B_76_106; note = Orientation (relative to transcription): sense; note = sgRNA Position: 1658904; note = Sequence Name: 56322-704_101_SL_seq_2481
cgtaggggtgagttccgact

SEQ ID NO: 2482 - DNA, 20 bp, Homo sapiens
  source 1..20: mol_type = genomic DNA; note = Gene: CDK11B; note = Location (start to end; relative to TSS): CDK11B_26_56; note = Orientation (relative to transcription): sense; note = sgRNA Position: 1658954; note = Sequence Name: 56322-704_101_SL_seq_2482
ttcttctctggctccgggac

SEQ ID NO: 2483 - DNA, 20 bp, Homo sapiens
  source 1..20: mol_type = genomic DNA; note = Gene: CDK11B; note = Location (start to end; relative to TSS): CDK11B_75_105; note = Orientation (relative to transcription): sense; note = sgRNA Position: 1658905; note = Sequence Name: 56322-704_101_SL_seq_2483
gcgtaggggtgagttccgac

SEQ ID NO: 2484 - DNA, 20 bp, Homo sapiens
  source 1..20: mol_type = genomic DNA; note = Gene: CDK11B; note = Location (start to end; relative to TSS): CDK11B_29_59; note = Orientation (relative to transcription): sense; note = sgRNA Position: 1658951; note = Sequence Name: 56322-704_101_SL_seq_2484
ttctctggctccgggaccgg

SEQ ID NO: 2485 - DNA, 20 bp, Homo sapiens
  source 1..20: mol_type = genomic DNA; note = Gene: CDK11B; note = Location (start to end; relative to TSS): CDK11B_61_91; note = Orientation (relative to transcription): sense; note = sgRNA Position: 1658919; note = Sequence Name: 56322-704_101_SL_seq_2485
cggcagcggcggcggcgtag

SEQ ID NO: 2486 - DNA, 20 bp, Homo sapiens
  source 1..20: mol_type = genomic DNA; note = Gene: CDK11B; note = Location (start to end; relative to TSS): CDK11B_21_51; note = Orientation (relative to transcription): sense; note = sgRNA Position: 1658959; note = Sequence Name: 56322-704_101_SL_seq_2486
gctgtttcttctctggctcc

SEQ ID NO: 2487 - DNA, 20 bp, Homo sapiens
  source 1..20: mol_type = genomic DNA; note = Gene: CDK11B; note = Location (start to end; relative to TSS): CDK11B_59_89; note = Orientation (relative to transcription): sense; note = sgRNA Position: 1658921; note = Sequence Name: 56322-704_101_SL_seq_2487
ggcggcagcggcggcggcgt

SEQ ID NO: 2488 - DNA, 20 bp, Homo sapiens
  source 1..20: mol_type = genomic DNA; note = Gene: CDK11B; note = Location (start to end; relative to TSS): CDK11B_20_50; note = Orientation (relative to transcription): sense; note = sgRNA Position: 1658960; note = Sequence Name: 56322-704_101_SL_seq_2488
tgctgtttcttctctggctc

SEQ ID NO: 2489 - DNA, 20 bp, Homo sapiens
  source 1..20: mol_type = genomic DNA; note = Gene: CDK11B; note = Location (start to end; relative to TSS): CDK11B_54_84; note = Orientation (relative to transcription): antisense; note = sgRNA Position: 1658946; note = Sequence Name: 56322-704_101_SL_seq_2489
gctgccgccgccgccgccgc

SEQ ID NO: 2490 - DNA, 20 bp, Homo sapiens
  source 1..20: mol_type = genomic DNA; note = Gene: CDK12; note = Location (start to end; relative to TSS): CDK12_47_77; note = Orientation (relative to transcription): sense; note = sgRNA Position: 39461559; note = Sequence Name: 56322-704_101_SL_seq_2490
tgtgtggtgtggaggtgaaa

SEQ ID NO: 2491 - DNA, 20 bp, Homo sapiens
  source 1..20: mol_type = genomic DNA; note = Gene: CDK12; note = Location (start to end; relative to TSS): CDK12_80_110; note = Orientation (relative to transcription): sense; note = sgRNA Position: 39461592; note = Sequence Name: 56322-704_101_SL_seq_2491
gggggctacctcaggagcga

SEQ ID NO: 2492 - DNA, 20 bp, Homo sapiens
  source 1..20: mol_type = genomic DNA; note = Gene: CDK12; note = Location (start to end; relative to TSS): CDK12_39_69; note = Orientation (relative to transcription): sense; note = sgRNA Position: 39461551; note = Sequence Name: 56322-704_101_SL_seq_2492
agagagtgtgtgtggtgtgg

SEQ ID NO: 2493 - DNA, 20 bp, Homo sapiens
  source 1..20: mol_type = genomic DNA; note = Gene: CDK12; note = Location (start to end; relative to TSS): CDK12_79_109; note = Orientation (relative to transcription): sense; note = sgRNA Position: 39461591; note = Sequence Name: 56322-704_101_SL_seq_2493
agggggctacctcaggagcg

SEQ ID NO: 2494 - DNA, 20 bp, Homo sapiens
  source 1..20: mol_type = genomic DNA; note = Gene: CDK12; note = Location (start to end; relative to TSS): CDK12_36_66; note = Orientation (relative to transcription): sense; note = sgRNA Position: 39461548; note = Sequence Name: 56322-704_101_SL_seq_2494
gggagagagtgtgtgtggtg

SEQ ID NO: 2495 - DNA, 20 bp, Homo sapiens
  source 1..20: mol_type = genomic DNA; note = Gene: CDK12; note = Location (start to end; relative to TSS): CDK12_72_102; note = Orientation (relative to transcription): sense; note = sgRNA Position: 39461584; note = Sequence Name: 56322-704_101_SL_seq_2495
gcaagaaagggggctacctc

SEQ ID NO: 2496 - DNA, 20 bp, Homo sapiens
  source 1..20: mol_type = genomic DNA; note = Gene: CDK12; note = Location (start to end; relative to TSS): CDK12_31_61; note = Orientation (relative to transcription): sense; note = sgRNA Position: 39461543; note = Sequence Name: 56322-704_101_SL_seq_2496
tgtgagggagagagtgtgtg

SEQ ID NO: 2497 - DNA, 20 bp, Homo sapiens
  source 1..20: mol_type = genomic DNA; note = Gene: CDK12; note = Location (start to end; relative to TSS): CDK12_61_91; note = Orientation (relative to transcription): sense; note = sgRNA Position: 39461573; note = Sequence Name: 56322-704_101_SL_seq_2497
gtgaaacggaggcaagaaag

SEQ ID NO: 2498 - DNA, 20 bp, Homo sapiens
  source 1..20: mol_type = genomic DNA; note = Gene: CDK12; note = Location (start to end; relative to TSS): CDK12_16_46; note = Orientation (relative to transcription): sense; note = sgRNA Position: 39461528; note = Sequence Name: 56322-704_101_SL_seq_2498
gtgtgactgggtctgtgtga

SEQ ID NO: 2499 - DNA, 20 bp, Homo sapiens
  source 1..20: mol_type = genomic DNA; note = Gene: CDK12; note = Location (start to end; relative to TSS): CDK12_47_77; note = Orientation (relative to transcription): sense; note = sgRNA Position: 39461559; note = Sequence Name: 56322-704_101_SL_seq_2499
tgtgtggtgtggaggtgaaa

SEQ ID NO: 2500 - DNA, 20 bp, Homo sapiens
  source 1..20: mol_type = genomic DNA; note = Gene: CDK13; note = Location (start to end; relative to TSS): CDK13_27_57; note = Orientation (relative to transcription): sense; note = sgRNA Position: 39950309; note = Sequence Name: 56322-704_101_SL_seq_2500
caaggccgctcccccacccc

SEQ ID NO: 2501 - DNA, 20 bp, Homo sapiens
  source 1..20: mol_type = genomic DNA; note = Gene: CDK13; note = Location (start to end; relative to TSS): CDK13_82_112; note = Orientation (relative to transcription): antisense; note = sgRNA Position: 39950344; note = Sequence Name: 56322-704_101_SL_seq_2501
cgccgggcgctgacctgcgg

SEQ ID NO: 2502 - DNA, 20 bp, Homo sapiens
  source 1..20: mol_type = genomic DNA; note = Gene: CDK13; note = Location (start to end; relative to TSS): CDK13_28_58; note = Orientation (relative to transcription): sense; note = sgRNA Position: 39950310; note = Sequence Name: 56322-704_101_SL_seq_2502
aaggccgctcccccaccccc

SEQ ID NO: 2503 - DNA, 20 bp, Homo sapiens
  source 1..20: mol_type = genomic DNA; note = Gene: CDK13; note = Location (start to end; relative to TSS): CDK13_80_110; note = Orientation (relative to transcription): sense; note = sgRNA Position: 39950362; note = Sequence Name: 56322-704_101_SL_seq_2503
aggtcagcgcccggcgcatc

SEQ ID NO: 2504 - DNA, 20 bp, Homo sapiens
  source 1..20: mol_type = genomic DNA; note = Gene: CDK13; note = Location (start to end; relative to TSS): CDK13_29_59; note = Orientation (relative to transcription): sense; note = sgRNA Position: 39950311; note = Sequence Name: 56322-704_101_SL_seq_2504
aggccgctcccccacccccg

SEQ ID NO: 2505 - DNA, 20 bp, Homo sapiens
  source 1..20: mol_type = genomic DNA; note = Gene: CDK13; note = Location (start to end; relative to TSS): CDK13_71_101; note = Orientation (relative to transcription): sense; note = sgRNA Position: 39950353; note = Sequence Name: 56322-704_101_SL_seq_2505
ctcccccgcaggtcagcgcc

SEQ ID NO: 2506 - DNA, 20 bp, Homo sapiens
  source 1..20: mol_type = genomic DNA; note = Gene: CDK13; note = Location (start to end; relative to TSS): CDK13_30_60; note = Orientation (relative to transcription): sense; note = sgRNA Position: 39950312; note = Sequence Name: 56322-704_101_SL_seq_2506
ggccgctcccccacccccgg

SEQ ID NO: 2507 - DNA, 20 bp, Homo sapiens
  source 1..20: mol_type = genomic DNA; note = Gene: CDK13; note = Location (start to end; relative to TSS): CDK13_60_90; note = Orientation (relative to transcription): sense; note = sgRNA Position: 39950342; note = Sequence Name: 56322-704_101_SL_seq_2507
aggactcgggactcccccgc

SEQ ID NO: 2508 - DNA, 20 bp, Homo sapiens
  source 1..20: mol_type = genomic DNA; note = Gene: CDK13; note = Location (start to end; relative to TSS): CDK13_23_53; note = Orientation (relative to transcription): antisense; note = sgRNA Position: 39950285; note = Sequence Name: 56322-704_101_SL_seq_2508
agcggccttggccgcgctct

SEQ ID NO: 2509 - DNA, 20 bp, Homo sapiens
  source 1..20: mol_type = genomic DNA; note = Gene: CDK13; note = Location (start to end; relative to TSS): CDK13_53_83; note = Orientation (relative to transcription): antisense; note = sgRNA Position: 39950315; note = Sequence Name: 56322-704_101_SL_seq_2509
gagtcctccaagtgcccccg

SEQ ID NO: 2510 - DNA, 20 bp, Homo sapiens
  source 1..20: mol_type = genomic DNA; note = Gene: CDK14; note = Location (start to end; relative to TSS): CDK14_45_75; note = Orientation (relative to transcription): antisense; note = sgRNA Position: 90596372; note = Sequence Name: 56322-704_101_SL_seq_2510
cgcgctcgccgccgccgtgg

SEQ ID NO: 2511 - DNA, 20 bp, Homo sapiens
  source 1..20: mol_type = genomic DNA; note = Gene: CDK14; note = Location (start to end; relative to TSS): CDK14_75_105; note = Orientation (relative to transcription): antisense; note = sgRNA Position: 90596402; note = Sequence Name: 56322-704_101_SL_seq_2511
gggggcggtttacgtggtgc

SEQ ID NO: 2512 - DNA, 20 bp, Homo sapiens
  source 1..20: mol_type = genomic DNA; note = Gene: CDK14; note = Location (start to end; relative to TSS): CDK14_25_55; note = Orientation (relative to transcription): sense; note = sgRNA Position: 90596372; note = Sequence Name: 56322-704_101_SL_seq_2512
gcggcgcggggccaccacgg

SEQ ID NO: 2513 - DNA, 20 bp, Homo sapiens
  source 1..20: mol_type = genomic DNA; note = Gene: CDK14; note = Location (start to end; relative to TSS): CDK14_74_104; note = Orientation (relative to transcription): antisense; note = sgRNA Position: 90596401; note = Sequence Name: 56322-704_101_SL_seq_2513
ggggcggtttacgtggtgcc

SEQ ID NO: 2514 - DNA, 20 bp, Homo sapiens
  source 1..20: mol_type = genomic DNA; note = Gene: CDK14; note = Location (start to end; relative to TSS): CDK14_28_58; note = Orientation (relative to transcription): sense; note = sgRNA Position: 90596375; note = Sequence Name: 56322-704_101_SL_seq_2514
gcgcggggccaccacggcgg

SEQ ID NO: 2515 - DNA, 20 bp, Homo sapiens
  source 1..20: mol_type = genomic DNA; note = Gene: CDK14; note = Location (start to end; relative to TSS): CDK14_73_103; note = Orientation (relative to transcription): antisense; note = sgRNA Position: 90596400; note = Sequence Name: 56322-704_101_SL_seq_2515
gggcggtttacgtggtgccg

SEQ ID NO: 2516 - DNA, 20 bp, Homo sapiens
  source 1..20: mol_type = genomic DNA; note = Gene: CDK14; note = Location (start to end; relative to TSS): CDK14_37_67; note = Orientation (relative to transcription): sense; note = sgRNA Position: 90596384; note = Sequence Name: 56322-704_101_SL_seq_2516
caccacggcggcggcgagcg

SEQ ID NO: 2517 - DNA, 20 bp, Homo sapiens
  source 1..20: mol_type = genomic DNA; note = Gene: CDK14; note = Location (start to end; relative to TSS): CDK14_72_102; note = Orientation (relative to transcription): antisense; note = sgRNA Position: 90596399; note = Sequence Name: 56322-704_101_SL_seq_2517
ggcggtttacgtggtgccgg

SEQ ID NO: 2518 - DNA, 20 bp, Homo sapiens
  source 1..20: mol_type = genomic DNA; note = Gene: CDK14; note = Location (start to end; relative to TSS): CDK14_22_52; note = Orientation (relative to transcription): sense; note = sgRNA Position: 90596369; note = Sequence Name: 56322-704_101_SL_seq_2518
ggcgcggcgcggggccacca

SEQ ID NO: 2519 - DNA, 20 bp, Homo sapiens
  source 1..20: mol_type = genomic DNA; note = Gene: CDK14; note = Location (start to end; relative to TSS): CDK14_69_99; note = Orientation (relative to transcription): antisense; note = sgRNA Position: 90596396; note = Sequence Name: 56322-704_101_SL_seq_2519
ggtttacgtggtgccggggg

SEQ ID NO: 2520 - DNA, 20 bp, Homo sapiens
  source 1..20: mol_type = genomic DNA; note = Gene: CDK15; note = Location (start to end; relative to TSS): CDK15_46_76; note = Orientation (relative to transcription): sense; note = sgRNA Position: 201806609; note = Sequence Name: 56322-704_101_SL_seq_2520
ggagagaacaaggataggag

SEQ ID NO: 2521 - DNA, 20 bp, Homo sapiens
  source 1..20: mol_type = genomic DNA; note = Gene: CDK15; note = Location (start to end; relative to TSS): CDK15_110_140; note = Orientation (relative to transcription): antisense; note = sgRNA Position: 201806653; note = Sequence Name: 56322-704_101_SL_seq_2521
cccataatcttgtaggttca

SEQ ID NO: 2522 - DNA, 20 bp, Homo sapiens
  source 1..20: mol_type = genomic DNA; note = Gene: CDK15; note = Location (start to end; relative to TSS): CDK15_41_71; note = Orientation (relative to transcription): antisense; note = sgRNA Position: 201806584; note = Sequence Name: 56322-704_101_SL_seq_2522
gttctctccctttttgccag

SEQ ID NO: 2523 - DNA, 20 bp, Homo sapiens
  source 1..20: mol_type = genomic DNA; note = Gene: CDK15; note = Location (start to end; relative to TSS): CDK15_72_102; note = Orientation (relative to transcription): sense; note = sgRNA Position: 201806635; note = Sequence Name: 56322-704_101_SL_seq_2523
tgggggaaaggttcaagtgc

SEQ ID NO: 2524 - DNA, 20 bp, Homo sapiens
  source 1..20: mol_type = genomic DNA; note = Gene: CDK15; note = Location (start to end; relative to TSS): CDK15_36_66; note = Orientation (relative to transcription): sense; note = sgRNA Position: 201806599; note = Sequence Name: 56322-704_101_SL_seq_2524
tggcaaaaagggagagaaca

SEQ ID NO: 2525 - DNA, 20 bp, Homo sapiens
  source 1..20: mol_type = genomic DNA; note = Gene: CDK15; note = Location (start to end; relative to TSS): CDK15_71_101; note = Orientation (relative to transcription): sense; note = sgRNA Position: 201806634; note = Sequence Name: 56322-704_101_SL_seq_2525
gtgggggaaaggttcaagtg

SEQ ID NO: 2526 - DNA, 20 bp, Homo sapiens
  source 1..20: mol_type = genomic DNA; note = Gene: CDK15; note = Location (start to end; relative to TSS): CDK15_25_55; note = Orientation (relative to transcription): sense; note = sgRNA Position: 201806588; note = Sequence Name: 56322-704_101_SL_seq_2526
ctgctgacctctggcaaaaa

SEQ ID NO: 2527 - DNA, 20 bp, Homo sapiens
  source 1..20: mol_type = genomic DNA; note = Gene: CDK15; note = Location (start to end; relative to TSS): CDK15_55_85; note = Orientation (relative to transcription): sense; note = sgRNA Position: 201806618; note = Sequence Name: 56322-704_101_SL_seq_2527
aaggataggagaggcagtgg

SEQ ID NO: 2528 - DNA, 20 bp, Homo sapiens
  source 1..20: mol_type = genomic DNA; note = Gene: CDK15; note = Location (start to end; relative to TSS): CDK15_24_54; note = Orientation (relative to transcription): sense; note = sgRNA Position: 201806587; note = Sequence Name: 56322-704_101_SL_seq_2528
gctgctgacctctggcaaaa

SEQ ID NO: 2529 - DNA, 20 bp, Homo sapiens
  source 1..20: mol_type = genomic DNA; note = Gene: CDK15; note = Location (start to end; relative to TSS): CDK15_54_84; note = Orientation (relative to transcription): sense; note = sgRNA Position: 201806617; note = Sequence Name: 56322-704_101_SL_seq_2529
caaggataggagaggcagtg

SEQ ID NO: 2530 - DNA, 20 bp, Homo sapiens
  source 1..20: mol_type = genomic DNA; note = Gene: CDK16; note = Location (start to end; relative to TSS): CDK16_38_68; note = Orientation (relative to transcription): sense; note = sgRNA Position: 47218745; note = Sequence Name: 56322-704_101_SL_seq_2530
gcgcgcggcggttgggccgt

SEQ ID NO: 2531 - DNA, 20 bp, Homo sapiens
  source 1..20: mol_type = genomic DNA; note = Gene: CDK16; note = Location (start to end; relative to TSS): CDK16_87_117; note = Orientation (relative to transcription): antisense; note = sgRNA Position: 47218774; note = Sequence Name: 56322-704_101_SL_seq_2531
gtctgatcgcggagtggcgg

SEQ ID NO: 2532 - DNA, 20 bp, Homo sapiens
  source 1..20: mol_type = genomic DNA; note = Gene: CDK16; note = Location (start to end; relative to TSS): CDK16_26_56; note = Orientation (relative to transcription): sense; note = sgRNA Position: 47218733; note = Sequence Name: 56322-704_101_SL_seq_2532
gcggagcgcggcgcgcgcgg

SEQ ID NO: 2533 - DNA, 20 bp, Homo sapiens
  source 1..20: mol_type = genomic DNA; note = Gene: CDK16; note = Location (start to end; relative to TSS): CDK16_79_109; note = Orientation (relative to transcription): antisense; note = sgRNA Position: 47218766; note = Sequence Name: 56322-704_101_SL_seq_2533
gcggagtggcggcggatccc

SEQ ID NO: 2534 - DNA, 20 bp, Homo sapiens
  source 1..20: mol_type = genomic DNA; note = Gene: CDK16; note = Location (start to end; relative to TSS): CDK16_31_61; note = Orientation (relative to transcription): sense; note = sgRNA Position: 47218738; note = Sequence Name: 56322-704_101_SL_seq_2534
gcgcggcgcgcgcggcggtt

SEQ ID NO: 2535 - DNA, 20 bp, Homo sapiens
  source 1..20: mol_type = genomic DNA; note = Gene: CDK16; note = Location (start to end; relative to TSS): CDK16_78_108; note = Orientation (relative to transcription): antisense; note = sgRNA Position: 47218765; note = Sequence Name: 56322-704_101_SL_seq_2535
cggagtggcggcggatccca

SEQ ID NO: 2536 - DNA, 20 bp, Homo sapiens
  source 1..20: mol_type = genomic DNA; note = Gene: CDK16; note = Location (start to end; relative to TSS): CDK16_20_50; note = Orientation (relative to transcription): antisense; note = sgRNA Position: 47218707; note = Sequence Name: 56322-704_101_SL_seq_2536
cgctccgcgcatgcgcacgc

SEQ ID NO: 2537 - DNA, 20 bp, Homo sapiens
  source 1..20: mol_type = genomic DNA; note = Gene: CDK16; note = Location (start to end; relative to TSS): CDK16_63_93; note = Orientation (relative to transcription): antisense; note = sgRNA Position: 47218750; note = Sequence Name: 56322-704_101_SL_seq_2537
tcccagggccgaacagccaa

SEQ ID NO: 2538 - DNA, 20 bp, Homo sapiens
  source 1..20: mol_type = genomic DNA; note = Gene: CDK16; note = Location (start to end; relative to TSS): CDK16_23_53; note = Orientation (relative to transcription): sense; note = sgRNA Position: 47218730; note = Sequence Name: 56322-704_101_SL_seq_2538
tgcgcggagcgcggcgcgcg

SEQ ID NO: 2539 - DNA, 20 bp, Homo sapiens
  source 1..20: mol_type = genomic DNA; note = Gene: CDK16; note = Location (start to end; relative to TSS): CDK16_53_83; note = Orientation (relative to transcription): sense; note = sgRNA Position: 47218760; note = Sequence Name: 56322-704_101_SL_seq_2539
gccgttggctgttcggccct

SEQ ID NO: 2540 - DNA, 20 bp, Homo sapiens
  source 1..20: mol_type = genomic DNA; note = Gene: CDK17; note = Location (start to end; relative to TSS): CDK17_50_80; note = Orientation (relative to transcription): sense; note = sgRNA Position: 96400365; note = Sequence Name: 56322-704_101_SL_seq_2540
gcagtctcctgagctccccg

SEQ ID NO: 2541 - DNA, 20 bp, Homo sapiens
  source 1..20: mol_type = genomic DNA; note = Gene: CDK17; note = Location (start to end; relative to TSS): CDK17_87_117; note = Orientation (relative to transcription): sense; note = sgRNA Position: 96400328; note = Sequence Name: 56322-704_101_SL_seq_2541
gcggagaaggagccagcgcc

SEQ ID NO: 2542 - DNA, 20 bp, Homo sapiens
  source 1..20: mol_type = genomic DNA; note = Gene: CDK17; note = Location (start to end; relative to TSS): CDK17_51_81; note = Orientation (relative to transcription): sense; note = sgRNA Position: 96400364; note = Sequence Name: 56322-704_101_SL_seq_2542
cagtctcctgagctccccgc

SEQ ID NO: 2543 - DNA, 20 bp, Homo sapiens
  source 1..20: mol_type = genomic DNA; note = Gene: CDK17; note = Location (start to end; relative to TSS): CDK17_86_116; note = Orientation (relative to transcription): antisense; note = sgRNA Position: 96400349; note = Sequence Name: 56322-704_101_SL_seq_2543
gctccttctccgcggctctg

SEQ ID NO: 2544 - DNA, 20 bp, Homo sapiens
  source 1..20: mol_type = genomic DNA; note = Gene: CDK17; note = Location (start to end; relative to TSS): CDK17_53_83; note = Orientation (relative to transcription): antisense; note = sgRNA Position: 96400382; note = Sequence Name: 56322-704_101_SL_seq_2544
ggagctcaggagactgcggg

SEQ ID NO: 2545 - DNA, 20 bp, Homo sapiens
  source 1..20: mol_type = genomic DNA; note = Gene: CDK17; note = Location (start to end; relative to TSS): CDK17_83_113; note = Orientation (relative to transcription): antisense; note = sgRNA Position: 96400352; note = Sequence Name: 56322-704_101_SL_seq_2545
ccttctccgcggctctgcgg

SEQ ID NO: 2546 - DNA, 20 bp, Homo sapiens
  source 1..20: mol_type = genomic DNA; note = Gene: CDK17; note = Location (start to end; relative to TSS): CDK17_21_51; note = Orientation (relative to transcription): sense; note = sgRNA Position: 96400394; note = Sequence Name: 56322-704_101_SL_seq_2546
gcacacgcaaggagcgaacg

SEQ ID NO: 2547 - DNA, 20 bp, Homo sapiens
  source 1..20: mol_type = genomic DNA; note = Gene: CDK17; note = Location (start to end; relative to TSS): CDK17_51_81; note = Orientation (relative to transcription): sense; note = sgRNA Position: 96400364; note = Sequence Name: 56322-704_101_SL_seq_2547
cagtctcctgagctccccgc

SEQ ID NO: 2548 - DNA, 20 bp, Homo sapiens
  source 1..20: mol_type = genomic DNA; note = Gene: CDK17; note = Location (start to end; relative to TSS): CDK17_13_43; note = Orientation (relative to transcription): antisense; note = sgRNA Position: 96400422; note = Sequence Name: 56322-704_101_SL_seq_2548
gtgtgcgtcgctttcacact

SEQ ID NO: 2549 - DNA, 20 bp, Homo sapiens
  source 1..20: mol_type = genomic DNA; note = Gene: CDK17; note = Location (start to end; relative to TSS): CDK17_50_80; note = Orientation (relative to transcription): sense; note = sgRNA Position: 96400365; note = Sequence Name: 56322-704_101_SL_seq_2549
gcagtctcctgagctccccg

SEQ ID NO: 2550 - DNA, 20 bp, Homo sapiens
  source 1..20: mol_type = genomic DNA; note = Gene: CDK18; note = Location (start to end; relative to TSS): CDK18_40_70; note = Orientation (relative to transcription): sense; note = sgRNA Position: 205504735; note = Sequence Name: 56322-704_101_SL_seq_2550
tgctcacctttccggagcag

SEQ ID NO: 2551 - DNA, 20 bp, Homo sapiens
  source 1..20: mol_type = genomic DNA; note = Gene: CDK18; note = Location (start to end; relative to TSS): CDK18_78_108; note = Orientation (relative to transcription): antisense; note = sgRNA Position: 205504753; note = Sequence Name: 56322-704_101_SL_seq_2551
cccgctccctcccgggcacg

SEQ ID NO: 2552 - DNA, 20 bp, Homo sapiens
  source 1..20: mol_type = genomic DNA; note = Gene: CDK18; note = Location (start to end; relative to TSS): CDK18_39_69; note = Orientation (relative to transcription): sense; note = sgRNA Position: 205504734; note = Sequence Name: 56322-704_101_SL_seq_2552
ctgctcacctttccggagca

SEQ ID NO: 2553 - DNA, 20 bp, Homo sapiens
  source 1..20: mol_type = genomic DNA; note = Gene: CDK18; note = Location (start to end; relative to TSS): CDK18_69_99; note = Orientation (relative to transcription): sense; note = sgRNA Position: 205504764; note = Sequence Name: 56322-704_101_SL_seq_2553
ccccgtgcccgggagggagc

SEQ ID NO: 2554 - DNA, 20 bp, Homo sapiens
  source 1..20: mol_type = genomic DNA; note = Gene: CDK18; note = Location (start to end; relative to TSS): CDK18_38_68; note = Orientation (relative to transcription): sense; note = sgRNA Position: 205504733; note = Sequence Name: 56322-704_101_SL_seq_2554
actgctcacctttccggagc

SEQ ID NO: 2555 - DNA, 20 bp, Homo sapiens
  source 1..20: mol_type = genomic DNA; note = Gene: CDK18; note = Location (start to end; relative to TSS): CDK18_68_98; note = Orientation (relative to transcription): sense; note = sgRNA Position: 205504763; note = Sequence Name: 56322-704_101_SL_seq_2555
gccccgtgcccgggagggag

SEQ ID NO: 2556 - DNA, 20 bp, Homo sapiens
  source 1..20: mol_type = genomic DNA; note = Gene: CDK18; note = Location (start to end; relative to TSS): CDK18_19_49; note = Orientation (relative to transcription): antisense; note = sgRNA Position: 205504694; note = Sequence Name: 56322-704_101_SL_seq_2556
agagaagctgcaacctgagc

SEQ ID NO: 2557 - DNA, 20 bp, Homo sapiens
  source 1..20: mol_type = genomic DNA; note = Gene: CDK18; note = Location (start to end; relative to TSS): CDK18_58_88; note = Orientation (relative to transcription): sense; note = sgRNA Position: 205504753; note = Sequence Name: 56322-704_101_SL_seq_2557
aggggaagctgccccgtgcc

SEQ ID NO: 2558 - DNA, 20 bp, Homo sapiens
  source 1..20: mol_type = genomic DNA; note = Gene: CDK18; note = Location (start to end; relative to TSS): CDK18_14_44; note = Orientation (relative to transcription): sense; note = sgRNA Position: 205504709; note = Sequence Name: 56322-704_101_SL_seq_2558
ctcaggttgcagcttctctg

SEQ ID NO: 2559 - DNA, 20 bp, Homo sapiens
  source 1..20: mol_type = genomic DNA; note = Gene: CDK18; note = Location (start to end; relative to TSS): CDK18_55_85; note = Orientation (relative to transcription): antisense; note = sgRNA Position: 205504730; note = Sequence Name: 56322-704_101_SL_seq_2559
cagcttcccctgctccggaa

SEQ ID NO: 2560 - DNA, 20 bp, Homo sapiens
  source 1..20: mol_type = genomic DNA; note = Gene: CDK19; note = Location (start to end; relative to TSS): CDK19_39_69; note = Orientation (relative to transcription): sense; note = sgRNA Position: 110815406; note = Sequence Name: 56322-704_101_SL_seq_2560
gttccaaaacaaggaaatga

SEQ ID NO: 2561 - DNA, 20 bp, Homo sapiens
  source 1..20: mol_type = genomic DNA; note = Gene: CDK19; note = Location (start to end; relative to TSS): CDK19_94_124; note = Orientation (relative to transcription): sense; note = sgRNA Position: 110815351; note = Sequence Name: 56322-704_101_SL_seq_2561
cgccgccgccgtcgcggagg

SEQ ID NO: 2562 - DNA, 20 bp, Homo sapiens
  source 1..20: mol_type = genomic DNA; note = Gene: CDK19; note = Location (start to end; relative to TSS): CDK19_40_70; note = Orientation (relative to transcription): antisense; note = sgRNA Position: 110815425; note = Sequence Name: 56322-704_101_SL_seq_2562
tccttgttttggaacctggt

SEQ ID NO: 2563 - DNA, 20 bp, Homo sapiens
  source 1..20: mol_type = genomic DNA; note = Gene: CDK19; note = Location (start to end; relative to TSS): CDK19_91_121; note = Orientation (relative to transcription): sense; note = sgRNA Position: 110815354; note = Sequence Name: 56322-704_101_SL_seq_2563
agccgccgccgccgtcgcgg

SEQ ID NO: 2564 - DNA, 20 bp, Homo sapiens
  source 1..20: mol_type = genomic DNA; note = Gene: CDK19; note = Location (start to end; relative to TSS): CDK19_41_71; note = Orientation (relative to transcription): antisense; note = sgRNA Position: 110815424; note = Sequence Name: 56322-704_101_SL_seq_2564
ttccttgttttggaacctgg

SEQ ID NO: 2565 - DNA, 20 bp, Homo sapiens
  source 1..20: mol_type = genomic DNA; note = Gene: CDK19; note = Location (start to end; relative to TSS): CDK19_88_118; note = Orientation (relative to transcription): sense; note = sgRNA Position: 110815357; note = Sequence Name: 56322-704_101_SL_seq_2565
gggagccgccgccgccgtcg

SEQ ID NO: 2566 - DNA, 20 bp, Homo sapiens
  source 1..20: mol_type = genomic DNA; note = Gene: CDK19; note = Location (start to end; relative to TSS): CDK19_30_60; note = Orientation (relative to transcription): sense; note = sgRNA Position: 110815415; note = Sequence Name: 56322-704_101_SL_seq_2566
gcccaccaggttccaaaaca

SEQ ID NO: 2567 - DNA, 20 bp, Homo sapiens
  source 1..20: mol_type = genomic DNA; note = Gene: CDK19; note = Location (start to end; relative to TSS): CDK19_68_98; note = Orientation (relative to transcription): sense; note = sgRNA Position: 110815377; note = Sequence Name: 56322-704_101_SL_seq_2567
gcgggactgggggtgcctgc

SEQ ID NO: 2568 - DNA, 20 bp, Homo sapiens
  source 1..20: mol_type = genomic DNA; note = Gene: CDK19; note = Location (start to end; relative to TSS): CDK19_29_59; note = Orientation (relative to transcription): antisense; note = sgRNA Position: 110815436; note = Sequence Name: 56322-704_101_SL_seq_2568
gaacctggtgggccgcgccg

SEQ ID NO: 2569 - DNA, 20 bp, Homo sapiens
  source 1..20: mol_type = genomic DNA; note = Gene: CDK19; note = Location (start to end; relative to TSS): CDK19_67_97; note = Orientation (relative to transcription): sense; note = sgRNA Position: 110815378; note = Sequence Name: 56322-704_101_SL_seq_2569
ggcgggactgggggtgcctg

SEQ ID NO: 2570 - DNA, 20 bp, Homo sapiens
  source 1..20: mol_type = genomic DNA; note = Gene: CDK2; note = Location (start to end; relative to TSS): CDK2_38_68; note = Orientation (relative to transcription): sense; note = sgRNA Position: 55966894; note = Sequence Name: 56322-704_101_SL_seq_2570
tccatcccgacccggggcca

SEQ ID NO: 2571 - DNA, 20 bp, Homo sapiens
  source 1..20: mol_type = genomic DNA; note = Gene: CDK2; note = Location (start to end; relative to TSS): CDK2_81_111; note = Orientation (relative to transcription): sense; note = sgRNA Position: 55966937; note = Sequence Name: 56322-704_101_SL_seq_2571
tcctcggcccccgagagcca

SEQ ID NO: 2572 - DNA, 20 bp, Homo sapiens
  source 1..20: mol_type = genomic DNA; note = Gene: CDK2; note = Location (start to end; relative to TSS): CDK2_44_74; note = Orientation (relative to transcription): sense; note = sgRNA Position: 55966900; note = Sequence Name: 56322-704_101_SL_seq_2572
ccgacccggggccacggtac

SEQ ID NO: 2573 - DNA, 20 bp, Homo sapiens
  source 1..20: mol_type = genomic DNA; note = Gene: CDK2; note = Location (start to end; relative to TSS): CDK2_80_110; note = Orientation (relative to transcription): sense; note = sgRNA Position: 55966936; note = Sequence Name: 56322-704_101_SL_seq_2573
ctcctcggcccccgagagcc

SEQ ID NO: 2574 - DNA, 20 bp, Homo sapiens
  source 1..20: mol_type = genomic DNA; note = Gene: CDK2; note = Location (start to end; relative to TSS): CDK2_30_60; note = Orientation (relative to transcription): sense; note = sgRNA Position: 55966886; note = Sequence Name: 56322-704_101_SL_seq_2574
tactgcgttccatcccgacc

SEQ ID NO: 2575 - DNA, 20 bp, Homo sapiens
  source 1..20: mol_type = genomic DNA; note = Gene: CDK2; note = Location (start to end; relative to TSS): CDK2_77_107; note = Orientation (relative to transcription): antisense; note = sgRNA Position: 55966913; note = Sequence Name: 56322-704_101_SL_seq_2575
gggccgaggagggggaaaca

SEQ ID NO: 2576 - DNA, 20 bp, Homo sapiens
  source 1..20: mol_type = genomic DNA; note = Gene: CDK2; note = Location (start to end; relative to TSS): CDK2_31_61; note = Orientation (relative to transcription): sense; note = sgRNA Position: 55966887; note = Sequence Name: 56322-704_101_SL_seq_2576
actgcgttccatcccgaccc

SEQ ID NO: 2577 - DNA, 20 bp, Homo sapiens
  source 1..20: mol_type = genomic DNA; note = Gene: CDK2; note = Location (start to end; relative to TSS): CDK2_65_95; note = Orientation (relative to transcription): sense; note = sgRNA Position: 55966921; note = Sequence Name: 56322-704_101_SL_seq_2577
gggccctgtttccccctcct

SEQ ID NO: 2578 - DNA, 20 bp, Homo sapiens
  source 1..20: mol_type = genomic DNA; note = Gene: CDK2; note = Location (start to end; relative to TSS): CDK2_32_62; note = Orientation (relative to transcription): sense; note = sgRNA Position: 55966888; note = Sequence Name: 56322-704_101_SL_seq_2578
ctgcgttccatcccgacccg

SEQ ID NO: 2579 - DNA, 20 bp, Homo sapiens
  source 1..20: mol_type = genomic DNA; note = Gene: CDK2; note = Location (start to end; relative to TSS): CDK2_64_94; note = Orientation (relative to transcription): antisense; note = sgRNA Position: 55966900; note = Sequence Name: 56322-704_101_SL_seq_2579
ggaaacagggcccagtaccg

SEQ ID NO: 2580 - DNA, 20 bp, Homo sapiens
  source 1..20: mol_type = genomic DNA; note = Gene: CDK20; note = Location (start to end; relative to TSS): CDK20_33_63; note = Orientation (relative to transcription): sense; note = sgRNA Position: 87974476; note = Sequence Name: 56322-704_101_SL_seq_2580
ttggaagttcaggggcacag

SEQ ID NO: 2581 - DNA, 20 bp, Homo sapiens
  source 1..20: mol_type = genomic DNA; note = Gene: CDK20; note = Location (start to end; relative to TSS): CDK20_78_108; note = Orientation (relative to transcription): sense; note = sgRNA Position: 87974431; note = Sequence Name: 56322-704_101_SL_seq_2581
gatggaccagtactgcatcc

SEQ ID NO: 2582 - DNA, 20 bp, Homo sapiens
  source 1..20: mol_type = genomic DNA; note = Gene: CDK20; note = Location (start to end; relative to TSS): CDK20_32_62; note = Orientation (relative to transcription): sense; note = sgRNA Position: 87974477; note = Sequence Name: 56322-704_101_SL_seq_2582
tttggaagttcaggggcaca

SEQ ID NO: 2583 - DNA, 20 bp, Homo sapiens
  source 1..20: mol_type = genomic DNA; note = Gene: CDK20; note = Location (start to end; relative to TSS): CDK20_72_102; note = Orientation (relative to transcription): antisense; note = sgRNA Position: 87974457; note = Sequence Name: 56322-704_101_SL_seq_2583
ggtccatcccgctgcagtcg

SEQ ID NO: 2584 - DNA, 20 bp, Homo sapiens
  source 1..20: mol_type = genomic DNA; note = Gene: CDK20; note = Location (start to end; relative to TSS): CDK20_31_61; note = Orientation (relative to transcription): sense; note = sgRNA Position: 87974478; note = Sequence Name: 56322-704_101_SL_seq_2584
gtttggaagttcaggggcac

SEQ ID NO: 2585 - DNA, 20 bp, Homo sapiens
  source 1..20: mol_type = genomic DNA; note = Gene: CDK20; note = Location (start to end; relative to TSS): CDK20_71_101; note = Orientation (relative to transcription): antisense; note = sgRNA Position: 87974458; note = Sequence Name: 56322-704_101_SL_seq_2585
gtccatcccgctgcagtcgt

SEQ ID NO: 2586 - DNA, 20 bp, Homo sapiens
  source 1..20: mol_type = genomic DNA; note = Gene: CDK20; note = Location (start to end; relative to TSS): CDK20_25_55; note = Orientation (relative to transcription): sense; note = sgRNA Position: 87974484; note = Sequence Name: 56322-704_101_SL_seq_2586
agtggagtttggaagttcag

SEQ ID NO: 2587 - DNA, 20 bp, Homo sapiens
  source 1..20: mol_type = genomic DNA; note = Gene: CDK20; note = Location (start to end; relative to TSS): CDK20_56_86; note = Orientation (relative to transcription): sense; note = sgRNA Position: 87974453; note = Sequence Name: 56322-704_101_SL_seq_2587
cacaggcccacgactgcagc

SEQ ID NO: 2588 - DNA, 20 bp, Homo sapiens
  source 1..20: mol_type = genomic DNA; note = Gene: CDK20; note = Location (start to end; relative to TSS): CDK20_24_54; note = Orientation (relative to transcription): sense; note = sgRNA Position: 87974485; note = Sequence Name: 56322-704_101_SL_seq_2588
aagtggagtttggaagttca

SEQ ID NO: 2589 - DNA, 20 bp, Homo sapiens
  source 1..20: mol_type = genomic DNA; note = Gene: CDK20; note = Location (start to end; relative to TSS): CDK20_55_85; note = Orientation (relative to transcription): sense; note = sgRNA Position: 87974454; note = Sequence Name: 56322-704_101_SL_seq_2589
gcacaggcccacgactgcag

SEQ ID NO: 2590 - DNA, 20 bp, Homo sapiens
  source 1..20: mol_type = genomic DNA; note = Gene: CDK3; note = Location (start to end; relative to TSS): CDK3_41_71; note = Orientation (relative to transcription): antisense; note = sgRNA Position: 76000902; note = Sequence Name: 56322-704_101_SL_seq_2590
ggccaggaagggctgcccag

SEQ ID NO: 2591 - DNA, 20 bp, Homo sapiens
  source 1..20: mol_type = genomic DNA; note = Gene: CDK3; note = Location (start to end; relative to TSS): CDK3_74_104; note = Orientation (relative to transcription): antisense; note = sgRNA Position: 76000935; note = Sequence Name: 56322-704_101_SL_seq_2591
cccagccagtcccaggctct

SEQ ID NO: 2592 - DNA, 20 bp, Homo sapiens
  source 1..20: mol_type = genomic DNA; note = Gene: CDK3; note = Location (start to end; relative to TSS): CDK3_35_65; note = Orientation (relative to transcription): antisense; note = sgRNA Position: 76000896; note = Sequence Name: 56322-704_101_SL_seq_2592
gaagggctgcccaggggcca

SEQ ID NO: 2593 - DNA, 20 bp, Homo sapiens
  source 1..20: mol_type = genomic DNA; note = Gene: CDK3; note = Location (start to end; relative to TSS): CDK3_65_95; note = Orientation (relative to transcription): antisense; note = sgRNA Position: 76000926; note = Sequence Name: 56322-704_101_SL_seq_2593
tcccaggctctgggtacaca

SEQ ID NO: 2594 - DNA, 20 bp, Homo sapiens
  source 1..20: mol_type = genomic DNA; note = Gene: CDK3; note = Location (start to end; relative to TSS): CDK3_25_55; note = Orientation (relative to transcription): antisense; note = sgRNA Position: 76000886; note = Sequence Name: 56322-704_101_SL_seq_2594
ccaggggccagggccactgg

SEQ ID NO: 2595 - DNA, 20 bp, Homo sapiens
  source 1..20: mol_type = genomic DNA; note = Gene: CDK3; note = Location (start to end; relative to TSS): CDK3_62_92; note = Orientation (relative to transcription): antisense; note = sgRNA Position: 76000923; note = Sequence Name: 56322-704_101_SL_seq_2595
caggctctgggtacacatgg

SEQ ID NO: 2596 - DNA, 20 bp, Homo sapiens
  source 1..20: mol_type = genomic DNA; note = Gene: CDK3; note = Location (start to end; relative to TSS): CDK3_26_56; note = Orientation (relative to transcription): antisense; note = sgRNA Position: 76000887; note = Sequence Name: 56322-704_101_SL_seq_2596
cccaggggccagggccactg

SEQ ID NO: 2597 - DNA, 20 bp, Homo sapiens
  source 1..20: mol_type = genomic DNA; note = Gene: CDK3; note = Location (start to end; relative to TSS): CDK3_57_87; note = Orientation (relative to transcription): antisense; note = sgRNA Position: 76000918; note = Sequence Name: 56322-704_101_SL_seq_2597
tctgggtacacatggcggcc

SEQ ID NO: 2598 - DNA, 20 bp, Homo sapiens
  source 1..20: mol_type = genomic DNA; note = Gene: CDK3; note = Location (start to end; relative to TSS): CDK3_19_49; note = Orientation (relative to transcription): antisense; note = sgRNA Position: 76000880; note = Sequence Name: 56322-704_101_SL_seq_2598
gccagggccactgggggcag

SEQ ID NO: 2599 - DNA, 20 bp, Homo sapiens
  source 1..20: mol_type = genomic DNA; note = Gene: CDK3; note = Location (start to end; relative to TSS): CDK3_52_82; note = Orientation (relative to transcription): antisense; note = sgRNA Position: 76000913; note = Sequence Name: 56322-704_101_SL_seq_2599
gtacacatggcggccaggaa

SEQ ID NO: 2600 - DNA, 20 bp, Homo sapiens
  source 1..20: mol_type = genomic DNA; note = Gene: CDK4; note = Location (start to end; relative to TSS): CDK4_38_68; note = Orientation (relative to transcription): antisense; note = sgRNA Position: 57752268; note = Sequence Name: 56322-704_101_SL_seq_2600
cgagctcggtccggagcagc

SEQ ID NO: 2601 - DNA, 20 bp, Homo sapiens
  source 1..20: mol_type = genomic DNA; note = Gene: CDK4; note = Location (start to end; relative to TSS): CDK4_73_103; note = Orientation (relative to transcription): sense; note = sgRNA Position: 57752213; note = Sequence Name: 56322-704_101_SL_seq_2601
cggctccggggccccgataa

SEQ ID NO: 2602 - DNA, 20 bp, Homo sapiens
  source 1..20: mol_type = genomic DNA; note = Gene: CDK4; note = Location (start to end; relative to TSS): CDK4_30_60; note = Orientation (relative to transcription): sense; note = sgRNA Position: 57752256; note = Sequence Name: 56322-704_101_SL_seq_2602
cagctgctccggaccgagct

SEQ ID NO: 2603 - DNA, 20 bp, Homo sapiens
  source 1..20: mol_type = genomic DNA; note = Gene: CDK4; note = Location (start to end; relative to TSS): CDK4_72_102; note = Orientation (relative to transcription): antisense; note = sgRNA Position: 57752234; note = Sequence Name: 56322-704_101_SL_seq_2603
ggccccggagccggttccta

SEQ ID NO: 2604 - DNA, 20 bp, Homo sapiens
  source 1..20: mol_type = genomic DNA; note = Gene: CDK4; note = Location (start to end; relative to TSS): CDK4_31_61; note = Orientation (relative to transcription): sense; note = sgRNA Position: 57752255; note = Sequence Name: 56322-704_101_SL_seq_2604
agctgctccggaccgagctc

SEQ ID NO: 2605 - DNA, 20 bp, Homo sapiens
  source 1..20: mol_type = genomic DNA; note = Gene: CDK4; note = Location (start to end; relative to TSS): CDK4_61_91; note = Orientation (relative to transcription): sense; note = sgRNA Position: 57752225; note = Sequence Name: 56322-704_101_SL_seq_2605
ggccgtaggaaccggctccg

SEQ ID NO: 2606 - DNA, 20 bp, Homo sapiens
  source 1..20: mol_type = genomic DNA; note = Gene: CDK4; note = Location (start to end; relative to TSS): CDK4_29_59; note = Orientation (relative to transcription): antisense; note = sgRNA Position: 57752277; note = Sequence Name: 56322-704_101_SL_seq_2606
tccggagcagctggacgcag

SEQ ID NO: 2607 - DNA, 20 bp, Homo sapiens
  source 1..20: mol_type = genomic DNA; note = Gene: CDK4; note = Location (start to end; relative to TSS): CDK4_59_89; note = Orientation (relative to transcription): sense; note = sgRNA Position: 57752227; note = Sequence Name: 56322-704_101_SL_seq_2607
ggggccgtaggaaccggctc

SEQ ID NO: 2608 - DNA, 20 bp, Homo sapiens
  source 1..20: mol_type = genomic DNA; note = Gene: CDK4; note = Location (start to end; relative to TSS): CDK4_19_49; note = Orientation (relative to transcription): sense; note = sgRNA Position: 57752267; note = Sequence Name: 56322-704_101_SL_seq_2608
ccctctgcgtccagctgctc

SEQ ID NO: 2609 - DNA, 20 bp, Homo sapiens
  source 1..20: mol_type = genomic DNA; note = Gene: CDK4; note = Location (start to end; relative to TSS): CDK4_52_82; note = Orientation (relative to transcription): antisense; note = sgRNA Position: 57752254; note = Sequence Name: 56322-704_101_SL_seq_2609
cggccccatacacccgagct

SEQ ID NO: 2610 - DNA, 20 bp, Homo sapiens
  source 1..20: mol_type = genomic DNA; note = Gene: CDK5; note = Location (start to end; relative to TSS): CDK5_36_66; note = Orientation (relative to transcription): antisense; note = sgRNA Position: 151057857; note = Sequence Name: 56322-704_101_SL_seq_2610
tttctgcatcgcggcggccg

SEQ ID NO: 2611 - DNA, 20 bp, Homo sapiens
  source 1..20: mol_type = genomic DNA; note = Gene: CDK5; note = Location (start to end; relative to TSS): CDK5_131_161; note = Orientation (relative to transcription): antisense; note = sgRNA Position: 151057762; note = Sequence Name: 56322-704_101_SL_seq_2611
agggcttcaaggaatgccga

SEQ ID NO: 2612 - DNA, 20 bp, Homo sapiens
  source 1..20: mol_type = genomic DNA; note = Gene: CDK5; note = Location (start to end; relative to TSS): CDK5_40_70; note = Orientation (relative to transcription): sense; note = sgRNA Position: 151057833; note = Sequence Name: 56322-704_101_SL_seq_2612
gatgcagaaatacgagaaac

SEQ ID NO: 2613 - DNA, 20 bp, Homo sapiens
  source 1..20: mol_type = genomic DNA; note = Gene: CDK5; note = Location (start to end; relative to TSS): CDK5_124_154; note = Orientation (relative to transcription): sense; note = sgRNA Position: 151057749; note = Sequence Name: 56322-704_101_SL_seq_2613
ttcggcattccttgaagccc

SEQ ID NO: 2614 - DNA, 20 bp, Homo sapiens
  source 1..20: mol_type = genomic DNA; note = Gene: CDK5; note = Location (start to end; relative to TSS): CDK5_42_72; note = Orientation (relative to transcription): antisense; note = sgRNA Position: 151057851; note = Sequence Name: 56322-704_101_SL_seq_2614
ctcgtatttctgcatcgcgg

SEQ ID NO: 2615 - DNA, 20 bp, Homo sapiens
  source 1..20: mol_type = genomic DNA; note = Gene: CDK5; note = Location (start to end; relative to TSS): CDK5_120_150; note = Orientation (relative to transcription): antisense; note = sgRNA Position: 151057773; note = Sequence Name: 56322-704_101_SL_seq_2615
gaatgccgaaggatctgcag

SEQ ID NO: 2616 - DNA, 20 bp, Homo sapiens
  source 1..20: mol_type = genomic DNA; note = Gene: CDK5; note = Location (start to end; relative to TSS): CDK5_34_64; note = Orientation (relative to transcription): antisense; note = sgRNA Position: 151057859; note = Sequence Name: 56322-704_101_SL_seq_2616
tctgcatcgcggcggccgcg

SEQ ID NO: 2617 - DNA, 20 bp, Homo sapiens
  source 1..20: mol_type = genomic DNA; note = Gene: CDK5; note = Location (start to end; relative to TSS): CDK5_106_136; note = Orientation (relative to transcription): sense; note = sgRNA Position: 151057767; note = Sequence Name: 56322-704_101_SL_seq_2617
gagctcctctgcagatcctt

SEQ ID NO: 2618 - DNA, 20 bp, Homo sapiens
  source 1..20: mol_type = genomic DNA; note = Gene: CDK5; note = Location (start to end; relative to TSS): CDK5_24_54; note = Orientation (relative to transcription): antisense; note = sgRNA Position: 151057869; note = Sequence Name: 56322-704_101_SL_seq_2618
ggcggccgcggggacccctg

SEQ ID NO: 2619 - DNA, 20 bp, Homo sapiens
  source 1..20: mol_type = genomic DNA; note = Gene: CDK5; note = Location (start to end; relative to TSS): CDK5_56_86; note = Orientation (relative to transcription): sense; note = sgRNA Position: 151057817; note = Sequence Name: 56322-704_101_SL_seq_2619
aaactggaaaagattgggga

SEQ ID NO: 2620 - DNA, 20 bp, Homo sapiens
  source 1..20: mol_type = genomic DNA; note = Gene: CDK6; note = Location (start to end; relative to TSS): CDK6_42_72; note = Orientation (relative to transcription): sense; note = sgRNA Position: 92836507; note = Sequence Name: 56322-704_101_SL_seq_2620
acactcgcagccccctcggg

SEQ ID NO: 2621 - DNA, 20 bp, Homo sapiens
  source 1..20: mol_type = genomic DNA; note = Gene: CDK6; note = Location (start to end; relative to TSS): CDK6_85_115; note = Orientation (relative to transcription): sense; note = sgRNA Position: 92836464; note = Sequence Name: 56322-704_101_SL_seq_2621
caggtgaggagctgtgcgct

SEQ ID NO: 2622 - DNA, 20 bp, Homo sapiens
  source 1..20: mol_type = genomic DNA; note = Gene: CDK6; note = Location (start to end; relative to TSS): CDK6_44_74; note = Orientation (relative to transcription): antisense; note = sgRNA Position: 92836525; note = Sequence Name: 56322-704_101_SL_seq_2622
agggggctgcgagtgtcagt

SEQ ID NO: 2623 - DNA, 20 bp, Homo sapiens
  source 1..20: mol_type = genomic DNA; note = Gene: CDK6; note = Location (start to end; relative to TSS): CDK6_75_105; note = Orientation (relative to transcription): antisense; note = sgRNA Position: 92836494; note = Sequence Name: 56322-704_101_SL_seq_2623
cctgaggggcccagtcgcgt

SEQ ID NO: 2624 - DNA, 20 bp, Homo sapiens
  source 1..20: mol_type = genomic DNA; note = Gene: CDK6; note = Location (start to end; relative to TSS): CDK6_38_68; note = Orientation (relative to transcription): sense; note = sgRNA Position: 92836511; note = Sequence Name: 56322-704_101_SL_seq_2624
actgacactcgcagccccct

SEQ ID NO: 2625 - DNA, 20 bp, Homo sapiens
  source 1..20: mol_type = genomic DNA; note = Gene: CDK6; note = Location (start to end; relative to TSS): CDK6_74_104; note = Orientation (relative to transcription): antisense; note = sgRNA Position: 92836495; note = Sequence Name: 56322-704_101_SL_seq_2625
ctgaggggcccagtcgcgtc

SEQ ID NO: 2626 - DNA, 20 bp, Homo sapiens
  source 1..20: mol_type = genomic DNA; note = Gene: CDK6; note = Location (start to end; relative to TSS): CDK6_39_69; note = Orientation (relative to transcription): sense; note = sgRNA Position: 92836510; note = Sequence Name: 56322-704_101_SL_seq_2626
ctgacactcgcagccccctc

SEQ ID NO: 2627 - DNA, 20 bp, Homo sapiens
  source 1..20: mol_type = genomic DNA; note = Gene: CDK6; note = Location (start to end; relative to TSS): CDK6_71_101; note = Orientation (relative to transcription): sense; note = sgRNA Position: 92836478; note = Sequence Name: 56322-704_101_SL_seq_2627
gcgactgggcccctcaggtg

SEQ ID NO: 2628 - DNA, 20 bp, Homo sapiens
  source 1..20: mol_type = genomic DNA; note = Gene: CDK6; note = Location (start to end; relative to TSS): CDK6_24_54; note = Orientation (relative to transcription): antisense; note = sgRNA Position: 92836545; note = Sequence Name: 56322-704_101_SL_seq_2628
cggctctccgcacgtgtccg

SEQ ID NO: 2629 - DNA, 20 bp, Homo sapiens
  source 1..20: mol_type = genomic DNA; note = Gene: CDK6; note = Location (start to end; relative to TSS): CDK6_57_87; note = Orientation (relative to transcription): sense; note = sgRNA Position: 92836492; note = Sequence Name: 56322-704_101_SL_seq_2629
tcgggaggcccgacgcgact

SEQ ID NO: 2630 - DNA, 20 bp, Homo sapiens
  source 1..20: mol_type = genomic DNA; note = Gene: CDK7; note = Location (start to end; relative to TSS): CDK7_44_74; note = Orientation (relative to transcription): sense; note = sgRNA Position: 69234956; note = Sequence Name: 56322-704_101_SL_seq_2630
cgcccttttcggctggagtc

SEQ ID NO: 2631 - DNA, 20 bp, Homo sapiens
  source 1..20: mol_type = genomic DNA; note = Gene: CDK7; note = Location (start to end; relative to TSS): CDK7_83_113; note = Orientation (relative to transcription): sense; note = sgRNA Position: 69234995; note = Sequence Name: 56322-704_101_SL_seq_2631
ggctctggacgtgaagtctc

SEQ ID NO: 2632 - DNA, 20 bp, Homo sapiens
  source 1..20: mol_type = genomic DNA; note = Gene: CDK7; note = Location (start to end; relative to TSS): CDK7_43_73; note = Orientation (relative to transcription): antisense; note = sgRNA Position: 69234935; note = Sequence Name: 56322-704_101_SL_seq_2632
gccgaaaagggcgagctccc

SEQ ID NO: 2633 - DNA, 20 bp, Homo sapiens
  source 1..20: mol_type = genomic DNA; note = Gene: CDK7; note = Location (start to end; relative to TSS): CDK7_82_112; note = Orientation (relative to transcription): sense; note = sgRNA Position: 69234994; note = Sequence Name: 56322-704_101_SL_seq_2633
tggctctggacgtgaagtct

SEQ ID NO: 2634 - DNA, 20 bp, Homo sapiens
  source 1..20: mol_type = genomic DNA; note = Gene: CDK7; note = Location (start to end; relative to TSS): CDK7_37_67; note = Orientation (relative to transcription): sense; note = sgRNA Position: 69234949; note = Sequence Name: 56322-704_101_SL_seq_2634
gggagctcgcccttttcggc

SEQ ID NO: 2635 - DNA, 20 bp, Homo sapiens
  source 1..20: mol_type = genomic DNA; note = Gene: CDK7; note = Location (start to end; relative to TSS): CDK7_68_98; note = Orientation (relative to transcription): sense; note = sgRNA Position: 69234980; note = Sequence Name: 56322-704_101_SL_seq_2635
tttacggcgccggatggctc

SEQ ID NO: 2636 - DNA, 20 bp, Homo sapiens
  source 1..20: mol_type = genomic DNA; note = Gene: CDK7; note = Location (start to end; relative to TSS): CDK7_17_47; note = Orientation (relative to transcription): sense; note = sgRNA Position: 69234929; note = Sequence Name: 56322-704_101_SL_seq_2636
ctttaaattcgtgttgtcct

SEQ ID NO: 2637 - DNA, 20 bp, Homo sapiens
  source 1..20: mol_type = genomic DNA; note = Gene: CDK7; note = Location (start to end; relative to TSS): CDK7_55_85; note = Orientation (relative to transcription): antisense; note = sgRNA Position: 69234947; note = Sequence Name: 56322-704_101_SL_seq_2637
agcccgactccagccgaaaa

SEQ ID NO: 2638 - DNA, 20 bp, Homo sapiens
  source 1..20: mol_type = genomic DNA; note = Gene: CDK7; note = Location (start to end; relative to TSS): CDK7_16_46; note = Orientation (relative to transcription): sense; note = sgRNA Position: 69234928; note = Sequence Name: 56322-704_101_SL_seq_2638
gctttaaattcgtgttgtcc

SEQ ID NO: 2639 - DNA, 20 bp, Homo sapiens
  source 1..20: mol_type = genomic DNA; note = Gene: CDK7; note = Location (start to end; relative to TSS): CDK7_52_82; note = Orientation (relative to transcription): sense; note = sgRNA Position: 69234964; note = Sequence Name: 56322-704_101_SL_seq_2639
tcggctggagtcgggcttta

SEQ ID NO: 2640 - DNA, 20 bp, Homo sapiens
  source 1..20: mol_type = genomic DNA; note = Gene: CDK8; note = Location (start to end; relative to TSS): CDK8_66_96; note = Orientation (relative to transcription): sense; note = sgRNA Position: 26254221; note = Sequence Name: 56322-704_101_SL_seq_2640
agcgtgtgtgtgagagcgtg

SEQ ID NO: 2641 - DNA, 20 bp, Homo sapiens
  source 1..20: mol_type = genomic DNA; note = Gene: CDK8; note = Location (start to end; relative to TSS): CDK8_135_165; note = Orientation (relative to transcription): antisense; note = sgRNA Position: 26254270; note = Sequence Name: 56322-704_101_SL_seq_2641
ctgcggcgggagcggcgggg

SEQ ID NO: 2642 - DNA, 20 bp, Homo sapiens
  source 1..20: mol_type = genomic DNA; note = Gene: CDK8; note = Location (start to end; relative to TSS): CDK8_29_59; note = Orientation (relative to transcription): antisense; note = sgRNA Position: 26254164; note = Sequence Name: 56322-704_101_SL_seq_2642
tcccatacactcaaacagaa

SEQ ID NO: 2643 - DNA, 20 bp, Homo sapiens
  source 1..20: mol_type = genomic DNA; note = Gene: CDK8; note = Location (start to end; relative to TSS): CDK8_103_133; note = Orientation (relative to transcription): sense; note = sgRNA Position: 26254258; note = Sequence Name: 56322-704_101_SL_seq_2643
tgagaggacgagagcccgcc

SEQ ID NO: 2644 - DNA, 20 bp, Homo sapiens
  source 1..20: mol_type = genomic DNA; note = Gene: CDK8; note = Location (start to end; relative to TSS): CDK8_19_49; note = Orientation (relative to transcription): sense; note = sgRNA Position: 26254174; note = Sequence Name: 56322-704_101_SL_seq_2644
gcccttctgtttgagtgtat

SEQ ID NO: 2645 - DNA, 20 bp, Homo sapiens
  source 1..20: mol_type = genomic DNA; note = Gene: CDK8; note = Location (start to end; relative to TSS): CDK8_87_117; note = Orientation (relative to transcription): sense; note = sgRNA Position: 26254242; note = Sequence Name: 56322-704_101_SL_seq_2645
ggcgtgagtgcgcgtgtgag

SEQ ID NO: 2646 - DNA, 20 bp, Homo sapiens
  source 1..20: mol_type = genomic DNA; note = Gene: CDK8; note = Location (start to end; relative to TSS): CDK8_-8_22; note = Orientation (relative to transcription): sense; note = sgRNA Position: 26254147; note = Sequence Name: 56322-704_101_SL_seq_2646
aggaggtaccggctgttgtg

SEQ ID NO: 2647 - DNA, 20 bp, Homo sapiens
  source 1..20: mol_type = genomic DNA; note = Gene: CDK8; note = Location (start to end; relative to TSS): CDK8_66_96; note = Orientation (relative to transcription): sense; note = sgRNA Position: 26254221; note = Sequence Name: 56322-704_101_SL_seq_2647
agcgtgtgtgtgagagcgtg

SEQ ID NO: 2648 - DNA, 20 bp, Homo sapiens
  source 1..20: mol_type = genomic DNA; note = Gene: CDK8; note = Location (start to end; relative to TSS): CDK8_-9_21; note = Orientation (relative to transcription): antisense; note = sgRNA Position: 26254126; note = Sequence Name: 56322-704_101_SL_seq_2648
gccggtacctcctcaaagag

SEQ ID NO: 2649 - DNA, 20 bp, Homo sapiens
  source 1..20: mol_type = genomic DNA; note = Gene: CDK8; note = Location (start to end; relative to TSS): CDK8_29_59; note = Orientation (relative to transcription): antisense; note = sgRNA Position: 26254164; note = Sequence Name: 56322-704_101_SL_seq_2649
tcccatacactcaaacagaa

SEQ ID NO: 2650 - DNA, 20 bp, Homo sapiens
  source 1..20: mol_type = genomic DNA; note = Gene: CDK9; note = Location (start to end; relative to TSS): CDK9_42_72; note = Orientation (relative to transcription): sense; note = sgRNA Position: 127786102; note = Sequence Name: 56322-704_101_SL_seq_2650
gggacccggagcaggagcgg

SEQ ID NO: 2651 - DNA, 20 bp, Homo sapiens
  source 1..20: mol_type = genomic DNA; note = Gene: CDK9; note = Location (start to end; relative to TSS): CDK9_105_135; note = Orientation (relative to transcription): sense; note = sgRNA Position: 127786165; note = Sequence Name: 56322-704_101_SL_seq_2651
catggcaaagcagtacgact

SEQ ID NO: 2652 - DNA, 20 bp, Homo sapiens
  source 1..20: mol_type = genomic DNA; note = Gene: CDK9; note = Location (start to end; relative to TSS): CDK9_39_69; note = Orientation (relative to transcription): sense; note = sgRNA Position: 127786099; note = Sequence Name: 56322-704_101_SL_seq_2652
ggcgggacccggagcaggag

SEQ ID NO: 2653 - DNA, 20 bp, Homo sapiens
  source 1..20: mol_type = genomic DNA; note = Gene: CDK9; note = Location (start to end; relative to TSS): CDK9_87_117; note = Orientation (relative to transcription): sense; note = sgRNA Position: 127786147; note = Sequence Name: 56322-704_101_SL_seq_2653
cggcgcgttggaggcggcca

SEQ ID NO: 2654 - DNA, 20 bp, Homo sapiens
  source 1..20: mol_type = genomic DNA; note = Gene: CDK9; note = Location (start to end; relative to TSS): CDK9_32_62; note = Orientation (relative to transcription): antisense; note = sgRNA Position: 127786072; note = Sequence Name: 56322-704_101_SL_seq_2654
tcccgccgccgccgcactcc

SEQ ID NO: 2655 - DNA, 20 bp, Homo sapiens
  source 1..20: mol_type = genomic DNA; note = Gene: CDK9; note = Location (start to end; relative to TSS): CDK9_75_105; note = Orientation (relative to transcription): sense; note = sgRNA Position: 127786135; note = Sequence Name: 56322-704_101_SL_seq_2655
tgggggcggcggcggcgcgt

SEQ ID NO: 2656 - DNA, 20 bp, Homo sapiens
  source 1..20: mol_type = genomic DNA; note = Gene: CDK9; note = Location (start to end; relative to TSS): CDK9_21_51; note = Orientation (relative to transcription): antisense; note = sgRNA Position: 127786061; note = Sequence Name: 56322-704_101_SL_seq_2656
ccgcactccaggcccctccg

SEQ ID NO: 2657 - DNA, 20 bp, Homo sapiens
  source 1..20: mol_type = genomic DNA; note = Gene: CDK9; note = Location (start to end; relative to TSS): CDK9_56_86; note = Orientation (relative to transcription): sense; note = sgRNA Position: 127786116; note = Sequence Name: 56322-704_101_SL_seq_2657
gagcggcggcagcagcgact

SEQ ID NO: 2658 - DNA, 20 bp, Homo sapiens
  source 1..20: mol_type = genomic DNA; note = Gene: CDK9; note = Location (start to end; relative to TSS): CDK9_15_45; note = Orientation (relative to transcription): sense; note = sgRNA Position: 127786075; note = Sequence Name: 56322-704_101_SL_seq_2658
cggaggggcctggagtgcgg

SEQ ID NO: 2659 - DNA, 20 bp, Homo sapiens
  source 1..20: mol_type = genomic DNA; note = Gene: CDK9; note = Location (start to end; relative to TSS): CDK9_55_85; note = Orientation (relative to transcription): antisense; note = sgRNA Position: 127786095; note = Sequence Name: 56322-704_101_SL_seq_2659
gctgccgccgctcctgctcc

SEQ ID NO: 2660 - DNA, 20 bp, Homo sapiens
  source 1..20: mol_type = genomic DNA; note = Gene: CDKL1; note = Location (start to end; relative to TSS): CDKL1_38_68; note = Orientation (relative to transcription): sense; note = sgRNA Position: 50396819; note = Sequence Name: 56322-704_101_SL_seq_2660
cgccgcggcgccgtgagtcc

SEQ ID NO: 2661 - DNA, 20 bp, Homo sapiens
  source 1..20: mol_type = genomic DNA; note = Gene: CDKL1; note = Location (start to end; relative to TSS): CDKL1_78_108; note = Orientation (relative to transcription): sense; note = sgRNA Position: 50396779; note = Sequence Name: 56322-704_101_SL_seq_2661
ggccgtccctggccaacacg

SEQ ID NO: 2662 - DNA, 20 bp, Homo sapiens
  source 1..20: mol_type = genomic DNA; note = Gene: CDKL1; note = Location (start to end; relative to TSS): CDKL1_36_66; note = Orientation (relative to transcription): antisense; note = sgRNA Position: 50396841; note = Sequence Name: 56322-704_101_SL_seq_2662
ggcgccgcggcggtcaggga

SEQ ID NO: 2663 - DNA, 20 bp, Homo sapiens
  source 1..20: mol_type = genomic DNA; note = Gene: CDKL1; note = Location (start to end; relative to TSS): CDKL1_67_97; note = Orientation (relative to transcription): sense; note = sgRNA Position: 50396790; note = Sequence Name: 56322-704_101_SL_seq_2663
aaggaggcgcgggccgtccc

SEQ ID NO: 2664 - DNA, 20 bp, Homo sapiens
  source 1..20: mol_type = genomic DNA; note = Gene: CDKL1; note = Location (start to end; relative to TSS): CDKL1_30_60; note = Orientation (relative to transcription): antisense; note = sgRNA Position: 50396847; note = Sequence Name: 56322-704_101_SL_seq_2664
gcggcggtcagggacgggcc

SEQ ID NO: 2665 - DNA, 20 bp, Homo sapiens
  source 1..20: mol_type = genomic DNA; note = Gene: CDKL1; note = Location (start to end; relative to TSS): CDKL1_65_95; note = Orientation (relative to transcription): antisense; note = sgRNA Position: 50396812; note = Sequence Name: 56322-704_101_SL_seq_2665
ccgcgcctccttgcccgccc

SEQ ID NO: 2666 - DNA, 20 bp, Homo sapiens
  source 1..20: mol_type = genomic DNA; note = Gene: CDKL1; note = Location (start to end; relative to TSS): CDKL1_35_65; note = Orientation (relative to transcription): antisense; note = sgRNA Position: 50396842; note = Sequence Name: 56322-704_101_SL_seq_2666
gcgccgcggcggtcagggac

SEQ ID NO: 2667 - DNA, 20 bp, Homo sapiens
  source 1..20: mol_type = genomic DNA; note = Gene: CDKL1; note = Location (start to end; relative to TSS): CDKL1_65_95; note = Orientation (relative to transcription): antisense; note = sgRNA Position: 50396812; note = Sequence Name: 56322-704_101_SL_seq_2667
ccgcgcctccttgcccgccc

SEQ ID NO: 2668 - DNA, 20 bp, Homo sapiens
  source 1..20: mol_type = genomic DNA; note = Gene: CDKL1; note = Location (start to end; relative to TSS): CDKL1_23_53; note = Orientation (relative to transcription): sense; note = sgRNA Position: 50396834; note = Sequence Name: 56322-704_101_SL_seq_2668
aggcccgtccctgaccgccg

SEQ ID NO: 2669 - DNA, 20 bp, Homo sapiens
  source 1..20: mol_type = genomic DNA; note = Gene: CDKL1; note = Location (start to end; relative to TSS): CDKL1_56_86; note = Orientation (relative to transcription): sense; note = sgRNA Position: 50396801; note = Sequence Name: 56322-704_101_SL_seq_2669
cccgggcgggcaaggaggcg

SEQ ID NO: 2670 - DNA, 20 bp, Homo sapiens
  source 1..20: mol_type = genomic DNA; note = Gene: CDKL2; note = Location (start to end; relative to TSS): CDKL2_32_62; note = Orientation (relative to transcription): sense; note = sgRNA Position: 75630472; note = Sequence Name: 56322-704_101_SL_seq_2670
ttggagcggtgcaggttccc

SEQ ID NO: 2671 - DNA, 20 bp, Homo sapiens
  source 1..20: mol_type = genomic DNA; note = Gene: CDKL2; note = Location (start to end; relative to TSS): CDKL2_65_95; note = Orientation (relative to transcription): sense; note = sgRNA Position: 75630439; note = Sequence Name: 56322-704_101_SL_seq_2671
tgggcgccttacgagctggg

SEQ ID NO: 2672 - DNA, 20 bp, Homo sapiens
  source 1..20: mol_type = genomic DNA; note = Gene: CDKL2; note = Location (start to end; relative to TSS): CDKL2_30_60; note = Orientation (relative to transcription): antisense; note = sgRNA Position: 75630494; note = Sequence Name: 56322-704_101_SL_seq_2672
gcaccgctccaactacccct

SEQ ID NO: 2673 - DNA, 20 bp, Homo sapiens
  source 1..20: mol_type = genomic DNA; note = Gene: CDKL2; note = Location (start to end; relative to TSS): CDKL2_62_92; note = Orientation (relative to transcription): sense; note = sgRNA Position: 75630442; note = Sequence Name: 56322-704_101_SL_seq_2673
tactgggcgccttacgagct

SEQ ID NO: 2674 - DNA, 20 bp, Homo sapiens
  source 1..20: mol_type = genomic DNA; note = Gene: CDKL2; note = Location (start to end; relative to TSS): CDKL2_31_61; note = Orientation (relative to transcription): antisense; note = sgRNA Position: 75630493; note = Sequence Name: 56322-704_101_SL_seq_2674
tgcaccgctccaactacccc

SEQ ID NO: 2675 - DNA, 20 bp, Homo sapiens
  source 1..20: mol_type = genomic DNA; note = Gene: CDKL2; note = Location (start to end; relative to TSS): CDKL2_61_91; note = Orientation (relative to transcription): sense; note = sgRNA Position: 75630443; note = Sequence Name: 56322-704_101_SL_seq_2675
gtactgggcgccttacgagc

SEQ ID NO: 2676 - DNA, 20 bp, Homo sapiens
  source 1..20: mol_type = genomic DNA; note = Gene: CDKL2; note = Location (start to end; relative to TSS): CDKL2_18_48; note = Orientation (relative to transcription): sense; note = sgRNA Position: 75630486; note = Sequence Name: 56322-704_101_SL_seq_2676
tcgcccaggggtagttggag

SEQ ID NO: 2677 - DNA, 20 bp, Homo sapiens
  source 1..20: mol_type = genomic DNA; note = Gene: CDKL2; note = Location (start to end; relative to TSS): CDKL2_59_89; note = Orientation (relative to transcription): antisense; note = sgRNA Position: 75630465; note = Sequence Name: 56322-704_101_SL_seq_2677
ggcgcccagtacctggagcc

SEQ ID NO: 2678 - DNA, 20 bp, Homo sapiens
  source 1..20: mol_type = genomic DNA; note = Gene: CDKL2; note = Location (start to end; relative to TSS): CDKL2_24_54; note = Orientation (relative to transcription): antisense; note = sgRNA Position: 75630500; note = Sequence Name: 56322-704_101_SL_seq_2678
ctccaactacccctgggcga

SEQ ID NO: 2679 - DNA, 20 bp, Homo sapiens
  source 1..20: mol_type = genomic DNA; note = Gene: CDKL2; note = Location (start to end; relative to TSS): CDKL2_58_88; note = Orientation (relative to transcription): antisense; note = sgRNA Position: 75630466; note = Sequence Name: 56322-704_101_SL_seq_2679
gcgcccagtacctggagcct

SEQ ID NO: 2680 - DNA, 20 bp, Homo sapiens
  source 1..20: mol_type = genomic DNA; note = Gene: CDKL3; note = Location (start to end; relative to TSS): CDKL3_43_73; note = Orientation (relative to transcription): antisense; note = sgRNA Position: 134367124; note = Sequence Name: 56322-704_101_SL_seq_2680
tgctcagccccgcaaggaac

SEQ ID NO: 2681 - DNA, 20 bp, Homo sapiens
  source 1..20: mol_type = genomic DNA; note = Gene: CDKL3; note = Location (start to end; relative to TSS): CDKL3_93_123; note = Orientation (relative to transcription): antisense; note = sgRNA Position: 134367074; note = Sequence Name: 56322-704_101_SL_seq_2681
ctggctctgcgtagttccag

SEQ ID NO: 2682 - DNA, 20 bp, Homo sapiens
  source 1..20: mol_type = genomic DNA; note = Gene: CDKL3; note = Location (start to end; relative to TSS): CDKL3_27_57; note = Orientation (relative to transcription): antisense; note = sgRNA Position: 134367140; note = Sequence Name: 56322-704_101_SL_seq_2682
gaaccggccacttgccacca

SEQ ID NO: 2683 - DNA, 20 bp, Homo sapiens
  source 1..20: mol_type = genomic DNA; note = Gene: CDKL3; note = Location (start to end; relative to TSS): CDKL3_68_98; note = Orientation (relative to transcription): sense; note = sgRNA Position: 134367079; note = Sequence Name: 56322-704_101_SL_seq_2683
tcagtgttcggtggctccac

SEQ ID NO: 2684 - DNA, 20 bp, Homo sapiens
  source 1..20: mol_type = genomic DNA; note = Gene: CDKL3; note = Location (start to end; relative to TSS): CDKL3_25_55; note = Orientation (relative to transcription): sense; note = sgRNA Position: 134367122; note = Sequence Name: 56322-704_101_SL_seq_2684
ggcaagtggccggttccttg

SEQ ID NO: 2685 - DNA, 20 bp, Homo sapiens
  source 1..20: mol_type = genomic DNA; note = Gene: CDKL3; note = Location (start to end; relative to TSS): CDKL3_59_89; note = Orientation (relative to transcription): sense; note = sgRNA Position: 134367088; note = Sequence Name: 56322-704_101_SL_seq_2685
aaagtagtatcagtgttcgg

SEQ ID NO: 2686 - DNA, 20 bp, Homo sapiens
  source 1..20: mol_type = genomic DNA; note = Gene: CDKL3; note = Location (start to end; relative to TSS): CDKL3_26_56; note = Orientation (relative to transcription): sense; note = sgRNA Position: 134367121; note = Sequence Name: 56322-704_101_SL_seq_2686
gcaagtggccggttccttgc

SEQ ID NO: 2687 - DNA, 20 bp, Homo sapiens
  source 1..20: mol_type = genomic DNA; note = Gene: CDKL3; note = Location (start to end; relative to TSS): CDKL3_56_86; note = Orientation (relative to transcription): sense; note = sgRNA Position: 134367091; note = Sequence Name: 56322-704_101_SL_seq_2687
aacaaagtagtatcagtgtt

SEQ ID NO: 2688 - DNA, 20 bp, Homo sapiens
  source 1..20: mol_type = genomic DNA; note = Gene: CDKL3; note = Location (start to end; relative to TSS): CDKL3_18_48; note = Orientation (relative to transcription): antisense; note = sgRNA Position: 134367149; note = Sequence Name: 56322-704_101_SL_seq_2688
acttgccaccatggaaacgc

SEQ ID NO: 2689 - DNA, 20 bp, Homo sapiens
  source 1..20: mol_type = genomic DNA; note = Gene: CDKL3; note = Location (start to end; relative to TSS): CDKL3_49_79; note = Orientation (relative to transcription): antisense; note = sgRNA Position: 134367118; note = Sequence Name: 56322-704_101_SL_seq_2689
ctttgttgctcagccccgca

SEQ ID NO: 2690 - DNA, 20 bp, Homo sapiens
  source 1..20: mol_type = genomic DNA; note = Gene: CDKL4; note = Location (start to end; relative to TSS): CDKL4_43_73; note = Orientation (relative to transcription): sense; note = sgRNA Position: 39247053; note = Sequence Name: 56322-704_101_SL_seq_2690
aagtaagtagtattaaaaca

SEQ ID NO: 2691 - DNA, 20 bp, Homo sapiens
  source 1..20: mol_type = genomic DNA; note = Gene: CDKL4; note = Location (start to end; relative to TSS): CDKL4_82_112; note = Orientation (relative to transcription): antisense; note = sgRNA Position: 39247034; note = Sequence Name: 56322-704_101_SL_seq_2691
agagatttgagccatcacac

SEQ ID NO: 2692 - DNA, 20 bp, Homo sapiens
  source 1..20: mol_type = genomic DNA; note = Gene: CDKL4; note = Location (start to end; relative to TSS): CDKL4_49_79; note = Orientation (relative to transcription): sense; note = sgRNA Position: 39247047; note = Sequence Name: 56322-704_101_SL_seq_2692
gtagtattaaaacaaggtac

SEQ ID NO: 2693 - DNA, 20 bp, Homo sapiens
  source 1..20: mol_type = genomic DNA; note = Gene: CDKL4; note = Location (start to end; relative to TSS): CDKL4_81_111; note = Orientation (relative to transcription): antisense; note = sgRNA Position: 39247035; note = Sequence Name: 56322-704_101_SL_seq_2693
gagatttgagccatcacact

SEQ ID NO: 2694 - DNA, 20 bp, Homo sapiens
  source 1..20: mol_type = genomic DNA; note = Gene: CDKL4; note = Location (start to end; relative to TSS): CDKL4_20_50; note = Orientation (relative to transcription): sense; note = sgRNA Position: 39247076; note = Sequence Name: 56322-704_101_SL_seq_2694
cttggatgaataaaggcaaa

SEQ ID NO: 2695 - DNA, 20 bp, Homo sapiens
  source 1..20: mol_type = genomic DNA; note = Gene: CDKL4; note = Location (start to end; relative to TSS): CDKL4_62_92; note = Orientation (relative to transcription): sense; note = sgRNA Position: 39247034; note = Sequence Name: 56322-704_101_SL_seq_2695
aaggtacaggcccagtgtga

SEQ ID NO: 2696 - DNA, 20 bp, Homo sapiens
  source 1..20: mol_type = genomic DNA; note = Gene: CDKL4; note = Location (start to end; relative to TSS): CDKL4_17_47; note = Orientation (relative to transcription): antisense; note = sgRNA Position: 39247099; note = Sequence Name: 56322-704_101_SL_seq_2696
attcatccaagtgtgctcct

SEQ ID NO: 2697 - DNA, 20 bp, Homo sapiens
  source 1..20: mol_type = genomic DNA; note = Gene: CDKL4; note = Location (start to end; relative to TSS): CDKL4_49_79; note = Orientation (relative to transcription): sense; note = sgRNA Position: 39247047; note = Sequence Name: 56322-704_101_SL_seq_2697
gtagtattaaaacaaggtac

SEQ ID NO: 2698 - DNA, 20 bp, Homo sapiens
  source 1..20: mol_type = genomic DNA; note = Gene: CDKL4; note = Location (start to end; relative to TSS): CDKL4_13_43; note = Orientation (relative to transcription): sense; note = sgRNA Position: 39247083; note = Sequence Name: 56322-704_101_SL_seq_2698
gagcacacttggatgaataa

SEQ ID NO: 2699 - DNA, 20 bp, Homo sapiens
  source 1..20: mol_type = genomic DNA; note = Gene: CDKL4; note = Location (start to end; relative to TSS): CDKL4_43_73; note = Orientation (relative to transcription): sense; note = sgRNA Position: 39247053; note = Sequence Name: 56322-704_101_SL_seq_2699
aagtaagtagtattaaaaca

SEQ ID NO: 2700 - DNA, 20 bp, Homo sapiens
  source 1..20: mol_type = genomic DNA; note = Gene: CDKL5; note = Location (start to end; relative to TSS): CDKL5_41_71; note = Orientation (relative to transcription): antisense; note = sgRNA Position: 18425655; note = Sequence Name: 56322-704_101_SL_seq_2700
aggggaccccacagctcctg

SEQ ID NO: 2701 - DNA, 20 bp, Homo sapiens
  source 1..20: mol_type = genomic DNA; note = Gene: CDKL5; note = Location (start to end; relative to TSS): CDKL5_104_134; note = Orientation (relative to transcription): antisense; note = sgRNA Position: 18425718; note = Sequence Name: 56322-704_101_SL_seq_2701
aagaaggcttggcgggcggg

SEQ ID NO: 2702 - DNA, 20 bp, Homo sapiens
  source 1..20: mol_type = genomic DNA; note = Gene: CDKL5; note = Location (start to end; relative to TSS): CDKL5_43_73; note = Orientation (relative to transcription): sense; note = sgRNA Position: 18425677; note = Sequence Name: 56322-704_101_SL_seq_2702
gtggggtcccctgctagaag

SEQ ID NO: 2703 - DNA, 20 bp, Homo sapiens
  source 1..20: mol_type = genomic DNA; note = Gene: CDKL5; note = Location (start to end; relative to TSS): CDKL5_101_131; note = Orientation (relative to transcription): antisense; note = sgRNA Position: 18425715; note = Sequence Name: 56322-704_101_SL_seq_2703
aaggcttggcgggcgggtgg

SEQ ID NO: 2704 - DNA, 20 bp, Homo sapiens
  source 1..20: mol_type = genomic DNA; note = Gene: CDKL5; note = Location (start to end; relative to TSS): CDKL5_26_56; note = Orientation (relative to transcription): sense; note = sgRNA Position: 18425660; note = Sequence Name: 56322-704_101_SL_seq_2704
cggcgtcctcaggagctgtg

SEQ ID NO: 2705 - DNA, 20 bp, Homo sapiens
  source 1..20: mol_type = genomic DNA; note = Gene: CDKL5; note = Location (start to end; relative to TSS): CDKL5_57_87; note = Orientation (relative to transcription): sense; note = sgRNA Position: 18425691; note = Sequence Name: 56322-704_101_SL_seq_2705
tagaagtgggggactcggcg

SEQ ID NO: 2706 - DNA, 20 bp, Homo sapiens
  source 1..20: mol_type = genomic DNA; note = Gene: CDKL5; note = Location (start to end; relative to TSS): CDKL5_24_54; note = Orientation (relative to transcription): sense; note = sgRNA Position: 18425658; note = Sequence Name: 56322-704_101_SL_seq_2706
gacggcgtcctcaggagctg

SEQ ID NO: 2707 - DNA, 20 bp, Homo sapiens
  source 1..20: mol_type = genomic DNA; note = Gene: CDKL5; note = Location (start to end; relative to TSS): CDKL5_56_86; note = Orientation (relative to transcription): sense; note = sgRNA Position: 18425690; note = Sequence Name: 56322-704_101_SL_seq_2707
ctagaagtgggggactcggc

SEQ ID NO: 2708 - DNA, 20 bp, Homo sapiens
  source 1..20: mol_type = genomic DNA; note = Gene: CDKL5; note = Location (start to end; relative to TSS): CDKL5_25_55; note = Orientation (relative to transcription): sense; note = sgRNA Position: 18425659; note = Sequence Name: 56322-704_101_SL_seq_2708
acggcgtcctcaggagctgt

SEQ ID NO: 2709 - DNA, 20 bp, Homo sapiens
  source 1..20: mol_type = genomic DNA; note = Gene: CDKL5; note = Location (start to end; relative to TSS): CDKL5_55_85; note = Orientation (relative to transcription): sense; note = sgRNA Position: 18425689; note = Sequence Name: 56322-704_101_SL_seq_2709
gctagaagtgggggactcgg

SEQ ID NO: 2710 - DNA, 20 bp, Homo sapiens
  source 1..20: mol_type = genomic DNA; note = Gene: CERK; note = Location (start to end; relative to TSS): CERK_37_67; note = Orientation (relative to transcription): antisense; note = sgRNA Position: 46738211; note = Sequence Name: 56322-704_101_SL_seq_2710
gaggggcgccggaccgttag

SEQ ID NO: 2711 - DNA, 20 bp, Homo sapiens
  source 1..20: mol_type = genomic DNA; note = Gene: CERK; note = Location (start to end; relative to TSS): CERK_68_98; note = Orientation (relative to transcription): sense; note = sgRNA Position: 46738160; note = Sequence Name: 56322-704_101_SL_seq_2711
agcctggcggacgagcccgg

SEQ ID NO: 2712 - DNA, 20 bp, Homo sapiens
  source 1..20: mol_type = genomic DNA; note = Gene: CERK; note = Location (start to end; relative to TSS): CERK_30_60; note = Orientation (relative to transcription): sense; note = sgRNA Position: 46738198; note = Sequence Name: 56322-704_101_SL_seq_2712
gctaacggtccggcgcccct

SEQ ID NO: 2713 - DNA, 20 bp, Homo sapiens
  source 1..20: mol_type = genomic DNA; note = Gene: CERK; note = Location (start to end; relative to TSS): CERK_65_95; note = Orientation (relative to transcription): antisense; note = sgRNA Position: 46738183; note = Sequence Name: 56322-704_101_SL_seq_2713
tccgccaggctgggggcgcg

SEQ ID NO: 2714 - DNA, 20 bp, Homo sapiens
  source 1..20: mol_type = genomic DNA; note = Gene: CERK; note = Location (start to end; relative to TSS): CERK_25_55; note = Orientation (relative to transcription): antisense; note = sgRNA Position: 46738223; note = Sequence Name: 56322-704_101_SL_seq_2714
accgttagcggcccctgcag

SEQ ID NO: 2715 - DNA, 20 bp, Homo sapiens
  source 1..20: mol_type = genomic DNA; note = Gene: CERK; note = Location (start to end; relative to TSS): CERK_55_85; note = Orientation (relative to transcription): sense; note = sgRNA Position: 46738173; note = Sequence Name: 56322-704_101_SL_seq_2715
tccgcgcgcccccagcctgg

SEQ ID NO: 2716 - DNA, 20 bp, Homo sapiens
  source 1..20: mol_type = genomic DNA; note = Gene: CERK; note = Location (start to end; relative to TSS): CERK_19_49; note = Orientation (relative to transcription): antisense; note = sgRNA Position: 46738229; note = Sequence Name: 56322-704_101_SL_seq_2716
agcggcccctgcagtggccc

SEQ ID NO: 2717 - DNA, 20 bp, Homo sapiens
  source 1..20: mol_type = genomic DNA; note = Gene: CERK; note = Location (start to end; relative to TSS): CERK_54_84; note = Orientation (relative to transcription): antisense; note = sgRNA Position: 46738194; note = Sequence Name: 56322-704_101_SL_seq_2717
gggggcgcgcggacgccgag

SEQ ID NO: 2718 - DNA, 20 bp, Homo sapiens
  source 1..20: mol_type = genomic DNA; note = Gene: CERK; note = Location (start to end; relative to TSS): CERK_20_50; note = Orientation (relative to transcription): sense; note = sgRNA Position: 46738208; note = Sequence Name: 56322-704_101_SL_seq_2718
tgcaggggccgctaacggtc

SEQ ID NO: 2719 - DNA, 20 bp, Homo sapiens
  source 1..20: mol_type = genomic DNA; note = Gene: CERK; note = Location (start to end; relative to TSS): CERK_52_82; note = Orientation (relative to transcription): sense; note = sgRNA Position: 46738176; note = Sequence Name: 56322-704_101_SL_seq_2719
gcgtccgcgcgcccccagcc

SEQ ID NO: 2720 - DNA, 20 bp, Homo sapiens
  source 1..20: mol_type = genomic DNA; note = Gene: CERKL; note = Location (start to end; relative to TSS): CERKL_39_69; note = Orientation (relative to transcription): antisense; note = sgRNA Position: 181657062; note = Sequence Name: 56322-704_101_SL_seq_2720
gaggcctttggagaaggagg

SEQ ID NO: 2721 - DNA, 20 bp, Homo sapiens
  source 1..20: mol_type = genomic DNA; note = Gene: CERKL; note = Location (start to end; relative to TSS): CERKL_77_107; note = Orientation (relative to transcription): sense; note = sgRNA Position: 181657004; note = Sequence Name: 56322-704_101_SL_seq_2721
cctgcgactccgccatgccc

SEQ ID NO: 2722 - DNA, 20 bp, Homo sapiens
  source 1..20: mol_type = genomic DNA; note = Gene: CERKL; note = Location (start to end; relative to TSS): CERKL_35_65; note = Orientation (relative to transcription): antisense; note = sgRNA Position: 181657066; note = Sequence Name: 56322-704_101_SL_seq_2722
cctttggagaaggaggtgga

SEQ ID NO: 2723 - DNA, 20 bp, Homo sapiens
  source 1..20: mol_type = genomic DNA; note = Gene: CERKL; note = Location (start to end; relative to TSS): CERKL_69_99; note = Orientation (relative to transcription): antisense; note = sgRNA Position: 181657032; note = Sequence Name: 56322-704_101_SL_seq_2723
cgcaggctgggcccgagcca

SEQ ID NO: 2724 - DNA, 20 bp, Homo sapiens
  source 1..20: mol_type = genomic DNA; note = Gene: CERKL; note = Location (start to end; relative to TSS): CERKL_36_66; note = Orientation (relative to transcription): antisense; note = sgRNA Position: 181657065; note = Sequence Name: 56322-704_101_SL_seq_2724
gcctttggagaaggaggtgg

SEQ ID NO: 2725 - DNA, 20 bp, Homo sapiens
  source 1..20: mol_type = genomic DNA; note = Gene: CERKL; note = Location (start to end; relative to TSS): CERKL_68_98; note = Orientation (relative to transcription): antisense; note = sgRNA Position: 181657033; note = Sequence Name: 56322-704_101_SL_seq_2725
gcaggctgggcccgagccag

SEQ ID NO: 2726 - DNA, 20 bp, Homo sapiens
  source 1..20: mol_type = genomic DNA; note = Gene: CERKL; note = Location (start to end; relative to TSS): CERKL_30_60; note = Orientation (relative to transcription): antisense; note = sgRNA Position: 181657071; note = Sequence Name: 56322-704_101_SL_seq_2726
ggagaaggaggtggagggcg

SEQ ID NO: 2727 - DNA, 20 bp, Homo sapiens
  source 1..20: mol_type = genomic DNA; note = Gene: CERKL; note = Location (start to end; relative to TSS): CERKL_61_91; note = Orientation (relative to transcription): antisense; note = sgRNA Position: 181657040; note = Sequence Name: 56322-704_101_SL_seq_2727
gggcccgagccaggggtccg

SEQ ID NO: 2728 - DNA, 20 bp, Homo sapiens
  source 1..20: mol_type = genomic DNA; note = Gene: CERKL; note = Location (start to end; relative to TSS): CERKL_26_56; note = Orientation (relative to transcription): sense; note = sgRNA Position: 181657055; note = Sequence Name: 56322-704_101_SL_seq_2728
ccctccacctccttctccaa

SEQ ID NO: 2729 - DNA, 20 bp, Homo sapiens
  source 1..20: mol_type = genomic DNA; note = Gene: CERKL; note = Location (start to end; relative to TSS): CERKL_58_88; note = Orientation (relative to transcription): antisense; note = sgRNA Position: 181657043; note = Sequence Name: 56322-704_101_SL_seq_2729
cccgagccaggggtccgggg

SEQ ID NO: 2730 - DNA, 20 bp, Homo sapiens
  source 1..20: mol_type = genomic DNA; note = Gene: CERT1; note = Location (start to end; relative to TSS): CERT1_39_69; note = Orientation (relative to transcription): sense; note = sgRNA Position: 75511566; note = Sequence Name: 56322-704_101_SL_seq_2730
tggacgcgggactcagcggc

SEQ ID NO: 2731 - DNA, 20 bp, Homo sapiens
  source 1..20: mol_type = genomic DNA; note = Gene: CERT1; note = Location (start to end; relative to TSS): CERT1_91_121; note = Orientation (relative to transcription): antisense; note = sgRNA Position: 75511534; note = Sequence Name: 56322-704_101_SL_seq_2731
tttcaaatagggaaggaaaa

SEQ ID NO: 2732 - DNA, 20 bp, Homo sapiens
  source 1..20: mol_type = genomic DNA; note = Gene: CERT1; note = Location (start to end; relative to TSS): CERT1_19_49; note = Orientation (relative to transcription): sense; note = sgRNA Position: 75511586; note = Sequence Name: 56322-704_101_SL_seq_2732
ggcggtagcggaggtgtgag

SEQ ID NO: 2733 - DNA, 20 bp, Homo sapiens
  source 1..20: mol_type = genomic DNA; note = Gene: CERT1; note = Location (start to end; relative to TSS): CERT1_86_116; note = Orientation (relative to transcription): sense; note = sgRNA Position: 75511519; note = Sequence Name: 56322-704_101_SL_seq_2733
tttccttccctatttgaaat

SEQ ID NO: 2734 - DNA, 20 bp, Homo sapiens
  source 1..20: mol_type = genomic DNA; note = Gene: CERT1; note = Location (start to end; relative to TSS): CERT1_25_55; note = Orientation (relative to transcription): sense; note = sgRNA Position: 75511580; note = Sequence Name: 56322-704_101_SL_seq_2734
agcggaggtgtgagtggacg

SEQ ID NO: 2735 - DNA, 20 bp, Homo sapiens
  source 1..20: mol_type = genomic DNA; note = Gene: CERT1; note = Location (start to end; relative to TSS): CERT1_82_112; note = Orientation (relative to transcription): antisense; note = sgRNA Position: 75511543; note = Sequence Name: 56322-704_101_SL_seq_2735
gggaaggaaaagggaaaaga

SEQ ID NO: 2736 - DNA, 20 bp, Homo sapiens
  source 1..20: mol_type = genomic DNA; note = Gene: CERT1; note = Location (start to end; relative to TSS): CERT1_35_65; note = Orientation (relative to transcription): sense; note = sgRNA Position: 75511570; note = Sequence Name: 56322-704_101_SL_seq_2736
tgagtggacgcgggactcag

SEQ ID NO: 2737 - DNA, 20 bp, Homo sapiens
  source 1..20: mol_type = genomic DNA; note = Gene: CERT1; note = Location (start to end; relative to TSS): CERT1_81_111; note = Orientation (relative to transcription): antisense; note = sgRNA Position: 75511544; note = Sequence Name: 56322-704_101_SL_seq_2737
ggaaggaaaagggaaaagaa

SEQ ID NO: 2738 - DNA, 20 bp, Homo sapiens
  source 1..20: mol_type = genomic DNA; note = Gene: CERT1; note = Location (start to end; relative to TSS): CERT1_26_56; note = Orientation (relative to transcription): sense; note = sgRNA Position: 75511579; note = Sequence Name: 56322-704_101_SL_seq_2738
gcggaggtgtgagtggacgc

SEQ ID NO: 2739 - DNA, 20 bp, Homo sapiens
  source 1..20: mol_type = genomic DNA; note = Gene: CERT1; note = Location (start to end; relative to TSS): CERT1_67_97; note = Orientation (relative to transcription): antisense; note = sgRNA Position: 75511558; note = Sequence Name: 56322-704_101_SL_seq_2739
aaagaagggaagagaaaatc

SEQ ID NO: 2740 - DNA, 20 bp, Homo sapiens
  source 1..20: mol_type = genomic DNA; note = Gene: CHEK1; note = Location (start to end; relative to TSS): CHEK1_74_104; note = Orientation (relative to transcription): antisense; note = sgRNA Position: 125625243; note = Sequence Name: 56322-704_101_SL_seq_2740
cttcagcccggtctttttgc

SEQ ID NO: 2741 - DNA, 20 bp, Homo sapiens
  source 1..20: mol_type = genomic DNA; note = Gene: CHEK1; note = Location (start to end; relative to TSS): CHEK1_111_141; note = Orientation (relative to transcription): sense; note = sgRNA Position: 125625300; note = Sequence Name: 56322-704_101_SL_seq_2741
tcacagaaaaaaggcaaaac

SEQ ID NO: 2742 - DNA, 20 bp, Homo sapiens
  source 1..20: mol_type = genomic DNA; note = Gene: CHEK1; note = Location (start to end; relative to TSS): CHEK1_14_44; note = Orientation (relative to transcription): antisense; note = sgRNA Position: 125625183; note = Sequence Name: 56322-704_101_SL_seq_2742
atttttaatgtgcaaagaac

SEQ ID NO: 2743 - DNA, 20 bp, Homo sapiens
  source 1..20: mol_type = genomic DNA; note = Gene: CHEK1; note = Location (start to end; relative to TSS): CHEK1_87_117; note = Orientation (relative to transcription): sense; note = sgRNA Position: 125625276; note = Sequence Name: 56322-704_101_SL_seq_2743
gtaaagcattgttttggagc

SEQ ID NO: 2744 - DNA, 20 bp, Homo sapiens
  source 1..20: mol_type = genomic DNA; note = Gene: CHEK1; note = Location (start to end; relative to TSS): CHEK1_11_41; note = Orientation (relative to transcription): antisense; note = sgRNA Position: 125625180; note = Sequence Name: 56322-704_101_SL_seq_2744
tttaatgtgcaaagaacagg

SEQ ID NO: 2745 - DNA, 20 bp, Homo sapiens
  source 1..20: mol_type = genomic DNA; note = Gene: CHEK1; note = Location (start to end; relative to TSS): CHEK1_86_116; note = Orientation (relative to transcription): antisense; note = sgRNA Position: 125625255; note = Sequence Name: 56322-704_101_SL_seq_2745
aacaatgctttacttcagcc

SEQ ID NO: 2746 - DNA, 20 bp, Homo sapiens
  source 1..20: mol_type = genomic DNA; note = Gene: CHEK1; note = Location (start to end; relative to TSS): CHEK1_10_40; note = Orientation (relative to transcription): antisense; note = sgRNA Position: 125625179; note = Sequence Name: 56322-704_101_SL_seq_2746
ttaatgtgcaaagaacaggc

SEQ ID NO: 2747 - DNA, 20 bp, Homo sapiens
  source 1..20: mol_type = genomic DNA; note = Gene: CHEK1; note = Location (start to end; relative to TSS): CHEK1_81_111; note = Orientation (relative to transcription): sense; note = sgRNA Position: 125625270; note = Sequence Name: 56322-704_101_SL_seq_2747
gctgaagtaaagcattgttt

SEQ ID NO: 2748 - DNA, 20 bp, Homo sapiens
  source 1..20: mol_type = genomic DNA; note = Gene: CHEK1; note = Location (start to end; relative to TSS): CHEK1_9_39; note = Orientation (relative to transcription): antisense; note = sgRNA Position: 125625178; note = Sequence Name: 56322-704_101_SL_seq_2748
taatgtgcaaagaacaggcg

SEQ ID NO: 2749 - DNA, 20 bp, Homo sapiens
  source 1..20: mol_type = genomic DNA; note = Gene: CHEK1; note = Location (start to end; relative to TSS): CHEK1_74_104; note = Orientation (relative to transcription): antisense; note = sgRNA Position: 125625243; note = Sequence Name: 56322-704_101_SL_seq_2749
cttcagcccggtctttttgc

SEQ ID NO: 2750 - DNA, 20 bp, Homo sapiens
  source 1..20: mol_type = genomic DNA; note = Gene: CHEK2; note = Location (start to end; relative to TSS): CHEK2_35_65; note = Orientation (relative to transcription): sense; note = sgRNA Position: 28741761; note = Sequence Name: 56322-704_101_SL_seq_2750
gctcacgcggtgagtcatat

SEQ ID NO: 2751 - DNA, 20 bp, Homo sapiens
  source 1..20: mol_type = genomic DNA; note = Gene: CHEK2; note = Location (start to end; relative to TSS): CHEK2_130_160; note = Orientation (relative to transcription): antisense; note = sgRNA Position: 28741686; note = Sequence Name: 56322-704_101_SL_seq_2751
ctacagacaaagcgaagctc

SEQ ID NO: 2752 - DNA, 20 bp, Homo sapiens
  source 1..20: mol_type = genomic DNA; note = Gene: CHEK2; note = Location (start to end; relative to TSS): CHEK2_36_66; note = Orientation (relative to transcription): sense; note = sgRNA Position: 28741760; note = Sequence Name: 56322-704_101_SL_seq_2752
ctcacgcggtgagtcatatg

SEQ ID NO: 2753 - DNA, 20 bp, Homo sapiens
  source 1..20: mol_type = genomic DNA; note = Gene: CHEK2; note = Location (start to end; relative to TSS): CHEK2_99_129; note = Orientation (relative to transcription): antisense; note = sgRNA Position: 28741717; note = Sequence Name: 56322-704_101_SL_seq_2753
ttcgcacaaaacgcttaaga

SEQ ID NO: 2754 - DNA, 20 bp, Homo sapiens
  source 1..20: mol_type = genomic DNA; note = Gene: CHEK2; note = Location (start to end; relative to TSS): CHEK2_48_78; note = Orientation (relative to transcription): sense; note = sgRNA Position: 28741748; note = Sequence Name: 56322-704_101_SL_seq_2754
gtcatatggggaacttctgt

SEQ ID NO: 2755 - DNA, 20 bp, Homo sapiens
  source 1..20: mol_type = genomic DNA; note = Gene: CHEK2; note = Location (start to end; relative to TSS): CHEK2_98_128; note = Orientation (relative to transcription): antisense; note = sgRNA Position: 28741718; note = Sequence Name: 56322-704_101_SL_seq_2755
tcgcacaaaacgcttaagat

SEQ ID NO: 2756 - DNA, 20 bp, Homo sapiens
  source 1..20: mol_type = genomic DNA; note = Gene: CHEK2; note = Location (start to end; relative to TSS): CHEK2_49_79; note = Orientation (relative to transcription): sense; note = sgRNA Position: 28741747; note = Sequence Name: 56322-704_101_SL_seq_2756
tcatatggggaacttctgtt

SEQ ID NO: 2757 - DNA, 20 bp, Homo sapiens
  source 1..20: mol_type = genomic DNA; note = Gene: CHEK2; note = Location (start to end; relative to TSS): CHEK2_93_123; note = Orientation (relative to transcription): sense; note = sgRNA Position: 28741703; note = Sequence Name: 56322-704_101_SL_seq_2757
tcttaagcgttttgtgcgaa

SEQ ID NO: 2758 - DNA, 20 bp, Homo sapiens
  source 1..20: mol_type = genomic DNA; note = Gene: CHEK2; note = Location (start to end; relative to TSS): CHEK2_22_52; note = Orientation (relative to transcription): sense; note = sgRNA Position: 28741774; note = Sequence Name: 56322-704_101_SL_seq_2758
cggctccaggtgggctcacg

SEQ ID NO: 2759 - DNA, 20 bp, Homo sapiens
  source 1..20: mol_type = genomic DNA; note = Gene: CHEK2; note = Location (start to end; relative to TSS): CHEK2_59_89; note = Orientation (relative to transcription): sense; note = sgRNA Position: 28741737; note = Sequence Name: 56322-704_101_SL_seq_2759
aacttctgttgggtgtttgg

SEQ ID NO: 2760 - DNA, 20 bp, Homo sapiens
  source 1..20: mol_type = genomic DNA; note = Gene: CHKA; note = Location (start to end; relative to TSS): CHKA_39_69; note = Orientation (relative to transcription): antisense; note = sgRNA Position: 68121345; note = Sequence Name: 56322-704_101_SL_seq_2760
tgcggcgactgcggcgactg

SEQ ID NO: 2761 - DNA, 20 bp, Homo sapiens
  source 1..20: mol_type = genomic DNA; note = Gene: CHKA; note = Location (start to end; relative to TSS): CHKA_100_130; note = Orientation (relative to transcription): antisense; note = sgRNA Position: 68121284; note = Sequence Name: 56322-704_101_SL_seq_2761
actggcaggccggcggggca

SEQ ID NO: 2762 - DNA, 20 bp, Homo sapiens
  source 1..20: mol_type = genomic DNA; note = Gene: CHKA; note = Location (start to end; relative to TSS): CHKA_34_64; note = Orientation (relative to transcription): antisense; note = sgRNA Position: 68121350; note = Sequence Name: 56322-704_101_SL_seq_2762
cgactgcggcgactgtggag

SEQ ID NO: 2763 - DNA, 20 bp, Homo sapiens
  source 1..20: mol_type = genomic DNA; note = Gene: CHKA; note = Location (start to end; relative to TSS): CHKA_89_119; note = Orientation (relative to transcription): antisense; note = sgRNA Position: 68121295; note = Sequence Name: 56322-704_101_SL_seq_2763
ggcggggcagggggccgcgg

SEQ ID NO: 2764 - DNA, 20 bp, Homo sapiens
  source 1..20: mol_type = genomic DNA; note = Gene: CHKA; note = Location (start to end; relative to TSS): CHKA_33_63; note = Orientation (relative to transcription): antisense; note = sgRNA Position: 68121351; note = Sequence Name: 56322-704_101_SL_seq_2764
gactgcggcgactgtggagc

SEQ ID NO: 2765 - DNA, 20 bp, Homo sapiens
  source 1..20: mol_type = genomic DNA; note = Gene: CHKA; note = Location (start to end; relative to TSS): CHKA_82_112; note = Orientation (relative to transcription): sense; note = sgRNA Position: 68121282; note = Sequence Name: 56322-704_101_SL_seq_2765
gccgcggccccctgccccgc

SEQ ID NO: 2766 - DNA, 20 bp, Homo sapiens
  source 1..20: mol_type = genomic DNA; note = Gene: CHKA; note = Location (start to end; relative to TSS): CHKA_32_62; note = Orientation (relative to transcription): antisense; note = sgRNA Position: 68121352; note = Sequence Name: 56322-704_101_SL_seq_2766
actgcggcgactgtggagcg

SEQ ID NO: 2767 - DNA, 20 bp, Homo sapiens
  source 1..20: mol_type = genomic DNA; note = Gene: CHKA; note = Location (start to end; relative to TSS): CHKA_75_105; note = Orientation (relative to transcription): antisense; note = sgRNA Position: 68121309; note = Sequence Name: 56322-704_101_SL_seq_2767
ccgcggcggttgggcgcgcg

SEQ ID NO: 2768 - DNA, 20 bp, Homo sapiens
  source 1..20: mol_type = genomic DNA; note = Gene: CHKA; note = Location (start to end; relative to TSS): CHKA_20_50; note = Orientation (relative to transcription): antisense; note = sgRNA Position: 68121364; note = Sequence Name: 56322-704_101_SL_seq_2768
gtggagcggggatgtgctgc

SEQ ID NO: 2769 - DNA, 20 bp, Homo sapiens
  source 1..20: mol_type = genomic DNA; note = Gene: CHKA; note = Location (start to end; relative to TSS): CHKA_66_96; note = Orientation (relative to transcription): sense; note = sgRNA Position: 68121298; note = Sequence Name: 56322-704_101_SL_seq_2769
ccccgcgcgcccaaccgccg

SEQ ID NO: 2770 - DNA, 20 bp, Homo sapiens
  source 1..20: mol_type = genomic DNA; note = Gene: CHKB; note = Location (start to end; relative to TSS): CHKB_44_74; note = Orientation (relative to transcription): sense; note = sgRNA Position: 50582781; note = Sequence Name: 56322-704_101_SL_seq_2770
cggtcgagcccgcgccatgg

SEQ ID NO: 2771 - DNA, 20 bp, Homo sapiens
  source 1..20: mol_type = genomic DNA; note = Gene: CHKB; note = Location (start to end; relative to TSS): CHKB_74_104; note = Orientation (relative to transcription): sense; note = sgRNA Position: 50582751; note = Sequence Name: 56322-704_101_SL_seq_2771
gacagctgtggccggaagcg

SEQ ID NO: 2772 - DNA, 20 bp, Homo sapiens
  source 1..20: mol_type = genomic DNA; note = Gene: CHKB; note = Location (start to end; relative to TSS): CHKB_39_69; note = Orientation (relative to transcription): antisense; note = sgRNA Position: 50582806; note = Sequence Name: 56322-704_101_SL_seq_2772
gctcgaccgggccccaggcc

SEQ ID NO: 2773 - DNA, 20 bp, Homo sapiens
  source 1..20: mol_type = genomic DNA; note = Gene: CHKB; note = Location (start to end; relative to TSS): CHKB_73_103; note = Orientation (relative to transcription): sense; note = sgRNA Position: 50582752; note = Sequence Name: 56322-704_101_SL_seq_2773
cgacagctgtggccggaagc

SEQ ID NO: 2774 - DNA, 20 bp, Homo sapiens
  source 1..20: mol_type = genomic DNA; note = Gene: CHKB; note = Location (start to end; relative to TSS): CHKB_41_71; note = Orientation (relative to transcription): sense; note = sgRNA Position: 50582784; note = Sequence Name: 56322-704_101_SL_seq_2774
gcccggtcgagcccgcgcca

SEQ ID NO: 2775 - DNA, 20 bp, Homo sapiens
  source 1..20: mol_type = genomic DNA; note = Gene: CHKB; note = Location (start to end; relative to TSS): CHKB_72_102; note = Orientation (relative to transcription): sense; note = sgRNA Position: 50582753; note = Sequence Name: 56322-704_101_SL_seq_2775
gcgacagctgtggccggaag

SEQ ID NO: 2776 - DNA, 20 bp, Homo sapiens
  source 1..20: mol_type = genomic DNA; note = Gene: CHKB; note = Location (start to end; relative to TSS): CHKB_24_54; note = Orientation (relative to transcription): sense; note = sgRNA Position: 50582801; note = Sequence Name: 56322-704_101_SL_seq_2776
gcgcagcctggcctggggcc

SEQ ID NO: 2777 - DNA, 20 bp, Homo sapiens
  source 1..20: mol_type = genomic DNA; note = Gene: CHKB; note = Location (start to end; relative to TSS): CHKB_61_91; note = Orientation (relative to transcription): antisense; note = sgRNA Position: 50582784; note = Sequence Name: 56322-704_101_SL_seq_2777
cgcctcggccgccatggcgc

SEQ ID NO: 2778 - DNA, 20 bp, Homo sapiens
  source 1..20: mol_type = genomic DNA; note = Gene: CHKB; note = Location (start to end; relative to TSS): CHKB_19_49; note = Orientation (relative to transcription): sense; note = sgRNA Position: 50582806; note = Sequence Name: 56322-704_101_SL_seq_2778
gcggagcgcagcctggcctg

SEQ ID NO: 2779 - DNA, 20 bp, Homo sapiens
  source 1..20: mol_type = genomic DNA; note = Gene: CHKB; note = Location (start to end; relative to TSS): CHKB_50_80; note = Orientation (relative to transcription): sense; note = sgRNA Position: 50582775; note = Sequence Name: 56322-704_101_SL_seq_2779
agcccgcgccatggcggccg

SEQ ID NO: 2780 - DNA, 20 bp, Homo sapiens
  source 1..20: mol_type = genomic DNA; note = Gene: CHUK; note = Location (start to end; relative to TSS): CHUK_46_76; note = Orientation (relative to transcription): antisense; note = sgRNA Position: 100229546; note = Sequence Name: 56322-704_101_SL_seq_2780
ccatggggcgggagggcaag

SEQ ID NO: 2781 - DNA, 20 bp, Homo sapiens
  source 1..20: mol_type = genomic DNA; note = Gene: CHUK; note = Location (start to end; relative to TSS): CHUK_89_119; note = Orientation (relative to transcription): antisense; note = sgRNA Position: 100229503; note = Sequence Name: 56322-704_101_SL_seq_2781
tcccagggcccgcccgcgcc

SEQ ID NO: 2782 - DNA, 20 bp, Homo sapiens
  source 1..20: mol_type = genomic DNA; note = Gene: CHUK; note = Location (start to end; relative to TSS): CHUK_37_67; note = Orientation (relative to transcription): sense; note = sgRNA Position: 100229535; note = Sequence Name: 56322-704_101_SL_seq_2782
ccgcttgccctcccgcccca

SEQ ID NO: 2783 - DNA, 20 bp, Homo sapiens
  source 1..20: mol_type = genomic DNA; note = Gene: CHUK; note = Location (start to end; relative to TSS): CHUK_88_118; note = Orientation (relative to transcription): sense; note = sgRNA Position: 100229484; note = Sequence Name: 56322-704_101_SL_seq_2783
gggcgggccctgggagatgc

SEQ ID NO: 2784 - DNA, 20 bp, Homo sapiens
  source 1..20: mol_type = genomic DNA; note = Gene: CHUK; note = Location (start to end; relative to TSS): CHUK_39_69; note = Orientation (relative to transcription): antisense; note = sgRNA Position: 100229553; note = Sequence Name: 56322-704_101_SL_seq_2784
gcgggagggcaagcggcctc

SEQ ID NO: 2785 - DNA, 20 bp, Homo sapiens
  source 1..20: mol_type = genomic DNA; note = Gene: CHUK; note = Location (start to end; relative to TSS): CHUK_75_105; note = Orientation (relative to transcription): antisense; note = sgRNA Position: 100229517; note = Sequence Name: 56322-704_101_SL_seq_2785
cgcgcccggccgcagccccg

SEQ ID NO: 2786 - DNA, 20 bp, Homo sapiens
  source 1..20: mol_type = genomic DNA; note = Gene: CHUK; note = Location (start to end; relative to TSS): CHUK_42_72; note = Orientation (relative to transcription): sense; note = sgRNA Position: 100229530; note = Sequence Name: 56322-704_101_SL_seq_2786
tgccctcccgccccatggag

SEQ ID NO: 2787 - DNA, 20 bp, Homo sapiens
  source 1..20: mol_type = genomic DNA; note = Gene: CHUK; note = Location (start to end; relative to TSS): CHUK_74_104; note = Orientation (relative to transcription): antisense; note = sgRNA Position: 100229518; note = Sequence Name: 56322-704_101_SL_seq_2787
gcgcccggccgcagccccgg

SEQ ID NO: 2788 - DNA, 20 bp, Homo sapiens
  source 1..20: mol_type = genomic DNA; note = Gene: CHUK; note = Location (start to end; relative to TSS): CHUK_20_50; note = Orientation (relative to transcription): antisense; note = sgRNA Position: 100229572; note = Sequence Name: 56322-704_101_SL_seq_2788
caggttccacagttgttcca

SEQ ID NO: 2789 - DNA, 20 bp, Homo sapiens
  source 1..20: mol_type = genomic DNA; note = Gene: CHUK; note = Location (start to end; relative to TSS): CHUK_51_81; note = Orientation (relative to transcription): sense; note = sgRNA Position: 100229521; note = Sequence Name: 56322-704_101_SL_seq_2789
gccccatggagcggcccccg

SEQ ID NO: 2790 - DNA, 20 bp, Homo sapiens
  source 1..20: mol_type = genomic DNA; note = Gene: CILK1; note = Location (start to end; relative to TSS): CILK1_51_81; note = Orientation (relative to transcription): antisense; note = sgRNA Position: 53061769; note = Sequence Name: 56322-704_101_SL_seq_2790
cgcacgggccgcacggcgca

SEQ ID NO: 2791 - DNA, 20 bp, Homo sapiens
  source 1..20: mol_type = genomic DNA; note = Gene: CILK1; note = Location (start to end; relative to TSS): CILK1_83_113; note = Orientation (relative to transcription): sense; note = sgRNA Position: 53061717; note = Sequence Name: 56322-704_101_SL_seq_2791
gcgtccctgtacggagccct

SEQ ID NO: 2792 - DNA, 20 bp, Homo sapiens
  source 1..20: mol_type = genomic DNA; note = Gene: CILK1; note = Location (start to end; relative to TSS): CILK1_39_69; note = Orientation (relative to transcription): antisense; note = sgRNA Position: 53061781; note = Sequence Name: 56322-704_101_SL_seq_2792
acggcgcatggtagtgcagc

SEQ ID NO: 2793 - DNA, 20 bp, Homo sapiens
  source 1..20: mol_type = genomic DNA; note = Gene: CILK1; note = Location (start to end; relative to TSS): CILK1_74_104; note = Orientation (relative to transcription): sense; note = sgRNA Position: 53061726; note = Sequence Name: 56322-704_101_SL_seq_2793
acctcgcgggcgtccctgta

SEQ ID NO: 2794 - DNA, 20 bp, Homo sapiens
  source 1..20: mol_type = genomic DNA; note = Gene: CILK1; note = Location (start to end; relative to TSS): CILK1_32_62; note = Orientation (relative to transcription): antisense; note = sgRNA Position: 53061788; note = Sequence Name: 56322-704_101_SL_seq_2794
atggtagtgcagcaggaacc

SEQ ID NO: 2795 - DNA, 20 bp, Homo sapiens
  source 1..20: mol_type = genomic DNA; note = Gene: CILK1; note = Location (start to end; relative to TSS): CILK1_67_97; note = Orientation (relative to transcription): antisense; note = sgRNA Position: 53061753; note = Sequence Name: 56322-704_101_SL_seq_2795
gcgaggtccggcgagtcgca

SEQ ID NO: 2796 - DNA, 20 bp, Homo sapiens
  source 1..20: mol_type = genomic DNA; note = Gene: CILK1; note = Location (start to end; relative to TSS): CILK1_34_64; note = Orientation (relative to transcription): sense; note = sgRNA Position: 53061766; note = Sequence Name: 56322-704_101_SL_seq_2796
ctgcactaccatgcgccgtg

SEQ ID NO: 2797 - DNA, 20 bp, Homo sapiens
  source 1..20: mol_type = genomic DNA; note = Gene: CILK1; note = Location (start to end; relative to TSS): CILK1_66_96; note = Orientation (relative to transcription): antisense; note = sgRNA Position: 53061754; note = Sequence Name: 56322-704_101_SL_seq_2797
cgaggtccggcgagtcgcac

SEQ ID NO: 2798 - DNA, 20 bp, Homo sapiens
  source 1..20: mol_type = genomic DNA; note = Gene: CILK1; note = Location (start to end; relative to TSS): CILK1_14_44; note = Orientation (relative to transcription): antisense; note = sgRNA Position: 53061806; note = Sequence Name: 56322-704_101_SL_seq_2798
cccggccgttttccagcctc

SEQ ID NO: 2799 - DNA, 20 bp, Homo sapiens
  source 1..20: mol_type = genomic DNA; note = Gene: CILK1; note = Location (start to end; relative to TSS): CILK1_51_81; note = Orientation (relative to transcription): antisense; note = sgRNA Position: 53061769; note = Sequence Name: 56322-704_101_SL_seq_2799
cgcacgggccgcacggcgca

SEQ ID NO: 2800 - DNA, 20 bp, Homo sapiens
  source 1..20: mol_type = genomic DNA; note = Gene: CIT; note = Location (start to end; relative to TSS): CIT_55_85; note = Orientation (relative to transcription): antisense; note = sgRNA Position: 119877261; note = Sequence Name: 56322-704_101_SL_seq_2800
ctcacgctctgcgaaccccc

SEQ ID NO: 2801 - DNA, 20 bp, Homo sapiens
  source 1..20: mol_type = genomic DNA; note = Gene: CIT; note = Location (start to end; relative to TSS): CIT_87_117; note = Orientation (relative to transcription): antisense; note = sgRNA Position: 119877229; note = Sequence Name: 56322-704_101_SL_seq_2801
gggtgcggtagaattgggtc

SEQ ID NO: 2802 - DNA, 20 bp, Homo sapiens
  source 1..20: mol_type = genomic DNA; note = Gene: CIT; note = Location (start to end; relative to TSS): CIT_29_59; note = Orientation (relative to transcription): sense; note = sgRNA Position: 119877267; note = Sequence Name: 56322-704_101_SL_seq_2802
gcggaacagatcgcagacct

SEQ ID NO: 2803 - DNA, 20 bp, Homo sapiens
  source 1..20: mol_type = genomic DNA; note = Gene: CIT; note = Location (start to end; relative to TSS): CIT_86_116; note = Orientation (relative to transcription): antisense; note = sgRNA Position: 119877230; note = Sequence Name: 56322-704_101_SL_seq_2803
ggtgcggtagaattgggtct

SEQ ID NO: 2804 - DNA, 20 bp, Homo sapiens
  source 1..20: mol_type = genomic DNA; note = Gene: CIT; note = Location (start to end; relative to TSS): CIT_28_58; note = Orientation (relative to transcription): sense; note = sgRNA Position: 119877268; note = Sequence Name: 56322-704_101_SL_seq_2804
ggcggaacagatcgcagacc

SEQ ID NO: 2805 - DNA, 20 bp, Homo sapiens
  source 1..20: mol_type = genomic DNA; note = Gene: CIT; note = Location (start to end; relative to TSS): CIT_85_115; note = Orientation (relative to transcription): antisense; note = sgRNA Position: 119877231; note = Sequence Name: 56322-704_101_SL_seq_2805
gtgcggtagaattgggtctg

SEQ ID NO: 2806 - DNA, 20 bp, Homo sapiens
  source 1..20: mol_type = genomic DNA; note = Gene: CIT; note = Location (start to end; relative to TSS): CIT_30_60; note = Orientation (relative to transcription): sense; note = sgRNA Position: 119877266; note = Sequence Name: 56322-704_101_SL_seq_2806
cggaacagatcgcagacctg

SEQ ID NO: 2807 - DNA, 20 bp, Homo sapiens
  source 1..20: mol_type = genomic DNA; note = Gene: CIT; note = Location (start to end; relative to TSS): CIT_84_114; note = Orientation (relative to transcription): antisense; note = sgRNA Position: 119877232; note = Sequence Name: 56322-704_101_SL_seq_2807
tgcggtagaattgggtctgg

SEQ ID NO: 2808 - DNA, 20 bp, Homo sapiens
  source 1..20: mol_type = genomic DNA; note = Gene: CIT; note = Location (start to end; relative to TSS): CIT_31_61; note = Orientation (relative to transcription): sense; note = sgRNA Position: 119877265; note = Sequence Name: 56322-704_101_SL_seq_2808
ggaacagatcgcagacctgg

SEQ ID NO: 2809 - DNA, 20 bp, Homo sapiens
  source 1..20: mol_type = genomic DNA; note = Gene: CIT; note = Location (start to end; relative to TSS): CIT_80_110; note = Orientation (relative to transcription): sense; note = sgRNA Position: 119877216; note = Sequence Name: 56322-704_101_SL_seq_2809
agacccaattctaccgcacc

SEQ ID NO: 2810 - DNA, 20 bp, Homo sapiens
  source 1..20: mol_type = genomic DNA; note = Gene: CKB; note = Location (start to end; relative to TSS): CKB_48_78; note = Orientation (relative to transcription): antisense; note = sgRNA Position: 103522778; note = Sequence Name: 56322-704_101_SL_seq_2810
ctcaccgggcggccgggcgg

SEQ ID NO: 2811 - DNA, 20 bp, Homo sapiens
  source 1..20: mol_type = genomic DNA; note = Gene: CKB; note = Location (start to end; relative to TSS): CKB_78_108; note = Orientation (relative to transcription): sense; note = sgRNA Position: 103522728; note = Sequence Name: 56322-704_101_SL_seq_2811
gggcgtccgcgcccgggcta

SEQ ID NO: 2812 - DNA, 20 bp, Homo sapiens
  source 1..20: mol_type = genomic DNA; note = Gene: CKB; note = Location (start to end; relative to TSS): CKB_35_65; note = Orientation (relative to transcription): sense; note = sgRNA Position: 103522771; note = Sequence Name: 56322-704_101_SL_seq_2812
cccgcccccgcccggccgcc

SEQ ID NO: 2813 - DNA, 20 bp, Homo sapiens
  source 1..20: mol_type = genomic DNA; note = Gene: CKB; note = Location (start to end; relative to TSS): CKB_75_105; note = Orientation (relative to transcription): antisense; note = sgRNA Position: 103522751; note = Sequence Name: 56322-704_101_SL_seq_2813
cgcggacgcccccggccccc

SEQ ID NO: 2814 - DNA, 20 bp, Homo sapiens
  source 1..20: mol_type = genomic DNA; note = Gene: CKB; note = Location (start to end; relative to TSS): CKB_42_72; note = Orientation (relative to transcription): sense; note = sgRNA Position: 103522764; note = Sequence Name: 56322-704_101_SL_seq_2814
ccgcccggccgcccggtgag

SEQ ID NO: 2815 - DNA, 20 bp, Homo sapiens
  source 1..20: mol_type = genomic DNA; note = Gene: CKB; note = Location (start to end; relative to TSS): CKB_72_102; note = Orientation (relative to transcription): sense; note = sgRNA Position: 103522734; note = Sequence Name: 56322-704_101_SL_seq_2815
ggccgggggcgtccgcgccc

SEQ ID NO: 2816 - DNA, 20 bp, Homo sapiens
  source 1..20: mol_type = genomic DNA; note = Gene: CKB; note = Location (start to end; relative to TSS): CKB_27_57; note = Orientation (relative to transcription): antisense; note = sgRNA Position: 103522799; note = Sequence Name: 56322-704_101_SL_seq_2816
ggcgggggcgctccgtccgt

SEQ ID NO: 2817 - DNA, 20 bp, Homo sapiens
  source 1..20: mol_type = genomic DNA; note = Gene: CKB; note = Location (start to end; relative to TSS): CKB_58_88; note = Orientation (relative to transcription): sense; note = sgRNA Position: 103522748; note = Sequence Name: 56322-704_101_SL_seq_2817
tgagtgggcccgggggccgg

SEQ ID NO: 2818 - DNA, 20 bp, Homo sapiens
  source 1..20: mol_type = genomic DNA; note = Gene: CKB; note = Location (start to end; relative to TSS): CKB_17_47; note = Orientation (relative to transcription): antisense; note = sgRNA Position: 103522809; note = Sequence Name: 56322-704_101_SL_seq_2818
ctccgtccgtcggcagctcc

SEQ ID NO: 2819 - DNA, 20 bp, Homo sapiens
  source 1..20: mol_type = genomic DNA; note = Gene: CKB; note = Location (start to end; relative to TSS): CKB_48_78; note = Orientation (relative to transcription): antisense; note = sgRNA Position: 103522778; note = Sequence Name: 56322-704_101_SL_seq_2819
ctcaccgggcggccgggcgg

SEQ ID NO: 2820 - DNA, 20 bp, Homo sapiens
  source 1..20: mol_type = genomic DNA; note = Gene: CKM; note = Location (start to end; relative to TSS): CKM_31_61; note = Orientation (relative to transcription): antisense; note = sgRNA Position: 45322840; note = Sequence Name: 56322-704_101_SL_seq_2820
ggctgggctgggctgaaggg

SEQ ID NO: 2821 - DNA, 20 bp, Homo sapiens
  source 1..20: mol_type = genomic DNA; note = Gene: CKM; note = Location (start to end; relative to TSS): CKM_98_128; note = Orientation (relative to transcription): sense; note = sgRNA Position: 45322753; note = Sequence Name: 56322-704_101_SL_seq_2821
gggtgctagaggcttggctt

SEQ ID NO: 2822 - DNA, 20 bp, Homo sapiens
  source 1..20: mol_type = genomic DNA; note = Gene: CKM; note = Location (start to end; relative to TSS): CKM_32_62; note = Orientation (relative to transcription): antisense; note = sgRNA Position: 45322839; note = Sequence Name: 56322-704_101_SL_seq_2822
tggctgggctgggctgaagg

SEQ ID NO: 2823 - DNA, 20 bp, Homo sapiens
  source 1..20: mol_type = genomic DNA; note = Gene: CKM; note = Location (start to end; relative to TSS): CKM_97_127; note = Orientation (relative to transcription): sense; note = sgRNA Position: 45322754; note = Sequence Name: 56322-704_101_SL_seq_2823
tgggtgctagaggcttggct

SEQ ID NO: 2824 - DNA, 20 bp, Homo sapiens
  source 1..20: mol_type = genomic DNA; note = Gene: CKM; note = Location (start to end; relative to TSS): CKM_34_64; note = Orientation (relative to transcription): antisense; note = sgRNA Position: 45322837; note = Sequence Name: 56322-704_101_SL_seq_2824
cctggctgggctgggctgaa

SEQ ID NO: 2825 - DNA, 20 bp, Homo sapiens
  source 1..20: mol_type = genomic DNA; note = Gene: CKM; note = Location (start to end; relative to TSS): CKM_92_122; note = Orientation (relative to transcription): sense; note = sgRNA Position: 45322759; note = Sequence Name: 56322-704_101_SL_seq_2825
ttctgtgggtgctagaggct

SEQ ID NO: 2826 - DNA, 20 bp, Homo sapiens
  source 1..20: mol_type = genomic DNA; note = Gene: CKM; note = Location (start to end; relative to TSS): CKM_35_65; note = Orientation (relative to transcription): sense; note = sgRNA Position: 45322816; note = Sequence Name: 56322-704_101_SL_seq_2826
cagcccagccaggtactgca

SEQ ID NO: 2827 - DNA, 20 bp, Homo sapiens
  source 1..20: mol_type = genomic DNA; note = Gene: CKM; note = Location (start to end; relative to TSS): CKM_87_117; note = Orientation (relative to transcription): sense; note = sgRNA Position: 45322764; note = Sequence Name: 56322-704_101_SL_seq_2827
gggatttctgtgggtgctag

SEQ ID NO: 2828 - DNA, 20 bp, Homo sapiens
  source 1..20: mol_type = genomic DNA; note = Gene: CKM; note = Location (start to end; relative to TSS): CKM_25_55; note = Orientation (relative to transcription): sense; note = sgRNA Position: 45322826; note = Sequence Name: 56322-704_101_SL_seq_2828
cccttcagcccagcccagcc

SEQ ID NO: 2829 - DNA, 20 bp, Homo sapiens
  source 1..20: mol_type = genomic DNA; note = Gene: CKM; note = Location (start to end; relative to TSS): CKM_55_85; note = Orientation (relative to transcription): sense; note = sgRNA Position: 45322796; note = Sequence Name: 56322-704_101_SL_seq_2829
cggggcgggaatctgggtgg

SEQ ID NO: 2830 - DNA, 20 bp, Homo sapiens
  source 1..20: mol_type = genomic DNA; note = Gene: CKMT1A; note = Location (start to end; relative to TSS): CKMT1A_47_77; note = Orientation (relative to transcription): antisense; note = sgRNA Position: 43693912; note = Sequence Name: 56322-704_101_SL_seq_2830
atgggggtcggattggaggc

SEQ ID NO: 2831 - DNA, 20 bp, Homo sapiens
  source 1..20: mol_type = genomic DNA; note = Gene: CKMT1A; note = Location (start to end; relative to TSS): CKMT1A_81_111; note = Orientation (relative to transcription): antisense; note = sgRNA Position: 43693946; note = Sequence Name: 56322-704_101_SL_seq_2831
gagggccggagctaggtccg

SEQ ID NO: 2832 - DNA, 20 bp, Homo sapiens
  source 1..20: mol_type = genomic DNA; note = Gene: CKMT1A; note = Location (start to end; relative to TSS): CKMT1A_41_71; note = Orientation (relative to transcription): antisense; note = sgRNA Position: 43693906; note = Sequence Name: 56322-704_101_SL_seq_2832
gtcggattggaggctggagc

SEQ ID NO: 2833 - DNA, 20 bp, Homo sapiens
  source 1..20: mol_type = genomic DNA; note = Gene: CKMT1A; note = Location (start to end; relative to TSS): CKMT1A_74_104; note = Orientation (relative to transcription): sense; note = sgRNA Position: 43693959; note = Sequence Name: 56322-704_101_SL_seq_2833
tcggacctagctccggccct

SEQ ID NO: 2834 - DNA, 20 bp, Homo sapiens
  source 1..20: mol_type = genomic DNA; note = Gene: CKMT1A; note = Location (start to end; relative to TSS): CKMT1A_35_65; note = Orientation (relative to transcription): antisense; note = sgRNA Position: 43693900; note = Sequence Name: 56322-704_101_SL_seq_2834
ttggaggctggagccggaat

SEQ ID NO: 2835 - DNA, 20 bp, Homo sapiens
  source 1..20: mol_type = genomic DNA; note = Gene: CKMT1A; note = Location (start to end; relative to TSS): CKMT1A_67_97; note = Orientation (relative to transcription): sense; note = sgRNA Position: 43693952; note = Sequence Name: 56322-704_101_SL_seq_2835
tgcagcctcggacctagctc

SEQ ID NO: 2836 - DNA, 20 bp, Homo sapiens
  source 1..20: mol_type = genomic DNA; note = Gene: CKMT1A; note = Location (start to end; relative to TSS): CKMT1A_36_66; note = Orientation (relative to transcription): antisense; note = sgRNA Position: 43693901; note = Sequence Name: 56322-704_101_SL_seq_2836
attggaggctggagccggaa

SEQ ID NO: 2837 - DNA, 20 bp, Homo sapiens
  source 1..20: mol_type = genomic DNA; note = Gene: CKMT1A; note = Location (start to end; relative to TSS): CKMT1A_66_96; note = Orientation (relative to transcription): antisense; note = sgRNA Position: 43693931; note = Sequence Name: 56322-704_101_SL_seq_2837
gtccgaggctgcagccgaaa

SEQ ID NO: 2838 - DNA, 20 bp, Homo sapiens
  source 1..20: mol_type = genomic DNA; note = Gene: CKMT1A; note = Location (start to end; relative to TSS): CKMT1A_29_59; note = Orientation (relative to transcription): antisense; note = sgRNA Position: 43693894; note = Sequence Name: 56322-704_101_SL_seq_2838
gctggagccggaatgggagc

SEQ ID NO: 2839 - DNA, 20 bp, Homo sapiens
  source 1..20: mol_type = genomic DNA; note = Gene: CKMT1A; note = Location (start to end; relative to TSS): CKMT1A_59_89; note = Orientation (relative to transcription): antisense; note = sgRNA Position: 43693924; note = Sequence Name: 56322-704_101_SL_seq_2839
gctgcagccgaaatgggggt

SEQ ID NO: 2840 - DNA, 20 bp, Homo sapiens
  source 1..20: mol_type = genomic DNA; note = Gene: CKMT1B; note = Location (start to end; relative to TSS): CKMT1B_47_77; note = Orientation (relative to transcription): antisense; note = sgRNA Position: 43594080; note = Sequence Name: 56322-704_101_SL_seq_2840
atgggggtcggattggaggc

SEQ ID NO: 2841 - DNA, 20 bp, Homo sapiens
  source 1..20: mol_type = genomic DNA; note = Gene: CKMT1B; note = Location (start to end; relative to TSS): CKMT1B_81_111; note = Orientation (relative to transcription): antisense; note = sgRNA Position: 43594114; note = Sequence Name: 56322-704_101_SL_seq_2841
gagggccggagctaggtccg

SEQ ID NO: 2842 - DNA, 20 bp, Homo sapiens
  source 1..20: mol_type = genomic DNA; note = Gene: CKMT1B; note = Location (start to end; relative to TSS): CKMT1B_41_71; note = Orientation (relative to transcription): antisense; note = sgRNA Position: 43594074; note = Sequence Name: 56322-704_101_SL_seq_2842
gtcggattggaggctggagc

SEQ ID NO: 2843 - DNA, 20 bp, Homo sapiens
  source 1..20: mol_type = genomic DNA; note = Gene: CKMT1B; note = Location (start to end; relative to TSS): CKMT1B_74_104; note = Orientation (relative to transcription): sense; note = sgRNA Position: 43594127; note = Sequence Name: 56322-704_101_SL_seq_2843
tcggacctagctccggccct

SEQ ID NO: 2844 - DNA, 20 bp, Homo sapiens
  source 1..20: mol_type = genomic DNA; note = Gene: CKMT1B; note = Location (start to end; relative to TSS): CKMT1B_35_65; note = Orientation (relative to transcription): antisense; note = sgRNA Position: 43594068; note = Sequence Name: 56322-704_101_SL_seq_2844
ttggaggctggagccggaat

SEQ ID NO: 2845 - DNA, 20 bp, Homo sapiens
  source 1..20: mol_type = genomic DNA; note = Gene: CKMT1B; note = Location (start to end; relative to TSS): CKMT1B_67_97; note = Orientation (relative to transcription): sense; note = sgRNA Position: 43594120; note = Sequence Name: 56322-704_101_SL_seq_2845
tgcagcctcggacctagctc

SEQ ID NO: 2846 - DNA, 20 bp, Homo sapiens
  source 1..20: mol_type = genomic DNA; note = Gene: CKMT1B; note = Location (start to end; relative to TSS): CKMT1B_36_66; note = Orientation (relative to transcription): antisense; note = sgRNA Position: 43594069; note = Sequence Name: 56322-704_101_SL_seq_2846
attggaggctggagccggaa

SEQ ID NO: 2847 - DNA, 20 bp, Homo sapiens
  source 1..20: mol_type = genomic DNA; note = Gene: CKMT1B; note = Location (start to end; relative to TSS): CKMT1B_66_96; note = Orientation (relative to transcription): antisense; note = sgRNA Position: 43594099; note = Sequence Name: 56322-704_101_SL_seq_2847
gtccgaggctgcagccgaaa

SEQ ID NO: 2848 - DNA, 20 bp, Homo sapiens
  source 1..20: mol_type = genomic DNA; note = Gene: CKMT1B; note = Location (start to end; relative to TSS): CKMT1B_29_59; note = Orientation (relative to transcription): antisense; note = sgRNA Position: 43594062; note = Sequence Name: 56322-704_101_SL_seq_2848
gctggagccggaatgggagc

SEQ ID NO: 2849 - DNA, 20 bp, Homo sapiens
  source 1..20: mol_type = genomic DNA; note = Gene: CKMT1B; note = Location (start to end; relative to TSS): CKMT1B_59_89; note = Orientation (relative to transcription): antisense; note = sgRNA Position: 43594092; note = Sequence Name: 56322-704_101_SL_seq_2849
gctgcagccgaaatgggggt

SEQ ID NO: 2850 - DNA, 20 bp, Homo sapiens
  source 1..20: mol_type = genomic DNA; note = Gene: CKMT2; note = Location (start to end; relative to TSS): CKMT2_45_75; note = Orientation (relative to transcription): antisense; note = sgRNA Position: 81233373; note = Sequence Name: 56322-704_101_SL_seq_2850
ggactcaccgaccttgaagc

SEQ ID NO: 2851 - DNA, 20 bp, Homo sapiens
  source 1..20: mol_type = genomic DNA; note = Gene: CKMT2; note = Location (start to end; relative to TSS): CKMT2_86_116; note = Orientation (relative to transcription): antisense; note = sgRNA Position: 81233414; note = Sequence Name: 56322-704_101_SL_seq_2851
tagccatgacccctctttgg

SEQ ID NO: 2852 - DNA, 20 bp, Homo sapiens
  source 1..20: mol_type = genomic DNA; note = Gene: CKMT2; note = Location (start to end; relative to TSS): CKMT2_29_59; note = Orientation (relative to transcription): sense; note = sgRNA Position: 81233377; note = Sequence Name: 56322-704_101_SL_seq_2852
ggaggctccggcttcaaggt

SEQ ID NO: 2853 - DNA, 20 bp, Homo sapiens
  source 1..20: mol_type = genomic DNA; note = Gene: CKMT2; note = Location (start to end; relative to TSS): CKMT2_68_98; note = Orientation (relative to transcription): sense; note = sgRNA Position: 81233416; note = Sequence Name: 56322-704_101_SL_seq_2853
tgctttattcctccaaagag

SEQ ID NO: 2854 - DNA, 20 bp, Homo sapiens
  source 1..20: mol_type = genomic DNA; note = Gene: CKMT2; note = Location (start to end; relative to TSS): CKMT2_25_55; note = Orientation (relative to transcription): sense; note = sgRNA Position: 81233373; note = Sequence Name: 56322-704_101_SL_seq_2854
cgtgggaggctccggcttca

SEQ ID NO: 2855 - DNA, 20 bp, Homo sapiens
  source 1..20: mol_type = genomic DNA; note = Gene: CKMT2; note = Location (start to end; relative to TSS): CKMT2_67_97; note = Orientation (relative to transcription): sense; note = sgRNA Position: 81233415; note = Sequence Name: 56322-704_101_SL_seq_2855
ctgctttattcctccaaaga

SEQ ID NO: 2856 - DNA, 20 bp, Homo sapiens
  source 1..20: mol_type = genomic DNA; note = Gene: CKMT2; note = Location (start to end; relative to TSS): CKMT2_17_47; note = Orientation (relative to transcription): sense; note = sgRNA Position: 81233365; note = Sequence Name: 56322-704_101_SL_seq_2856
cagcaggacgtgggaggctc

SEQ ID NO: 2857 - DNA, 20 bp, Homo sapiens
  source 1..20: mol_type = genomic DNA; note = Gene: CKMT2; note = Location (start to end; relative to TSS): CKMT2_66_96; note = Orientation (relative to transcription): sense; note = sgRNA Position: 81233414; note = Sequence Name: 56322-704_101_SL_seq_2857
tctgctttattcctccaaag

SEQ ID NO: 2858 - DNA, 20 bp, Homo sapiens
  source 1..20: mol_type = genomic DNA; note = Gene: CKMT2; note = Location (start to end; relative to TSS): CKMT2_11_41; note = Orientation (relative to transcription): sense; note = sgRNA Position: 81233359; note = Sequence Name: 56322-704_101_SL_seq_2858
tgcgctcagcaggacgtggg

SEQ ID NO: 2859 - DNA, 20 bp, Homo sapiens
  source 1..20: mol_type = genomic DNA; note = Gene: CKMT2; note = Location (start to end; relative to TSS): CKMT2_45_75; note = Orientation (relative to transcription): antisense; note = sgRNA Position: 81233373; note = Sequence Name: 56322-704_101_SL_seq_2859
ggactcaccgaccttgaagc

SEQ ID NO: 2860 - DNA, 20 bp, Homo sapiens
  source 1..20: mol_type = genomic DNA; note = Gene: CLK1; note = Location (start to end; relative to TSS): CLK1_65_95; note = Orientation (relative to transcription): sense; note = sgRNA Position: 200864569; note = Sequence Name: 56322-704_101_SL_seq_2860
cttggagtctttgtccagga

SEQ ID NO: 2861 - DNA, 20 bp, Homo sapiens
  source 1..20: mol_type = genomic DNA; note = Gene: CLK1; note = Location (start to end; relative to TSS): CLK1_98_128; note = Orientation (relative to transcription): sense; note = sgRNA Position: 200864536; note = Sequence Name: 56322-704_101_SL_seq_2861
gagggagcggactaggtgac

SEQ ID NO: 2862 - DNA, 20 bp, Homo sapiens
  source 1..20: mol_type = genomic DNA; note = Gene: CLK1; note = Location (start to end; relative to TSS): CLK1_61_91; note = Orientation (relative to transcription): sense; note = sgRNA Position: 200864573; note = Sequence Name: 56322-704_101_SL_seq_2862
tcgacttggagtctttgtcc

SEQ ID NO: 2863 - DNA, 20 bp, Homo sapiens
  source 1..20: mol_type = genomic DNA; note = Gene: CLK1; note = Location (start to end; relative to TSS): CLK1_91_121; note = Orientation (relative to transcription): sense; note = sgRNA Position: 200864543; note = Sequence Name: 56322-704_101_SL_seq_2863
gacgcaggagggagcggact

SEQ ID NO: 2864 - DNA, 20 bp, Homo sapiens
  source 1..20: mol_type = genomic DNA; note = Gene: CLK1; note = Location (start to end; relative to TSS): CLK1_47_77; note = Orientation (relative to transcription): sense; note = sgRNA Position: 200864587; note = Sequence Name: 56322-704_101_SL_seq_2864
aagctttgtctccttcgact

SEQ ID NO: 2865 - DNA, 20 bp, Homo sapiens
  source 1..20: mol_type = genomic DNA; note = Gene: CLK1; note = Location (start to end; relative to TSS): CLK1_80_110; note = Orientation (relative to transcription): sense; note = sgRNA Position: 200864554; note = Sequence Name: 56322-704_101_SL_seq_2865
caggacggtaagacgcagga

SEQ ID NO: 2866 - DNA, 20 bp, Homo sapiens
  source 1..20: mol_type = genomic DNA; note = Gene: CLK1; note = Location (start to end; relative to TSS): CLK1_40_70; note = Orientation (relative to transcription): antisense; note = sgRNA Position: 200864614; note = Sequence Name: 56322-704_101_SL_seq_2866
aaagcttgtaacgcaatcac

SEQ ID NO: 2867 - DNA, 20 bp, Homo sapiens
  source 1..20: mol_type = genomic DNA; note = Gene: CLK1; note = Location (start to end; relative to TSS): CLK1_79_109; note = Orientation (relative to transcription): sense; note = sgRNA Position: 200864555; note = Sequence Name: 56322-704_101_SL_seq_2867
ccaggacggtaagacgcagg

SEQ ID NO: 2868 - DNA, 20 bp, Homo sapiens
  source 1..20: mol_type = genomic DNA; note = Gene: CLK1; note = Location (start to end; relative to TSS): CLK1_41_71; note = Orientation (relative to transcription): antisense; note = sgRNA Position: 200864613; note = Sequence Name: 56322-704_101_SL_seq_2868
caaagcttgtaacgcaatca

SEQ ID NO: 2869 - DNA, 20 bp, Homo sapiens
  source 1..20: mol_type = genomic DNA; note = Gene: CLK1; note = Location (start to end; relative to TSS): CLK1_76_106; note = Orientation (relative to transcription): sense; note = sgRNA Position: 200864558; note = Sequence Name: 56322-704_101_SL_seq_2869
tgtccaggacggtaagacgc

SEQ ID NO: 2870 - DNA, 20 bp, Homo sapiens
  source 1..20: mol_type = genomic DNA; note = Gene: CLK2; note = Location (start to end; relative to TSS): CLK2_45_75; note = Orientation (relative to transcription): antisense; note = sgRNA Position: 155273455; note = Sequence Name: 56322-704_101_SL_seq_2870
cccagctcggtctccggctc

SEQ ID NO: 2871 - DNA, 20 bp, Homo sapiens
  source 1..20: mol_type = genomic DNA; note = Gene: CLK2; note = Location (start to end; relative to TSS): CLK2_90_120; note = Orientation (relative to transcription): sense; note = sgRNA Position: 155273390; note = Sequence Name: 56322-704_101_SL_seq_2871
cgccaagcagatcttagggg

SEQ ID NO: 2872 - DNA, 20 bp, Homo sapiens
  source 1..20: mol_type = genomic DNA; note = Gene: CLK2; note = Location (start to end; relative to TSS): CLK2_48_78; note = Orientation (relative to transcription): sense; note = sgRNA Position: 155273432; note = Sequence Name: 56322-704_101_SL_seq_2872
accgagctgggatcgggccc

SEQ ID NO: 2873 - DNA, 20 bp, Homo sapiens
  source 1..20: mol_type = genomic DNA; note = Gene: CLK2; note = Location (start to end; relative to TSS): CLK2_87_117; note = Orientation (relative to transcription): sense; note = sgRNA Position: 155273393; note = Sequence Name: 56322-704_101_SL_seq_2873
cggcgccaagcagatcttag

SEQ ID NO: 2874 - DNA, 20 bp, Homo sapiens
  source 1..20: mol_type = genomic DNA; note = Gene: CLK2; note = Location (start to end; relative to TSS): CLK2_49_79; note = Orientation (relative to transcription): sense; note = sgRNA Position: 155273431; note = Sequence Name: 56322-704_101_SL_seq_2874
ccgagctgggatcgggcccc

SEQ ID NO: 2875 - DNA, 20 bp, Homo sapiens
  source 1..20: mol_type = genomic DNA; note = Gene: CLK2; note = Location (start to end; relative to TSS): CLK2_86_116; note = Orientation (relative to transcription): sense; note = sgRNA Position: 155273394; note = Sequence Name: 56322-704_101_SL_seq_2875
gcggcgccaagcagatctta

SEQ ID NO: 2876 - DNA, 20 bp, Homo sapiens
  source 1..20: mol_type = genomic DNA; note = Gene: CLK2; note = Location (start to end; relative to TSS): CLK2_41_71; note = Orientation (relative to transcription): sense; note = sgRNA Position: 155273439; note = Sequence Name: 56322-704_101_SL_seq_2876
gccggagaccgagctgggat

SEQ ID NO: 2877 - DNA, 20 bp, Homo sapiens
  source 1..20: mol_type = genomic DNA; note = Gene: CLK2; note = Location (start to end; relative to TSS): CLK2_85_115; note = Orientation (relative to transcription): sense; note = sgRNA Position: 155273395; note = Sequence Name: 56322-704_101_SL_seq_2877
agcggcgccaagcagatctt

SEQ ID NO: 2878 - DNA, 20 bp, Homo sapiens
  source 1..20: mol_type = genomic DNA; note = Gene: CLK2; note = Location (start to end; relative to TSS): CLK2_42_72; note = Orientation (relative to transcription): sense; note = sgRNA Position: 155273438; note = Sequence Name: 56322-704_101_SL_seq_2878
ccggagaccgagctgggatc

SEQ ID NO: 2879 - DNA, 20 bp, Homo sapiens
  source 1..20: mol_type = genomic DNA; note = Gene: CLK2; note = Location (start to end; relative to TSS): CLK2_74_104; note = Orientation (relative to transcription): antisense; note = sgRNA Position: 155273426; note = Sequence Name: 56322-704_101_SL_seq_2879
gctcgcaccgcccccgcccg

SEQ ID NO: 2880 - DNA, 20 bp, Homo sapiens
  source 1..20: mol_type = genomic DNA; note = Gene: CLK3; note = Location (start to end; relative to TSS): CLK3_41_71; note = Orientation (relative to transcription): sense; note = sgRNA Position: 74615903; note = Sequence Name: 56322-704_101_SL_seq_2880
agcctgggagacggtaagtg

SEQ ID NO: 2881 - DNA, 20 bp, Homo sapiens
  source 1..20: mol_type = genomic DNA; note = Gene: CLK3; note = Location (start to end; relative to TSS): CLK3_81_111; note = Orientation (relative to transcription): antisense; note = sgRNA Position: 74615923; note = Sequence Name: 56322-704_101_SL_seq_2881
cgccgccgctgtcgccgccg

SEQ ID NO: 2882 - DNA, 20 bp, Homo sapiens
  source 1..20: mol_type = genomic DNA; note = Gene: CLK3; note = Location (start to end; relative to TSS): CLK3_35_65; note = Orientation (relative to transcription): antisense; note = sgRNA Position: 74615877; note = Sequence Name: 56322-704_101_SL_seq_2882
cccaggctccggctgcagct

SEQ ID NO: 2883 - DNA, 20 bp, Homo sapiens
  source 1..20: mol_type = genomic DNA; note = Gene: CLK3; note = Location (start to end; relative to TSS): CLK3_70_100; note = Orientation (relative to transcription): sense; note = sgRNA Position: 74615932; note = Sequence Name: 56322-704_101_SL_seq_2883
gtccgcggcggcgacagcgg

SEQ ID NO: 2884 - DNA, 20 bp, Homo sapiens
  source 1..20: mol_type = genomic DNA; note = Gene: CLK3; note = Location (start to end; relative to TSS): CLK3_32_62; note = Orientation (relative to transcription): sense; note = sgRNA Position: 74615894; note = Sequence Name: 56322-704_101_SL_seq_2884
tgcagccggagcctgggaga

SEQ ID NO: 2885 - DNA, 20 bp, Homo sapiens
  source 1..20: mol_type = genomic DNA; note = Gene: CLK3; note = Location (start to end; relative to TSS): CLK3_67_97; note = Orientation (relative to transcription): sense; note = sgRNA Position: 74615929; note = Sequence Name: 56322-704_101_SL_seq_2885
ggggtccgcggcggcgacag

SEQ ID NO: 2886 - DNA, 20 bp, Homo sapiens
  source 1..20: mol_type = genomic DNA; note = Gene: CLK3; note = Location (start to end; relative to TSS): CLK3_26_56; note = Orientation (relative to transcription): sense; note = sgRNA Position: 74615888; note = Sequence Name: 56322-704_101_SL_seq_2886
cctagctgcagccggagcct

SEQ ID NO: 2887 - DNA, 20 bp, Homo sapiens
  source 1..20: mol_type = genomic DNA; note = Gene: CLK3; note = Location (start to end; relative to TSS): CLK3_58_88; note = Orientation (relative to transcription): sense; note = sgRNA Position: 74615920; note = Sequence Name: 56322-704_101_SL_seq_2887
gtgtgggctggggtccgcgg

SEQ ID NO: 2888 - DNA, 20 bp, Homo sapiens
  source 1..20: mol_type = genomic DNA; note = Gene: CLK3; note = Location (start to end; relative to TSS): CLK3_18_48; note = Orientation (relative to transcription): sense; note = sgRNA Position: 74615880; note = Sequence Name: 56322-704_101_SL_seq_2888
gagtggggcctagctgcagc

SEQ ID NO: 2889 - DNA, 20 bp, Homo sapiens
  source 1..20: mol_type = genomic DNA; note = Gene: CLK3; note = Location (start to end; relative to TSS): CLK3_48_78; note = Orientation (relative to transcription): sense; note = sgRNA Position: 74615910; note = Sequence Name: 56322-704_101_SL_seq_2889
gagacggtaagtgtgggctg

SEQ ID NO: 2890 - DNA, 20 bp, Homo sapiens
  source 1..20: mol_type = genomic DNA; note = Gene: CLK4; note = Location (start to end; relative to TSS): CLK4_48_78; note = Orientation (relative to transcription): sense; note = sgRNA Position: 178626978; note = Sequence Name: 56322-704_101_SL_seq_2890
ggcagtttggcgacatttct

SEQ ID NO: 2891 - DNA, 20 bp, Homo sapiens
  source 1..20: mol_type = genomic DNA; note = Gene: CLK4; note = Location (start to end; relative to TSS): CLK4_79_109; note = Orientation (relative to transcription): sense; note = sgRNA Position: 178626947; note = Sequence Name: 56322-704_101_SL_seq_2891
ccatttgcttttgcggaggt

SEQ ID NO: 2892 - DNA, 20 bp, Homo sapiens
  source 1..20: mol_type = genomic DNA; note = Gene: CLK4; note = Location (start to end; relative to TSS): CLK4_27_57; note = Orientation (relative to transcription): sense; note = sgRNA Position: 178626999; note = Sequence Name: 56322-704_101_SL_seq_2892
cagcggccgaggagggaaga

SEQ ID NO: 2893 - DNA, 20 bp, Homo sapiens
  source 1..20: mol_type = genomic DNA; note = Gene: CLK4; note = Location (start to end; relative to TSS): CLK4_72_102; note = Orientation (relative to transcription): sense; note = sgRNA Position: 178626954; note = Sequence Name: 56322-704_101_SL_seq_2893
cgaagggccatttgcttttg

SEQ ID NO: 2894 - DNA, 20 bp, Homo sapiens
  source 1..20: mol_type = genomic DNA; note = Gene: CLK4; note = Location (start to end; relative to TSS): CLK4_20_50; note = Orientation (relative to transcription): sense; note = sgRNA Position: 178627006; note = Sequence Name: 56322-704_101_SL_seq_2894
tttgtcgcagcggccgagga

SEQ ID NO: 2895 - DNA, 20 bp, Homo sapiens
  source 1..20: mol_type = genomic DNA; note = Gene: CLK4; note = Location (start to end; relative to TSS): CLK4_56_86; note = Orientation (relative to transcription): sense; note = sgRNA Position: 178626970; note = Sequence Name: 56322-704_101_SL_seq_2895
ggcgacatttctcggccgaa

SEQ ID NO: 2896 - DNA, 20 bp, Homo sapiens
  source 1..20: mol_type = genomic DNA; note = Gene: CLK4; note = Location (start to end; relative to TSS): CLK4_19_49; note = Orientation (relative to transcription): sense; note = sgRNA Position: 178627007; note = Sequence Name: 56322-704_101_SL_seq_2896
gtttgtcgcagcggccgagg

SEQ ID NO: 2897 - DNA, 20 bp, Homo sapiens
  source 1..20: mol_type = genomic DNA; note = Gene: CLK4; note = Location (start to end; relative to TSS): CLK4_55_85; note = Orientation (relative to transcription): sense; note = sgRNA Position: 178626971; note = Sequence Name: 56322-704_101_SL_seq_2897
tggcgacatttctcggccga

SEQ ID NO: 2898 - DNA, 20 bp, Homo sapiens
  source 1..20: mol_type = genomic DNA; note = Gene: CLK4; note = Location (start to end; relative to TSS): CLK4_16_46; note = Orientation (relative to transcription): sense; note = sgRNA Position: 178627010; note = Sequence Name: 56322-704_101_SL_seq_2898
ggtgtttgtcgcagcggccg

SEQ ID NO: 2899 - DNA, 20 bp, Homo sapiens
  source 1..20: mol_type = genomic DNA; note = Gene: CLK4; note = Location (start to end; relative to TSS): CLK4_48_78; note = Orientation (relative to transcription): sense; note = sgRNA Position: 178626978; note = Sequence Name: 56322-704_101_SL_seq_2899
ggcagtttggcgacatttct

SEQ ID NO: 2900 - DNA, 20 bp, Homo sapiens
  source 1..20: mol_type = genomic DNA; note = Gene: CMPK1; note = Location (start to end; relative to TSS): CMPK1_46_76; note = Orientation (relative to transcription): antisense; note = sgRNA Position: 47333842; note = Sequence Name: 56322-704_101_SL_seq_2900
ggctgagccggcgcccgccg

SEQ ID NO: 2901 - DNA, 20 bp, Homo sapiens
  source 1..20: mol_type = genomic DNA; note = Gene: CMPK1; note = Location (start to end; relative to TSS): CMPK1_100_130; note = Orientation (relative to transcription): antisense; note = sgRNA Position: 47333896; note = Sequence Name: 56322-704_101_SL_seq_2901
acagcggccggcgcggcgcg

SEQ ID NO: 2902 - DNA, 20 bp, Homo sapiens
  source 1..20: mol_type = genomic DNA; note = Gene: CMPK1; note = Location (start to end; relative to TSS): CMPK1_32_62; note = Orientation (relative to transcription): antisense; note = sgRNA Position: 47333828; note = Sequence Name: 56322-704_101_SL_seq_2902
ccgccgcggccccgccgccg

SEQ ID NO: 2903 - DNA, 20 bp, Homo sapiens
  source 1..20: mol_type = genomic DNA; note = Gene: CMPK1; note = Location (start to end; relative to TSS): CMPK1_71_101; note = Orientation (relative to transcription): antisense; note = sgRNA Position: 47333867; note = Sequence Name: 56322-704_101_SL_seq_2903
ggggaggcggcgggagaaag

SEQ ID NO: 2904 - DNA, 20 bp, Homo sapiens
  source 1..20: mol_type = genomic DNA; note = Gene: CMPK1; note = Location (start to end; relative to TSS): CMPK1_23_53; note = Orientation (relative to transcription): antisense; note = sgRNA Position: 47333819; note = Sequence Name: 56322-704_101_SL_seq_2904
ccccgccgccgtggctgccc

SEQ ID NO: 2905 - DNA, 20 bp, Homo sapiens
  source 1..20: mol_type = genomic DNA; note = Gene: CMPK1; note = Location (start to end; relative to TSS): CMPK1_67_97; note = Orientation (relative to transcription): antisense; note = sgRNA Position: 47333863; note = Sequence Name: 56322-704_101_SL_seq_2905
aggcggcgggagaaaggggc

SEQ ID NO: 2906 - DNA, 20 bp, Homo sapiens
  source 1..20: mol_type = genomic DNA; note = Gene: CMPK1; note = Location (start to end; relative to TSS): CMPK1_14_44; note = Orientation (relative to transcription): sense; note = sgRNA Position: 47333830; note = Sequence Name: 56322-704_101_SL_seq_2906
cccgggcagccacggcggcg

SEQ ID NO: 2907 - DNA, 20 bp, Homo sapiens
  source 1..20: mol_type = genomic DNA; note = Gene: CMPK1; note = Location (start to end; relative to TSS): CMPK1_58_88; note = Orientation (relative to transcription): antisense; note = sgRNA Position: 47333854; note = Sequence Name: 56322-704_101_SL_seq_2907
gagaaaggggcgggctgagc

SEQ ID NO: 2908 - DNA, 20 bp, Homo sapiens
  source 1..20: mol_type = genomic DNA; note = Gene: CMPK1; note = Location (start to end; relative to TSS): CMPK1_9_39; note = Orientation (relative to transcription): sense; note = sgRNA Position: 47333825; note = Sequence Name: 56322-704_101_SL_seq_2908
ggacgcccgggcagccacgg

SEQ ID NO: 2909 - DNA, 20 bp, Homo sapiens
  source 1..20: mol_type = genomic DNA; note = Gene: CMPK1; note = Location (start to end; relative to TSS): CMPK1_46_76; note = Orientation (relative to transcription): antisense; note = sgRNA Position: 47333842; note = Sequence Name: 56322-704_101_SL_seq_2909
ggctgagccggcgcccgccg

SEQ ID NO: 2910 - DNA, 20 bp, Homo sapiens
  source 1..20: mol_type = genomic DNA; note = Gene: CMPK2; note = Location (start to end; relative to TSS): CMPK2_56_86; note = Orientation (relative to transcription): antisense; note = sgRNA Position: 6865847; note = Sequence Name: 56322-704_101_SL_seq_2910
gaaagccggaggcccaggcg

SEQ ID NO: 2911 - DNA, 20 bp, Homo sapiens
  source 1..20: mol_type = genomic DNA; note = Gene: CMPK2; note = Location (start to end; relative to TSS): CMPK2_90_120; note = Orientation (relative to transcription): sense; note = sgRNA Position: 6865793; note = Sequence Name: 56322-704_101_SL_seq_2911
tttcgtttcccgctggcgcc

SEQ ID NO: 2912 - DNA, 20 bp, Homo sapiens
  source 1..20: mol_type = genomic DNA; note = Gene: CMPK2; note = Location (start to end; relative to TSS): CMPK2_42_72; note = Orientation (relative to transcription): antisense; note = sgRNA Position: 6865861; note = Sequence Name: 56322-704_101_SL_seq_2912
caggcggggcaggagccctg

SEQ ID NO: 2913 - DNA, 20 bp, Homo sapiens
  source 1..20: mol_type = genomic DNA; note = Gene: CMPK2; note = Location (start to end; relative to TSS): CMPK2_83_113; note = Orientation (relative to transcription): antisense; note = sgRNA Position: 6865820; note = Sequence Name: 56322-704_101_SL_seq_2913
aacgaaagcgaagcgttgcg

SEQ ID NO: 2914 - DNA, 20 bp, Homo sapiens
  source 1..20: mol_type = genomic DNA; note = Gene: CMPK2; note = Location (start to end; relative to TSS): CMPK2_35_65; note = Orientation (relative to transcription): sense; note = sgRNA Position: 6865848; note = Sequence Name: 56322-704_101_SL_seq_2914
ccagggctcctgccccgcct

SEQ ID NO: 2915 - DNA, 20 bp, Homo sapiens
  source 1..20: mol_type = genomic DNA; note = Gene: CMPK2; note = Location (start to end; relative to TSS): CMPK2_67_97; note = Orientation (relative to transcription): antisense; note = sgRNA Position: 6865836; note = Sequence Name: 56322-704_101_SL_seq_2915
tgcggggaaacgaaagccgg

SEQ ID NO: 2916 - DNA, 20 bp, Homo sapiens
  source 1..20: mol_type = genomic DNA; note = Gene: CMPK2; note = Location (start to end; relative to TSS): CMPK2_18_48; note = Orientation (relative to transcription): sense; note = sgRNA Position: 6865865; note = Sequence Name: 56322-704_101_SL_seq_2916
ggaagggcgccccagcccca

SEQ ID NO: 2917 - DNA, 20 bp, Homo sapiens
  source 1..20: mol_type = genomic DNA; note = Gene: CMPK2; note = Location (start to end; relative to TSS): CMPK2_57_87; note = Orientation (relative to transcription): antisense; note = sgRNA Position: 6865846; note = Sequence Name: 56322-704_101_SL_seq_2917
cgaaagccggaggcccaggc

SEQ ID NO: 2918 - DNA, 20 bp, Homo sapiens
  source 1..20: mol_type = genomic DNA; note = Gene: CMPK2; note = Location (start to end; relative to TSS): CMPK2_17_47; note = Orientation (relative to transcription): sense; note = sgRNA Position: 6865866; note = Sequence Name: 56322-704_101_SL_seq_2918
cggaagggcgccccagcccc

SEQ ID NO: 2919 - DNA, 20 bp, Homo sapiens
  source 1..20: mol_type = genomic DNA; note = Gene: CMPK2; note = Location (start to end; relative to TSS): CMPK2_56_86; note = Orientation (relative to transcription): antisense; note = sgRNA Position: 6865847; note = Sequence Name: 56322-704_101_SL_seq_2919
gaaagccggaggcccaggcg

SEQ ID NO: 2920 - DNA, 20 bp, Homo sapiens
  source 1..20: mol_type = genomic DNA; note = Gene: COQ8A; note = Location (start to end; relative to TSS): COQ8A_53_83; note = Orientation (relative to transcription): sense; note = sgRNA Position: 226940373; note = Sequence Name: 56322-704_101_SL_seq_2920
aggcggctagaaggtgaccg

SEQ ID NO: 2921 - DNA, 20 bp, Homo sapiens
  source 1..20: mol_type = genomic DNA; note = Gene: COQ8A; note = Location (start to end; relative to TSS): COQ8A_87_117; note = Orientation (relative to transcription): antisense; note = sgRNA Position: 226940387; note = Sequence Name: 56322-704_101_SL_seq_2921
ttacctggctgcaggaagct

SEQ ID NO: 2922 - DNA, 20 bp, Homo sapiens
  source 1..20: mol_type = genomic DNA; note = Gene: COQ8A; note = Location (start to end; relative to TSS): COQ8A_39_69; note = Orientation (relative to transcription): antisense; note = sgRNA Position: 226940339; note = Sequence Name: 56322-704_101_SL_seq_2922
ccgcgcccgcctctgcgcgc

SEQ ID NO: 2923 - DNA, 20 bp, Homo sapiens
  source 1..20: mol_type = genomic DNA; note = Gene: COQ8A; note = Location (start to end; relative to TSS): COQ8A_79_109; note = Orientation (relative to transcription): antisense; note = sgRNA Position: 226940379; note = Sequence Name: 56322-704_101_SL_seq_2923
ctgcaggaagctgggatccg

SEQ ID NO: 2924 - DNA, 20 bp, Homo sapiens
  source 1..20: mol_type = genomic DNA; note = Gene: COQ8A; note = Location (start to end; relative to TSS): COQ8A_44_74; note = Orientation (relative to transcription): sense; note = sgRNA Position: 226940364; note = Sequence Name: 56322-704_101_SL_seq_2924
cgggcgcggaggcggctaga

SEQ ID NO: 2925 - DNA, 20 bp, Homo sapiens
  source 1..20: mol_type = genomic DNA; note = Gene: COQ8A; note = Location (start to end; relative to TSS): COQ8A_75_105; note = Orientation (relative to transcription): sense; note = sgRNA Position: 226940395; note = Sequence Name: 56322-704_101_SL_seq_2925
gatcccagcttcctgcagcc

SEQ ID NO: 2926 - DNA, 20 bp, Homo sapiens
  source 1..20: mol_type = genomic DNA; note = Gene: COQ8A; note = Location (start to end; relative to TSS): COQ8A_21_51; note = Orientation (relative to transcription): sense; note = sgRNA Position: 226940341; note = Sequence Name: 56322-704_101_SL_seq_2926
gcgcggtggccagcgcgcag

SEQ ID NO: 2927 - DNA, 20 bp, Homo sapiens
  source 1..20: mol_type = genomic DNA; note = Gene: COQ8A; note = Location (start to end; relative to TSS): COQ8A_53_83; note = Orientation (relative to transcription): sense; note = sgRNA Position: 226940373; note = Sequence Name: 56322-704_101_SL_seq_2927
aggcggctagaaggtgaccg

SEQ ID NO: 2928 - DNA, 20 bp, Homo sapiens
  source 1..20: mol_type = genomic DNA; note = Gene: COQ8A; note = Location (start to end; relative to TSS): COQ8A_8_38; note = Orientation (relative to transcription): antisense; note = sgRNA Position: 226940308; note = Sequence Name: 56322-704_101_SL_seq_2928
ctgacgcccgccacgcgctc

SEQ ID NO: 2929 - DNA, 20 bp, Homo sapiens
  source 1..20: mol_type = genomic DNA; note = Gene: COQ8A; note = Location (start to end; relative to TSS): COQ8A_39_69; note = Orientation (relative to transcription): antisense; note = sgRNA Position: 226940339; note = Sequence Name: 56322-704_101_SL_seq_2929
ccgcgcccgcctctgcgcgc

SEQ ID NO: 2930 - DNA, 20 bp, Homo sapiens
  source 1..20: mol_type = genomic DNA; note = Gene: COQ8B; note = Location (start to end; relative to TSS): COQ8B_42_72; note = Orientation (relative to transcription): antisense; note = sgRNA Position: 40716840; note = Sequence Name: 56322-704_101_SL_seq_2930
ctggcgcgccaccaggaccc

SEQ ID NO: 2931 - DNA, 20 bp, Homo sapiens
  source 1..20: mol_type = genomic DNA; note = Gene: COQ8B; note = Location (start to end; relative to TSS): COQ8B_72_102; note = Orientation (relative to transcription): antisense; note = sgRNA Position: 40716810; note = Sequence Name: 56322-704_101_SL_seq_2931
ttagtcacaggggtggaggg

SEQ ID NO: 2932 - DNA, 20 bp, Homo sapiens
  source 1..20: mol_type = genomic DNA; note = Gene: COQ8B; note = Location (start to end; relative to TSS): COQ8B_36_66; note = Orientation (relative to transcription): sense; note = sgRNA Position: 40716826; note = Sequence Name: 56322-704_101_SL_seq_2932
gggtcctggtggcgcgccag

SEQ ID NO: 2933 - DNA, 20 bp, Homo sapiens
  source 1..20: mol_type = genomic DNA; note = Gene: COQ8B; note = Location (start to end; relative to TSS): COQ8B_71_101; note = Orientation (relative to transcription): antisense; note = sgRNA Position: 40716811; note = Sequence Name: 56322-704_101_SL_seq_2933
tagtcacaggggtggaggga

SEQ ID NO: 2934 - DNA, 20 bp, Homo sapiens
  source 1..20: mol_type = genomic DNA; note = Gene: COQ8B; note = Location (start to end; relative to TSS): COQ8B_37_67; note = Orientation (relative to transcription): sense; note = sgRNA Position: 40716825; note = Sequence Name: 56322-704_101_SL_seq_2934
ggtcctggtggcgcgccagt

SEQ ID NO: 2935 - DNA, 20 bp, Homo sapiens
  source 1..20: mol_type = genomic DNA; note = Gene: COQ8B; note = Location (start to end; relative to TSS): COQ8B_70_100; note = Orientation (relative to transcription): antisense; note = sgRNA Position: 40716812; note = Sequence Name: 56322-704_101_SL_seq_2935
agtcacaggggtggagggag

SEQ ID NO: 2936 - DNA, 20 bp, Homo sapiens
  source 1..20: mol_type = genomic DNA; note = Gene: COQ8B; note = Location (start to end; relative to TSS): COQ8B_25_55; note = Orientation (relative to transcription): sense; note = sgRNA Position: 40716837; note = Sequence Name: 56322-704_101_SL_seq_2936
ctagggcaccggggtcctgg

SEQ ID NO: 2937 - DNA, 20 bp, Homo sapiens
  source 1..20: mol_type = genomic DNA; note = Gene: COQ8B; note = Location (start to end; relative to TSS): COQ8B_69_99; note = Orientation (relative to transcription): antisense; note = sgRNA Position: 40716813; note = Sequence Name: 56322-704_101_SL_seq_2937
gtcacaggggtggagggagg

SEQ ID NO: 2938 - DNA, 20 bp, Homo sapiens
  source 1..20: mol_type = genomic DNA; note = Gene: COQ8B; note = Location (start to end; relative to TSS): COQ8B_22_52; note = Orientation (relative to transcription): antisense; note = sgRNA Position: 40716860; note = Sequence Name: 56322-704_101_SL_seq_2938
cggtgccctagatgcatacc

SEQ ID NO: 2939 - DNA, 20 bp, Homo sapiens
  source 1..20: mol_type = genomic DNA; note = Gene: COQ8B; note = Location (start to end; relative to TSS): COQ8B_61_91; note = Orientation (relative to transcription): antisense; note = sgRNA Position: 40716821; note = Sequence Name: 56322-704_101_SL_seq_2939
ggtggagggagggggcccac

SEQ ID NO: 2940 - DNA, 20 bp, Homo sapiens
  source 1..20: mol_type = genomic DNA; note = Gene: CSF1R; note = Location (start to end; relative to TSS): CSF1R_46_76; note = Orientation (relative to transcription): antisense; note = sgRNA Position: 150086504; note = Sequence Name: 56322-704_101_SL_seq_2940
tctcagctactagctccgca

SEQ ID NO: 2941 - DNA, 20 bp, Homo sapiens
  source 1..20: mol_type = genomic DNA; note = Gene: CSF1R; note = Location (start to end; relative to TSS): CSF1R_94_124; note = Orientation (relative to transcription): sense; note = sgRNA Position: 150086436; note = Sequence Name: 56322-704_101_SL_seq_2941
tgcctgccacttccccaccg

SEQ ID NO: 2942 - DNA, 20 bp, Homo sapiens
  source 1..20: mol_type = genomic DNA; note = Gene: CSF1R; note = Location (start to end; relative to TSS): CSF1R_41_71; note = Orientation (relative to transcription): antisense; note = sgRNA Position: 150086509; note = Sequence Name: 56322-704_101_SL_seq_2942
gctactagctccgcagggat

SEQ ID NO: 2943 - DNA, 20 bp, Homo sapiens
  source 1..20: mol_type = genomic DNA; note = Gene: CSF1R; note = Location (start to end; relative to TSS): CSF1R_86_116; note = Orientation (relative to transcription): antisense; note = sgRNA Position: 150086464; note = Sequence Name: 56322-704_101_SL_seq_2943
caggcaggtgcagggctgca

SEQ ID NO: 2944 - DNA, 20 bp, Homo sapiens
  source 1..20: mol_type = genomic DNA; note = Gene: CSF1R; note = Location (start to end; relative to TSS): CSF1R_40_70; note = Orientation (relative to transcription): antisense; note = sgRNA Position: 150086510; note = Sequence Name: 56322-704_101_SL_seq_2944
ctactagctccgcagggatc

SEQ ID NO: 2945 - DNA, 20 bp, Homo sapiens
  source 1..20: mol_type = genomic DNA; note = Gene: CSF1R; note = Location (start to end; relative to TSS): CSF1R_78_108; note = Orientation (relative to transcription): antisense; note = sgRNA Position: 150086472; note = Sequence Name: 56322-704_101_SL_seq_2945
tgcagggctgcaaggtgccc

SEQ ID NO: 2946 - DNA, 20 bp, Homo sapiens
  source 1..20: mol_type = genomic DNA; note = Gene: CSF1R; note = Location (start to end; relative to TSS): CSF1R_33_63; note = Orientation (relative to transcription): antisense; note = sgRNA Position: 150086517; note = Sequence Name: 56322-704_101_SL_seq_2946
ctccgcagggatcgggacac

SEQ ID NO: 2947 - DNA, 20 bp, Homo sapiens
  source 1..20: mol_type = genomic DNA; note = Gene: CSF1R; note = Location (start to end; relative to TSS): CSF1R_77_107; note = Orientation (relative to transcription): antisense; note = sgRNA Position: 150086473; note = Sequence Name: 56322-704_101_SL_seq_2947
gcagggctgcaaggtgccca

SEQ ID NO: 2948 - DNA, 20 bp, Homo sapiens
  source 1..20: mol_type = genomic DNA; note = Gene: CSF1R; note = Location (start to end; relative to TSS): CSF1R_22_52; note = Orientation (relative to transcription): sense; note = sgRNA Position: 150086508; note = Sequence Name: 56322-704_101_SL_seq_2948
gtccagtgtcccgatccctg

SEQ ID NO: 2949 - DNA, 20 bp, Homo sapiens
  source 1..20: mol_type = genomic DNA; note = Gene: CSF1R; note = Location (start to end; relative to TSS): CSF1R_52_82; note = Orientation (relative to transcription): sense; note = sgRNA Position: 150086478; note = Sequence Name: 56322-704_101_SL_seq_2949
agctgagagctctgtgccct

SEQ ID NO: 2950 - DNA, 20 bp, Homo sapiens
  source 1..20: mol_type = genomic DNA; note = Gene: CSK; note = Location (start to end; relative to TSS): CSK_38_68; note = Orientation (relative to transcription): sense; note = sgRNA Position: 74782144; note = Sequence Name: 56322-704_101_SL_seq_2950
gcggagccctgggcgagccg

SEQ ID NO: 2951 - DNA, 20 bp, Homo sapiens
  source 1..20: mol_type = genomic DNA; note = Gene: CSK; note = Location (start to end; relative to TSS): CSK_98_128; note = Orientation (relative to transcription): antisense; note = sgRNA Position: 74782184; note = Sequence Name: 56322-704_101_SL_seq_2951
gtggggcaggagcgggaggg

SEQ ID NO: 2952 - DNA, 20 bp, Homo sapiens
  source 1..20: mol_type = genomic DNA; note = Gene: CSK; note = Location (start to end; relative to TSS): CSK_29_59; note = Orientation (relative to transcription): antisense; note = sgRNA Position: 74782115; note = Sequence Name: 56322-704_101_SL_seq_2952
tccgctgggaggaagctcgc

SEQ ID NO: 2953 - DNA, 20 bp, Homo sapiens
  source 1..20: mol_type = genomic DNA; note = Gene: CSK; note = Location (start to end; relative to TSS): CSK_91_121; note = Orientation (relative to transcription): antisense; note = sgRNA Position: 74782177; note = Sequence Name: 56322-704_101_SL_seq_2953
aggagcgggagggcggcagc

SEQ ID NO: 2954 - DNA, 20 bp, Homo sapiens
  source 1..20: mol_type = genomic DNA; note = Gene: CSK; note = Location (start to end; relative to TSS): CSK_28_58; note = Orientation (relative to transcription): sense; note = sgRNA Position: 74782134; note = Sequence Name: 56322-704_101_SL_seq_2954
cttcctcccagcggagccct

SEQ ID NO: 2955 - DNA, 20 bp, Homo sapiens
  source 1..20: mol_type = genomic DNA; note = Gene: CSK; note = Location (start to end; relative to TSS): CSK_83_113; note = Orientation (relative to transcription): antisense; note = sgRNA Position: 74782169; note = Sequence Name: 56322-704_101_SL_seq_2955
gagggcggcagcgggctcgg

SEQ ID NO: 2956 - DNA, 20 bp, Homo sapiens
  source 1..20: mol_type = genomic DNA; note = Gene: CSK; note = Location (start to end; relative to TSS): CSK_24_54; note = Orientation (relative to transcription): antisense; note = sgRNA Position: 74782110; note = Sequence Name: 56322-704_101_SL_seq_2956
tgggaggaagctcgcaggcc

SEQ ID NO: 2957 - DNA, 20 bp, Homo sapiens
  source 1..20: mol_type = genomic DNA; note = Gene: CSK; note = Location (start to end; relative to TSS): CSK_64_94; note = Orientation (relative to transcription): antisense; note = sgRNA Position: 74782150; note = Sequence Name: 56322-704_101_SL_seq_2957
gcggcggcggcggccaacct

SEQ ID NO: 2958 - DNA, 20 bp, Homo sapiens
  source 1..20: mol_type = genomic DNA; note = Gene: CSK; note = Location (start to end; relative to TSS): CSK_19_49; note = Orientation (relative to transcription): sense; note = sgRNA Position: 74782125; note = Sequence Name: 56322-704_101_SL_seq_2958
gcctgcgagcttcctcccag

SEQ ID NO: 2959 - DNA, 20 bp, Homo sapiens
  source 1..20: mol_type = genomic DNA; note = Gene: CSK; note = Location (start to end; relative to TSS): CSK_53_83; note = Orientation (relative to transcription): antisense; note = sgRNA Position: 74782139; note = Sequence Name: 56322-704_101_SL_seq_2959
ggccaacctcggctcgccca

SEQ ID NO: 2960 - DNA, 20 bp, Homo sapiens
  source 1..20: mol_type = genomic DNA; note = Gene: CSNK1A1; note = Location (start to end; relative to TSS): CSNK1A1_39_69; note = Orientation (relative to transcription): sense; note = sgRNA Position: 149551376; note = Sequence Name: 56322-704_101_SL_seq_2960
cattttgtgttggctggagc

SEQ ID NO: 2961 - DNA, 20 bp, Homo sapiens
  source 1..20: mol_type = genomic DNA; note = Gene: CSNK1A1; note = Location (start to end; relative to TSS): CSNK1A1_75_105; note = Orientation (relative to transcription): sense; note = sgRNA Position: 149551340; note = Sequence Name: 56322-704_101_SL_seq_2961
cgtcgtccgcggagtgacag

SEQ ID NO: 2962 - DNA, 20 bp, Homo sapiens
  source 1..20: mol_type = genomic DNA; note = Gene: CSNK1A1; note = Location (start to end; relative to TSS): CSNK1A1_29_59; note = Orientation (relative to transcription): sense; note = sgRNA Position: 149551386; note = Sequence Name: 56322-704_101_SL_seq_2962
ggactgggggcattttgtgt

SEQ ID NO: 2963 - DNA, 20 bp, Homo sapiens
  source 1..20: mol_type = genomic DNA; note = Gene: CSNK1A1; note = Location (start to end; relative to TSS): CSNK1A1_74_104; note = Orientation (relative to transcription): sense; note = sgRNA Position: 149551341; note = Sequence Name: 56322-704_101_SL_seq_2963
gcgtcgtccgcggagtgaca

SEQ ID NO: 2964 - DNA, 20 bp, Homo sapiens
  source 1..20: mol_type = genomic DNA; note = Gene: CSNK1A1; note = Location (start to end; relative to TSS): CSNK1A1_33_63; note = Orientation (relative to transcription): antisense; note = sgRNA Position: 149551402; note = Sequence Name: 56322-704_101_SL_seq_2964
acaaaatgcccccagtcccc

SEQ ID NO: 2965 - DNA, 20 bp, Homo sapiens
  source 1..20: mol_type = genomic DNA; note = Gene: CSNK1A1; note = Location (start to end; relative to TSS): CSNK1A1_73_103; note = Orientation (relative to transcription): sense; note = sgRNA Position: 149551342; note = Sequence Name: 56322-704_101_SL_seq_2965
ggcgtcgtccgcggagtgac

SEQ ID NO: 2966 - DNA, 20 bp, Homo sapiens
  source 1..20: mol_type = genomic DNA; note = Gene: CSNK1A1; note = Location (start to end; relative to TSS): CSNK1A1_34_64; note = Orientation (relative to transcription): antisense; note = sgRNA Position: 149551401; note = Sequence Name: 56322-704_101_SL_seq_2966
cacaaaatgcccccagtccc

SEQ ID NO: 2967 - DNA, 20 bp, Homo sapiens
  source 1..20: mol_type = genomic DNA; note = Gene: CSNK1A1; note = Location (start to end; relative to TSS): CSNK1A1_64_94; note = Orientation (relative to transcription): sense; note = sgRNA Position: 149551351; note = Sequence Name: 56322-704_101_SL_seq_2967
taacaagatggcgtcgtccg

SEQ ID NO: 2968 - DNA, 20 bp, Homo sapiens
  source 1..20: mol_type = genomic DNA; note = Gene: CSNK1A1; note = Location (start to end; relative to TSS): CSNK1A1_17_47; note = Orientation (relative to transcription): antisense; note = sgRNA Position: 149551418; note = Sequence Name: 56322-704_101_SL_seq_2968
ccccgggagccgcttcttca

SEQ ID NO: 2969 - DNA, 20 bp, Homo sapiens
  source 1..20: mol_type = genomic DNA; note = Gene: CSNK1A1; note = Location (start to end; relative to TSS): CSNK1A1_52_82; note = Orientation (relative to transcription): sense; note = sgRNA Position: 149551363; note = Sequence Name: 56322-704_101_SL_seq_2969
ctggagctggagtaacaaga

SEQ ID NO: 2970 - DNA, 20 bp, Homo sapiens
  source 1..20: mol_type = genomic DNA; note = Gene: CSNK1A1L; note = Location (start to end; relative to TSS): CSNK1A1L_46_76; note = Orientation (relative to transcription): sense; note = sgRNA Position: 37105594; note = Sequence Name: 56322-704_101_SL_seq_2970
gccctctggcccacagccgt

SEQ ID NO: 2971 - DNA, 20 bp, Homo sapiens
  source 1..20: mol_type = genomic DNA; note = Gene: CSNK1A1L; note = Location (start to end; relative to TSS): CSNK1A1L_101_131; note = Orientation (relative to transcription): antisense; note = sgRNA Position: 37105559; note = Sequence Name: 56322-704_101_SL_seq_2971
aaagggggcacagcgagttg

SEQ ID NO: 2972 - DNA, 20 bp, Homo sapiens
  source 1..20: mol_type = genomic DNA; note = Gene: CSNK1A1L; note = Location (start to end; relative to TSS): CSNK1A1L_39_69; note = Orientation (relative to transcription): antisense; note = sgRNA Position: 37105621; note = Sequence Name: 56322-704_101_SL_seq_2972
agagggcccggtcacgccgc

SEQ ID NO: 2973 - DNA, 20 bp, Homo sapiens
  source 1..20: mol_type = genomic DNA; note = Gene: CSNK1A1L; note = Location (start to end; relative to TSS): CSNK1A1L_71_101; note = Orientation (relative to transcription): antisense; note = sgRNA Position: 37105589; note = Sequence Name: 56322-704_101_SL_seq_2973
actgctgccaccgctaccaa

SEQ ID NO: 2974 - DNA, 20 bp, Homo sapiens
  source 1..20: mol_type = genomic DNA; note = Gene: CSNK1A1L; note = Location (start to end; relative to TSS): CSNK1A1L_32_62; note = Orientation (relative to transcription): sense; note = sgRNA Position: 37105608; note = Sequence Name: 56322-704_101_SL_seq_2974
ggcggcgtgaccgggccctc

SEQ ID NO: 2975 - DNA, 20 bp, Homo sapiens
  source 1..20: mol_type = genomic DNA; note = Gene: CSNK1A1L; note = Location (start to end; relative to TSS): CSNK1A1L_64_94; note = Orientation (relative to transcription): antisense; note = sgRNA Position: 37105596; note = Sequence Name: 56322-704_101_SL_seq_2975
ccaccgctaccaacggctgt

SEQ ID NO: 2976 - DNA, 20 bp, Homo sapiens
  source 1..20: mol_type = genomic DNA; note = Gene: CSNK1A1L; note = Location (start to end; relative to TSS): CSNK1A1L_24_54; note = Orientation (relative to transcription): sense; note = sgRNA Position: 37105616; note = Sequence Name: 56322-704_101_SL_seq_2976
gcggcgccggcggcgtgacc

SEQ ID NO: 2977 - DNA, 20 bp, Homo sapiens
  source 1..20: mol_type = genomic DNA; note = Gene: CSNK1A1L; note = Location (start to end; relative to TSS): CSNK1A1L_55_85; note = Orientation (relative to transcription): sense; note = sgRNA Position: 37105585; note = Sequence Name: 56322-704_101_SL_seq_2977
cccacagccgttggtagcgg

SEQ ID NO: 2978 - DNA, 20 bp, Homo sapiens
  source 1..20: mol_type = genomic DNA; note = Gene: CSNK1A1L; note = Location (start to end; relative to TSS): CSNK1A1L_14_44; note = Orientation (relative to transcription): sense; note = sgRNA Position: 37105626; note = Sequence Name: 56322-704_101_SL_seq_2978
gaacaaaatggcggcgccgg

SEQ ID NO: 2979 - DNA, 20 bp, Homo sapiens
  source 1..20: mol_type = genomic DNA; note = Gene: CSNK1A1L; note = Location (start to end; relative to TSS): CSNK1A1L_46_76; note = Orientation (relative to transcription): sense; note = sgRNA Position: 37105594; note = Sequence Name: 56322-704_101_SL_seq_2979
gccctctggcccacagccgt

SEQ ID NO: 2980 - DNA, 20 bp, Homo sapiens
  source 1..20: mol_type = genomic DNA; note = Gene: CSNK1D; note = Location (start to end; relative to TSS): CSNK1D_47_77; note = Orientation (relative to transcription): sense; note = sgRNA Position: 82273629; note = Sequence Name: 56322-704_101_SL_seq_2980
gatccgagtccatccgcggc

SEQ ID NO: 2981 - DNA, 20 bp, Homo sapiens
  source 1..20: mol_type = genomic DNA; note = Gene: CSNK1D; note = Location (start to end; relative to TSS): CSNK1D_85_115; note = Orientation (relative to transcription): sense; note = sgRNA Position: 82273591; note = Sequence Name: 56322-704_101_SL_seq_2981
accggtaggggccggagcag

SEQ ID NO: 2982 - DNA, 20 bp, Homo sapiens
  source 1..20: mol_type = genomic DNA; note = Gene: CSNK1D; note = Location (start to end; relative to TSS): CSNK1D_46_76; note = Orientation (relative to transcription): sense; note = sgRNA Position: 82273630; note = Sequence Name: 56322-704_101_SL_seq_2982
agatccgagtccatccgcgg

SEQ ID NO: 2983 - DNA, 20 bp, Homo sapiens
  source 1..20: mol_type = genomic DNA; note = Gene: CSNK1D; note = Location (start to end; relative to TSS): CSNK1D_77_107; note = Orientation (relative to transcription): sense; note = sgRNA Position: 82273599; note = Sequence Name: 56322-704_101_SL_seq_2983
caagcgggaccggtaggggc

SEQ ID NO: 2984 - DNA, 20 bp, Homo sapiens
  source 1..20: mol_type = genomic DNA; note = Gene: CSNK1D; note = Location (start to end; relative to TSS): CSNK1D_43_73; note = Orientation (relative to transcription): sense; note = sgRNA Position: 82273633; note = Sequence Name: 56322-704_101_SL_seq_2984
ggaagatccgagtccatccg

SEQ ID NO: 2985 - DNA, 20 bp, Homo sapiens
  source 1..20: mol_type = genomic DNA; note = Gene: CSNK1D; note = Location (start to end; relative to TSS): CSNK1D_73_103; note = Orientation (relative to transcription): sense; note = sgRNA Position: 82273603; note = Sequence Name: 56322-704_101_SL_seq_2985
agggcaagcgggaccggtag

SEQ ID NO: 2986 - DNA, 20 bp, Homo sapiens
  source 1..20: mol_type = genomic DNA; note = Gene: CSNK1D; note = Location (start to end; relative to TSS): CSNK1D_21_51; note = Orientation (relative to transcription): antisense; note = sgRNA Position: 82273675; note = Sequence Name: 56322-704_101_SL_seq_2986
atcccctttcagctgcctaa

SEQ ID NO: 2987 - DNA, 20 bp, Homo sapiens
  source 1..20: mol_type = genomic DNA; note = Gene: CSNK1D; note = Location (start to end; relative to TSS): CSNK1D_54_84; note = Orientation (relative to transcription): sense; note = sgRNA Position: 82273622; note = Sequence Name: 56322-704_101_SL_seq_2987
gtccatccgcggcggggaga

SEQ ID NO: 2988 - DNA, 20 bp, Homo sapiens
  source 1..20: mol_type = genomic DNA; note = Gene: CSNK1D; note = Location (start to end; relative to TSS): CSNK1D_22_52; note = Orientation (relative to transcription): sense; note = sgRNA Position: 82273654; note = Sequence Name: 56322-704_101_SL_seq_2988
gctgaaaggggatttaggcc

SEQ ID NO: 2989 - DNA, 20 bp, Homo sapiens
  source 1..20: mol_type = genomic DNA; note = Gene: CSNK1D; note = Location (start to end; relative to TSS): CSNK1D_53_83; note = Orientation (relative to transcription): sense; note = sgRNA Position: 82273623; note = Sequence Name: 56322-704_101_SL_seq_2989
agtccatccgcggcggggag

SEQ ID NO: 2990 - DNA, 20 bp, Homo sapiens
  source 1..20: mol_type = genomic DNA; note = Gene: CSNK1E; note = Location (start to end; relative to TSS): CSNK1E_22_52; note = Orientation (relative to transcription): sense; note = sgRNA Position: 38317387; note = Sequence Name: 56322-704_101_SL_seq_2990
cgggcgggcaggaggccggg

SEQ ID NO: 2991 - DNA, 20 bp, Homo sapiens
  source 1..20: mol_type = genomic DNA; note = Gene: CSNK1E; note = Location (start to end; relative to TSS): CSNK1E_167_197; note = Orientation (relative to transcription): sense; note = sgRNA Position: 38317242; note = Sequence Name: 56322-704_101_SL_seq_2991
gggcggctccgcgaatcctc

SEQ ID NO: 2992 - DNA, 20 bp, Homo sapiens
  source 1..20: mol_type = genomic DNA; note = Gene: CSNK1E; note = Location (start to end; relative to TSS): CSNK1E_35_65; note = Orientation (relative to transcription): sense; note = sgRNA Position: 38317374; note = Sequence Name: 56322-704_101_SL_seq_2992
ggccgggaggagggaggcgg

SEQ ID NO: 2993 - DNA, 20 bp, Homo sapiens
  source 1..20: mol_type = genomic DNA; note = Gene: CSNK1E; note = Location (start to end; relative to TSS): CSNK1E_150_180; note = Orientation (relative to transcription): sense; note = sgRNA Position: 38317259; note = Sequence Name: 56322-704_101_SL_seq_2993
ggagaggctggcgcgccggg

SEQ ID NO: 2994 - DNA, 20 bp, Homo sapiens
  source 1..20: mol_type = genomic DNA; note = Gene: CSNK1E; note = Location (start to end; relative to TSS): CSNK1E_32_62; note = Orientation (relative to transcription): sense; note = sgRNA Position: 38317377; note = Sequence Name: 56322-704_101_SL_seq_2994
ggaggccgggaggagggagg

SEQ ID NO: 2995 - DNA, 20 bp, Homo sapiens
  source 1..20: mol_type = genomic DNA; note = Gene: CSNK1E; note = Location (start to end; relative to TSS): CSNK1E_101_131; note = Orientation (relative to transcription): sense; note = sgRNA Position: 38317308; note = Sequence Name: 56322-704_101_SL_seq_2995
cggggccgagcggagcgcgg

SEQ ID NO: 2996 - DNA, 20 bp, Homo sapiens
  source 1..20: mol_type = genomic DNA; note = Gene: CSNK1E; note = Location (start to end; relative to TSS): CSNK1E_26_56; note = Orientation (relative to transcription): sense; note = sgRNA Position: 38317383; note = Sequence Name: 56322-704_101_SL_seq_2996
cgggcaggaggccgggagga

SEQ ID NO: 2997 - DNA, 20 bp, Homo sapiens
  source 1..20: mol_type = genomic DNA; note = Gene: CSNK1E; note = Location (start to end; relative to TSS): CSNK1E_98_128; note = Orientation (relative to transcription): sense; note = sgRNA Position: 38317311; note = Sequence Name: 56322-704_101_SL_seq_2997
ggccggggccgagcggagcg

SEQ ID NO: 2998 - DNA, 20 bp, Homo sapiens
  source 1..20: mol_type = genomic DNA; note = Gene: CSNK1E; note = Location (start to end; relative to TSS): CSNK1E_29_59; note = Orientation (relative to transcription): sense; note = sgRNA Position: 38317380; note = Sequence Name: 56322-704_101_SL_seq_2998
gcaggaggccgggaggaggg

SEQ ID NO: 2999 - DNA, 20 bp, Homo sapiens
  source 1..20: mol_type = genomic DNA; note = Gene: CSNK1E; note = Location (start to end; relative to TSS): CSNK1E_91_121; note = Orientation (relative to transcription): sense; note = sgRNA Position: 38317318; note = Sequence Name: 56322-704_101_SL_seq_2999
agagcccggccggggccgag

SEQ ID NO: 3000 - DNA, 20 bp, Homo sapiens
  source 1..20: mol_type = genomic DNA; note = Gene: CSNK1G1; note = Location (start to end; relative to TSS): CSNK1G1_41_71; note = Orientation (relative to transcription): antisense; note = sgRNA Position: 64356128; note = Sequence Name: 56322-704_101_SL_seq_3000
gaaggcggacgggaggggga

SEQ ID NO: 3001 - DNA, 20 bp, Homo sapiens
  source 1..20: mol_type = genomic DNA; note = Gene: CSNK1G1; note = Location (start to end; relative to TSS): CSNK1G1_71_101; note = Orientation (relative to transcription): antisense; note = sgRNA Position: 64356098; note = Sequence Name: 56322-704_101_SL_seq_3001
ctctctttcccaggagcggg

SEQ ID NO: 3002 - DNA, 20 bp, Homo sapiens
  source 1..20: mol_type = genomic DNA; note = Gene: CSNK1G1; note = Location (start to end; relative to TSS): CSNK1G1_36_66; note = Orientation (relative to transcription): antisense; note = sgRNA Position: 64356133; note = Sequence Name: 56322-704_101_SL_seq_3002
cggacgggagggggaaggcg

SEQ ID NO: 3003 - DNA, 20 bp, Homo sapiens
  source 1..20: mol_type = genomic DNA; note = Gene: CSNK1G1; note = Location (start to end; relative to TSS): CSNK1G1_66_96; note = Orientation (relative to transcription): antisense; note = sgRNA Position: 64356103; note = Sequence Name: 56322-704_101_SL_seq_3003
tttcccaggagcgggaggga

SEQ ID NO: 3004 - DNA, 20 bp, Homo sapiens
  source 1..20: mol_type = genomic DNA; note = Gene: CSNK1G1; note = Location (start to end; relative to TSS): CSNK1G1_27_57; note = Orientation (relative to transcription): antisense; note = sgRNA Position: 64356142; note = Sequence Name: 56322-704_101_SL_seq_3004
gggggaaggcgaggagccga

SEQ ID NO: 3005 - DNA, 20 bp, Homo sapiens
  source 1..20: mol_type = genomic DNA; note = Gene: CSNK1G1; note = Location (start to end; relative to TSS): CSNK1G1_59_89; note = Orientation (relative to transcription): antisense; note = sgRNA Position: 64356110; note = Sequence Name: 56322-704_101_SL_seq_3005
ggagcgggagggaggggaga

SEQ ID NO: 3006 - DNA, 20 bp, Homo sapiens
  source 1..20: mol_type = genomic DNA; note = Gene: CSNK1G1; note = Location (start to end; relative to TSS): CSNK1G1_26_56; note = Orientation (relative to transcription): antisense; note = sgRNA Position: 64356143; note = Sequence Name: 56322-704_101_SL_seq_3006
ggggaaggcgaggagccgag

SEQ ID NO: 3007 - DNA, 20 bp, Homo sapiens
  source 1..20: mol_type = genomic DNA; note = Gene: CSNK1G1; note = Location (start to end; relative to TSS): CSNK1G1_56_86; note = Orientation (relative to transcription): antisense; note = sgRNA Position: 64356113; note = Sequence Name: 56322-704_101_SL_seq_3007
gcgggagggaggggagaagg

SEQ ID NO: 3008 - DNA, 20 bp, Homo sapiens
  source 1..20: mol_type = genomic DNA; note = Gene: CSNK1G1; note = Location (start to end; relative to TSS): CSNK1G1_23_53; note = Orientation (relative to transcription): antisense; note = sgRNA Position: 64356146; note = Sequence Name: 56322-704_101_SL_seq_3008
gaaggcgaggagccgagggg

SEQ ID NO: 3009 - DNA, 20 bp, Homo sapiens
  source 1..20: mol_type = genomic DNA; note = Gene: CSNK1G1; note = Location (start to end; relative to TSS): CSNK1G1_54_84; note = Orientation (relative to transcription): sense; note = sgRNA Position: 64356095; note = Sequence Name: 56322-704_101_SL_seq_3009
ctcccctccctcccgctcct

SEQ ID NO: 3010 - DNA, 20 bp, Homo sapiens
  source 1..20: mol_type = genomic DNA; note = Gene: CSNK1G2; note = Location (start to end; relative to TSS): CSNK1G2_54_84; note = Orientation (relative to transcription): sense; note = sgRNA Position: 1941252; note = Sequence Name: 56322-704_101_SL_seq_3010
cgcctcccgtcccgaacatg

SEQ ID NO: 3011 - DNA, 20 bp, Homo sapiens
  source 1..20: mol_type = genomic DNA; note = Gene: CSNK1G2; note = Location (start to end; relative to TSS): CSNK1G2_89_119; note = Orientation (relative to transcription): antisense; note = sgRNA Position: 1941267; note = Sequence Name: 56322-704_101_SL_seq_3011
ggctcccgcgccgcctgggc

SEQ ID NO: 3012 - DNA, 20 bp, Homo sapiens
  source 1..20: mol_type = genomic DNA; note = Gene: CSNK1G2; note = Location (start to end; relative to TSS): CSNK1G2_57_87; note = Orientation (relative to transcription): sense; note = sgRNA Position: 1941255; note = Sequence Name: 56322-704_101_SL_seq_3012
ctcccgtcccgaacatgcgg

SEQ ID NO: 3013 - DNA, 20 bp, Homo sapiens
  source 1..20: mol_type = genomic DNA; note = Gene: CSNK1G2; note = Location (start to end; relative to TSS): CSNK1G2_89_119; note = Orientation (relative to transcription): antisense; note = sgRNA Position: 1941267; note = Sequence Name: 56322-704_101_SL_seq_3013
ggctcccgcgccgcctgggc

SEQ ID NO: 3014 - DNA, 20 bp, Homo sapiens
  source 1..20: mol_type = genomic DNA; note = Gene: CSNK1G2; note = Location (start to end; relative to TSS): CSNK1G2_27_57; note = Orientation (relative to transcription): antisense; note = sgRNA Position: 1941205; note = Sequence Name: 56322-704_101_SL_seq_3014
gctccgccgcgcccgctccg

SEQ ID NO: 3015 - DNA, 20 bp, Homo sapiens
  source 1..20: mol_type = genomic DNA; note = Gene: CSNK1G2; note = Location (start to end; relative to TSS): CSNK1G2_58_88; note = Orientation (relative to transcription): antisense; note = sgRNA Position: 1941236; note = Sequence Name: 56322-704_101_SL_seq_3015
tgttcgggacgggaggcgcc

SEQ ID NO: 3016 - DNA, 20 bp, Homo sapiens
  source 1..20: mol_type = genomic DNA; note = Gene: CSNK1G2; note = Location (start to end; relative to TSS): CSNK1G2_22_52; note = Orientation (relative to transcription): sense; note = sgRNA Position: 1941220; note = Sequence Name: 56322-704_101_SL_seq_3016
ggagcgggcgcggcggagcg

SEQ ID NO: 3017 - DNA, 20 bp, Homo sapiens
  source 1..20: mol_type = genomic DNA; note = Gene: CSNK1G2; note = Location (start to end; relative to TSS): CSNK1G2_57_87; note = Orientation (relative to transcription): sense; note = sgRNA Position: 1941255; note = Sequence Name: 56322-704_101_SL_seq_3017
ctcccgtcccgaacatgcgg

SEQ ID NO: 3018 - DNA, 20 bp, Homo sapiens
  source 1..20: mol_type = genomic DNA; note = Gene: CSNK1G2; note = Location (start to end; relative to TSS): CSNK1G2_15_45; note = Orientation (relative to transcription): sense; note = sgRNA Position: 1941213; note = Sequence Name: 56322-704_101_SL_seq_3018
gggccccggagcgggcgcgg

SEQ ID NO: 3019 - DNA, 20 bp, Homo sapiens
  source 1..20: mol_type = genomic DNA; note = Gene: CSNK1G2; note = Location (start to end; relative to TSS): CSNK1G2_54_84; note = Orientation (relative to transcription): sense; note = sgRNA Position: 1941252; note = Sequence Name: 56322-704_101_SL_seq_3019
cgcctcccgtcccgaacatg

SEQ ID NO: 3020 - DNA, 20 bp, Homo sapiens
  source 1..20: mol_type = genomic DNA; note = Gene: CSNK1G3; note = Location (start to end; relative to TSS): CSNK1G3_44_74; note = Orientation (relative to transcription): sense; note = sgRNA Position: 123512247; note = Sequence Name: 56322-704_101_SL_seq_3020
gtttgacctccggataagcg

SEQ ID NO: 3021 - DNA, 20 bp, Homo sapiens
  source 1..20: mol_type = genomic DNA; note = Gene: CSNK1G3; note = Location (start to end; relative to TSS): CSNK1G3_91_121; note = Orientation (relative to transcription): sense; note = sgRNA Position: 123512294; note = Sequence Name: 56322-704_101_SL_seq_3021
tgcatcggtggcgacagcag

SEQ ID NO: 3022 - DNA, 20 bp, Homo sapiens
  source 1..20: mol_type = genomic DNA; note = Gene: CSNK1G3; note = Location (start to end; relative to TSS): CSNK1G3_38_68; note = Orientation (relative to transcription): antisense; note = sgRNA Position: 123512221; note = Sequence Name: 56322-704_101_SL_seq_3022
ggtcaaacatccttctgcct

SEQ ID NO: 3023 - DNA, 20 bp, Homo sapiens
  source 1..20: mol_type = genomic DNA; note = Gene: CSNK1G3; note = Location (start to end; relative to TSS): CSNK1G3_79_109; note = Orientation (relative to transcription): sense; note = sgRNA Position: 123512282; note = Sequence Name: 56322-704_101_SL_seq_3023
ttcattccgggctgcatcgg

SEQ ID NO: 3024 - DNA, 20 bp, Homo sapiens
  source 1..20: mol_type = genomic DNA; note = Gene: CSNK1G3; note = Location (start to end; relative to TSS): CSNK1G3_37_67; note = Orientation (relative to transcription): antisense; note = sgRNA Position: 123512220; note = Sequence Name: 56322-704_101_SL_seq_3024
gtcaaacatccttctgcctc

SEQ ID NO: 3025 - DNA, 20 bp, Homo sapiens
  source 1..20: mol_type = genomic DNA; note = Gene: CSNK1G3; note = Location (start to end; relative to TSS): CSNK1G3_76_106; note = Orientation (relative to transcription): sense; note = sgRNA Position: 123512279; note = Sequence Name: 56322-704_101_SL_seq_3025
gcattcattccgggctgcat

SEQ ID NO: 3026 - DNA, 20 bp, Homo sapiens
  source 1..20: mol_type = genomic DNA; note = Gene: CSNK1G3; note = Location (start to end; relative to TSS): CSNK1G3_34_64; note = Orientation (relative to transcription): sense; note = sgRNA Position: 123512237; note = Sequence Name: 56322-704_101_SL_seq_3026
gcagaaggatgtttgacctc

SEQ ID NO: 3027 - DNA, 20 bp, Homo sapiens
  source 1..20: mol_type = genomic DNA; note = Gene: CSNK1G3; note = Location (start to end; relative to TSS): CSNK1G3_66_96; note = Orientation (relative to transcription): sense; note = sgRNA Position: 123512269; note = Sequence Name: 56322-704_101_SL_seq_3027
gcgctgctgtgcattcattc

SEQ ID NO: 3028 - DNA, 20 bp, Homo sapiens
  source 1..20: mol_type = genomic DNA; note = Gene: CSNK1G3; note = Location (start to end; relative to TSS): CSNK1G3_30_60; note = Orientation (relative to transcription): antisense; note = sgRNA Position: 123512213; note = Sequence Name: 56322-704_101_SL_seq_3028
atccttctgcctcgggcatc

SEQ ID NO: 3029 - DNA, 20 bp, Homo sapiens
  source 1..20: mol_type = genomic DNA; note = Gene: CSNK1G3; note = Location (start to end; relative to TSS): CSNK1G3_62_92; note = Orientation (relative to transcription): antisense; note = sgRNA Position: 123512245; note = Sequence Name: 56322-704_101_SL_seq_3029
acagcagcgcctcgcttatc

SEQ ID NO: 3030 - DNA, 20 bp, Homo sapiens
  source 1..20: mol_type = genomic DNA; note = Gene: CSNK2A1; note = Location (start to end; relative to TSS): CSNK2A1_35_65; note = Orientation (relative to transcription): antisense; note = sgRNA Position: 543751; note = Sequence Name: 56322-704_101_SL_seq_3030
gcgatggaggaggagacaca

SEQ ID NO: 3031 - DNA, 20 bp, Homo sapiens
  source 1..20: mol_type = genomic DNA; note = Gene: CSNK2A1; note = Location (start to end; relative to TSS): CSNK2A1_96_126; note = Orientation (relative to transcription): antisense; note = sgRNA Position: 543690; note = Sequence Name: 56322-704_101_SL_seq_3031
tgtggtggaagcggcagcgg

SEQ ID NO: 3032 - DNA, 20 bp, Homo sapiens
  source 1..20: mol_type = genomic DNA; note = Gene: CSNK2A1; note = Location (start to end; relative to TSS): CSNK2A1_45_75; note = Orientation (relative to transcription): antisense; note = sgRNA Position: 543741; note = Sequence Name: 56322-704_101_SL_seq_3032
caatatggcggcgatggagg

SEQ ID NO: 3033 - DNA, 20 bp, Homo sapiens
  source 1..20: mol_type = genomic DNA; note = Gene: CSNK2A1; note = Location (start to end; relative to TSS): CSNK2A1_93_123; note = Orientation (relative to transcription): antisense; note = sgRNA Position: 543693; note = Sequence Name: 56322-704_101_SL_seq_3033
ggtggaagcggcagcggcgg

SEQ ID NO: 3034 - DNA, 20 bp, Homo sapiens
  source 1..20: mol_type = genomic DNA; note = Gene: CSNK2A1; note = Location (start to end; relative to TSS): CSNK2A1_48_78; note = Orientation (relative to transcription): antisense; note = sgRNA Position: 543738; note = Sequence Name: 56322-704_101_SL_seq_3034
agacaatatggcggcgatgg

SEQ ID NO: 3035 - DNA, 20 bp, Homo sapiens
  source 1..20: mol_type = genomic DNA; note = Gene: CSNK2A1; note = Location (start to end; relative to TSS): CSNK2A1_89_119; note = Orientation (relative to transcription): sense; note = sgRNA Position: 543677; note = Sequence Name: 56322-704_101_SL_seq_3035
gccgctgccgcttccaccac

SEQ ID NO: 3036 - DNA, 20 bp, Homo sapiens
  source 1..20: mol_type = genomic DNA; note = Gene: CSNK2A1; note = Location (start to end; relative to TSS): CSNK2A1_30_60; note = Orientation (relative to transcription): antisense; note = sgRNA Position: 543756; note = Sequence Name: 56322-704_101_SL_seq_3036
ggaggaggagacacacggct

SEQ ID NO: 3037 - DNA, 20 bp, Homo sapiens
  source 1..20: mol_type = genomic DNA; note = Gene: CSNK2A1; note = Location (start to end; relative to TSS): CSNK2A1_60_90; note = Orientation (relative to transcription): antisense; note = sgRNA Position: 543726; note = Sequence Name: 56322-704_101_SL_seq_3037
ctctgctcacacagacaata

SEQ ID NO: 3038 - DNA, 20 bp, Homo sapiens
  source 1..20: mol_type = genomic DNA; note = Gene: CSNK2A1; note = Location (start to end; relative to TSS): CSNK2A1_16_46; note = Orientation (relative to transcription): antisense; note = sgRNA Position: 543770; note = Sequence Name: 56322-704_101_SL_seq_3038
acggctcggccgccagccgc

SEQ ID NO: 3039 - DNA, 20 bp, Homo sapiens
  source 1..20: mol_type = genomic DNA; note = Gene: CSNK2A1; note = Location (start to end; relative to TSS): CSNK2A1_48_78; note = Orientation (relative to transcription): antisense; note = sgRNA Position: 543738; note = Sequence Name: 56322-704_101_SL_seq_3039
agacaatatggcggcgatgg

SEQ ID NO: 3040 - DNA, 20 bp, Homo sapiens
  source 1..20: mol_type = genomic DNA; note = Gene: CSNK2A2; note = Location (start to end; relative to TSS): CSNK2A2_47_77; note = Orientation (relative to transcription): antisense; note = sgRNA Position: 58198055; note = Sequence Name: 56322-704_101_SL_seq_3040
gcaccggcagcggcagccac

SEQ ID NO: 3041 - DNA, 20 bp, Homo sapiens
  source 1..20: mol_type = genomic DNA; note = Gene: CSNK2A2; note = Location (start to end; relative to TSS): CSNK2A2_78_108; note = Orientation (relative to transcription): antisense; note = sgRNA Position: 58198024; note = Sequence Name: 56322-704_101_SL_seq_3041
ggctcgcggcccccaggagg

SEQ ID NO: 3042 - DNA, 20 bp, Homo sapiens
  source 1..20: mol_type = genomic DNA; note = Gene: CSNK2A2; note = Location (start to end; relative to TSS): CSNK2A2_35_65; note = Orientation (relative to transcription): antisense; note = sgRNA Position: 58198067; note = Sequence Name: 56322-704_101_SL_seq_3042
gcagccaccggccgggaaag

SEQ ID NO: 3043 - DNA, 20 bp, Homo sapiens
  source 1..20: mol_type = genomic DNA; note = Gene: CSNK2A2; note = Location (start to end; relative to TSS): CSNK2A2_75_105; note = Orientation (relative to transcription): sense; note = sgRNA Position: 58198007; note = Sequence Name: 56322-704_101_SL_seq_3043
cctgggggccgcgagccgag

SEQ ID NO: 3044 - DNA, 20 bp, Homo sapiens
  source 1..20: mol_type = genomic DNA; note = Gene: CSNK2A2; note = Location (start to end; relative to TSS): CSNK2A2_26_56; note = Orientation (relative to transcription): antisense; note = sgRNA Position: 58198076; note = Sequence Name: 56322-704_101_SL_seq_3044
ggccgggaaaggggcagcgg

SEQ ID NO: 3045 - DNA, 20 bp, Homo sapiens
  source 1..20: mol_type = genomic DNA; note = Gene: CSNK2A2; note = Location (start to end; relative to TSS): CSNK2A2_72_102; note = Orientation (relative to transcription): antisense; note = sgRNA Position: 58198030; note = Sequence Name: 56322-704_101_SL_seq_3045
cggcccccaggaggcggcgg

SEQ ID NO: 3046 - DNA, 20 bp, Homo sapiens
  source 1..20: mol_type = genomic DNA; note = Gene: CSNK2A2; note = Location (start to end; relative to TSS): CSNK2A2_22_52; note = Orientation (relative to transcription): sense; note = sgRNA Position: 58198060; note = Sequence Name: 56322-704_101_SL_seq_3046
gctgcccctttcccggccgg

SEQ ID NO: 3047 - DNA, 20 bp, Homo sapiens
  source 1..20: mol_type = genomic DNA; note = Gene: CSNK2A2; note = Location (start to end; relative to TSS): CSNK2A2_60_90; note = Orientation (relative to transcription): sense; note = sgRNA Position: 58198022; note = Sequence Name: 56322-704_101_SL_seq_3047
ccgccgccgccgcctcctgg

SEQ ID NO: 3048 - DNA, 20 bp, Homo sapiens
  source 1..20: mol_type = genomic DNA; note = Gene: CSNK2A2; note = Location (start to end; relative to TSS): CSNK2A2_19_49; note = Orientation (relative to transcription): sense; note = sgRNA Position: 58198063; note = Sequence Name: 56322-704_101_SL_seq_3048
gccgctgcccctttcccggc

SEQ ID NO: 3049 - DNA, 20 bp, Homo sapiens
  source 1..20: mol_type = genomic DNA; note = Gene: CSNK2A2; note = Location (start to end; relative to TSS): CSNK2A2_59_89; note = Orientation (relative to transcription): sense; note = sgRNA Position: 58198023; note = Sequence Name: 56322-704_101_SL_seq_3049
gccgccgccgccgcctcctg

SEQ ID NO: 3050 - DNA, 20 bp, Homo sapiens
  source 1..20: mol_type = genomic DNA; note = Gene: CSNK2A3; note = Location (start to end; relative to TSS): CSNK2A3_55_85; note = Orientation (relative to transcription): antisense; note = sgRNA Position: 11353191; note = Sequence Name: 56322-704_101_SL_seq_3050
ctgtgttcagaagcagcttg

SEQ ID NO: 3051 - DNA, 20 bp, Homo sapiens
  source 1..20: mol_type = genomic DNA; note = Gene: CSNK2A3; note = Location (start to end; relative to TSS): CSNK2A3_92_122; note = Orientation (relative to transcription): antisense; note = sgRNA Position: 11353154; note = Sequence Name: 56322-704_101_SL_seq_3051
acaaagctggacttgatgtt

SEQ ID NO: 3052 - DNA, 20 bp, Homo sapiens
  source 1..20: mol_type = genomic DNA; note = Gene: CSNK2A3; note = Location (start to end; relative to TSS): CSNK2A3_54_84; note = Orientation (relative to transcription): antisense; note = sgRNA Position: 11353192; note = Sequence Name: 56322-704_101_SL_seq_3052
tgtgttcagaagcagcttgg

SEQ ID NO: 3053 - DNA, 20 bp, Homo sapiens
  source 1..20: mol_type = genomic DNA; note = Gene: CSNK2A3; note = Location (start to end; relative to TSS): CSNK2A3_84_114; note = Orientation (relative to transcription): antisense; note = sgRNA Position: 11353162; note = Sequence Name: 56322-704_101_SL_seq_3053
ggacttgatgtttggagatc

SEQ ID NO: 3054 - DNA, 20 bp, Homo sapiens
  source 1..20: mol_type = genomic DNA; note = Gene: CSNK2A3; note = Location (start to end; relative to TSS): CSNK2A3_17_47; note = Orientation (relative to transcription): sense; note = sgRNA Position: 11353209; note = Sequence Name: 56322-704_101_SL_seq_3054
aagaaaacaggtctgaaaca

SEQ ID NO: 3055 - DNA, 20 bp, Homo sapiens
  source 1..20: mol_type = genomic DNA; note = Gene: CSNK2A3; note = Location (start to end; relative to TSS): CSNK2A3_56_86; note = Orientation (relative to transcription): antisense; note = sgRNA Position: 11353190; note = Sequence Name: 56322-704_101_SL_seq_3055
actgtgttcagaagcagctt

SEQ ID NO: 3056 - DNA, 20 bp, Homo sapiens
  source 1..20: mol_type = genomic DNA; note = Gene: CSNK2A3; note = Location (start to end; relative to TSS): CSNK2A3_16_46; note = Orientation (relative to transcription): antisense; note = sgRNA Position: 11353230; note = Sequence Name: 56322-704_101_SL_seq_3056
gacctgttttcttcacactg

SEQ ID NO: 3057 - DNA, 20 bp, Homo sapiens
  source 1..20: mol_type = genomic DNA; note = Gene: CSNK2A3; note = Location (start to end; relative to TSS): CSNK2A3_55_85; note = Orientation (relative to transcription): antisense; note = sgRNA Position: 11353191; note = Sequence Name: 56322-704_101_SL_seq_3057
ctgtgttcagaagcagcttg

SEQ ID NO: 3058 - DNA, 20 bp, Homo sapiens
  source 1..20: mol_type = genomic DNA; note = Gene: CSNK2A3; note = Location (start to end; relative to TSS): CSNK2A3_13_43; note = Orientation (relative to transcription): antisense; note = sgRNA Position: 11353233; note = Sequence Name: 56322-704_101_SL_seq_3058
ctgttttcttcacactgtgg

SEQ ID NO: 3059 - DNA, 20 bp, Homo sapiens
  source 1..20: mol_type = genomic DNA; note = Gene: CSNK2A3; note = Location (start to end; relative to TSS): CSNK2A3_54_84; note = Orientation (relative to transcription): antisense; note = sgRNA Position: 11353192; note = Sequence Name: 56322-704_101_SL_seq_3059
tgtgttcagaagcagcttgg

SEQ ID NO: 3060 - DNA, 20 bp, Homo sapiens
  source 1..20: mol_type = genomic DNA; note = Gene: CSNK2B; note = Location (start to end; relative to TSS): CSNK2B_27_57; note = Orientation (relative to transcription): antisense; note = sgRNA Position: 31666113; note = Sequence Name: 56322-704_101_SL_seq_3060
gccgcggacccgaccgcggc

SEQ ID NO: 3061 - DNA, 20 bp, Homo sapiens
  source 1..20: mol_type = genomic DNA; note = Gene: CSNK2B; note = Location (start to end; relative to TSS): CSNK2B_76_106; note = Orientation (relative to transcription): antisense; note = sgRNA Position: 31666162; note = Sequence Name: 56322-704_101_SL_seq_3061
gtagggaagttgctacttcc

SEQ ID NO: 3062 - DNA, 20 bp, Homo sapiens
  source 1..20: mol_type = genomic DNA; note = Gene: CSNK2B; note = Location (start to end; relative to TSS): CSNK2B_31_61; note = Orientation (relative to transcription): antisense; note = sgRNA Position: 31666117; note = Sequence Name: 56322-704_101_SL_seq_3062
gcaggccgcggacccgaccg

SEQ ID NO: 3063 - DNA, 20 bp, Homo sapiens
  source 1..20: mol_type = genomic DNA; note = Gene: CSNK2B; note = Location (start to end; relative to TSS): CSNK2B_75_105; note = Orientation (relative to transcription): antisense; note = sgRNA Position: 31666161; note = Sequence Name: 56322-704_101_SL_seq_3063
tagggaagttgctacttcca

SEQ ID NO: 3064 - DNA, 20 bp, Homo sapiens
  source 1..20: mol_type = genomic DNA; note = Gene: CSNK2B; note = Location (start to end; relative to TSS): CSNK2B_32_62; note = Orientation (relative to transcription): sense; note = sgRNA Position: 31666138; note = Sequence Name: 56322-704_101_SL_seq_3064
gtccgcggcctgcgctgtag

SEQ ID NO: 3065 - DNA, 20 bp, Homo sapiens
  source 1..20: mol_type = genomic DNA; note = Gene: CSNK2B; note = Location (start to end; relative to TSS): CSNK2B_70_100; note = Orientation (relative to transcription): antisense; note = sgRNA Position: 31666156; note = Sequence Name: 56322-704_101_SL_seq_3065
aagttgctacttccagggaa

SEQ ID NO: 3066 - DNA, 20 bp, Homo sapiens
  source 1..20: mol_type = genomic DNA; note = Gene: CSNK2B; note = Location (start to end; relative to TSS): CSNK2B_19_49; note = Orientation (relative to transcription): antisense; note = sgRNA Position: 31666105; note = Sequence Name: 56322-704_101_SL_seq_3066
cccgaccgcggcaggcgaag

SEQ ID NO: 3067 - DNA, 20 bp, Homo sapiens
  source 1..20: mol_type = genomic DNA; note = Gene: CSNK2B; note = Location (start to end; relative to TSS): CSNK2B_67_97; note = Orientation (relative to transcription): antisense; note = sgRNA Position: 31666153; note = Sequence Name: 56322-704_101_SL_seq_3067
ttgctacttccagggaacgg

SEQ ID NO: 3068 - DNA, 20 bp, Homo sapiens
  source 1..20: mol_type = genomic DNA; note = Gene: CSNK2B; note = Location (start to end; relative to TSS): CSNK2B_18_48; note = Orientation (relative to transcription): antisense; note = sgRNA Position: 31666104; note = Sequence Name: 56322-704_101_SL_seq_3068
ccgaccgcggcaggcgaagt

SEQ ID NO: 3069 - DNA, 20 bp, Homo sapiens
  source 1..20: mol_type = genomic DNA; note = Gene: CSNK2B; note = Location (start to end; relative to TSS): CSNK2B_49_79; note = Orientation (relative to transcription): antisense; note = sgRNA Position: 31666135; note = Sequence Name: 56322-704_101_SL_seq_3069
ggcggcgaccgctacagcgc

SEQ ID NO: 3070 - DNA, 20 bp, Homo sapiens
  source 1..20: mol_type = genomic DNA; note = Gene: DAPK1; note = Location (start to end; relative to TSS): DAPK1_31_61; note = Orientation (relative to transcription): sense; note = sgRNA Position: 87497924; note = Sequence Name: 56322-704_101_SL_seq_3070
cggggactttgttccctccg

SEQ ID NO: 3071 - DNA, 20 bp, Homo sapiens
  source 1..20: mol_type = genomic DNA; note = Gene: DAPK1; note = Location (start to end; relative to TSS): DAPK1_79_109; note = Orientation (relative to transcription): sense; note = sgRNA Position: 87497972; note = Sequence Name: 56322-704_101_SL_seq_3071
agggtctggggccggcgcct

SEQ ID NO: 3072 - DNA, 20 bp, Homo sapiens
  source 1..20: mol_type = genomic DNA; note = Gene: DAPK1; note = Location (start to end; relative to TSS): DAPK1_33_63; note = Orientation (relative to transcription): antisense; note = sgRNA Position: 87497906; note = Sequence Name: 56322-704_101_SL_seq_3072
gggaacaaagtccccggcgt

SEQ ID NO: 3073 - DNA, 20 bp, Homo sapiens
  source 1..20: mol_type = genomic DNA; note = Gene: DAPK1; note = Location (start to end; relative to TSS): DAPK1_71_101; note = Orientation (relative to transcription): sense; note = sgRNA Position: 87497964; note = Sequence Name: 56322-704_101_SL_seq_3073
gcagcggcagggtctggggc

SEQ ID NO: 3074 - DNA, 20 bp, Homo sapiens
  source 1..20: mol_type = genomic DNA; note = Gene: DAPK1; note = Location (start to end; relative to TSS): DAPK1_34_64; note = Orientation (relative to transcription): sense; note = sgRNA Position: 87497927; note = Sequence Name: 56322-704_101_SL_seq_3074
ggactttgttccctccgcgg

SEQ ID NO: 3075 - DNA, 20 bp, Homo sapiens
  source 1..20: mol_type = genomic DNA; note = Gene: DAPK1; note = Location (start to end; relative to TSS): DAPK1_67_97; note = Orientation (relative to transcription): sense; note = sgRNA Position: 87497960; note = Sequence Name: 56322-704_101_SL_seq_3075
actcgcagcggcagggtctg

SEQ ID NO: 3076 - DNA, 20 bp, Homo sapiens
  source 1..20: mol_type = genomic DNA; note = Gene: DAPK1; note = Location (start to end; relative to TSS): DAPK1_28_58; note = Orientation (relative to transcription): antisense; note = sgRNA Position: 87497901; note = Sequence Name: 56322-704_101_SL_seq_3076
caaagtccccggcgttggct

SEQ ID NO: 3077 - DNA, 20 bp, Homo sapiens
  source 1..20: mol_type = genomic DNA; note = Gene: DAPK1; note = Location (start to end; relative to TSS): DAPK1_59_89; note = Orientation (relative to transcription): sense; note = sgRNA Position: 87497952; note = Sequence Name: 56322-704_101_SL_seq_3077
actcggcaactcgcagcggc

SEQ ID NO: 3078 - DNA, 20 bp, Homo sapiens
  source 1..20: mol_type = genomic DNA; note = Gene: DAPK1; note = Location (start to end; relative to TSS): DAPK1_23_53; note = Orientation (relative to transcription): antisense; note = sgRNA Position: 87497896; note = Sequence Name: 56322-704_101_SL_seq_3078
tccccggcgttggctcggtc

SEQ ID NO: 3079 - DNA, 20 bp, Homo sapiens
  source 1..20: mol_type = genomic DNA; note = Gene: DAPK1; note = Location (start to end; relative to TSS): DAPK1_53_83; note = Orientation (relative to transcription): antisense; note = sgRNA Position: 87497926; note = Sequence Name: 56322-704_101_SL_seq_3079
tgccgagtcccctccgcgga

SEQ ID NO: 3080 - DNA, 20 bp, Homo sapiens
  source 1..20: mol_type = genomic DNA; note = Gene: DAPK2; note = Location (start to end; relative to TSS): DAPK2_22_52; note = Orientation (relative to transcription): sense; note = sgRNA Position: 64046439; note = Sequence Name: 56322-704_101_SL_seq_3080
gccgggcgctctgggaggag

SEQ ID NO: 3081 - DNA, 20 bp, Homo sapiens
  source 1..20: mol_type = genomic DNA; note = Gene: DAPK2; note = Location (start to end; relative to TSS): DAPK2_128_158; note = Orientation (relative to transcription): sense; note = sgRNA Position: 64046333; note = Sequence Name: 56322-704_101_SL_seq_3081
cgctcccgccgcgcctgccg

SEQ ID NO: 3082 - DNA, 20 bp, Homo sapiens
  source 1..20: mol_type = genomic DNA; note = Gene: DAPK2; note = Location (start to end; relative to TSS): DAPK2_30_60; note = Orientation (relative to transcription): sense; note = sgRNA Position: 64046431; note = Sequence Name: 56322-704_101_SL_seq_3082
ctctgggaggagaggactgc

SEQ ID NO: 3083 - DNA, 20 bp, Homo sapiens
  source 1..20: mol_type = genomic DNA; note = Gene: DAPK2; note = Location (start to end; relative to TSS): DAPK2_88_118; note = Orientation (relative to transcription): antisense; note = sgRNA Position: 64046393; note = Sequence Name: 56322-704_101_SL_seq_3083
ggcgggcgcggcgggaacgg

SEQ ID NO: 3084 - DNA, 20 bp, Homo sapiens
  source 1..20: mol_type = genomic DNA; note = Gene: DAPK2; note = Location (start to end; relative to TSS): DAPK2_31_61; note = Orientation (relative to transcription): sense; note = sgRNA Position: 64046430; note = Sequence Name: 56322-704_101_SL_seq_3084
tctgggaggagaggactgca

SEQ ID NO: 3085 - DNA, 20 bp, Homo sapiens
  source 1..20: mol_type = genomic DNA; note = Gene: DAPK2; note = Location (start to end; relative to TSS): DAPK2_79_109; note = Orientation (relative to transcription): antisense; note = sgRNA Position: 64046402; note = Sequence Name: 56322-704_101_SL_seq_3085
ggcgggaacgggggacgcgg

SEQ ID NO: 3086 - DNA, 20 bp, Homo sapiens
  source 1..20: mol_type = genomic DNA; note = Gene: DAPK2; note = Location (start to end; relative to TSS): DAPK2_17_47; note = Orientation (relative to transcription): sense; note = sgRNA Position: 64046444; note = Sequence Name: 56322-704_101_SL_seq_3086
cgggtgccgggcgctctggg

SEQ ID NO: 3087 - DNA, 20 bp, Homo sapiens
  source 1..20: mol_type = genomic DNA; note = Gene: DAPK2; note = Location (start to end; relative to TSS): DAPK2_77_107; note = Orientation (relative to transcription): antisense; note = sgRNA Position: 64046404; note = Sequence Name: 56322-704_101_SL_seq_3087
cgggaacgggggacgcggcg

SEQ ID NO: 3088 - DNA, 20 bp, Homo sapiens
  source 1..20: mol_type = genomic DNA; note = Gene: DAPK2; note = Location (start to end; relative to TSS): DAPK2_14_44; note = Orientation (relative to transcription): sense; note = sgRNA Position: 64046447; note = Sequence Name: 56322-704_101_SL_seq_3088
gggcgggtgccgggcgctct

SEQ ID NO: 3089 - DNA, 20 bp, Homo sapiens
  source 1..20: mol_type = genomic DNA; note = Gene: DAPK2; note = Location (start to end; relative to TSS): DAPK2_68_98; note = Orientation (relative to transcription): antisense; note = sgRNA Position: 64046413; note = Sequence Name: 56322-704_101_SL_seq_3089
gggacgcggcggggtgcgct

SEQ ID NO: 3090 - DNA, 20 bp, Homo sapiens
  source 1..20: mol_type = genomic DNA; note = Gene: DAPK3; note = Location (start to end; relative to TSS): DAPK3_47_77; note = Orientation (relative to transcription): sense; note = sgRNA Position: 3971028; note = Sequence Name: 56322-704_101_SL_seq_3090
ccgtattctccgggctgcgg

SEQ ID NO: 3091 - DNA, 20 bp, Homo sapiens
  source 1..20: mol_type = genomic DNA; note = Gene: DAPK3; note = Location (start to end; relative to TSS): DAPK3_78_108; note = Orientation (relative to transcription): sense; note = sgRNA Position: 3970997; note = Sequence Name: 56322-704_101_SL_seq_3091
cgggctcgggccgaggctgg

SEQ ID NO: 3092 - DNA, 20 bp, Homo sapiens
  source 1..20: mol_type = genomic DNA; note = Gene: DAPK3; note = Location (start to end; relative to TSS): DAPK3_44_74; note = Orientation (relative to transcription): sense; note = sgRNA Position: 3971031; note = Sequence Name: 56322-704_101_SL_seq_3092
cggccgtattctccgggctg

SEQ ID NO: 3093 - DNA, 20 bp, Homo sapiens
  source 1..20: mol_type = genomic DNA; note = Gene: DAPK3; note = Location (start to end; relative to TSS): DAPK3_75_105; note = Orientation (relative to transcription): sense; note = sgRNA Position: 3971000; note = Sequence Name: 56322-704_101_SL_seq_3093
gagcgggctcgggccgaggc

SEQ ID NO: 3094 - DNA, 20 bp, Homo sapiens
  source 1..20: mol_type = genomic DNA; note = Gene: DAPK3; note = Location (start to end; relative to TSS): DAPK3_38_68; note = Orientation (relative to transcription): sense; note = sgRNA Position: 3971037; note = Sequence Name: 56322-704_101_SL_seq_3094
cggcgccggccgtattctcc

SEQ ID NO: 3095 - DNA, 20 bp, Homo sapiens
  source 1..20: mol_type = genomic DNA; note = Gene: DAPK3; note = Location (start to end; relative to TSS): DAPK3_71_101; note = Orientation (relative to transcription): sense; note = sgRNA Position: 3971004; note = Sequence Name: 56322-704_101_SL_seq_3095
taaagagcgggctcgggccg

SEQ ID NO: 3096 - DNA, 20 bp, Homo sapiens
  source 1..20: mol_type = genomic DNA; note = Gene: DAPK3; note = Location (start to end; relative to TSS): DAPK3_24_54; note = Orientation (relative to transcription): sense; note = sgRNA Position: 3971051; note = Sequence Name: 56322-704_101_SL_seq_3096
ggtggccagcgcggcggcgc

SEQ ID NO: 3097 - DNA, 20 bp, Homo sapiens
  source 1..20: mol_type = genomic DNA; note = Gene: DAPK3; note = Location (start to end; relative to TSS): DAPK3_56_86; note = Orientation (relative to transcription): antisense; note = sgRNA Position: 3971039; note = Sequence Name: 56322-704_101_SL_seq_3097
cctccgcagcccggagaata

SEQ ID NO: 3098 - DNA, 20 bp, Homo sapiens
  source 1..20: mol_type = genomic DNA; note = Gene: DAPK3; note = Location (start to end; relative to TSS): DAPK3_18_48; note = Orientation (relative to transcription): sense; note = sgRNA Position: 3971057; note = Sequence Name: 56322-704_101_SL_seq_3098
ggcggcggtggccagcgcgg

SEQ ID NO: 3099 - DNA, 20 bp, Homo sapiens
  source 1..20: mol_type = genomic DNA; note = Gene: DAPK3; note = Location (start to end; relative to TSS): DAPK3_48_78; note = Orientation (relative to transcription): sense; note = sgRNA Position: 3971027; note = Sequence Name: 56322-704_101_SL_seq_3099
cgtattctccgggctgcgga

SEQ ID NO: 3100 - DNA, 20 bp, Homo sapiens
  source 1..20: mol_type = genomic DNA; note = Gene: DCK; note = Location (start to end; relative to TSS): DCK_27_57; note = Orientation (relative to transcription): sense; note = sgRNA Position: 70993702; note = Sequence Name: 56322-704_101_SL_seq_3100
cccgacacccgccggcgggc

SEQ ID NO: 3101 - DNA, 20 bp, Homo sapiens
  source 1..20: mol_type = genomic DNA; note = Gene: DCK; note = Location (start to end; relative to TSS): DCK_71_101; note = Orientation (relative to transcription): sense; note = sgRNA Position: 70993746; note = Sequence Name: 56322-704_101_SL_seq_3101
caggtcaggatctggcttag

SEQ ID NO: 3102 - DNA, 20 bp, Homo sapiens
  source 1..20: mol_type = genomic DNA; note = Gene: DCK; note = Location (start to end; relative to TSS): DCK_24_54; note = Orientation (relative to transcription): antisense; note = sgRNA Position: 70993679; note = Sequence Name: 56322-704_101_SL_seq_3102
cgggtgtcggggtttgactt

SEQ ID NO: 3103 - DNA, 20 bp, Homo sapiens
  source 1..20: mol_type = genomic DNA; note = Gene: DCK; note = Location (start to end; relative to TSS): DCK_63_93; note = Orientation (relative to transcription): sense; note = sgRNA Position: 70993738; note = Sequence Name: 56322-704_101_SL_seq_3103
tgacccggcaggtcaggatc

SEQ ID NO: 3104 - DNA, 20 bp, Homo sapiens
  source 1..20: mol_type = genomic DNA; note = Gene: DCK; note = Location (start to end; relative to TSS): DCK_23_53; note = Orientation (relative to transcription): sense; note = sgRNA Position: 70993698; note = Sequence Name: 56322-704_101_SL_seq_3104
aaaccccgacacccgccggc

SEQ ID NO: 3105 - DNA, 20 bp, Homo sapiens
  source 1..20: mol_type = genomic DNA; note = Gene: DCK; note = Location (start to end; relative to TSS): DCK_57_87; note = Orientation (relative to transcription): sense; note = sgRNA Position: 70993732; note = Sequence Name: 56322-704_101_SL_seq_3105
actagctgacccggcaggtc

SEQ ID NO: 3106 - DNA, 20 bp, Homo sapiens
  source 1..20: mol_type = genomic DNA; note = Gene: DCK; note = Location (start to end; relative to TSS): DCK_22_52; note = Orientation (relative to transcription): sense; note = sgRNA Position: 70993697; note = Sequence Name: 56322-704_101_SL_seq_3106
caaaccccgacacccgccgg

SEQ ID NO: 3107 - DNA, 20 bp, Homo sapiens
  source 1..20: mol_type = genomic DNA; note = Gene: DCK; note = Location (start to end; relative to TSS): DCK_55_85; note = Orientation (relative to transcription): antisense; note = sgRNA Position: 70993710; note = Sequence Name: 56322-704_101_SL_seq_3107
gggtcagctagtgagctcac

SEQ ID NO: 3108 - DNA, 20 bp, Homo sapiens
  source 1..20: mol_type = genomic DNA; note = Gene: DCK; note = Location (start to end; relative to TSS): DCK_19_49; note = Orientation (relative to transcription): sense; note = sgRNA Position: 70993694; note = Sequence Name: 56322-704_101_SL_seq_3108
agtcaaaccccgacacccgc

SEQ ID NO: 3109 - DNA, 20 bp, Homo sapiens
  source 1..20: mol_type = genomic DNA; note = Gene: DCK; note = Location (start to end; relative to TSS): DCK_52_82; note = Orientation (relative to transcription): sense; note = sgRNA Position: 70993727; note = Sequence Name: 56322-704_101_SL_seq_3109
agctcactagctgacccggc

SEQ ID NO: 3110 - DNA, 20 bp, Homo sapiens
  source 1..20: mol_type = genomic DNA; note = Gene: DCLK1; note = Location (start to end; relative to TSS): DCLK1_51_81; note = Orientation (relative to transcription): antisense; note = sgRNA Position: 36131327; note = Sequence Name: 56322-704_101_SL_seq_3110
ggcccgtcctcattgaaatg

SEQ ID NO: 3111 - DNA, 20 bp, Homo sapiens
  source 1..20: mol_type = genomic DNA; note = Gene: DCLK1; note = Location (start to end; relative to TSS): DCLK1_84_114; note = Orientation (relative to transcription): antisense; note = sgRNA Position: 36131294; note = Sequence Name: 56322-704_101_SL_seq_3111
tcggttgcggccactagtgc

SEQ ID NO: 3112 - DNA, 20 bp, Homo sapiens
  source 1..20: mol_type = genomic DNA; note = Gene: DCLK1; note = Location (start to end; relative to TSS): DCLK1_46_76; note = Orientation (relative to transcription): sense; note = sgRNA Position: 36131312; note = Sequence Name: 56322-704_101_SL_seq_3112
atttcaatgaggacgggccg

SEQ ID NO: 3113 - DNA, 20 bp, Homo sapiens
  source 1..20: mol_type = genomic DNA; note = Gene: DCLK1; note = Location (start to end; relative to TSS): DCLK1_83_113; note = Orientation (relative to transcription): antisense; note = sgRNA Position: 36131295; note = Sequence Name: 56322-704_101_SL_seq_3113
cggttgcggccactagtgca

SEQ ID NO: 3114 - DNA, 20 bp, Homo sapiens
  source 1..20: mol_type = genomic DNA; note = Gene: DCLK1; note = Location (start to end; relative to TSS): DCLK1_40_70; note = Orientation (relative to transcription): sense; note = sgRNA Position: 36131318; note = Sequence Name: 56322-704_101_SL_seq_3114
cgccgcatttcaatgaggac

SEQ ID NO: 3115 - DNA, 20 bp, Homo sapiens
  source 1..20: mol_type = genomic DNA; note = Gene: DCLK1; note = Location (start to end; relative to TSS): DCLK1_77_107; note = Orientation (relative to transcription): sense; note = sgRNA Position: 36131281; note = Sequence Name: 56322-704_101_SL_seq_3115
tgcactagtggccgcaaccg

SEQ ID NO: 3116 - DNA, 20 bp, Homo sapiens
  source 1..20: mol_type = genomic DNA; note = Gene: DCLK1; note = Location (start to end; relative to TSS): DCLK1_39_69; note = Orientation (relative to transcription): sense; note = sgRNA Position: 36131319; note = Sequence Name: 56322-704_101_SL_seq_3116
gcgccgcatttcaatgagga

SEQ ID NO: 3117 - DNA, 20 bp, Homo sapiens
  source 1..20: mol_type = genomic DNA; note = Gene: DCLK1; note = Location (start to end; relative to TSS): DCLK1_72_102; note = Orientation (relative to transcription): antisense; note = sgRNA Position: 36131306; note = Sequence Name: 56322-704_101_SL_seq_3117
actagtgcagggatgtgcct

SEQ ID NO: 3118 - DNA, 20 bp, Homo sapiens
  source 1..20: mol_type = genomic DNA; note = Gene: DCLK1; note = Location (start to end; relative to TSS): DCLK1_35_65; note = Orientation (relative to transcription): sense; note = sgRNA Position: 36131323; note = Sequence Name: 56322-704_101_SL_seq_3118
cgaagcgccgcatttcaatg

SEQ ID NO: 3119 - DNA, 20 bp, Homo sapiens
  source 1..20: mol_type = genomic DNA; note = Gene: DCLK1; note = Location (start to end; relative to TSS): DCLK1_65_95; note = Orientation (relative to transcription): sense; note = sgRNA Position: 36131293; note = Sequence Name: 56322-704_101_SL_seq_3119
gaggcacatccctgcactag

SEQ ID NO: 3120 - DNA, 20 bp, Homo sapiens
  source 1..20: mol_type = genomic DNA; note = Gene: DCLK2; note = Location (start to end; relative to TSS): DCLK2_36_66; note = Orientation (relative to transcription): antisense; note = sgRNA Position: 150078487; note = Sequence Name: 56322-704_101_SL_seq_3120
gcgcccggatcccgcccgcc

SEQ ID NO: 3121 - DNA, 20 bp, Homo sapiens
  source 1..20: mol_type = genomic DNA; note = Gene: DCLK2; note = Location (start to end; relative to TSS): DCLK2_81_111; note = Orientation (relative to transcription): sense; note = sgRNA Position: 150078552; note = Sequence Name: 56322-704_101_SL_seq_3121
gggcccgcgcgactcccccg

SEQ ID NO: 3122 - DNA, 20 bp, Homo sapiens
  source 1..20: mol_type = genomic DNA; note = Gene: DCLK2; note = Location (start to end; relative to TSS): DCLK2_19_49; note = Orientation (relative to transcription): antisense; note = sgRNA Position: 150078470; note = Sequence Name: 56322-704_101_SL_seq_3122
gccgggcagcgcgcgccgtt

SEQ ID NO: 3123 - DNA, 20 bp, Homo sapiens
  source 1..20: mol_type = genomic DNA; note = Gene: DCLK2; note = Location (start to end; relative to TSS): DCLK2_80_110; note = Orientation (relative to transcription): antisense; note = sgRNA Position: 150078531; note = Sequence Name: 56322-704_101_SL_seq_3123
gtcgcgcgggcccaggcccg

SEQ ID NO: 3124 - DNA, 20 bp, Homo sapiens
  source 1..20: mol_type = genomic DNA; note = Gene: DCLK2; note = Location (start to end; relative to TSS): DCLK2_17_47; note = Orientation (relative to transcription): antisense; note = sgRNA Position: 150078468; note = Sequence Name: 56322-704_101_SL_seq_3124
cgggcagcgcgcgccgttcg

SEQ ID NO: 3125 - DNA, 20 bp, Homo sapiens
  source 1..20: mol_type = genomic DNA; note = Gene: DCLK2; note = Location (start to end; relative to TSS): DCLK2_61_91; note = Orientation (relative to transcription): antisense; note = sgRNA Position: 150078512; note = Sequence Name: 56322-704_101_SL_seq_3125
ggggtgcagcgccgccgcct

SEQ ID NO: 3126 - DNA, 20 bp, Homo sapiens
  source 1..20: mol_type = genomic DNA; note = Gene: DCLK2; note = Location (start to end; relative to TSS): DCLK2_16_46; note = Orientation (relative to transcription): sense; note = sgRNA Position: 150078487; note = Sequence Name: 56322-704_101_SL_seq_3126
ggcgcgcgctgcccggcggg

SEQ ID NO: 3127 - DNA, 20 bp, Homo sapiens
  source 1..20: mol_type = genomic DNA; note = Gene: DCLK2; note = Location (start to end; relative to TSS): DCLK2_55_85; note = Orientation (relative to transcription): sense; note = sgRNA Position: 150078526; note = Sequence Name: 56322-704_101_SL_seq_3127
aggcggcggcgctgcacccc

SEQ ID NO: 3128 - DNA, 20 bp, Homo sapiens
  source 1..20: mol_type = genomic DNA; note = Gene: DCLK2; note = Location (start to end; relative to TSS): DCLK2_12_42; note = Orientation (relative to transcription): sense; note = sgRNA Position: 150078483; note = Sequence Name: 56322-704_101_SL_seq_3128
gaacggcgcgcgctgcccgg

SEQ ID NO: 3129 - DNA, 20 bp, Homo sapiens
  source 1..20: mol_type = genomic DNA; note = Gene: DCLK2; note = Location (start to end; relative to TSS): DCLK2_54_84; note = Orientation (relative to transcription): sense; note = sgRNA Position: 150078525; note = Sequence Name: 56322-704_101_SL_seq_3129
gaggcggcggcgctgcaccc

SEQ ID NO: 3130 - DNA, 20 bp, Homo sapiens
  source 1..20: mol_type = genomic DNA; note = Gene: DCLK3; note = Location (start to end; relative to TSS): DCLK3_65_95; note = Orientation (relative to transcription): sense; note = sgRNA Position: 36764464; note = Sequence Name: 56322-704_101_SL_seq_3130
cgcgcccccggagacgttcc

SEQ ID NO: 3131 - DNA, 20 bp, Homo sapiens
  source 1..20: mol_type = genomic DNA; note = Gene: DCLK3; note = Location (start to end; relative to TSS): DCLK3_96_126; note = Orientation (relative to transcription): sense; note = sgRNA Position: 36764433; note = Sequence Name: 56322-704_101_SL_seq_3131
gccgggcgctgcgcggcgcg

SEQ ID NO: 3132 - DNA, 20 bp, Homo sapiens
  source 1..20: mol_type = genomic DNA; note = Gene: DCLK3; note = Location (start to end; relative to TSS): DCLK3_53_83; note = Orientation (relative to transcription): sense; note = sgRNA Position: 36764476; note = Sequence Name: 56322-704_101_SL_seq_3132
gttgctaagtcccgcgcccc

SEQ ID NO: 3133 - DNA, 20 bp, Homo sapiens
  source 1..20: mol_type = genomic DNA; note = Gene: DCLK3; note = Location (start to end; relative to TSS): DCLK3_89_119; note = Orientation (relative to transcription): sense; note = sgRNA Position: 36764440; note = Sequence Name: 56322-704_101_SL_seq_3133
ggctgtcgccgggcgctgcg

SEQ ID NO: 3134 - DNA, 20 bp, Homo sapiens
  source 1..20: mol_type = genomic DNA; note = Gene: DCLK3; note = Location (start to end; relative to TSS): DCLK3_28_58; note = Orientation (relative to transcription): antisense; note = sgRNA Position: 36764521; note = Sequence Name: 56322-704_101_SL_seq_3134
tgcagccgccctctctgcgc

SEQ ID NO: 3135 - DNA, 20 bp, Homo sapiens
  source 1..20: mol_type = genomic DNA; note = Gene: DCLK3; note = Location (start to end; relative to TSS): DCLK3_68_98; note = Orientation (relative to transcription): sense; note = sgRNA Position: 36764461; note = Sequence Name: 56322-704_101_SL_seq_3135
gcccccggagacgttcccgg

SEQ ID NO: 3136 - DNA, 20 bp, Homo sapiens
  source 1..20: mol_type = genomic DNA; note = Gene: DCLK3; note = Location (start to end; relative to TSS): DCLK3_31_61; note = Orientation (relative to transcription): sense; note = sgRNA Position: 36764498; note = Sequence Name: 56322-704_101_SL_seq_3136
gggcggctgcagctggtgcg

SEQ ID NO: 3137 - DNA, 20 bp, Homo sapiens
  source 1..20: mol_type = genomic DNA; note = Gene: DCLK3; note = Location (start to end; relative to TSS): DCLK3_65_95; note = Orientation (relative to transcription): sense; note = sgRNA Position: 36764464; note = Sequence Name: 56322-704_101_SL_seq_3137
cgcgcccccggagacgttcc

SEQ ID NO: 3138 - DNA, 20 bp, Homo sapiens
  source 1..20: mol_type = genomic DNA; note = Gene: DCLK3; note = Location (start to end; relative to TSS): DCLK3_-2_28; note = Orientation (relative to transcription): antisense; note = sgRNA Position: 36764551; note = Sequence Name: 56322-704_101_SL_seq_3138
atgcgcgccgctcctggccc

SEQ ID NO: 3139 - DNA, 20 bp, Homo sapiens
  source 1..20: mol_type = genomic DNA; note = Gene: DCLK3; note = Location (start to end; relative to TSS): DCLK3_28_58; note = Orientation (relative to transcription): antisense; note = sgRNA Position: 36764521; note = Sequence Name: 56322-704_101_SL_seq_3139
tgcagccgccctctctgcgc

SEQ ID NO: 3140 - DNA, 20 bp, Homo sapiens
  source 1..20: mol_type = genomic DNA; note = Gene: DDR1; note = Location (start to end; relative to TSS): DDR1_39_69; note = Orientation (relative to transcription): sense; note = sgRNA Position: 30884584; note = Sequence Name: 56322-704_101_SL_seq_3140
tcccgacacccgagccccgc

SEQ ID NO: 3141 - DNA, 20 bp, Homo sapiens
  source 1..20: mol_type = genomic DNA; note = Gene: DDR1; note = Location (start to end; relative to TSS): DDR1_73_103; note = Orientation (relative to transcription): antisense; note = sgRNA Position: 30884598; note = Sequence Name: 56322-704_101_SL_seq_3141
agccgggagccgggagcggg

SEQ ID NO: 3142 - DNA, 20 bp, Homo sapiens
  source 1..20: mol_type = genomic DNA; note = Gene: DDR1; note = Location (start to end; relative to TSS): DDR1_23_53; note = Orientation (relative to transcription): antisense; note = sgRNA Position: 30884548; note = Sequence Name: 56322-704_101_SL_seq_3142
cggctcccgagagcagctgt

SEQ ID NO: 3143 - DNA, 20 bp, Homo sapiens
  source 1..20: mol_type = genomic DNA; note = Gene: DDR1; note = Location (start to end; relative to TSS): DDR1_69_99; note = Orientation (relative to transcription): sense; note = sgRNA Position: 30884614; note = Sequence Name: 56322-704_101_SL_seq_3143
cgctcccggctcccggctcc

SEQ ID NO: 3144 - DNA, 20 bp, Homo sapiens
  source 1..20: mol_type = genomic DNA; note = Gene: DDR1; note = Location (start to end; relative to TSS): DDR1_22_52; note = Orientation (relative to transcription): antisense; note = sgRNA Position: 30884547; note = Sequence Name: 56322-704_101_SL_seq_3144
ggctcccgagagcagctgtc

SEQ ID NO: 3145 - DNA, 20 bp, Homo sapiens
  source 1..20: mol_type = genomic DNA; note = Gene: DDR1; note = Location (start to end; relative to TSS): DDR1_62_92; note = Orientation (relative to transcription): sense; note = sgRNA Position: 30884607; note = Sequence Name: 56322-704_101_SL_seq_3145
cgcctcccgctcccggctcc

SEQ ID NO: 3146 - DNA, 20 bp, Homo sapiens
  source 1..20: mol_type = genomic DNA; note = Gene: DDR1; note = Location (start to end; relative to TSS): DDR1_20_50; note = Orientation (relative to transcription): antisense; note = sgRNA Position: 30884545; note = Sequence Name: 56322-704_101_SL_seq_3146
ctcccgagagcagctgtcgg

SEQ ID NO: 3147 - DNA, 20 bp, Homo sapiens
  source 1..20: mol_type = genomic DNA; note = Gene: DDR1; note = Location (start to end; relative to TSS): DDR1_56_86; note = Orientation (relative to transcription): antisense; note = sgRNA Position: 30884581; note = Sequence Name: 56322-704_101_SL_seq_3147
gggaggcgccggcggggctc

SEQ ID NO: 3148 - DNA, 20 bp, Homo sapiens
  source 1..20: mol_type = genomic DNA; note = Gene: DDR1; note = Location (start to end; relative to TSS): DDR1_21_51; note = Orientation (relative to transcription): antisense; note = sgRNA Position: 30884546; note = Sequence Name: 56322-704_101_SL_seq_3148
gctcccgagagcagctgtcg

SEQ ID NO: 3149 - DNA, 20 bp, Homo sapiens
  source 1..20: mol_type = genomic DNA; note = Gene: DDR1; note = Location (start to end; relative to TSS): DDR1_55_85; note = Orientation (relative to transcription): sense; note = sgRNA Position: 30884600; note = Sequence Name: 56322-704_101_SL_seq_3149
ccgccggcgcctcccgctcc

SEQ ID NO: 3150 - DNA, 20 bp, Homo sapiens
  source 1..20: mol_type = genomic DNA; note = Gene: DDR2; note = Location (start to end; relative to TSS): DDR2_47_77; note = Orientation (relative to transcription): antisense; note = sgRNA Position: 162632517; note = Sequence Name: 56322-704_101_SL_seq_3150
tttttccactttgctggtga

SEQ ID NO: 3151 - DNA, 20 bp, Homo sapiens
  source 1..20: mol_type = genomic DNA; note = Gene: DDR2; note = Location (start to end; relative to TSS): DDR2_130_160; note = Orientation (relative to transcription): sense; note = sgRNA Position: 162632620; note = Sequence Name: 56322-704_101_SL_seq_3151
tttccaaaactgtgcacccc

SEQ ID NO: 3152 - DNA, 20 bp, Homo sapiens
  source 1..20: mol_type = genomic DNA; note = Gene: DDR2; note = Location (start to end; relative to TSS): DDR2_19_49; note = Orientation (relative to transcription): antisense; note = sgRNA Position: 162632489; note = Sequence Name: 56322-704_101_SL_seq_3152
ggtggtaggcatacatccac

SEQ ID NO: 3153 - DNA, 20 bp, Homo sapiens
  source 1..20: mol_type = genomic DNA; note = Gene: DDR2; note = Location (start to end; relative to TSS): DDR2_87_117; note = Orientation (relative to transcription): sense; note = sgRNA Position: 162632577; note = Sequence Name: 56322-704_101_SL_seq_3153
tttgggttggggaaacgcag

SEQ ID NO: 3154 - DNA, 20 bp, Homo sapiens
  source 1..20: mol_type = genomic DNA; note = Gene: DDR2; note = Location (start to end; relative to TSS): DDR2_40_70; note = Orientation (relative to transcription): antisense; note = sgRNA Position: 162632510; note = Sequence Name: 56322-704_101_SL_seq_3154
actttgctggtgaaggagcc

SEQ ID NO: 3155 - DNA, 20 bp, Homo sapiens
  source 1..20: mol_type = genomic DNA; note = Gene: DDR2; note = Location (start to end; relative to TSS): DDR2_76_106; note = Orientation (relative to transcription): sense; note = sgRNA Position: 162632566; note = Sequence Name: 56322-704_101_SL_seq_3155
aaattcttctttttgggttg

SEQ ID NO: 3156 - DNA, 20 bp, Homo sapiens
  source 1..20: mol_type = genomic DNA; note = Gene: DDR2; note = Location (start to end; relative to TSS): DDR2_37_67; note = Orientation (relative to transcription): antisense; note = sgRNA Position: 162632507; note = Sequence Name: 56322-704_101_SL_seq_3156
ttgctggtgaaggagcccgg

SEQ ID NO: 3157 - DNA, 20 bp, Homo sapiens
  source 1..20: mol_type = genomic DNA; note = Gene: DDR2; note = Location (start to end; relative to TSS): DDR2_75_105; note = Orientation (relative to transcription): sense; note = sgRNA Position: 162632565; note = Sequence Name: 56322-704_101_SL_seq_3157
caaattcttctttttgggtt

SEQ ID NO: 3158 - DNA, 20 bp, Homo sapiens
  source 1..20: mol_type = genomic DNA; note = Gene: DDR2; note = Location (start to end; relative to TSS): DDR2_33_63; note = Orientation (relative to transcription): sense; note = sgRNA Position: 162632523; note = Sequence Name: 56322-704_101_SL_seq_3158
gggctccttcaccagcaaag

SEQ ID NO: 3159 - DNA, 20 bp, Homo sapiens
  source 1..20: mol_type = genomic DNA; note = Gene: DDR2; note = Location (start to end; relative to TSS): DDR2_74_104; note = Orientation (relative to transcription): sense; note = sgRNA Position: 162632564; note = Sequence Name: 56322-704_101_SL_seq_3159
acaaattcttctttttgggt

SEQ ID NO: 3160 - DNA, 20 bp, Homo sapiens
  source 1..20: mol_type = genomic DNA; note = Gene: DGKA; note = Location (start to end; relative to TSS): DGKA_38_68; note = Orientation (relative to transcription): antisense; note = sgRNA Position: 55931206; note = Sequence Name: 56322-704_101_SL_seq_3160
gtggtgaaggtggtacagca

SEQ ID NO: 3161 - DNA, 20 bp, Homo sapiens
  source 1..20: mol_type = genomic DNA; note = Gene: DGKA; note = Location (start to end; relative to TSS): DGKA_74_104; note = Orientation (relative to transcription): antisense; note = sgRNA Position: 55931242; note = Sequence Name: 56322-704_101_SL_seq_3161
tctagagtcattaaggctct

SEQ ID NO: 3162 - DNA, 20 bp, Homo sapiens
  source 1..20: mol_type = genomic DNA; note = Gene: DGKA; note = Location (start to end; relative to TSS): DGKA_37_67; note = Orientation (relative to transcription): antisense; note = sgRNA Position: 55931205; note = Sequence Name: 56322-704_101_SL_seq_3162
tggtgaaggtggtacagcaa

SEQ ID NO: 3163 - DNA, 20 bp, Homo sapiens
  source 1..20: mol_type = genomic DNA; note = Gene: DGKA; note = Location (start to end; relative to TSS): DGKA_72_102; note = Orientation (relative to transcription): antisense; note = sgRNA Position: 55931240; note = Sequence Name: 56322-704_101_SL_seq_3163
tagagtcattaaggctcttg

SEQ ID NO: 3164 - DNA, 20 bp, Homo sapiens
  source 1..20: mol_type = genomic DNA; note = Gene: DGKA; note = Location (start to end; relative to TSS): DGKA_27_57; note = Orientation (relative to transcription): antisense; note = sgRNA Position: 55931195; note = Sequence Name: 56322-704_101_SL_seq_3164
ggtacagcaagggagagaga

SEQ ID NO: 3165 - DNA, 20 bp, Homo sapiens
  source 1..20: mol_type = genomic DNA; note = Gene: DGKA; note = Location (start to end; relative to TSS): DGKA_60_90; note = Orientation (relative to transcription): antisense; note = sgRNA Position: 55931228; note = Sequence Name: 56322-704_101_SL_seq_3165
ggctcttggggtcgcatgga

SEQ ID NO: 3166 - DNA, 20 bp, Homo sapiens
  source 1..20: mol_type = genomic DNA; note = Gene: DGKA; note = Location (start to end; relative to TSS): DGKA_24_54; note = Orientation (relative to transcription): antisense; note = sgRNA Position: 55931192; note = Sequence Name: 56322-704_101_SL_seq_3166
acagcaagggagagagatgg

SEQ ID NO: 3167 - DNA, 20 bp, Homo sapiens
  source 1..20: mol_type = genomic DNA; note = Gene: DGKA; note = Location (start to end; relative to TSS): DGKA_57_87; note = Orientation (relative to transcription): antisense; note = sgRNA Position: 55931225; note = Sequence Name: 56322-704_101_SL_seq_3167
tcttggggtcgcatggatgg

SEQ ID NO: 3168 - DNA, 20 bp, Homo sapiens
  source 1..20: mol_type = genomic DNA; note = Gene: DGKA; note = Location (start to end; relative to TSS): DGKA_18_48; note = Orientation (relative to transcription): antisense; note = sgRNA Position: 55931186; note = Sequence Name: 56322-704_101_SL_seq_3168
agggagagagatggaggcct

SEQ ID NO: 3169 - DNA, 20 bp, Homo sapiens
  source 1..20: mol_type = genomic DNA; note = Gene: DGKA; note = Location (start to end; relative to TSS): DGKA_48_78; note = Orientation (relative to transcription): antisense; note = sgRNA Position: 55931216; note = Sequence Name: 56322-704_101_SL_seq_3169
cgcatggatggtggtgaagg

SEQ ID NO: 3170 - DNA, 20 bp, Homo sapiens
  source 1..20: mol_type = genomic DNA; note = Gene: DGKB; note = Location (start to end; relative to TSS): DGKB_45_75; note = Orientation (relative to transcription): antisense; note = sgRNA Position: 14902702; note = Sequence Name: 56322-704_101_SL_seq_3170
ctttccaattcacacgctcc

SEQ ID NO: 3171 - DNA, 20 bp, Homo sapiens
  source 1..20: mol_type = genomic DNA; note = Gene: DGKB; note = Location (start to end; relative to TSS): DGKB_88_118; note = Orientation (relative to transcription): antisense; note = sgRNA Position: 14902659; note = Sequence Name: 56322-704_101_SL_seq_3171
tgcttttccggagaggaact

SEQ ID NO: 3172 - DNA, 20 bp, Homo sapiens
  source 1..20: mol_type = genomic DNA; note = Gene: DGKB; note = Location (start to end; relative to TSS): DGKB_32_62; note = Orientation (relative to transcription): antisense; note = sgRNA Position: 14902715; note = Sequence Name: 56322-704_101_SL_seq_3172
acgctcccggcacagtaaga

SEQ ID NO: 3173 - DNA, 20 bp, Homo sapiens
  source 1..20: mol_type = genomic DNA; note = Gene: DGKB; note = Location (start to end; relative to TSS): DGKB_83_113; note = Orientation (relative to transcription): sense; note = sgRNA Position: 14902644; note = Sequence Name: 56322-704_101_SL_seq_3173
gttcctctccggaaaagcag

SEQ ID NO: 3174 - DNA, 20 bp, Homo sapiens
  source 1..20: mol_type = genomic DNA; note = Gene: DGKB; note = Location (start to end; relative to TSS): DGKB_37_67; note = Orientation (relative to transcription): sense; note = sgRNA Position: 14902690; note = Sequence Name: 56322-704_101_SL_seq_3174
cgggagcgtgtgaattggaa

SEQ ID NO: 3175 - DNA, 20 bp, Homo sapiens
  source 1..20: mol_type = genomic DNA; note = Gene: DGKB; note = Location (start to end; relative to TSS): DGKB_72_102; note = Orientation (relative to transcription): sense; note = sgRNA Position: 14902655; note = Sequence Name: 56322-704_101_SL_seq_3175
ggctagtcccagttcctctc

SEQ ID NO: 3176 - DNA, 20 bp, Homo sapiens
  source 1..20: mol_type = genomic DNA; note = Gene: DGKB; note = Location (start to end; relative to TSS): DGKB_18_48; note = Orientation (relative to transcription): sense; note = sgRNA Position: 14902709; note = Sequence Name: 56322-704_101_SL_seq_3176
gggagccttcttactgtgcc

SEQ ID NO: 3177 - DNA, 20 bp, Homo sapiens
  source 1..20: mol_type = genomic DNA; note = Gene: DGKB; note = Location (start to end; relative to TSS): DGKB_71_101; note = Orientation (relative to transcription): antisense; note = sgRNA Position: 14902676; note = Sequence Name: 56322-704_101_SL_seq_3177
actgggactagccagttctc

SEQ ID NO: 3178 - DNA, 20 bp, Homo sapiens
  source 1..20: mol_type = genomic DNA; note = Gene: DGKB; note = Location (start to end; relative to TSS): DGKB_17_47; note = Orientation (relative to transcription): sense; note = sgRNA Position: 14902710; note = Sequence Name: 56322-704_101_SL_seq_3178
tgggagccttcttactgtgc

SEQ ID NO: 3179 - DNA, 20 bp, Homo sapiens
  source 1..20: mol_type = genomic DNA; note = Gene: DGKB; note = Location (start to end; relative to TSS): DGKB_51_81; note = Orientation (relative to transcription): sense; note = sgRNA Position: 14902676; note = Sequence Name: 56322-704_101_SL_seq_3179
ttggaaaggatcctgagaac

SEQ ID NO: 3180 - DNA, 20 bp, Homo sapiens
  source 1..20: mol_type = genomic DNA; note = Gene: DGKD; note = Location (start to end; relative to TSS): DGKD_49_79; note = Orientation (relative to transcription): antisense; note = sgRNA Position: 233354549; note = Sequence Name: 56322-704_101_SL_seq_3180
ggcggttgcgggggacccgg

SEQ ID NO: 3181 - DNA, 20 bp, Homo sapiens
  source 1..20: mol_type = genomic DNA; note = Gene: DGKD; note = Location (start to end; relative to TSS): DGKD_82_112; note = Orientation (relative to transcription): antisense; note = sgRNA Position: 233354582; note = Sequence Name: 56322-704_101_SL_seq_3181
ctgtcggacgactcctcggg

SEQ ID NO: 3182 - DNA, 20 bp, Homo sapiens
  source 1..20: mol_type = genomic DNA; note = Gene: DGKD; note = Location (start to end; relative to TSS): DGKD_44_74; note = Orientation (relative to transcription): antisense; note = sgRNA Position: 233354544; note = Sequence Name: 56322-704_101_SL_seq_3182
ttgcgggggacccggcggag

SEQ ID NO: 3183 - DNA, 20 bp, Homo sapiens
  source 1..20: mol_type = genomic DNA; note = Gene: DGKD; note = Location (start to end; relative to TSS): DGKD_79_109; note = Orientation (relative to transcription): antisense; note = sgRNA Position: 233354579; note = Sequence Name: 56322-704_101_SL_seq_3183
tcggacgactcctcgggcgg

SEQ ID NO: 3184 - DNA, 20 bp, Homo sapiens
  source 1..20: mol_type = genomic DNA; note = Gene: DGKD; note = Location (start to end; relative to TSS): DGKD_45_75; note = Orientation (relative to transcription): antisense; note = sgRNA Position: 233354545; note = Sequence Name: 56322-704_101_SL_seq_3184
gttgcgggggacccggcgga

SEQ ID NO: 3185 - DNA, 20 bp, Homo sapiens
  source 1..20: mol_type = genomic DNA; note = Gene: DGKD; note = Location (start to end; relative to TSS): DGKD_76_106; note = Orientation (relative to transcription): antisense; note = sgRNA Position: 233354576; note = Sequence Name: 56322-704_101_SL_seq_3185
gacgactcctcgggcggcgg

SEQ ID NO: 3186 - DNA, 20 bp, Homo sapiens
  source 1..20: mol_type = genomic DNA; note = Gene: DGKD; note = Location (start to end; relative to TSS): DGKD_25_55; note = Orientation (relative to transcription): sense; note = sgRNA Position: 233354545; note = Sequence Name: 56322-704_101_SL_seq_3186
gcggcgggcgcccctccgcc

SEQ ID NO: 3187 - DNA, 20 bp, Homo sapiens
  source 1..20: mol_type = genomic DNA; note = Gene: DGKD; note = Location (start to end; relative to TSS): DGKD_58_88; note = Orientation (relative to transcription): antisense; note = sgRNA Position: 233354558; note = Sequence Name: 56322-704_101_SL_seq_3187
ggcggcggaggcggttgcgg

SEQ ID NO: 3188 - DNA, 20 bp, Homo sapiens
  source 1..20: mol_type = genomic DNA; note = Gene: DGKD; note = Location (start to end; relative to TSS): DGKD_16_46; note = Orientation (relative to transcription): antisense; note = sgRNA Position: 233354516; note = Sequence Name: 56322-704_101_SL_seq_3188
gccgccgccgccatgctgcc

SEQ ID NO: 3189 - DNA, 20 bp, Homo sapiens
  source 1..20: mol_type = genomic DNA; note = Gene: DGKD; note = Location (start to end; relative to TSS): DGKD_49_79; note = Orientation (relative to transcription): antisense; note = sgRNA Position: 233354549; note = Sequence Name: 56322-704_101_SL_seq_3189
ggcggttgcgggggacccgg

SEQ ID NO: 3190 - DNA, 20 bp, Homo sapiens
  source 1..20: mol_type = genomic DNA; note = Gene: DGKE; note = Location (start to end; relative to TSS): DGKE_37_67; note = Orientation (relative to transcription): antisense; note = sgRNA Position: 56834194; note = Sequence Name: 56322-704_101_SL_seq_3190
cgcaggaggagaacgacgct

SEQ ID NO: 3191 - DNA, 20 bp, Homo sapiens
  source 1..20: mol_type = genomic DNA; note = Gene: DGKE; note = Location (start to end; relative to TSS): DGKE_92_122; note = Orientation (relative to transcription): sense; note = sgRNA Position: 56834269; note = Sequence Name: 56322-704_101_SL_seq_3191
ccgcgcgaggtagggcttcg

SEQ ID NO: 3192 - DNA, 20 bp, Homo sapiens
  source 1..20: mol_type = genomic DNA; note = Gene: DGKE; note = Location (start to end; relative to TSS): DGKE_36_66; note = Orientation (relative to transcription): sense; note = sgRNA Position: 56834213; note = Sequence Name: 56322-704_101_SL_seq_3192
cgttctcctcctgcgcgagg

SEQ ID NO: 3193 - DNA, 20 bp, Homo sapiens
  source 1..20: mol_type = genomic DNA; note = Gene: DGKE; note = Location (start to end; relative to TSS): DGKE_89_119; note = Orientation (relative to transcription): antisense; note = sgRNA Position: 56834246; note = Sequence Name: 56322-704_101_SL_seq_3193
acctcgcgcgggtggaggcg

SEQ ID NO: 3194 - DNA, 20 bp, Homo sapiens
  source 1..20: mol_type = genomic DNA; note = Gene: DGKE; note = Location (start to end; relative to TSS): DGKE_33_63; note = Orientation (relative to transcription): sense; note = sgRNA Position: 56834210; note = Sequence Name: 56322-704_101_SL_seq_3194
cgtcgttctcctcctgcgcg

SEQ ID NO: 3195 - DNA, 20 bp, Homo sapiens
  source 1..20: mol_type = genomic DNA; note = Gene: DGKE; note = Location (start to end; relative to TSS): DGKE_84_114; note = Orientation (relative to transcription): sense; note = sgRNA Position: 56834261; note = Sequence Name: 56322-704_101_SL_seq_3195
gcctccacccgcgcgaggta

SEQ ID NO: 3196 - DNA, 20 bp, Homo sapiens
  source 1..20: mol_type = genomic DNA; note = Gene: DGKE; note = Location (start to end; relative to TSS): DGKE_26_56; note = Orientation (relative to transcription): antisense; note = sgRNA Position: 56834183; note = Sequence Name: 56322-704_101_SL_seq_3196
aacgacgctgggccgccagc

SEQ ID NO: 3197 - DNA, 20 bp, Homo sapiens
  source 1..20: mol_type = genomic DNA; note = Gene: DGKE; note = Location (start to end; relative to TSS): DGKE_83_113; note = Orientation (relative to transcription): sense; note = sgRNA Position: 56834260; note = Sequence Name: 56322-704_101_SL_seq_3197
cgcctccacccgcgcgaggt

SEQ ID NO: 3198 - DNA, 20 bp, Homo sapiens
  source 1..20: mol_type = genomic DNA; note = Gene: DGKE; note = Location (start to end; relative to TSS): DGKE_25_55; note = Orientation (relative to transcription): antisense; note = sgRNA Position: 56834182; note = Sequence Name: 56322-704_101_SL_seq_3198
acgacgctgggccgccagca

SEQ ID NO: 3199 - DNA, 20 bp, Homo sapiens
  source 1..20: mol_type = genomic DNA; note = Gene: DGKE; note = Location (start to end; relative to TSS): DGKE_79_109; note = Orientation (relative to transcription): sense; note = sgRNA Position: 56834256; note = Sequence Name: 56322-704_101_SL_seq_3199
gccgcgcctccacccgcgcg

SEQ ID NO: 3200 - DNA, 20 bp, Homo sapiens
  source 1..20: mol_type = genomic DNA; note = Gene: DGKG; note = Location (start to end; relative to TSS): DGKG_33_63; note = Orientation (relative to transcription): sense; note = sgRNA Position: 186362177; note = Sequence Name: 56322-704_101_SL_seq_3200
agctgctgaactccgagcac

SEQ ID NO: 3201 - DNA, 20 bp, Homo sapiens
  source 1..20: mol_type = genomic DNA; note = Gene: DGKG; note = Location (start to end; relative to TSS): DGKG_83_113; note = Orientation (relative to transcription): sense; note = sgRNA Position: 186362127; note = Sequence Name: 56322-704_101_SL_seq_3201
gcctggcagcctggtctccg

SEQ ID NO: 3202 - DNA, 20 bp, Homo sapiens
  source 1..20: mol_type = genomic DNA; note = Gene: DGKG; note = Location (start to end; relative to TSS): DGKG_34_64; note = Orientation (relative to transcription): sense; note = sgRNA Position: 186362176; note = Sequence Name: 56322-704_101_SL_seq_3202
gctgctgaactccgagcaca

SEQ ID NO: 3203 - DNA, 20 bp, Homo sapiens
  source 1..20: mol_type = genomic DNA; note = Gene: DGKG; note = Location (start to end; relative to TSS): DGKG_74_104; note = Orientation (relative to transcription): sense; note = sgRNA Position: 186362136; note = Sequence Name: 56322-704_101_SL_seq_3203
ccaaccacagcctggcagcc

SEQ ID NO: 3204 - DNA, 20 bp, Homo sapiens
  source 1..20: mol_type = genomic DNA; note = Gene: DGKG; note = Location (start to end; relative to TSS): DGKG_20_50; note = Orientation (relative to transcription): antisense; note = sgRNA Position: 186362210; note = Sequence Name: 56322-704_101_SL_seq_3204
tccaaagctgtctatctccg

SEQ ID NO: 3205 - DNA, 20 bp, Homo sapiens
  source 1..20: mol_type = genomic DNA; note = Gene: DGKG; note = Location (start to end; relative to TSS): DGKG_73_103; note = Orientation (relative to transcription): antisense; note = sgRNA Position: 186362157; note = Sequence Name: 56322-704_101_SL_seq_3205
aggctgtggttggtagcgcc

SEQ ID NO: 3206 - DNA, 20 bp, Homo sapiens
  source 1..20: mol_type = genomic DNA; note = Gene: DGKG; note = Location (start to end; relative to TSS): DGKG_10_40; note = Orientation (relative to transcription): sense; note = sgRNA Position: 186362200; note = Sequence Name: 56322-704_101_SL_seq_3206
gccacggagatagacagctt

SEQ ID NO: 3207 - DNA, 20 bp, Homo sapiens
  source 1..20: mol_type = genomic DNA; note = Gene: DGKG; note = Location (start to end; relative to TSS): DGKG_72_102; note = Orientation (relative to transcription): antisense; note = sgRNA Position: 186362158; note = Sequence Name: 56322-704_101_SL_seq_3207
ggctgtggttggtagcgccg

SEQ ID NO: 3208 - DNA, 20 bp, Homo sapiens
  source 1..20: mol_type = genomic DNA; note = Gene: DGKG; note = Location (start to end; relative to TSS): DGKG_7_37; note = Orientation (relative to transcription): antisense; note = sgRNA Position: 186362223; note = Sequence Name: 56322-704_101_SL_seq_3208
atctccgtggcccgctacta

SEQ ID NO: 3209 - DNA, 20 bp, Homo sapiens
  source 1..20: mol_type = genomic DNA; note = Gene: DGKG; note = Location (start to end; relative to TSS): DGKG_66_96; note = Orientation (relative to transcription): sense; note = sgRNA Position: 186362144; note = Sequence Name: 56322-704_101_SL_seq_3209
cggcgctaccaaccacagcc

SEQ ID NO: 3210 - DNA, 20 bp, Homo sapiens
  source 1..20: mol_type = genomic DNA; note = Gene: DGKH; note = Location (start to end; relative to TSS): DGKH_46_76; note = Orientation (relative to transcription): antisense; note = sgRNA Position: 42048700; note = Sequence Name: 56322-704_101_SL_seq_3210
gcgggtgggctctgcccgag

SEQ ID NO: 3211 - DNA, 20 bp, Homo sapiens
  source 1..20: mol_type = genomic DNA; note = Gene: DGKH; note = Location (start to end; relative to TSS): DGKH_81_111; note = Orientation (relative to transcription): antisense; note = sgRNA Position: 42048735; note = Sequence Name: 56322-704_101_SL_seq_3211
acagcaccgcccggcggggg

SEQ ID NO: 3212 - DNA, 20 bp, Homo sapiens
  source 1..20: mol_type = genomic DNA; note = Gene: DGKH; note = Location (start to end; relative to TSS): DGKH_39_69; note = Orientation (relative to transcription): antisense; note = sgRNA Position: 42048693; note = Sequence Name: 56322-704_101_SL_seq_3212
ggctctgcccgagcggagcc

SEQ ID NO: 3213 - DNA, 20 bp, Homo sapiens
  source 1..20: mol_type = genomic DNA; note = Gene: DGKH; note = Location (start to end; relative to TSS): DGKH_72_102; note = Orientation (relative to transcription): antisense; note = sgRNA Position: 42048726; note = Sequence Name: 56322-704_101_SL_seq_3213
cccggcgggggcggcggcgt

SEQ ID NO: 3214 - DNA, 20 bp, Homo sapiens
  source 1..20: mol_type = genomic DNA; note = Gene: DGKH; note = Location (start to end; relative to TSS): DGKH_22_52; note = Orientation (relative to transcription): sense; note = sgRNA Position: 42048696; note = Sequence Name: 56322-704_101_SL_seq_3214
acggggttccgggctccgct

SEQ ID NO: 3215 - DNA, 20 bp, Homo sapiens
  source 1..20: mol_type = genomic DNA; note = Gene: DGKH; note = Location (start to end; relative to TSS): DGKH_64_94; note = Orientation (relative to transcription): antisense; note = sgRNA Position: 42048718; note = Sequence Name: 56322-704_101_SL_seq_3215
gggcggcggcgttggtcagc

SEQ ID NO: 3216 - DNA, 20 bp, Homo sapiens
  source 1..20: mol_type = genomic DNA; note = Gene: DGKH; note = Location (start to end; relative to TSS): DGKH_25_55; note = Orientation (relative to transcription): antisense; note = sgRNA Position: 42048679; note = Sequence Name: 56322-704_101_SL_seq_3216
ggagcccggaaccccgtgcc

SEQ ID NO: 3217 - DNA, 20 bp, Homo sapiens
  source 1..20: mol_type = genomic DNA; note = Gene: DGKH; note = Location (start to end; relative to TSS): DGKH_63_93; note = Orientation (relative to transcription): sense; note = sgRNA Position: 42048737; note = Sequence Name: 56322-704_101_SL_seq_3217
ccaacgccgccgcccccgcc

SEQ ID NO: 3218 - DNA, 20 bp, Homo sapiens
  source 1..20: mol_type = genomic DNA; note = Gene: DGKH; note = Location (start to end; relative to TSS): DGKH_23_53; note = Orientation (relative to transcription): sense; note = sgRNA Position: 42048697; note = Sequence Name: 56322-704_101_SL_seq_3218
cggggttccgggctccgctc

SEQ ID NO: 3219 - DNA, 20 bp, Homo sapiens
  source 1..20: mol_type = genomic DNA; note = Gene: DGKH; note = Location (start to end; relative to TSS): DGKH_60_90; note = Orientation (relative to transcription): antisense; note = sgRNA Position: 42048714; note = Sequence Name: 56322-704_101_SL_seq_3219
ggcggcgttggtcagcgggt

SEQ ID NO: 3220 - DNA, 20 bp, Homo sapiens
  source 1..20: mol_type = genomic DNA; note = Gene: DGKI; note = Location (start to end; relative to TSS): DGKI_34_64; note = Orientation (relative to transcription): sense; note = sgRNA Position: 137846916; note = Sequence Name: 56322-704_101_SL_seq_3220
ggcctctgattggccggggc

SEQ ID NO: 3221 - DNA, 20 bp, Homo sapiens
  source 1..20: mol_type = genomic DNA; note = Gene: DGKI; note = Location (start to end; relative to TSS): DGKI_82_112; note = Orientation (relative to transcription): antisense; note = sgRNA Position: 137846888; note = Sequence Name: 56322-704_101_SL_seq_3221
gcaccgcaccggggcattgt

SEQ ID NO: 3222 - DNA, 20 bp, Homo sapiens
  source 1..20: mol_type = genomic DNA; note = Gene: DGKI; note = Location (start to end; relative to TSS): DGKI_30_60; note = Orientation (relative to transcription): sense; note = sgRNA Position: 137846920; note = Sequence Name: 56322-704_101_SL_seq_3222
cggcggcctctgattggccg

SEQ ID NO: 3223 - DNA, 20 bp, Homo sapiens
  source 1..20: mol_type = genomic DNA; note = Gene: DGKI; note = Location (start to end; relative to TSS): DGKI_81_111; note = Orientation (relative to transcription): sense; note = sgRNA Position: 137846869; note = Sequence Name: 56322-704_101_SL_seq_3223
gccccggtgcggtgcagccg

SEQ ID NO: 3224 - DNA, 20 bp, Homo sapiens
  source 1..20: mol_type = genomic DNA; note = Gene: DGKI; note = Location (start to end; relative to TSS): DGKI_29_59; note = Orientation (relative to transcription): sense; note = sgRNA Position: 137846921; note = Sequence Name: 56322-704_101_SL_seq_3224
gcggcggcctctgattggcc

SEQ ID NO: 3225 - DNA, 20 bp, Homo sapiens
  source 1..20: mol_type = genomic DNA; note = Gene: DGKI; note = Location (start to end; relative to TSS): DGKI_70_100; note = Orientation (relative to transcription): sense; note = sgRNA Position: 137846880; note = Sequence Name: 56322-704_101_SL_seq_3225
tttcccacaatgccccggtg

SEQ ID NO: 3226 - DNA, 20 bp, Homo sapiens
  source 1..20: mol_type = genomic DNA; note = Gene: DGKI; note = Location (start to end; relative to TSS): DGKI_28_58; note = Orientation (relative to transcription): sense; note = sgRNA Position: 137846922; note = Sequence Name: 56322-704_101_SL_seq_3226
agcggcggcctctgattggc

SEQ ID NO: 3227 - DNA, 20 bp, Homo sapiens
  source 1..20: mol_type = genomic DNA; note = Gene: DGKI; note = Location (start to end; relative to TSS): DGKI_65_95; note = Orientation (relative to transcription): sense; note = sgRNA Position: 137846885; note = Sequence Name: 56322-704_101_SL_seq_3227
cggagtttcccacaatgccc

SEQ ID NO: 3228 - DNA, 20 bp, Homo sapiens
  source 1..20: mol_type = genomic DNA; note = Gene: DGKI; note = Location (start to end; relative to TSS): DGKI_24_54; note = Orientation (relative to transcription): sense; note = sgRNA Position: 137846926; note = Sequence Name: 56322-704_101_SL_seq_3228
ggggagcggcggcctctgat

SEQ ID NO: 3229 - DNA, 20 bp, Homo sapiens
  source 1..20: mol_type = genomic DNA; note = Gene: DGKI; note = Location (start to end; relative to TSS): DGKI_56_86; note = Orientation (relative to transcription): antisense; note = sgRNA Position: 137846914; note = Sequence Name: 56322-704_101_SL_seq_3229
ctccgctcactcccccgccc

SEQ ID NO: 3230 - DNA, 20 bp, Homo sapiens
  source 1..20: mol_type = genomic DNA; note = Gene: DGKK; note = Location (start to end; relative to TSS): DGKK_45_75; note = Orientation (relative to transcription): antisense; note = sgRNA Position: 50470776; note = Sequence Name: 56322-704_101_SL_seq_3230
ccagtccggcagcccctcgc

SEQ ID NO: 3231 - DNA, 20 bp, Homo sapiens
  source 1..20: mol_type = genomic DNA; note = Gene: DGKK; note = Location (start to end; relative to TSS): DGKK_81_111; note = Orientation (relative to transcription): antisense; note = sgRNA Position: 50470740; note = Sequence Name: 56322-704_101_SL_seq_3231
tggaaggctaaagtaccctc

SEQ ID NO: 3232 - DNA, 20 bp, Homo sapiens
  source 1..20: mol_type = genomic DNA; note = Gene: DGKK; note = Location (start to end; relative to TSS): DGKK_46_76; note = Orientation (relative to transcription): sense; note = sgRNA Position: 50470755; note = Sequence Name: 56322-704_101_SL_seq_3232
gctgccggactggagtgggc

SEQ ID NO: 3233 - DNA, 20 bp, Homo sapiens
  source 1..20: mol_type = genomic DNA; note = Gene: DGKK; note = Location (start to end; relative to TSS): DGKK_80_110; note = Orientation (relative to transcription): sense; note = sgRNA Position: 50470721; note = Sequence Name: 56322-704_101_SL_seq_3233
tactttagccttccaggctt

SEQ ID NO: 3234 - DNA, 20 bp, Homo sapiens
  source 1..20: mol_type = genomic DNA; note = Gene: DGKK; note = Location (start to end; relative to TSS): DGKK_22_52; note = Orientation (relative to transcription): sense; note = sgRNA Position: 50470779; note = Sequence Name: 56322-704_101_SL_seq_3234
ggaaagtttggcaccctgcg

SEQ ID NO: 3235 - DNA, 20 bp, Homo sapiens
  source 1..20: mol_type = genomic DNA; note = Gene: DGKK; note = Location (start to end; relative to TSS): DGKK_59_89; note = Orientation (relative to transcription): antisense; note = sgRNA Position: 50470762; note = Sequence Name: 56322-704_101_SL_seq_3235
gcgccccgcccactccagtc

SEQ ID NO: 3236 - DNA, 20 bp, Homo sapiens
  source 1..20: mol_type = genomic DNA; note = Gene: DGKK; note = Location (start to end; relative to TSS): DGKK_24_54; note = Orientation (relative to transcription): sense; note = sgRNA Position: 50470777; note = Sequence Name: 56322-704_101_SL_seq_3236
aaagtttggcaccctgcgag

SEQ ID NO: 3237 - DNA, 20 bp, Homo sapiens
  source 1..20: mol_type = genomic DNA; note = Gene: DGKK; note = Location (start to end; relative to TSS): DGKK_57_87; note = Orientation (relative to transcription): sense; note = sgRNA Position: 50470744; note = Sequence Name: 56322-704_101_SL_seq_3237
ggagtgggcggggcgcccga

SEQ ID NO: 3238 - DNA, 20 bp, Homo sapiens
  source 1..20: mol_type = genomic DNA; note = Gene: DGKK; note = Location (start to end; relative to TSS): DGKK_23_53; note = Orientation (relative to transcription): sense; note = sgRNA Position: 50470778; note = Sequence Name: 56322-704_101_SL_seq_3238
gaaagtttggcaccctgcga

SEQ ID NO: 3239 - DNA, 20 bp, Homo sapiens
  source 1..20: mol_type = genomic DNA; note = Gene: DGKK; note = Location (start to end; relative to TSS): DGKK_56_86; note = Orientation (relative to transcription): sense; note = sgRNA Position: 50470745; note = Sequence Name: 56322-704_101_SL_seq_3239
tggagtgggcggggcgcccg

SEQ ID NO: 3240 - DNA, 20 bp, Homo sapiens
  source 1..20: mol_type = genomic DNA; note = Gene: DGKQ; note = Location (start to end; relative to TSS): DGKQ_44_74; note = Orientation (relative to transcription): antisense; note = sgRNA Position: 973521; note = Sequence Name: 56322-704_101_SL_seq_3240
cccctttaggtccgcgccgg

SEQ ID NO: 3241 - DNA, 20 bp, Homo sapiens
  source 1..20: mol_type = genomic DNA; note = Gene: DGKQ; note = Location (start to end; relative to TSS): DGKQ_81_111; note = Orientation (relative to transcription): sense; note = sgRNA Position: 973464; note = Sequence Name: 56322-704_101_SL_seq_3241
ggcggcggcggccgagcccg

SEQ ID NO: 3242 - DNA, 20 bp, Homo sapiens
  source 1..20: mol_type = genomic DNA; note = Gene: DGKQ; note = Location (start to end; relative to TSS): DGKQ_41_71; note = Orientation (relative to transcription): sense; note = sgRNA Position: 973504; note = Sequence Name: 56322-704_101_SL_seq_3242
gcgcggacctaaaggggctc

SEQ ID NO: 3243 - DNA, 20 bp, Homo sapiens
  source 1..20: mol_type = genomic DNA; note = Gene: DGKQ; note = Location (start to end; relative to TSS): DGKQ_73_103; note = Orientation (relative to transcription): antisense; note = sgRNA Position: 973492; note = Sequence Name: 56322-704_101_SL_seq_3243
gccgccattcccggcccgag

SEQ ID NO: 3244 - DNA, 20 bp, Homo sapiens
  source 1..20: mol_type = genomic DNA; note = Gene: DGKQ; note = Location (start to end; relative to TSS): DGKQ_22_52; note = Orientation (relative to transcription): antisense; note = sgRNA Position: 973543; note = Sequence Name: 56322-704_101_SL_seq_3244
gtacaggagccgccgctcca

SEQ ID NO: 3245 - DNA, 20 bp, Homo sapiens
  source 1..20: mol_type = genomic DNA; note = Gene: DGKQ; note = Location (start to end; relative to TSS): DGKQ_55_85; note = Orientation (relative to transcription): sense; note = sgRNA Position: 973490; note = Sequence Name: 56322-704_101_SL_seq_3245
gggctcgggccgctcgggcc

SEQ ID NO: 3246 - DNA, 20 bp, Homo sapiens
  source 1..20: mol_type = genomic DNA; note = Gene: DGKQ; note = Location (start to end; relative to TSS): DGKQ_24_54; note = Orientation (relative to transcription): sense; note = sgRNA Position: 973521; note = Sequence Name: 56322-704_101_SL_seq_3246
cggctcctgtacccccggcg

SEQ ID NO: 3247 - DNA, 20 bp, Homo sapiens
  source 1..20: mol_type = genomic DNA; note = Gene: DGKQ; note = Location (start to end; relative to TSS): DGKQ_54_84; note = Orientation (relative to transcription): sense; note = sgRNA Position: 973491; note = Sequence Name: 56322-704_101_SL_seq_3247
ggggctcgggccgctcgggc

SEQ ID NO: 3248 - DNA, 20 bp, Homo sapiens
  source 1..20: mol_type = genomic DNA; note = Gene: DGKQ; note = Location (start to end; relative to TSS): DGKQ_19_49; note = Orientation (relative to transcription): sense; note = sgRNA Position: 973526; note = Sequence Name: 56322-704_101_SL_seq_3248
agcggcggctcctgtacccc

SEQ ID NO: 3249 - DNA, 20 bp, Homo sapiens
  source 1..20: mol_type = genomic DNA; note = Gene: DGKQ; note = Location (start to end; relative to TSS): DGKQ_49_79; note = Orientation (relative to transcription): sense; note = sgRNA Position: 973496; note = Sequence Name: 56322-704_101_SL_seq_3249
ctaaaggggctcgggccgct

SEQ ID NO: 3250 - DNA, 20 bp, Homo sapiens
  source 1..20: mol_type = genomic DNA; note = Gene: DGKZ; note = Location (start to end; relative to TSS): DGKZ_32_62; note = Orientation (relative to transcription): antisense; note = sgRNA Position: 46347501; note = Sequence Name: 56322-704_101_SL_seq_3250
ctccccacgcccaggtgccc

SEQ ID NO: 3251 - DNA, 20 bp, Homo sapiens
  source 1..20: mol_type = genomic DNA; note = Gene: DGKZ; note = Location (start to end; relative to TSS): DGKZ_78_108; note = Orientation (relative to transcription): sense; note = sgRNA Position: 46347567; note = Sequence Name: 56322-704_101_SL_seq_3251
gcgcgcgccatggaggtggc

SEQ ID NO: 3252 - DNA, 20 bp, Homo sapiens
  source 1..20: mol_type = genomic DNA; note = Gene: DGKZ; note = Location (start to end; relative to TSS): DGKZ_20_50; note = Orientation (relative to transcription): sense; note = sgRNA Position: 46347509; note = Sequence Name: 56322-704_101_SL_seq_3252
cttcccgggcacctgggcgt

SEQ ID NO: 3253 - DNA, 20 bp, Homo sapiens
  source 1..20: mol_type = genomic DNA; note = Gene: DGKZ; note = Location (start to end; relative to TSS): DGKZ_77_107; note = Orientation (relative to transcription): sense; note = sgRNA Position: 46347566; note = Sequence Name: 56322-704_101_SL_seq_3253
agcgcgcgccatggaggtgg

SEQ ID NO: 3254 - DNA, 20 bp, Homo sapiens
  source 1..20: mol_type = genomic DNA; note = Gene: DGKZ; note = Location (start to end; relative to TSS): DGKZ_29_59; note = Orientation (relative to transcription): sense; note = sgRNA Position: 46347518; note = Sequence Name: 56322-704_101_SL_seq_3254
cacctgggcgtggggagcgg

SEQ ID NO: 3255 - DNA, 20 bp, Homo sapiens
  source 1..20: mol_type = genomic DNA; note = Gene: DGKZ; note = Location (start to end; relative to TSS): DGKZ_74_104; note = Orientation (relative to transcription): sense; note = sgRNA Position: 46347563; note = Sequence Name: 56322-704_101_SL_seq_3255
gcgagcgcgcgccatggagg

SEQ ID NO: 3256 - DNA, 20 bp, Homo sapiens
  source 1..20: mol_type = genomic DNA; note = Gene: DGKZ; note = Location (start to end; relative to TSS): DGKZ_28_58; note = Orientation (relative to transcription): sense; note = sgRNA Position: 46347517; note = Sequence Name: 56322-704_101_SL_seq_3256
gcacctgggcgtggggagcg

SEQ ID NO: 3257 - DNA, 20 bp, Homo sapiens
  source 1..20: mol_type = genomic DNA; note = Gene: DGKZ; note = Location (start to end; relative to TSS): DGKZ_71_101; note = Orientation (relative to transcription): sense; note = sgRNA Position: 46347560; note = Sequence Name: 56322-704_101_SL_seq_3257
ggagcgagcgcgcgccatgg

SEQ ID NO: 3258 - DNA, 20 bp, Homo sapiens
  source 1..20: mol_type = genomic DNA; note = Gene: DGKZ; note = Location (start to end; relative to TSS): DGKZ_21_51; note = Orientation (relative to transcription): sense; note = sgRNA Position: 46347510; note = Sequence Name: 56322-704_101_SL_seq_3258
ttcccgggcacctgggcgtg

SEQ ID NO: 3259 - DNA, 20 bp, Homo sapiens
  source 1..20: mol_type = genomic DNA; note = Gene: DGKZ; note = Location (start to end; relative to TSS): DGKZ_68_98; note = Orientation (relative to transcription): sense; note = sgRNA Position: 46347557; note = Sequence Name: 56322-704_101_SL_seq_3259
ggcggagcgagcgcgcgcca

SEQ ID NO: 3260 - DNA, 20 bp, Homo sapiens
  source 1..20: mol_type = genomic DNA; note = Gene: DGUOK; note = Location (start to end; relative to TSS): DGUOK_54_84; note = Orientation (relative to transcription): sense; note = sgRNA Position: 73926960; note = Sequence Name: 56322-704_101_SL_seq_3260
tcgagcacccttcagttcca

SEQ ID NO: 3261 - DNA, 20 bp, Homo sapiens
  source 1..20: mol_type = genomic DNA; note = Gene: DGUOK; note = Location (start to end; relative to TSS): DGUOK_86_116; note = Orientation (relative to transcription): antisense; note = sgRNA Position: 73926972; note = Sequence Name: 56322-704_101_SL_seq_3261
aacgccctcgagtgggctct

SEQ ID NO: 3262 - DNA, 20 bp, Homo sapiens
  source 1..20: mol_type = genomic DNA; note = Gene: DGUOK; note = Location (start to end; relative to TSS): DGUOK_45_75; note = Orientation (relative to transcription): antisense; note = sgRNA Position: 73926931; note = Sequence Name: 56322-704_101_SL_seq_3262
ctcgaagccgacttagaaag

SEQ ID NO: 3263 - DNA, 20 bp, Homo sapiens
  source 1..20: mol_type = genomic DNA; note = Gene: DGUOK; note = Location (start to end; relative to TSS): DGUOK_80_110; note = Orientation (relative to transcription): antisense; note = sgRNA Position: 73926966; note = Sequence Name: 56322-704_101_SL_seq_3263
ctcgagtgggctcttggcca

SEQ ID NO: 3264 - DNA, 20 bp, Homo sapiens
  source 1..20: mol_type = genomic DNA; note = Gene: DGUOK; note = Location (start to end; relative to TSS): DGUOK_42_72; note = Orientation (relative to transcription): antisense; note = sgRNA Position: 73926928; note = Sequence Name: 56322-704_101_SL_seq_3264
gaagccgacttagaaagagg

SEQ ID NO: 3265 - DNA, 20 bp, Homo sapiens
  source 1..20: mol_type = genomic DNA; note = Gene: DGUOK; note = Location (start to end; relative to TSS): DGUOK_72_102; note = Orientation (relative to transcription): sense; note = sgRNA Position: 73926978; note = Sequence Name: 56322-704_101_SL_seq_3265
catggccaagagcccactcg

SEQ ID NO: 3266 - DNA, 20 bp, Homo sapiens
  source 1..20: mol_type = genomic DNA; note = Gene: DGUOK; note = Location (start to end; relative to TSS): DGUOK_29_59; note = Orientation (relative to transcription): sense; note = sgRNA Position: 73926935; note = Sequence Name: 56322-704_101_SL_seq_3266
cgggccgcctctttctaagt

SEQ ID NO: 3267 - DNA, 20 bp, Homo sapiens
  source 1..20: mol_type = genomic DNA; note = Gene: DGUOK; note = Location (start to end; relative to TSS): DGUOK_71_101; note = Orientation (relative to transcription): antisense; note = sgRNA Position: 73926957; note = Sequence Name: 56322-704_101_SL_seq_3267
gctcttggccatggaactga

SEQ ID NO: 3268 - DNA, 20 bp, Homo sapiens
  source 1..20: mol_type = genomic DNA; note = Gene: DGUOK; note = Location (start to end; relative to TSS): DGUOK_35_65; note = Orientation (relative to transcription): antisense; note = sgRNA Position: 73926921; note = Sequence Name: 56322-704_101_SL_seq_3268
acttagaaagaggcggcccg

SEQ ID NO: 3269 - DNA, 20 bp, Homo sapiens
  source 1..20: mol_type = genomic DNA; note = Gene: DGUOK; note = Location (start to end; relative to TSS): DGUOK_70_100; note = Orientation (relative to transcription): antisense; note = sgRNA Position: 73926956; note = Sequence Name: 56322-704_101_SL_seq_3269
ctcttggccatggaactgaa

SEQ ID NO: 3270 - DNA, 20 bp, Homo sapiens
  source 1..20: mol_type = genomic DNA; note = Gene: DMPK; note = Location (start to end; relative to TSS): DMPK_34_64; note = Orientation (relative to transcription): sense; note = sgRNA Position: 45782432; note = Sequence Name: 56322-704_101_SL_seq_3270
cagggctccagggcctggac

SEQ ID NO: 3271 - DNA, 20 bp, Homo sapiens
  source 1..20: mol_type = genomic DNA; note = Gene: DMPK; note = Location (start to end; relative to TSS): DMPK_74_104; note = Orientation (relative to transcription): sense; note = sgRNA Position: 45782392; note = Sequence Name: 56322-704_101_SL_seq_3271
acaggaggaccccgagcccc

SEQ ID NO: 3272 - DNA, 20 bp, Homo sapiens
  source 1..20: mol_type = genomic DNA; note = Gene: DMPK; note = Location (start to end; relative to TSS): DMPK_29_59; note = Orientation (relative to transcription): sense; note = sgRNA Position: 45782437; note = Sequence Name: 56322-704_101_SL_seq_3272
gcagccagggctccagggcc

SEQ ID NO: 3273 - DNA, 20 bp, Homo sapiens
  source 1..20: mol_type = genomic DNA; note = Gene: DMPK; note = Location (start to end; relative to TSS): DMPK_71_101; note = Orientation (relative to transcription): antisense; note = sgRNA Position: 45782415; note = Sequence Name: 56322-704_101_SL_seq_3273
ggtcctcctgtcacagggcc

SEQ ID NO: 3274 - DNA, 20 bp, Homo sapiens
  source 1..20: mol_type = genomic DNA; note = Gene: DMPK; note = Location (start to end; relative to TSS): DMPK_24_54; note = Orientation (relative to transcription): sense; note = sgRNA Position: 45782442; note = Sequence Name: 56322-704_101_SL_seq_3274
gacatgcagccagggctcca

SEQ ID NO: 3275 - DNA, 20 bp, Homo sapiens
  source 1..20: mol_type = genomic DNA; note = Gene: DMPK; note = Location (start to end; relative to TSS): DMPK_59_89; note = Orientation (relative to transcription): sense; note = sgRNA Position: 45782407; note = Sequence Name: 56322-704_101_SL_seq_3275
ctgccaggccctgtgacagg

SEQ ID NO: 3276 - DNA, 20 bp, Homo sapiens
  source 1..20: mol_type = genomic DNA; note = Gene: DMPK; note = Location (start to end; relative to TSS): DMPK_23_53; note = Orientation (relative to transcription): sense; note = sgRNA Position: 45782443; note = Sequence Name: 56322-704_101_SL_seq_3276
agacatgcagccagggctcc

SEQ ID NO: 3277 - DNA, 20 bp, Homo sapiens
  source 1..20: mol_type = genomic DNA; note = Gene: DMPK; note = Location (start to end; relative to TSS): DMPK_56_86; note = Orientation (relative to transcription): sense; note = sgRNA Position: 45782410; note = Sequence Name: 56322-704_101_SL_seq_3277
gggctgccaggccctgtgac

SEQ ID NO: 3278 - DNA, 20 bp, Homo sapiens
  source 1..20: mol_type = genomic DNA; note = Gene: DMPK; note = Location (start to end; relative to TSS): DMPK_20_50; note = Orientation (relative to transcription): antisense; note = sgRNA Position: 45782466; note = Sequence Name: 56322-704_101_SL_seq_3278
gctgcatgtctgcctgtccc

SEQ ID NO: 3279 - DNA, 20 bp, Homo sapiens
  source 1..20: mol_type = genomic DNA; note = Gene: DMPK; note = Location (start to end; relative to TSS): DMPK_50_80; note = Orientation (relative to transcription): antisense; note = sgRNA Position: 45782436; note = Sequence Name: 56322-704_101_SL_seq_3279
ggcagcccctgtccaggccc

SEQ ID NO: 3280 - DNA, 20 bp, Homo sapiens
  source 1..20: mol_type = genomic DNA; note = Gene: DOLK; note = Location (start to end; relative to TSS): DOLK_35_65; note = Orientation (relative to transcription): sense; note = sgRNA Position: 128947544; note = Sequence Name: 56322-704_101_SL_seq_3280
ggcggctgtaactgtgagga

SEQ ID NO: 3281 - DNA, 20 bp, Homo sapiens
  source 1..20: mol_type = genomic DNA; note = Gene: DOLK; note = Location (start to end; relative to TSS): DOLK_78_108; note = Orientation (relative to transcription): sense; note = sgRNA Position: 128947501; note = Sequence Name: 56322-704_101_SL_seq_3281
cgccgtaggttggaggctgt

SEQ ID NO: 3282 - DNA, 20 bp, Homo sapiens
  source 1..20: mol_type = genomic DNA; note = Gene: DOLK; note = Location (start to end; relative to TSS): DOLK_31_61; note = Orientation (relative to transcription): sense; note = sgRNA Position: 128947548; note = Sequence Name: 56322-704_101_SL_seq_3282
cgggggcggctgtaactgtg

SEQ ID NO: 3283 - DNA, 20 bp, Homo sapiens
  source 1..20: mol_type = genomic DNA; note = Gene: DOLK; note = Location (start to end; relative to TSS): DOLK_77_107; note = Orientation (relative to transcription): sense; note = sgRNA Position: 128947502; note = Sequence Name: 56322-704_101_SL_seq_3283
acgccgtaggttggaggctg

SEQ ID NO: 3284 - DNA, 20 bp, Homo sapiens
  source 1..20: mol_type = genomic DNA; note = Gene: DOLK; note = Location (start to end; relative to TSS): DOLK_33_63; note = Orientation (relative to transcription): antisense; note = sgRNA Position: 128947566; note = Sequence Name: 56322-704_101_SL_seq_3284
gttacagccgcccccgctgc

SEQ ID NO: 3285 - DNA, 20 bp, Homo sapiens
  source 1..20: mol_type = genomic DNA; note = Gene: DOLK; note = Location (start to end; relative to TSS): DOLK_71_101; note = Orientation (relative to transcription): sense; note = sgRNA Position: 128947508; note = Sequence Name: 56322-704_101_SL_seq_3285
acgtctacgccgtaggttgg

SEQ ID NO: 3286 - DNA, 20 bp, Homo sapiens
  source 1..20: mol_type = genomic DNA; note = Gene: DOLK; note = Location (start to end; relative to TSS): DOLK_17_47; note = Orientation (relative to transcription): sense; note = sgRNA Position: 128947562; note = Sequence Name: 56322-704_101_SL_seq_3286
tgaggagccggcagcggggg

SEQ ID NO: 3287 - DNA, 20 bp, Homo sapiens
  source 1..20: mol_type = genomic DNA; note = Gene: DOLK; note = Location (start to end; relative to TSS): DOLK_68_98; note = Orientation (relative to transcription): sense; note = sgRNA Position: 128947511; note = Sequence Name: 56322-704_101_SL_seq_3287
gcgacgtctacgccgtaggt

SEQ ID NO: 3288 - DNA, 20 bp, Homo sapiens
  source 1..20: mol_type = genomic DNA; note = Gene: DOLK; note = Location (start to end; relative to TSS): DOLK_16_46; note = Orientation (relative to transcription): antisense; note = sgRNA Position: 128947583; note = Sequence Name: 56322-704_101_SL_seq_3288
tgccggctcctcacctcttt

SEQ ID NO: 3289 - DNA, 20 bp, Homo sapiens
  source 1..20: mol_type = genomic DNA; note = Gene: DOLK; note = Location (start to end; relative to TSS): DOLK_64_94; note = Orientation (relative to transcription): sense; note = sgRNA Position: 128947515; note = Sequence Name: 56322-704_101_SL_seq_3289
agtggcgacgtctacgccgt

SEQ ID NO: 3290 - DNA, 20 bp, Homo sapiens
  source 1..20: mol_type = genomic DNA; note = Gene: DSTYK; note = Location (start to end; relative to TSS): DSTYK_25_55; note = Orientation (relative to transcription): sense; note = sgRNA Position: 205211653; note = Sequence Name: 56322-704_101_SL_seq_3290
ttgggagccaggctgactgc

SEQ ID NO: 3291 - DNA, 20 bp, Homo sapiens
  source 1..20: mol_type = genomic DNA; note = Gene: DSTYK; note = Location (start to end; relative to TSS): DSTYK_71_101; note = Orientation (relative to transcription): sense; note = sgRNA Position: 205211607; note = Sequence Name: 56322-704_101_SL_seq_3291
ctcctcccttcggcactggg

SEQ ID NO: 3292 - DNA, 20 bp, Homo sapiens
  source 1..20: mol_type = genomic DNA; note = Gene: DSTYK; note = Location (start to end; relative to TSS): DSTYK_28_58; note = Orientation (relative to transcription): sense; note = sgRNA Position: 205211650; note = Sequence Name: 56322-704_101_SL_seq_3292
ggagccaggctgactgcagg

SEQ ID NO: 3293 - DNA, 20 bp, Homo sapiens
  source 1..20: mol_type = genomic DNA; note = Gene: DSTYK; note = Location (start to end; relative to TSS): DSTYK_70_100; note = Orientation (relative to transcription): sense; note = sgRNA Position: 205211608; note = Sequence Name: 56322-704_101_SL_seq_3293
cctcctcccttcggcactgg

SEQ ID NO: 3294 - DNA, 20 bp, Homo sapiens
  source 1..20: mol_type = genomic DNA; note = Gene: DSTYK; note = Location (start to end; relative to TSS): DSTYK_29_59; note = Orientation (relative to transcription): sense; note = sgRNA Position: 205211649; note = Sequence Name: 56322-704_101_SL_seq_3294
gagccaggctgactgcaggc

SEQ ID NO: 3295 - DNA, 20 bp, Homo sapiens
  source 1..20: mol_type = genomic DNA; note = Gene: DSTYK; note = Location (start to end; relative to TSS): DSTYK_69_99; note = Orientation (relative to transcription): sense; note = sgRNA Position: 205211609; note = Sequence Name: 56322-704_101_SL_seq_3295
tcctcctcccttcggcactg

SEQ ID NO: 3296 - DNA, 20 bp, Homo sapiens
  source 1..20: mol_type = genomic DNA; note = Gene: DSTYK; note = Location (start to end; relative to TSS): DSTYK_31_61; note = Orientation (relative to transcription): sense; note = sgRNA Position: 205211647; note = Sequence Name: 56322-704_101_SL_seq_3296
gccaggctgactgcaggcgg

SEQ ID NO: 3297 - DNA, 20 bp, Homo sapiens
  source 1..20: mol_type = genomic DNA; note = Gene: DSTYK; note = Location (start to end; relative to TSS): DSTYK_68_98; note = Orientation (relative to transcription): sense; note = sgRNA Position: 205211610; note = Sequence Name: 56322-704_101_SL_seq_3297
ttcctcctcccttcggcact

SEQ ID NO: 3298 - DNA, 20 bp, Homo sapiens
  source 1..20: mol_type = genomic DNA; note = Gene: DSTYK; note = Location (start to end; relative to TSS): DSTYK_30_60; note = Orientation (relative to transcription): sense; note = sgRNA Position: 205211648; note = Sequence Name: 56322-704_101_SL_seq_3298
agccaggctgactgcaggcg

SEQ ID NO: 3299 - DNA, 20 bp, Homo sapiens
  source 1..20: mol_type = genomic DNA; note = Gene: DSTYK; note = Location (start to end; relative to TSS): DSTYK_61_91; note = Orientation (relative to transcription): sense; note = sgRNA Position: 205211617; note = Sequence Name: 56322-704_101_SL_seq_3299
aggcggattcctcctccctt

SEQ ID NO: 3300 - DNA, 20 bp, Homo sapiens
  source 1..20: mol_type = genomic DNA; note = Gene: DTYMK; note = Location (start to end; relative to TSS): DTYMK_40_70; note = Orientation (relative to transcription): antisense; note = sgRNA Position: 241686771; note = Sequence Name: 56322-704_101_SL_seq_3300
cactatgagagccccgcgcc

SEQ ID NO: 3301 - DNA, 20 bp, Homo sapiens
  source 1..20: mol_type = genomic DNA; note = Gene: DTYMK; note = Location (start to end; relative to TSS): DTYMK_102_132; note = Orientation (relative to transcription): sense; note = sgRNA Position: 241686689; note = Sequence Name: 56322-704_101_SL_seq_3301
gtggaagcgctgtgcgccgc

SEQ ID NO: 3302 - DNA, 20 bp, Homo sapiens
  source 1..20: mol_type = genomic DNA; note = Gene: DTYMK; note = Location (start to end; relative to TSS): DTYMK_38_68; note = Orientation (relative to transcription): sense; note = sgRNA Position: 241686753; note = Sequence Name: 56322-704_101_SL_seq_3302
cggggctctcatagtgctgg

SEQ ID NO: 3303 - DNA, 20 bp, Homo sapiens
  source 1..20: mol_type = genomic DNA; note = Gene: DTYMK; note = Location (start to end; relative to TSS): DTYMK_101_131; note = Orientation (relative to transcription): antisense; note = sgRNA Position: 241686710; note = Sequence Name: 56322-704_101_SL_seq_3303
acagcgcttccaccagcttg

SEQ ID NO: 3304 - DNA, 20 bp, Homo sapiens
  source 1..20: mol_type = genomic DNA; note = Gene: DTYMK; note = Location (start to end; relative to TSS): DTYMK_35_65; note = Orientation (relative to transcription): sense; note = sgRNA Position: 241686756; note = Sequence Name: 56322-704_101_SL_seq_3304
gcgcggggctctcatagtgc

SEQ ID NO: 3305 - DNA, 20 bp, Homo sapiens
  source 1..20: mol_type = genomic DNA; note = Gene: DTYMK; note = Location (start to end; relative to TSS): DTYMK_82_112; note = Orientation (relative to transcription): antisense; note = sgRNA Position: 241686729; note = Sequence Name: 56322-704_101_SL_seq_3305
gcggctctgcgtgctcttcc

SEQ ID NO: 3306 - DNA, 20 bp, Homo sapiens
  source 1..20: mol_type = genomic DNA; note = Gene: DTYMK; note = Location (start to end; relative to TSS): DTYMK_39_69; note = Orientation (relative to transcription): sense; note = sgRNA Position: 241686752; note = Sequence Name: 56322-704_101_SL_seq_3306
ggggctctcatagtgctgga

SEQ ID NO: 3307 - DNA, 20 bp, Homo sapiens
  source 1..20: mol_type = genomic DNA; note = Gene: DTYMK; note = Location (start to end; relative to TSS): DTYMK_77_107; note = Orientation (relative to transcription): antisense; note = sgRNA Position: 241686734; note = Sequence Name: 56322-704_101_SL_seq_3307
tctgcgtgctcttcccggcg

SEQ ID NO: 3308 - DNA, 20 bp, Homo sapiens
  source 1..20: mol_type = genomic DNA; note = Gene: DTYMK; note = Location (start to end; relative to TSS): DTYMK_18_48; note = Orientation (relative to transcription): sense; note = sgRNA Position: 241686773; note = Sequence Name: 56322-704_101_SL_seq_3308
acagtcatggcggcccggcg

SEQ ID NO: 3309 - DNA, 20 bp, Homo sapiens
  source 1..20: mol_type = genomic DNA; note = Gene: DTYMK; note = Location (start to end; relative to TSS): DTYMK_54_84; note = Orientation (relative to transcription): sense; note = sgRNA Position: 241686737; note = Sequence Name: 56322-704_101_SL_seq_3309
ctggagggcgtggaccgcgc

SEQ ID NO: 3310 - DNA, 20 bp, Homo sapiens
  source 1..20: mol_type = genomic DNA; note = Gene: DYRK1A; note = Location (start to end; relative to TSS): DYRK1A_57_87; note = Orientation (relative to transcription): sense; note = sgRNA Position: 37366856; note = Sequence Name: 56322-704_101_SL_seq_3310
ataataataaaaagccccat

SEQ ID NO: 3311 - DNA, 20 bp, Homo sapiens
  source 1..20: mol_type = genomic DNA; note = Gene: DYRK1A; note = Location (start to end; relative to TSS): DYRK1A_88_118; note = Orientation (relative to transcription): sense; note = sgRNA Position: 37366887; note = Sequence Name: 56322-704_101_SL_seq_3311
gggggtggcggcggcaaccg

SEQ ID NO: 3312 - DNA, 20 bp, Homo sapiens
  source 1..20: mol_type = genomic DNA; note = Gene: DYRK1A; note = Location (start to end; relative to TSS): DYRK1A_47_77; note = Orientation (relative to transcription): antisense; note = sgRNA Position: 37366826; note = Sequence Name: 56322-704_101_SL_seq_3312
ttattcgggcgggaagcgaa

SEQ ID NO: 3313 - DNA, 20 bp, Homo sapiens
  source 1..20: mol_type = genomic DNA; note = Gene: DYRK1A; note = Location (start to end; relative to TSS): DYRK1A_79_109; note = Orientation (relative to transcription): sense; note = sgRNA Position: 37366878; note = Sequence Name: 56322-704_101_SL_seq_3313
gagtgaggcgggggtggcgg

SEQ ID NO: 3314 - DNA, 20 bp, Homo sapiens
  source 1..20: mol_type = genomic DNA; note = Gene: DYRK1A; note = Location (start to end; relative to TSS): DYRK1A_46_76; note = Orientation (relative to transcription): antisense; note = sgRNA Position: 37366825; note = Sequence Name: 56322-704_101_SL_seq_3314
tattcgggcgggaagcgaaa

SEQ ID NO: 3315 - DNA, 20 bp, Homo sapiens
  source 1..20: mol_type = genomic DNA; note = Gene: DYRK1A; note = Location (start to end; relative to TSS): DYRK1A_76_106; note = Orientation (relative to transcription): sense; note = sgRNA Position: 37366875; note = Sequence Name: 56322-704_101_SL_seq_3315
ttggagtgaggcgggggtgg

SEQ ID NO: 3316 - DNA, 20 bp, Homo sapiens
  source 1..20: mol_type = genomic DNA; note = Gene: DYRK1A; note = Location (start to end; relative to TSS): DYRK1A_18_48; note = Orientation (relative to transcription): antisense; note = sgRNA Position: 37366797; note = Sequence Name: 56322-704_101_SL_seq_3316
aaaaaaaccaaccaacaaaa

SEQ ID NO: 3317 - DNA, 20 bp, Homo sapiens
  source 1..20: mol_type = genomic DNA; note = Gene: DYRK1A; note = Location (start to end; relative to TSS): DYRK1A_57_87; note = Orientation (relative to transcription): sense; note = sgRNA Position: 37366856; note = Sequence Name: 56322-704_101_SL_seq_3317
ataataataaaaagccccat

SEQ ID NO: 3318 - DNA, 20 bp, Homo sapiens
  source 1..20: mol_type = genomic DNA; note = Gene: DYRK1A; note = Location (start to end; relative to TSS): DYRK1A_12_42; note = Orientation (relative to transcription): antisense; note = sgRNA Position: 37366791; note = Sequence Name: 56322-704_101_SL_seq_3318
accaaccaacaaaatggcga

SEQ ID NO: 3319 - DNA, 20 bp, Homo sapiens
  source 1..20: mol_type = genomic DNA; note = Gene: DYRK1A; note = Location (start to end; relative to TSS): DYRK1A_46_76; note = Orientation (relative to transcription): antisense; note = sgRNA Position: 37366825; note = Sequence Name: 56322-704_101_SL_seq_3319
tattcgggcgggaagcgaaa

SEQ ID NO: 3320 - DNA, 20 bp, Homo sapiens
  source 1..20: mol_type = genomic DNA; note = Gene: DYRK1B; note = Location (start to end; relative to TSS): DYRK1B_46_76; note = Orientation (relative to transcription): antisense; note = sgRNA Position: 39834112; note = Sequence Name: 56322-704_101_SL_seq_3320
tccggcggacgcggcaagcc

SEQ ID NO: 3321 - DNA, 20 bp, Homo sapiens
  source 1..20: mol_type = genomic DNA; note = Gene: DYRK1B; note = Location (start to end; relative to TSS): DYRK1B_104_134; note = Orientation (relative to transcription): antisense; note = sgRNA Position: 39834054; note = Sequence Name: 56322-704_101_SL_seq_3321
aaggggactcaaactgctcg

SEQ ID NO: 3322 - DNA, 20 bp, Homo sapiens
  source 1..20: mol_type = genomic DNA; note = Gene: DYRK1B; note = Location (start to end; relative to TSS): DYRK1B_45_75; note = Orientation (relative to transcription): antisense; note = sgRNA Position: 39834113; note = Sequence Name: 56322-704_101_SL_seq_3322
ccggcggacgcggcaagcca

SEQ ID NO: 3323 - DNA, 20 bp, Homo sapiens
  source 1..20: mol_type = genomic DNA; note = Gene: DYRK1B; note = Location (start to end; relative to TSS): DYRK1B_78_108; note = Orientation (relative to transcription): antisense; note = sgRNA Position: 39834080; note = Sequence Name: 56322-704_101_SL_seq_3323
ccgagctcagacctgcccac

SEQ ID NO: 3324 - DNA, 20 bp, Homo sapiens
  source 1..20: mol_type = genomic DNA; note = Gene: DYRK1B; note = Location (start to end; relative to TSS): DYRK1B_36_66; note = Orientation (relative to transcription): sense; note = sgRNA Position: 39834102; note = Sequence Name: 56322-704_101_SL_seq_3324
ccctggcttgccgcgtccgc

SEQ ID NO: 3325 - DNA, 20 bp, Homo sapiens
  source 1..20: mol_type = genomic DNA; note = Gene: DYRK1B; note = Location (start to end; relative to TSS): DYRK1B_69_99; note = Orientation (relative to transcription): sense; note = sgRNA Position: 39834069; note = Sequence Name: 56322-704_101_SL_seq_3325
ccagtgggcaggtctgagct

SEQ ID NO: 3326 - DNA, 20 bp, Homo sapiens
  source 1..20: mol_type = genomic DNA; note = Gene: DYRK1B; note = Location (start to end; relative to TSS): DYRK1B_19_49; note = Orientation (relative to transcription): sense; note = sgRNA Position: 39834119; note = Sequence Name: 56322-704_101_SL_seq_3326
ttactgggtaatcggggccc

SEQ ID NO: 3327 - DNA, 20 bp, Homo sapiens
  source 1..20: mol_type = genomic DNA; note = Gene: DYRK1B; note = Location (start to end; relative to TSS): DYRK1B_53_83; note = Orientation (relative to transcription): sense; note = sgRNA Position: 39834085; note = Sequence Name: 56322-704_101_SL_seq_3327
cgccggataccctcagccag

SEQ ID NO: 3328 - DNA, 20 bp, Homo sapiens
  source 1..20: mol_type = genomic DNA; note = Gene: DYRK1B; note = Location (start to end; relative to TSS): DYRK1B_13_43; note = Orientation (relative to transcription): sense; note = sgRNA Position: 39834125; note = Sequence Name: 56322-704_101_SL_seq_3328
gttgcattactgggtaatcg

SEQ ID NO: 3329 - DNA, 20 bp, Homo sapiens
  source 1..20: mol_type = genomic DNA; note = Gene: DYRK1B; note = Location (start to end; relative to TSS): DYRK1B_46_76; note = Orientation (relative to transcription): antisense; note = sgRNA Position: 39834112; note = Sequence Name: 56322-704_101_SL_seq_3329
tccggcggacgcggcaagcc

SEQ ID NO: 3330 - DNA, 20 bp, Homo sapiens
  source 1..20: mol_type = genomic DNA; note = Gene: DYRK2; note = Location (start to end; relative to TSS): DYRK2_51_81; note = Orientation (relative to transcription): sense; note = sgRNA Position: 67648822; note = Sequence Name: 56322-704_101_SL_seq_3330
gctccccgcgcccctatgtg

SEQ ID NO: 3331 - DNA, 20 bp, Homo sapiens
  source 1..20: mol_type = genomic DNA; note = Gene: DYRK2; note = Location (start to end; relative to TSS): DYRK2_89_119; note = Orientation (relative to transcription): sense; note = sgRNA Position: 67648860; note = Sequence Name: 56322-704_101_SL_seq_3331
gcggcgcgcaggggagggcg

SEQ ID NO: 3332 - DNA, 20 bp, Homo sapiens
  source 1..20: mol_type = genomic DNA; note = Gene: DYRK2; note = Location (start to end; relative to TSS): DYRK2_52_82; note = Orientation (relative to transcription): sense; note = sgRNA Position: 67648823; note = Sequence Name: 56322-704_101_SL_seq_3332
ctccccgcgcccctatgtga

SEQ ID NO: 3333 - DNA, 20 bp, Homo sapiens
  source 1..20: mol_type = genomic DNA; note = Gene: DYRK2; note = Location (start to end; relative to TSS): DYRK2_84_114; note = Orientation (relative to transcription): sense; note = sgRNA Position: 67648855; note = Sequence Name: 56322-704_101_SL_seq_3333
ggcccgcggcgcgcagggga

SEQ ID NO: 3334 - DNA, 20 bp, Homo sapiens
  source 1..20: mol_type = genomic DNA; note = Gene: DYRK2; note = Location (start to end; relative to TSS): DYRK2_44_74; note = Orientation (relative to transcription): antisense; note = sgRNA Position: 67648795; note = Sequence Name: 56322-704_101_SL_seq_3334
ggggagctggaagcgctgcg

SEQ ID NO: 3335 - DNA, 20 bp, Homo sapiens
  source 1..20: mol_type = genomic DNA; note = Gene: DYRK2; note = Location (start to end; relative to TSS): DYRK2_79_109; note = Orientation (relative to transcription): sense; note = sgRNA Position: 67648850; note = Sequence Name: 56322-704_101_SL_seq_3335
ggggaggcccgcggcgcgca

SEQ ID NO: 3336 - DNA, 20 bp, Homo sapiens
  source 1..20: mol_type = genomic DNA; note = Gene: DYRK2; note = Location (start to end; relative to TSS): DYRK2_11_41; note = Orientation (relative to transcription): sense; note = sgRNA Position: 67648782; note = Sequence Name: 56322-704_101_SL_seq_3336
ctcccgagccaggcggtctt

SEQ ID NO: 3337 - DNA, 20 bp, Homo sapiens
  source 1..20: mol_type = genomic DNA; note = Gene: DYRK2; note = Location (start to end; relative to TSS): DYRK2_51_81; note = Orientation (relative to transcription): sense; note = sgRNA Position: 67648822; note = Sequence Name: 56322-704_101_SL_seq_3337
gctccccgcgcccctatgtg

SEQ ID NO: 3338 - DNA, 20 bp, Homo sapiens
  source 1..20: mol_type = genomic DNA; note = Gene: DYRK2; note = Location (start to end; relative to TSS): DYRK2_10_40; note = Orientation (relative to transcription): antisense; note = sgRNA Position: 67648761; note = Sequence Name: 56322-704_101_SL_seq_3338
cctggctcgggagcctctcc

SEQ ID NO: 3339 - DNA, 20 bp, Homo sapiens
  source 1..20: mol_type = genomic DNA; note = Gene: DYRK2; note = Location (start to end; relative to TSS): DYRK2_44_74; note = Orientation (relative to transcription): antisense; note = sgRNA Position: 67648795; note = Sequence Name: 56322-704_101_SL_seq_3339
ggggagctggaagcgctgcg

SEQ ID NO: 3340 - DNA, 20 bp, Homo sapiens
  source 1..20: mol_type = genomic DNA; note = Gene: DYRK3; note = Location (start to end; relative to TSS): DYRK3_54_84; note = Orientation (relative to transcription): sense; note = sgRNA Position: 206635616; note = Sequence Name: 56322-704_101_SL_seq_3340
cccgtgggagcgtcgcgccg

SEQ ID NO: 3341 - DNA, 20 bp, Homo sapiens
  source 1..20: mol_type = genomic DNA; note = Gene: DYRK3; note = Location (start to end; relative to TSS): DYRK3_91_121; note = Orientation (relative to transcription): sense; note = sgRNA Position: 206635653; note = Sequence Name: 56322-704_101_SL_seq_3341
gcgtaggtggcgtggccgac

SEQ ID NO: 3342 - DNA, 20 bp, Homo sapiens
  source 1..20: mol_type = genomic DNA; note = Gene: DYRK3; note = Location (start to end; relative to TSS): DYRK3_39_69; note = Orientation (relative to transcription): sense; note = sgRNA Position: 206635601; note = Sequence Name: 56322-704_101_SL_seq_3342
gtctggtcgagagtacccgt

SEQ ID NO: 3343 - DNA, 20 bp, Homo sapiens
  source 1..20: mol_type = genomic DNA; note = Gene: DYRK3; note = Location (start to end; relative to TSS): DYRK3_75_105; note = Orientation (relative to transcription): sense; note = sgRNA Position: 206635637; note = Sequence Name: 56322-704_101_SL_seq_3343
ggaggcagccgtcccggcgt

SEQ ID NO: 3344 - DNA, 20 bp, Homo sapiens
  source 1..20: mol_type = genomic DNA; note = Gene: DYRK3; note = Location (start to end; relative to TSS): DYRK3_38_68; note = Orientation (relative to transcription): sense; note = sgRNA Position: 206635600; note = Sequence Name: 56322-704_101_SL_seq_3344
tgtctggtcgagagtacccg

SEQ ID NO: 3345 - DNA, 20 bp, Homo sapiens
  source 1..20: mol_type = genomic DNA; note = Gene: DYRK3; note = Location (start to end; relative to TSS): DYRK3_69_99; note = Orientation (relative to transcription): sense; note = sgRNA Position: 206635631; note = Sequence Name: 56322-704_101_SL_seq_3345
cgccgcggaggcagccgtcc

SEQ ID NO: 3346 - DNA, 20 bp, Homo sapiens
  source 1..20: mol_type = genomic DNA; note = Gene: DYRK3; note = Location (start to end; relative to TSS): DYRK3_22_52; note = Orientation (relative to transcription): sense; note = sgRNA Position: 206635584; note = Sequence Name: 56322-704_101_SL_seq_3346
gtgcgctgagctgcagtgtc

SEQ ID NO: 3347 - DNA, 20 bp, Homo sapiens
  source 1..20: mol_type = genomic DNA; note = Gene: DYRK3; note = Location (start to end; relative to TSS): DYRK3_57_87; note = Orientation (relative to transcription): sense; note = sgRNA Position: 206635619; note = Sequence Name: 56322-704_101_SL_seq_3347
gtgggagcgtcgcgccgcgg

SEQ ID NO: 3348 - DNA, 20 bp, Homo sapiens
  source 1..20: mol_type = genomic DNA; note = Gene: DYRK3; note = Location (start to end; relative to TSS): DYRK3_15_45; note = Orientation (relative to transcription): antisense; note = sgRNA Position: 206635557; note = Sequence Name: 56322-704_101_SL_seq_3348
agcgcactttcgctcccgac

SEQ ID NO: 3349 - DNA, 20 bp, Homo sapiens
  source 1..20: mol_type = genomic DNA; note = Gene: DYRK3; note = Location (start to end; relative to TSS): DYRK3_54_84; note = Orientation (relative to transcription): sense; note = sgRNA Position: 206635616; note = Sequence Name: 56322-704_101_SL_seq_3349
cccgtgggagcgtcgcgccg

SEQ ID NO: 3350 - DNA, 20 bp, Homo sapiens
  source 1..20: mol_type = genomic DNA; note = Gene: DYRK4; note = Location (start to end; relative to TSS): DYRK4_38_68; note = Orientation (relative to transcription): sense; note = sgRNA Position: 4562272; note = Sequence Name: 56322-704_101_SL_seq_3350
ctcccgccgcctatccgcac

SEQ ID NO: 3351 - DNA, 20 bp, Homo sapiens
  source 1..20: mol_type = genomic DNA; note = Gene: DYRK4; note = Location (start to end; relative to TSS): DYRK4_100_130; note = Orientation (relative to transcription): sense; note = sgRNA Position: 4562334; note = Sequence Name: 56322-704_101_SL_seq_3351
gtcaggcgcgagtacgaggc

SEQ ID NO: 3352 - DNA, 20 bp, Homo sapiens
  source 1..20: mol_type = genomic DNA; note = Gene: DYRK4; note = Location (start to end; relative to TSS): DYRK4_46_76; note = Orientation (relative to transcription): antisense; note = sgRNA Position: 4562260; note = Sequence Name: 56322-704_101_SL_seq_3352
cggtgcggataggcggcggg

SEQ ID NO: 3353 - DNA, 20 bp, Homo sapiens
  source 1..20: mol_type = genomic DNA; note = Gene: DYRK4; note = Location (start to end; relative to TSS): DYRK4_96_126; note = Orientation (relative to transcription): sense; note = sgRNA Position: 4562330; note = Sequence Name: 56322-704_101_SL_seq_3353
agcagtcaggcgcgagtacg

SEQ ID NO: 3354 - DNA, 20 bp, Homo sapiens
  source 1..20: mol_type = genomic DNA; note = Gene: DYRK4; note = Location (start to end; relative to TSS): DYRK4_49_79; note = Orientation (relative to transcription): antisense; note = sgRNA Position: 4562263; note = Sequence Name: 56322-704_101_SL_seq_3354
ttccggtgcggataggcggc

SEQ ID NO: 3355 - DNA, 20 bp, Homo sapiens
  source 1..20: mol_type = genomic DNA; note = Gene: DYRK4; note = Location (start to end; relative to TSS): DYRK4_83_113; note = Orientation (relative to transcription): antisense; note = sgRNA Position: 4562297; note = Sequence Name: 56322-704_101_SL_seq_3355
tcgtgaagtacgagcctccg

SEQ ID NO: 3356 - DNA, 20 bp, Homo sapiens
  source 1..20: mol_type = genomic DNA; note = Gene: DYRK4; note = Location (start to end; relative to TSS): DYRK4_34_64; note = Orientation (relative to transcription): antisense; note = sgRNA Position: 4562248; note = Sequence Name: 56322-704_101_SL_seq_3356
gcggcgggaggagctgcatg

SEQ ID NO: 3357 - DNA, 20 bp, Homo sapiens
  source 1..20: mol_type = genomic DNA; note = Gene: DYRK4; note = Location (start to end; relative to TSS): DYRK4_66_96; note = Orientation (relative to transcription): antisense; note = sgRNA Position: 4562280; note = Sequence Name: 56322-704_101_SL_seq_3357
ccgcggcccttactttgttc

SEQ ID NO: 3358 - DNA, 20 bp, Homo sapiens
  source 1..20: mol_type = genomic DNA; note = Gene: DYRK4; note = Location (start to end; relative to TSS): DYRK4_30_60; note = Orientation (relative to transcription): antisense; note = sgRNA Position: 4562244; note = Sequence Name: 56322-704_101_SL_seq_3358
cgggaggagctgcatgaggc

SEQ ID NO: 3359 - DNA, 20 bp, Homo sapiens
  source 1..20: mol_type = genomic DNA; note = Gene: DYRK4; note = Location (start to end; relative to TSS): DYRK4_60_90; note = Orientation (relative to transcription): sense; note = sgRNA Position: 4562294; note = Sequence Name: 56322-704_101_SL_seq_3359
gaacaaagtaagggccgcgg

SEQ ID NO: 3360 - DNA, 20 bp, Homo sapiens
  source 1..20: mol_type = genomic DNA; note = Gene: EEF2K; note = Location (start to end; relative to TSS): EEF2K_38_68; note = Orientation (relative to transcription): antisense; note = sgRNA Position: 22206322; note = Sequence Name: 56322-704_101_SL_seq_3360
gggcgctcgatccaggaagg

SEQ ID NO: 3361 - DNA, 20 bp, Homo sapiens
  source 1..20: mol_type = genomic DNA; note = Gene: EEF2K; note = Location (start to end; relative to TSS): EEF2K_82_112; note = Orientation (relative to transcription): antisense; note = sgRNA Position: 22206366; note = Sequence Name: 56322-704_101_SL_seq_3361
ggcgacagcgagcgggactc

SEQ ID NO: 3362 - DNA, 20 bp, Homo sapiens
  source 1..20: mol_type = genomic DNA; note = Gene: EEF2K; note = Location (start to end; relative to TSS): EEF2K_37_67; note = Orientation (relative to transcription): antisense; note = sgRNA Position: 22206321; note = Sequence Name: 56322-704_101_SL_seq_3362
ggcgctcgatccaggaagga

SEQ ID NO: 3363 - DNA, 20 bp, Homo sapiens
  source 1..20: mol_type = genomic DNA; note = Gene: EEF2K; note = Location (start to end; relative to TSS): EEF2K_79_109; note = Orientation (relative to transcription): antisense; note = sgRNA Position: 22206363; note = Sequence Name: 56322-704_101_SL_seq_3363
gacagcgagcgggactcggg

SEQ ID NO: 3364 - DNA, 20 bp, Homo sapiens
  source 1..20: mol_type = genomic DNA; note = Gene: EEF2K; note = Location (start to end; relative to TSS): EEF2K_18_48; note = Orientation (relative to transcription): antisense; note = sgRNA Position: 22206302; note = Sequence Name: 56322-704_101_SL_seq_3364
aggggagctgaggctgaagc

SEQ ID NO: 3365 - DNA, 20 bp, Homo sapiens
  source 1..20: mol_type = genomic DNA; note = Gene: EEF2K; note = Location (start to end; relative to TSS): EEF2K_71_101; note = Orientation (relative to transcription): antisense; note = sgRNA Position: 22206355; note = Sequence Name: 56322-704_101_SL_seq_3365
gcgggactcgggtggctgca

SEQ ID NO: 3366 - DNA, 20 bp, Homo sapiens
  source 1..20: mol_type = genomic DNA; note = Gene: EEF2K; note = Location (start to end; relative to TSS): EEF2K_28_58; note = Orientation (relative to transcription): antisense; note = sgRNA Position: 22206312; note = Sequence Name: 56322-704_101_SL_seq_3366
tccaggaaggaggggagctg

SEQ ID NO: 3367 - DNA, 20 bp, Homo sapiens
  source 1..20: mol_type = genomic DNA; note = Gene: EEF2K; note = Location (start to end; relative to TSS): EEF2K_67_97; note = Orientation (relative to transcription): antisense; note = sgRNA Position: 22206351; note = Sequence Name: 56322-704_101_SL_seq_3367
gactcgggtggctgcagggc

SEQ ID NO: 3368 - DNA, 20 bp, Homo sapiens
  source 1..20: mol_type = genomic DNA; note = Gene: EEF2K; note = Location (start to end; relative to TSS): EEF2K_36_66; note = Orientation (relative to transcription): antisense; note = sgRNA Position: 22206320; note = Sequence Name: 56322-704_101_SL_seq_3368
gcgctcgatccaggaaggag

SEQ ID NO: 3369 - DNA, 20 bp, Homo sapiens
  source 1..20: mol_type = genomic DNA; note = Gene: EEF2K; note = Location (start to end; relative to TSS): EEF2K_66_96; note = Orientation (relative to transcription): antisense; note = sgRNA Position: 22206350; note = Sequence Name: 56322-704_101_SL_seq_3369
actcgggtggctgcagggcc

SEQ ID NO: 3370 - DNA, 20 bp, Homo sapiens
  source 1..20: mol_type = genomic DNA; note = Gene: EGFR; note = Location (start to end; relative to TSS): EGFR_40_70; note = Orientation (relative to transcription): antisense; note = sgRNA Position: 55019063; note = Sequence Name: 56322-704_101_SL_seq_3370
tcacaccgtgcggggggcgg

SEQ ID NO: 3371 - DNA, 20 bp, Homo sapiens
  source 1..20: mol_type = genomic DNA; note = Gene: EGFR; note = Location (start to end; relative to TSS): EGFR_85_115; note = Orientation (relative to transcription): antisense; note = sgRNA Position: 55019108; note = Sequence Name: 56322-704_101_SL_seq_3371
ccggggctagctcgggactc

SEQ ID NO: 3372 - DNA, 20 bp, Homo sapiens
  source 1..20: mol_type = genomic DNA; note = Gene: EGFR; note = Location (start to end; relative to TSS): EGFR_44_74; note = Orientation (relative to transcription): sense; note = sgRNA Position: 55019087; note = Sequence Name: 56322-704_101_SL_seq_3372
cacggtgtgagcgcccgacg

SEQ ID NO: 3373 - DNA, 20 bp, Homo sapiens
  source 1..20: mol_type = genomic DNA; note = Gene: EGFR; note = Location (start to end; relative to TSS): EGFR_79_109; note = Orientation (relative to transcription): sense; note = sgRNA Position: 55019122; note = Sequence Name: 56322-704_101_SL_seq_3373
gagtcccgagctagccccgg

SEQ ID NO: 3374 - DNA, 20 bp, Homo sapiens
  source 1..20: mol_type = genomic DNA; note = Gene: EGFR; note = Location (start to end; relative to TSS): EGFR_46_76; note = Orientation (relative to transcription): antisense; note = sgRNA Position: 55019069; note = Sequence Name: 56322-704_101_SL_seq_3374
gggcgctcacaccgtgcggg

SEQ ID NO: 3375 - DNA, 20 bp, Homo sapiens
  source 1..20: mol_type = genomic DNA; note = Gene: EGFR; note = Location (start to end; relative to TSS): EGFR_76_106; note = Orientation (relative to transcription): antisense; note = sgRNA Position: 55019099; note = Sequence Name: 56322-704_101_SL_seq_3375
gctcgggactccggccgcct

SEQ ID NO: 3376 - DNA, 20 bp, Homo sapiens
  source 1..20: mol_type = genomic DNA; note = Gene: EGFR; note = Location (start to end; relative to TSS): EGFR_26_56; note = Orientation (relative to transcription): sense; note = sgRNA Position: 55019069; note = Sequence Name: 56322-704_101_SL_seq_3376
agcagcctccgccccccgca

SEQ ID NO: 3377 - DNA, 20 bp, Homo sapiens
  source 1..20: mol_type = genomic DNA; note = Gene: EGFR; note = Location (start to end; relative to TSS): EGFR_67_97; note = Orientation (relative to transcription): antisense; note = sgRNA Position: 55019090; note = Sequence Name: 56322-704_101_SL_seq_3377
tccggccgcctcggccgcgt

SEQ ID NO: 3378 - DNA, 20 bp, Homo sapiens
  source 1..20: mol_type = genomic DNA; note = Gene: EGFR; note = Location (start to end; relative to TSS): EGFR_31_61; note = Orientation (relative to transcription): antisense; note = sgRNA Position: 55019054; note = Sequence Name: 56322-704_101_SL_seq_3378
gcggggggcggaggctgctg

SEQ ID NO: 3379 - DNA, 20 bp, Homo sapiens
  source 1..20: mol_type = genomic DNA; note = Gene: EGFR; note = Location (start to end; relative to TSS): EGFR_66_96; note = Orientation (relative to transcription): antisense; note = sgRNA Position: 55019089; note = Sequence Name: 56322-704_101_SL_seq_3379
ccggccgcctcggccgcgtc

SEQ ID NO: 3380 - DNA, 20 bp, Homo sapiens
  source 1..20: mol_type = genomic DNA; note = Gene: EIF2AK1; note = Location (start to end; relative to TSS): EIF2AK1_32_62; note = Orientation (relative to transcription): sense; note = sgRNA Position: 6059119; note = Sequence Name: 56322-704_101_SL_seq_3380
ggcagtgctgggctggccgg

SEQ ID NO: 3381 - DNA, 20 bp, Homo sapiens
  source 1..20: mol_type = genomic DNA; note = Gene: EIF2AK1; note = Location (start to end; relative to TSS): EIF2AK1_76_106; note = Orientation (relative to transcription): antisense; note = sgRNA Position: 6059095; note = Sequence Name: 56322-704_101_SL_seq_3381
ctgcatcgccggccgcgcgc

SEQ ID NO: 3382 - DNA, 20 bp, Homo sapiens
  source 1..20: mol_type = genomic DNA; note = Gene: EIF2AK1; note = Location (start to end; relative to TSS): EIF2AK1_29_59; note = Orientation (relative to transcription): sense; note = sgRNA Position: 6059122; note = Sequence Name: 56322-704_101_SL_seq_3382
tgtggcagtgctgggctggc

SEQ ID NO: 3383 - DNA, 20 bp, Homo sapiens
  source 1..20: mol_type = genomic DNA; note = Gene: EIF2AK1; note = Location (start to end; relative to TSS): EIF2AK1_72_102; note = Orientation (relative to transcription): sense; note = sgRNA Position: 6059079; note = Sequence Name: 56322-704_101_SL_seq_3383
gcgcggccggcgatgcaggg

SEQ ID NO: 3384 - DNA, 20 bp, Homo sapiens
  source 1..20: mol_type = genomic DNA; note = Gene: EIF2AK1; note = Location (start to end; relative to TSS): EIF2AK1_20_50; note = Orientation (relative to transcription): sense; note = sgRNA Position: 6059131; note = Sequence Name: 56322-704_101_SL_seq_3384
gcatcggagtgtggcagtgc

SEQ ID NO: 3385 - DNA, 20 bp, Homo sapiens
  source 1..20: mol_type = genomic DNA; note = Gene: EIF2AK1; note = Location (start to end; relative to TSS): EIF2AK1_71_101; note = Orientation (relative to transcription): sense; note = sgRNA Position: 6059080; note = Sequence Name: 56322-704_101_SL_seq_3385
cgcgcggccggcgatgcagg

SEQ ID NO: 3386 - DNA, 20 bp, Homo sapiens
  source 1..20: mol_type = genomic DNA; note = Gene: EIF2AK1; note = Location (start to end; relative to TSS): EIF2AK1_21_51; note = Orientation (relative to transcription): sense; note = sgRNA Position: 6059130; note = Sequence Name: 56322-704_101_SL_seq_3386
catcggagtgtggcagtgct

SEQ ID NO: 3387 - DNA, 20 bp, Homo sapiens
  source 1..20: mol_type = genomic DNA; note = Gene: EIF2AK1; note = Location (start to end; relative to TSS): EIF2AK1_70_100; note = Orientation (relative to transcription): sense; note = sgRNA Position: 6059081; note = Sequence Name: 56322-704_101_SL_seq_3387
gcgcgcggccggcgatgcag

SEQ ID NO: 3388 - DNA, 20 bp, Homo sapiens
  source 1..20: mol_type = genomic DNA; note = Gene: EIF2AK1; note = Location (start to end; relative to TSS): EIF2AK1_25_55; note = Orientation (relative to transcription): sense; note = sgRNA Position: 6059126; note = Sequence Name: 56322-704_101_SL_seq_3388
ggagtgtggcagtgctgggc

SEQ ID NO: 3389 - DNA, 20 bp, Homo sapiens
  source 1..20: mol_type = genomic DNA; note = Gene: EIF2AK1; note = Location (start to end; relative to TSS): EIF2AK1_55_85; note = Orientation (relative to transcription): sense; note = sgRNA Position: 6059096; note = Sequence Name: 56322-704_101_SL_seq_3389
gctgggctgcggcccgcgcg

SEQ ID NO: 3390 - DNA, 20 bp, Homo sapiens
  source 1..20: mol_type = genomic DNA; note = Gene: EIF2AK2; note = Location (start to end; relative to TSS): EIF2AK2_52_82; note = Orientation (relative to transcription): sense; note = sgRNA Position: 37156904; note = Sequence Name: 56322-704_101_SL_seq_3390
ggcggcggcgcaggtgagca

SEQ ID NO: 3391 - DNA, 20 bp, Homo sapiens
  source 1..20: mol_type = genomic DNA; note = Gene: EIF2AK2; note = Location (start to end; relative to TSS): EIF2AK2_94_124; note = Orientation (relative to transcription): antisense; note = sgRNA Position: 37156882; note = Sequence Name: 56322-704_101_SL_seq_3391
ccccgctccccgcgctccct

SEQ ID NO: 3392 - DNA, 20 bp, Homo sapiens
  source 1..20: mol_type = genomic DNA; note = Gene: EIF2AK2; note = Location (start to end; relative to TSS): EIF2AK2_19_49; note = Orientation (relative to transcription): sense; note = sgRNA Position: 37156937; note = Sequence Name: 56322-704_101_SL_seq_3392
cgcgggtctccggccggcgg

SEQ ID NO: 3393 - DNA, 20 bp, Homo sapiens
  source 1..20: mol_type = genomic DNA; note = Gene: EIF2AK2; note = Location (start to end; relative to TSS): EIF2AK2_69_99; note = Orientation (relative to transcription): sense; note = sgRNA Position: 37156887; note = Sequence Name: 56322-704_101_SL_seq_3393
gcagggcagggggcagccga

SEQ ID NO: 3394 - DNA, 20 bp, Homo sapiens
  source 1..20: mol_type = genomic DNA; note = Gene: EIF2AK2; note = Location (start to end; relative to TSS): EIF2AK2_20_50; note = Orientation (relative to transcription): antisense; note = sgRNA Position: 37156956; note = Sequence Name: 56322-704_101_SL_seq_3394
ggccggagacccgcggcttc

SEQ ID NO: 3395 - DNA, 20 bp, Homo sapiens
  source 1..20: mol_type = genomic DNA; note = Gene: EIF2AK2; note = Location (start to end; relative to TSS): EIF2AK2_59_89; note = Orientation (relative to transcription): sense; note = sgRNA Position: 37156897; note = Sequence Name: 56322-704_101_SL_seq_3395
gcgcaggtgagcagggcagg

SEQ ID NO: 3396 - DNA, 20 bp, Homo sapiens
  source 1..20: mol_type = genomic DNA; note = Gene: EIF2AK2; note = Location (start to end; relative to TSS): EIF2AK2_16_46; note = Orientation (relative to transcription): sense; note = sgRNA Position: 37156940; note = Sequence Name: 56322-704_101_SL_seq_3396
agccgcgggtctccggccgg

SEQ ID NO: 3397 - DNA, 20 bp, Homo sapiens
  source 1..20: mol_type = genomic DNA; note = Gene: EIF2AK2; note = Location (start to end; relative to TSS): EIF2AK2_57_87; note = Orientation (relative to transcription): sense; note = sgRNA Position: 37156899; note = Sequence Name: 56322-704_101_SL_seq_3397
cggcgcaggtgagcagggca

SEQ ID NO: 3398 - DNA, 20 bp, Homo sapiens
  source 1..20: mol_type = genomic DNA; note = Gene: EIF2AK2; note = Location (start to end; relative to TSS): EIF2AK2_13_43; note = Orientation (relative to transcription): sense; note = sgRNA Position: 37156943; note = Sequence Name: 56322-704_101_SL_seq_3398
cgaagccgcgggtctccggc

SEQ ID NO: 3399 - DNA, 20 bp, Homo sapiens
  source 1..20: mol_type = genomic DNA; note = Gene: EIF2AK2; note = Location (start to end; relative to TSS): EIF2AK2_52_82; note = Orientation (relative to transcription): sense; note = sgRNA Position: 37156904; note = Sequence Name: 56322-704_101_SL_seq_3399
ggcggcggcgcaggtgagca

SEQ ID NO: 3400 - DNA, 20 bp, Homo sapiens
  source 1..20: mol_type = genomic DNA; note = Gene: EIF2AK3; note = Location (start to end; relative to TSS): EIF2AK3_29_59; note = Orientation (relative to transcription): sense; note = sgRNA Position: 88627411; note = Sequence Name: 56322-704_101_SL_seq_3400
gagacgtggccaggggaaca

SEQ ID NO: 3401 - DNA, 20 bp, Homo sapiens
  source 1..20: mol_type = genomic DNA; note = Gene: EIF2AK3; note = Location (start to end; relative to TSS): EIF2AK3_62_92; note = Orientation (relative to transcription): sense; note = sgRNA Position: 88627378; note = Sequence Name: 56322-704_101_SL_seq_3401
aggccgtcggggcggcagta

SEQ ID NO: 3402 - DNA, 20 bp, Homo sapiens
  source 1..20: mol_type = genomic DNA; note = Gene: EIF2AK3; note = Location (start to end; relative to TSS): EIF2AK3_31_61; note = Orientation (relative to transcription): antisense; note = sgRNA Position: 88627429; note = Sequence Name: 56322-704_101_SL_seq_3402
cccctggccacgtctcagcc

SEQ ID NO: 3403 - DNA, 20 bp, Homo sapiens
  source 1..20: mol_type = genomic DNA; note = Gene: EIF2AK3; note = Location (start to end; relative to TSS): EIF2AK3_61_91; note = Orientation (relative to transcription): sense; note = sgRNA Position: 88627379; note = Sequence Name: 56322-704_101_SL_seq_3403
caggccgtcggggcggcagt

SEQ ID NO: 3404 - DNA, 20 bp, Homo sapiens
  source 1..20: mol_type = genomic DNA; note = Gene: EIF2AK3; note = Location (start to end; relative to TSS): EIF2AK3_22_52; note = Orientation (relative to transcription): sense; note = sgRNA Position: 88627418; note = Sequence Name: 56322-704_101_SL_seq_3404
ccgggctgagacgtggccag

SEQ ID NO: 3405 - DNA, 20 bp, Homo sapiens
  source 1..20: mol_type = genomic DNA; note = Gene: EIF2AK3; note = Location (start to end; relative to TSS): EIF2AK3_54_84; note = Orientation (relative to transcription): sense; note = sgRNA Position: 88627386; note = Sequence Name: 56322-704_101_SL_seq_3405
ggctgtccaggccgtcgggg

SEQ ID NO: 3406 - DNA, 20 bp, Homo sapiens
  source 1..20: mol_type = genomic DNA; note = Gene: EIF2AK3; note = Location (start to end; relative to TSS): EIF2AK3_21_51; note = Orientation (relative to transcription): sense; note = sgRNA Position: 88627419; note = Sequence Name: 56322-704_101_SL_seq_3406
gccgggctgagacgtggcca

SEQ ID NO: 3407 - DNA, 20 bp, Homo sapiens
  source 1..20: mol_type = genomic DNA; note = Gene: EIF2AK3; note = Location (start to end; relative to TSS): EIF2AK3_51_81; note = Orientation (relative to transcription): sense; note = sgRNA Position: 88627389; note = Sequence Name: 56322-704_101_SL_seq_3407
gctggctgtccaggccgtcg

SEQ ID NO: 3408 - DNA, 20 bp, Homo sapiens
  source 1..20: mol_type = genomic DNA; note = Gene: EIF2AK3; note = Location (start to end; relative to TSS): EIF2AK3_20_50; note = Orientation (relative to transcription): sense; note = sgRNA Position: 88627420; note = Sequence Name: 56322-704_101_SL_seq_3408
ggccgggctgagacgtggcc

SEQ ID NO: 3409 - DNA, 20 bp, Homo sapiens
  source 1..20: mol_type = genomic DNA; note = Gene: EIF2AK3; note = Location (start to end; relative to TSS): EIF2AK3_50_80; note = Orientation (relative to transcription): sense; note = sgRNA Position: 88627390; note = Sequence Name: 56322-704_101_SL_seq_3409
ggctggctgtccaggccgtc

SEQ ID NO: 3410 - DNA, 20 bp, Homo sapiens
  source 1..20: mol_type = genomic DNA; note = Gene: EIF2AK4; note = Location (start to end; relative to TSS): EIF2AK4_40_70; note = Orientation (relative to transcription): antisense; note = sgRNA Position: 39934161; note = Sequence Name: 56322-704_101_SL_seq_3410
gcagggcggccttgcctggg

SEQ ID NO: 3411 - DNA, 20 bp, Homo sapiens
  source 1..20: mol_type = genomic DNA; note = Gene: EIF2AK4; note = Location (start to end; relative to TSS): EIF2AK4_79_109; note = Orientation (relative to transcription): antisense; note = sgRNA Position: 39934200; note = Sequence Name: 56322-704_101_SL_seq_3411
ggccccacggcccccagcca

SEQ ID NO: 3412 - DNA, 20 bp, Homo sapiens
  source 1..20: mol_type = genomic DNA; note = Gene: EIF2AK4; note = Location (start to end; relative to TSS): EIF2AK4_33_63; note = Orientation (relative to transcription): antisense; note = sgRNA Position: 39934154; note = Sequence Name: 56322-704_101_SL_seq_3412
ggccttgcctgggcggcggt

SEQ ID NO: 3413 - DNA, 20 bp, Homo sapiens
  source 1..20: mol_type = genomic DNA; note = Gene: EIF2AK4; note = Location (start to end; relative to TSS): EIF2AK4_76_106; note = Orientation (relative to transcription): sense; note = sgRNA Position: 39934217; note = Sequence Name: 56322-704_101_SL_seq_3413
ctgggggccgtggggccccc

SEQ ID NO: 3414 - DNA, 20 bp, Homo sapiens
  source 1..20: mol_type = genomic DNA; note = Gene: EIF2AK4; note = Location (start to end; relative to TSS): EIF2AK4_37_67; note = Orientation (relative to transcription): antisense; note = sgRNA Position: 39934158; note = Sequence Name: 56322-704_101_SL_seq_3414
gggcggccttgcctgggcgg

SEQ ID NO: 3415 - DNA, 20 bp, Homo sapiens
  source 1..20: mol_type = genomic DNA; note = Gene: EIF2AK4; note = Location (start to end; relative to TSS): EIF2AK4_68_98; note = Orientation (relative to transcription): sense; note = sgRNA Position: 39934209; note = Sequence Name: 56322-704_101_SL_seq_3415
tgccatggctgggggccgtg

SEQ ID NO: 3416 - DNA, 20 bp, Homo sapiens
  source 1..20: mol_type = genomic DNA; note = Gene: EIF2AK4; note = Location (start to end; relative to TSS): EIF2AK4_26_56; note = Orientation (relative to transcription): antisense; note = sgRNA Position: 39934147; note = Sequence Name: 56322-704_101_SL_seq_3416
cctgggcggcggtgggcccc

SEQ ID NO: 3417 - DNA, 20 bp, Homo sapiens
  source 1..20: mol_type = genomic DNA; note = Gene: EIF2AK4; note = Location (start to end; relative to TSS): EIF2AK4_57_87; note = Orientation (relative to transcription): antisense; note = sgRNA Position: 39934178; note = Sequence Name: 56322-704_101_SL_seq_3417
gcagcgctgcgcccaaggca

SEQ ID NO: 3418 - DNA, 20 bp, Homo sapiens
  source 1..20: mol_type = genomic DNA; note = Gene: EIF2AK4; note = Location (start to end; relative to TSS): EIF2AK4_22_52; note = Orientation (relative to transcription): sense; note = sgRNA Position: 39934163; note = Sequence Name: 56322-704_101_SL_seq_3418
ggcccaccgccgcccaggca

SEQ ID NO: 3419 - DNA, 20 bp, Homo sapiens
  source 1..20: mol_type = genomic DNA; note = Gene: EIF2AK4; note = Location (start to end; relative to TSS): EIF2AK4_53_83; note = Orientation (relative to transcription): sense; note = sgRNA Position: 39934194; note = Sequence Name: 56322-704_101_SL_seq_3419
ccttgggcgcagcgctgcca

SEQ ID NO: 3420 - DNA, 20 bp, Homo sapiens
  source 1..20: mol_type = genomic DNA; note = Gene: EPHA1; note = Location (start to end; relative to TSS): EPHA1_31_61; note = Orientation (relative to transcription): antisense; note = sgRNA Position: 143408821; note = Sequence Name: 56322-704_101_SL_seq_3420
atagctccgggccgggacct

SEQ ID NO: 3421 - DNA, 20 bp, Homo sapiens
  source 1..20: mol_type = genomic DNA; note = Gene: EPHA1; note = Location (start to end; relative to TSS): EPHA1_69_99; note = Orientation (relative to transcription): antisense; note = sgRNA Position: 143408783; note = Sequence Name: 56322-704_101_SL_seq_3421
gcagcaccagccctagcccc

SEQ ID NO: 3422 - DNA, 20 bp, Homo sapiens
  source 1..20: mol_type = genomic DNA; note = Gene: EPHA1; note = Location (start to end; relative to TSS): EPHA1_29_59; note = Orientation (relative to transcription): sense; note = sgRNA Position: 143408803; note = Sequence Name: 56322-704_101_SL_seq_3422
cccggcccggagctatggag

SEQ ID NO: 3423 - DNA, 20 bp, Homo sapiens
  source 1..20: mol_type = genomic DNA; note = Gene: EPHA1; note = Location (start to end; relative to TSS): EPHA1_68_98; note = Orientation (relative to transcription): antisense; note = sgRNA Position: 143408784; note = Sequence Name: 56322-704_101_SL_seq_3423
cagcaccagccctagcccca

SEQ ID NO: 3424 - DNA, 20 bp, Homo sapiens
  source 1..20: mol_type = genomic DNA; note = Gene: EPHA1; note = Location (start to end; relative to TSS): EPHA1_35_65; note = Orientation (relative to transcription): sense; note = sgRNA Position: 143408797; note = Sequence Name: 56322-704_101_SL_seq_3424
ccggagctatggagcggcgc

SEQ ID NO: 3425 - DNA, 20 bp, Homo sapiens
  source 1..20: mol_type = genomic DNA; note = Gene: EPHA1; note = Location (start to end; relative to TSS): EPHA1_67_97; note = Orientation (relative to transcription): antisense; note = sgRNA Position: 143408785; note = Sequence Name: 56322-704_101_SL_seq_3425
agcaccagccctagccccag

SEQ ID NO: 3426 - DNA, 20 bp, Homo sapiens
  source 1..20: mol_type = genomic DNA; note = Gene: EPHA1; note = Location (start to end; relative to TSS): EPHA1_24_54; note = Orientation (relative to transcription): antisense; note = sgRNA Position: 143408828; note = Sequence Name: 56322-704_101_SL_seq_3426
cgggccgggacctgggacag

SEQ ID NO: 3427 - DNA, 20 bp, Homo sapiens
  source 1..20: mol_type = genomic DNA; note = Gene: EPHA1; note = Location (start to end; relative to TSS): EPHA1_54_84; note = Orientation (relative to transcription): sense; note = sgRNA Position: 143408778; note = Sequence Name: 56322-704_101_SL_seq_3427
ctggcccctggggctagggc

SEQ ID NO: 3428 - DNA, 20 bp, Homo sapiens
  source 1..20: mol_type = genomic DNA; note = Gene: EPHA1; note = Location (start to end; relative to TSS): EPHA1_19_49; note = Orientation (relative to transcription): antisense; note = sgRNA Position: 143408833; note = Sequence Name: 56322-704_101_SL_seq_3428
cgggacctgggacagtggcc

SEQ ID NO: 3429 - DNA, 20 bp, Homo sapiens
  source 1..20: mol_type = genomic DNA; note = Gene: EPHA1; note = Location (start to end; relative to TSS): EPHA1_50_80; note = Orientation (relative to transcription): sense; note = sgRNA Position: 143408782; note = Sequence Name: 56322-704_101_SL_seq_3429
ggcgctggcccctggggcta

SEQ ID NO: 3430 - DNA, 20 bp, Homo sapiens
  source 1..20: mol_type = genomic DNA; note = Gene: EPHA10; note = Location (start to end; relative to TSS): EPHA10_25_55; note = Orientation (relative to transcription): antisense; note = sgRNA Position: 37765091; note = Sequence Name: 56322-704_101_SL_seq_3430
agaccgagctgtcagtccgg

SEQ ID NO: 3431 - DNA, 20 bp, Homo sapiens
  source 1..20: mol_type = genomic DNA; note = Gene: EPHA10; note = Location (start to end; relative to TSS): EPHA10_73_103; note = Orientation (relative to transcription): antisense; note = sgRNA Position: 37765043; note = Sequence Name: 56322-704_101_SL_seq_3431
aggaagaggcgcagcgggtg

SEQ ID NO: 3432 - DNA, 20 bp, Homo sapiens
  source 1..20: mol_type = genomic DNA; note = Gene: EPHA10; note = Location (start to end; relative to TSS): EPHA10_27_57; note = Orientation (relative to transcription): sense; note = sgRNA Position: 37765069; note = Sequence Name: 56322-704_101_SL_seq_3432
acagctcggtctgcggacca

SEQ ID NO: 3433 - DNA, 20 bp, Homo sapiens
  source 1..20: mol_type = genomic DNA; note = Gene: EPHA10; note = Location (start to end; relative to TSS): EPHA10_71_101; note = Orientation (relative to transcription): sense; note = sgRNA Position: 37765025; note = Sequence Name: 56322-704_101_SL_seq_3433
cgctgcgcctcttcctctgc

SEQ ID NO: 3434 - DNA, 20 bp, Homo sapiens
  source 1..20: mol_type = genomic DNA; note = Gene: EPHA10; note = Location (start to end; relative to TSS): EPHA10_28_58; note = Orientation (relative to transcription): antisense; note = sgRNA Position: 37765088; note = Sequence Name: 56322-704_101_SL_seq_3434
cgcagaccgagctgtcagtc

SEQ ID NO: 3435 - DNA, 20 bp, Homo sapiens
  source 1..20: mol_type = genomic DNA; note = Gene: EPHA10; note = Location (start to end; relative to TSS): EPHA10_68_98; note = Orientation (relative to transcription): antisense; note = sgRNA Position: 37765048; note = Sequence Name: 56322-704_101_SL_seq_3435
gaggcgcagcgggtgtggac

SEQ ID NO: 3436 - DNA, 20 bp, Homo sapiens
  source 1..20: mol_type = genomic DNA; note = Gene: EPHA10; note = Location (start to end; relative to TSS): EPHA10_20_50; note = Orientation (relative to transcription): sense; note = sgRNA Position: 37765076; note = Sequence Name: 56322-704_101_SL_seq_3436
cggactgacagctcggtctg

SEQ ID NO: 3437 - DNA, 20 bp, Homo sapiens
  source 1..20: mol_type = genomic DNA; note = Gene: EPHA10; note = Location (start to end; relative to TSS): EPHA10_62_92; note = Orientation (relative to transcription): antisense; note = sgRNA Position: 37765054; note = Sequence Name: 56322-704_101_SL_seq_3437
cagcgggtgtggaccggcgc

SEQ ID NO: 3438 - DNA, 20 bp, Homo sapiens
  source 1..20: mol_type = genomic DNA; note = Gene: EPHA10; note = Location (start to end; relative to TSS): EPHA10_22_52; note = Orientation (relative to transcription): antisense; note = sgRNA Position: 37765094; note = Sequence Name: 56322-704_101_SL_seq_3438
ccgagctgtcagtccggcgg

SEQ ID NO: 3439 - DNA, 20 bp, Homo sapiens
  source 1..20: mol_type = genomic DNA; note = Gene: EPHA10; note = Location (start to end; relative to TSS): EPHA10_53_83; note = Orientation (relative to transcription): antisense; note = sgRNA Position: 37765063; note = Sequence Name: 56322-704_101_SL_seq_3439
tggaccggcgcaggtctcca

SEQ ID NO: 3440 - DNA, 20 bp, Homo sapiens
  source 1..20: mol_type = genomic DNA; note = Gene: EPHA2; note = Location (start to end; relative to TSS): EPHA2_42_72; note = Orientation (relative to transcription): antisense; note = sgRNA Position: 16156023; note = Sequence Name: 56322-704_101_SL_seq_3440
cggtgtccgctcccgcccgc

SEQ ID NO: 3441 - DNA, 20 bp, Homo sapiens
  source 1..20: mol_type = genomic DNA; note = Gene: EPHA2; note = Location (start to end; relative to TSS): EPHA2_78_108; note = Orientation (relative to transcription): sense; note = sgRNA Position: 16155967; note = Sequence Name: 56322-704_101_SL_seq_3441
gtgtgcgggagccgggctcg

SEQ ID NO: 3442 - DNA, 20 bp, Homo sapiens
  source 1..20: mol_type = genomic DNA; note = Gene: EPHA2; note = Location (start to end; relative to TSS): EPHA2_40_70; note = Orientation (relative to transcription): sense; note = sgRNA Position: 16156005; note = Sequence Name: 56322-704_101_SL_seq_3442
gcgggagcggacaccgaggc

SEQ ID NO: 3443 - DNA, 20 bp, Homo sapiens
  source 1..20: mol_type = genomic DNA; note = Gene: EPHA2; note = Location (start to end; relative to TSS): EPHA2_71_101; note = Orientation (relative to transcription): sense; note = sgRNA Position: 16155974; note = Sequence Name: 56322-704_101_SL_seq_3443
cgtgcgggtgtgcgggagcc

SEQ ID NO: 3444 - DNA, 20 bp, Homo sapiens
  source 1..20: mol_type = genomic DNA; note = Gene: EPHA2; note = Location (start to end; relative to TSS): EPHA2_36_66; note = Orientation (relative to transcription): sense; note = sgRNA Position: 16156009; note = Sequence Name: 56322-704_101_SL_seq_3444
gcgggcgggagcggacaccg

SEQ ID NO: 3445 - DNA, 20 bp, Homo sapiens
  source 1..20: mol_type = genomic DNA; note = Gene: EPHA2; note = Location (start to end; relative to TSS): EPHA2_68_98; note = Orientation (relative to transcription): antisense; note = sgRNA Position: 16155997; note = Sequence Name: 56322-704_101_SL_seq_3445
acacccgcacgcctgcacgc

SEQ ID NO: 3446 - DNA, 20 bp, Homo sapiens
  source 1..20: mol_type = genomic DNA; note = Gene: EPHA2; note = Location (start to end; relative to TSS): EPHA2_21_51; note = Orientation (relative to transcription): sense; note = sgRNA Position: 16156024; note = Sequence Name: 56322-704_101_SL_seq_3446
gttgcgcgcaggccggcggg

SEQ ID NO: 3447 - DNA, 20 bp, Homo sapiens
  source 1..20: mol_type = genomic DNA; note = Gene: EPHA2; note = Location (start to end; relative to TSS): EPHA2_55_85; note = Orientation (relative to transcription): sense; note = sgRNA Position: 16155990; note = Sequence Name: 56322-704_101_SL_seq_3447
gaggccggcgtgcaggcgtg

SEQ ID NO: 3448 - DNA, 20 bp, Homo sapiens
  source 1..20: mol_type = genomic DNA; note = Gene: EPHA2; note = Location (start to end; relative to TSS): EPHA2_18_48; note = Orientation (relative to transcription): sense; note = sgRNA Position: 16156027; note = Sequence Name: 56322-704_101_SL_seq_3448
gaagttgcgcgcaggccggc

SEQ ID NO: 3449 - DNA, 20 bp, Homo sapiens
  source 1..20: mol_type = genomic DNA; note = Gene: EPHA2; note = Location (start to end; relative to TSS): EPHA2_48_78; note = Orientation (relative to transcription): sense; note = sgRNA Position: 16155997; note = Sequence Name: 56322-704_101_SL_seq_3449
ggacaccgaggccggcgtgc

SEQ ID NO: 3450 - DNA, 20 bp, Homo sapiens
  source 1..20: mol_type = genomic DNA; note = Gene: EPHA3; note = Location (start to end; relative to TSS): EPHA3_46_76; note = Orientation (relative to transcription): antisense; note = sgRNA Position: 89107673; note = Sequence Name: 56322-704_101_SL_seq_3450
agggggagcgctctgattgc

SEQ ID NO: 3451 - DNA, 20 bp, Homo sapiens
  source 1..20: mol_type = genomic DNA; note = Gene: EPHA3; note = Location (start to end; relative to TSS): EPHA3_120_150; note = Orientation (relative to transcription): antisense; note = sgRNA Position: 89107747; note = Sequence Name: 56322-704_101_SL_seq_3451
gagctgacaatccatgttgc

SEQ ID NO: 3452 - DNA, 20 bp, Homo sapiens
  source 1..20: mol_type = genomic DNA; note = Gene: EPHA3; note = Location (start to end; relative to TSS): EPHA3_48_78; note = Orientation (relative to transcription): sense; note = sgRNA Position: 89107695; note = Sequence Name: 56322-704_101_SL_seq_3452
agcgctccccctcacatcag

SEQ ID NO: 3453 - DNA, 20 bp, Homo sapiens
  source 1..20: mol_type = genomic DNA; note = Gene: EPHA3; note = Location (start to end; relative to TSS): EPHA3_112_142; note = Orientation (relative to transcription): antisense; note = sgRNA Position: 89107739; note = Sequence Name: 56322-704_101_SL_seq_3453
aatccatgttgctggtgcag

SEQ ID NO: 3454 - DNA, 20 bp, Homo sapiens
  source 1..20: mol_type = genomic DNA; note = Gene: EPHA3; note = Location (start to end; relative to TSS): EPHA3_60_90; note = Orientation (relative to transcription): sense; note = sgRNA Position: 89107707; note = Sequence Name: 56322-704_101_SL_seq_3454
cacatcagtggcatgcttca

SEQ ID NO: 3455 - DNA, 20 bp, Homo sapiens
  source 1..20: mol_type = genomic DNA; note = Gene: EPHA3; note = Location (start to end; relative to TSS): EPHA3_100_130; note = Orientation (relative to transcription): sense; note = sgRNA Position: 89107747; note = Sequence Name: 56322-704_101_SL_seq_3455
tgccctctgcaccagcaaca

SEQ ID NO: 3456 - DNA, 20 bp, Homo sapiens
  source 1..20: mol_type = genomic DNA; note = Gene: EPHA3; note = Location (start to end; relative to TSS): EPHA3_20_50; note = Orientation (relative to transcription): antisense; note = sgRNA Position: 89107647; note = Sequence Name: 56322-704_101_SL_seq_3456
agttaccatgctccgctcgc

SEQ ID NO: 3457 - DNA, 20 bp, Homo sapiens
  source 1..20: mol_type = genomic DNA; note = Gene: EPHA3; note = Location (start to end; relative to TSS): EPHA3_60_90; note = Orientation (relative to transcription): sense; note = sgRNA Position: 89107707; note = Sequence Name: 56322-704_101_SL_seq_3457
cacatcagtggcatgcttca

SEQ ID NO: 3458 - DNA, 20 bp, Homo sapiens
  source 1..20: mol_type = genomic DNA; note = Gene: EPHA3; note = Location (start to end; relative to TSS): EPHA3_6_36; note = Orientation (relative to transcription): sense; note = sgRNA Position: 89107653; note = Sequence Name: 56322-704_101_SL_seq_3458
atcagcctgcgagcggagca

SEQ ID NO: 3459 - DNA, 20 bp, Homo sapiens
  source 1..20: mol_type = genomic DNA; note = Gene: EPHA3; note = Location (start to end; relative to TSS): EPHA3_46_76; note = Orientation (relative to transcription): antisense; note = sgRNA Position: 89107673; note = Sequence Name: 56322-704_101_SL_seq_3459
agggggagcgctctgattgc

SEQ ID NO: 3460 - DNA, 20 bp, Homo sapiens
  source 1..20: mol_type = genomic DNA; note = Gene: EPHA4; note = Location (start to end; relative to TSS): EPHA4_47_77; note = Orientation (relative to transcription): antisense; note = sgRNA Position: 221572253; note = Sequence Name: 56322-704_101_SL_seq_3460
aaatcccagccatggttcgc

SEQ ID NO: 3461 - DNA, 20 bp, Homo sapiens
  source 1..20: mol_type = genomic DNA; note = Gene: EPHA4; note = Location (start to end; relative to TSS): EPHA4_90_120; note = Orientation (relative to transcription): sense; note = sgRNA Position: 221572190; note = Sequence Name: 56322-704_101_SL_seq_3461
gggatttgcgacgctgtcac

SEQ ID NO: 3462 - DNA, 20 bp, Homo sapiens
  source 1..20: mol_type = genomic DNA; note = Gene: EPHA4; note = Location (start to end; relative to TSS): EPHA4_29_59; note = Orientation (relative to transcription): sense; note = sgRNA Position: 221572251; note = Sequence Name: 56322-704_101_SL_seq_3462
gcgttggcaccggcgaacca

SEQ ID NO: 3463 - DNA, 20 bp, Homo sapiens
  source 1..20: mol_type = genomic DNA; note = Gene: EPHA4; note = Location (start to end; relative to TSS): EPHA4_80_110; note = Orientation (relative to transcription): antisense; note = sgRNA Position: 221572220; note = Sequence Name: 56322-704_101_SL_seq_3463
tcccgaagagacacgaaaat

SEQ ID NO: 3464 - DNA, 20 bp, Homo sapiens
  source 1..20: mol_type = genomic DNA; note = Gene: EPHA4; note = Location (start to end; relative to TSS): EPHA4_33_63; note = Orientation (relative to transcription): sense; note = sgRNA Position: 221572247; note = Sequence Name: 56322-704_101_SL_seq_3464
tggcaccggcgaaccatggc

SEQ ID NO: 3465 - DNA, 20 bp, Homo sapiens
  source 1..20: mol_type = genomic DNA; note = Gene: EPHA4; note = Location (start to end; relative to TSS): EPHA4_79_109; note = Orientation (relative to transcription): antisense; note = sgRNA Position: 221572221; note = Sequence Name: 56322-704_101_SL_seq_3465
cccgaagagacacgaaaata

SEQ ID NO: 3466 - DNA, 20 bp, Homo sapiens
  source 1..20: mol_type = genomic DNA; note = Gene: EPHA4; note = Location (start to end; relative to TSS): EPHA4_34_64; note = Orientation (relative to transcription): sense; note = sgRNA Position: 221572246; note = Sequence Name: 56322-704_101_SL_seq_3466
ggcaccggcgaaccatggct

SEQ ID NO: 3467 - DNA, 20 bp, Homo sapiens
  source 1..20: mol_type = genomic DNA; note = Gene: EPHA4; note = Location (start to end; relative to TSS): EPHA4_69_99; note = Orientation (relative to transcription): sense; note = sgRNA Position: 221572211; note = Sequence Name: 56322-704_101_SL_seq_3467
gccctattttcgtgtctctt

SEQ ID NO: 3468 - DNA, 20 bp, Homo sapiens
  source 1..20: mol_type = genomic DNA; note = Gene: EPHA4; note = Location (start to end; relative to TSS): EPHA4_19_49; note = Orientation (relative to transcription): sense; note = sgRNA Position: 221572261; note = Sequence Name: 56322-704_101_SL_seq_3468
ggcaggagcagcgttggcac

SEQ ID NO: 3469 - DNA, 20 bp, Homo sapiens
  source 1..20: mol_type = genomic DNA; note = Gene: EPHA4; note = Location (start to end; relative to TSS): EPHA4_55_85; note = Orientation (relative to transcription): antisense; note = sgRNA Position: 221572245; note = Sequence Name: 56322-704_101_SL_seq_3469
gaaatagaaaatcccagcca

SEQ ID NO: 3470 - DNA, 20 bp, Homo sapiens
  source 1..20: mol_type = genomic DNA; note = Gene: EPHA5; note = Location (start to end; relative to TSS): EPHA5_49_79; note = Orientation (relative to transcription): antisense; note = sgRNA Position: 65670436; note = Sequence Name: 56322-704_101_SL_seq_3470
gggagcaggcggtgtgtgcg

SEQ ID NO: 3471 - DNA, 20 bp, Homo sapiens
  source 1..20: mol_type = genomic DNA; note = Gene: EPHA5; note = Location (start to end; relative to TSS): EPHA5_102_132; note = Orientation (relative to transcription): antisense; note = sgRNA Position: 65670383; note = Sequence Name: 56322-704_101_SL_seq_3471
agcgcggagctgcgctgcgg

SEQ ID NO: 3472 - DNA, 20 bp, Homo sapiens
  source 1..20: mol_type = genomic DNA; note = Gene: EPHA5; note = Location (start to end; relative to TSS): EPHA5_50_80; note = Orientation (relative to transcription): sense; note = sgRNA Position: 65670415; note = Sequence Name: 56322-704_101_SL_seq_3472
accgcctgctccccgagcag

SEQ ID NO: 3473 - DNA, 20 bp, Homo sapiens
  source 1..20: mol_type = genomic DNA; note = Gene: EPHA5; note = Location (start to end; relative to TSS): EPHA5_101_131; note = Orientation (relative to transcription): sense; note = sgRNA Position: 65670364; note = Sequence Name: 56322-704_101_SL_seq_3473
gcgcagctccgcgctcctac

SEQ ID NO: 3474 - DNA, 20 bp, Homo sapiens
  source 1..20: mol_type = genomic DNA; note = Gene: EPHA5; note = Location (start to end; relative to TSS): EPHA5_51_81; note = Orientation (relative to transcription): sense; note = sgRNA Position: 65670414; note = Sequence Name: 56322-704_101_SL_seq_3474
ccgcctgctccccgagcagc

SEQ ID NO: 3475 - DNA, 20 bp, Homo sapiens
  source 1..20: mol_type = genomic DNA; note = Gene: EPHA5; note = Location (start to end; relative to TSS): EPHA5_85_115; note = Orientation (relative to transcription): antisense; note = sgRNA Position: 65670400; note = Sequence Name: 56322-704_101_SL_seq_3475
cggcggcccaggagctgctg

SEQ ID NO: 3476 - DNA, 20 bp, Homo sapiens
  source 1..20: mol_type = genomic DNA; note = Gene: EPHA5; note = Location (start to end; relative to TSS): EPHA5_35_65; note = Orientation (relative to transcription): antisense; note = sgRNA Position: 65670450; note = Sequence Name: 56322-704_101_SL_seq_3476
tgtgcgcggctgcgaagtcg

SEQ ID NO: 3477 - DNA, 20 bp, Homo sapiens
  source 1..20: mol_type = genomic DNA; note = Gene: EPHA5; note = Location (start to end; relative to TSS): EPHA5_69_99; note = Orientation (relative to transcription): antisense; note = sgRNA Position: 65670416; note = Sequence Name: 56322-704_101_SL_seq_3477
gctgcggttcccgctgctcg

SEQ ID NO: 3478 - DNA, 20 bp, Homo sapiens
  source 1..20: mol_type = genomic DNA; note = Gene: EPHA5; note = Location (start to end; relative to TSS): EPHA5_15_45; note = Orientation (relative to transcription): antisense; note = sgRNA Position: 65670470; note = Sequence Name: 56322-704_101_SL_seq_3478
aggttgaaactgcaccgcca

SEQ ID NO: 3479 - DNA, 20 bp, Homo sapiens
  source 1..20: mol_type = genomic DNA; note = Gene: EPHA5; note = Location (start to end; relative to TSS): EPHA5_49_79; note = Orientation (relative to transcription): antisense; note = sgRNA Position: 65670436; note = Sequence Name: 56322-704_101_SL_seq_3479
gggagcaggcggtgtgtgcg

SEQ ID NO: 3480 - DNA, 20 bp, Homo sapiens
  source 1..20: mol_type = genomic DNA; note = Gene: EPHA6; note = Location (start to end; relative to TSS): EPHA6_45_75; note = Orientation (relative to transcription): antisense; note = sgRNA Position: 96814645; note = Sequence Name: 56322-704_101_SL_seq_3480
ggggagctcctcgcggctgg

SEQ ID NO: 3481 - DNA, 20 bp, Homo sapiens
  source 1..20: mol_type = genomic DNA; note = Gene: EPHA6; note = Location (start to end; relative to TSS): EPHA6_91_121; note = Orientation (relative to transcription): antisense; note = sgRNA Position: 96814691; note = Sequence Name: 56322-704_101_SL_seq_3481
agttgcaggtgcagctgctt

SEQ ID NO: 3482 - DNA, 20 bp, Homo sapiens
  source 1..20: mol_type = genomic DNA; note = Gene: EPHA6; note = Location (start to end; relative to TSS): EPHA6_40_70; note = Orientation (relative to transcription): antisense; note = sgRNA Position: 96814640; note = Sequence Name: 56322-704_101_SL_seq_3482
gctcctcgcggctggaggcg

SEQ ID NO: 3483 - DNA, 20 bp, Homo sapiens
  source 1..20: mol_type = genomic DNA; note = Gene: EPHA6; note = Location (start to end; relative to TSS): EPHA6_88_118; note = Orientation (relative to transcription): antisense; note = sgRNA Position: 96814688; note = Sequence Name: 56322-704_101_SL_seq_3483
tgcaggtgcagctgcttcgg

SEQ ID NO: 3484 - DNA, 20 bp, Homo sapiens
  source 1..20: mol_type = genomic DNA; note = Gene: EPHA6; note = Location (start to end; relative to TSS): EPHA6_39_69; note = Orientation (relative to transcription): antisense; note = sgRNA Position: 96814639; note = Sequence Name: 56322-704_101_SL_seq_3484
ctcctcgcggctggaggcga

SEQ ID NO: 3485 - DNA, 20 bp, Homo sapiens
  source 1..20: mol_type = genomic DNA; note = Gene: EPHA6; note = Location (start to end; relative to TSS): EPHA6_85_115; note = Orientation (relative to transcription): sense; note = sgRNA Position: 96814705; note = Sequence Name: 56322-704_101_SL_seq_3485
aagcagctgcacctgcaact

SEQ ID NO: 3486 - DNA, 20 bp, Homo sapiens
  source 1..20: mol_type = genomic DNA; note = Gene: EPHA6; note = Location (start to end; relative to TSS): EPHA6_38_68; note = Orientation (relative to transcription): antisense; note = sgRNA Position: 96814638; note = Sequence Name: 56322-704_101_SL_seq_3486
tcctcgcggctggaggcgag

SEQ ID NO: 3487 - DNA, 20 bp, Homo sapiens
  source 1..20: mol_type = genomic DNA; note = Gene: EPHA6; note = Location (start to end; relative to TSS): EPHA6_72_102; note = Orientation (relative to transcription): antisense; note = sgRNA Position: 96814672; note = Sequence Name: 56322-704_101_SL_seq_3487
tcggaggaggacgctgcctg

SEQ ID NO: 3488 - DNA, 20 bp, Homo sapiens
  source 1..20: mol_type = genomic DNA; note = Gene: EPHA6; note = Location (start to end; relative to TSS): EPHA6_28_58; note = Orientation (relative to transcription): sense; note = sgRNA Position: 96814648; note = Sequence Name: 56322-704_101_SL_seq_3488
tcccctcgcctccagccgcg

SEQ ID NO: 3489 - DNA, 20 bp, Homo sapiens
  source 1..20: mol_type = genomic DNA; note = Gene: EPHA6; note = Location (start to end; relative to TSS): EPHA6_64_94; note = Orientation (relative to transcription): antisense; note = sgRNA Position: 96814664; note = Sequence Name: 56322-704_101_SL_seq_3489
ggacgctgcctgcggcgccg

SEQ ID NO: 3490 - DNA, 20 bp, Homo sapiens
  source 1..20: mol_type = genomic DNA; note = Gene: EPHA7; note = Location (start to end; relative to TSS): EPHA7_24_54; note = Orientation (relative to transcription): sense; note = sgRNA Position: 93419511; note = Sequence Name: 56322-704_101_SL_seq_3490
acggtgcgagcgaacaggag

SEQ ID NO: 3491 - DNA, 20 bp, Homo sapiens
  source 1..20: mol_type = genomic DNA; note = Gene: EPHA7; note = Location (start to end; relative to TSS): EPHA7_77_107; note = Orientation (relative to transcription): sense; note = sgRNA Position: 93419458; note = Sequence Name: 56322-704_101_SL_seq_3491
cagccgatcggggaccgaga

SEQ ID NO: 3492 - DNA, 20 bp, Homo sapiens
  source 1..20: mol_type = genomic DNA; note = Gene: EPHA7; note = Location (start to end; relative to TSS): EPHA7_25_55; note = Orientation (relative to transcription): sense; note = sgRNA Position: 93419510; note = Sequence Name: 56322-704_101_SL_seq_3492
cggtgcgagcgaacaggagt

SEQ ID NO: 3493 - DNA, 20 bp, Homo sapiens
  source 1..20: mol_type = genomic DNA; note = Gene: EPHA7; note = Location (start to end; relative to TSS): EPHA7_67_97; note = Orientation (relative to transcription): sense; note = sgRNA Position: 93419468; note = Sequence Name: 56322-704_101_SL_seq_3493
aaacgtggagcagccgatcg

SEQ ID NO: 3494 - DNA, 20 bp, Homo sapiens
  source 1..20: mol_type = genomic DNA; note = Gene: EPHA7; note = Location (start to end; relative to TSS): EPHA7_27_57; note = Orientation (relative to transcription): sense; note = sgRNA Position: 93419508; note = Sequence Name: 56322-704_101_SL_seq_3494
gtgcgagcgaacaggagtgg

SEQ ID NO: 3495 - DNA, 20 bp, Homo sapiens
  source 1..20: mol_type = genomic DNA; note = Gene: EPHA7; note = Location (start to end; relative to TSS): EPHA7_66_96; note = Orientation (relative to transcription): sense; note = sgRNA Position: 93419469; note = Sequence Name: 56322-704_101_SL_seq_3495
taaacgtggagcagccgatc

SEQ ID NO: 3496 - DNA, 20 bp, Homo sapiens
  source 1..20: mol_type = genomic DNA; note = Gene: EPHA7; note = Location (start to end; relative to TSS): EPHA7_26_56; note = Orientation (relative to transcription): sense; note = sgRNA Position: 93419509; note = Sequence Name: 56322-704_101_SL_seq_3496
ggtgcgagcgaacaggagtg

SEQ ID NO: 3497 - DNA, 20 bp, Homo sapiens
  source 1..20: mol_type = genomic DNA; note = Gene: EPHA7; note = Location (start to end; relative to TSS): EPHA7_65_95; note = Orientation (relative to transcription): sense; note = sgRNA Position: 93419470; note = Sequence Name: 56322-704_101_SL_seq_3497
ctaaacgtggagcagccgat

SEQ ID NO: 3498 - DNA, 20 bp, Homo sapiens
  source 1..20: mol_type = genomic DNA; note = Gene: EPHA7; note = Location (start to end; relative to TSS): EPHA7_19_49; note = Orientation (relative to transcription): sense; note = sgRNA Position: 93419516; note = Sequence Name: 56322-704_101_SL_seq_3498
caaacacggtgcgagcgaac

SEQ ID NO: 3499 - DNA, 20 bp, Homo sapiens
  source 1..20: mol_type = genomic DNA; note = Gene: EPHA7; note = Location (start to end; relative to TSS): EPHA7_52_82; note = Orientation (relative to transcription): sense; note = sgRNA Position: 93419483; note = Sequence Name: 56322-704_101_SL_seq_3499
aaattaaaaaaagctaaacg

SEQ ID NO: 3500 - DNA, 20 bp, Homo sapiens
  source 1..20: mol_type = genomic DNA; note = Gene: EPHA8; note = Location (start to end; relative to TSS): EPHA8_42_72; note = Orientation (relative to transcription): antisense; note = sgRNA Position: 22563537; note = Sequence Name: 56322-704_101_SL_seq_3500
tccctcgctctccgcacacc

SEQ ID NO: 3501 - DNA, 20 bp, Homo sapiens
  source 1..20: mol_type = genomic DNA; note = Gene: EPHA8; note = Location (start to end; relative to TSS): EPHA8_73_103; note = Orientation (relative to transcription): antisense; note = sgRNA Position: 22563568; note = Sequence Name: 56322-704_101_SL_seq_3501
gctgcggcccgcgcgtcggg

SEQ ID NO: 3502 - DNA, 20 bp, Homo sapiens
  source 1..20: mol_type = genomic DNA; note = Gene: EPHA8; note = Location (start to end; relative to TSS): EPHA8_32_62; note = Orientation (relative to transcription): sense; note = sgRNA Position: 22563547; note = Sequence Name: 56322-704_101_SL_seq_3502
gccgggtgtgcggagagcga

SEQ ID NO: 3503 - DNA, 20 bp, Homo sapiens
  source 1..20: mol_type = genomic DNA; note = Gene: EPHA8; note = Location (start to end; relative to TSS): EPHA8_72_102; note = Orientation (relative to transcription): antisense; note = sgRNA Position: 22563567; note = Sequence Name: 56322-704_101_SL_seq_3503
ctgcggcccgcgcgtcggga

SEQ ID NO: 3504 - DNA, 20 bp, Homo sapiens
  source 1..20: mol_type = genomic DNA; note = Gene: EPHA8; note = Location (start to end; relative to TSS): EPHA8_31_61; note = Orientation (relative to transcription): sense; note = sgRNA Position: 22563546; note = Sequence Name: 56322-704_101_SL_seq_3504
ggccgggtgtgcggagagcg

SEQ ID NO: 3505 - DNA, 20 bp, Homo sapiens
  source 1..20: mol_type = genomic DNA; note = Gene: EPHA8; note = Location (start to end; relative to TSS): EPHA8_66_96; note = Orientation (relative to transcription): sense; note = sgRNA Position: 22563581; note = Sequence Name: 56322-704_101_SL_seq_3505
tcccgacgcgcgggccgcag

SEQ ID NO: 3506 - DNA, 20 bp, Homo sapiens
  source 1..20: mol_type = genomic DNA; note = Gene: EPHA8; note = Location (start to end; relative to TSS): EPHA8_22_52; note = Orientation (relative to transcription): sense; note = sgRNA Position: 22563537; note = Sequence Name: 56322-704_101_SL_seq_3506
tgtgcgcccggccgggtgtg

SEQ ID NO: 3507 - DNA, 20 bp, Homo sapiens
  source 1..20: mol_type = genomic DNA; note = Gene: EPHA8; note = Location (start to end; relative to TSS): EPHA8_57_87; note = Orientation (relative to transcription): sense; note = sgRNA Position: 22563572; note = Sequence Name: 56322-704_101_SL_seq_3507
cgcgctccctcccgacgcgc

SEQ ID NO: 3508 - DNA, 20 bp, Homo sapiens
  source 1..20: mol_type = genomic DNA; note = Gene: EPHA8; note = Location (start to end; relative to TSS): EPHA8_25_55; note = Orientation (relative to transcription): antisense; note = sgRNA Position: 22563520; note = Sequence Name: 56322-704_101_SL_seq_3508
acccggccgggcgcacaccc

SEQ ID NO: 3509 - DNA, 20 bp, Homo sapiens
  source 1..20: mol_type = genomic DNA; note = Gene: EPHA8; note = Location (start to end; relative to TSS): EPHA8_56_86; note = Orientation (relative to transcription): sense; note = sgRNA Position: 22563571; note = Sequence Name: 56322-704_101_SL_seq_3509
gcgcgctccctcccgacgcg

SEQ ID NO: 3510 - DNA, 20 bp, Homo sapiens
  source 1..20: mol_type = genomic DNA; note = Gene: EPHB1; note = Location (start to end; relative to TSS): EPHB1_30_60; note = Orientation (relative to transcription): antisense; note = sgRNA Position: 134795296; note = Sequence Name: 56322-704_101_SL_seq_3510
tgtcacattgctagctacag

SEQ ID NO: 3511 - DNA, 20 bp, Homo sapiens
  source 1..20: mol_type = genomic DNA; note = Gene: EPHB1; note = Location (start to end; relative to TSS): EPHB1_96_126; note = Orientation (relative to transcription): antisense; note = sgRNA Position: 134795362; note = Sequence Name: 56322-704_101_SL_seq_3511
tgtgtgagagagagagggcg

SEQ ID NO: 3512 - DNA, 20 bp, Homo sapiens
  source 1..20: mol_type = genomic DNA; note = Gene: EPHB1; note = Location (start to end; relative to TSS): EPHB1_26_56; note = Orientation (relative to transcription): sense; note = sgRNA Position: 134795312; note = Sequence Name: 56322-704_101_SL_seq_3512
gtagctagcaatgtgacacc

SEQ ID NO: 3513 - DNA, 20 bp, Homo sapiens
  source 1..20: mol_type = genomic DNA; note = Gene: EPHB1; note = Location (start to end; relative to TSS): EPHB1_95_125; note = Orientation (relative to transcription): antisense; note = sgRNA Position: 134795361; note = Sequence Name: 56322-704_101_SL_seq_3513
gtgtgagagagagagggcga

SEQ ID NO: 3514 - DNA, 20 bp, Homo sapiens
  source 1..20: mol_type = genomic DNA; note = Gene: EPHB1; note = Location (start to end; relative to TSS): EPHB1_21_51; note = Orientation (relative to transcription): antisense; note = sgRNA Position: 134795287; note = Sequence Name: 56322-704_101_SL_seq_3514
gctagctacagcggagccta

SEQ ID NO: 3515 - DNA, 20 bp, Homo sapiens
  source 1..20: mol_type = genomic DNA; note = Gene: EPHB1; note = Location (start to end; relative to TSS): EPHB1_81_111; note = Orientation (relative to transcription): antisense; note = sgRNA Position: 134795347; note = Sequence Name: 56322-704_101_SL_seq_3515
gggcgagggagaacgagcct

SEQ ID NO: 3516 - DNA, 20 bp, Homo sapiens
  source 1..20: mol_type = genomic DNA; note = Gene: EPHB1; note = Location (start to end; relative to TSS): EPHB1_20_50; note = Orientation (relative to transcription): antisense; note = sgRNA Position: 134795286; note = Sequence Name: 56322-704_101_SL_seq_3516
ctagctacagcggagcctac

SEQ ID NO: 3517 - DNA, 20 bp, Homo sapiens
  source 1..20: mol_type = genomic DNA; note = Gene: EPHB1; note = Location (start to end; relative to TSS): EPHB1_55_85; note = Orientation (relative to transcription): sense; note = sgRNA Position: 134795341; note = Sequence Name: 56322-704_101_SL_seq_3517
tcgctctcgcgcgctctccc

SEQ ID NO: 3518 - DNA, 20 bp, Homo sapiens
  source 1..20: mol_type = genomic DNA; note = Gene: EPHB1; note = Location (start to end; relative to TSS): EPHB1_17_47; note = Orientation (relative to transcription): antisense; note = sgRNA Position: 134795283; note = Sequence Name: 56322-704_101_SL_seq_3518
gctacagcggagcctacggg

SEQ ID NO: 3519 - DNA, 20 bp, Homo sapiens
  source 1..20: mol_type = genomic DNA; note = Gene: EPHB1; note = Location (start to end; relative to TSS): EPHB1_53_83; note = Orientation (relative to transcription): antisense; note = sgRNA Position: 134795319; note = Sequence Name: 56322-704_101_SL_seq_3519
gcgcgagagcgagtgcgtcc

SEQ ID NO: 3520 - DNA, 20 bp, Homo sapiens
  source 1..20: mol_type = genomic DNA; note = Gene: EPHB2; note = Location (start to end; relative to TSS): EPHB2_51_81; note = Orientation (relative to transcription): antisense; note = sgRNA Position: 22710896; note = Sequence Name: 56322-704_101_SL_seq_3520
cgggctcggggggccagggg

SEQ ID NO: 3521 - DNA, 20 bp, Homo sapiens
  source 1..20: mol_type = genomic DNA; note = Gene: EPHB2; note = Location (start to end; relative to TSS): EPHB2_104_134; note = Orientation (relative to transcription): antisense; note = sgRNA Position: 22710949; note = Sequence Name: 56322-704_101_SL_seq_3521
cctcgggccgcggcgccgcg

SEQ ID NO: 3522 - DNA, 20 bp, Homo sapiens
  source 1..20: mol_type = genomic DNA; note = Gene: EPHB2; note = Location (start to end; relative to TSS): EPHB2_52_82; note = Orientation (relative to transcription): antisense; note = sgRNA Position: 22710897; note = Sequence Name: 56322-704_101_SL_seq_3522
ccgggctcggggggccaggg

SEQ ID NO: 3523 - DNA, 20 bp, Homo sapiens
  source 1..20: mol_type = genomic DNA; note = Gene: EPHB2; note = Location (start to end; relative to TSS): EPHB2_95_125; note = Orientation (relative to transcription): sense; note = sgRNA Position: 22710960; note = Sequence Name: 56322-704_101_SL_seq_3523
ccccgcggcgccgcggcccg

SEQ ID NO: 3524 - DNA, 20 bp, Homo sapiens
  source 1..20: mol_type = genomic DNA; note = Gene: EPHB2; note = Location (start to end; relative to TSS): EPHB2_53_83; note = Orientation (relative to transcription): antisense; note = sgRNA Position: 22710898; note = Sequence Name: 56322-704_101_SL_seq_3524
cccgggctcggggggccagg

SEQ ID NO: 3525 - DNA, 20 bp, Homo sapiens
  source 1..20: mol_type = genomic DNA; note = Gene: EPHB2; note = Location (start to end; relative to TSS): EPHB2_88_118; note = Orientation (relative to transcription): sense; note = sgRNA Position: 22710953; note = Sequence Name: 56322-704_101_SL_seq_3525
gtccgggccccgcggcgccg

SEQ ID NO: 3526 - DNA, 20 bp, Homo sapiens
  source 1..20: mol_type = genomic DNA; note = Gene: EPHB2; note = Location (start to end; relative to TSS): EPHB2_45_75; note = Orientation (relative to transcription): sense; note = sgRNA Position: 22710910; note = Sequence Name: 56322-704_101_SL_seq_3526
cccctggccccccgagcccg

SEQ ID NO: 3527 - DNA, 20 bp, Homo sapiens
  source 1..20: mol_type = genomic DNA; note = Gene: EPHB2; note = Location (start to end; relative to TSS): EPHB2_85_115; note = Orientation (relative to transcription): antisense; note = sgRNA Position: 22710930; note = Sequence Name: 56322-704_101_SL_seq_3527
ggggcccggacggcccgggc

SEQ ID NO: 3528 - DNA, 20 bp, Homo sapiens
  source 1..20: mol_type = genomic DNA; note = Gene: EPHB2; note = Location (start to end; relative to TSS): EPHB2_43_73; note = Orientation (relative to transcription): antisense; note = sgRNA Position: 22710888; note = Sequence Name: 56322-704_101_SL_seq_3528
gggggccagggggggcggca

SEQ ID NO: 3529 - DNA, 20 bp, Homo sapiens
  source 1..20: mol_type = genomic DNA; note = Gene: EPHB2; note = Location (start to end; relative to TSS): EPHB2_80_110; note = Orientation (relative to transcription): sense; note = sgRNA Position: 22710945; note = Sequence Name: 56322-704_101_SL_seq_3529
cccgggccgtccgggccccg

SEQ ID NO: 3530 - DNA, 20 bp, Homo sapiens
  source 1..20: mol_type = genomic DNA; note = Gene: EPHB3; note = Location (start to end; relative to TSS): EPHB3_44_74; note = Orientation (relative to transcription): sense; note = sgRNA Position: 184561855; note = Sequence Name: 56322-704_101_SL_seq_3530
ggcgcgcgcccccgaagccc

SEQ ID NO: 3531 - DNA, 20 bp, Homo sapiens
  source 1..20: mol_type = genomic DNA; note = Gene: EPHB3; note = Location (start to end; relative to TSS): EPHB3_88_118; note = Orientation (relative to transcription): antisense; note = sgRNA Position: 184561879; note = Sequence Name: 56322-704_101_SL_seq_3531
gtaatctggcggtcagctgc

SEQ ID NO: 3532 - DNA, 20 bp, Homo sapiens
  source 1..20: mol_type = genomic DNA; note = Gene: EPHB3; note = Location (start to end; relative to TSS): EPHB3_45_75; note = Orientation (relative to transcription): antisense; note = sgRNA Position: 184561836; note = Sequence Name: 56322-704_101_SL_seq_3532
tcgggggcgcgcgccgtccg

SEQ ID NO: 3533 - DNA, 20 bp, Homo sapiens
  source 1..20: mol_type = genomic DNA; note = Gene: EPHB3; note = Location (start to end; relative to TSS): EPHB3_78_108; note = Orientation (relative to transcription): antisense; note = sgRNA Position: 184561869; note = Sequence Name: 56322-704_101_SL_seq_3533
ggtcagctgcgggcccgact

SEQ ID NO: 3534 - DNA, 20 bp, Homo sapiens
  source 1..20: mol_type = genomic DNA; note = Gene: EPHB3; note = Location (start to end; relative to TSS): EPHB3_34_64; note = Orientation (relative to transcription): antisense; note = sgRNA Position: 184561825; note = Sequence Name: 56322-704_101_SL_seq_3534
cgccgtccggggtccgagct

SEQ ID NO: 3535 - DNA, 20 bp, Homo sapiens
  source 1..20: mol_type = genomic DNA; note = Gene: EPHB3; note = Location (start to end; relative to TSS): EPHB3_70_100; note = Orientation (relative to transcription): antisense; note = sgRNA Position: 184561861; note = Sequence Name: 56322-704_101_SL_seq_3535
gcgggcccgactgggatccg

SEQ ID NO: 3536 - DNA, 20 bp, Homo sapiens
  source 1..20: mol_type = genomic DNA; note = Gene: EPHB3; note = Location (start to end; relative to TSS): EPHB3_23_53; note = Orientation (relative to transcription): sense; note = sgRNA Position: 184561834; note = Sequence Name: 56322-704_101_SL_seq_3536
atcccagctcggaccccgga

SEQ ID NO: 3537 - DNA, 20 bp, Homo sapiens
  source 1..20: mol_type = genomic DNA; note = Gene: EPHB3; note = Location (start to end; relative to TSS): EPHB3_56_86; note = Orientation (relative to transcription): sense; note = sgRNA Position: 184561867; note = Sequence Name: 56322-704_101_SL_seq_3537
cgaagccccggatcccagtc

SEQ ID NO: 3538 - DNA, 20 bp, Homo sapiens
  source 1..20: mol_type = genomic DNA; note = Gene: EPHB3; note = Location (start to end; relative to TSS): EPHB3_19_49; note = Orientation (relative to transcription): sense; note = sgRNA Position: 184561830; note = Sequence Name: 56322-704_101_SL_seq_3538
caagatcccagctcggaccc

SEQ ID NO: 3539 - DNA, 20 bp, Homo sapiens
  source 1..20: mol_type = genomic DNA; note = Gene: EPHB3; note = Location (start to end; relative to TSS): EPHB3_55_85; note = Orientation (relative to transcription): sense; note = sgRNA Position: 184561866; note = Sequence Name: 56322-704_101_SL_seq_3539
ccgaagccccggatcccagt

SEQ ID NO: 3540 - DNA, 20 bp, Homo sapiens
  source 1..20: mol_type = genomic DNA; note = Gene: EPHB4; note = Location (start to end; relative to TSS): EPHB4_56_86; note = Orientation (relative to transcription): sense; note = sgRNA Position: 100827443; note = Sequence Name: 56322-704_101_SL_seq_3540
cctcccgctccgtccccgct

SEQ ID NO: 3541 - DNA, 20 bp, Homo sapiens
  source 1..20: mol_type = genomic DNA; note = Gene: EPHB4; note = Location (start to end; relative to TSS): EPHB4_91_121; note = Orientation (relative to transcription): antisense; note = sgRNA Position: 100827428; note = Sequence Name: 56322-704_101_SL_seq_3541
tcctcgcgggcggggatggt

SEQ ID NO: 3542 - DNA, 20 bp, Homo sapiens
  source 1..20: mol_type = genomic DNA; note = Gene: EPHB4; note = Location (start to end; relative to TSS): EPHB4_51_81; note = Orientation (relative to transcription): antisense; note = sgRNA Position: 100827468; note = Sequence Name: 56322-704_101_SL_seq_3542
agcgggagggagggagactg

SEQ ID NO: 3543 - DNA, 20 bp, Homo sapiens
  source 1..20: mol_type = genomic DNA; note = Gene: EPHB4; note = Location (start to end; relative to TSS): EPHB4_81_111; note = Orientation (relative to transcription): sense; note = sgRNA Position: 100827418; note = Sequence Name: 56322-704_101_SL_seq_3543
tcccaccatccccgcccgcg

SEQ ID NO: 3544 - DNA, 20 bp, Homo sapiens
  source 1..20: mol_type = genomic DNA; note = Gene: EPHB4; note = Location (start to end; relative to TSS): EPHB4_46_76; note = Orientation (relative to transcription): antisense; note = sgRNA Position: 100827473; note = Sequence Name: 56322-704_101_SL_seq_3544
gagggagggagactgcggcg

SEQ ID NO: 3545 - DNA, 20 bp, Homo sapiens
  source 1..20: mol_type = genomic DNA; note = Gene: EPHB4; note = Location (start to end; relative to TSS): EPHB4_78_108; note = Orientation (relative to transcription): antisense; note = sgRNA Position: 100827441; note = Sequence Name: 56322-704_101_SL_seq_3545
ggatggtgggagcccgagcg

SEQ ID NO: 3546 - DNA, 20 bp, Homo sapiens
  source 1..20: mol_type = genomic DNA; note = Gene: EPHB4; note = Location (start to end; relative to TSS): EPHB4_39_69; note = Orientation (relative to transcription): antisense; note = sgRNA Position: 100827480; note = Sequence Name: 56322-704_101_SL_seq_3546
ggagactgcggcgcggagcc

SEQ ID NO: 3547 - DNA, 20 bp, Homo sapiens
  source 1..20: mol_type = genomic DNA; note = Gene: EPHB4; note = Location (start to end; relative to TSS): EPHB4_69_99; note = Orientation (relative to transcription): antisense; note = sgRNA Position: 100827450; note = Sequence Name: 56322-704_101_SL_seq_3547
gagcccgagcggggacggag

SEQ ID NO: 3548 - DNA, 20 bp, Homo sapiens
  source 1..20: mol_type = genomic DNA; note = Gene: EPHB4; note = Location (start to end; relative to TSS): EPHB4_36_66; note = Orientation (relative to transcription): antisense; note = sgRNA Position: 100827483; note = Sequence Name: 56322-704_101_SL_seq_3548
gactgcggcgcggagccggg

SEQ ID NO: 3549 - DNA, 20 bp, Homo sapiens
  source 1..20: mol_type = genomic DNA; note = Gene: EPHB4; note = Location (start to end; relative to TSS): EPHB4_68_98; note = Orientation (relative to transcription): antisense; note = sgRNA Position: 100827451; note = Sequence Name: 56322-704_101_SL_seq_3549
agcccgagcggggacggagc

SEQ ID NO: 3550 - DNA, 20 bp, Homo sapiens
  source 1..20: mol_type = genomic DNA; note = Gene: EPHB6; note = Location (start to end; relative to TSS): EPHB6_32_62; note = Orientation (relative to transcription): sense; note = sgRNA Position: 142855134; note = Sequence Name: 56322-704_101_SL_seq_3550
gcgggacccgggacccagct

SEQ ID NO: 3551 - DNA, 20 bp, Homo sapiens
  source 1..20: mol_type = genomic DNA; note = Gene: EPHB6; note = Location (start to end; relative to TSS): EPHB6_84_114; note = Orientation (relative to transcription): sense; note = sgRNA Position: 142855186; note = Sequence Name: 56322-704_101_SL_seq_3551
atctcccggcgccccacctc

SEQ ID NO: 3552 - DNA, 20 bp, Homo sapiens
  source 1..20: mol_type = genomic DNA; note = Gene: EPHB6; note = Location (start to end; relative to TSS): EPHB6_38_68; note = Orientation (relative to transcription): sense; note = sgRNA Position: 142855140; note = Sequence Name: 56322-704_101_SL_seq_3552
cccgggacccagcttggcga

SEQ ID NO: 3553 - DNA, 20 bp, Homo sapiens
  source 1..20: mol_type = genomic DNA; note = Gene: EPHB6; note = Location (start to end; relative to TSS): EPHB6_70_100; note = Orientation (relative to transcription): sense; note = sgRNA Position: 142855172; note = Sequence Name: 56322-704_101_SL_seq_3553
cgcgggcccccaggatctcc

SEQ ID NO: 3554 - DNA, 20 bp, Homo sapiens
  source 1..20: mol_type = genomic DNA; note = Gene: EPHB6; note = Location (start to end; relative to TSS): EPHB6_21_51; note = Orientation (relative to transcription): sense; note = sgRNA Position: 142855123; note = Sequence Name: 56322-704_101_SL_seq_3554
agcagcgggcggcgggaccc

SEQ ID NO: 3555 - DNA, 20 bp, Homo sapiens
  source 1..20: mol_type = genomic DNA; note = Gene: EPHB6; note = Location (start to end; relative to TSS): EPHB6_53_83; note = Orientation (relative to transcription): sense; note = sgRNA Position: 142855155; note = Sequence Name: 56322-704_101_SL_seq_3555
ggcgacggcgatctcgacgc

SEQ ID NO: 3556 - DNA, 20 bp, Homo sapiens
  source 1..20: mol_type = genomic DNA; note = Gene: EPHB6; note = Location (start to end; relative to TSS): EPHB6_20_50; note = Orientation (relative to transcription): sense; note = sgRNA Position: 142855122; note = Sequence Name: 56322-704_101_SL_seq_3556
cagcagcgggcggcgggacc

SEQ ID NO: 3557 - DNA, 20 bp, Homo sapiens
  source 1..20: mol_type = genomic DNA; note = Gene: EPHB6; note = Location (start to end; relative to TSS): EPHB6_52_82; note = Orientation (relative to transcription): sense; note = sgRNA Position: 142855154; note = Sequence Name: 56322-704_101_SL_seq_3557
tggcgacggcgatctcgacg

SEQ ID NO: 3558 - DNA, 20 bp, Homo sapiens
  source 1..20: mol_type = genomic DNA; note = Gene: EPHB6; note = Location (start to end; relative to TSS): EPHB6_18_48; note = Orientation (relative to transcription): antisense; note = sgRNA Position: 142855100; note = Sequence Name: 56322-704_101_SL_seq_3558
cgcccgctgctgtagagccg

SEQ ID NO: 3559 - DNA, 20 bp, Homo sapiens
  source 1..20: mol_type = genomic DNA; note = Gene: EPHB6; note = Location (start to end; relative to TSS): EPHB6_48_78; note = Orientation (relative to transcription): antisense; note = sgRNA Position: 142855130; note = Sequence Name: 56322-704_101_SL_seq_3559
gccgtcgccaagctgggtcc

SEQ ID NO: 3560 - DNA, 20 bp, Homo sapiens
  source 1..20: mol_type = genomic DNA; note = Gene: ERBB2; note = Location (start to end; relative to TSS): ERBB2_32_62; note = Orientation (relative to transcription): antisense; note = sgRNA Position: 39700102; note = Sequence Name: 56322-704_101_SL_seq_3560
ggggcgcgcggctgcccggg

SEQ ID NO: 3561 - DNA, 20 bp, Homo sapiens
  source 1..20: mol_type = genomic DNA; note = Gene: ERBB2; note = Location (start to end; relative to TSS): ERBB2_104_134; note = Orientation (relative to transcription): sense; note = sgRNA Position: 39700194; note = Sequence Name: 56322-704_101_SL_seq_3561
cgccccgcgccctcccagcc

SEQ ID NO: 3562 - DNA, 20 bp, Homo sapiens
  source 1..20: mol_type = genomic DNA; note = Gene: ERBB2; note = Location (start to end; relative to TSS): ERBB2_33_63; note = Orientation (relative to transcription): antisense; note = sgRNA Position: 39700103; note = Sequence Name: 56322-704_101_SL_seq_3562
aggggcgcgcggctgcccgg

SEQ ID NO: 3563 - DNA, 20 bp, Homo sapiens
  source 1..20: mol_type = genomic DNA; note = Gene: ERBB2; note = Location (start to end; relative to TSS): ERBB2_98_128; note = Orientation (relative to transcription): antisense; note = sgRNA Position: 39700168; note = Sequence Name: 56322-704_101_SL_seq_3563
gcggggcgcggggtgctgcg

SEQ ID NO: 3564 - DNA, 20 bp, Homo sapiens
  source 1..20: mol_type = genomic DNA; note = Gene: ERBB2; note = Location (start to end; relative to TSS): ERBB2_44_74; note = Orientation (relative to transcription): antisense; note = sgRNA Position: 39700114; note = Sequence Name: 56322-704_101_SL_seq_3564
gccccgtgggaaggggcgcg

SEQ ID NO: 3565 - DNA, 20 bp, Homo sapiens
  source 1..20: mol_type = genomic DNA; note = Gene: ERBB2; note = Location (start to end; relative to TSS): ERBB2_90_120; note = Orientation (relative to transcription): antisense; note = sgRNA Position: 39700160; note = Sequence Name: 56322-704_101_SL_seq_3565
cggggtgctgcgaggggtgg

SEQ ID NO: 3566 - DNA, 20 bp, Homo sapiens
  source 1..20: mol_type = genomic DNA; note = Gene: ERBB2; note = Location (start to end; relative to TSS): ERBB2_35_65; note = Orientation (relative to transcription): antisense; note = sgRNA Position: 39700105; note = Sequence Name: 56322-704_101_SL_seq_3566
gaaggggcgcgcggctgccc

SEQ ID NO: 3567 - DNA, 20 bp, Homo sapiens
  source 1..20: mol_type = genomic DNA; note = Gene: ERBB2; note = Location (start to end; relative to TSS): ERBB2_86_116; note = Orientation (relative to transcription): antisense; note = sgRNA Position: 39700156; note = Sequence Name: 56322-704_101_SL_seq_3567
gtgctgcgaggggtgggggc

SEQ ID NO: 3568 - DNA, 20 bp, Homo sapiens
  source 1..20: mol_type = genomic DNA; note = Gene: ERBB2; note = Location (start to end; relative to TSS): ERBB2_34_64; note = Orientation (relative to transcription): sense; note = sgRNA Position: 39700124; note = Sequence Name: 56322-704_101_SL_seq_3568
gccgcgcgccccttcccacg

SEQ ID NO: 3569 - DNA, 20 bp, Homo sapiens
  source 1..20: mol_type = genomic DNA; note = Gene: ERBB2; note = Location (start to end; relative to TSS): ERBB2_85_115; note = Orientation (relative to transcription): antisense; note = sgRNA Position: 39700155; note = Sequence Name: 56322-704_101_SL_seq_3569
tgctgcgaggggtgggggcc

SEQ ID NO: 3570 - DNA, 20 bp, Homo sapiens
  source 1..20: mol_type = genomic DNA; note = Gene: ERBB3; note = Location (start to end; relative to TSS): ERBB3_46_76; note = Orientation (relative to transcription): antisense; note = sgRNA Position: 56080217; note = Sequence Name: 56322-704_101_SL_seq_3570
gcaagagccacctgaaccgc

SEQ ID NO: 3571 - DNA, 20 bp, Homo sapiens
  source 1..20: mol_type = genomic DNA; note = Gene: ERBB3; note = Location (start to end; relative to TSS): ERBB3_77_107; note = Orientation (relative to transcription): antisense; note = sgRNA Position: 56080248; note = Sequence Name: 56322-704_101_SL_seq_3571
ggcccgggggcccctaggct

SEQ ID NO: 3572 - DNA, 20 bp, Homo sapiens
  source 1..20: mol_type = genomic DNA; note = Gene: ERBB3; note = Location (start to end; relative to TSS): ERBB3_30_60; note = Orientation (relative to transcription): sense; note = sgRNA Position: 56080221; note = Sequence Name: 56322-704_101_SL_seq_3572
caattcgccagcggttcagg

SEQ ID NO: 3573 - DNA, 20 bp, Homo sapiens
  source 1..20: mol_type = genomic DNA; note = Gene: ERBB3; note = Location (start to end; relative to TSS): ERBB3_65_95; note = Orientation (relative to transcription): sense; note = sgRNA Position: 56080256; note = Sequence Name: 56322-704_101_SL_seq_3573
tgtcctagcctaggggcccc

SEQ ID NO: 3574 - DNA, 20 bp, Homo sapiens
  source 1..20: mol_type = genomic DNA; note = Gene: ERBB3; note = Location (start to end; relative to TSS): ERBB3_26_56; note = Orientation (relative to transcription): antisense; note = sgRNA Position: 56080197; note = Sequence Name: 56322-704_101_SL_seq_3574
tggcgaattggtggctgctg

SEQ ID NO: 3575 - DNA, 20 bp, Homo sapiens
  source 1..20: mol_type = genomic DNA; note = Gene: ERBB3; note = Location (start to end; relative to TSS): ERBB3_58_88; note = Orientation (relative to transcription): sense; note = sgRNA Position: 56080249; note = Sequence Name: 56322-704_101_SL_seq_3575
gcctcgatgtcctagcctag

SEQ ID NO: 3576 - DNA, 20 bp, Homo sapiens
  source 1..20: mol_type = genomic DNA; note = Gene: ERBB3; note = Location (start to end; relative to TSS): ERBB3_21_51; note = Orientation (relative to transcription): sense; note = sgRNA Position: 56080212; note = Sequence Name: 56322-704_101_SL_seq_3576
agcagccaccaattcgccag

SEQ ID NO: 3577 - DNA, 20 bp, Homo sapiens
  source 1..20: mol_type = genomic DNA; note = Gene: ERBB3; note = Location (start to end; relative to TSS): ERBB3_57_87; note = Orientation (relative to transcription): sense; note = sgRNA Position: 56080248; note = Sequence Name: 56322-704_101_SL_seq_3577
tgcctcgatgtcctagccta

SEQ ID NO: 3578 - DNA, 20 bp, Homo sapiens
  source 1..20: mol_type = genomic DNA; note = Gene: ERBB3; note = Location (start to end; relative to TSS): ERBB3_20_50; note = Orientation (relative to transcription): antisense; note = sgRNA Position: 56080191; note = Sequence Name: 56322-704_101_SL_seq_3578
attggtggctgctgcggcga

SEQ ID NO: 3579 - DNA, 20 bp, Homo sapiens
  source 1..20: mol_type = genomic DNA; note = Gene: ERBB3; note = Location (start to end; relative to TSS): ERBB3_56_86; note = Orientation (relative to transcription): sense; note = sgRNA Position: 56080247; note = Sequence Name: 56322-704_101_SL_seq_3579
ttgcctcgatgtcctagcct

SEQ ID NO: 3580 - DNA, 20 bp, Homo sapiens
  source 1..20: mol_type = genomic DNA; note = Gene: ERBB4; note = Location (start to end; relative to TSS): ERBB4_53_83; note = Orientation (relative to transcription): sense; note = sgRNA Position: 212538725; note = Sequence Name: 56322-704_101_SL_seq_3580
gctcacactcgccccctcct

SEQ ID NO: 3581 - DNA, 20 bp, Homo sapiens
  source 1..20: mol_type = genomic DNA; note = Gene: ERBB4; note = Location (start to end; relative to TSS): ERBB4_86_116; note = Orientation (relative to transcription): antisense; note = sgRNA Position: 212538712; note = Sequence Name: 56322-704_101_SL_seq_3581
cgcccgcgggtccagggccg

SEQ ID NO: 3582 - DNA, 20 bp, Homo sapiens
  source 1..20: mol_type = genomic DNA; note = Gene: ERBB4; note = Location (start to end; relative to TSS): ERBB4_44_74; note = Orientation (relative to transcription): antisense; note = sgRNA Position: 212538754; note = Sequence Name: 56322-704_101_SL_seq_3582
tgagcgcgtgtgtgcgcgtg

SEQ ID NO: 3583 - DNA, 20 bp, Homo sapiens
  source 1..20: mol_type = genomic DNA; note = Gene: ERBB4; note = Location (start to end; relative to TSS): ERBB4_76_106; note = Orientation (relative to transcription): antisense; note = sgRNA Position: 212538722; note = Sequence Name: 56322-704_101_SL_seq_3583
tccagggccggggcccgagg

SEQ ID NO: 3584 - DNA, 20 bp, Homo sapiens
  source 1..20: mol_type = genomic DNA; note = Gene: ERBB4; note = Location (start to end; relative to TSS): ERBB4_43_73; note = Orientation (relative to transcription): antisense; note = sgRNA Position: 212538755; note = Sequence Name: 56322-704_101_SL_seq_3584
gagcgcgtgtgtgcgcgtgt

SEQ ID NO: 3585 - DNA, 20 bp, Homo sapiens
  source 1..20: mol_type = genomic DNA; note = Gene: ERBB4; note = Location (start to end; relative to TSS): ERBB4_75_105; note = Orientation (relative to transcription): antisense; note = sgRNA Position: 212538723; note = Sequence Name: 56322-704_101_SL_seq_3585
ccagggccggggcccgagga

SEQ ID NO: 3586 - DNA, 20 bp, Homo sapiens
  source 1..20: mol_type = genomic DNA; note = Gene: ERBB4; note = Location (start to end; relative to TSS): ERBB4_32_62; note = Orientation (relative to transcription): antisense; note = sgRNA Position: 212538766; note = Sequence Name: 56322-704_101_SL_seq_3586
tgcgcgtgtgggagtgtgct

SEQ ID NO: 3587 - DNA, 20 bp, Homo sapiens
  source 1..20: mol_type = genomic DNA; note = Gene: ERBB4; note = Location (start to end; relative to TSS): ERBB4_74_104; note = Orientation (relative to transcription): sense; note = sgRNA Position: 212538704; note = Sequence Name: 56322-704_101_SL_seq_3587
gggccccggccctggacccg

SEQ ID NO: 3588 - DNA, 20 bp, Homo sapiens
  source 1..20: mol_type = genomic DNA; note = Gene: ERBB4; note = Location (start to end; relative to TSS): ERBB4_19_49; note = Orientation (relative to transcription): antisense; note = sgRNA Position: 212538779; note = Sequence Name: 56322-704_101_SL_seq_3588
gtgtgctcggtgtgtgcgct

SEQ ID NO: 3589 - DNA, 20 bp, Homo sapiens
  source 1..20: mol_type = genomic DNA; note = Gene: ERBB4; note = Location (start to end; relative to TSS): ERBB4_53_83; note = Orientation (relative to transcription): sense; note = sgRNA Position: 212538725; note = Sequence Name: 56322-704_101_SL_seq_3589
gctcacactcgccccctcct

SEQ ID NO: 3590 - DNA, 20 bp, Homo sapiens
  source 1..20: mol_type = genomic DNA; note = Gene: ERN1; note = Location (start to end; relative to TSS): ERN1_42_72; note = Orientation (relative to transcription): antisense; note = sgRNA Position: 64130098; note = Sequence Name: 56322-704_101_SL_seq_3590
ggggcgccgcgacgacagcg

SEQ ID NO: 3591 - DNA, 20 bp, Homo sapiens
  source 1..20: mol_type = genomic DNA; note = Gene: ERN1; note = Location (start to end; relative to TSS): ERN1_80_110; note = Orientation (relative to transcription): antisense; note = sgRNA Position: 64130060; note = Sequence Name: 56322-704_101_SL_seq_3591
ccctggctccgggggcggta

SEQ ID NO: 3592 - DNA, 20 bp, Homo sapiens
  source 1..20: mol_type = genomic DNA; note = Gene: ERN1; note = Location (start to end; relative to TSS): ERN1_22_52; note = Orientation (relative to transcription): antisense; note = sgRNA Position: 64130118; note = Sequence Name: 56322-704_101_SL_seq_3592
aggcggtgaccgagcctcag

SEQ ID NO: 3593 - DNA, 20 bp, Homo sapiens
  source 1..20: mol_type = genomic DNA; note = Gene: ERN1; note = Location (start to end; relative to TSS): ERN1_73_103; note = Orientation (relative to transcription): antisense; note = sgRNA Position: 64130067; note = Sequence Name: 56322-704_101_SL_seq_3593
tccgggggcggtacggacag

SEQ ID NO: 3594 - DNA, 20 bp, Homo sapiens
  source 1..20: mol_type = genomic DNA; note = Gene: ERN1; note = Location (start to end; relative to TSS): ERN1_27_57; note = Orientation (relative to transcription): sense; note = sgRNA Position: 64130093; note = Sequence Name: 56322-704_101_SL_seq_3594
tcaccgcctcgctgtcgtcg

SEQ ID NO: 3595 - DNA, 20 bp, Homo sapiens
  source 1..20: mol_type = genomic DNA; note = Gene: ERN1; note = Location (start to end; relative to TSS): ERN1_71_101; note = Orientation (relative to transcription): sense; note = sgRNA Position: 64130049; note = Sequence Name: 56322-704_101_SL_seq_3595
ccgtaccgcccccggagcca

SEQ ID NO: 3596 - DNA, 20 bp, Homo sapiens
  source 1..20: mol_type = genomic DNA; note = Gene: ERN1; note = Location (start to end; relative to TSS): ERN1_39_69; note = Orientation (relative to transcription): antisense; note = sgRNA Position: 64130101; note = Sequence Name: 56322-704_101_SL_seq_3596
gcgccgcgacgacagcgagg

SEQ ID NO: 3597 - DNA, 20 bp, Homo sapiens
  source 1..20: mol_type = genomic DNA; note = Gene: ERN1; note = Location (start to end; relative to TSS): ERN1_70_100; note = Orientation (relative to transcription): sense; note = sgRNA Position: 64130050; note = Sequence Name: 56322-704_101_SL_seq_3597
tccgtaccgcccccggagcc

SEQ ID NO: 3598 - DNA, 20 bp, Homo sapiens
  source 1..20: mol_type = genomic DNA; note = Gene: ERN1; note = Location (start to end; relative to TSS): ERN1_5_35; note = Orientation (relative to transcription): antisense; note = sgRNA Position: 64130135; note = Sequence Name: 56322-704_101_SL_seq_3598
cagcggacgcagaactgact

SEQ ID NO: 3599 - DNA, 20 bp, Homo sapiens
  source 1..20: mol_type = genomic DNA; note = Gene: ERN1; note = Location (start to end; relative to TSS): ERN1_42_72; note = Orientation (relative to transcription): antisense; note = sgRNA Position: 64130098; note = Sequence Name: 56322-704_101_SL_seq_3599
ggggcgccgcgacgacagcg

SEQ ID NO: 3600 - DNA, 20 bp, Homo sapiens
  source 1..20: mol_type = genomic DNA; note = Gene: ERN2; note = Location (start to end; relative to TSS): ERN2_26_56; note = Orientation (relative to transcription): antisense; note = sgRNA Position: 23713192; note = Sequence Name: 56322-704_101_SL_seq_3600
ccgcactcgccatagcgcct

SEQ ID NO: 3601 - DNA, 20 bp, Homo sapiens
  source 1..20: mol_type = genomic DNA; note = Gene: ERN2; note = Location (start to end; relative to TSS): ERN2_71_101; note = Orientation (relative to transcription): antisense; note = sgRNA Position: 23713147; note = Sequence Name: 56322-704_101_SL_seq_3601
actggagctggagccccagc

SEQ ID NO: 3602 - DNA, 20 bp, Homo sapiens
  source 1..20: mol_type = genomic DNA; note = Gene: ERN2; note = Location (start to end; relative to TSS): ERN2_25_55; note = Orientation (relative to transcription): sense; note = sgRNA Position: 23713173; note = Sequence Name: 56322-704_101_SL_seq_3602
ctatggcgagtgcggtcagg

SEQ ID NO: 3603 - DNA, 20 bp, Homo sapiens
  source 1..20: mol_type = genomic DNA; note = Gene: ERN2; note = Location (start to end; relative to TSS): ERN2_70_100; note = Orientation (relative to transcription): antisense; note = sgRNA Position: 23713148; note = Sequence Name: 56322-704_101_SL_seq_3603
ctggagctggagccccagcc

SEQ ID NO: 3604 - DNA, 20 bp, Homo sapiens
  source 1..20: mol_type = genomic DNA; note = Gene: ERN2; note = Location (start to end; relative to TSS): ERN2_24_54; note = Orientation (relative to transcription): sense; note = sgRNA Position: 23713174; note = Sequence Name: 56322-704_101_SL_seq_3604
gctatggcgagtgcggtcag

SEQ ID NO: 3605 - DNA, 20 bp, Homo sapiens
  source 1..20: mol_type = genomic DNA; note = Gene: ERN2; note = Location (start to end; relative to TSS): ERN2_69_99; note = Orientation (relative to transcription): antisense; note = sgRNA Position: 23713149; note = Sequence Name: 56322-704_101_SL_seq_3605
tggagctggagccccagccg

SEQ ID NO: 3606 - DNA, 20 bp, Homo sapiens
  source 1..20: mol_type = genomic DNA; note = Gene: ERN2; note = Location (start to end; relative to TSS): ERN2_23_53; note = Orientation (relative to transcription): sense; note = sgRNA Position: 23713175; note = Sequence Name: 56322-704_101_SL_seq_3606
cgctatggcgagtgcggtca

SEQ ID NO: 3607 - DNA, 20 bp, Homo sapiens
  source 1..20: mol_type = genomic DNA; note = Gene: ERN2; note = Location (start to end; relative to TSS): ERN2_68_98; note = Orientation (relative to transcription): sense; note = sgRNA Position: 23713130; note = Sequence Name: 56322-704_101_SL_seq_3607
ggggctccagctccagttcg

SEQ ID NO: 3608 - DNA, 20 bp, Homo sapiens
  source 1..20: mol_type = genomic DNA; note = Gene: ERN2; note = Location (start to end; relative to TSS): ERN2_22_52; note = Orientation (relative to transcription): sense; note = sgRNA Position: 23713176; note = Sequence Name: 56322-704_101_SL_seq_3608
gcgctatggcgagtgcggtc

SEQ ID NO: 3609 - DNA, 20 bp, Homo sapiens
  source 1..20: mol_type = genomic DNA; note = Gene: ERN2; note = Location (start to end; relative to TSS): ERN2_63_93; note = Orientation (relative to transcription): antisense; note = sgRNA Position: 23713155; note = Sequence Name: 56322-704_101_SL_seq_3609
tggagccccagccggggcca

SEQ ID NO: 3610 - DNA, 20 bp, Homo sapiens
  source 1..20: mol_type = genomic DNA; note = Gene: ETNK1; note = Location (start to end; relative to TSS): ETNK1_24_54; note = Orientation (relative to transcription): sense; note = sgRNA Position: 22625221; note = Sequence Name: 56322-704_101_SL_seq_3610
attttctccgagagcgggcc

SEQ ID NO: 3611 - DNA, 20 bp, Homo sapiens
  source 1..20: mol_type = genomic DNA; note = Gene: ETNK1; note = Location (start to end; relative to TSS): ETNK1_79_109; note = Orientation (relative to transcription): antisense; note = sgRNA Position: 22625256; note = Sequence Name: 56322-704_101_SL_seq_3611
aggcggcactgttgccgatc

SEQ ID NO: 3612 - DNA, 20 bp, Homo sapiens
  source 1..20: mol_type = genomic DNA; note = Gene: ETNK1; note = Location (start to end; relative to TSS): ETNK1_23_53; note = Orientation (relative to transcription): sense; note = sgRNA Position: 22625220; note = Sequence Name: 56322-704_101_SL_seq_3612
aattttctccgagagcgggc

SEQ ID NO: 3613 - DNA, 20 bp, Homo sapiens
  source 1..20: mol_type = genomic DNA; note = Gene: ETNK1; note = Location (start to end; relative to TSS): ETNK1_78_108; note = Orientation (relative to transcription): antisense; note = sgRNA Position: 22625255; note = Sequence Name: 56322-704_101_SL_seq_3613
ggcggcactgttgccgatcc

SEQ ID NO: 3614 - DNA, 20 bp, Homo sapiens
  source 1..20: mol_type = genomic DNA; note = Gene: ETNK1; note = Location (start to end; relative to TSS): ETNK1_19_49; note = Orientation (relative to transcription): sense; note = sgRNA Position: 22625216; note = Sequence Name: 56322-704_101_SL_seq_3614
caggaattttctccgagagc

SEQ ID NO: 3615 - DNA, 20 bp, Homo sapiens
  source 1..20: mol_type = genomic DNA; note = Gene: ETNK1; note = Location (start to end; relative to TSS): ETNK1_73_103; note = Orientation (relative to transcription): antisense; note = sgRNA Position: 22625250; note = Sequence Name: 56322-704_101_SL_seq_3615
cactgttgccgatccgggtc

SEQ ID NO: 3616 - DNA, 20 bp, Homo sapiens
  source 1..20: mol_type = genomic DNA; note = Gene: ETNK1; note = Location (start to end; relative to TSS): ETNK1_18_48; note = Orientation (relative to transcription): sense; note = sgRNA Position: 22625215; note = Sequence Name: 56322-704_101_SL_seq_3616
acaggaattttctccgagag

SEQ ID NO: 3617 - DNA, 20 bp, Homo sapiens
  source 1..20: mol_type = genomic DNA; note = Gene: ETNK1; note = Location (start to end; relative to TSS): ETNK1_56_86; note = Orientation (relative to transcription): sense; note = sgRNA Position: 22625253; note = Sequence Name: 56322-704_101_SL_seq_3617
gctgctgtccagacccggat

SEQ ID NO: 3618 - DNA, 20 bp, Homo sapiens
  source 1..20: mol_type = genomic DNA; note = Gene: ETNK1; note = Location (start to end; relative to TSS): ETNK1_21_51; note = Orientation (relative to transcription): antisense; note = sgRNA Position: 22625198; note = Sequence Name: 56322-704_101_SL_seq_3618
tcggagaaaattcctgttgt

SEQ ID NO: 3619 - DNA, 20 bp, Homo sapiens
  source 1..20: mol_type = genomic DNA; note = Gene: ETNK1; note = Location (start to end; relative to TSS): ETNK1_51_81; note = Orientation (relative to transcription): sense; note = sgRNA Position: 22625248; note = Sequence Name: 56322-704_101_SL_seq_3619
gttcagctgctgtccagacc

SEQ ID NO: 3620 - DNA, 20 bp, Homo sapiens
  source 1..20: mol_type = genomic DNA; note = Gene: ETNK2; note = Location (start to end; relative to TSS): ETNK2_49_79; note = Orientation (relative to transcription): antisense; note = sgRNA Position: 204151991; note = Sequence Name: 56322-704_101_SL_seq_3620
ccgcttcgatcgccggctcg

SEQ ID NO: 3621 - DNA, 20 bp, Homo sapiens
  source 1..20: mol_type = genomic DNA; note = Gene: ETNK2; note = Location (start to end; relative to TSS): ETNK2_98_128; note = Orientation (relative to transcription): antisense; note = sgRNA Position: 204151942; note = Sequence Name: 56322-704_101_SL_seq_3621
agtggtagaggaggggccag

SEQ ID NO: 3622 - DNA, 20 bp, Homo sapiens
  source 1..20: mol_type = genomic DNA; note = Gene: ETNK2; note = Location (start to end; relative to TSS): ETNK2_40_70; note = Orientation (relative to transcription): sense; note = sgRNA Position: 204151980; note = Sequence Name: 56322-704_101_SL_seq_3622
ccgcgagccggcgatcgaag

SEQ ID NO: 3623 - DNA, 20 bp, Homo sapiens
  source 1..20: mol_type = genomic DNA; note = Gene: ETNK2; note = Location (start to end; relative to TSS): ETNK2_82_112; note = Orientation (relative to transcription): antisense; note = sgRNA Position: 204151958; note = Sequence Name: 56322-704_101_SL_seq_3623
ccaggggaagtccatgactc

SEQ ID NO: 3624 - DNA, 20 bp, Homo sapiens
  source 1..20: mol_type = genomic DNA; note = Gene: ETNK2; note = Location (start to end; relative to TSS): ETNK2_41_71; note = Orientation (relative to transcription): sense; note = sgRNA Position: 204151979; note = Sequence Name: 56322-704_101_SL_seq_3624
cgcgagccggcgatcgaagc

SEQ ID NO: 3625 - DNA, 20 bp, Homo sapiens
  source 1..20: mol_type = genomic DNA; note = Gene: ETNK2; note = Location (start to end; relative to TSS): ETNK2_73_103; note = Orientation (relative to transcription): sense; note = sgRNA Position: 204151947; note = Sequence Name: 56322-704_101_SL_seq_3625
cctgagtcatggacttcccc

SEQ ID NO: 3626 - DNA, 20 bp, Homo sapiens
  source 1..20: mol_type = genomic DNA; note = Gene: ETNK2; note = Location (start to end; relative to TSS): ETNK2_25_55; note = Orientation (relative to transcription): antisense; note = sgRNA Position: 204152015; note = Sequence Name: 56322-704_101_SL_seq_3626
ccgccgcccaccgccgaccc

SEQ ID NO: 3627 - DNA, 20 bp, Homo sapiens
  source 1..20: mol_type = genomic DNA; note = Gene: ETNK2; note = Location (start to end; relative to TSS): ETNK2_56_86; note = Orientation (relative to transcription): antisense; note = sgRNA Position: 204151984; note = Sequence Name: 56322-704_101_SL_seq_3627
gagctgcccgcttcgatcgc

SEQ ID NO: 3628 - DNA, 20 bp, Homo sapiens
  source 1..20: mol_type = genomic DNA; note = Gene: ETNK2; note = Location (start to end; relative to TSS): ETNK2_17_47; note = Orientation (relative to transcription): sense; note = sgRNA Position: 204152003; note = Sequence Name: 56322-704_101_SL_seq_3628
cggggtcggcggtgggcggc

SEQ ID NO: 3629 - DNA, 20 bp, Homo sapiens
  source 1..20: mol_type = genomic DNA; note = Gene: ETNK2; note = Location (start to end; relative to TSS): ETNK2_49_79; note = Orientation (relative to transcription): antisense; note = sgRNA Position: 204151991; note = Sequence Name: 56322-704_101_SL_seq_3629
ccgcttcgatcgccggctcg

SEQ ID NO: 3630 - DNA, 20 bp, Homo sapiens
  source 1..20: mol_type = genomic DNA; note = Gene: FAM20C; note = Location (start to end; relative to TSS): FAM20C_49_79; note = Orientation (relative to transcription): antisense; note = sgRNA Position: 192626; note = Sequence Name: 56322-704_101_SL_seq_3630
ggagcggccggcggggtccc

SEQ ID NO: 3631 - DNA, 20 bp, Homo sapiens
  source 1..20: mol_type = genomic DNA; note = Gene: FAM20C; note = Location (start to end; relative to TSS): FAM20C_81_111; note = Orientation (relative to transcription): antisense; note = sgRNA Position: 192658; note = Sequence Name: 56322-704_101_SL_seq_3631
gggggggcgaagggcggaag

SEQ ID NO: 3632 - DNA, 20 bp, Homo sapiens
  source 1..20: mol_type = genomic DNA; note = Gene: FAM20C; note = Location (start to end; relative to TSS): FAM20C_37_67; note = Orientation (relative to transcription): antisense; note = sgRNA Position: 192614; note = Sequence Name: 56322-704_101_SL_seq_3632
ggggtcccgggcaggtgcag

SEQ ID NO: 3633 - DNA, 20 bp, Homo sapiens
  source 1..20: mol_type = genomic DNA; note = Gene: FAM20C; note = Location (start to end; relative to TSS): FAM20C_77_107; note = Orientation (relative to transcription): antisense; note = sgRNA Position: 192654; note = Sequence Name: 56322-704_101_SL_seq_3633
gggcgaagggcggaaggggt

SEQ ID NO: 3634 - DNA, 20 bp, Homo sapiens
  source 1..20: mol_type = genomic DNA; note = Gene: FAM20C; note = Location (start to end; relative to TSS): FAM20C_33_63; note = Orientation (relative to transcription): sense; note = sgRNA Position: 192630; note = Sequence Name: 56322-704_101_SL_seq_3634
gcacctgcccgggaccccgc

SEQ ID NO: 3635 - DNA, 20 bp, Homo sapiens
  source 1..20: mol_type = genomic DNA; note = Gene: FAM20C; note = Location (start to end; relative to TSS): FAM20C_71_101; note = Orientation (relative to transcription): antisense; note = sgRNA Position: 192648; note = Sequence Name: 56322-704_101_SL_seq_3635
agggcggaaggggtgggcgc

SEQ ID NO: 3636 - DNA, 20 bp, Homo sapiens
  source 1..20: mol_type = genomic DNA; note = Gene: FAM20C; note = Location (start to end; relative to TSS): FAM20C_23_53; note = Orientation (relative to transcription): sense; note = sgRNA Position: 192620; note = Sequence Name: 56322-704_101_SL_seq_3636
ggcggccgctgcacctgccc

SEQ ID NO: 3637 - DNA, 20 bp, Homo sapiens
  source 1..20: mol_type = genomic DNA; note = Gene: FAM20C; note = Location (start to end; relative to TSS): FAM20C_70_100; note = Orientation (relative to transcription): antisense; note = sgRNA Position: 192647; note = Sequence Name: 56322-704_101_SL_seq_3637
gggcggaaggggtgggcgcg

SEQ ID NO: 3638 - DNA, 20 bp, Homo sapiens
  source 1..20: mol_type = genomic DNA; note = Gene: FAM20C; note = Location (start to end; relative to TSS): FAM20C_22_52; note = Orientation (relative to transcription): sense; note = sgRNA Position: 192619; note = Sequence Name: 56322-704_101_SL_seq_3638
gggcggccgctgcacctgcc

SEQ ID NO: 3639 - DNA, 20 bp, Homo sapiens
  source 1..20: mol_type = genomic DNA; note = Gene: FAM20C; note = Location (start to end; relative to TSS): FAM20C_56_86; note = Orientation (relative to transcription): antisense; note = sgRNA Position: 192633; note = Sequence Name: 56322-704_101_SL_seq_3639
ggcgcggggagcggccggcg

SEQ ID NO: 3640 - DNA, 20 bp, Homo sapiens
  source 1..20: mol_type = genomic DNA; note = Gene: FASTK; note = Location (start to end; relative to TSS): FASTK_38_68; note = Orientation (relative to transcription): sense; note = sgRNA Position: 151080747; note = Sequence Name: 56322-704_101_SL_seq_3640
aggaggccgcggggggaacc

SEQ ID NO: 3641 - DNA, 20 bp, Homo sapiens
  source 1..20: mol_type = genomic DNA; note = Gene: FASTK; note = Location (start to end; relative to TSS): FASTK_71_101; note = Orientation (relative to transcription): antisense; note = sgRNA Position: 151080734; note = Sequence Name: 56322-704_101_SL_seq_3641
tcagtcggtctcggggcccg

SEQ ID NO: 3642 - DNA, 20 bp, Homo sapiens
  source 1..20: mol_type = genomic DNA; note = Gene: FASTK; note = Location (start to end; relative to TSS): FASTK_27_57; note = Orientation (relative to transcription): sense; note = sgRNA Position: 151080758; note = Sequence Name: 56322-704_101_SL_seq_3642
gctagccgatgaggaggccg

SEQ ID NO: 3643 - DNA, 20 bp, Homo sapiens
  source 1..20: mol_type = genomic DNA; note = Gene: FASTK; note = Location (start to end; relative to TSS): FASTK_70_100; note = Orientation (relative to transcription): antisense; note = sgRNA Position: 151080735; note = Sequence Name: 56322-704_101_SL_seq_3643
cagtcggtctcggggcccgg

SEQ ID NO: 3644 - DNA, 20 bp, Homo sapiens
  source 1..20: mol_type = genomic DNA; note = Gene: FASTK; note = Location (start to end; relative to TSS): FASTK_30_60; note = Orientation (relative to transcription): sense; note = sgRNA Position: 151080755; note = Sequence Name: 56322-704_101_SL_seq_3644
agccgatgaggaggccgcgg

SEQ ID NO: 3645 - DNA, 20 bp, Homo sapiens
  source 1..20: mol_type = genomic DNA; note = Gene: FASTK; note = Location (start to end; relative to TSS): FASTK_65_95; note = Orientation (relative to transcription): sense; note = sgRNA Position: 151080720; note = Sequence Name: 56322-704_101_SL_seq_3645
cgggccccgagaccgactga

SEQ ID NO: 3646 - DNA, 20 bp, Homo sapiens
  source 1..20: mol_type = genomic DNA; note = Gene: FASTK; note = Location (start to end; relative to TSS): FASTK_31_61; note = Orientation (relative to transcription): sense; note = sgRNA Position: 151080754; note = Sequence Name: 56322-704_101_SL_seq_3646
gccgatgaggaggccgcggg

SEQ ID NO: 3647 - DNA, 20 bp, Homo sapiens
  source 1..20: mol_type = genomic DNA; note = Gene: FASTK; note = Location (start to end; relative to TSS): FASTK_64_94; note = Orientation (relative to transcription): sense; note = sgRNA Position: 151080721; note = Sequence Name: 56322-704_101_SL_seq_3647
ccgggccccgagaccgactg

SEQ ID NO: 3648 - DNA, 20 bp, Homo sapiens
  source 1..20: mol_type = genomic DNA; note = Gene: FASTK; note = Location (start to end; relative to TSS): FASTK_18_48; note = Orientation (relative to transcription): sense; note = sgRNA Position: 151080767; note = Sequence Name: 56322-704_101_SL_seq_3648
gactcggtggctagccgatg

SEQ ID NO: 3649 - DNA, 20 bp, Homo sapiens
  source 1..20: mol_type = genomic DNA; note = Gene: FASTK; note = Location (start to end; relative to TSS): FASTK_53_83; note = Orientation (relative to transcription): antisense; note = sgRNA Position: 151080752; note = Sequence Name: 56322-704_101_SL_seq_3649
cgggggccgggttccccccg

SEQ ID NO: 3650 - DNA, 20 bp, Homo sapiens
  source 1..20: mol_type = genomic DNA; note = Gene: FCSK; note = Location (start to end; relative to TSS): FCSK_46_76; note = Orientation (relative to transcription): antisense; note = sgRNA Position: 70454647; note = Sequence Name: 56322-704_101_SL_seq_3650
gggcgctgcggcgaccctcg

SEQ ID NO: 3651 - DNA, 20 bp, Homo sapiens
  source 1..20: mol_type = genomic DNA; note = Gene: FCSK; note = Location (start to end; relative to TSS): FCSK_76_106; note = Orientation (relative to transcription): antisense; note = sgRNA Position: 70454677; note = Sequence Name: 56322-704_101_SL_seq_3651
agggggcgcaaggggcgcaa

SEQ ID NO: 3652 - DNA, 20 bp, Homo sapiens
  source 1..20: mol_type = genomic DNA; note = Gene: FCSK; note = Location (start to end; relative to TSS): FCSK_23_53; note = Orientation (relative to transcription): sense; note = sgRNA Position: 70454644; note = Sequence Name: 56322-704_101_SL_seq_3652
gcaggtacgtcagtccgcga

SEQ ID NO: 3653 - DNA, 20 bp, Homo sapiens
  source 1..20: mol_type = genomic DNA; note = Gene: FCSK; note = Location (start to end; relative to TSS): FCSK_67_97; note = Orientation (relative to transcription): antisense; note = sgRNA Position: 70454668; note = Sequence Name: 56322-704_101_SL_seq_3653
aaggggcgcaaggggcgcaa

SEQ ID NO: 3654 - DNA, 20 bp, Homo sapiens
  source 1..20: mol_type = genomic DNA; note = Gene: FCSK; note = Location (start to end; relative to TSS): FCSK_22_52; note = Orientation (relative to transcription): sense; note = sgRNA Position: 70454643; note = Sequence Name: 56322-704_101_SL_seq_3654
ggcaggtacgtcagtccgcg

SEQ ID NO: 3655 - DNA, 20 bp, Homo sapiens
  source 1..20: mol_type = genomic DNA; note = Gene: FCSK; note = Location (start to end; relative to TSS): FCSK_66_96; note = Orientation (relative to transcription): antisense; note = sgRNA Position: 70454667; note = Sequence Name: 56322-704_101_SL_seq_3655
aggggcgcaaggggcgcaag

SEQ ID NO: 3656 - DNA, 20 bp, Homo sapiens
  source 1..20: mol_type = genomic DNA; note = Gene: FCSK; note = Location (start to end; relative to TSS): FCSK_15_45; note = Orientation (relative to transcription): antisense; note = sgRNA Position: 70454616; note = Sequence Name: 56322-704_101_SL_seq_3656
acctgccgtcgcccggcgct

SEQ ID NO: 3657 - DNA, 20 bp, Homo sapiens
  source 1..20: mol_type = genomic DNA; note = Gene: FCSK; note = Location (start to end; relative to TSS): FCSK_58_88; note = Orientation (relative to transcription): antisense; note = sgRNA Position: 70454659; note = Sequence Name: 56322-704_101_SL_seq_3657
aaggggcgcaaggggcgctg

SEQ ID NO: 3658 - DNA, 20 bp, Homo sapiens
  source 1..20: mol_type = genomic DNA; note = Gene: FCSK; note = Location (start to end; relative to TSS): FCSK_12_42; note = Orientation (relative to transcription): antisense; note = sgRNA Position: 70454613; note = Sequence Name: 56322-704_101_SL_seq_3658
tgccgtcgcccggcgctcgg

SEQ ID NO: 3659 - DNA, 20 bp, Homo sapiens
  source 1..20: mol_type = genomic DNA; note = Gene: FCSK; note = Location (start to end; relative to TSS): FCSK_46_76; note = Orientation (relative to transcription): antisense; note = sgRNA Position: 70454647; note = Sequence Name: 56322-704_101_SL_seq_3659
gggcgctgcggcgaccctcg

SEQ ID NO: 3660 - DNA, 20 bp, Homo sapiens
  source 1..20: mol_type = genomic DNA; note = Gene: FER; note = Location (start to end; relative to TSS): FER_47_77; note = Orientation (relative to transcription): antisense; note = sgRNA Position: 108747950; note = Sequence Name: 56322-704_101_SL_seq_3660
acgggtctgctcttcagtga

SEQ ID NO: 3661 - DNA, 20 bp, Homo sapiens
  source 1..20: mol_type = genomic DNA; note = Gene: FER; note = Location (start to end; relative to TSS): FER_90_120; note = Orientation (relative to transcription): sense; note = sgRNA Position: 108748013; note = Sequence Name: 56322-704_101_SL_seq_3661
aagaggtaagaatttattat

SEQ ID NO: 3662 - DNA, 20 bp, Homo sapiens
  source 1..20: mol_type = genomic DNA; note = Gene: FER; note = Location (start to end; relative to TSS): FER_43_73; note = Orientation (relative to transcription): sense; note = sgRNA Position: 108747966; note = Sequence Name: 56322-704_101_SL_seq_3662
actgaagagcagacccgttt

SEQ ID NO: 3663 - DNA, 20 bp, Homo sapiens
  source 1..20: mol_type = genomic DNA; note = Gene: FER; note = Location (start to end; relative to TSS): FER_79_109; note = Orientation (relative to transcription): antisense; note = sgRNA Position: 108747982; note = Sequence Name: 56322-704_101_SL_seq_3663
cttcgggagtctagaatgcg

SEQ ID NO: 3664 - DNA, 20 bp, Homo sapiens
  source 1..20: mol_type = genomic DNA; note = Gene: FER; note = Location (start to end; relative to TSS): FER_42_72; note = Orientation (relative to transcription): sense; note = sgRNA Position: 108747965; note = Sequence Name: 56322-704_101_SL_seq_3664
cactgaagagcagacccgtt

SEQ ID NO: 3665 - DNA, 20 bp, Homo sapiens
  source 1..20: mol_type = genomic DNA; note = Gene: FER; note = Location (start to end; relative to TSS): FER_73_103; note = Orientation (relative to transcription): sense; note = sgRNA Position: 108747996; note = Sequence Name: 56322-704_101_SL_seq_3665
cgcattctagactcccgaag

SEQ ID NO: 3666 - DNA, 20 bp, Homo sapiens
  source 1..20: mol_type = genomic DNA; note = Gene: FER; note = Location (start to end; relative to TSS): FER_15_45; note = Orientation (relative to transcription): sense; note = sgRNA Position: 108747938; note = Sequence Name: 56322-704_101_SL_seq_3666
ggtgaaggacgcttcagaaa

SEQ ID NO: 3667 - DNA, 20 bp, Homo sapiens
  source 1..20: mol_type = genomic DNA; note = Gene: FER; note = Location (start to end; relative to TSS): FER_65_95; note = Orientation (relative to transcription): antisense; note = sgRNA Position: 108747968; note = Sequence Name: 56322-704_101_SL_seq_3667
aatgcgtggagaacccaaac

SEQ ID NO: 3668 - DNA, 20 bp, Homo sapiens
  source 1..20: mol_type = genomic DNA; note = Gene: FER; note = Location (start to end; relative to TSS): FER_12_42; note = Orientation (relative to transcription): antisense; note = sgRNA Position: 108747915; note = Sequence Name: 56322-704_101_SL_seq_3668
cgtccttcaccaaaagaatt

SEQ ID NO: 3669 - DNA, 20 bp, Homo sapiens
  source 1..20: mol_type = genomic DNA; note = Gene: FER; note = Location (start to end; relative to TSS): FER_47_77; note = Orientation (relative to transcription): antisense; note = sgRNA Position: 108747950; note = Sequence Name: 56322-704_101_SL_seq_3669
acgggtctgctcttcagtga

SEQ ID NO: 3670 - DNA, 20 bp, Homo sapiens
  source 1..20: mol_type = genomic DNA; note = Gene: FES; note = Location (start to end; relative to TSS): FES_33_63; note = Orientation (relative to transcription): antisense; note = sgRNA Position: 90884543; note = Sequence Name: 56322-704_101_SL_seq_3670
cggggctagaggtacccgca

SEQ ID NO: 3671 - DNA, 20 bp, Homo sapiens
  source 1..20: mol_type = genomic DNA; note = Gene: FES; note = Location (start to end; relative to TSS): FES_67_97; note = Orientation (relative to transcription): sense; note = sgRNA Position: 90884597; note = Sequence Name: 56322-704_101_SL_seq_3671
agctgggggcgcggcaggca

SEQ ID NO: 3672 - DNA, 20 bp, Homo sapiens
  source 1..20: mol_type = genomic DNA; note = Gene: FES; note = Location (start to end; relative to TSS): FES_32_62; note = Orientation (relative to transcription): antisense; note = sgRNA Position: 90884542; note = Sequence Name: 56322-704_101_SL_seq_3672
ggggctagaggtacccgcac

SEQ ID NO: 3673 - DNA, 20 bp, Homo sapiens
  source 1..20: mol_type = genomic DNA; note = Gene: FES; note = Location (start to end; relative to TSS): FES_67_97; note = Orientation (relative to transcription): sense; note = sgRNA Position: 90884597; note = Sequence Name: 56322-704_101_SL_seq_3673
agctgggggcgcggcaggca

SEQ ID NO: 3674 - DNA, 20 bp, Homo sapiens
  source 1..20: mol_type = genomic DNA; note = Gene: FES; note = Location (start to end; relative to TSS): FES_26_56; note = Orientation (relative to transcription): sense; note = sgRNA Position: 90884556; note = Sequence Name: 56322-704_101_SL_seq_3674
gtgcgggtacctctagcccc

SEQ ID NO: 3675 - DNA, 20 bp, Homo sapiens
  source 1..20: mol_type = genomic DNA; note = Gene: FES; note = Location (start to end; relative to TSS): FES_59_89; note = Orientation (relative to transcription): antisense; note = sgRNA Position: 90884569; note = Sequence Name: 56322-704_101_SL_seq_3675
ccagctcccaccgctcctcc

SEQ ID NO: 3676 - DNA, 20 bp, Homo sapiens
  source 1..20: mol_type = genomic DNA; note = Gene: FES; note = Location (start to end; relative to TSS): FES_25_55; note = Orientation (relative to transcription): sense; note = sgRNA Position: 90884555; note = Sequence Name: 56322-704_101_SL_seq_3676
cgtgcgggtacctctagccc

SEQ ID NO: 3677 - DNA, 20 bp, Homo sapiens
  source 1..20: mol_type = genomic DNA; note = Gene: FES; note = Location (start to end; relative to TSS): FES_58_88; note = Orientation (relative to transcription): sense; note = sgRNA Position: 90884588; note = Sequence Name: 56322-704_101_SL_seq_3677
agcggtgggagctgggggcg

SEQ ID NO: 3678 - DNA, 20 bp, Homo sapiens
  source 1..20: mol_type = genomic DNA; note = Gene: FES; note = Location (start to end; relative to TSS): FES_18_48; note = Orientation (relative to transcription): antisense; note = sgRNA Position: 90884528; note = Sequence Name: 56322-704_101_SL_seq_3678
ccgcacgggcagctgctcct

SEQ ID NO: 3679 - DNA, 20 bp, Homo sapiens
  source 1..20: mol_type = genomic DNA; note = Gene: FES; note = Location (start to end; relative to TSS): FES_51_81; note = Orientation (relative to transcription): antisense; note = sgRNA Position: 90884561; note = Sequence Name: 56322-704_101_SL_seq_3679
caccgctcctccaggccccg

SEQ ID NO: 3680 - DNA, 20 bp, Homo sapiens
  source 1..20: mol_type = genomic DNA; note = Gene: FGFR1; note = Location (start to end; relative to TSS): FGFR1_36_66; note = Orientation (relative to transcription): sense; note = sgRNA Position: 38468575; note = Sequence Name: 56322-704_101_SL_seq_3680
cggcggcgggcggcagctag

SEQ ID NO: 3681 - DNA, 20 bp, Homo sapiens
  source 1..20: mol_type = genomic DNA; note = Gene: FGFR1; note = Location (start to end; relative to TSS): FGFR1_79_109; note = Orientation (relative to transcription): antisense; note = sgRNA Position: 38468552; note = Sequence Name: 56322-704_101_SL_seq_3681
tccgcgcgctgcggctgcac

SEQ ID NO: 3682 - DNA, 20 bp, Homo sapiens
  source 1..20: mol_type = genomic DNA; note = Gene: FGFR1; note = Location (start to end; relative to TSS): FGFR1_23_53; note = Orientation (relative to transcription): sense; note = sgRNA Position: 38468588; note = Sequence Name: 56322-704_101_SL_seq_3682
ggcgcggcgtcctcggcggc

SEQ ID NO: 3683 - DNA, 20 bp, Homo sapiens
  source 1..20: mol_type = genomic DNA; note = Gene: FGFR1; note = Location (start to end; relative to TSS): FGFR1_72_102; note = Orientation (relative to transcription): sense; note = sgRNA Position: 38468539; note = Sequence Name: 56322-704_101_SL_seq_3683
ggtgcagccgcagcgcgcgg

SEQ ID NO: 3684 - DNA, 20 bp, Homo sapiens
  source 1..20: mol_type = genomic DNA; note = Gene: FGFR1; note = Location (start to end; relative to TSS): FGFR1_26_56; note = Orientation (relative to transcription): sense; note = sgRNA Position: 38468585; note = Sequence Name: 56322-704_101_SL_seq_3684
gcggcgtcctcggcggcggg

SEQ ID NO: 3685 - DNA, 20 bp, Homo sapiens
  source 1..20: mol_type = genomic DNA; note = Gene: FGFR1; note = Location (start to end; relative to TSS): FGFR1_71_101; note = Orientation (relative to transcription): antisense; note = sgRNA Position: 38468560; note = Sequence Name: 56322-704_101_SL_seq_3685
ctgcggctgcaccggcgtcc

SEQ ID NO: 3686 - DNA, 20 bp, Homo sapiens
  source 1..20: mol_type = genomic DNA; note = Gene: FGFR1; note = Location (start to end; relative to TSS): FGFR1_27_57; note = Orientation (relative to transcription): antisense; note = sgRNA Position: 38468604; note = Sequence Name: 56322-704_101_SL_seq_3686
cgccgaggacgccgcgcctg

SEQ ID NO: 3687 - DNA, 20 bp, Homo sapiens
  source 1..20: mol_type = genomic DNA; note = Gene: FGFR1; note = Location (start to end; relative to TSS): FGFR1_69_99; note = Orientation (relative to transcription): sense; note = sgRNA Position: 38468542; note = Sequence Name: 56322-704_101_SL_seq_3687
gccggtgcagccgcagcgcg

SEQ ID NO: 3688 - DNA, 20 bp, Homo sapiens
  source 1..20: mol_type = genomic DNA; note = Gene: FGFR1; note = Location (start to end; relative to TSS): FGFR1_19_49; note = Orientation (relative to transcription): sense; note = sgRNA Position: 38468592; note = Sequence Name: 56322-704_101_SL_seq_3688
cacaggcgcggcgtcctcgg

SEQ ID NO: 3689 - DNA, 20 bp, Homo sapiens
  source 1..20: mol_type = genomic DNA; note = Gene: FGFR1; note = Location (start to end; relative to TSS): FGFR1_51_81; note = Orientation (relative to transcription): sense; note = sgRNA Position: 38468560; note = Sequence Name: 56322-704_101_SL_seq_3689
gctagcgggagccgggacgc

SEQ ID NO: 3690 - DNA, 20 bp, Homo sapiens
  source 1..20: mol_type = genomic DNA; note = Gene: FGFR2; note = Location (start to end; relative to TSS): FGFR2_51_81; note = Orientation (relative to transcription): sense; note = sgRNA Position: 121598369; note = Sequence Name: 56322-704_101_SL_seq_3690
gcgcggccgccacaaagctc

SEQ ID NO: 3691 - DNA, 20 bp, Homo sapiens
  source 1..20: mol_type = genomic DNA; note = Gene: FGFR2; note = Location (start to end; relative to TSS): FGFR2_85_115; note = Orientation (relative to transcription): antisense; note = sgRNA Position: 121598355; note = Sequence Name: 56322-704_101_SL_seq_3691
gtacgccgcatgcagccccg

SEQ ID NO: 3692 - DNA, 20 bp, Homo sapiens
  source 1..20: mol_type = genomic DNA; note = Gene: FGFR2; note = Location (start to end; relative to TSS): FGFR2_34_64; note = Orientation (relative to transcription): sense; note = sgRNA Position: 121598386; note = Sequence Name: 56322-704_101_SL_seq_3692
agcgggcgagggagcgcgcg

SEQ ID NO: 3693 - DNA, 20 bp, Homo sapiens
  source 1..20: mol_type = genomic DNA; note = Gene: FGFR2; note = Location (start to end; relative to TSS): FGFR2_66_96; note = Orientation (relative to transcription): antisense; note = sgRNA Position: 121598374; note = Sequence Name: 56322-704_101_SL_seq_3693
gcggcgcccgagctttgtgg

SEQ ID NO: 3694 - DNA, 20 bp, Homo sapiens
  source 1..20: mol_type = genomic DNA; note = Gene: FGFR2; note = Location (start to end; relative to TSS): FGFR2_23_53; note = Orientation (relative to transcription): sense; note = sgRNA Position: 121598397; note = Sequence Name: 56322-704_101_SL_seq_3694
ggcgggtgcggagcgggcga

SEQ ID NO: 3695 - DNA, 20 bp, Homo sapiens
  source 1..20: mol_type = genomic DNA; note = Gene: FGFR2; note = Location (start to end; relative to TSS): FGFR2_61_91; note = Orientation (relative to transcription): sense; note = sgRNA Position: 121598359; note = Sequence Name: 56322-704_101_SL_seq_3695
cacaaagctcgggcgccgcg

SEQ ID NO: 3696 - DNA, 20 bp, Homo sapiens
  source 1..20: mol_type = genomic DNA; note = Gene: FGFR2; note = Location (start to end; relative to TSS): FGFR2_18_48; note = Orientation (relative to transcription): antisense; note = sgRNA Position: 121598422; note = Sequence Name: 56322-704_101_SL_seq_3696
gcacccgccgcccgcccgct

SEQ ID NO: 3697 - DNA, 20 bp, Homo sapiens
  source 1..20: mol_type = genomic DNA; note = Gene: FGFR2; note = Location (start to end; relative to TSS): FGFR2_59_89; note = Orientation (relative to transcription): sense; note = sgRNA Position: 121598361; note = Sequence Name: 56322-704_101_SL_seq_3697
gccacaaagctcgggcgccg

SEQ ID NO: 3698 - DNA, 20 bp, Homo sapiens
  source 1..20: mol_type = genomic DNA; note = Gene: FGFR2; note = Location (start to end; relative to TSS): FGFR2_16_46; note = Orientation (relative to transcription): sense; note = sgRNA Position: 121598404; note = Sequence Name: 56322-704_101_SL_seq_3698
ggcgggcggcgggtgcggag

SEQ ID NO: 3699 - DNA, 20 bp, Homo sapiens
  source 1..20: mol_type = genomic DNA; note = Gene: FGFR2; note = Location (start to end; relative to TSS): FGFR2_51_81; note = Orientation (relative to transcription): sense; note = sgRNA Position: 121598369; note = Sequence Name: 56322-704_101_SL_seq_3699
gcgcggccgccacaaagctc

SEQ ID NO: 3700 - DNA, 20 bp, Homo sapiens
  source 1..20: mol_type = genomic DNA; note = Gene: FGFR3; note = Location (start to end; relative to TSS): FGFR3_43_73; note = Orientation (relative to transcription): sense; note = sgRNA Position: 1793362; note = Sequence Name: 56322-704_101_SL_seq_3700
tgccggtcgcacggacgcac

SEQ ID NO: 3701 - DNA, 20 bp, Homo sapiens
  source 1..20: mol_type = genomic DNA; note = Gene: FGFR3; note = Location (start to end; relative to TSS): FGFR3_86_116; note = Orientation (relative to transcription): antisense; note = sgRNA Position: 1793385; note = Sequence Name: 56322-704_101_SL_seq_3701
cagctcccgccccgtccctc

SEQ ID NO: 3702 - DNA, 20 bp, Homo sapiens
  source 1..20: mol_type = genomic DNA; note = Gene: FGFR3; note = Location (start to end; relative to TSS): FGFR3_46_76; note = Orientation (relative to transcription): sense; note = sgRNA Position: 1793365; note = Sequence Name: 56322-704_101_SL_seq_3702
cggtcgcacggacgcaccgg

SEQ ID NO: 3703 - DNA, 20 bp, Homo sapiens
  source 1..20: mol_type = genomic DNA; note = Gene: FGFR3; note = Location (start to end; relative to TSS): FGFR3_82_112; note = Orientation (relative to transcription): antisense; note = sgRNA Position: 1793381; note = Sequence Name: 56322-704_101_SL_seq_3703
tcccgccccgtccctccggc

SEQ ID NO: 3704 - DNA, 20 bp, Homo sapiens
  source 1..20: mol_type = genomic DNA; note = Gene: FGFR3; note = Location (start to end; relative to TSS): FGFR3_47_77; note = Orientation (relative to transcription): sense; note = sgRNA Position: 1793366; note = Sequence Name: 56322-704_101_SL_seq_3704
ggtcgcacggacgcaccggc

SEQ ID NO: 3705 - DNA, 20 bp, Homo sapiens
  source 1..20: mol_type = genomic DNA; note = Gene: FGFR3; note = Location (start to end; relative to TSS): FGFR3_79_109; note = Orientation (relative to transcription): antisense; note = sgRNA Position: 1793378; note = Sequence Name: 56322-704_101_SL_seq_3705
cgccccgtccctccggccgg

SEQ ID NO: 3706 - DNA, 20 bp, Homo sapiens
  source 1..20: mol_type = genomic DNA; note = Gene: FGFR3; note = Location (start to end; relative to TSS): FGFR3_34_64; note = Orientation (relative to transcription): sense; note = sgRNA Position: 1793353; note = Sequence Name: 56322-704_101_SL_seq_3706
gtcctgctctgccggtcgca

SEQ ID NO: 3707 - DNA, 20 bp, Homo sapiens
  source 1..20: mol_type = genomic DNA; note = Gene: FGFR3; note = Location (start to end; relative to TSS): FGFR3_71_101; note = Orientation (relative to transcription): antisense; note = sgRNA Position: 1793370; note = Sequence Name: 56322-704_101_SL_seq_3707
ccctccggccggcggcccgc

SEQ ID NO: 3708 - DNA, 20 bp, Homo sapiens
  source 1..20: mol_type = genomic DNA; note = Gene: FGFR3; note = Location (start to end; relative to TSS): FGFR3_26_56; note = Orientation (relative to transcription): sense; note = sgRNA Position: 1793345; note = Sequence Name: 56322-704_101_SL_seq_3708
gccgcgcggtcctgctctgc

SEQ ID NO: 3709 - DNA, 20 bp, Homo sapiens
  source 1..20: mol_type = genomic DNA; note = Gene: FGFR3; note = Location (start to end; relative to TSS): FGFR3_61_91; note = Orientation (relative to transcription): sense; note = sgRNA Position: 1793380; note = Sequence Name: 56322-704_101_SL_seq_3709
accggcgggccgccggccgg

SEQ ID NO: 3710 - DNA, 20 bp, Homo sapiens
  source 1..20: mol_type = genomic DNA; note = Gene: FGFR4; note = Location (start to end; relative to TSS): FGFR4_39_69; note = Orientation (relative to transcription): sense; note = sgRNA Position: 177086980; note = Sequence Name: 56322-704_101_SL_seq_3710
ccgcgtgcaggggtcgcggc

SEQ ID NO: 3711 - DNA, 20 bp, Homo sapiens
  source 1..20: mol_type = genomic DNA; note = Gene: FGFR4; note = Location (start to end; relative to TSS): FGFR4_73_103; note = Orientation (relative to transcription): sense; note = sgRNA Position: 177087014; note = Sequence Name: 56322-704_101_SL_seq_3711
agtgaggcggcggaggagcc

SEQ ID NO: 3712 - DNA, 20 bp, Homo sapiens
  source 1..20: mol_type = genomic DNA; note = Gene: FGFR4; note = Location (start to end; relative to TSS): FGFR4_35_65; note = Orientation (relative to transcription): sense; note = sgRNA Position: 177086976; note = Sequence Name: 56322-704_101_SL_seq_3712
cctgccgcgtgcaggggtcg

SEQ ID NO: 3713 - DNA, 20 bp, Homo sapiens
  source 1..20: mol_type = genomic DNA; note = Gene: FGFR4; note = Location (start to end; relative to TSS): FGFR4_66_96; note = Orientation (relative to transcription): sense; note = sgRNA Position: 177087007; note = Sequence Name: 56322-704_101_SL_seq_3713
agctgggagtgaggcggcgg

SEQ ID NO: 3714 - DNA, 20 bp, Homo sapiens
  source 1..20: mol_type = genomic DNA; note = Gene: FGFR4; note = Location (start to end; relative to TSS): FGFR4_28_58; note = Orientation (relative to transcription): sense; note = sgRNA Position: 177086969; note = Sequence Name: 56322-704_101_SL_seq_3714
tgcggaccctgccgcgtgca

SEQ ID NO: 3715 - DNA, 20 bp, Homo sapiens
  source 1..20: mol_type = genomic DNA; note = Gene: FGFR4; note = Location (start to end; relative to TSS): FGFR4_63_93; note = Orientation (relative to transcription): sense; note = sgRNA Position: 177087004; note = Sequence Name: 56322-704_101_SL_seq_3715
tggagctgggagtgaggcgg

SEQ ID NO: 3716 - DNA, 20 bp, Homo sapiens
  source 1..20: mol_type = genomic DNA; note = Gene: FGFR4; note = Location (start to end; relative to TSS): FGFR4_29_59; note = Orientation (relative to transcription): sense; note = sgRNA Position: 177086970; note = Sequence Name: 56322-704_101_SL_seq_3716
gcggaccctgccgcgtgcag

SEQ ID NO: 3717 - DNA, 20 bp, Homo sapiens
  source 1..20: mol_type = genomic DNA; note = Gene: FGFR4; note = Location (start to end; relative to TSS): FGFR4_60_90; note = Orientation (relative to transcription): sense; note = sgRNA Position: 177087001; note = Sequence Name: 56322-704_101_SL_seq_3717
ggctggagctgggagtgagg

SEQ ID NO: 3718 - DNA, 20 bp, Homo sapiens
  source 1..20: mol_type = genomic DNA; note = Gene: FGFR4; note = Location (start to end; relative to TSS): FGFR4_27_57; note = Orientation (relative to transcription): sense; note = sgRNA Position: 177086968; note = Sequence Name: 56322-704_101_SL_seq_3718
ctgcggaccctgccgcgtgc

SEQ ID NO: 3719 - DNA, 20 bp, Homo sapiens
  source 1..20: mol_type = genomic DNA; note = Gene: FGFR4; note = Location (start to end; relative to TSS): FGFR4_57_87; note = Orientation (relative to transcription): sense; note = sgRNA Position: 177086998; note = Sequence Name: 56322-704_101_SL_seq_3719
gccggctggagctgggagtg

SEQ ID NO: 3720 - DNA, 20 bp, Homo sapiens
  source 1..20: mol_type = genomic DNA; note = Gene: FGR; note = Location (start to end; relative to TSS): FGR_45_75; note = Orientation (relative to transcription): sense; note = sgRNA Position: 27635116; note = Sequence Name: 56322-704_101_SL_seq_3720
acgccggcactcgcggctgc

SEQ ID NO: 3721 - DNA, 20 bp, Homo sapiens
  source 1..20: mol_type = genomic DNA; note = Gene: FGR; note = Location (start to end; relative to TSS): FGR_84_114; note = Orientation (relative to transcription): sense; note = sgRNA Position: 27635077; note = Sequence Name: 56322-704_101_SL_seq_3721
ccccggggccgggcagaatt

SEQ ID NO: 3722 - DNA, 20 bp, Homo sapiens
  source 1..20: mol_type = genomic DNA; note = Gene: FGR; note = Location (start to end; relative to TSS): FGR_48_78; note = Orientation (relative to transcription): antisense; note = sgRNA Position: 27635133; note = Sequence Name: 56322-704_101_SL_seq_3722
gccgcgagtgccggcgtgcg

SEQ ID NO: 3723 - DNA, 20 bp, Homo sapiens
  source 1..20: mol_type = genomic DNA; note = Gene: FGR; note = Location (start to end; relative to TSS): FGR_79_109; note = Orientation (relative to transcription): antisense; note = sgRNA Position: 27635102; note = Sequence Name: 56322-704_101_SL_seq_3723
gccccggggtgagccagccg

SEQ ID NO: 3724 - DNA, 20 bp, Homo sapiens
  source 1..20: mol_type = genomic DNA; note = Gene: FGR; note = Location (start to end; relative to TSS): FGR_39_69; note = Orientation (relative to transcription): antisense; note = sgRNA Position: 27635142; note = Sequence Name: 56322-704_101_SL_seq_3724
gccggcgtgcggggagaact

SEQ ID NO: 3725 - DNA, 20 bp, Homo sapiens
  source 1..20: mol_type = genomic DNA; note = Gene: FGR; note = Location (start to end; relative to TSS): FGR_69_99; note = Orientation (relative to transcription): sense; note = sgRNA Position: 27635092; note = Sequence Name: 56322-704_101_SL_seq_3725
gccccggctggctcaccccg

SEQ ID NO: 3726 - DNA, 20 bp, Homo sapiens
  source 1..20: mol_type = genomic DNA; note = Gene: FGR; note = Location (start to end; relative to TSS): FGR_38_68; note = Orientation (relative to transcription): antisense; note = sgRNA Position: 27635143; note = Sequence Name: 56322-704_101_SL_seq_3726
ccggcgtgcggggagaactg

SEQ ID NO: 3727 - DNA, 20 bp, Homo sapiens
  source 1..20: mol_type = genomic DNA; note = Gene: FGR; note = Location (start to end; relative to TSS): FGR_68_98; note = Orientation (relative to transcription): sense; note = sgRNA Position: 27635093; note = Sequence Name: 56322-704_101_SL_seq_3727
agccccggctggctcacccc

SEQ ID NO: 3728 - DNA, 20 bp, Homo sapiens
  source 1..20: mol_type = genomic DNA; note = Gene: FGR; note = Location (start to end; relative to TSS): FGR_29_59; note = Orientation (relative to transcription): sense; note = sgRNA Position: 27635132; note = Sequence Name: 56322-704_101_SL_seq_3728
ccccagttctccccgcacgc

SEQ ID NO: 3729 - DNA, 20 bp, Homo sapiens
  source 1..20: mol_type = genomic DNA; note = Gene: FGR; note = Location (start to end; relative to TSS): FGR_67_97; note = Orientation (relative to transcription): sense; note = sgRNA Position: 27635094; note = Sequence Name: 56322-704_101_SL_seq_3729
gagccccggctggctcaccc

SEQ ID NO: 3730 - DNA, 20 bp, Homo sapiens
  source 1..20: mol_type = genomic DNA; note = Gene: FJX1; note = Location (start to end; relative to TSS): FJX1_33_63; note = Orientation (relative to transcription): antisense; note = sgRNA Position: 35618499; note = Sequence Name: 56322-704_101_SL_seq_3730
cgcggccgcggggcgctgcg

SEQ ID NO: 3731 - DNA, 20 bp, Homo sapiens
  source 1..20: mol_type = genomic DNA; note = Gene: FJX1; note = Location (start to end; relative to TSS): FJX1_77_107; note = Orientation (relative to transcription): antisense; note = sgRNA Position: 35618543; note = Sequence Name: 56322-704_101_SL_seq_3731
ccggcagtttgtgggctccg

SEQ ID NO: 3732 - DNA, 20 bp, Homo sapiens
  source 1..20: mol_type = genomic DNA; note = Gene: FJX1; note = Location (start to end; relative to TSS): FJX1_35_65; note = Orientation (relative to transcription): antisense; note = sgRNA Position: 35618501; note = Sequence Name: 56322-704_101_SL_seq_3732
atcgcggccgcggggcgctg

SEQ ID NO: 3733 - DNA, 20 bp, Homo sapiens
  source 1..20: mol_type = genomic DNA; note = Gene: FJX1; note = Location (start to end; relative to TSS): FJX1_70_100; note = Orientation (relative to transcription): antisense; note = sgRNA Position: 35618536; note = Sequence Name: 56322-704_101_SL_seq_3733
tttgtgggctccggggcttc

SEQ ID NO: 3734 - DNA, 20 bp, Homo sapiens
  source 1..20: mol_type = genomic DNA; note = Gene: FJX1; note = Location (start to end; relative to TSS): FJX1_23_53; note = Orientation (relative to transcription): antisense; note = sgRNA Position: 35618489; note = Sequence Name: 56322-704_101_SL_seq_3734
gggcgctgcggggctctgtc

SEQ ID NO: 3735 - DNA, 20 bp, Homo sapiens
  source 1..20: mol_type = genomic DNA; note = Gene: FJX1; note = Location (start to end; relative to TSS): FJX1_69_99; note = Orientation (relative to transcription): sense; note = sgRNA Position: 35618555; note = Sequence Name: 56322-704_101_SL_seq_3735
cccggagcccacaaactgcc

SEQ ID NO: 3736 - DNA, 20 bp, Homo sapiens
  source 1..20: mol_type = genomic DNA; note = Gene: FJX1; note = Location (start to end; relative to TSS): FJX1_28_58; note = Orientation (relative to transcription): sense; note = sgRNA Position: 35618514; note = Sequence Name: 56322-704_101_SL_seq_3736
gcagcgccccgcggccgcga

SEQ ID NO: 3737 - DNA, 20 bp, Homo sapiens
  source 1..20: mol_type = genomic DNA; note = Gene: FJX1; note = Location (start to end; relative to TSS): FJX1_68_98; note = Orientation (relative to transcription): sense; note = sgRNA Position: 35618554; note = Sequence Name: 56322-704_101_SL_seq_3737
ccccggagcccacaaactgc

SEQ ID NO: 3738 - DNA, 20 bp, Homo sapiens
  source 1..20: mol_type = genomic DNA; note = Gene: FJX1; note = Location (start to end; relative to TSS): FJX1_30_60; note = Orientation (relative to transcription): sense; note = sgRNA Position: 35618516; note = Sequence Name: 56322-704_101_SL_seq_3738
agcgccccgcggccgcgatg

SEQ ID NO: 3739 - DNA, 20 bp, Homo sapiens
  source 1..20: mol_type = genomic DNA; note = Gene: FJX1; note = Location (start to end; relative to TSS): FJX1_62_92; note = Orientation (relative to transcription): antisense; note = sgRNA Position: 35618528; note = Sequence Name: 56322-704_101_SL_seq_3739
ctccggggcttcgggcgctt

SEQ ID NO: 3740 - DNA, 20 bp, Homo sapiens
  source 1..20: mol_type = genomic DNA; note = Gene: FLT1; note = Location (start to end; relative to TSS): FLT1_39_69; note = Orientation (relative to transcription): sense; note = sgRNA Position: 28495065; note = Sequence Name: 56322-704_101_SL_seq_3740
cggctcctccccggcagcgg

SEQ ID NO: 3741 - DNA, 20 bp, Homo sapiens
  source 1..20: mol_type = genomic DNA; note = Gene: FLT1; note = Location (start to end; relative to TSS): FLT1_82_112; note = Orientation (relative to transcription): sense; note = sgRNA Position: 28495022; note = Sequence Name: 56322-704_101_SL_seq_3741
ggctcgggtgcagcggccag

SEQ ID NO: 3742 - DNA, 20 bp, Homo sapiens
  source 1..20: mol_type = genomic DNA; note = Gene: FLT1; note = Location (start to end; relative to TSS): FLT1_42_72; note = Orientation (relative to transcription): sense; note = sgRNA Position: 28495062; note = Sequence Name: 56322-704_101_SL_seq_3742
ctcctccccggcagcggcgg

SEQ ID NO: 3743 - DNA, 20 bp, Homo sapiens
  source 1..20: mol_type = genomic DNA; note = Gene: FLT1; note = Location (start to end; relative to TSS): FLT1_75_105; note = Orientation (relative to transcription): sense; note = sgRNA Position: 28495029; note = Sequence Name: 56322-704_101_SL_seq_3743
gctccggggctcgggtgcag

SEQ ID NO: 3744 - DNA, 20 bp, Homo sapiens
  source 1..20: mol_type = genomic DNA; note = Gene: FLT1; note = Location (start to end; relative to TSS): FLT1_36_66; note = Orientation (relative to transcription): sense; note = sgRNA Position: 28495068; note = Sequence Name: 56322-704_101_SL_seq_3744
tctcggctcctccccggcag

SEQ ID NO: 3745 - DNA, 20 bp, Homo sapiens
  source 1..20: mol_type = genomic DNA; note = Gene: FLT1; note = Location (start to end; relative to TSS): FLT1_67_97; note = Orientation (relative to transcription): sense; note = sgRNA Position: 28495037; note = Sequence Name: 56322-704_101_SL_seq_3745
cggagcgggctccggggctc

SEQ ID NO: 3746 - DNA, 20 bp, Homo sapiens
  source 1..20: mol_type = genomic DNA; note = Gene: FLT1; note = Location (start to end; relative to TSS): FLT1_30_60; note = Orientation (relative to transcription): sense; note = sgRNA Position: 28495074; note = Sequence Name: 56322-704_101_SL_seq_3746
cactcctctcggctcctccc

SEQ ID NO: 3747 - DNA, 20 bp, Homo sapiens
  source 1..20: mol_type = genomic DNA; note = Gene: FLT1; note = Location (start to end; relative to TSS): FLT1_61_91; note = Orientation (relative to transcription): sense; note = sgRNA Position: 28495043; note = Sequence Name: 56322-704_101_SL_seq_3747
gcggctcggagcgggctccg

SEQ ID NO: 3748 - DNA, 20 bp, Homo sapiens
  source 1..20: mol_type = genomic DNA; note = Gene: FLT1; note = Location (start to end; relative to TSS): FLT1_19_49; note = Orientation (relative to transcription): sense; note = sgRNA Position: 28495085; note = Sequence Name: 56322-704_101_SL_seq_3748
cgccaggcggacactcctct

SEQ ID NO: 3749 - DNA, 20 bp, Homo sapiens
  source 1..20: mol_type = genomic DNA; note = Gene: FLT1; note = Location (start to end; relative to TSS): FLT1_52_82; note = Orientation (relative to transcription): sense; note = sgRNA Position: 28495052; note = Sequence Name: 56322-704_101_SL_seq_3749
gcagcggcggcggctcggag

SEQ ID NO: 3750 - DNA, 20 bp, Homo sapiens
  source 1..20: mol_type = genomic DNA; note = Gene: FLT3; note = Location (start to end; relative to TSS): FLT3_41_71; note = Orientation (relative to transcription): antisense; note = sgRNA Position: 28100531; note = Sequence Name: 56322-704_101_SL_seq_3750
ctccggagcccggggtcccc

SEQ ID NO: 3751 - DNA, 20 bp, Homo sapiens
  source 1..20: mol_type = genomic DNA; note = Gene: FLT3; note = Location (start to end; relative to TSS): FLT3_79_109; note = Orientation (relative to transcription): sense; note = sgRNA Position: 28100473; note = Sequence Name: 56322-704_101_SL_seq_3751
ggcggccagctgccgctgct

SEQ ID NO: 3752 - DNA, 20 bp, Homo sapiens
  source 1..20: mol_type = genomic DNA; note = Gene: FLT3; note = Location (start to end; relative to TSS): FLT3_32_62; note = Orientation (relative to transcription): antisense; note = sgRNA Position: 28100540; note = Sequence Name: 56322-704_101_SL_seq_3752
ccggggtccccaggccgcgc

SEQ ID NO: 3753 - DNA, 20 bp, Homo sapiens
  source 1..20: mol_type = genomic DNA; note = Gene: FLT3; note = Location (start to end; relative to TSS): FLT3_70_100; note = Orientation (relative to transcription): antisense; note = sgRNA Position: 28100502; note = Sequence Name: 56322-704_101_SL_seq_3753
ccgccgtcgcgcgccaacgc

SEQ ID NO: 3754 - DNA, 20 bp, Homo sapiens
  source 1..20: mol_type = genomic DNA; note = Gene: FLT3; note = Location (start to end; relative to TSS): FLT3_33_63; note = Orientation (relative to transcription): sense; note = sgRNA Position: 28100519; note = Sequence Name: 56322-704_101_SL_seq_3754
ctggggaccccgggctccgg

SEQ ID NO: 3755 - DNA, 20 bp, Homo sapiens
  source 1..20: mol_type = genomic DNA; note = Gene: FLT3; note = Location (start to end; relative to TSS): FLT3_65_95; note = Orientation (relative to transcription): antisense; note = sgRNA Position: 28100507; note = Sequence Name: 56322-704_101_SL_seq_3755
gtcgcgcgccaacgccggca

SEQ ID NO: 3756 - DNA, 20 bp, Homo sapiens
  source 1..20: mol_type = genomic DNA; note = Gene: FLT3; note = Location (start to end; relative to TSS): FLT3_30_60; note = Orientation (relative to transcription): sense; note = sgRNA Position: 28100522; note = Sequence Name: 56322-704_101_SL_seq_3756
ggcctggggaccccgggctc

SEQ ID NO: 3757 - DNA, 20 bp, Homo sapiens
  source 1..20: mol_type = genomic DNA; note = Gene: FLT3; note = Location (start to end; relative to TSS): FLT3_61_91; note = Orientation (relative to transcription): sense; note = sgRNA Position: 28100491; note = Sequence Name: 56322-704_101_SL_seq_3757
ccggcgttggcgcgcgacgg

SEQ ID NO: 3758 - DNA, 20 bp, Homo sapiens
  source 1..20: mol_type = genomic DNA; note = Gene: FLT3; note = Location (start to end; relative to TSS): FLT3_24_54; note = Orientation (relative to transcription): sense; note = sgRNA Position: 28100528; note = Sequence Name: 56322-704_101_SL_seq_3758
cggcgcggcctggggacccc

SEQ ID NO: 3759 - DNA, 20 bp, Homo sapiens
  source 1..20: mol_type = genomic DNA; note = Gene: FLT3; note = Location (start to end; relative to TSS): FLT3_58_88; note = Orientation (relative to transcription): sense; note = sgRNA Position: 28100494; note = Sequence Name: 56322-704_101_SL_seq_3759
atgccggcgttggcgcgcga

SEQ ID NO: 3760 - DNA, 20 bp, Homo sapiens
  source 1..20: mol_type = genomic DNA; note = Gene: FLT4; note = Location (start to end; relative to TSS): FLT4_33_63; note = Orientation (relative to transcription): sense; note = sgRNA Position: 180649543; note = Sequence Name: 56322-704_101_SL_seq_3760
cgcagcggccggagatgcag

SEQ ID NO: 3761 - DNA, 20 bp, Homo sapiens
  source 1..20: mol_type = genomic DNA; note = Gene: FLT4; note = Location (start to end; relative to TSS): FLT4_83_113; note = Orientation (relative to transcription): sense; note = sgRNA Position: 180649493; note = Sequence Name: 56322-704_101_SL_seq_3761
ctctgcctgggactcctgga

SEQ ID NO: 3762 - DNA, 20 bp, Homo sapiens
  source 1..20: mol_type = genomic DNA; note = Gene: FLT4; note = Location (start to end; relative to TSS): FLT4_34_64; note = Orientation (relative to transcription): sense; note = sgRNA Position: 180649542; note = Sequence Name: 56322-704_101_SL_seq_3762
gcagcggccggagatgcagc

SEQ ID NO: 3763 - DNA, 20 bp, Homo sapiens
  source 1..20: mol_type = genomic DNA; note = Gene: FLT4; note = Location (start to end; relative to TSS): FLT4_71_101; note = Orientation (relative to transcription): sense; note = sgRNA Position: 180649505; note = Sequence Name: 56322-704_101_SL_seq_3763
ctgcgactgtggctctgcct

SEQ ID NO: 3764 - DNA, 20 bp, Homo sapiens
  source 1..20: mol_type = genomic DNA; note = Gene: FLT4; note = Location (start to end; relative to TSS): FLT4_35_65; note = Orientation (relative to transcription): sense; note = sgRNA Position: 180649541; note = Sequence Name: 56322-704_101_SL_seq_3764
cagcggccggagatgcagcg

SEQ ID NO: 3765 - DNA, 20 bp, Homo sapiens
  source 1..20: mol_type = genomic DNA; note = Gene: FLT4; note = Location (start to end; relative to TSS): FLT4_69_99; note = Orientation (relative to transcription): antisense; note = sgRNA Position: 180649527; note = Sequence Name: 56322-704_101_SL_seq_3765
ccacagtcgcaggcacagcg

SEQ ID NO: 3766 - DNA, 20 bp, Homo sapiens
  source 1..20: mol_type = genomic DNA; note = Gene: FLT4; note = Location (start to end; relative to TSS): FLT4_22_52; note = Orientation (relative to transcription): antisense; note = sgRNA Position: 180649574; note = Sequence Name: 56322-704_101_SL_seq_3766
gcgcgtgggtccgacccgag

SEQ ID NO: 3767 - DNA, 20 bp, Homo sapiens
  source 1..20: mol_type = genomic DNA; note = Gene: FLT4; note = Location (start to end; relative to TSS): FLT4_60_90; note = Orientation (relative to transcription): sense; note = sgRNA Position: 180649516; note = Sequence Name: 56322-704_101_SL_seq_3767
ccgcgctgtgcctgcgactg

SEQ ID NO: 3768 - DNA, 20 bp, Homo sapiens
  source 1..20: mol_type = genomic DNA; note = Gene: FLT4; note = Location (start to end; relative to TSS): FLT4_18_48; note = Orientation (relative to transcription): sense; note = sgRNA Position: 180649558; note = Sequence Name: 56322-704_101_SL_seq_3768
cgggtcggacccacgcgcag

SEQ ID NO: 3769 - DNA, 20 bp, Homo sapiens
  source 1..20: mol_type = genomic DNA; note = Gene: FLT4; note = Location (start to end; relative to TSS): FLT4_50_80; note = Orientation (relative to transcription): antisense; note = sgRNA Position: 180649546; note = Sequence Name: 56322-704_101_SL_seq_3769
gcggcgccccgctgcatctc

SEQ ID NO: 3770 - DNA, 20 bp, Homo sapiens
  source 1..20: mol_type = genomic DNA; note = Gene: FN3K; note = Location (start to end; relative to TSS): FN3K_46_76; note = Orientation (relative to transcription): sense; note = sgRNA Position: 82735687; note = Sequence Name: 56322-704_101_SL_seq_3770
gcgaccctgcgggccttcgg

SEQ ID NO: 3771 - DNA, 20 bp, Homo sapiens
  source 1..20: mol_type = genomic DNA; note = Gene: FN3K; note = Location (start to end; relative to TSS): FN3K_86_116; note = Orientation (relative to transcription): antisense; note = sgRNA Position: 82735707; note = Sequence Name: 56322-704_101_SL_seq_3771
tcggccctcgctgatgcagc

SEQ ID NO: 3772 - DNA, 20 bp, Homo sapiens
  source 1..20: mol_type = genomic DNA; note = Gene: FN3K; note = Location (start to end; relative to TSS): FN3K_43_73; note = Orientation (relative to transcription): sense; note = sgRNA Position: 82735684; note = Sequence Name: 56322-704_101_SL_seq_3772
accgcgaccctgcgggcctt

SEQ ID NO: 3773 - DNA, 20 bp, Homo sapiens
  source 1..20: mol_type = genomic DNA; note = Gene: FN3K; note = Location (start to end; relative to TSS): FN3K_78_108; note = Orientation (relative to transcription): antisense; note = sgRNA Position: 82735699; note = Sequence Name: 56322-704_101_SL_seq_3773
cgctgatgcagccggcgccg

SEQ ID NO: 3774 - DNA, 20 bp, Homo sapiens
  source 1..20: mol_type = genomic DNA; note = Gene: FN3K; note = Location (start to end; relative to TSS): FN3K_35_65; note = Orientation (relative to transcription): sense; note = sgRNA Position: 82735676; note = Sequence Name: 56322-704_101_SL_seq_3774
agctgcgcaccgcgaccctg

SEQ ID NO: 3775 - DNA, 20 bp, Homo sapiens
  source 1..20: mol_type = genomic DNA; note = Gene: FN3K; note = Location (start to end; relative to TSS): FN3K_73_103; note = Orientation (relative to transcription): sense; note = sgRNA Position: 82735714; note = Sequence Name: 56322-704_101_SL_seq_3775
ggcgccggctgcatcagcga

SEQ ID NO: 3776 - DNA, 20 bp, Homo sapiens
  source 1..20: mol_type = genomic DNA; note = Gene: FN3K; note = Location (start to end; relative to TSS): FN3K_41_71; note = Orientation (relative to transcription): antisense; note = sgRNA Position: 82735662; note = Sequence Name: 56322-704_101_SL_seq_3776
cagggtcgcggtgcgcagct

SEQ ID NO: 3777 - DNA, 20 bp, Homo sapiens
  source 1..20: mol_type = genomic DNA; note = Gene: FN3K; note = Location (start to end; relative to TSS): FN3K_72_102; note = Orientation (relative to transcription): sense; note = sgRNA Position: 82735713; note = Sequence Name: 56322-704_101_SL_seq_3777
cggcgccggctgcatcagcg

SEQ ID NO: 3778 - DNA, 20 bp, Homo sapiens
  source 1..20: mol_type = genomic DNA; note = Gene: FN3K; note = Location (start to end; relative to TSS): FN3K_20_50; note = Orientation (relative to transcription): antisense; note = sgRNA Position: 82735641; note = Sequence Name: 56322-704_101_SL_seq_3778
ggcgcgcagcagctgctcca

SEQ ID NO: 3779 - DNA, 20 bp, Homo sapiens
  source 1..20: mol_type = genomic DNA; note = Gene: FN3K; note = Location (start to end; relative to TSS): FN3K_53_83; note = Orientation (relative to transcription): antisense; note = sgRNA Position: 82735674; note = Sequence Name: 56322-704_101_SL_seq_3779
gccgaaggcccgcagggtcg

SEQ ID NO: 3780 - DNA, 20 bp, Homo sapiens
  source 1..20: mol_type = genomic DNA; note = Gene: FRK; note = Location (start to end; relative to TSS): FRK_59_89; note = Orientation (relative to transcription): sense; note = sgRNA Position: 116060808; note = Sequence Name: 56322-704_101_SL_seq_3780
aggagagagccgtccagatc

SEQ ID NO: 3781 - DNA, 20 bp, Homo sapiens
  source 1..20: mol_type = genomic DNA; note = Gene: FRK; note = Location (start to end; relative to TSS): FRK_93_123; note = Orientation (relative to transcription): sense; note = sgRNA Position: 116060774; note = Sequence Name: 56322-704_101_SL_seq_3781
gacaggaacagacttgaaac

SEQ ID NO: 3782 - DNA, 20 bp, Homo sapiens
  source 1..20: mol_type = genomic DNA; note = Gene: FRK; note = Location (start to end; relative to TSS): FRK_38_68; note = Orientation (relative to transcription): antisense; note = sgRNA Position: 116060849; note = Sequence Name: 56322-704_101_SL_seq_3782
aatgaataaccaaccagcag

SEQ ID NO: 3783 - DNA, 20 bp, Homo sapiens
  source 1..20: mol_type = genomic DNA; note = Gene: FRK; note = Location (start to end; relative to TSS): FRK_77_107; note = Orientation (relative to transcription): antisense; note = sgRNA Position: 116060810; note = Sequence Name: 56322-704_101_SL_seq_3783
tcgaccagtccggatctgga

SEQ ID NO: 3784 - DNA, 20 bp, Homo sapiens
  source 1..20: mol_type = genomic DNA; note = Gene: FRK; note = Location (start to end; relative to TSS): FRK_39_69; note = Orientation (relative to transcription): sense; note = sgRNA Position: 116060828; note = Sequence Name: 56322-704_101_SL_seq_3784
ttggttattcattagcaaaa

SEQ ID NO: 3785 - DNA, 20 bp, Homo sapiens
  source 1..20: mol_type = genomic DNA; note = Gene: FRK; note = Location (start to end; relative to TSS): FRK_76_106; note = Orientation (relative to transcription): sense; note = sgRNA Position: 116060791; note = Sequence Name: 56322-704_101_SL_seq_3785
atccggactggtcgaaagac

SEQ ID NO: 3786 - DNA, 20 bp, Homo sapiens
  source 1..20: mol_type = genomic DNA; note = Gene: FRK; note = Location (start to end; relative to TSS): FRK_20_50; note = Orientation (relative to transcription): sense; note = sgRNA Position: 116060847; note = Sequence Name: 56322-704_101_SL_seq_3786
aggcaacagcctctgctggt

SEQ ID NO: 3787 - DNA, 20 bp, Homo sapiens
  source 1..20: mol_type = genomic DNA; note = Gene: FRK; note = Location (start to end; relative to TSS): FRK_64_94; note = Orientation (relative to transcription): sense; note = sgRNA Position: 116060803; note = Sequence Name: 56322-704_101_SL_seq_3787
agagccgtccagatccggac

SEQ ID NO: 3788 - DNA, 20 bp, Homo sapiens
  source 1..20: mol_type = genomic DNA; note = Gene: FRK; note = Location (start to end; relative to TSS): FRK_16_46; note = Orientation (relative to transcription): sense; note = sgRNA Position: 116060851; note = Sequence Name: 56322-704_101_SL_seq_3788
ttaaaggcaacagcctctgc

SEQ ID NO: 3789 - DNA, 20 bp, Homo sapiens
  source 1..20: mol_type = genomic DNA; note = Gene: FRK; note = Location (start to end; relative to TSS): FRK_59_89; note = Orientation (relative to transcription): sense; note = sgRNA Position: 116060808; note = Sequence Name: 56322-704_101_SL_seq_3789
aggagagagccgtccagatc

SEQ ID NO: 3790 - DNA, 20 bp, Homo sapiens
  source 1..20: mol_type = genomic DNA; note = Gene: FYN; note = Location (start to end; relative to TSS): FYN_51_81; note = Orientation (relative to transcription): sense; note = sgRNA Position: 111873377; note = Sequence Name: 56322-704_101_SL_seq_3790
gttgcgccatctgtcaggag

SEQ ID NO: 3791 - DNA, 20 bp, Homo sapiens
  source 1..20: mol_type = genomic DNA; note = Gene: FYN; note = Location (start to end; relative to TSS): FYN_85_115; note = Orientation (relative to transcription): antisense; note = sgRNA Position: 111873363; note = Sequence Name: 56322-704_101_SL_seq_3791
cgcggcagccccctcctcgc

SEQ ID NO: 3792 - DNA, 20 bp, Homo sapiens
  source 1..20: mol_type = genomic DNA; note = Gene: FYN; note = Location (start to end; relative to TSS): FYN_46_76; note = Orientation (relative to transcription): sense; note = sgRNA Position: 111873382; note = Sequence Name: 56322-704_101_SL_seq_3792
ttgcagttgcgccatctgtc

SEQ ID NO: 3793 - DNA, 20 bp, Homo sapiens
  source 1..20: mol_type = genomic DNA; note = Gene: FYN; note = Location (start to end; relative to TSS): FYN_77_107; note = Orientation (relative to transcription): sense; note = sgRNA Position: 111873351; note = Sequence Name: 56322-704_101_SL_seq_3793
cggcgaggagggggctgccg

SEQ ID NO: 3794 - DNA, 20 bp, Homo sapiens
  source 1..20: mol_type = genomic DNA; note = Gene: FYN; note = Location (start to end; relative to TSS): FYN_30_60; note = Orientation (relative to transcription): antisense; note = sgRNA Position: 111873418; note = Sequence Name: 56322-704_101_SL_seq_3794
acgcgccgccgccaccagcg

SEQ ID NO: 3795 - DNA, 20 bp, Homo sapiens
  source 1..20: mol_type = genomic DNA; note = Gene: FYN; note = Location (start to end; relative to TSS): FYN_62_92; note = Orientation (relative to transcription): sense; note = sgRNA Position: 111873366; note = Sequence Name: 56322-704_101_SL_seq_3795
tgtcaggagcggagccggcg

SEQ ID NO: 3796 - DNA, 20 bp, Homo sapiens
  source 1..20: mol_type = genomic DNA; note = Gene: FYN; note = Location (start to end; relative to TSS): FYN_16_46; note = Orientation (relative to transcription): sense; note = sgRNA Position: 111873412; note = Sequence Name: 56322-704_101_SL_seq_3796
agcagccgcgctggtggcgg

SEQ ID NO: 3797 - DNA, 20 bp, Homo sapiens
  source 1..20: mol_type = genomic DNA; note = Gene: FYN; note = Location (start to end; relative to TSS): FYN_51_81; note = Orientation (relative to transcription): sense; note = sgRNA Position: 111873377; note = Sequence Name: 56322-704_101_SL_seq_3797
gttgcgccatctgtcaggag

SEQ ID NO: 3798 - DNA, 20 bp, Homo sapiens
  source 1..20: mol_type = genomic DNA; note = Gene: FYN; note = Location (start to end; relative to TSS): FYN_13_43; note = Orientation (relative to transcription): sense; note = sgRNA Position: 111873415; note = Sequence Name: 56322-704_101_SL_seq_3798
gcgagcagccgcgctggtgg

SEQ ID NO: 3799 - DNA, 20 bp, Homo sapiens
  source 1..20: mol_type = genomic DNA; note = Gene: FYN; note = Location (start to end; relative to TSS): FYN_46_76; note = Orientation (relative to transcription): sense; note = sgRNA Position: 111873382; note = Sequence Name: 56322-704_101_SL_seq_3799
ttgcagttgcgccatctgtc

SEQ ID NO: 3800 - DNA, 20 bp, Homo sapiens
  source 1..20: mol_type = genomic DNA; note = Gene: GAK; note = Location (start to end; relative to TSS): GAK_40_70; note = Orientation (relative to transcription): sense; note = sgRNA Position: 932252; note = Sequence Name: 56322-704_101_SL_seq_3800
ctgagctgacccggacggcg

SEQ ID NO: 3801 - DNA, 20 bp, Homo sapiens
  source 1..20: mol_type = genomic DNA; note = Gene: GAK; note = Location (start to end; relative to TSS): GAK_81_111; note = Orientation (relative to transcription): antisense; note = sgRNA Position: 932231; note = Sequence Name: 56322-704_101_SL_seq_3801
cagccggagtggtcgggctc

SEQ ID NO: 3802 - DNA, 20 bp, Homo sapiens
  source 1..20: mol_type = genomic DNA; note = Gene: GAK; note = Location (start to end; relative to TSS): GAK_31_61; note = Orientation (relative to transcription): antisense; note = sgRNA Position: 932281; note = Sequence Name: 56322-704_101_SL_seq_3802
ctcagcaaccgccggcccgg

SEQ ID NO: 3803 - DNA, 20 bp, Homo sapiens
  source 1..20: mol_type = genomic DNA; note = Gene: GAK; note = Location (start to end; relative to TSS): GAK_80_110; note = Orientation (relative to transcription): sense; note = sgRNA Position: 932212; note = Sequence Name: 56322-704_101_SL_seq_3803
cgaccactccggctgccgcg

SEQ ID NO: 3804 - DNA, 20 bp, Homo sapiens
  source 1..20: mol_type = genomic DNA; note = Gene: GAK; note = Location (start to end; relative to TSS): GAK_34_64; note = Orientation (relative to transcription): antisense; note = sgRNA Position: 932278; note = Sequence Name: 56322-704_101_SL_seq_3804
cagctcagcaaccgccggcc

SEQ ID NO: 3805 - DNA, 20 bp, Homo sapiens
  source 1..20: mol_type = genomic DNA; note = Gene: GAK; note = Location (start to end; relative to TSS): GAK_79_109; note = Orientation (relative to transcription): sense; note = sgRNA Position: 932213; note = Sequence Name: 56322-704_101_SL_seq_3805
ccgaccactccggctgccgc

SEQ ID NO: 3806 - DNA, 20 bp, Homo sapiens
  source 1..20: mol_type = genomic DNA; note = Gene: GAK; note = Location (start to end; relative to TSS): GAK_35_65; note = Orientation (relative to transcription): sense; note = sgRNA Position: 932257; note = Sequence Name: 56322-704_101_SL_seq_3806
ggttgctgagctgacccgga

SEQ ID NO: 3807 - DNA, 20 bp, Homo sapiens
  source 1..20: mol_type = genomic DNA; note = Gene: GAK; note = Location (start to end; relative to TSS): GAK_78_108; note = Orientation (relative to transcription): sense; note = sgRNA Position: 932214; note = Sequence Name: 56322-704_101_SL_seq_3807
cccgaccactccggctgccg

SEQ ID NO: 3808 - DNA, 20 bp, Homo sapiens
  source 1..20: mol_type = genomic DNA; note = Gene: GAK; note = Location (start to end; relative to TSS): GAK_39_69; note = Orientation (relative to transcription): antisense; note = sgRNA Position: 932273; note = Sequence Name: 56322-704_101_SL_seq_3808
cgggtcagctcagcaaccgc

SEQ ID NO: 3809 - DNA, 20 bp, Homo sapiens
  source 1..20: mol_type = genomic DNA; note = Gene: GAK; note = Location (start to end; relative to TSS): GAK_69_99; note = Orientation (relative to transcription): sense; note = sgRNA Position: 932223; note = Sequence Name: 56322-704_101_SL_seq_3809
gagcccgagcccgaccactc

SEQ ID NO: 3810 - DNA, 20 bp, Homo sapiens
  source 1..20: mol_type = genomic DNA; note = Gene: GASK1A; note = Location (start to end; relative to TSS): GASK1A_48_78; note = Orientation (relative to transcription): antisense; note = sgRNA Position: 42979365; note = Sequence Name: 56322-704_101_SL_seq_3810
gatctgagggagcctacccg

SEQ ID NO: 3811 - DNA, 20 bp, Homo sapiens
  source 1..20: mol_type = genomic DNA; note = Gene: GASK1A; note = Location (start to end; relative to TSS): GASK1A_82_112; note = Orientation (relative to transcription): sense; note = sgRNA Position: 42979419; note = Sequence Name: 56322-704_101_SL_seq_3811
cggcgtgtattccccacccg

SEQ ID NO: 3812 - DNA, 20 bp, Homo sapiens
  source 1..20: mol_type = genomic DNA; note = Gene: GASK1A; note = Location (start to end; relative to TSS): GASK1A_32_62; note = Orientation (relative to transcription): antisense; note = sgRNA Position: 42979349; note = Sequence Name: 56322-704_101_SL_seq_3812
cccgcggccgcgagcctctg

SEQ ID NO: 3813 - DNA, 20 bp, Homo sapiens
  source 1..20: mol_type = genomic DNA; note = Gene: GASK1A; note = Location (start to end; relative to TSS): GASK1A_70_100; note = Orientation (relative to transcription): antisense; note = sgRNA Position: 42979387; note = Sequence Name: 56322-704_101_SL_seq_3813
cggatctactgagatctacg

SEQ ID NO: 3814 - DNA, 20 bp, Homo sapiens
  source 1..20: mol_type = genomic DNA; note = Gene: GASK1A; note = Location (start to end; relative to TSS): GASK1A_22_52; note = Orientation (relative to transcription): antisense; note = sgRNA Position: 42979339; note = Sequence Name: 56322-704_101_SL_seq_3814
cgagcctctgcggtctactc

SEQ ID NO: 3815 - DNA, 20 bp, Homo sapiens
  source 1..20: mol_type = genomic DNA; note = Gene: GASK1A; note = Location (start to end; relative to TSS): GASK1A_62_92; note = Orientation (relative to transcription): antisense; note = sgRNA Position: 42979379; note = Sequence Name: 56322-704_101_SL_seq_3815
ctgagatctacggggatctg

SEQ ID NO: 3816 - DNA, 20 bp, Homo sapiens
  source 1..20: mol_type = genomic DNA; note = Gene: GASK1A; note = Location (start to end; relative to TSS): GASK1A_27_57; note = Orientation (relative to transcription): sense; note = sgRNA Position: 42979364; note = Sequence Name: 56322-704_101_SL_seq_3816
agaggctcgcggccgcgggt

SEQ ID NO: 3817 - DNA, 20 bp, Homo sapiens
  source 1..20: mol_type = genomic DNA; note = Gene: GASK1A; note = Location (start to end; relative to TSS): GASK1A_61_91; note = Orientation (relative to transcription): antisense; note = sgRNA Position: 42979378; note = Sequence Name: 56322-704_101_SL_seq_3817
tgagatctacggggatctga

SEQ ID NO: 3818 - DNA, 20 bp, Homo sapiens
  source 1..20: mol_type = genomic DNA; note = Gene: GASK1A; note = Location (start to end; relative to TSS): GASK1A_9_39; note = Orientation (relative to transcription): sense; note = sgRNA Position: 42979346; note = Sequence Name: 56322-704_101_SL_seq_3818
aagtcccgagtagaccgcag

SEQ ID NO: 3819 - DNA, 20 bp, Homo sapiens
  source 1..20: mol_type = genomic DNA; note = Gene: GASK1A; note = Location (start to end; relative to TSS): GASK1A_48_78; note = Orientation (relative to transcription): antisense; note = sgRNA Position: 42979365; note = Sequence Name: 56322-704_101_SL_seq_3819
gatctgagggagcctacccg

SEQ ID NO: 3820 - DNA, 20 bp, Homo sapiens
  source 1..20: mol_type = genomic DNA; note = Gene: GASK1B; note = Location (start to end; relative to TSS): GASK1B_95_125; note = Orientation (relative to transcription): sense; note = sgRNA Position: 158172906; note = Sequence Name: 56322-704_101_SL_seq_3820
aggccttctctttccagaac

SEQ ID NO: 3821 - DNA, 20 bp, Homo sapiens
  source 1..20: mol_type = genomic DNA; note = Gene: GASK1B; note = Location (start to end; relative to TSS): GASK1B_128_158; note = Orientation (relative to transcription): sense; note = sgRNA Position: 158172873; note = Sequence Name: 56322-704_101_SL_seq_3821
atgaaacggccaagatggta

SEQ ID NO: 3822 - DNA, 20 bp, Homo sapiens
  source 1..20: mol_type = genomic DNA; note = Gene: GASK1B; note = Location (start to end; relative to TSS): GASK1B_85_115; note = Orientation (relative to transcription): antisense; note = sgRNA Position: 158172936; note = Sequence Name: 56322-704_101_SL_seq_3822
gcctagaagttcagaaaaaa

SEQ ID NO: 3823 - DNA, 20 bp, Homo sapiens
  source 1..20: mol_type = genomic DNA; note = Gene: GASK1B; note = Location (start to end; relative to TSS): GASK1B_123_153; note = Orientation (relative to transcription): sense; note = sgRNA Position: 158172878; note = Sequence Name: 56322-704_101_SL_seq_3823
gacaaatgaaacggccaaga

SEQ ID NO: 3824 - DNA, 20 bp, Homo sapiens
  source 1..20: mol_type = genomic DNA; note = Gene: GASK1B; note = Location (start to end; relative to TSS): GASK1B_18_48; note = Orientation (relative to transcription): antisense; note = sgRNA Position: 158173003; note = Sequence Name: 56322-704_101_SL_seq_3824
gataagagtacacacagata

SEQ ID NO: 3825 - DNA, 20 bp, Homo sapiens
  source 1..20: mol_type = genomic DNA; note = Gene: GASK1B; note = Location (start to end; relative to TSS): GASK1B_85_115; note = Orientation (relative to transcription): antisense; note = sgRNA Position: 158172936; note = Sequence Name: 56322-704_101_SL_seq_3825
gcctagaagttcagaaaaaa

SEQ ID NO: 3826 - DNA, 20 bp, Homo sapiens
  source 1..20: mol_type = genomic DNA; note = Gene: GASK1B; note = Location (start to end; relative to TSS): GASK1B_-11_19; note = Orientation (relative to transcription): antisense; note = sgRNA Position: 158173032; note = Sequence Name: 56322-704_101_SL_seq_3826
atttatagtgtgcaattgca

SEQ ID NO: 3827 - DNA, 20 bp, Homo sapiens
  source 1..20: mol_type = genomic DNA; note = Gene: GASK1B; note = Location (start to end; relative to TSS): GASK1B_60_90; note = Orientation (relative to transcription): antisense; note = sgRNA Position: 158172961; note = Sequence Name: 56322-704_101_SL_seq_3827
agaaagagttaatataaatg

SEQ ID NO: 3828 - DNA, 20 bp, Homo sapiens
  source 1..20: mol_type = genomic DNA; note = Gene: GASK1B; note = Location (start to end; relative to TSS): GASK1B_-30_0; note = Orientation (relative to transcription): antisense; note = sgRNA Position: 158173051; note = Sequence Name: 56322-704_101_SL_seq_3828
acggtgcaacagttcacaaa

SEQ ID NO: 3829 - DNA, 20 bp, Homo sapiens
  source 1..20: mol_type = genomic DNA; note = Gene: GASK1B; note = Location (start to end; relative to TSS): GASK1B_18_48; note = Orientation (relative to transcription): antisense; note = sgRNA Position: 158173003; note = Sequence Name: 56322-704_101_SL_seq_3829
gataagagtacacacagata

SEQ ID NO: 3830 - DNA, 20 bp, Homo sapiens
  source 1..20: mol_type = genomic DNA; note = Gene: GK; note = Location (start to end; relative to TSS): GK_51_81; note = Orientation (relative to transcription): sense; note = sgRNA Position: 30653500; note = Sequence Name: 56322-704_101_SL_seq_3830
gccgccgtcacccaggaaac

SEQ ID NO: 3831 - DNA, 20 bp, Homo sapiens
  source 1..20: mol_type = genomic DNA; note = Gene: GK; note = Location (start to end; relative to TSS): GK_96_126; note = Orientation (relative to transcription): antisense; note = sgRNA Position: 30653525; note = Sequence Name: 56322-704_101_SL_seq_3831
ccatgaaaccagcttcaggt

SEQ ID NO: 3832 - DNA, 20 bp, Homo sapiens
  source 1..20: mol_type = genomic DNA; note = Gene: GK; note = Location (start to end; relative to TSS): GK_52_82; note = Orientation (relative to transcription): antisense; note = sgRNA Position: 30653481; note = Sequence Name: 56322-704_101_SL_seq_3832
ctgggtgacggcggcgggag

SEQ ID NO: 3833 - DNA, 20 bp, Homo sapiens
  source 1..20: mol_type = genomic DNA; note = Gene: GK; note = Location (start to end; relative to TSS): GK_92_122; note = Orientation (relative to transcription): antisense; note = sgRNA Position: 30653521; note = Sequence Name: 56322-704_101_SL_seq_3833
gaaaccagcttcaggtcggc

SEQ ID NO: 3834 - DNA, 20 bp, Homo sapiens
  source 1..20: mol_type = genomic DNA; note = Gene: GK; note = Location (start to end; relative to TSS): GK_47_77; note = Orientation (relative to transcription): antisense; note = sgRNA Position: 30653476; note = Sequence Name: 56322-704_101_SL_seq_3834
tgacggcggcgggaggggga

SEQ ID NO: 3835 - DNA, 20 bp, Homo sapiens
  source 1..20: mol_type = genomic DNA; note = Gene: GK; note = Location (start to end; relative to TSS): GK_87_117; note = Orientation (relative to transcription): sense; note = sgRNA Position: 30653536; note = Sequence Name: 56322-704_101_SL_seq_3835
ccgacctgaagctggtttca

SEQ ID NO: 3836 - DNA, 20 bp, Homo sapiens
  source 1..20: mol_type = genomic DNA; note = Gene: GK; note = Location (start to end; relative to TSS): GK_44_74; note = Orientation (relative to transcription): sense; note = sgRNA Position: 30653493; note = Sequence Name: 56322-704_101_SL_seq_3836
ccctcccgccgccgtcaccc

SEQ ID NO: 3837 - DNA, 20 bp, Homo sapiens
  source 1..20: mol_type = genomic DNA; note = Gene: GK; note = Location (start to end; relative to TSS): GK_83_113; note = Orientation (relative to transcription): antisense; note = sgRNA Position: 30653512; note = Sequence Name: 56322-704_101_SL_seq_3837
ttcaggtcggccggcgattg

SEQ ID NO: 3838 - DNA, 20 bp, Homo sapiens
  source 1..20: mol_type = genomic DNA; note = Gene: GK; note = Location (start to end; relative to TSS): GK_42_72; note = Orientation (relative to transcription): antisense; note = sgRNA Position: 30653471; note = Sequence Name: 56322-704_101_SL_seq_3838
gcggcgggagggggaggggc

SEQ ID NO: 3839 - DNA, 20 bp, Homo sapiens
  source 1..20: mol_type = genomic DNA; note = Gene: GK; note = Location (start to end; relative to TSS): GK_79_109; note = Orientation (relative to transcription): sense; note = sgRNA Position: 30653528; note = Sequence Name: 56322-704_101_SL_seq_3839
atcgccggccgacctgaagc

SEQ ID NO: 3840 - DNA, 20 bp, Homo sapiens
  source 1..20: mol_type = genomic DNA; note = Gene: GK2; note = Location (start to end; relative to TSS): GK2_34_64; note = Orientation (relative to transcription): sense; note = sgRNA Position: 79408170; note = Sequence Name: 56322-704_101_SL_seq_3840
gacagcagctgtggggccgt

SEQ ID NO: 3841 - DNA, 20 bp, Homo sapiens
  source 1..20: mol_type = genomic DNA; note = Gene: GK2; note = Location (start to end; relative to TSS): GK2_97_127; note = Orientation (relative to transcription): sense; note = sgRNA Position: 79408107; note = Sequence Name: 56322-704_101_SL_seq_3841
ggttttcaattcaaaaacag

SEQ ID NO: 3842 - DNA, 20 bp, Homo sapiens
  source 1..20: mol_type = genomic DNA; note = Gene: GK2; note = Location (start to end; relative to TSS): GK2_36_66; note = Orientation (relative to transcription): antisense; note = sgRNA Position: 79408188; note = Sequence Name: 56322-704_101_SL_seq_3842
ccccacagctgctgtctttg

SEQ ID NO: 3843 - DNA, 20 bp, Homo sapiens
  source 1..20: mol_type = genomic DNA; note = Gene: GK2; note = Location (start to end; relative to TSS): GK2_93_123; note = Orientation (relative to transcription): antisense; note = sgRNA Position: 79408131; note = Sequence Name: 56322-704_101_SL_seq_3843
attgaaaaccagaaagcgag

SEQ ID NO: 3844 - DNA, 20 bp, Homo sapiens
  source 1..20: mol_type = genomic DNA; note = Gene: GK2; note = Location (start to end; relative to TSS): GK2_27_57; note = Orientation (relative to transcription): sense; note = sgRNA Position: 79408177; note = Sequence Name: 56322-704_101_SL_seq_3844
ccccaaagacagcagctgtg

SEQ ID NO: 3845 - DNA, 20 bp, Homo sapiens
  source 1..20: mol_type = genomic DNA; note = Gene: GK2; note = Location (start to end; relative to TSS): GK2_87_117; note = Orientation (relative to transcription): antisense; note = sgRNA Position: 79408137; note = Sequence Name: 56322-704_101_SL_seq_3845
aaccagaaagcgagtggagt

SEQ ID NO: 3846 - DNA, 20 bp, Homo sapiens
  source 1..20: mol_type = genomic DNA; note = Gene: GK2; note = Location (start to end; relative to TSS): GK2_26_56; note = Orientation (relative to transcription): sense; note = sgRNA Position: 79408178; note = Sequence Name: 56322-704_101_SL_seq_3846
gccccaaagacagcagctgt

SEQ ID NO: 3847 - DNA, 20 bp, Homo sapiens
  source 1..20: mol_type = genomic DNA; note = Gene: GK2; note = Location (start to end; relative to TSS): GK2_79_109; note = Orientation (relative to transcription): antisense; note = sgRNA Position: 79408145; note = Sequence Name: 56322-704_101_SL_seq_3847
agcgagtggagttggtgccc

SEQ ID NO: 3848 - DNA, 20 bp, Homo sapiens
  source 1..20: mol_type = genomic DNA; note = Gene: GK2; note = Location (start to end; relative to TSS): GK2_25_55; note = Orientation (relative to transcription): sense; note = sgRNA Position: 79408179; note = Sequence Name: 56322-704_101_SL_seq_3848
agccccaaagacagcagctg

SEQ ID NO: 3849 - DNA, 20 bp, Homo sapiens
  source 1..20: mol_type = genomic DNA; note = Gene: GK2; note = Location (start to end; relative to TSS): GK2_59_89; note = Orientation (relative to transcription): antisense; note = sgRNA Position: 79408165; note = Sequence Name: 56322-704_101_SL_seq_3849
tggaccaccgctcccaccaa

SEQ ID NO: 3850 - DNA, 20 bp, Homo sapiens
  source 1..20: mol_type = genomic DNA; note = Gene: GK5; note = Location (start to end; relative to TSS): GK5_38_68; note = Orientation (relative to transcription): antisense; note = sgRNA Position: 142225543; note = Sequence Name: 56322-704_101_SL_seq_3850
gtccccgggcggcccaaccc

SEQ ID NO: 3851 - DNA, 20 bp, Homo sapiens
  source 1..20: mol_type = genomic DNA; note = Gene: GK5; note = Location (start to end; relative to TSS): GK5_80_110; note = Orientation (relative to transcription): sense; note = sgRNA Position: 142225481; note = Sequence Name: 56322-704_101_SL_seq_3851
ctctgggtaggcggctgtag

SEQ ID NO: 3852 - DNA, 20 bp, Homo sapiens
  source 1..20: mol_type = genomic DNA; note = Gene: GK5; note = Location (start to end; relative to TSS): GK5_34_64; note = Orientation (relative to transcription): sense; note = sgRNA Position: 142225527; note = Sequence Name: 56322-704_101_SL_seq_3852
gttgggccgcccggggactc

SEQ ID NO: 3853 - DNA, 20 bp, Homo sapiens
  source 1..20: mol_type = genomic DNA; note = Gene: GK5; note = Location (start to end; relative to TSS): GK5_71_101; note = Orientation (relative to transcription): sense; note = sgRNA Position: 142225490; note = Sequence Name: 56322-704_101_SL_seq_3853
tagcgcgccctctgggtagg

SEQ ID NO: 3854 - DNA, 20 bp, Homo sapiens
  source 1..20: mol_type = genomic DNA; note = Gene: GK5; note = Location (start to end; relative to TSS): GK5_18_48; note = Orientation (relative to transcription): antisense; note = sgRNA Position: 142225563; note = Sequence Name: 56322-704_101_SL_seq_3854
gggccccaacccggctcagc

SEQ ID NO: 3855 - DNA, 20 bp, Homo sapiens
  source 1..20: mol_type = genomic DNA; note = Gene: GK5; note = Location (start to end; relative to TSS): GK5_68_98; note = Orientation (relative to transcription): sense; note = sgRNA Position: 142225493; note = Sequence Name: 56322-704_101_SL_seq_3855
ttgtagcgcgccctctgggt

SEQ ID NO: 3856 - DNA, 20 bp, Homo sapiens
  source 1..20: mol_type = genomic DNA; note = Gene: GK5; note = Location (start to end; relative to TSS): GK5_26_56; note = Orientation (relative to transcription): sense; note = sgRNA Position: 142225535; note = Sequence Name: 56322-704_101_SL_seq_3856
gggcccgggttgggccgccc

SEQ ID NO: 3857 - DNA, 20 bp, Homo sapiens
  source 1..20: mol_type = genomic DNA; note = Gene: GK5; note = Location (start to end; relative to TSS): GK5_64_94; note = Orientation (relative to transcription): sense; note = sgRNA Position: 142225497; note = Sequence Name: 56322-704_101_SL_seq_3857
ggatttgtagcgcgccctct

SEQ ID NO: 3858 - DNA, 20 bp, Homo sapiens
  source 1..20: mol_type = genomic DNA; note = Gene: GK5; note = Location (start to end; relative to TSS): GK5_27_57; note = Orientation (relative to transcription): antisense; note = sgRNA Position: 142225554; note = Sequence Name: 56322-704_101_SL_seq_3858
gcccaacccgggccccaacc

SEQ ID NO: 3859 - DNA, 20 bp, Homo sapiens
  source 1..20: mol_type = genomic DNA; note = Gene: GK5; note = Location (start to end; relative to TSS): GK5_63_93; note = Orientation (relative to transcription): sense; note = sgRNA Position: 142225498; note = Sequence Name: 56322-704_101_SL_seq_3859
gggatttgtagcgcgccctc

SEQ ID NO: 3860 - DNA, 20 bp, Homo sapiens
  source 1..20: mol_type = genomic DNA; note = Gene: GLYCTK; note = Location (start to end; relative to TSS): GLYCTK_46_76; note = Orientation (relative to transcription): sense; note = sgRNA Position: 52287900; note = Sequence Name: 56322-704_101_SL_seq_3860
ctgcgccgccagggctcgca

SEQ ID NO: 3861 - DNA, 20 bp, Homo sapiens
  source 1..20: mol_type = genomic DNA; note = Gene: GLYCTK; note = Location (start to end; relative to TSS): GLYCTK_78_108; note = Orientation (relative to transcription): antisense; note = sgRNA Position: 52287912; note = Sequence Name: 56322-704_101_SL_seq_3861
agcccagggaccgcttctga

SEQ ID NO: 3862 - DNA, 20 bp, Homo sapiens
  source 1..20: mol_type = genomic DNA; note = Gene: GLYCTK; note = Location (start to end; relative to TSS): GLYCTK_36_66; note = Orientation (relative to transcription): sense; note = sgRNA Position: 52287890; note = Sequence Name: 56322-704_101_SL_seq_3862
gctggtaagtctgcgccgcc

SEQ ID NO: 3863 - DNA, 20 bp, Homo sapiens
  source 1..20: mol_type = genomic DNA; note = Gene: GLYCTK; note = Location (start to end; relative to TSS): GLYCTK_72_102; note = Orientation (relative to transcription): sense; note = sgRNA Position: 52287926; note = Sequence Name: 56322-704_101_SL_seq_3863
tcagaagcggtccctgggct

SEQ ID NO: 3864 - DNA, 20 bp, Homo sapiens
  source 1..20: mol_type = genomic DNA; note = Gene: GLYCTK; note = Location (start to end; relative to TSS): GLYCTK_37_67; note = Orientation (relative to transcription): sense; note = sgRNA Position: 52287891; note = Sequence Name: 56322-704_101_SL_seq_3864
ctggtaagtctgcgccgcca

SEQ ID NO: 3865 - DNA, 20 bp, Homo sapiens
  source 1..20: mol_type = genomic DNA; note = Gene: GLYCTK; note = Location (start to end; relative to TSS): GLYCTK_67_97; note = Orientation (relative to transcription): sense; note = sgRNA Position: 52287921; note = Sequence Name: 56322-704_101_SL_seq_3865
ggccttcagaagcggtccct

SEQ ID NO: 3866 - DNA, 20 bp, Homo sapiens
  source 1..20: mol_type = genomic DNA; note = Gene: GLYCTK; note = Location (start to end; relative to TSS): GLYCTK_27_57; note = Orientation (relative to transcription): antisense; note = sgRNA Position: 52287861; note = Sequence Name: 56322-704_101_SL_seq_3866
ccagcccacagctccggccg

SEQ ID NO: 3867 - DNA, 20 bp, Homo sapiens
  source 1..20: mol_type = genomic DNA; note = Gene: GLYCTK; note = Location (start to end; relative to TSS): GLYCTK_60_90; note = Orientation (relative to transcription): antisense; note = sgRNA Position: 52287894; note = Sequence Name: 56322-704_101_SL_seq_3867
gaaggccatgcgagccctgg

SEQ ID NO: 3868 - DNA, 20 bp, Homo sapiens
  source 1..20: mol_type = genomic DNA; note = Gene: GLYCTK; note = Location (start to end; relative to TSS): GLYCTK_18_48; note = Orientation (relative to transcription): sense; note = sgRNA Position: 52287872; note = Sequence Name: 56322-704_101_SL_seq_3868
ccgcggccggagctgtgggc

SEQ ID NO: 3869 - DNA, 20 bp, Homo sapiens
  source 1..20: mol_type = genomic DNA; note = Gene: GLYCTK; note = Location (start to end; relative to TSS): GLYCTK_59_89; note = Orientation (relative to transcription): sense; note = sgRNA Position: 52287913; note = Sequence Name: 56322-704_101_SL_seq_3869
gctcgcatggccttcagaag

SEQ ID NO: 3870 - DNA, 20 bp, Homo sapiens
  source 1..20: mol_type = genomic DNA; note = Gene: GNE; note = Location (start to end; relative to TSS): GNE_56_86; note = Orientation (relative to transcription): sense; note = sgRNA Position: 36258368; note = Sequence Name: 56322-704_101_SL_seq_3870
cttggttcgtccctcgcccg

SEQ ID NO: 3871 - DNA, 20 bp, Homo sapiens
  source 1..20: mol_type = genomic DNA; note = Gene: GNE; note = Location (start to end; relative to TSS): GNE_91_121; note = Orientation (relative to transcription): sense; note = sgRNA Position: 36258333; note = Sequence Name: 56322-704_101_SL_seq_3871
gcgtgggagggagcctctga

SEQ ID NO: 3872 - DNA, 20 bp, Homo sapiens
  source 1..20: mol_type = genomic DNA; note = Gene: GNE; note = Location (start to end; relative to TSS): GNE_51_81; note = Orientation (relative to transcription): antisense; note = sgRNA Position: 36258393; note = Sequence Name: 56322-704_101_SL_seq_3872
cgaaccaagcgccacgaagc

SEQ ID NO: 3873 - DNA, 20 bp, Homo sapiens
  source 1..20: mol_type = genomic DNA; note = Gene: GNE; note = Location (start to end; relative to TSS): GNE_81_111; note = Orientation (relative to transcription): antisense; note = sgRNA Position: 36258363; note = Sequence Name: 56322-704_101_SL_seq_3873
acgccgccaccgcgctcctc

SEQ ID NO: 3874 - DNA, 20 bp, Homo sapiens
  source 1..20: mol_type = genomic DNA; note = Gene: GNE; note = Location (start to end; relative to TSS): GNE_38_68; note = Orientation (relative to transcription): sense; note = sgRNA Position: 36258386; note = Sequence Name: 56322-704_101_SL_seq_3874
tctgcctgcttcgtggcgct

SEQ ID NO: 3875 - DNA, 20 bp, Homo sapiens
  source 1..20: mol_type = genomic DNA; note = Gene: GNE; note = Location (start to end; relative to TSS): GNE_69_99; note = Orientation (relative to transcription): sense; note = sgRNA Position: 36258355; note = Sequence Name: 56322-704_101_SL_seq_3875
tcgcccgaggagcgcggtgg

SEQ ID NO: 3876 - DNA, 20 bp, Homo sapiens
  source 1..20: mol_type = genomic DNA; note = Gene: GNE; note = Location (start to end; relative to TSS): GNE_31_61; note = Orientation (relative to transcription): sense; note = sgRNA Position: 36258393; note = Sequence Name: 56322-704_101_SL_seq_3876
ctcgcgctctgcctgcttcg

SEQ ID NO: 3877 - DNA, 20 bp, Homo sapiens
  source 1..20: mol_type = genomic DNA; note = Gene: GNE; note = Location (start to end; relative to TSS): GNE_63_93; note = Orientation (relative to transcription): sense; note = sgRNA Position: 36258361; note = Sequence Name: 56322-704_101_SL_seq_3877
cgtccctcgcccgaggagcg

SEQ ID NO: 3878 - DNA, 20 bp, Homo sapiens
  source 1..20: mol_type = genomic DNA; note = Gene: GNE; note = Location (start to end; relative to TSS): GNE_14_44; note = Orientation (relative to transcription): antisense; note = sgRNA Position: 36258430; note = Sequence Name: 56322-704_101_SL_seq_3878
gcccctcggtttccgcgctc

SEQ ID NO: 3879 - DNA, 20 bp, Homo sapiens
  source 1..20: mol_type = genomic DNA; note = Gene: GNE; note = Location (start to end; relative to TSS): GNE_51_81; note = Orientation (relative to transcription): antisense; note = sgRNA Position: 36258393; note = Sequence Name: 56322-704_101_SL_seq_3879
cgaaccaagcgccacgaagc

SEQ ID NO: 3880 - DNA, 20 bp, Homo sapiens
  source 1..20: mol_type = genomic DNA; note = Gene: GRK1; note = Location (start to end; relative to TSS): GRK1_32_62; note = Orientation (relative to transcription): sense; note = sgRNA Position: 113667277; note = Sequence Name: 56322-704_101_SL_seq_3880
tcgtccagcaagggcaggga

SEQ ID NO: 3881 - DNA, 20 bp, Homo sapiens
  source 1..20: mol_type = genomic DNA; note = Gene: GRK1; note = Location (start to end; relative to TSS): GRK1_89_119; note = Orientation (relative to transcription): sense; note = sgRNA Position: 113667334; note = Sequence Name: 56322-704_101_SL_seq_3881
gtctgtgaacgctcccggct

SEQ ID NO: 3882 - DNA, 20 bp, Homo sapiens
  source 1..20: mol_type = genomic DNA; note = Gene: GRK1; note = Location (start to end; relative to TSS): GRK1_22_52; note = Orientation (relative to transcription): sense; note = sgRNA Position: 113667267; note = Sequence Name: 56322-704_101_SL_seq_3882
ggcgtctctctcgtccagca

SEQ ID NO: 3883 - DNA, 20 bp, Homo sapiens
  source 1..20: mol_type = genomic DNA; note = Gene: GRK1; note = Location (start to end; relative to TSS): GRK1_84_114; note = Orientation (relative to transcription): sense; note = sgRNA Position: 113667329; note = Sequence Name: 56322-704_101_SL_seq_3883
gctctgtctgtgaacgctcc

SEQ ID NO: 3884 - DNA, 20 bp, Homo sapiens
  source 1..20: mol_type = genomic DNA; note = Gene: GRK1; note = Location (start to end; relative to TSS): GRK1_28_58; note = Orientation (relative to transcription): sense; note = sgRNA Position: 113667273; note = Sequence Name: 56322-704_101_SL_seq_3884
tctctcgtccagcaagggca

SEQ ID NO: 3885 - DNA, 20 bp, Homo sapiens
  source 1..20: mol_type = genomic DNA; note = Gene: GRK1; note = Location (start to end; relative to TSS): GRK1_72_102; note = Orientation (relative to transcription): antisense; note = sgRNA Position: 113667297; note = Sequence Name: 56322-704_101_SL_seq_3885
gcaggcctgactgctgccct

SEQ ID NO: 3886 - DNA, 20 bp, Homo sapiens
  source 1..20: mol_type = genomic DNA; note = Gene: GRK1; note = Location (start to end; relative to TSS): GRK1_27_57; note = Orientation (relative to transcription): antisense; note = sgRNA Position: 113667252; note = Sequence Name: 56322-704_101_SL_seq_3886
gctggacgagagagacgccc

SEQ ID NO: 3887 - DNA, 20 bp, Homo sapiens
  source 1..20: mol_type = genomic DNA; note = Gene: GRK1; note = Location (start to end; relative to TSS): GRK1_65_95; note = Orientation (relative to transcription): antisense; note = sgRNA Position: 113667290; note = Sequence Name: 56322-704_101_SL_seq_3887
tgactgctgcccttggcctg

SEQ ID NO: 3888 - DNA, 20 bp, Homo sapiens
  source 1..20: mol_type = genomic DNA; note = Gene: GRK1; note = Location (start to end; relative to TSS): GRK1_23_53; note = Orientation (relative to transcription): sense; note = sgRNA Position: 113667268; note = Sequence Name: 56322-704_101_SL_seq_3888
gcgtctctctcgtccagcaa

SEQ ID NO: 3889 - DNA, 20 bp, Homo sapiens
  source 1..20: mol_type = genomic DNA; note = Gene: GRK1; note = Location (start to end; relative to TSS): GRK1_58_88; note = Orientation (relative to transcription): sense; note = sgRNA Position: 113667303; note = Sequence Name: 56322-704_101_SL_seq_3889
acaggccaagggcagcagtc

SEQ ID NO: 3890 - DNA, 20 bp, Homo sapiens
  source 1..20: mol_type = genomic DNA; note = Gene: GRK2; note = Location (start to end; relative to TSS): GRK2_43_73; note = Orientation (relative to transcription): sense; note = sgRNA Position: 67266542; note = Sequence Name: 56322-704_101_SL_seq_3890
ggggcggcgccgcctgtgag

SEQ ID NO: 3891 - DNA, 20 bp, Homo sapiens
  source 1..20: mol_type = genomic DNA; note = Gene: GRK2; note = Location (start to end; relative to TSS): GRK2_82_112; note = Orientation (relative to transcription): sense; note = sgRNA Position: 67266581; note = Sequence Name: 56322-704_101_SL_seq_3891
gggcgccgagcagggccagg

SEQ ID NO: 3892 - DNA, 20 bp, Homo sapiens
  source 1..20: mol_type = genomic DNA; note = Gene: GRK2; note = Location (start to end; relative to TSS): GRK2_36_66; note = Orientation (relative to transcription): antisense; note = sgRNA Position: 67266515; note = Sequence Name: 56322-704_101_SL_seq_3892
ccgccccatggcgccggctc

SEQ ID NO: 3893 - DNA, 20 bp, Homo sapiens
  source 1..20: mol_type = genomic DNA; note = Gene: GRK2; note = Location (start to end; relative to TSS): GRK2_74_104; note = Orientation (relative to transcription): sense; note = sgRNA Position: 67266573; note = Sequence Name: 56322-704_101_SL_seq_3893
ggagccgcgggcgccgagca

SEQ ID NO: 3894 - DNA, 20 bp, Homo sapiens
  source 1..20: mol_type = genomic DNA; note = Gene: GRK2; note = Location (start to end; relative to TSS): GRK2_25_55; note = Orientation (relative to transcription): antisense; note = sgRNA Position: 67266504; note = Sequence Name: 56322-704_101_SL_seq_3894
cgccggctcgggcccggccc

SEQ ID NO: 3895 - DNA, 20 bp, Homo sapiens
  source 1..20: mol_type = genomic DNA; note = Gene: GRK2; note = Location (start to end; relative to TSS): GRK2_64_94; note = Orientation (relative to transcription): antisense; note = sgRNA Position: 67266543; note = Sequence Name: 56322-704_101_SL_seq_3895
ctccgctcgccgccgctcac

SEQ ID NO: 3896 - DNA, 20 bp, Homo sapiens
  source 1..20: mol_type = genomic DNA; note = Gene: GRK2; note = Location (start to end; relative to TSS): GRK2_24_54; note = Orientation (relative to transcription): sense; note = sgRNA Position: 67266523; note = Sequence Name: 56322-704_101_SL_seq_3896
gggcccgagccggcgccatg

SEQ ID NO: 3897 - DNA, 20 bp, Homo sapiens
  source 1..20: mol_type = genomic DNA; note = Gene: GRK2; note = Location (start to end; relative to TSS): GRK2_62_92; note = Orientation (relative to transcription): sense; note = sgRNA Position: 67266561; note = Sequence Name: 56322-704_101_SL_seq_3897
gcggcggcgagcggagccgc

SEQ ID NO: 3898 - DNA, 20 bp, Homo sapiens
  source 1..20: mol_type = genomic DNA; note = Gene: GRK2; note = Location (start to end; relative to TSS): GRK2_27_57; note = Orientation (relative to transcription): sense; note = sgRNA Position: 67266526; note = Sequence Name: 56322-704_101_SL_seq_3898
cccgagccggcgccatgggg

SEQ ID NO: 3899 - DNA, 20 bp, Homo sapiens
  source 1..20: mol_type = genomic DNA; note = Gene: GRK2; note = Location (start to end; relative to TSS): GRK2_61_91; note = Orientation (relative to transcription): antisense; note = sgRNA Position: 67266540; note = Sequence Name: 56322-704_101_SL_seq_3899
cgctcgccgccgctcacagg

SEQ ID NO: 3900 - DNA, 20 bp, Homo sapiens
  source 1..20: mol_type = genomic DNA; note = Gene: GRK3; note = Location (start to end; relative to TSS): GRK3_35_65; note = Orientation (relative to transcription): sense; note = sgRNA Position: 25564736; note = Sequence Name: 56322-704_101_SL_seq_3900
cactgaggggcgctgaccgt

SEQ ID NO: 3901 - DNA, 20 bp, Homo sapiens
  source 1..20: mol_type = genomic DNA; note = Gene: GRK3; note = Location (start to end; relative to TSS): GRK3_74_104; note = Orientation (relative to transcription): sense; note = sgRNA Position: 25564775; note = Sequence Name: 56322-704_101_SL_seq_3901
gaccctcgctgaaggagcag

SEQ ID NO: 3902 - DNA, 20 bp, Homo sapiens
  source 1..20: mol_type = genomic DNA; note = Gene: GRK3; note = Location (start to end; relative to TSS): GRK3_20_50; note = Orientation (relative to transcription): sense; note = sgRNA Position: 25564721; note = Sequence Name: 56322-704_101_SL_seq_3902
gccgctgggactgtgcactg

SEQ ID NO: 3903 - DNA, 20 bp, Homo sapiens
  source 1..20: mol_type = genomic DNA; note = Gene: GRK3; note = Location (start to end; relative to TSS): GRK3_73_103; note = Orientation (relative to transcription): sense; note = sgRNA Position: 25564774; note = Sequence Name: 56322-704_101_SL_seq_3903
agaccctcgctgaaggagca

SEQ ID NO: 3904 - DNA, 20 bp, Homo sapiens
  source 1..20: mol_type = genomic DNA; note = Gene: GRK3; note = Location (start to end; relative to TSS): GRK3_21_51; note = Orientation (relative to transcription): sense; note = sgRNA Position: 25564722; note = Sequence Name: 56322-704_101_SL_seq_3904
ccgctgggactgtgcactga

SEQ ID NO: 3905 - DNA, 20 bp, Homo sapiens
  source 1..20: mol_type = genomic DNA; note = Gene: GRK3; note = Location (start to end; relative to TSS): GRK3_72_102; note = Orientation (relative to transcription): sense; note = sgRNA Position: 25564773; note = Sequence Name: 56322-704_101_SL_seq_3905
cagaccctcgctgaaggagc

SEQ ID NO: 3906 - DNA, 20 bp, Homo sapiens
  source 1..20: mol_type = genomic DNA; note = Gene: GRK3; note = Location (start to end; relative to TSS): GRK3_30_60; note = Orientation (relative to transcription): antisense; note = sgRNA Position: 25564711; note = Sequence Name: 56322-704_101_SL_seq_3906
ccctcagtgcacagtcccag

SEQ ID NO: 3907 - DNA, 20 bp, Homo sapiens
  source 1..20: mol_type = genomic DNA; note = Gene: GRK3; note = Location (start to end; relative to TSS): GRK3_66_96; note = Orientation (relative to transcription): sense; note = sgRNA Position: 25564767; note = Sequence Name: 56322-704_101_SL_seq_3907
tccccgcagaccctcgctga

SEQ ID NO: 3908 - DNA, 20 bp, Homo sapiens
  source 1..20: mol_type = genomic DNA; note = Gene: GRK3; note = Location (start to end; relative to TSS): GRK3_22_52; note = Orientation (relative to transcription): sense; note = sgRNA Position: 25564723; note = Sequence Name: 56322-704_101_SL_seq_3908
cgctgggactgtgcactgag

SEQ ID NO: 3909 - DNA, 20 bp, Homo sapiens
  source 1..20: mol_type = genomic DNA; note = Gene: GRK3; note = Location (start to end; relative to TSS): GRK3_60_90; note = Orientation (relative to transcription): antisense; note = sgRNA Position: 25564741; note = Sequence Name: 56322-704_101_SL_seq_3909
tgcggggagcgcgcgtccaa

SEQ ID NO: 3910 - DNA, 20 bp, Homo sapiens
  source 1..20: mol_type = genomic DNA; note = Gene: GRK4; note = Location (start to end; relative to TSS): GRK4_38_68; note = Orientation (relative to transcription): sense; note = sgRNA Position: 2963635; note = Sequence Name: 56322-704_101_SL_seq_3910
ccgttagcgccgagcccgcc

SEQ ID NO: 3911 - DNA, 20 bp, Homo sapiens
  source 1..20: mol_type = genomic DNA; note = Gene: GRK4; note = Location (start to end; relative to TSS): GRK4_98_128; note = Orientation (relative to transcription): antisense; note = sgRNA Position: 2963675; note = Sequence Name: 56322-704_101_SL_seq_3911
tcggacaggggctcactggc

SEQ ID NO: 3912 - DNA, 20 bp, Homo sapiens
  source 1..20: mol_type = genomic DNA; note = Gene: GRK4; note = Location (start to end; relative to TSS): GRK4_33_63; note = Orientation (relative to transcription): antisense; note = sgRNA Position: 2963610; note = Sequence Name: 56322-704_101_SL_seq_3912
cgctaacggcttagctgaag

SEQ ID NO: 3913 - DNA, 20 bp, Homo sapiens
  source 1..20: mol_type = genomic DNA; note = Gene: GRK4; note = Location (start to end; relative to TSS): GRK4_97_127; note = Orientation (relative to transcription): antisense; note = sgRNA Position: 2963674; note = Sequence Name: 56322-704_101_SL_seq_3913
cggacaggggctcactggca

SEQ ID NO: 3914 - DNA, 20 bp, Homo sapiens
  source 1..20: mol_type = genomic DNA; note = Gene: GRK4; note = Location (start to end; relative to TSS): GRK4_45_75; note = Orientation (relative to transcription): sense; note = sgRNA Position: 2963642; note = Sequence Name: 56322-704_101_SL_seq_3914
cgccgagcccgcccgggagc

SEQ ID NO: 3915 - DNA, 20 bp, Homo sapiens
  source 1..20: mol_type = genomic DNA; note = Gene: GRK4; note = Location (start to end; relative to TSS): GRK4_96_126; note = Orientation (relative to transcription): antisense; note = sgRNA Position: 2963673; note = Sequence Name: 56322-704_101_SL_seq_3915
ggacaggggctcactggcag

SEQ ID NO: 3916 - DNA, 20 bp, Homo sapiens
  source 1..20: mol_type = genomic DNA; note = Gene: GRK4; note = Location (start to end; relative to TSS): GRK4_47_77; note = Orientation (relative to transcription): antisense; note = sgRNA Position: 2963624; note = Sequence Name: 56322-704_101_SL_seq_3916
ccgggcgggctcggcgctaa

SEQ ID NO: 3917 - DNA, 20 bp, Homo sapiens
  source 1..20: mol_type = genomic DNA; note = Gene: GRK4; note = Location (start to end; relative to TSS): GRK4_84_114; note = Orientation (relative to transcription): antisense; note = sgRNA Position: 2963661; note = Sequence Name: 56322-704_101_SL_seq_3917
actggcaggggcgcccgccg

SEQ ID NO: 3918 - DNA, 20 bp, Homo sapiens
  source 1..20: mol_type = genomic DNA; note = Gene: GRK4; note = Location (start to end; relative to TSS): GRK4_32_62; note = Orientation (relative to transcription): antisense; note = sgRNA Position: 2963609; note = Sequence Name: 56322-704_101_SL_seq_3918
gctaacggcttagctgaaga

SEQ ID NO: 3919 - DNA, 20 bp, Homo sapiens
  source 1..20: mol_type = genomic DNA; note = Gene: GRK4; note = Location (start to end; relative to TSS): GRK4_62_92; note = Orientation (relative to transcription): antisense; note = sgRNA Position: 2963639; note = Sequence Name: 56322-704_101_SL_seq_3919
gccggcgacccgctcccggg

SEQ ID NO: 3920 - DNA, 20 bp, Homo sapiens
  source 1..20: mol_type = genomic DNA; note = Gene: GRK5; note = Location (start to end; relative to TSS): GRK5_50_80; note = Orientation (relative to transcription): sense; note = sgRNA Position: 119207647; note = Sequence Name: 56322-704_101_SL_seq_3920
agagacacgcggagggtggg

SEQ ID NO: 3921 - DNA, 20 bp, Homo sapiens
  source 1..20: mol_type = genomic DNA; note = Gene: GRK5; note = Location (start to end; relative to TSS): GRK5_81_111; note = Orientation (relative to transcription): sense; note = sgRNA Position: 119207678; note = Sequence Name: 56322-704_101_SL_seq_3921
agcgtgttgagggagggggg

SEQ ID NO: 3922 - DNA, 20 bp, Homo sapiens
  source 1..20: mol_type = genomic DNA; note = Gene: GRK5; note = Location (start to end; relative to TSS): GRK5_34_64; note = Orientation (relative to transcription): antisense; note = sgRNA Position: 119207611; note = Sequence Name: 56322-704_101_SL_seq_3922
cactccattctcctcccctc

SEQ ID NO: 3923 - DNA, 20 bp, Homo sapiens
  source 1..20: mol_type = genomic DNA; note = Gene: GRK5; note = Location (start to end; relative to TSS): GRK5_71_101; note = Orientation (relative to transcription): sense; note = sgRNA Position: 119207668; note = Sequence Name: 56322-704_101_SL_seq_3923
ggtgggggggagcgtgttga

SEQ ID NO: 3924 - DNA, 20 bp, Homo sapiens
  source 1..20: mol_type = genomic DNA; note = Gene: GRK5; note = Location (start to end; relative to TSS): GRK5_25_55; note = Orientation (relative to transcription): antisense; note = sgRNA Position: 119207602; note = Sequence Name: 56322-704_101_SL_seq_3924
ctcctcccctccggctccct

SEQ ID NO: 3925 - DNA, 20 bp, Homo sapiens
  source 1..20: mol_type = genomic DNA; note = Gene: GRK5; note = Location (start to end; relative to TSS): GRK5_57_87; note = Orientation (relative to transcription): sense; note = sgRNA Position: 119207654; note = Sequence Name: 56322-704_101_SL_seq_3925
cgcggagggtggggggtggg

SEQ ID NO: 3926 - DNA, 20 bp, Homo sapiens
  source 1..20: mol_type = genomic DNA; note = Gene: GRK5; note = Location (start to end; relative to TSS): GRK5_21_51; note = Orientation (relative to transcription): sense; note = sgRNA Position: 119207618; note = Sequence Name: 56322-704_101_SL_seq_3926
ggagccggaggggaggagaa

SEQ ID NO: 3927 - DNA, 20 bp, Homo sapiens
  source 1..20: mol_type = genomic DNA; note = Gene: GRK5; note = Location (start to end; relative to TSS): GRK5_53_83; note = Orientation (relative to transcription): sense; note = sgRNA Position: 119207650; note = Sequence Name: 56322-704_101_SL_seq_3927
gacacgcggagggtgggggg

SEQ ID NO: 3928 - DNA, 20 bp, Homo sapiens
  source 1..20: mol_type = genomic DNA; note = Gene: GRK5; note = Location (start to end; relative to TSS): GRK5_14_44; note = Orientation (relative to transcription): sense; note = sgRNA Position: 119207611; note = Sequence Name: 56322-704_101_SL_seq_3928
atccgagggagccggagggg

SEQ ID NO: 3929 - DNA, 20 bp, Homo sapiens
  source 1..20: mol_type = genomic DNA; note = Gene: GRK5; note = Location (start to end; relative to TSS): GRK5_50_80; note = Orientation (relative to transcription): sense; note = sgRNA Position: 119207647; note = Sequence Name: 56322-704_101_SL_seq_3929
agagacacgcggagggtggg

SEQ ID NO: 3930 - DNA, 20 bp, Homo sapiens
  source 1..20: mol_type = genomic DNA; note = Gene: GRK6; note = Location (start to end; relative to TSS): GRK6_44_74; note = Orientation (relative to transcription): antisense; note = sgRNA Position: 177426726; note = Sequence Name: 56322-704_101_SL_seq_3930
ggctcgcagtgaccgcgccg

SEQ ID NO: 3931 - DNA, 20 bp, Homo sapiens
  source 1..20: mol_type = genomic DNA; note = Gene: GRK6; note = Location (start to end; relative to TSS): GRK6_75_105; note = Orientation (relative to transcription): antisense; note = sgRNA Position: 177426757; note = Sequence Name: 56322-704_101_SL_seq_3931
gcgatcggcgcggctcggcg

SEQ ID NO: 3932 - DNA, 20 bp, Homo sapiens
  source 1..20: mol_type = genomic DNA; note = Gene: GRK6; note = Location (start to end; relative to TSS): GRK6_35_65; note = Orientation (relative to transcription): antisense; note = sgRNA Position: 177426717; note = Sequence Name: 56322-704_101_SL_seq_3932
tgaccgcgccgcggcctccc

SEQ ID NO: 3933 - DNA, 20 bp, Homo sapiens
  source 1..20: mol_type = genomic DNA; note = Gene: GRK6; note = Location (start to end; relative to TSS): GRK6_73_103; note = Orientation (relative to transcription): sense; note = sgRNA Position: 177426775; note = Sequence Name: 56322-704_101_SL_seq_3933
gagccgcgccgatcgccatc

SEQ ID NO: 3934 - DNA, 20 bp, Homo sapiens
  source 1..20: mol_type = genomic DNA; note = Gene: GRK6; note = Location (start to end; relative to TSS): GRK6_23_53; note = Orientation (relative to transcription): sense; note = sgRNA Position: 177426725; note = Sequence Name: 56322-704_101_SL_seq_3934
aggccggggaggccgcggcg

SEQ ID NO: 3935 - DNA, 20 bp, Homo sapiens
  source 1..20: mol_type = genomic DNA; note = Gene: GRK6; note = Location (start to end; relative to TSS): GRK6_70_100; note = Orientation (relative to transcription): antisense; note = sgRNA Position: 177426752; note = Sequence Name: 56322-704_101_SL_seq_3935
cggcgcggctcggcgcggct

SEQ ID NO: 3936 - DNA, 20 bp, Homo sapiens
  source 1..20: mol_type = genomic DNA; note = Gene: GRK6; note = Location (start to end; relative to TSS): GRK6_12_42; note = Orientation (relative to transcription): sense; note = sgRNA Position: 177426714; note = Sequence Name: 56322-704_101_SL_seq_3936
ggcggccggggaggccgggg

SEQ ID NO: 3937 - DNA, 20 bp, Homo sapiens
  source 1..20: mol_type = genomic DNA; note = Gene: GRK6; note = Location (start to end; relative to TSS): GRK6_65_95; note = Orientation (relative to transcription): antisense; note = sgRNA Position: 177426747; note = Sequence Name: 56322-704_101_SL_seq_3937
cggctcggcgcggctcggct

SEQ ID NO: 3938 - DNA, 20 bp, Homo sapiens
  source 1..20: mol_type = genomic DNA; note = Gene: GRK6; note = Location (start to end; relative to TSS): GRK6_9_39; note = Orientation (relative to transcription): sense; note = sgRNA Position: 177426711; note = Sequence Name: 56322-704_101_SL_seq_3938
tgcggcggccggggaggccg

SEQ ID NO: 3939 - DNA, 20 bp, Homo sapiens
  source 1..20: mol_type = genomic DNA; note = Gene: GRK6; note = Location (start to end; relative to TSS): GRK6_44_74; note = Orientation (relative to transcription): antisense; note = sgRNA Position: 177426726; note = Sequence Name: 56322-704_101_SL_seq_3939
ggctcgcagtgaccgcgccg

SEQ ID NO: 3940 - DNA, 20 bp, Homo sapiens
  source 1..20: mol_type = genomic DNA; note = Gene: GRK7; note = Location (start to end; relative to TSS): GRK7_22_52; note = Orientation (relative to transcription): antisense; note = sgRNA Position: 141763436; note = Sequence Name: 56322-704_101_SL_seq_3940
gactttgctgggttagttag

SEQ ID NO: 3941 - DNA, 20 bp, Homo sapiens
  source 1..20: mol_type = genomic DNA; note = Gene: GRK7; note = Location (start to end; relative to TSS): GRK7_81_111; note = Orientation (relative to transcription): antisense; note = sgRNA Position: 141763495; note = Sequence Name: 56322-704_101_SL_seq_3941
tggttcctcgtctgtgaagg

SEQ ID NO: 3942 - DNA, 20 bp, Homo sapiens
  source 1..20: mol_type = genomic DNA; note = Gene: GRK7; note = Location (start to end; relative to TSS): GRK7_21_51; note = Orientation (relative to transcription): antisense; note = sgRNA Position: 141763435; note = Sequence Name: 56322-704_101_SL_seq_3942
actttgctgggttagttagt

SEQ ID NO: 3943 - DNA, 20 bp, Homo sapiens
  source 1..20: mol_type = genomic DNA; note = Gene: GRK7; note = Location (start to end; relative to TSS): GRK7_75_105; note = Orientation (relative to transcription): sense; note = sgRNA Position: 141763509; note = Sequence Name: 56322-704_101_SL_seq_3943
ccttcacagacgaggaacca

SEQ ID NO: 3944 - DNA, 20 bp, Homo sapiens
  source 1..20: mol_type = genomic DNA; note = Gene: GRK7; note = Location (start to end; relative to TSS): GRK7_20_50; note = Orientation (relative to transcription): sense; note = sgRNA Position: 141763454; note = Sequence Name: 56322-704_101_SL_seq_3944
ctaacccagcaaagtctggg

SEQ ID NO: 3945 - DNA, 20 bp, Homo sapiens
  source 1..20: mol_type = genomic DNA; note = Gene: GRK7; note = Location (start to end; relative to TSS): GRK7_74_104; note = Orientation (relative to transcription): sense; note = sgRNA Position: 141763508; note = Sequence Name: 56322-704_101_SL_seq_3945
accttcacagacgaggaacc

SEQ ID NO: 3946 - DNA, 20 bp, Homo sapiens
  source 1..20: mol_type = genomic DNA; note = Gene: GRK7; note = Location (start to end; relative to TSS): GRK7_19_49; note = Orientation (relative to transcription): sense; note = sgRNA Position: 141763453; note = Sequence Name: 56322-704_101_SL_seq_3946
actaacccagcaaagtctgg

SEQ ID NO: 3947 - DNA, 20 bp, Homo sapiens
  source 1..20: mol_type = genomic DNA; note = Gene: GRK7; note = Location (start to end; relative to TSS): GRK7_69_99; note = Orientation (relative to transcription): antisense; note = sgRNA Position: 141763483; note = Sequence Name: 56322-704_101_SL_seq_3947
tgtgaaggtggagctggcag

SEQ ID NO: 3948 - DNA, 20 bp, Homo sapiens
  source 1..20: mol_type = genomic DNA; note = Gene: GRK7; note = Location (start to end; relative to TSS): GRK7_18_48; note = Orientation (relative to transcription): sense; note = sgRNA Position: 141763452; note = Sequence Name: 56322-704_101_SL_seq_3948
aactaacccagcaaagtctg

SEQ ID NO: 3949 - DNA, 20 bp, Homo sapiens
  source 1..20: mol_type = genomic DNA; note = Gene: GRK7; note = Location (start to end; relative to TSS): GRK7_67_97; note = Orientation (relative to transcription): sense; note = sgRNA Position: 141763501; note = Sequence Name: 56322-704_101_SL_seq_3949
cagctccaccttcacagacg

SEQ ID NO: 3950 - DNA, 20 bp, Homo sapiens
  source 1..20: mol_type = genomic DNA; note = Gene: GSK3A; note = Location (start to end; relative to TSS): GSK3A_35_65; note = Orientation (relative to transcription): sense; note = sgRNA Position: 42242543; note = Sequence Name: 56322-704_101_SL_seq_3950
aagaggccagggcccggggg

SEQ ID NO: 3951 - DNA, 20 bp, Homo sapiens
  source 1..20: mol_type = genomic DNA; note = Gene: GSK3A; note = Location (start to end; relative to TSS): GSK3A_109_139; note = Orientation (relative to transcription): antisense; note = sgRNA Position: 42242489; note = Sequence Name: 56322-704_101_SL_seq_3951
gagcacaggcccaggctgcg

SEQ ID NO: 3952 - DNA, 20 bp, Homo sapiens
  source 1..20: mol_type = genomic DNA; note = Gene: GSK3A; note = Location (start to end; relative to TSS): GSK3A_32_62; note = Orientation (relative to transcription): sense; note = sgRNA Position: 42242546; note = Sequence Name: 56322-704_101_SL_seq_3952
tggaagaggccagggcccgg

SEQ ID NO: 3953 - DNA, 20 bp, Homo sapiens
  source 1..20: mol_type = genomic DNA; note = Gene: GSK3A; note = Location (start to end; relative to TSS): GSK3A_102_132; note = Orientation (relative to transcription): sense; note = sgRNA Position: 42242476; note = Sequence Name: 56322-704_101_SL_seq_3953
ccgcagcctgggcctgtgct

SEQ ID NO: 3954 - DNA, 20 bp, Homo sapiens
  source 1..20: mol_type = genomic DNA; note = Gene: GSK3A; note = Location (start to end; relative to TSS): GSK3A_30_60; note = Orientation (relative to transcription): sense; note = sgRNA Position: 42242548; note = Sequence Name: 56322-704_101_SL_seq_3954
cctggaagaggccagggccc

SEQ ID NO: 3955 - DNA, 20 bp, Homo sapiens
  source 1..20: mol_type = genomic DNA; note = Gene: GSK3A; note = Location (start to end; relative to TSS): GSK3A_91_121; note = Orientation (relative to transcription): sense; note = sgRNA Position: 42242487; note = Sequence Name: 56322-704_101_SL_seq_3955
cagcccgagccccgcagcct

SEQ ID NO: 3956 - DNA, 20 bp, Homo sapiens
  source 1..20: mol_type = genomic DNA; note = Gene: GSK3A; note = Location (start to end; relative to TSS): GSK3A_23_53; note = Orientation (relative to transcription): sense; note = sgRNA Position: 42242555; note = Sequence Name: 56322-704_101_SL_seq_3956
ggcgcggcctggaagaggcc

SEQ ID NO: 3957 - DNA, 20 bp, Homo sapiens
  source 1..20: mol_type = genomic DNA; note = Gene: GSK3A; note = Location (start to end; relative to TSS): GSK3A_68_98; note = Orientation (relative to transcription): sense; note = sgRNA Position: 42242510; note = Sequence Name: 56322-704_101_SL_seq_3957
ggcggcggctggggcagccc

SEQ ID NO: 3958 - DNA, 20 bp, Homo sapiens
  source 1..20: mol_type = genomic DNA; note = Gene: GSK3A; note = Location (start to end; relative to TSS): GSK3A_18_48; note = Orientation (relative to transcription): sense; note = sgRNA Position: 42242560; note = Sequence Name: 56322-704_101_SL_seq_3958
agagcggcgcggcctggaag

SEQ ID NO: 3959 - DNA, 20 bp, Homo sapiens
  source 1..20: mol_type = genomic DNA; note = Gene: GSK3A; note = Location (start to end; relative to TSS): GSK3A_56_86; note = Orientation (relative to transcription): antisense; note = sgRNA Position: 42242542; note = Sequence Name: 56322-704_101_SL_seq_3959
ccgctgccgccgcctccccc

SEQ ID NO: 3960 - DNA, 20 bp, Homo sapiens
  source 1..20: mol_type = genomic DNA; note = Gene: GSK3B; note = Location (start to end; relative to TSS): GSK3B_50_80; note = Orientation (relative to transcription): sense; note = sgRNA Position: 120094373; note = Sequence Name: 56322-704_101_SL_seq_3960
ccgcccgggccaagtgacaa

SEQ ID NO: 3961 - DNA, 20 bp, Homo sapiens
  source 1..20: mol_type = genomic DNA; note = Gene: GSK3B; note = Location (start to end; relative to TSS): GSK3B_102_132; note = Orientation (relative to transcription): sense; note = sgRNA Position: 120094321; note = Sequence Name: 56322-704_101_SL_seq_3961
gcagccgctgacagggctct

SEQ ID NO: 3962 - DNA, 20 bp, Homo sapiens
  source 1..20: mol_type = genomic DNA; note = Gene: GSK3B; note = Location (start to end; relative to TSS): GSK3B_53_83; note = Orientation (relative to transcription): antisense; note = sgRNA Position: 120094390; note = Sequence Name: 56322-704_101_SL_seq_3962
tcacttggcccgggcggcgg

SEQ ID NO: 3963 - DNA, 20 bp, Homo sapiens
  source 1..20: mol_type = genomic DNA; note = Gene: GSK3B; note = Location (start to end; relative to TSS): GSK3B_95_125; note = Orientation (relative to transcription): sense; note = sgRNA Position: 120094328; note = Sequence Name: 56322-704_101_SL_seq_3963
cggccccgcagccgctgaca

SEQ ID NO: 3964 - DNA, 20 bp, Homo sapiens
  source 1..20: mol_type = genomic DNA; note = Gene: GSK3B; note = Location (start to end; relative to TSS): GSK3B_20_50; note = Orientation (relative to transcription): antisense; note = sgRNA Position: 120094423; note = Sequence Name: 56322-704_101_SL_seq_3964
ggcacaagcccgcattcgcc

SEQ ID NO: 3965 - DNA, 20 bp, Homo sapiens
  source 1..20: mol_type = genomic DNA; note = Gene: GSK3B; note = Location (start to end; relative to TSS): GSK3B_54_84; note = Orientation (relative to transcription): sense; note = sgRNA Position: 120094369; note = Sequence Name: 56322-704_101_SL_seq_3965
ccgggccaagtgacaaagga

SEQ ID NO: 3966 - DNA, 20 bp, Homo sapiens
  source 1..20: mol_type = genomic DNA; note = Gene: GSK3B; note = Location (start to end; relative to TSS): GSK3B_19_49; note = Orientation (relative to transcription): antisense; note = sgRNA Position: 120094424; note = Sequence Name: 56322-704_101_SL_seq_3966
gcacaagcccgcattcgccc

SEQ ID NO: 3967 - DNA, 20 bp, Homo sapiens
  source 1..20: mol_type = genomic DNA; note = Gene: GSK3B; note = Location (start to end; relative to TSS): GSK3B_53_83; note = Orientation (relative to transcription): antisense; note = sgRNA Position: 120094390; note = Sequence Name: 56322-704_101_SL_seq_3967
tcacttggcccgggcggcgg

SEQ ID NO: 3968 - DNA, 20 bp, Homo sapiens
  source 1..20: mol_type = genomic DNA; note = Gene: GSK3B; note = Location (start to end; relative to TSS): GSK3B_14_44; note = Orientation (relative to transcription): antisense; note = sgRNA Position: 120094429; note = Sequence Name: 56322-704_101_SL_seq_3968
agcccgcattcgcccgggtc

SEQ ID NO: 3969 - DNA, 20 bp, Homo sapiens
  source 1..20: mol_type = genomic DNA; note = Gene: GSK3B; note = Location (start to end; relative to TSS): GSK3B_50_80; note = Orientation (relative to transcription): sense; note = sgRNA Position: 120094373; note = Sequence Name: 56322-704_101_SL_seq_3969
ccgcccgggccaagtgacaa

SEQ ID NO: 3970 - DNA, 20 bp, Homo sapiens
  source 1..20: mol_type = genomic DNA; note = Gene: GTF2F1; note = Location (start to end; relative to TSS): GTF2F1_49_79; note = Orientation (relative to transcription): antisense; note = sgRNA Position: 6393111; note = Sequence Name: 56322-704_101_SL_seq_3970
cgggtctctgtgcctgagcg

SEQ ID NO: 3971 - DNA, 20 bp, Homo sapiens
  source 1..20: mol_type = genomic DNA; note = Gene: GTF2F1; note = Location (start to end; relative to TSS): GTF2F1_88_118; note = Orientation (relative to transcription): sense; note = sgRNA Position: 6393052; note = Sequence Name: 56322-704_101_SL_seq_3971
tcgagggacgcgcacgccag

SEQ ID NO: 3972 - DNA, 20 bp, Homo sapiens
  source 1..20: mol_type = genomic DNA; note = Gene: GTF2F1; note = Location (start to end; relative to TSS): GTF2F1_35_65; note = Orientation (relative to transcription): antisense; note = sgRNA Position: 6393125; note = Sequence Name: 56322-704_101_SL_seq_3972
tgagcgaggaccccaaccct

SEQ ID NO: 3973 - DNA, 20 bp, Homo sapiens
  source 1..20: mol_type = genomic DNA; note = Gene: GTF2F1; note = Location (start to end; relative to TSS): GTF2F1_68_98; note = Orientation (relative to transcription): antisense; note = sgRNA Position: 6393092; note = Sequence Name: 56322-704_101_SL_seq_3973
ggaagccgccgctcggtgtc

SEQ ID NO: 3974 - DNA, 20 bp, Homo sapiens
  source 1..20: mol_type = genomic DNA; note = Gene: GTF2F1; note = Location (start to end; relative to TSS): GTF2F1_28_58; note = Orientation (relative to transcription): sense; note = sgRNA Position: 6393112; note = Sequence Name: 56322-704_101_SL_seq_3974
tagggttggggtcctcgctc

SEQ ID NO: 3975 - DNA, 20 bp, Homo sapiens
  source 1..20: mol_type = genomic DNA; note = Gene: GTF2F1; note = Location (start to end; relative to TSS): GTF2F1_64_94; note = Orientation (relative to transcription): sense; note = sgRNA Position: 6393076; note = Sequence Name: 56322-704_101_SL_seq_3975
caccgagcggcggcttcccc

SEQ ID NO: 3976 - DNA, 20 bp, Homo sapiens
  source 1..20: mol_type = genomic DNA; note = Gene: GTF2F1; note = Location (start to end; relative to TSS): GTF2F1_26_56; note = Orientation (relative to transcription): antisense; note = sgRNA Position: 6393134; note = Sequence Name: 56322-704_101_SL_seq_3976
accccaaccctaggcgcctc

SEQ ID NO: 3977 - DNA, 20 bp, Homo sapiens
  source 1..20: mol_type = genomic DNA; note = Gene: GTF2F1; note = Location (start to end; relative to TSS): GTF2F1_63_93; note = Orientation (relative to transcription): sense; note = sgRNA Position: 6393077; note = Sequence Name: 56322-704_101_SL_seq_3977
acaccgagcggcggcttccc

SEQ ID NO: 3978 - DNA, 20 bp, Homo sapiens
  source 1..20: mol_type = genomic DNA; note = Gene: GTF2F1; note = Location (start to end; relative to TSS): GTF2F1_19_49; note = Orientation (relative to transcription): antisense; note = sgRNA Position: 6393141; note = Sequence Name: 56322-704_101_SL_seq_3978
ccctaggcgcctctggcgct

SEQ ID NO: 3979 - DNA, 20 bp, Homo sapiens
  source 1..20: mol_type = genomic DNA; note = Gene: GTF2F1; note = Location (start to end; relative to TSS): GTF2F1_49_79; note = Orientation (relative to transcription): antisense; note = sgRNA Position: 6393111; note = Sequence Name: 56322-704_101_SL_seq_3979
cgggtctctgtgcctgagcg

SEQ ID NO: 3980 - DNA, 20 bp, Homo sapiens
  source 1..20: mol_type = genomic DNA; note = Gene: GUCY2C; note = Location (start to end; relative to TSS): GUCY2C_44_74; note = Orientation (relative to transcription): sense; note = sgRNA Position: 14696531; note = Sequence Name: 56322-704_101_SL_seq_3980
tccactagaggctgtccatc

SEQ ID NO: 3981 - DNA, 20 bp, Homo sapiens
  source 1..20: mol_type = genomic DNA; note = Gene: GUCY2C; note = Location (start to end; relative to TSS): GUCY2C_84_114; note = Orientation (relative to transcription): antisense; note = sgRNA Position: 14696511; note = Sequence Name: 56322-704_101_SL_seq_3981
gctctgttgggctcctaggg

SEQ ID NO: 3982 - DNA, 20 bp, Homo sapiens
  source 1..20: mol_type = genomic DNA; note = Gene: GUCY2C; note = Location (start to end; relative to TSS): GUCY2C_32_62; note = Orientation (relative to transcription): sense; note = sgRNA Position: 14696543; note = Sequence Name: 56322-704_101_SL_seq_3982
gggctgagggactccactag

SEQ ID NO: 3983 - DNA, 20 bp, Homo sapiens
  source 1..20: mol_type = genomic DNA; note = Gene: GUCY2C; note = Location (start to end; relative to TSS): GUCY2C_80_110; note = Orientation (relative to transcription): antisense; note = sgRNA Position: 14696515; note = Sequence Name: 56322-704_101_SL_seq_3983
tgttgggctcctagggaggc

SEQ ID NO: 3984 - DNA, 20 bp, Homo sapiens
  source 1..20: mol_type = genomic DNA; note = Gene: GUCY2C; note = Location (start to end; relative to TSS): GUCY2C_19_49; note = Orientation (relative to transcription): sense; note = sgRNA Position: 14696556; note = Sequence Name: 56322-704_101_SL_seq_3984
cgtggggaagagtgggctga

SEQ ID NO: 3985 - DNA, 20 bp, Homo sapiens
  source 1..20: mol_type = genomic DNA; note = Gene: GUCY2C; note = Location (start to end; relative to TSS): GUCY2C_79_109; note = Orientation (relative to transcription): antisense; note = sgRNA Position: 14696516; note = Sequence Name: 56322-704_101_SL_seq_3985
gttgggctcctagggaggca

SEQ ID NO: 3986 - DNA, 20 bp, Homo sapiens
  source 1..20: mol_type = genomic DNA; note = Gene: GUCY2C; note = Location (start to end; relative to TSS): GUCY2C_18_48; note = Orientation (relative to transcription): sense; note = sgRNA Position: 14696557; note = Sequence Name: 56322-704_101_SL_seq_3986
gcgtggggaagagtgggctg

SEQ ID NO: 3987 - DNA, 20 bp, Homo sapiens
  source 1..20: mol_type = genomic DNA; note = Gene: GUCY2C; note = Location (start to end; relative to TSS): GUCY2C_62_92; note = Orientation (relative to transcription): sense; note = sgRNA Position: 14696513; note = Sequence Name: 56322-704_101_SL_seq_3987
tctggattccctgcctccct

SEQ ID NO: 3988 - DNA, 20 bp, Homo sapiens
  source 1..20: mol_type = genomic DNA; note = Gene: GUCY2C; note = Location (start to end; relative to TSS): GUCY2C_17_47; note = Orientation (relative to transcription): antisense; note = sgRNA Position: 14696578; note = Sequence Name: 56322-704_101_SL_seq_3988
ctcttccccacgcttctctc

SEQ ID NO: 3989 - DNA, 20 bp, Homo sapiens
  source 1..20: mol_type = genomic DNA; note = Gene: GUCY2C; note = Location (start to end; relative to TSS): GUCY2C_54_84; note = Orientation (relative to transcription): antisense; note = sgRNA Position: 14696541; note = Sequence Name: 56322-704_101_SL_seq_3989
tccagatggacagcctctag

SEQ ID NO: 3990 - DNA, 20 bp, Homo sapiens
  source 1..20: mol_type = genomic DNA; note = Gene: GUCY2D; note = Location (start to end; relative to TSS): GUCY2D_40_70; note = Orientation (relative to transcription): antisense; note = sgRNA Position: 8002661; note = Sequence Name: 56322-704_101_SL_seq_3990
cccttttgacgcccgcccac

SEQ ID NO: 3991 - DNA, 20 bp, Homo sapiens
  source 1..20: mol_type = genomic DNA; note = Gene: GUCY2D; note = Location (start to end; relative to TSS): GUCY2D_71_101; note = Orientation (relative to transcription): antisense; note = sgRNA Position: 8002692; note = Sequence Name: 56322-704_101_SL_seq_3991
ggcccccggtgaggggtcac

SEQ ID NO: 3992 - DNA, 20 bp, Homo sapiens
  source 1..20: mol_type = genomic DNA; note = Gene: GUCY2D; note = Location (start to end; relative to TSS): GUCY2D_33_63; note = Orientation (relative to transcription): sense; note = sgRNA Position: 8002674; note = Sequence Name: 56322-704_101_SL_seq_3992
tgtgggcgggcgtcaaaagg

SEQ ID NO: 3993 - DNA, 20 bp, Homo sapiens
  source 1..20: mol_type = genomic DNA; note = Gene: GUCY2D; note = Location (start to end; relative to TSS): GUCY2D_70_100; note = Orientation (relative to transcription): antisense; note = sgRNA Position: 8002691; note = Sequence Name: 56322-704_101_SL_seq_3993
gcccccggtgaggggtcaca

SEQ ID NO: 3994 - DNA, 20 bp, Homo sapiens
  source 1..20: mol_type = genomic DNA; note = Gene: GUCY2D; note = Location (start to end; relative to TSS): GUCY2D_32_62; note = Orientation (relative to transcription): sense; note = sgRNA Position: 8002673; note = Sequence Name: 56322-704_101_SL_seq_3994
ctgtgggcgggcgtcaaaag

SEQ ID NO: 3995 - DNA, 20 bp, Homo sapiens
  source 1..20: mol_type = genomic DNA; note = Gene: GUCY2D; note = Location (start to end; relative to TSS): GUCY2D_67_97; note = Orientation (relative to transcription): sense; note = sgRNA Position: 8002708; note = Sequence Name: 56322-704_101_SL_seq_3995
gacccctcaccgggggccgt

SEQ ID NO: 3996 - DNA, 20 bp, Homo sapiens
  source 1..20: mol_type = genomic DNA; note = Gene: GUCY2D; note = Location (start to end; relative to TSS): GUCY2D_31_61; note = Orientation (relative to transcription): sense; note = sgRNA Position: 8002672; note = Sequence Name: 56322-704_101_SL_seq_3996
cctgtgggcgggcgtcaaaa

SEQ ID NO: 3997 - DNA, 20 bp, Homo sapiens
  source 1..20: mol_type = genomic DNA; note = Gene: GUCY2D; note = Location (start to end; relative to TSS): GUCY2D_66_96; note = Orientation (relative to transcription): antisense; note = sgRNA Position: 8002687; note = Sequence Name: 56322-704_101_SL_seq_3997
ccggtgaggggtcacagggc

SEQ ID NO: 3998 - DNA, 20 bp, Homo sapiens
  source 1..20: mol_type = genomic DNA; note = Gene: GUCY2D; note = Location (start to end; relative to TSS): GUCY2D_30_60; note = Orientation (relative to transcription): sense; note = sgRNA Position: 8002671; note = Sequence Name: 56322-704_101_SL_seq_3998
acctgtgggcgggcgtcaaa

SEQ ID NO: 3999 - DNA, 20 bp, Homo sapiens
  source 1..20: mol_type = genomic DNA; note = Gene: GUCY2D; note = Location (start to end; relative to TSS): GUCY2D_60_90; note = Orientation (relative to transcription): sense; note = sgRNA Position: 8002701; note = Sequence Name: 56322-704_101_SL_seq_3999
gccctgtgacccctcaccgg

SEQ ID NO: 4000 - DNA, 20 bp, Homo sapiens
  source 1..20: mol_type = genomic DNA; note = Gene: GUCY2F; note = Location (start to end; relative to TSS): GUCY2F_71_101; note = Orientation (relative to transcription): antisense; note = sgRNA Position: 109482011; note = Sequence Name: 56322-704_101_SL_seq_4000
gttgacaaattccattaatg

SEQ ID NO: 4001 - DNA, 20 bp, Homo sapiens
  source 1..20: mol_type = genomic DNA; note = Gene: GUCY2F; note = Location (start to end; relative to TSS): GUCY2F_104_134; note = Orientation (relative to transcription): antisense; note = sgRNA Position: 109481978; note = Sequence Name: 56322-704_101_SL_seq_4001
atgcattcacaatcctgtca

SEQ ID NO: 4002 - DNA, 20 bp, Homo sapiens
  source 1..20: mol_type = genomic DNA; note = Gene: GUCY2F; note = Location (start to end; relative to TSS): GUCY2F_69_99; note = Orientation (relative to transcription): sense; note = sgRNA Position: 109481993; note = Sequence Name: 56322-704_101_SL_seq_4002
aatggaatttgtcaacagac

SEQ ID NO: 4003 - DNA, 20 bp, Homo sapiens
  source 1..20: mol_type = genomic DNA; note = Gene: GUCY2F; note = Location (start to end; relative to TSS): GUCY2F_100_130; note = Orientation (relative to transcription): sense; note = sgRNA Position: 109481962; note = Sequence Name: 56322-704_101_SL_seq_4003
acaggattgtgaatgcatag

SEQ ID NO: 4004 - DNA, 20 bp, Homo sapiens
  source 1..20: mol_type = genomic DNA; note = Gene: GUCY2F; note = Location (start to end; relative to TSS): GUCY2F_4_34; note = Orientation (relative to transcription): antisense; note = sgRNA Position: 109482078; note = Sequence Name: 56322-704_101_SL_seq_4004
agcatccgcagaccaagact

SEQ ID NO: 4005 - DNA, 20 bp, Homo sapiens
  source 1..20: mol_type = genomic DNA; note = Gene: GUCY2F; note = Location (start to end; relative to TSS): GUCY2F_82_112; note = Orientation (relative to transcription): sense; note = sgRNA Position: 109481980; note = Sequence Name: 56322-704_101_SL_seq_4005
aacagactggagtccttgac

SEQ ID NO: 4006 - DNA, 20 bp, Homo sapiens
  source 1..20: mol_type = genomic DNA; note = Gene: GUCY2F; note = Location (start to end; relative to TSS): GUCY2F_-2_28; note = Orientation (relative to transcription): antisense; note = sgRNA Position: 109482084; note = Sequence Name: 56322-704_101_SL_seq_4006
cgcagaccaagacttggatt

SEQ ID NO: 4007 - DNA, 20 bp, Homo sapiens
  source 1..20: mol_type = genomic DNA; note = Gene: GUCY2F; note = Location (start to end; relative to TSS): GUCY2F_71_101; note = Orientation (relative to transcription): antisense; note = sgRNA Position: 109482011; note = Sequence Name: 56322-704_101_SL_seq_4007
gttgacaaattccattaatg

SEQ ID NO: 4008 - DNA, 20 bp, Homo sapiens
  source 1..20: mol_type = genomic DNA; note = Gene: GUCY2F; note = Location (start to end; relative to TSS): GUCY2F_-10_20; note = Orientation (relative to transcription): sense; note = sgRNA Position: 109482072; note = Sequence Name: 56322-704_101_SL_seq_4008
ctaatccaagtcttggtctg

SEQ ID NO: 4009 - DNA, 20 bp, Homo sapiens
  source 1..20: mol_type = genomic DNA; note = Gene: GUCY2F; note = Location (start to end; relative to TSS): GUCY2F_69_99; note = Orientation (relative to transcription): sense; note = sgRNA Position: 109481993; note = Sequence Name: 56322-704_101_SL_seq_4009
aatggaatttgtcaacagac

SEQ ID NO: 4010 - DNA, 20 bp, Homo sapiens
  source 1..20: mol_type = genomic DNA; note = Gene: GUK1; note = Location (start to end; relative to TSS): GUK1_54_84; note = Orientation (relative to transcription): sense; note = sgRNA Position: 228140359; note = Sequence Name: 56322-704_101_SL_seq_4010
ctgggccgggccccaccgga

SEQ ID NO: 4011 - DNA, 20 bp, Homo sapiens
  source 1..20: mol_type = genomic DNA; note = Gene: GUK1; note = Location (start to end; relative to TSS): GUK1_89_119; note = Orientation (relative to transcription): sense; note = sgRNA Position: 228140394; note = Sequence Name: 56322-704_101_SL_seq_4011
gcgcgatcgcgagggtgact

SEQ ID NO: 4012 - DNA, 20 bp, Homo sapiens
  source 1..20: mol_type = genomic DNA; note = Gene: GUK1; note = Location (start to end; relative to TSS): GUK1_50_80; note = Orientation (relative to transcription): sense; note = sgRNA Position: 228140355; note = Sequence Name: 56322-704_101_SL_seq_4012
cgccctgggccgggccccac

SEQ ID NO: 4013 - DNA, 20 bp, Homo sapiens
  source 1..20: mol_type = genomic DNA; note = Gene: GUK1; note = Location (start to end; relative to TSS): GUK1_80_110; note = Orientation (relative to transcription): sense; note = sgRNA Position: 228140385; note = Sequence Name: 56322-704_101_SL_seq_4013
gtacgacaagcgcgatcgcg

SEQ ID NO: 4014 - DNA, 20 bp, Homo sapiens
  source 1..20: mol_type = genomic DNA; note = Gene: GUK1; note = Location (start to end; relative to TSS): GUK1_26_56; note = Orientation (relative to transcription): sense; note = sgRNA Position: 228140331; note = Sequence Name: 56322-704_101_SL_seq_4014
cccgctggccgggctggctg

SEQ ID NO: 4015 - DNA, 20 bp, Homo sapiens
  source 1..20: mol_type = genomic DNA; note = Gene: GUK1; note = Location (start to end; relative to TSS): GUK1_58_88; note = Orientation (relative to transcription): antisense; note = sgRNA Position: 228140343; note = Sequence Name: 56322-704_101_SL_seq_4015
cggtggggcccggcccaggg

SEQ ID NO: 4016 - DNA, 20 bp, Homo sapiens
  source 1..20: mol_type = genomic DNA; note = Gene: GUK1; note = Location (start to end; relative to TSS): GUK1_18_48; note = Orientation (relative to transcription): antisense; note = sgRNA Position: 228140303; note = Sequence Name: 56322-704_101_SL_seq_4016
agcgggcgccgcagcatccg

SEQ ID NO: 4017 - DNA, 20 bp, Homo sapiens
  source 1..20: mol_type = genomic DNA; note = Gene: GUK1; note = Location (start to end; relative to TSS): GUK1_54_84; note = Orientation (relative to transcription): sense; note = sgRNA Position: 228140359; note = Sequence Name: 56322-704_101_SL_seq_4017
ctgggccgggccccaccgga

SEQ ID NO: 4018 - DNA, 20 bp, Homo sapiens
  source 1..20: mol_type = genomic DNA; note = Gene: GUK1; note = Location (start to end; relative to TSS): GUK1_11_41; note = Orientation (relative to transcription): sense; note = sgRNA Position: 228140316; note = Sequence Name: 56322-704_101_SL_seq_4018
ccggatgctgcggcgcccgc

SEQ ID NO: 4019 - DNA, 20 bp, Homo sapiens
  source 1..20: mol_type = genomic DNA; note = Gene: GUK1; note = Location (start to end; relative to TSS): GUK1_50_80; note = Orientation (relative to transcription): sense; note = sgRNA Position: 228140355; note = Sequence Name: 56322-704_101_SL_seq_4019
cgccctgggccgggccccac

SEQ ID NO: 4020 - DNA, 20 bp, Homo sapiens
  source 1..20: mol_type = genomic DNA; note = Gene: HASPIN; note = Location (start to end; relative to TSS): HASPIN_34_64; note = Orientation (relative to transcription): sense; note = sgRNA Position: 3723963; note = Sequence Name: 56322-704_101_SL_seq_4020
cgctcccgggacctgggagc

SEQ ID NO: 4021 - DNA, 20 bp, Homo sapiens
  source 1..20: mol_type = genomic DNA; note = Gene: HASPIN; note = Location (start to end; relative to TSS): HASPIN_67_97; note = Orientation (relative to transcription): sense; note = sgRNA Position: 3723996; note = Sequence Name: 56322-704_101_SL_seq_4021
catatggggctgcggacggc

SEQ ID NO: 4022 - DNA, 20 bp, Homo sapiens
  source 1..20: mol_type = genomic DNA; note = Gene: HASPIN; note = Location (start to end; relative to TSS): HASPIN_31_61; note = Orientation (relative to transcription): antisense; note = sgRNA Position: 3723940; note = Sequence Name: 56322-704_101_SL_seq_4022
tcccgggagcgaagccgcca

SEQ ID NO: 4023 - DNA, 20 bp, Homo sapiens
  source 1..20: mol_type = genomic DNA; note = Gene: HASPIN; note = Location (start to end; relative to TSS): HASPIN_63_93; note = Orientation (relative to transcription): sense; note = sgRNA Position: 3723992; note = Sequence Name: 56322-704_101_SL_seq_4023
cgcacatatggggctgcgga

SEQ ID NO: 4024 - DNA, 20 bp, Homo sapiens
  source 1..20: mol_type = genomic DNA; note = Gene: HASPIN; note = Location (start to end; relative to TSS): HASPIN_28_58; note = Orientation (relative to transcription): sense; note = sgRNA Position: 3723957; note = Sequence Name: 56322-704_101_SL_seq_4024
cggcttcgctcccgggacct

SEQ ID NO: 4025 - DNA, 20 bp, Homo sapiens
  source 1..20: mol_type = genomic DNA; note = Gene: HASPIN; note = Location (start to end; relative to TSS): HASPIN_62_92; note = Orientation (relative to transcription): antisense; note = sgRNA Position: 3723971; note = Sequence Name: 56322-704_101_SL_seq_4025
ccccatatgtgcggaaaagc

SEQ ID NO: 4026 - DNA, 20 bp, Homo sapiens
  source 1..20: mol_type = genomic DNA; note = Gene: HASPIN; note = Location (start to end; relative to TSS): HASPIN_27_57; note = Orientation (relative to transcription): antisense; note = sgRNA Position: 3723936; note = Sequence Name: 56322-704_101_SL_seq_4026
gggagcgaagccgccatggc

SEQ ID NO: 4027 - DNA, 20 bp, Homo sapiens
  source 1..20: mol_type = genomic DNA; note = Gene: HASPIN; note = Location (start to end; relative to TSS): HASPIN_59_89; note = Orientation (relative to transcription): sense; note = sgRNA Position: 3723988; note = Sequence Name: 56322-704_101_SL_seq_4027
tttccgcacatatggggctg

SEQ ID NO: 4028 - DNA, 20 bp, Homo sapiens
  source 1..20: mol_type = genomic DNA; note = Gene: HASPIN; note = Location (start to end; relative to TSS): HASPIN_21_51; note = Orientation (relative to transcription): sense; note = sgRNA Position: 3723950; note = Sequence Name: 56322-704_101_SL_seq_4028
gccatggcggcttcgctccc

SEQ ID NO: 4029 - DNA, 20 bp, Homo sapiens
  source 1..20: mol_type = genomic DNA; note = Gene: HASPIN; note = Location (start to end; relative to TSS): HASPIN_52_82; note = Orientation (relative to transcription): sense; note = sgRNA Position: 3723981; note = Sequence Name: 56322-704_101_SL_seq_4029
gccggcttttccgcacatat

SEQ ID NO: 4030 - DNA, 20 bp, Homo sapiens
  source 1..20: mol_type = genomic DNA; note = Gene: HCK; note = Location (start to end; relative to TSS): HCK_43_73; note = Orientation (relative to transcription): sense; note = sgRNA Position: 32052311; note = Sequence Name: 56322-704_101_SL_seq_4030
ggaagggactcagacagtgc

SEQ ID NO: 4031 - DNA, 20 bp, Homo sapiens
  source 1..20: mol_type = genomic DNA; note = Gene: HCK; note = Location (start to end; relative to TSS): HCK_94_124; note = Orientation (relative to transcription): antisense; note = sgRNA Position: 32052342; note = Sequence Name: 56322-704_101_SL_seq_4031
ggcgacgctctgaggggctt

SEQ ID NO: 4032 - DNA, 20 bp, Homo sapiens
  source 1..20: mol_type = genomic DNA; note = Gene: HCK; note = Location (start to end; relative to TSS): HCK_27_57; note = Orientation (relative to transcription): sense; note = sgRNA Position: 32052295; note = Sequence Name: 56322-704_101_SL_seq_4032
ggcttagaggcgagtgggaa

SEQ ID NO: 4033 - DNA, 20 bp, Homo sapiens
  source 1..20: mol_type = genomic DNA; note = Gene: HCK; note = Location (start to end; relative to TSS): HCK_86_116; note = Orientation (relative to transcription): antisense; note = sgRNA Position: 32052334; note = Sequence Name: 56322-704_101_SL_seq_4033
tctgaggggctttggtgccg

SEQ ID NO: 4034 - DNA, 20 bp, Homo sapiens
  source 1..20: mol_type = genomic DNA; note = Gene: HCK; note = Location (start to end; relative to TSS): HCK_26_56; note = Orientation (relative to transcription): sense; note = sgRNA Position: 32052294; note = Sequence Name: 56322-704_101_SL_seq_4034
aggcttagaggcgagtggga

SEQ ID NO: 4035 - DNA, 20 bp, Homo sapiens
  source 1..20: mol_type = genomic DNA; note = Gene: HCK; note = Location (start to end; relative to TSS): HCK_85_115; note = Orientation (relative to transcription): antisense; note = sgRNA Position: 32052333; note = Sequence Name: 56322-704_101_SL_seq_4035
ctgaggggctttggtgccgc

SEQ ID NO: 4036 - DNA, 20 bp, Homo sapiens
  source 1..20: mol_type = genomic DNA; note = Gene: HCK; note = Location (start to end; relative to TSS): HCK_15_45; note = Orientation (relative to transcription): antisense; note = sgRNA Position: 32052263; note = Sequence Name: 56322-704_101_SL_seq_4036
cctctgatgtgctcccgagc

SEQ ID NO: 4037 - DNA, 20 bp, Homo sapiens
  source 1..20: mol_type = genomic DNA; note = Gene: HCK; note = Location (start to end; relative to TSS): HCK_60_90; note = Orientation (relative to transcription): sense; note = sgRNA Position: 32052328; note = Sequence Name: 56322-704_101_SL_seq_4037
tgcaggacgagaaacgcccg

SEQ ID NO: 4038 - DNA, 20 bp, Homo sapiens
  source 1..20: mol_type = genomic DNA; note = Gene: HCK; note = Location (start to end; relative to TSS): HCK_8_38; note = Orientation (relative to transcription): antisense; note = sgRNA Position: 32052256; note = Sequence Name: 56322-704_101_SL_seq_4038
tgtgctcccgagctgggacc

SEQ ID NO: 4039 - DNA, 20 bp, Homo sapiens
  source 1..20: mol_type = genomic DNA; note = Gene: HCK; note = Location (start to end; relative to TSS): HCK_43_73; note = Orientation (relative to transcription): sense; note = sgRNA Position: 32052311; note = Sequence Name: 56322-704_101_SL_seq_4039
ggaagggactcagacagtgc

SEQ ID NO: 4040 - DNA, 20 bp, Homo sapiens
  source 1..20: mol_type = genomic DNA; note = Gene: HIPK1; note = Location (start to end; relative to TSS): HIPK1_27_57; note = Orientation (relative to transcription): antisense; note = sgRNA Position: 113929357; note = Sequence Name: 56322-704_101_SL_seq_4040
ggtgatttaaaggtgcctgg

SEQ ID NO: 4041 - DNA, 20 bp, Homo sapiens
  source 1..20: mol_type = genomic DNA; note = Gene: HIPK1; note = Location (start to end; relative to TSS): HIPK1_87_117; note = Orientation (relative to transcription): antisense; note = sgRNA Position: 113929417; note = Sequence Name: 56322-704_101_SL_seq_4041
gccagcgtggatcgagtgcg

SEQ ID NO: 4042 - DNA, 20 bp, Homo sapiens
  source 1..20: mol_type = genomic DNA; note = Gene: HIPK1; note = Location (start to end; relative to TSS): HIPK1_45_75; note = Orientation (relative to transcription): sense; note = sgRNA Position: 113929395; note = Sequence Name: 56322-704_101_SL_seq_4042
agtctgcagtgcggaggggg

SEQ ID NO: 4043 - DNA, 20 bp, Homo sapiens
  source 1..20: mol_type = genomic DNA; note = Gene: HIPK1; note = Location (start to end; relative to TSS): HIPK1_82_112; note = Orientation (relative to transcription): antisense; note = sgRNA Position: 113929412; note = Sequence Name: 56322-704_101_SL_seq_4043
cgtggatcgagtgcggggcc

SEQ ID NO: 4044 - DNA, 20 bp, Homo sapiens
  source 1..20: mol_type = genomic DNA; note = Gene: HIPK1; note = Location (start to end; relative to TSS): HIPK1_24_54; note = Orientation (relative to transcription): antisense; note = sgRNA Position: 113929354; note = Sequence Name: 56322-704_101_SL_seq_4044
gatttaaaggtgcctggcgg

SEQ ID NO: 4045 - DNA, 20 bp, Homo sapiens
  source 1..20: mol_type = genomic DNA; note = Gene: HIPK1; note = Location (start to end; relative to TSS): HIPK1_77_107; note = Orientation (relative to transcription): sense; note = sgRNA Position: 113929427; note = Sequence Name: 56322-704_101_SL_seq_4045
gccccgcactcgatccacgc

SEQ ID NO: 4046 - DNA, 20 bp, Homo sapiens
  source 1..20: mol_type = genomic DNA; note = Gene: HIPK1; note = Location (start to end; relative to TSS): HIPK1_19_49; note = Orientation (relative to transcription): antisense; note = sgRNA Position: 113929349; note = Sequence Name: 56322-704_101_SL_seq_4046
aaaggtgcctggcggtggta

SEQ ID NO: 4047 - DNA, 20 bp, Homo sapiens
  source 1..20: mol_type = genomic DNA; note = Gene: HIPK1; note = Location (start to end; relative to TSS): HIPK1_55_85; note = Orientation (relative to transcription): sense; note = sgRNA Position: 113929405; note = Sequence Name: 56322-704_101_SL_seq_4047
gcggagggggcgggaagtcc

SEQ ID NO: 4048 - DNA, 20 bp, Homo sapiens
  source 1..20: mol_type = genomic DNA; note = Gene: HIPK1; note = Location (start to end; relative to TSS): HIPK1_18_48; note = Orientation (relative to transcription): antisense; note = sgRNA Position: 113929348; note = Sequence Name: 56322-704_101_SL_seq_4048
aaggtgcctggcggtggtac

SEQ ID NO: 4049 - DNA, 20 bp, Homo sapiens
  source 1..20: mol_type = genomic DNA; note = Gene: HIPK1; note = Location (start to end; relative to TSS): HIPK1_48_78; note = Orientation (relative to transcription): antisense; note = sgRNA Position: 113929378; note = Sequence Name: 56322-704_101_SL_seq_4049
cctccgcactgcagactctg

SEQ ID NO: 4050 - DNA, 20 bp, Homo sapiens
  source 1..20: mol_type = genomic DNA; note = Gene: HIPK2; note = Location (start to end; relative to TSS): HIPK2_48_78; note = Orientation (relative to transcription): antisense; note = sgRNA Position: 139777946; note = Sequence Name: 56322-704_101_SL_seq_4050
gagcggatccgcggaggggc

SEQ ID NO: 4051 - DNA, 20 bp, Homo sapiens
  source 1..20: mol_type = genomic DNA; note = Gene: HIPK2; note = Location (start to end; relative to TSS): HIPK2_89_119; note = Orientation (relative to transcription): sense; note = sgRNA Position: 139777885; note = Sequence Name: 56322-704_101_SL_seq_4051
cctcggccgctccgcccgcc

SEQ ID NO: 4052 - DNA, 20 bp, Homo sapiens
  source 1..20: mol_type = genomic DNA; note = Gene: HIPK2; note = Location (start to end; relative to TSS): HIPK2_49_79; note = Orientation (relative to transcription): antisense; note = sgRNA Position: 139777945; note = Sequence Name: 56322-704_101_SL_seq_4052
cgagcggatccgcggagggg

SEQ ID NO: 4053 - DNA, 20 bp, Homo sapiens
  source 1..20: mol_type = genomic DNA; note = Gene: HIPK2; note = Location (start to end; relative to TSS): HIPK2_82_112; note = Orientation (relative to transcription): antisense; note = sgRNA Position: 139777912; note = Sequence Name: 56322-704_101_SL_seq_4053
gccgaggccgaggcgccgag

SEQ ID NO: 4054 - DNA, 20 bp, Homo sapiens
  source 1..20: mol_type = genomic DNA; note = Gene: HIPK2; note = Location (start to end; relative to TSS): HIPK2_50_80; note = Orientation (relative to transcription): sense; note = sgRNA Position: 139777924; note = Sequence Name: 56322-704_101_SL_seq_4054
gcggatccgctcgggggccg

SEQ ID NO: 4055 - DNA, 20 bp, Homo sapiens
  source 1..20: mol_type = genomic DNA; note = Gene: HIPK2; note = Location (start to end; relative to TSS): HIPK2_82_112; note = Orientation (relative to transcription): antisense; note = sgRNA Position: 139777912; note = Sequence Name: 56322-704_101_SL_seq_4055
gccgaggccgaggcgccgag

SEQ ID NO: 4056 - DNA, 20 bp, Homo sapiens
  source 1..20: mol_type = genomic DNA; note = Gene: HIPK2; note = Location (start to end; relative to TSS): HIPK2_31_61; note = Orientation (relative to transcription): sense; note = sgRNA Position: 139777943; note = Sequence Name: 56322-704_101_SL_seq_4056
ccccggctcccgcccctccg

SEQ ID NO: 4057 - DNA, 20 bp, Homo sapiens
  source 1..20: mol_type = genomic DNA; note = Gene: HIPK2; note = Location (start to end; relative to TSS): HIPK2_65_95; note = Orientation (relative to transcription): antisense; note = sgRNA Position: 139777929; note = Sequence Name: 56322-704_101_SL_seq_4057
gagcggccgcggcccccgag

SEQ ID NO: 4058 - DNA, 20 bp, Homo sapiens
  source 1..20: mol_type = genomic DNA; note = Gene: HIPK2; note = Location (start to end; relative to TSS): HIPK2_14_44; note = Orientation (relative to transcription): antisense; note = sgRNA Position: 139777980; note = Sequence Name: 56322-704_101_SL_seq_4058
gcgcgcggccagggccggcg

SEQ ID NO: 4059 - DNA, 20 bp, Homo sapiens
  source 1..20: mol_type = genomic DNA; note = Gene: HIPK2; note = Location (start to end; relative to TSS): HIPK2_44_74; note = Orientation (relative to transcription): sense; note = sgRNA Position: 139777930; note = Sequence Name: 56322-704_101_SL_seq_4059
ccctccgcggatccgctcgg

SEQ ID NO: 4060 - DNA, 20 bp, Homo sapiens
  source 1..20: mol_type = genomic DNA; note = Gene: HIPK3; note = Location (start to end; relative to TSS): HIPK3_41_71; note = Orientation (relative to transcription): antisense; note = sgRNA Position: 33257428; note = Sequence Name: 56322-704_101_SL_seq_4060
gcctgcggcttgatctcctc

SEQ ID NO: 4061 - DNA, 20 bp, Homo sapiens
  source 1..20: mol_type = genomic DNA; note = Gene: HIPK3; note = Location (start to end; relative to TSS): HIPK3_84_114; note = Orientation (relative to transcription): sense; note = sgRNA Position: 33257491; note = Sequence Name: 56322-704_101_SL_seq_4061
tccttctccgctcccggccg

SEQ ID NO: 4062 - DNA, 20 bp, Homo sapiens
  source 1..20: mol_type = genomic DNA; note = Gene: HIPK3; note = Location (start to end; relative to TSS): HIPK3_31_61; note = Orientation (relative to transcription): sense; note = sgRNA Position: 33257438; note = Sequence Name: 56322-704_101_SL_seq_4062
acctgaggagatcaagccgc

SEQ ID NO: 4063 - DNA, 20 bp, Homo sapiens
  source 1..20: mol_type = genomic DNA; note = Gene: HIPK3; note = Location (start to end; relative to TSS): HIPK3_64_94; note = Orientation (relative to transcription): antisense; note = sgRNA Position: 33257451; note = Sequence Name: 56322-704_101_SL_seq_4063
gcgggagtggtggcgacggc

SEQ ID NO: 4064 - DNA, 20 bp, Homo sapiens
  source 1..20: mol_type = genomic DNA; note = Gene: HIPK3; note = Location (start to end; relative to TSS): HIPK3_26_56; note = Orientation (relative to transcription): antisense; note = sgRNA Position: 33257413; note = Sequence Name: 56322-704_101_SL_seq_4064
tcctcaggtcgccgcgatgc

SEQ ID NO: 4065 - DNA, 20 bp, Homo sapiens
  source 1..20: mol_type = genomic DNA; note = Gene: HIPK3; note = Location (start to end; relative to TSS): HIPK3_63_93; note = Orientation (relative to transcription): antisense; note = sgRNA Position: 33257450; note = Sequence Name: 56322-704_101_SL_seq_4065
cgggagtggtggcgacggcg

SEQ ID NO: 4066 - DNA, 20 bp, Homo sapiens
  source 1..20: mol_type = genomic DNA; note = Gene: HIPK3; note = Location (start to end; relative to TSS): HIPK3_16_46; note = Orientation (relative to transcription): sense; note = sgRNA Position: 33257423; note = Sequence Name: 56322-704_101_SL_seq_4066
gccggcatcgcggcgacctg

SEQ ID NO: 4067 - DNA, 20 bp, Homo sapiens
  source 1..20: mol_type = genomic DNA; note = Gene: HIPK3; note = Location (start to end; relative to TSS): HIPK3_56_86; note = Orientation (relative to transcription): antisense; note = sgRNA Position: 33257443; note = Sequence Name: 56322-704_101_SL_seq_4067
ggtggcgacggcggggcctg

SEQ ID NO: 4068 - DNA, 20 bp, Homo sapiens
  source 1..20: mol_type = genomic DNA; note = Gene: HIPK3; note = Location (start to end; relative to TSS): HIPK3_11_41; note = Orientation (relative to transcription): antisense; note = sgRNA Position: 33257398; note = Sequence Name: 56322-704_101_SL_seq_4068
gatgccggcagtcgtcactg

SEQ ID NO: 4069 - DNA, 20 bp, Homo sapiens
  source 1..20: mol_type = genomic DNA; note = Gene: HIPK3; note = Location (start to end; relative to TSS): HIPK3_41_71; note = Orientation (relative to transcription): antisense; note = sgRNA Position: 33257428; note = Sequence Name: 56322-704_101_SL_seq_4069
gcctgcggcttgatctcctc

SEQ ID NO: 4070 - DNA, 20 bp, Homo sapiens
  source 1..20: mol_type = genomic DNA; note = Gene: HIPK4; note = Location (start to end; relative to TSS): HIPK4_32_62; note = Orientation (relative to transcription): antisense; note = sgRNA Position: 40390145; note = Sequence Name: 56322-704_101_SL_seq_4070
ggcttgggatgaggggcccc

SEQ ID NO: 4071 - DNA, 20 bp, Homo sapiens
  source 1..20: mol_type = genomic DNA; note = Gene: HIPK4; note = Location (start to end; relative to TSS): HIPK4_80_110; note = Orientation (relative to transcription): sense; note = sgRNA Position: 40390077; note = Sequence Name: 56322-704_101_SL_seq_4071
agactgacagtgtggcctgg

SEQ ID NO: 4072 - DNA, 20 bp, Homo sapiens
  source 1..20: mol_type = genomic DNA; note = Gene: HIPK4; note = Location (start to end; relative to TSS): HIPK4_40_70; note = Orientation (relative to transcription): antisense; note = sgRNA Position: 40390137; note = Sequence Name: 56322-704_101_SL_seq_4072
accctcctggcttgggatga

SEQ ID NO: 4073 - DNA, 20 bp, Homo sapiens
  source 1..20: mol_type = genomic DNA; note = Gene: HIPK4; note = Location (start to end; relative to TSS): HIPK4_79_109; note = Orientation (relative to transcription): sense; note = sgRNA Position: 40390078; note = Sequence Name: 56322-704_101_SL_seq_4073
cagactgacagtgtggcctg

SEQ ID NO: 4074 - DNA, 20 bp, Homo sapiens
  source 1..20: mol_type = genomic DNA; note = Gene: HIPK4; note = Location (start to end; relative to TSS): HIPK4_41_71; note = Orientation (relative to transcription): antisense; note = sgRNA Position: 40390136; note = Sequence Name: 56322-704_101_SL_seq_4074
aaccctcctggcttgggatg

SEQ ID NO: 4075 - DNA, 20 bp, Homo sapiens
  source 1..20: mol_type = genomic DNA; note = Gene: HIPK4; note = Location (start to end; relative to TSS): HIPK4_78_108; note = Orientation (relative to transcription): sense; note = sgRNA Position: 40390079; note = Sequence Name: 56322-704_101_SL_seq_4075
gcagactgacagtgtggcct

SEQ ID NO: 4076 - DNA, 20 bp, Homo sapiens
  source 1..20: mol_type = genomic DNA; note = Gene: HIPK4; note = Location (start to end; relative to TSS): HIPK4_42_72; note = Orientation (relative to transcription): sense; note = sgRNA Position: 40390115; note = Sequence Name: 56322-704_101_SL_seq_4076
agccaggagggtttctgggg

SEQ ID NO: 4077 - DNA, 20 bp, Homo sapiens
  source 1..20: mol_type = genomic DNA; note = Gene: HIPK4; note = Location (start to end; relative to TSS): HIPK4_72_102; note = Orientation (relative to transcription): sense; note = sgRNA Position: 40390085; note = Sequence Name: 56322-704_101_SL_seq_4077
cccctggcagactgacagtg

SEQ ID NO: 4078 - DNA, 20 bp, Homo sapiens
  source 1..20: mol_type = genomic DNA; note = Gene: HIPK4; note = Location (start to end; relative to TSS): HIPK4_18_48; note = Orientation (relative to transcription): antisense; note = sgRNA Position: 40390159; note = Sequence Name: 56322-704_101_SL_seq_4078
ggccccaggccccaccgaat

SEQ ID NO: 4079 - DNA, 20 bp, Homo sapiens
  source 1..20: mol_type = genomic DNA; note = Gene: HIPK4; note = Location (start to end; relative to TSS): HIPK4_48_78; note = Orientation (relative to transcription): antisense; note = sgRNA Position: 40390129; note = Sequence Name: 56322-704_101_SL_seq_4079
ccccagaaaccctcctggct

SEQ ID NO: 4080 - DNA, 20 bp, Homo sapiens
  source 1..20: mol_type = genomic DNA; note = Gene: HUNK; note = Location (start to end; relative to TSS): HUNK_49_79; note = Orientation (relative to transcription): antisense; note = sgRNA Position: 31873075; note = Sequence Name: 56322-704_101_SL_seq_4080
ttaatccgctcgcgggcggc

SEQ ID NO: 4081 - DNA, 20 bp, Homo sapiens
  source 1..20: mol_type = genomic DNA; note = Gene: HUNK; note = Location (start to end; relative to TSS): HUNK_123_153; note = Orientation (relative to transcription): sense; note = sgRNA Position: 31873169; note = Sequence Name: 56322-704_101_SL_seq_4081
gcccgccgcgcgcttctctc

SEQ ID NO: 4082 - DNA, 20 bp, Homo sapiens
  source 1..20: mol_type = genomic DNA; note = Gene: HUNK; note = Location (start to end; relative to TSS): HUNK_50_80; note = Orientation (relative to transcription): antisense; note = sgRNA Position: 31873076; note = Sequence Name: 56322-704_101_SL_seq_4082
tttaatccgctcgcgggcgg

SEQ ID NO: 4083 - DNA, 20 bp, Homo sapiens
  source 1..20: mol_type = genomic DNA; note = Gene: HUNK; note = Location (start to end; relative to TSS): HUNK_116_146; note = Orientation (relative to transcription): antisense; note = sgRNA Position: 31873142; note = Sequence Name: 56322-704_101_SL_seq_4083
ggcgggctgccggcgccctc

SEQ ID NO: 4084 - DNA, 20 bp, Homo sapiens
  source 1..20: mol_type = genomic DNA; note = Gene: HUNK; note = Location (start to end; relative to TSS): HUNK_53_83; note = Orientation (relative to transcription): antisense; note = sgRNA Position: 31873079; note = Sequence Name: 56322-704_101_SL_seq_4084
aaatttaatccgctcgcggg

SEQ ID NO: 4085 - DNA, 20 bp, Homo sapiens
  source 1..20: mol_type = genomic DNA; note = Gene: HUNK; note = Location (start to end; relative to TSS): HUNK_112_142; note = Orientation (relative to transcription): antisense; note = sgRNA Position: 31873138; note = Sequence Name: 56322-704_101_SL_seq_4085
ggctgccggcgccctctgga

SEQ ID NO: 4086 - DNA, 20 bp, Homo sapiens
  source 1..20: mol_type = genomic DNA; note = Gene: HUNK; note = Location (start to end; relative to TSS): HUNK_56_86; note = Orientation (relative to transcription): antisense; note = sgRNA Position: 31873082; note = Sequence Name: 56322-704_101_SL_seq_4086
cagaaatttaatccgctcgc

SEQ ID NO: 4087 - DNA, 20 bp, Homo sapiens
  source 1..20: mol_type = genomic DNA; note = Gene: HUNK; note = Location (start to end; relative to TSS): HUNK_91_121; note = Orientation (relative to transcription): sense; note = sgRNA Position: 31873137; note = Sequence Name: 56322-704_101_SL_seq_4087
tttcttctgctgccttccag

SEQ ID NO: 4088 - DNA, 20 bp, Homo sapiens
  source 1..20: mol_type = genomic DNA; note = Gene: HUNK; note = Location (start to end; relative to TSS): HUNK_35_65; note = Orientation (relative to transcription): sense; note = sgRNA Position: 31873081; note = Sequence Name: 56322-704_101_SL_seq_4088
ctgttcccgccgcccgcgag

SEQ ID NO: 4089 - DNA, 20 bp, Homo sapiens
  source 1..20: mol_type = genomic DNA; note = Gene: HUNK; note = Location (start to end; relative to TSS): HUNK_65_95; note = Orientation (relative to transcription): sense; note = sgRNA Position: 31873111; note = Sequence Name: 56322-704_101_SL_seq_4089
ttctgcaaattcaaactgaa

SEQ ID NO: 4090 - DNA, 20 bp, Homo sapiens
  source 1..20: mol_type = genomic DNA; note = Gene: HYKK; note = Location (start to end; relative to TSS): HYKK_46_76; note = Orientation (relative to transcription): antisense; note = sgRNA Position: 78507629; note = Sequence Name: 56322-704_101_SL_seq_4090
gatcccgctttcccgcagac

SEQ ID NO: 4091 - DNA, 20 bp, Homo sapiens
  source 1..20: mol_type = genomic DNA; note = Gene: HYKK; note = Location (start to end; relative to TSS): HYKK_77_107; note = Orientation (relative to transcription): sense; note = sgRNA Position: 78507680; note = Sequence Name: 56322-704_101_SL_seq_4091
tcgctgccggtgagccaagg

SEQ ID NO: 4092 - DNA, 20 bp, Homo sapiens
  source 1..20: mol_type = genomic DNA; note = Gene: HYKK; note = Location (start to end; relative to TSS): HYKK_32_62; note = Orientation (relative to transcription): antisense; note = sgRNA Position: 78507615; note = Sequence Name: 56322-704_101_SL_seq_4092
gcagacaggtagtgcggcct

SEQ ID NO: 4093 - DNA, 20 bp, Homo sapiens
  source 1..20: mol_type = genomic DNA; note = Gene: HYKK; note = Location (start to end; relative to TSS): HYKK_71_101; note = Orientation (relative to transcription): antisense; note = sgRNA Position: 78507654; note = Sequence Name: 56322-704_101_SL_seq_4093
ggcagcgacccgacgtcctg

SEQ ID NO: 4094 - DNA, 20 bp, Homo sapiens
  source 1..20: mol_type = genomic DNA; note = Gene: HYKK; note = Location (start to end; relative to TSS): HYKK_33_63; note = Orientation (relative to transcription): sense; note = sgRNA Position: 78507636; note = Sequence Name: 56322-704_101_SL_seq_4094
actacctgtctgcgggaaag

SEQ ID NO: 4095 - DNA, 20 bp, Homo sapiens
  source 1..20: mol_type = genomic DNA; note = Gene: HYKK; note = Location (start to end; relative to TSS): HYKK_68_98; note = Orientation (relative to transcription): antisense; note = sgRNA Position: 78507651; note = Sequence Name: 56322-704_101_SL_seq_4095
agcgacccgacgtcctgggg

SEQ ID NO: 4096 - DNA, 20 bp, Homo sapiens
  source 1..20: mol_type = genomic DNA; note = Gene: HYKK; note = Location (start to end; relative to TSS): HYKK_26_56; note = Orientation (relative to transcription): sense; note = sgRNA Position: 78507629; note = Sequence Name: 56322-704_101_SL_seq_4096
aggccgcactacctgtctgc

SEQ ID NO: 4097 - DNA, 20 bp, Homo sapiens
  source 1..20: mol_type = genomic DNA; note = Gene: HYKK; note = Location (start to end; relative to TSS): HYKK_64_94; note = Orientation (relative to transcription): sense; note = sgRNA Position: 78507667; note = Sequence Name: 56322-704_101_SL_seq_4097
ccaggacgtcgggtcgctgc

SEQ ID NO: 4098 - DNA, 20 bp, Homo sapiens
  source 1..20: mol_type = genomic DNA; note = Gene: HYKK; note = Location (start to end; relative to TSS): HYKK_21_51; note = Orientation (relative to transcription): antisense; note = sgRNA Position: 78507604; note = Sequence Name: 56322-704_101_SL_seq_4098
gtgcggcctcggccgcgcac

SEQ ID NO: 4099 - DNA, 20 bp, Homo sapiens
  source 1..20: mol_type = genomic DNA; note = Gene: HYKK; note = Location (start to end; relative to TSS): HYKK_53_83; note = Orientation (relative to transcription): sense; note = sgRNA Position: 78507656; note = Sequence Name: 56322-704_101_SL_seq_4099
cgggatccaccccaggacgt

SEQ ID NO: 4100 - DNA, 20 bp, Homo sapiens
  source 1..20: mol_type = genomic DNA; note = Gene: IGF1R; note = Location (start to end; relative to TSS): IGF1R_62_92; note = Orientation (relative to transcription): antisense; note = sgRNA Position: 98648607; note = Sequence Name: 56322-704_101_SL_seq_4100
ccctttttttttccgctcag

SEQ ID NO: 4101 - DNA, 20 bp, Homo sapiens
  source 1..20: mol_type = genomic DNA; note = Gene: IGF1R; note = Location (start to end; relative to TSS): IGF1R_102_132; note = Orientation (relative to transcription): sense; note = sgRNA Position: 98648667; note = Sequence Name: 56322-704_101_SL_seq_4101
ccaggcgaactcgagagagg

SEQ ID NO: 4102 - DNA, 20 bp, Homo sapiens
  source 1..20: mol_type = genomic DNA; note = Gene: IGF1R; note = Location (start to end; relative to TSS): IGF1R_41_71; note = Orientation (relative to transcription): sense; note = sgRNA Position: 98648606; note = Sequence Name: 56322-704_101_SL_seq_4102
ccagcattaactccgctgag

SEQ ID NO: 4103 - DNA, 20 bp, Homo sapiens
  source 1..20: mol_type = genomic DNA; note = Gene: IGF1R; note = Location (start to end; relative to TSS): IGF1R_99_129; note = Orientation (relative to transcription): sense; note = sgRNA Position: 98648664; note = Sequence Name: 56322-704_101_SL_seq_4103
gcaccaggcgaactcgagag

SEQ ID NO: 4104 - DNA, 20 bp, Homo sapiens
  source 1..20: mol_type = genomic DNA; note = Gene: IGF1R; note = Location (start to end; relative to TSS): IGF1R_50_80; note = Orientation (relative to transcription): antisense; note = sgRNA Position: 98648595; note = Sequence Name: 56322-704_101_SL_seq_4104
ccgctcagcggagttaatgc

SEQ ID NO: 4105 - DNA, 20 bp, Homo sapiens
  source 1..20: mol_type = genomic DNA; note = Gene: IGF1R; note = Location (start to end; relative to TSS): IGF1R_92_122; note = Orientation (relative to transcription): antisense; note = sgRNA Position: 98648637; note = Sequence Name: 56322-704_101_SL_seq_4105
ctggtgcgctcgctcctcct

SEQ ID NO: 4106 - DNA, 20 bp, Homo sapiens
  source 1..20: mol_type = genomic DNA; note = Gene: IGF1R; note = Location (start to end; relative to TSS): IGF1R_52_82; note = Orientation (relative to transcription): sense; note = sgRNA Position: 98648617; note = Sequence Name: 56322-704_101_SL_seq_4106
tccgctgagcggaaaaaaaa

SEQ ID NO: 4107 - DNA, 20 bp, Homo sapiens
  source 1..20: mol_type = genomic DNA; note = Gene: IGF1R; note = Location (start to end; relative to TSS): IGF1R_91_121; note = Orientation (relative to transcription): antisense; note = sgRNA Position: 98648636; note = Sequence Name: 56322-704_101_SL_seq_4107
tggtgcgctcgctcctcctc

SEQ ID NO: 4108 - DNA, 20 bp, Homo sapiens
  source 1..20: mol_type = genomic DNA; note = Gene: IGF1R; note = Location (start to end; relative to TSS): IGF1R_53_83; note = Orientation (relative to transcription): sense; note = sgRNA Position: 98648618; note = Sequence Name: 56322-704_101_SL_seq_4108
ccgctgagcggaaaaaaaaa

SEQ ID NO: 4109 - DNA, 20 bp, Homo sapiens
  source 1..20: mol_type = genomic DNA; note = Gene: IGF1R; note = Location (start to end; relative to TSS): IGF1R_84_114; note = Orientation (relative to transcription): sense; note = sgRNA Position: 98648649; note = Sequence Name: 56322-704_101_SL_seq_4109
cgaggaggagcgagcgcacc

SEQ ID NO: 4110 - DNA, 20 bp, Homo sapiens
  source 1..20: mol_type = genomic DNA; note = Gene: IKBKB; note = Location (start to end; relative to TSS): IKBKB_45_75; note = Orientation (relative to transcription): antisense; note = sgRNA Position: 42271353; note = Sequence Name: 56322-704_101_SL_seq_4110
aaaatgcgggaatcttaacg

SEQ ID NO: 4111 - DNA, 20 bp, Homo sapiens
  source 1..20: mol_type = genomic DNA; note = Gene: IKBKB; note = Location (start to end; relative to TSS): IKBKB_103_133; note = Orientation (relative to transcription): sense; note = sgRNA Position: 42271431; note = Sequence Name: 56322-704_101_SL_seq_4111
gccccgccttccccgccccg

SEQ ID NO: 4112 - DNA, 20 bp, Homo sapiens
  source 1..20: mol_type = genomic DNA; note = Gene: IKBKB; note = Location (start to end; relative to TSS): IKBKB_44_74; note = Orientation (relative to transcription): antisense; note = sgRNA Position: 42271352; note = Sequence Name: 56322-704_101_SL_seq_4112
aaatgcgggaatcttaacgc

SEQ ID NO: 4113 - DNA, 20 bp, Homo sapiens
  source 1..20: mol_type = genomic DNA; note = Gene: IKBKB; note = Location (start to end; relative to TSS): IKBKB_101_131; note = Orientation (relative to transcription): sense; note = sgRNA Position: 42271429; note = Sequence Name: 56322-704_101_SL_seq_4113
cagccccgccttccccgccc

SEQ ID NO: 4114 - DNA, 20 bp, Homo sapiens
  source 1..20: mol_type = genomic DNA; note = Gene: IKBKB; note = Location (start to end; relative to TSS): IKBKB_49_79; note = Orientation (relative to transcription): sense; note = sgRNA Position: 42271377; note = Sequence Name: 56322-704_101_SL_seq_4114
cccgcattttaatgttttca

SEQ ID NO: 4115 - DNA, 20 bp, Homo sapiens
  source 1..20: mol_type = genomic DNA; note = Gene: IKBKB; note = Location (start to end; relative to TSS): IKBKB_93_123; note = Orientation (relative to transcription): antisense; note = sgRNA Position: 42271401; note = Sequence Name: 56322-704_101_SL_seq_4115
gggctggggcggccaaaccc

SEQ ID NO: 4116 - DNA, 20 bp, Homo sapiens
  source 1..20: mol_type = genomic DNA; note = Gene: IKBKB; note = Location (start to end; relative to TSS): IKBKB_50_80; note = Orientation (relative to transcription): sense; note = sgRNA Position: 42271378; note = Sequence Name: 56322-704_101_SL_seq_4116
ccgcattttaatgttttcag

SEQ ID NO: 4117 - DNA, 20 bp, Homo sapiens
  source 1..20: mol_type = genomic DNA; note = Gene: IKBKB; note = Location (start to end; relative to TSS): IKBKB_92_122; note = Orientation (relative to transcription): antisense; note = sgRNA Position: 42271400; note = Sequence Name: 56322-704_101_SL_seq_4117
ggctggggcggccaaacccg

SEQ ID NO: 4118 - DNA, 20 bp, Homo sapiens
  source 1..20: mol_type = genomic DNA; note = Gene: IKBKB; note = Location (start to end; relative to TSS): IKBKB_36_66; note = Orientation (relative to transcription): antisense; note = sgRNA Position: 42271344; note = Sequence Name: 56322-704_101_SL_seq_4118
gaatcttaacgcgggcagcg

SEQ ID NO: 4119 - DNA, 20 bp, Homo sapiens
  source 1..20: mol_type = genomic DNA; note = Gene: IKBKB; note = Location (start to end; relative to TSS): IKBKB_66_96; note = Orientation (relative to transcription): sense; note = sgRNA Position: 42271394; note = Sequence Name: 56322-704_101_SL_seq_4119
tcaggggggtgtcatagccc

SEQ ID NO: 4120 - DNA, 20 bp, Homo sapiens
  source 1..20: mol_type = genomic DNA; note = Gene: IKBKE; note = Location (start to end; relative to TSS): IKBKE_35_65; note = Orientation (relative to transcription): sense; note = sgRNA Position: 206470537; note = Sequence Name: 56322-704_101_SL_seq_4120
aacccactagtcccagctcc

SEQ ID NO: 4121 - DNA, 20 bp, Homo sapiens
  source 1..20: mol_type = genomic DNA; note = Gene: IKBKE; note = Location (start to end; relative to TSS): IKBKE_71_101; note = Orientation (relative to transcription): sense; note = sgRNA Position: 206470573; note = Sequence Name: 56322-704_101_SL_seq_4121
ttgcaactggccctgcctgt

SEQ ID NO: 4122 - DNA, 20 bp, Homo sapiens
  source 1..20: mol_type = genomic DNA; note = Gene: IKBKE; note = Location (start to end; relative to TSS): IKBKE_36_66; note = Orientation (relative to transcription): sense; note = sgRNA Position: 206470538; note = Sequence Name: 56322-704_101_SL_seq_4122
acccactagtcccagctcct

SEQ ID NO: 4123 - DNA, 20 bp, Homo sapiens
  source 1..20: mol_type = genomic DNA; note = Gene: IKBKE; note = Location (start to end; relative to TSS): IKBKE_70_100; note = Orientation (relative to transcription): sense; note = sgRNA Position: 206470572; note = Sequence Name: 56322-704_101_SL_seq_4123
attgcaactggccctgcctg

SEQ ID NO: 4124 - DNA, 20 bp, Homo sapiens
  source 1..20: mol_type = genomic DNA; note = Gene: IKBKE; note = Location (start to end; relative to TSS): IKBKE_18_48; note = Orientation (relative to transcription): antisense; note = sgRNA Position: 206470500; note = Sequence Name: 56322-704_101_SL_seq_4124
tccctgcctccttgtggcgg

SEQ ID NO: 4125 - DNA, 20 bp, Homo sapiens
  source 1..20: mol_type = genomic DNA; note = Gene: IKBKE; note = Location (start to end; relative to TSS): IKBKE_58_88; note = Orientation (relative to transcription): sense; note = sgRNA Position: 206470560; note = Sequence Name: 56322-704_101_SL_seq_4125
ggtggcacagacattgcaac

SEQ ID NO: 4126 - DNA, 20 bp, Homo sapiens
  source 1..20: mol_type = genomic DNA; note = Gene: IKBKE; note = Location (start to end; relative to TSS): IKBKE_21_51; note = Orientation (relative to transcription): antisense; note = sgRNA Position: 206470503; note = Sequence Name: 56322-704_101_SL_seq_4126
tcttccctgcctccttgtgg

SEQ ID NO: 4127 - DNA, 20 bp, Homo sapiens
  source 1..20: mol_type = genomic DNA; note = Gene: IKBKE; note = Location (start to end; relative to TSS): IKBKE_56_86; note = Orientation (relative to transcription): antisense; note = sgRNA Position: 206470538; note = Sequence Name: 56322-704_101_SL_seq_4127
gtctgtgccaccccaggagc

SEQ ID NO: 4128 - DNA, 20 bp, Homo sapiens
  source 1..20: mol_type = genomic DNA; note = Gene: IKBKE; note = Location (start to end; relative to TSS): IKBKE_24_54; note = Orientation (relative to transcription): antisense; note = sgRNA Position: 206470506; note = Sequence Name: 56322-704_101_SL_seq_4128
gtttcttccctgcctccttg

SEQ ID NO: 4129 - DNA, 20 bp, Homo sapiens
  source 1..20: mol_type = genomic DNA; note = Gene: IKBKE; note = Location (start to end; relative to TSS): IKBKE_55_85; note = Orientation (relative to transcription): antisense; note = sgRNA Position: 206470537; note = Sequence Name: 56322-704_101_SL_seq_4129
tctgtgccaccccaggagct

SEQ ID NO: 4130 - DNA, 20 bp, Homo sapiens
  source 1..20: mol_type = genomic DNA; note = Gene: ILK; note = Location (start to end; relative to TSS): ILK_38_68; note = Orientation (relative to transcription): antisense; note = sgRNA Position: 6603818; note = Sequence Name: 56322-704_101_SL_seq_4130
tctcgcactcaccgggactc

SEQ ID NO: 4131 - DNA, 20 bp, Homo sapiens
  source 1..20: mol_type = genomic DNA; note = Gene: ILK; note = Location (start to end; relative to TSS): ILK_72_102; note = Orientation (relative to transcription): antisense; note = sgRNA Position: 6603852; note = Sequence Name: 56322-704_101_SL_seq_4131
aggagaagtgaggggtgaca

SEQ ID NO: 4132 - DNA, 20 bp, Homo sapiens
  source 1..20: mol_type = genomic DNA; note = Gene: ILK; note = Location (start to end; relative to TSS): ILK_39_69; note = Orientation (relative to transcription): antisense; note = sgRNA Position: 6603819; note = Sequence Name: 56322-704_101_SL_seq_4132
ctctcgcactcaccgggact

SEQ ID NO: 4133 - DNA, 20 bp, Homo sapiens
  source 1..20: mol_type = genomic DNA; note = Gene: ILK; note = Location (start to end; relative to TSS): ILK_71_101; note = Orientation (relative to transcription): antisense; note = sgRNA Position: 6603851; note = Sequence Name: 56322-704_101_SL_seq_4133
ggagaagtgaggggtgacag

SEQ ID NO: 4134 - DNA, 20 bp, Homo sapiens
  source 1..20: mol_type = genomic DNA; note = Gene: ILK; note = Location (start to end; relative to TSS): ILK_18_48; note = Orientation (relative to transcription): sense; note = sgRNA Position: 6603818; note = Sequence Name: 56322-704_101_SL_seq_4134
ggatcctgcagcccgagtcc

SEQ ID NO: 4135 - DNA, 20 bp, Homo sapiens
  source 1..20: mol_type = genomic DNA; note = Gene: ILK; note = Location (start to end; relative to TSS): ILK_70_100; note = Orientation (relative to transcription): antisense; note = sgRNA Position: 6603850; note = Sequence Name: 56322-704_101_SL_seq_4135
gagaagtgaggggtgacagg

SEQ ID NO: 4136 - DNA, 20 bp, Homo sapiens
  source 1..20: mol_type = genomic DNA; note = Gene: ILK; note = Location (start to end; relative to TSS): ILK_19_49; note = Orientation (relative to transcription): antisense; note = sgRNA Position: 6603799; note = Sequence Name: 56322-704_101_SL_seq_4136
cgggctgcaggatccttctc

SEQ ID NO: 4137 - DNA, 20 bp, Homo sapiens
  source 1..20: mol_type = genomic DNA; note = Gene: ILK; note = Location (start to end; relative to TSS): ILK_65_95; note = Orientation (relative to transcription): antisense; note = sgRNA Position: 6603845; note = Sequence Name: 56322-704_101_SL_seq_4137
gtgaggggtgacagggggcg

SEQ ID NO: 4138 - DNA, 20 bp, Homo sapiens
  source 1..20: mol_type = genomic DNA; note = Gene: ILK; note = Location (start to end; relative to TSS): ILK_31_61; note = Orientation (relative to transcription): sense; note = sgRNA Position: 6603831; note = Sequence Name: 56322-704_101_SL_seq_4138
cgagtcccggtgagtgcgag

SEQ ID NO: 4139 - DNA, 20 bp, Homo sapiens
  source 1..20: mol_type = genomic DNA; note = Gene: ILK; note = Location (start to end; relative to TSS): ILK_64_94; note = Orientation (relative to transcription): antisense; note = sgRNA Position: 6603844; note = Sequence Name: 56322-704_101_SL_seq_4139
tgaggggtgacagggggcgc

SEQ ID NO: 4140 - DNA, 20 bp, Homo sapiens
  source 1..20: mol_type = genomic DNA; note = Gene: INSR; note = Location (start to end; relative to TSS): INSR_26_56; note = Orientation (relative to transcription): antisense; note = sgRNA Position: 7294384; note = Sequence Name: 56322-704_101_SL_seq_4140
ccgtcagctgggccccgtgc

SEQ ID NO: 4141 - DNA, 20 bp, Homo sapiens
  source 1..20: mol_type = genomic DNA; note = Gene: INSR; note = Location (start to end; relative to TSS): INSR_76_106; note = Orientation (relative to transcription): antisense; note = sgRNA Position: 7294334; note = Sequence Name: 56322-704_101_SL_seq_4141
gcgggcgggcggcgggagag

SEQ ID NO: 4142 - DNA, 20 bp, Homo sapiens
  source 1..20: mol_type = genomic DNA; note = Gene: INSR; note = Location (start to end; relative to TSS): INSR_27_57; note = Orientation (relative to transcription): antisense; note = sgRNA Position: 7294383; note = Sequence Name: 56322-704_101_SL_seq_4142
cccgtcagctgggccccgtg

SEQ ID NO: 4143 - DNA, 20 bp, Homo sapiens
  source 1..20: mol_type = genomic DNA; note = Gene: INSR; note = Location (start to end; relative to TSS): INSR_75_105; note = Orientation (relative to transcription): antisense; note = sgRNA Position: 7294335; note = Sequence Name: 56322-704_101_SL_seq_4143
cgggcgggcggcgggagaga

SEQ ID NO: 4144 - DNA, 20 bp, Homo sapiens
  source 1..20: mol_type = genomic DNA; note = Gene: INSR; note = Location (start to end; relative to TSS): INSR_18_48; note = Orientation (relative to transcription): sense; note = sgRNA Position: 7294372; note = Sequence Name: 56322-704_101_SL_seq_4144
ccgcacggggcccagctgac

SEQ ID NO: 4145 - DNA, 20 bp, Homo sapiens
  source 1..20: mol_type = genomic DNA; note = Gene: INSR; note = Location (start to end; relative to TSS): INSR_67_97; note = Orientation (relative to transcription): antisense; note = sgRNA Position: 7294343; note = Sequence Name: 56322-704_101_SL_seq_4145
cggcgggagagagggctgct

SEQ ID NO: 4146 - DNA, 20 bp, Homo sapiens
  source 1..20: mol_type = genomic DNA; note = Gene: INSR; note = Location (start to end; relative to TSS): INSR_19_49; note = Orientation (relative to transcription): antisense; note = sgRNA Position: 7294391; note = Sequence Name: 56322-704_101_SL_seq_4146
ctgggccccgtgcgggccgc

SEQ ID NO: 4147 - DNA, 20 bp, Homo sapiens
  source 1..20: mol_type = genomic DNA; note = Gene: INSR; note = Location (start to end; relative to TSS): INSR_66_96; note = Orientation (relative to transcription): antisense; note = sgRNA Position: 7294344; note = Sequence Name: 56322-704_101_SL_seq_4147
ggcgggagagagggctgctc

SEQ ID NO: 4148 - DNA, 20 bp, Homo sapiens
  source 1..20: mol_type = genomic DNA; note = Gene: INSR; note = Location (start to end; relative to TSS): INSR_20_50; note = Orientation (relative to transcription): antisense; note = sgRNA Position: 7294390; note = Sequence Name: 56322-704_101_SL_seq_4148
gctgggccccgtgcgggccg

SEQ ID NO: 4149 - DNA, 20 bp, Homo sapiens
  source 1..20: mol_type = genomic DNA; note = Gene: INSR; note = Location (start to end; relative to TSS): INSR_50_80; note = Orientation (relative to transcription): antisense; note = sgRNA Position: 7294360; note = Sequence Name: 56322-704_101_SL_seq_4149
gctcgggcccgtaaacaacg

SEQ ID NO: 4150 - DNA, 20 bp, Homo sapiens
  source 1..20: mol_type = genomic DNA; note = Gene: INSRR; note = Location (start to end; relative to TSS): INSRR_49_79; note = Orientation (relative to transcription): sense; note = sgRNA Position: 156859044; note = Sequence Name: 56322-704_101_SL_seq_4150
atccagggagactctccctg

SEQ ID NO: 4151 - DNA, 20 bp, Homo sapiens
  source 1..20: mol_type = genomic DNA; note = Gene: INSRR; note = Location (start to end; relative to TSS): INSRR_84_114; note = Orientation (relative to transcription): antisense; note = sgRNA Position: 156859029; note = Sequence Name: 56322-704_101_SL_seq_4151
gcgggggtcccggggcgcgt

SEQ ID NO: 4152 - DNA, 20 bp, Homo sapiens
  source 1..20: mol_type = genomic DNA; note = Gene: INSRR; note = Location (start to end; relative to TSS): INSRR_42_72; note = Orientation (relative to transcription): antisense; note = sgRNA Position: 156859071; note = Sequence Name: 56322-704_101_SL_seq_4152
cctggatccctccgggcgcg

SEQ ID NO: 4153 - DNA, 20 bp, Homo sapiens
  source 1..20: mol_type = genomic DNA; note = Gene: INSRR; note = Location (start to end; relative to TSS): INSRR_73_103; note = Orientation (relative to transcription): antisense; note = sgRNA Position: 156859040; note = Sequence Name: 56322-704_101_SL_seq_4153
ggggcgcgtgggactccgca

SEQ ID NO: 4154 - DNA, 20 bp, Homo sapiens
  source 1..20: mol_type = genomic DNA; note = Gene: INSRR; note = Location (start to end; relative to TSS): INSRR_34_64; note = Orientation (relative to transcription): sense; note = sgRNA Position: 156859059; note = Sequence Name: 56322-704_101_SL_seq_4154
cgcgcgcccggagggatcca

SEQ ID NO: 4155 - DNA, 20 bp, Homo sapiens
  source 1..20: mol_type = genomic DNA; note = Gene: INSRR; note = Location (start to end; relative to TSS): INSRR_66_96; note = Orientation (relative to transcription): sense; note = sgRNA Position: 156859027; note = Sequence Name: 56322-704_101_SL_seq_4155
ctgcggagtcccacgcgccc

SEQ ID NO: 4156 - DNA, 20 bp, Homo sapiens
  source 1..20: mol_type = genomic DNA; note = Gene: INSRR; note = Location (start to end; relative to TSS): INSRR_26_56; note = Orientation (relative to transcription): sense; note = sgRNA Position: 156859067; note = Sequence Name: 56322-704_101_SL_seq_4156
tggggggccgcgcgcccgga

SEQ ID NO: 4157 - DNA, 20 bp, Homo sapiens
  source 1..20: mol_type = genomic DNA; note = Gene: INSRR; note = Location (start to end; relative to TSS): INSRR_60_90; note = Orientation (relative to transcription): antisense; note = sgRNA Position: 156859053; note = Sequence Name: 56322-704_101_SL_seq_4157
ctccgcagggagagtctccc

SEQ ID NO: 4158 - DNA, 20 bp, Homo sapiens
  source 1..20: mol_type = genomic DNA; note = Gene: INSRR; note = Location (start to end; relative to TSS): INSRR_15_45; note = Orientation (relative to transcription): antisense; note = sgRNA Position: 156859098; note = Sequence Name: 56322-704_101_SL_seq_4158
ccagcgccagctgacagtgc

SEQ ID NO: 4159 - DNA, 20 bp, Homo sapiens
  source 1..20: mol_type = genomic DNA; note = Gene: INSRR; note = Location (start to end; relative to TSS): INSRR_49_79; note = Orientation (relative to transcription): sense; note = sgRNA Position: 156859044; note = Sequence Name: 56322-704_101_SL_seq_4159
atccagggagactctccctg

SEQ ID NO: 4160 - DNA, 20 bp, Homo sapiens
  source 1..20: mol_type = genomic DNA; note = Gene: IP6K1; note = Location (start to end; relative to TSS): IP6K1_33_63; note = Orientation (relative to transcription): sense; note = sgRNA Position: 49786485; note = Sequence Name: 56322-704_101_SL_seq_4160
cgggagctggaccaagcggc

SEQ ID NO: 4161 - DNA, 20 bp, Homo sapiens
  source 1..20: mol_type = genomic DNA; note = Gene: IP6K1; note = Location (start to end; relative to TSS): IP6K1_81_111; note = Orientation (relative to transcription): sense; note = sgRNA Position: 49786437; note = Sequence Name: 56322-704_101_SL_seq_4161
gccacctgtgctgcctgcca

SEQ ID NO: 4162 - DNA, 20 bp, Homo sapiens
  source 1..20: mol_type = genomic DNA; note = Gene: IP6K1; note = Location (start to end; relative to TSS): IP6K1_27_57; note = Orientation (relative to transcription): antisense; note = sgRNA Position: 49786511; note = Sequence Name: 56322-704_101_SL_seq_4162
agctcccggcgctgcccact

SEQ ID NO: 4163 - DNA, 20 bp, Homo sapiens
  source 1..20: mol_type = genomic DNA; note = Gene: IP6K1; note = Location (start to end; relative to TSS): IP6K1_72_102; note = Orientation (relative to transcription): antisense; note = sgRNA Position: 49786466; note = Sequence Name: 56322-704_101_SL_seq_4163
gtggctgagcaccgctacag

SEQ ID NO: 4164 - DNA, 20 bp, Homo sapiens
  source 1..20: mol_type = genomic DNA; note = Gene: IP6K1; note = Location (start to end; relative to TSS): IP6K1_29_59; note = Orientation (relative to transcription): sense; note = sgRNA Position: 49786489; note = Sequence Name: 56322-704_101_SL_seq_4164
gcgccgggagctggaccaag

SEQ ID NO: 4165 - DNA, 20 bp, Homo sapiens
  source 1..20: mol_type = genomic DNA; note = Gene: IP6K1; note = Location (start to end; relative to TSS): IP6K1_61_91; note = Orientation (relative to transcription): antisense; note = sgRNA Position: 49786477; note = Sequence Name: 56322-704_101_SL_seq_4165
ccgctacagcggcctctcac

SEQ ID NO: 4166 - DNA, 20 bp, Homo sapiens
  source 1..20: mol_type = genomic DNA; note = Gene: IP6K1; note = Location (start to end; relative to TSS): IP6K1_22_52; note = Orientation (relative to transcription): antisense; note = sgRNA Position: 49786516; note = Sequence Name: 56322-704_101_SL_seq_4166
ccggcgctgcccactgggta

SEQ ID NO: 4167 - DNA, 20 bp, Homo sapiens
  source 1..20: mol_type = genomic DNA; note = Gene: IP6K1; note = Location (start to end; relative to TSS): IP6K1_53_83; note = Orientation (relative to transcription): antisense; note = sgRNA Position: 49786485; note = Sequence Name: 56322-704_101_SL_seq_4167
gcggcctctcaccggccgct

SEQ ID NO: 4168 - DNA, 20 bp, Homo sapiens
  source 1..20: mol_type = genomic DNA; note = Gene: IP6K1; note = Location (start to end; relative to TSS): IP6K1_20_50; note = Orientation (relative to transcription): sense; note = sgRNA Position: 49786498; note = Sequence Name: 56322-704_101_SL_seq_4168
cagtgggcagcgccgggagc

SEQ ID NO: 4169 - DNA, 20 bp, Homo sapiens
  source 1..20: mol_type = genomic DNA; note = Gene: IP6K1; note = Location (start to end; relative to TSS): IP6K1_52_82; note = Orientation (relative to transcription): sense; note = sgRNA Position: 49786466; note = Sequence Name: 56322-704_101_SL_seq_4169
ccggtgagaggccgctgtag

SEQ ID NO: 4170 - DNA, 20 bp, Homo sapiens
  source 1..20: mol_type = genomic DNA; note = Gene: IP6K2; note = Location (start to end; relative to TSS): IP6K2_41_71; note = Orientation (relative to transcription): antisense; note = sgRNA Position: 48717176; note = Sequence Name: 56322-704_101_SL_seq_4170
gccgcctcagccgggttcct

SEQ ID NO: 4171 - DNA, 20 bp, Homo sapiens
  source 1..20: mol_type = genomic DNA; note = Gene: IP6K2; note = Location (start to end; relative to TSS): IP6K2_86_116; note = Orientation (relative to transcription): antisense; note = sgRNA Position: 48717131; note = Sequence Name: 56322-704_101_SL_seq_4171
tcaaagctcctcgggcacta

SEQ ID NO: 4172 - DNA, 20 bp, Homo sapiens
  source 1..20: mol_type = genomic DNA; note = Gene: IP6K2; note = Location (start to end; relative to TSS): IP6K2_28_58; note = Orientation (relative to transcription): sense; note = sgRNA Position: 48717169; note = Sequence Name: 56322-704_101_SL_seq_4172
aacgccgaggaacccggctg

SEQ ID NO: 4173 - DNA, 20 bp, Homo sapiens
  source 1..20: mol_type = genomic DNA; note = Gene: IP6K2; note = Location (start to end; relative to TSS): IP6K2_80_110; note = Orientation (relative to transcription): sense; note = sgRNA Position: 48717117; note = Sequence Name: 56322-704_101_SL_seq_4173
tagtgcccgaggagctttga

SEQ ID NO: 4174 - DNA, 20 bp, Homo sapiens
  source 1..20: mol_type = genomic DNA; note = Gene: IP6K2; note = Location (start to end; relative to TSS): IP6K2_31_61; note = Orientation (relative to transcription): sense; note = sgRNA Position: 48717166; note = Sequence Name: 56322-704_101_SL_seq_4174
gccgaggaacccggctgagg

SEQ ID NO: 4175 - DNA, 20 bp, Homo sapiens
  source 1..20: mol_type = genomic DNA; note = Gene: IP6K2; note = Location (start to end; relative to TSS): IP6K2_79_109; note = Orientation (relative to transcription): antisense; note = sgRNA Position: 48717138; note = Sequence Name: 56322-704_101_SL_seq_4175
tcctcgggcactagggccat

SEQ ID NO: 4176 - DNA, 20 bp, Homo sapiens
  source 1..20: mol_type = genomic DNA; note = Gene: IP6K2; note = Location (start to end; relative to TSS): IP6K2_35_65; note = Orientation (relative to transcription): sense; note = sgRNA Position: 48717162; note = Sequence Name: 56322-704_101_SL_seq_4176
aggaacccggctgaggcggc

SEQ ID NO: 4177 - DNA, 20 bp, Homo sapiens
  source 1..20: mol_type = genomic DNA; note = Gene: IP6K2; note = Location (start to end; relative to TSS): IP6K2_69_99; note = Orientation (relative to transcription): sense; note = sgRNA Position: 48717128; note = Sequence Name: 56322-704_101_SL_seq_4177
tcctatggccctagtgcccg

SEQ ID NO: 4178 - DNA, 20 bp, Homo sapiens
  source 1..20: mol_type = genomic DNA; note = Gene: IP6K2; note = Location (start to end; relative to TSS): IP6K2_22_52; note = Orientation (relative to transcription): sense; note = sgRNA Position: 48717175; note = Sequence Name: 56322-704_101_SL_seq_4178
gacggaaacgccgaggaacc

SEQ ID NO: 4179 - DNA, 20 bp, Homo sapiens
  source 1..20: mol_type = genomic DNA; note = Gene: IP6K2; note = Location (start to end; relative to TSS): IP6K2_54_84; note = Orientation (relative to transcription): sense; note = sgRNA Position: 48717143; note = Sequence Name: 56322-704_101_SL_seq_4179
caggtaaagctcgcgtccta

SEQ ID NO: 4180 - DNA, 20 bp, Homo sapiens
  source 1..20: mol_type = genomic DNA; note = Gene: IP6K3; note = Location (start to end; relative to TSS): IP6K3_47_77; note = Orientation (relative to transcription): sense; note = sgRNA Position: 33746834; note = Sequence Name: 56322-704_101_SL_seq_4180
cattgcctgatgcctgtaca

SEQ ID NO: 4181 - DNA, 20 bp, Homo sapiens
  source 1..20: mol_type = genomic DNA; note = Gene: IP6K3; note = Location (start to end; relative to TSS): IP6K3_100_130; note = Orientation (relative to transcription): antisense; note = sgRNA Position: 33746801; note = Sequence Name: 56322-704_101_SL_seq_4181
gtgtatggaaggcagggccc

SEQ ID NO: 4182 - DNA, 20 bp, Homo sapiens
  source 1..20: mol_type = genomic DNA; note = Gene: IP6K3; note = Location (start to end; relative to TSS): IP6K3_40_70; note = Orientation (relative to transcription): antisense; note = sgRNA Position: 33746861; note = Sequence Name: 56322-704_101_SL_seq_4182
ggcaatggcccgtcccagcg

SEQ ID NO: 4183 - DNA, 20 bp, Homo sapiens
  source 1..20: mol_type = genomic DNA; note = Gene: IP6K3; note = Location (start to end; relative to TSS): IP6K3_73_103; note = Orientation (relative to transcription): sense; note = sgRNA Position: 33746808; note = Sequence Name: 56322-704_101_SL_seq_4183
gcactgagagacaagattcc

SEQ ID NO: 4184 - DNA, 20 bp, Homo sapiens
  source 1..20: mol_type = genomic DNA; note = Gene: IP6K3; note = Location (start to end; relative to TSS): IP6K3_22_52; note = Orientation (relative to transcription): sense; note = sgRNA Position: 33746859; note = Sequence Name: 56322-704_101_SL_seq_4184
gcaaatgctccacgctggga

SEQ ID NO: 4185 - DNA, 20 bp, Homo sapiens
  source 1..20: mol_type = genomic DNA; note = Gene: IP6K3; note = Location (start to end; relative to TSS): IP6K3_61_91; note = Orientation (relative to transcription): antisense; note = sgRNA Position: 33746840; note = Sequence Name: 56322-704_101_SL_seq_4185
gcccaccatgtacaggcatc

SEQ ID NO: 4186 - DNA, 20 bp, Homo sapiens
  source 1..20: mol_type = genomic DNA; note = Gene: IP6K3; note = Location (start to end; relative to TSS): IP6K3_23_53; note = Orientation (relative to transcription): sense; note = sgRNA Position: 33746858; note = Sequence Name: 56322-704_101_SL_seq_4186
caaatgctccacgctgggac

SEQ ID NO: 4187 - DNA, 20 bp, Homo sapiens
  source 1..20: mol_type = genomic DNA; note = Gene: IP6K3; note = Location (start to end; relative to TSS): IP6K3_55_85; note = Orientation (relative to transcription): antisense; note = sgRNA Position: 33746846; note = Sequence Name: 56322-704_101_SL_seq_4187
catgtacaggcatcaggcaa

SEQ ID NO: 4188 - DNA, 20 bp, Homo sapiens
  source 1..20: mol_type = genomic DNA; note = Gene: IP6K3; note = Location (start to end; relative to TSS): IP6K3_18_48; note = Orientation (relative to transcription): sense; note = sgRNA Position: 33746863; note = Sequence Name: 56322-704_101_SL_seq_4188
aacagcaaatgctccacgct

SEQ ID NO: 4189 - DNA, 20 bp, Homo sapiens
  source 1..20: mol_type = genomic DNA; note = Gene: IP6K3; note = Location (start to end; relative to TSS): IP6K3_50_80; note = Orientation (relative to transcription): sense; note = sgRNA Position: 33746831; note = Sequence Name: 56322-704_101_SL_seq_4189
tgcctgatgcctgtacatgg

SEQ ID NO: 4190 - DNA, 20 bp, Homo sapiens
  source 1..20: mol_type = genomic DNA; note = Gene: IPPK; note = Location (start to end; relative to TSS): IPPK_46_76; note = Orientation (relative to transcription): antisense; note = sgRNA Position: 92670081; note = Sequence Name: 56322-704_101_SL_seq_4190
ccagccgctgcggtcggggg

SEQ ID NO: 4191 - DNA, 20 bp, Homo sapiens
  source 1..20: mol_type = genomic DNA; note = Gene: IPPK; note = Location (start to end; relative to TSS): IPPK_99_129; note = Orientation (relative to transcription): sense; note = sgRNA Position: 92670008; note = Sequence Name: 56322-704_101_SL_seq_4191
gtcctagcccgcgaggcgcc

SEQ ID NO: 4192 - DNA, 20 bp, Homo sapiens
  source 1..20: mol_type = genomic DNA; note = Gene: IPPK; note = Location (start to end; relative to TSS): IPPK_49_79; note = Orientation (relative to transcription): sense; note = sgRNA Position: 92670058; note = Sequence Name: 56322-704_101_SL_seq_4192
gcagcggctggttcccagcg

SEQ ID NO: 4193 - DNA, 20 bp, Homo sapiens
  source 1..20: mol_type = genomic DNA; note = Gene: IPPK; note = Location (start to end; relative to TSS): IPPK_92_122; note = Orientation (relative to transcription): sense; note = sgRNA Position: 92670015; note = Sequence Name: 56322-704_101_SL_seq_4193
tccccgagtcctagcccgcg

SEQ ID NO: 4194 - DNA, 20 bp, Homo sapiens
  source 1..20: mol_type = genomic DNA; note = Gene: IPPK; note = Location (start to end; relative to TSS): IPPK_50_80; note = Orientation (relative to transcription): antisense; note = sgRNA Position: 92670077; note = Sequence Name: 56322-704_101_SL_seq_4194
ggaaccagccgctgcggtcg

SEQ ID NO: 4195 - DNA, 20 bp, Homo sapiens
  source 1..20: mol_type = genomic DNA; note = Gene: IPPK; note = Location (start to end; relative to TSS): IPPK_89_119; note = Orientation (relative to transcription): antisense; note = sgRNA Position: 92670038; note = Sequence Name: 56322-704_101_SL_seq_4195
ggactcggggacgcgagctg

SEQ ID NO: 4196 - DNA, 20 bp, Homo sapiens
  source 1..20: mol_type = genomic DNA; note = Gene: IPPK; note = Location (start to end; relative to TSS): IPPK_33_63; note = Orientation (relative to transcription): sense; note = sgRNA Position: 92670074; note = Sequence Name: 56322-704_101_SL_seq_4196
cgctcctcccccgaccgcag

SEQ ID NO: 4197 - DNA, 20 bp, Homo sapiens
  source 1..20: mol_type = genomic DNA; note = Gene: IPPK; note = Location (start to end; relative to TSS): IPPK_88_118; note = Orientation (relative to transcription): antisense; note = sgRNA Position: 92670039; note = Sequence Name: 56322-704_101_SL_seq_4197
gactcggggacgcgagctgg

SEQ ID NO: 4198 - DNA, 20 bp, Homo sapiens
  source 1..20: mol_type = genomic DNA; note = Gene: IPPK; note = Location (start to end; relative to TSS): IPPK_37_67; note = Orientation (relative to transcription): sense; note = sgRNA Position: 92670070; note = Sequence Name: 56322-704_101_SL_seq_4198
cctcccccgaccgcagcggc

SEQ ID NO: 4199 - DNA, 20 bp, Homo sapiens
  source 1..20: mol_type = genomic DNA; note = Gene: IPPK; note = Location (start to end; relative to TSS): IPPK_71_101; note = Orientation (relative to transcription): antisense; note = sgRNA Position: 92670056; note = Sequence Name: 56322-704_101_SL_seq_4199
tgggggccgcccgcctcgct

SEQ ID NO: 4200 - DNA, 20 bp, Homo sapiens
  source 1..20: mol_type = genomic DNA; note = Gene: IRAK1; note = Location (start to end; relative to TSS): IRAK1_39_69; note = Orientation (relative to transcription): antisense; note = sgRNA Position: 154019859; note = Sequence Name: 56322-704_101_SL_seq_4200
gggcctctcagggccgcggc

SEQ ID NO: 4201 - DNA, 20 bp, Homo sapiens
  source 1..20: mol_type = genomic DNA; note = Gene: IRAK1; note = Location (start to end; relative to TSS): IRAK1_71_101; note = Orientation (relative to transcription): sense; note = sgRNA Position: 154019807; note = Sequence Name: 56322-704_101_SL_seq_4201
cggcggcagccatggccggg

SEQ ID NO: 4202 - DNA, 20 bp, Homo sapiens
  source 1..20: mol_type = genomic DNA; note = Gene: IRAK1; note = Location (start to end; relative to TSS): IRAK1_37_67; note = Orientation (relative to transcription): sense; note = sgRNA Position: 154019841; note = Sequence Name: 56322-704_101_SL_seq_4202
cggccctgagaggccccggc

SEQ ID NO: 4203 - DNA, 20 bp, Homo sapiens
  source 1..20: mol_type = genomic DNA; note = Gene: IRAK1; note = Location (start to end; relative to TSS): IRAK1_70_100; note = Orientation (relative to transcription): sense; note = sgRNA Position: 154019808; note = Sequence Name: 56322-704_101_SL_seq_4203
gcggcggcagccatggccgg

SEQ ID NO: 4204 - DNA, 20 bp, Homo sapiens
  source 1..20: mol_type = genomic DNA; note = Gene: IRAK1; note = Location (start to end; relative to TSS): IRAK1_33_63; note = Orientation (relative to transcription): sense; note = sgRNA Position: 154019845; note = Sequence Name: 56322-704_101_SL_seq_4204
gccgcggccctgagaggccc

SEQ ID NO: 4205 - DNA, 20 bp, Homo sapiens
  source 1..20: mol_type = genomic DNA; note = Gene: IRAK1; note = Location (start to end; relative to TSS): IRAK1_63_93; note = Orientation (relative to transcription): sense; note = sgRNA Position: 154019815; note = Sequence Name: 56322-704_101_SL_seq_4205
cggcccggcggcggcagcca

SEQ ID NO: 4206 - DNA, 20 bp, Homo sapiens
  source 1..20: mol_type = genomic DNA; note = Gene: IRAK1; note = Location (start to end; relative to TSS): IRAK1_27_57; note = Orientation (relative to transcription): sense; note = sgRNA Position: 154019851; note = Sequence Name: 56322-704_101_SL_seq_4206
gcgcccgccgcggccctgag

SEQ ID NO: 4207 - DNA, 20 bp, Homo sapiens
  source 1..20: mol_type = genomic DNA; note = Gene: IRAK1; note = Location (start to end; relative to TSS): IRAK1_59_89; note = Orientation (relative to transcription): antisense; note = sgRNA Position: 154019839; note = Sequence Name: 56322-704_101_SL_seq_4207
cgccgggccgggacctgccg

SEQ ID NO: 4208 - DNA, 20 bp, Homo sapiens
  source 1..20: mol_type = genomic DNA; note = Gene: IRAK1; note = Location (start to end; relative to TSS): IRAK1_18_48; note = Orientation (relative to transcription): antisense; note = sgRNA Position: 154019880; note = Sequence Name: 56322-704_101_SL_seq_4208
ggcgcgggcctgggccggcc

SEQ ID NO: 4209 - DNA, 20 bp, Homo sapiens
  source 1..20: mol_type = genomic DNA; note = Gene: IRAK1; note = Location (start to end; relative to TSS): IRAK1_48_78; note = Orientation (relative to transcription): sense; note = sgRNA Position: 154019830; note = Sequence Name: 56322-704_101_SL_seq_4209
ggccccggcaggtcccggcc

SEQ ID NO: 4210 - DNA, 20 bp, Homo sapiens
  source 1..20: mol_type = genomic DNA; note = Gene: IRAK2; note = Location (start to end; relative to TSS): IRAK2_34_64; note = Orientation (relative to transcription): antisense; note = sgRNA Position: 10164959; note = Sequence Name: 56322-704_101_SL_seq_4210
ctggtagatgtagcaggcca

SEQ ID NO: 4211 - DNA, 20 bp, Homo sapiens
  source 1..20: mol_type = genomic DNA; note = Gene: IRAK2; note = Location (start to end; relative to TSS): IRAK2_65_95; note = Orientation (relative to transcription): sense; note = sgRNA Position: 10165010; note = Sequence Name: 56322-704_101_SL_seq_4211
ggacgacctgtgccgcaaca

SEQ ID NO: 4212 - DNA, 20 bp, Homo sapiens
  source 1..20: mol_type = genomic DNA; note = Gene: IRAK2; note = Location (start to end; relative to TSS): IRAK2_24_54; note = Orientation (relative to transcription): antisense; note = sgRNA Position: 10164949; note = Sequence Name: 56322-704_101_SL_seq_4212
tagcaggccatggcacgcta

SEQ ID NO: 4213 - DNA, 20 bp, Homo sapiens
  source 1..20: mol_type = genomic DNA; note = Gene: IRAK2; note = Location (start to end; relative to TSS): IRAK2_64_94; note = Orientation (relative to transcription): antisense; note = sgRNA Position: 10164989; note = Sequence Name: 56322-704_101_SL_seq_4213
gcacaggtcgtccagcaccc

SEQ ID NO: 4214 - DNA, 20 bp, Homo sapiens
  source 1..20: mol_type = genomic DNA; note = Gene: IRAK2; note = Location (start to end; relative to TSS): IRAK2_23_53; note = Orientation (relative to transcription): antisense; note = sgRNA Position: 10164948; note = Sequence Name: 56322-704_101_SL_seq_4214
agcaggccatggcacgctac

SEQ ID NO: 4215 - DNA, 20 bp, Homo sapiens
  source 1..20: mol_type = genomic DNA; note = Gene: IRAK2; note = Location (start to end; relative to TSS): IRAK2_61_91; note = Orientation (relative to transcription): antisense; note = sgRNA Position: 10164986; note = Sequence Name: 56322-704_101_SL_seq_4215
caggtcgtccagcacccagg

SEQ ID NO: 4216 - DNA, 20 bp, Homo sapiens
  source 1..20: mol_type = genomic DNA; note = Gene: IRAK2; note = Location (start to end; relative to TSS): IRAK2_22_52; note = Orientation (relative to transcription): antisense; note = sgRNA Position: 10164947; note = Sequence Name: 56322-704_101_SL_seq_4216
gcaggccatggcacgctacg

SEQ ID NO: 4217 - DNA, 20 bp, Homo sapiens
  source 1..20: mol_type = genomic DNA; note = Gene: IRAK2; note = Location (start to end; relative to TSS): IRAK2_60_90; note = Orientation (relative to transcription): antisense; note = sgRNA Position: 10164985; note = Sequence Name: 56322-704_101_SL_seq_4217
aggtcgtccagcacccagga

SEQ ID NO: 4218 - DNA, 20 bp, Homo sapiens
  source 1..20: mol_type = genomic DNA; note = Gene: IRAK2; note = Location (start to end; relative to TSS): IRAK2_18_48; note = Orientation (relative to transcription): antisense; note = sgRNA Position: 10164943; note = Sequence Name: 56322-704_101_SL_seq_4218
gccatggcacgctacggggc

SEQ ID NO: 4219 - DNA, 20 bp, Homo sapiens
  source 1..20: mol_type = genomic DNA; note = Gene: IRAK2; note = Location (start to end; relative to TSS): IRAK2_53_83; note = Orientation (relative to transcription): antisense; note = sgRNA Position: 10164978; note = Sequence Name: 56322-704_101_SL_seq_4219
ccagcacccaggagggcagc

SEQ ID NO: 4220 - DNA, 20 bp, Homo sapiens
  source 1..20: mol_type = genomic DNA; note = Gene: IRAK3; note = Location (start to end; relative to TSS): IRAK3_38_68; note = Orientation (relative to transcription): sense; note = sgRNA Position: 66189278; note = Sequence Name: 56322-704_101_SL_seq_4220
tggactccgcctcgtccccg

SEQ ID NO: 4221 - DNA, 20 bp, Homo sapiens
  source 1..20: mol_type = genomic DNA; note = Gene: IRAK3; note = Location (start to end; relative to TSS): IRAK3_73_103; note = Orientation (relative to transcription): sense; note = sgRNA Position: 66189313; note = Sequence Name: 56322-704_101_SL_seq_4221
agccatggcggggaactgtg

SEQ ID NO: 4222 - DNA, 20 bp, Homo sapiens
  source 1..20: mol_type = genomic DNA; note = Gene: IRAK3; note = Location (start to end; relative to TSS): IRAK3_37_67; note = Orientation (relative to transcription): sense; note = sgRNA Position: 66189277; note = Sequence Name: 56322-704_101_SL_seq_4222
ctggactccgcctcgtcccc

SEQ ID NO: 4223 - DNA, 20 bp, Homo sapiens
  source 1..20: mol_type = genomic DNA; note = Gene: IRAK3; note = Location (start to end; relative to TSS): IRAK3_72_102; note = Orientation (relative to transcription): sense; note = sgRNA Position: 66189312; note = Sequence Name: 56322-704_101_SL_seq_4223
gagccatggcggggaactgt

SEQ ID NO: 4224 - DNA, 20 bp, Homo sapiens
  source 1..20: mol_type = genomic DNA; note = Gene: IRAK3; note = Location (start to end; relative to TSS): IRAK3_36_66; note = Orientation (relative to transcription): sense; note = sgRNA Position: 66189276; note = Sequence Name: 56322-704_101_SL_seq_4224
cctggactccgcctcgtccc

SEQ ID NO: 4225 - DNA, 20 bp, Homo sapiens
  source 1..20: mol_type = genomic DNA; note = Gene: IRAK3; note = Location (start to end; relative to TSS): IRAK3_71_101; note = Orientation (relative to transcription): sense; note = sgRNA Position: 66189311; note = Sequence Name: 56322-704_101_SL_seq_4225
cgagccatggcggggaactg

SEQ ID NO: 4226 - DNA, 20 bp, Homo sapiens
  source 1..20: mol_type = genomic DNA; note = Gene: IRAK3; note = Location (start to end; relative to TSS): IRAK3_24_54; note = Orientation (relative to transcription): antisense; note = sgRNA Position: 66189244; note = Sequence Name: 56322-704_101_SL_seq_4226
ggtccctgcacgcctgcgac

SEQ ID NO: 4227 - DNA, 20 bp, Homo sapiens
  source 1..20: mol_type = genomic DNA; note = Gene: IRAK3; note = Location (start to end; relative to TSS): IRAK3_56_86; note = Orientation (relative to transcription): antisense; note = sgRNA Position: 66189276; note = Sequence Name: 56322-704_101_SL_seq_4227
ctgcccgagccccggggacg

SEQ ID NO: 4228 - DNA, 20 bp, Homo sapiens
  source 1..20: mol_type = genomic DNA; note = Gene: IRAK3; note = Location (start to end; relative to TSS): IRAK3_18_48; note = Orientation (relative to transcription): sense; note = sgRNA Position: 66189258; note = Sequence Name: 56322-704_101_SL_seq_4228
gtcgcaggcgtgcagggacc

SEQ ID NO: 4229 - DNA, 20 bp, Homo sapiens
  source 1..20: mol_type = genomic DNA; note = Gene: IRAK3; note = Location (start to end; relative to TSS): IRAK3_53_83; note = Orientation (relative to transcription): antisense; note = sgRNA Position: 66189273; note = Sequence Name: 56322-704_101_SL_seq_4229
cccgagccccggggacgagg

SEQ ID NO: 4230 - DNA, 20 bp, Homo sapiens
  source 1..20: mol_type = genomic DNA; note = Gene: IRAK4; note = Location (start to end; relative to TSS): IRAK4_51_81; note = Orientation (relative to transcription): antisense; note = sgRNA Position: 43759008; note = Sequence Name: 56322-704_101_SL_seq_4230
tgccttacctgcccgggcgc

SEQ ID NO: 4231 - DNA, 20 bp, Homo sapiens
  source 1..20: mol_type = genomic DNA; note = Gene: IRAK4; note = Location (start to end; relative to TSS): IRAK4_81_111; note = Orientation (relative to transcription): antisense; note = sgRNA Position: 43759038; note = Sequence Name: 56322-704_101_SL_seq_4231
gacgtttgaccgaggcatta

SEQ ID NO: 4232 - DNA, 20 bp, Homo sapiens
  source 1..20: mol_type = genomic DNA; note = Gene: IRAK4; note = Location (start to end; relative to TSS): IRAK4_40_70; note = Orientation (relative to transcription): sense; note = sgRNA Position: 43759017; note = Sequence Name: 56322-704_101_SL_seq_4232
agcccgcgcccgggcaggta

SEQ ID NO: 4233 - DNA, 20 bp, Homo sapiens
  source 1..20: mol_type = genomic DNA; note = Gene: IRAK4; note = Location (start to end; relative to TSS): IRAK4_78_108; note = Orientation (relative to transcription): antisense; note = sgRNA Position: 43759035; note = Sequence Name: 56322-704_101_SL_seq_4233
gtttgaccgaggcattaagg

SEQ ID NO: 4234 - DNA, 20 bp, Homo sapiens
  source 1..20: mol_type = genomic DNA; note = Gene: IRAK4; note = Location (start to end; relative to TSS): IRAK4_35_65; note = Orientation (relative to transcription): sense; note = sgRNA Position: 43759012; note = Sequence Name: 56322-704_101_SL_seq_4234
tcagcagcccgcgcccgggc

SEQ ID NO: 4235 - DNA, 20 bp, Homo sapiens
  source 1..20: mol_type = genomic DNA; note = Gene: IRAK4; note = Location (start to end; relative to TSS): IRAK4_77_107; note = Orientation (relative to transcription): antisense; note = sgRNA Position: 43759034; note = Sequence Name: 56322-704_101_SL_seq_4235
tttgaccgaggcattaaggc

SEQ ID NO: 4236 - DNA, 20 bp, Homo sapiens
  source 1..20: mol_type = genomic DNA; note = Gene: IRAK4; note = Location (start to end; relative to TSS): IRAK4_31_61; note = Orientation (relative to transcription): sense; note = sgRNA Position: 43759008; note = Sequence Name: 56322-704_101_SL_seq_4236
ggcttcagcagcccgcgccc

SEQ ID NO: 4237 - DNA, 20 bp, Homo sapiens
  source 1..20: mol_type = genomic DNA; note = Gene: IRAK4; note = Location (start to end; relative to TSS): IRAK4_76_106; note = Orientation (relative to transcription): antisense; note = sgRNA Position: 43759033; note = Sequence Name: 56322-704_101_SL_seq_4237
ttgaccgaggcattaaggcg

SEQ ID NO: 4238 - DNA, 20 bp, Homo sapiens
  source 1..20: mol_type = genomic DNA; note = Gene: IRAK4; note = Location (start to end; relative to TSS): IRAK4_30_60; note = Orientation (relative to transcription): sense; note = sgRNA Position: 43759007; note = Sequence Name: 56322-704_101_SL_seq_4238
cggcttcagcagcccgcgcc

SEQ ID NO: 4239 - DNA, 20 bp, Homo sapiens
  source 1..20: mol_type = genomic DNA; note = Gene: IRAK4; note = Location (start to end; relative to TSS): IRAK4_63_93; note = Orientation (relative to transcription): sense; note = sgRNA Position: 43759040; note = Sequence Name: 56322-704_101_SL_seq_4239
cattccccgccttaatgcct

SEQ ID NO: 4240 - DNA, 20 bp, Homo sapiens
  source 1..20: mol_type = genomic DNA; note = Gene: ITK; note = Location (start to end; relative to TSS): ITK_56_86; note = Orientation (relative to transcription): sense; note = sgRNA Position: 157180922; note = Sequence Name: 56322-704_101_SL_seq_4240
tgccccaaaactctttcctt

SEQ ID NO: 4241 - DNA, 20 bp, Homo sapiens
  source 1..20: mol_type = genomic DNA; note = Gene: ITK; note = Location (start to end; relative to TSS): ITK_117_147; note = Orientation (relative to transcription): antisense; note = sgRNA Position: 157180963; note = Sequence Name: 56322-704_101_SL_seq_4241
atgatccagttcttgaaagg

SEQ ID NO: 4242 - DNA, 20 bp, Homo sapiens
  source 1..20: mol_type = genomic DNA; note = Gene: ITK; note = Location (start to end; relative to TSS): ITK_67_97; note = Orientation (relative to transcription): antisense; note = sgRNA Position: 157180913; note = Sequence Name: 56322-704_101_SL_seq_4242
aaccaaaggaaagagttttg

SEQ ID NO: 4243 - DNA, 20 bp, Homo sapiens
  source 1..20: mol_type = genomic DNA; note = Gene: ITK; note = Location (start to end; relative to TSS): ITK_107_137; note = Orientation (relative to transcription): antisense; note = sgRNA Position: 157180953; note = Sequence Name: 56322-704_101_SL_seq_4243
tcttgaaaggtggtgcacct

SEQ ID NO: 4244 - DNA, 20 bp, Homo sapiens
  source 1..20: mol_type = genomic DNA; note = Gene: ITK; note = Location (start to end; relative to TSS): ITK_69_99; note = Orientation (relative to transcription): sense; note = sgRNA Position: 157180935; note = Sequence Name: 56322-704_101_SL_seq_4244
tttcctttggttgtgctaag

SEQ ID NO: 4245 - DNA, 20 bp, Homo sapiens
  source 1..20: mol_type = genomic DNA; note = Gene: ITK; note = Location (start to end; relative to TSS): ITK_106_136; note = Orientation (relative to transcription): antisense; note = sgRNA Position: 157180952; note = Sequence Name: 56322-704_101_SL_seq_4245
cttgaaaggtggtgcacctt

SEQ ID NO: 4246 - DNA, 20 bp, Homo sapiens
  source 1..20: mol_type = genomic DNA; note = Gene: ITK; note = Location (start to end; relative to TSS): ITK_47_77; note = Orientation (relative to transcription): antisense; note = sgRNA Position: 157180893; note = Sequence Name: 56322-704_101_SL_seq_4246
gggcaaagaatgcaatgtgg

SEQ ID NO: 4247 - DNA, 20 bp, Homo sapiens
  source 1..20: mol_type = genomic DNA; note = Gene: ITK; note = Location (start to end; relative to TSS): ITK_103_133; note = Orientation (relative to transcription): sense; note = sgRNA Position: 157180969; note = Sequence Name: 56322-704_101_SL_seq_4247
gtgcaccacctttcaagaac

SEQ ID NO: 4248 - DNA, 20 bp, Homo sapiens
  source 1..20: mol_type = genomic DNA; note = Gene: ITK; note = Location (start to end; relative to TSS): ITK_50_80; note = Orientation (relative to transcription): antisense; note = sgRNA Position: 157180896; note = Sequence Name: 56322-704_101_SL_seq_4248
ttggggcaaagaatgcaatg

SEQ ID NO: 4249 - DNA, 20 bp, Homo sapiens
  source 1..20: mol_type = genomic DNA; note = Gene: ITK; note = Location (start to end; relative to TSS): ITK_81_111; note = Orientation (relative to transcription): sense; note = sgRNA Position: 157180947; note = Sequence Name: 56322-704_101_SL_seq_4249
gtgctaagaggtgatgccca

SEQ ID NO: 4250 - DNA, 20 bp, Homo sapiens
  source 1..20: mol_type = genomic DNA; note = Gene: ITPK1; note = Location (start to end; relative to TSS): ITPK1_49_79; note = Orientation (relative to transcription): sense; note = sgRNA Position: 93115852; note = Sequence Name: 56322-704_101_SL_seq_4250
ggcaggggcggcgagtgcgc

SEQ ID NO: 4251 - DNA, 20 bp, Homo sapiens
  source 1..20: mol_type = genomic DNA; note = Gene: ITPK1; note = Location (start to end; relative to TSS): ITPK1_90_120; note = Orientation (relative to transcription): antisense; note = sgRNA Position: 93115831; note = Sequence Name: 56322-704_101_SL_seq_4251
gcgctgcccgccgagaaggg

SEQ ID NO: 4252 - DNA, 20 bp, Homo sapiens
  source 1..20: mol_type = genomic DNA; note = Gene: ITPK1; note = Location (start to end; relative to TSS): ITPK1_39_69; note = Orientation (relative to transcription): antisense; note = sgRNA Position: 93115882; note = Sequence Name: 56322-704_101_SL_seq_4252
tgcccgccgccgccccgcgc

SEQ ID NO: 4253 - DNA, 20 bp, Homo sapiens
  source 1..20: mol_type = genomic DNA; note = Gene: ITPK1; note = Location (start to end; relative to TSS): ITPK1_87_117; note = Orientation (relative to transcription): sense; note = sgRNA Position: 93115814; note = Sequence Name: 56322-704_101_SL_seq_4253
ttctcggcgggcagcgcgcg

SEQ ID NO: 4254 - DNA, 20 bp, Homo sapiens
  source 1..20: mol_type = genomic DNA; note = Gene: ITPK1; note = Location (start to end; relative to TSS): ITPK1_18_48; note = Orientation (relative to transcription): sense; note = sgRNA Position: 93115883; note = Sequence Name: 56322-704_101_SL_seq_4254
ggggcggccgggccagcgcg

SEQ ID NO: 4255 - DNA, 20 bp, Homo sapiens
  source 1..20: mol_type = genomic DNA; note = Gene: ITPK1; note = Location (start to end; relative to TSS): ITPK1_75_105; note = Orientation (relative to transcription): sense; note = sgRNA Position: 93115826; note = Sequence Name: 56322-704_101_SL_seq_4255
tcgccgccgcccttctcggc

SEQ ID NO: 4256 - DNA, 20 bp, Homo sapiens
  source 1..20: mol_type = genomic DNA; note = Gene: ITPK1; note = Location (start to end; relative to TSS): ITPK1_13_43; note = Orientation (relative to transcription): antisense; note = sgRNA Position: 93115908; note = Sequence Name: 56322-704_101_SL_seq_4256
ggccgccccgcttgagcccg

SEQ ID NO: 4257 - DNA, 20 bp, Homo sapiens
  source 1..20: mol_type = genomic DNA; note = Gene: ITPK1; note = Location (start to end; relative to TSS): ITPK1_74_104; note = Orientation (relative to transcription): sense; note = sgRNA Position: 93115827; note = Sequence Name: 56322-704_101_SL_seq_4257
ctcgccgccgcccttctcgg

SEQ ID NO: 4258 - DNA, 20 bp, Homo sapiens
  source 1..20: mol_type = genomic DNA; note = Gene: ITPK1; note = Location (start to end; relative to TSS): ITPK1_10_40; note = Orientation (relative to transcription): antisense; note = sgRNA Position: 93115911; note = Sequence Name: 56322-704_101_SL_seq_4258
cgccccgcttgagcccgcgg

SEQ ID NO: 4259 - DNA, 20 bp, Homo sapiens
  source 1..20: mol_type = genomic DNA; note = Gene: ITPK1; note = Location (start to end; relative to TSS): ITPK1_49_79; note = Orientation (relative to transcription): sense; note = sgRNA Position: 93115852; note = Sequence Name: 56322-704_101_SL_seq_4259
ggcaggggcggcgagtgcgc

SEQ ID NO: 4260 - DNA, 20 bp, Homo sapiens
  source 1..20: mol_type = genomic DNA; note = Gene: ITPKA; note = Location (start to end; relative to TSS): ITPKA_39_69; note = Orientation (relative to transcription): sense; note = sgRNA Position: 41493939; note = Sequence Name: 56322-704_101_SL_seq_4260
tgggaaatgaccctgcccgg

SEQ ID NO: 4261 - DNA, 20 bp, Homo sapiens
  source 1..20: mol_type = genomic DNA; note = Gene: ITPKA; note = Location (start to end; relative to TSS): ITPKA_88_118; note = Orientation (relative to transcription): sense; note = sgRNA Position: 41493988; note = Sequence Name: 56322-704_101_SL_seq_4261
gcgcgaggccctgcagcccg

SEQ ID NO: 4262 - DNA, 20 bp, Homo sapiens
  source 1..20: mol_type = genomic DNA; note = Gene: ITPKA; note = Location (start to end; relative to TSS): ITPKA_37_67; note = Orientation (relative to transcription): sense; note = sgRNA Position: 41493937; note = Sequence Name: 56322-704_101_SL_seq_4262
actgggaaatgaccctgccc

SEQ ID NO: 4263 - DNA, 20 bp, Homo sapiens
  source 1..20: mol_type = genomic DNA; note = Gene: ITPKA; note = Location (start to end; relative to TSS): ITPKA_72_102; note = Orientation (relative to transcription): antisense; note = sgRNA Position: 41493952; note = Sequence Name: 56322-704_101_SL_seq_4263
cccggccgcgccatgcccgt

SEQ ID NO: 4264 - DNA, 20 bp, Homo sapiens
  source 1..20: mol_type = genomic DNA; note = Gene: ITPKA; note = Location (start to end; relative to TSS): ITPKA_38_68; note = Orientation (relative to transcription): sense; note = sgRNA Position: 41493938; note = Sequence Name: 56322-704_101_SL_seq_4264
ctgggaaatgaccctgcccg

SEQ ID NO: 4265 - DNA, 20 bp, Homo sapiens
  source 1..20: mol_type = genomic DNA; note = Gene: ITPKA; note = Location (start to end; relative to TSS): ITPKA_71_101; note = Orientation (relative to transcription): antisense; note = sgRNA Position: 41493951; note = Sequence Name: 56322-704_101_SL_seq_4265
ccggccgcgccatgcccgtt

SEQ ID NO: 4266 - DNA, 20 bp, Homo sapiens
  source 1..20: mol_type = genomic DNA; note = Gene: ITPKA; note = Location (start to end; relative to TSS): ITPKA_36_66; note = Orientation (relative to transcription): sense; note = sgRNA Position: 41493936; note = Sequence Name: 56322-704_101_SL_seq_4266
cactgggaaatgaccctgcc

SEQ ID NO: 4267 - DNA, 20 bp, Homo sapiens
  source 1..20: mol_type = genomic DNA; note = Gene: ITPKA; note = Location (start to end; relative to TSS): ITPKA_66_96; note = Orientation (relative to transcription): sense; note = sgRNA Position: 41493966; note = Sequence Name: 56322-704_101_SL_seq_4267
acgggcatggcgcggccggg

SEQ ID NO: 4268 - DNA, 20 bp, Homo sapiens
  source 1..20: mol_type = genomic DNA; note = Gene: ITPKA; note = Location (start to end; relative to TSS): ITPKA_20_50; note = Orientation (relative to transcription): sense; note = sgRNA Position: 41493920; note = Sequence Name: 56322-704_101_SL_seq_4268
tcagcggcggcgccggcact

SEQ ID NO: 4269 - DNA, 20 bp, Homo sapiens
  source 1..20: mol_type = genomic DNA; note = Gene: ITPKA; note = Location (start to end; relative to TSS): ITPKA_53_83; note = Orientation (relative to transcription): sense; note = sgRNA Position: 41493953; note = Sequence Name: 56322-704_101_SL_seq_4269
gcccgggggcccaacgggca

SEQ ID NO: 4270 - DNA, 20 bp, Homo sapiens
  source 1..20: mol_type = genomic DNA; note = Gene: ITPKB; note = Location (start to end; relative to TSS): ITPKB_38_68; note = Orientation (relative to transcription): sense; note = sgRNA Position: 226739220; note = Sequence Name: 56322-704_101_SL_seq_4270
gtcgccactgccgggatcgc

SEQ ID NO: 4271 - DNA, 20 bp, Homo sapiens
  source 1..20: mol_type = genomic DNA; note = Gene: ITPKB; note = Location (start to end; relative to TSS): ITPKB_91_121; note = Orientation (relative to transcription): antisense; note = sgRNA Position: 226739187; note = Sequence Name: 56322-704_101_SL_seq_4271
aagaggagtgcgaaagaggg

SEQ ID NO: 4272 - DNA, 20 bp, Homo sapiens
  source 1..20: mol_type = genomic DNA; note = Gene: ITPKB; note = Location (start to end; relative to TSS): ITPKB_39_69; note = Orientation (relative to transcription): sense; note = sgRNA Position: 226739219; note = Sequence Name: 56322-704_101_SL_seq_4272
tcgccactgccgggatcgcc

SEQ ID NO: 4273 - DNA, 20 bp, Homo sapiens
  source 1..20: mol_type = genomic DNA; note = Gene: ITPKB; note = Location (start to end; relative to TSS): ITPKB_79_109; note = Orientation (relative to transcription): antisense; note = sgRNA Position: 226739199; note = Sequence Name: 56322-704_101_SL_seq_4273
aaagaggggggaaagctctt

SEQ ID NO: 4274 - DNA, 20 bp, Homo sapiens
  source 1..20: mol_type = genomic DNA; note = Gene: ITPKB; note = Location (start to end; relative to TSS): ITPKB_37_67; note = Orientation (relative to transcription): antisense; note = sgRNA Position: 226739241; note = Sequence Name: 56322-704_101_SL_seq_4274
cggcagtggcgacgccaagc

SEQ ID NO: 4275 - DNA, 20 bp, Homo sapiens
  source 1..20: mol_type = genomic DNA; note = Gene: ITPKB; note = Location (start to end; relative to TSS): ITPKB_72_102; note = Orientation (relative to transcription): antisense; note = sgRNA Position: 226739206; note = Sequence Name: 56322-704_101_SL_seq_4275
ggggaaagctcttcggttca

SEQ ID NO: 4276 - DNA, 20 bp, Homo sapiens
  source 1..20: mol_type = genomic DNA; note = Gene: ITPKB; note = Location (start to end; relative to TSS): ITPKB_29_59; note = Orientation (relative to transcription): sense; note = sgRNA Position: 226739229; note = Sequence Name: 56322-704_101_SL_seq_4276
cggcttggcgtcgccactgc

SEQ ID NO: 4277 - DNA, 20 bp, Homo sapiens
  source 1..20: mol_type = genomic DNA; note = Gene: ITPKB; note = Location (start to end; relative to TSS): ITPKB_71_101; note = Orientation (relative to transcription): antisense; note = sgRNA Position: 226739207; note = Sequence Name: 56322-704_101_SL_seq_4277
gggaaagctcttcggttcag

SEQ ID NO: 4278 - DNA, 20 bp, Homo sapiens
  source 1..20: mol_type = genomic DNA; note = Gene: ITPKB; note = Location (start to end; relative to TSS): ITPKB_30_60; note = Orientation (relative to transcription): sense; note = sgRNA Position: 226739228; note = Sequence Name: 56322-704_101_SL_seq_4278
ggcttggcgtcgccactgcc

SEQ ID NO: 4279 - DNA, 20 bp, Homo sapiens
  source 1..20: mol_type = genomic DNA; note = Gene: ITPKB; note = Location (start to end; relative to TSS): ITPKB_66_96; note = Orientation (relative to transcription): antisense; note = sgRNA Position: 226739212; note = Sequence Name: 56322-704_101_SL_seq_4279
agctcttcggttcaggggcc

SEQ ID NO: 4280 - DNA, 20 bp, Homo sapiens
  source 1..20: mol_type = genomic DNA; note = Gene: ITPKC; note = Location (start to end; relative to TSS): ITPKC_39_69; note = Orientation (relative to transcription): sense; note = sgRNA Position: 40717177; note = Sequence Name: 56322-704_101_SL_seq_4280
agcctgaacgaggcggaggc

SEQ ID NO: 4281 - DNA, 20 bp, Homo sapiens
  source 1..20: mol_type = genomic DNA; note = Gene: ITPKC; note = Location (start to end; relative to TSS): ITPKC_84_114; note = Orientation (relative to transcription): sense; note = sgRNA Position: 40717222; note = Sequence Name: 56322-704_101_SL_seq_4281
atgggactggaggcgccgcg

SEQ ID NO: 4282 - DNA, 20 bp, Homo sapiens
  source 1..20: mol_type = genomic DNA; note = Gene: ITPKC; note = Location (start to end; relative to TSS): ITPKC_29_59; note = Orientation (relative to transcription): sense; note = sgRNA Position: 40717167; note = Sequence Name: 56322-704_101_SL_seq_4282
gtgccgtgggagcctgaacg

SEQ ID NO: 4283 - DNA, 20 bp, Homo sapiens
  source 1..20: mol_type = genomic DNA; note = Gene: ITPKC; note = Location (start to end; relative to TSS): ITPKC_79_109; note = Orientation (relative to transcription): antisense; note = sgRNA Position: 40717197; note = Sequence Name: 56322-704_101_SL_seq_4283
cagtcccatgcgggccgccg

SEQ ID NO: 4284 - DNA, 20 bp, Homo sapiens
  source 1..20: mol_type = genomic DNA; note = Gene: ITPKC; note = Location (start to end; relative to TSS): ITPKC_35_65; note = Orientation (relative to transcription): sense; note = sgRNA Position: 40717173; note = Sequence Name: 56322-704_101_SL_seq_4284
tgggagcctgaacgaggcgg

SEQ ID NO: 4285 - DNA, 20 bp, Homo sapiens
  source 1..20: mol_type = genomic DNA; note = Gene: ITPKC; note = Location (start to end; relative to TSS): ITPKC_78_108; note = Orientation (relative to transcription): antisense; note = sgRNA Position: 40717196; note = Sequence Name: 56322-704_101_SL_seq_4285
agtcccatgcgggccgccgc

SEQ ID NO: 4286 - DNA, 20 bp, Homo sapiens
  source 1..20: mol_type = genomic DNA; note = Gene: ITPKC; note = Location (start to end; relative to TSS): ITPKC_36_66; note = Orientation (relative to transcription): antisense; note = sgRNA Position: 40717154; note = Sequence Name: 56322-704_101_SL_seq_4286
tcgttcaggctcccacggca

SEQ ID NO: 4287 - DNA, 20 bp, Homo sapiens
  source 1..20: mol_type = genomic DNA; note = Gene: ITPKC; note = Location (start to end; relative to TSS): ITPKC_74_104; note = Orientation (relative to transcription): sense; note = sgRNA Position: 40717212; note = Sequence Name: 56322-704_101_SL_seq_4287
ggcggcccgcatgggactgg

SEQ ID NO: 4288 - DNA, 20 bp, Homo sapiens
  source 1..20: mol_type = genomic DNA; note = Gene: ITPKC; note = Location (start to end; relative to TSS): ITPKC_32_62; note = Orientation (relative to transcription): sense; note = sgRNA Position: 40717170; note = Sequence Name: 56322-704_101_SL_seq_4288
ccgtgggagcctgaacgagg

SEQ ID NO: 4289 - DNA, 20 bp, Homo sapiens
  source 1..20: mol_type = genomic DNA; note = Gene: ITPKC; note = Location (start to end; relative to TSS): ITPKC_67_97; note = Orientation (relative to transcription): antisense; note = sgRNA Position: 40717185; note = Sequence Name: 56322-704_101_SL_seq_4289
ggccgccgcgggcagcgccc

SEQ ID NO: 4290 - DNA, 20 bp, Homo sapiens
  source 1..20: mol_type = genomic DNA; note = Gene: JAK1; note = Location (start to end; relative to TSS): JAK1_46_76; note = Orientation (relative to transcription): sense; note = sgRNA Position: 64966479; note = Sequence Name: 56322-704_101_SL_seq_4290
tgcgggcctgcgcccagtcc

SEQ ID NO: 4291 - DNA, 20 bp, Homo sapiens
  source 1..20: mol_type = genomic DNA; note = Gene: JAK1; note = Location (start to end; relative to TSS): JAK1_78_108; note = Orientation (relative to transcription): sense; note = sgRNA Position: 64966447; note = Sequence Name: 56322-704_101_SL_seq_4291
ccgcgacccctcctcagccc

SEQ ID NO: 4292 - DNA, 20 bp, Homo sapiens
  source 1..20: mol_type = genomic DNA; note = Gene: JAK1; note = Location (start to end; relative to TSS): JAK1_38_68; note = Orientation (relative to transcription): antisense; note = sgRNA Position: 64966507; note = Sequence Name: 56322-704_101_SL_seq_4292
cccgcactgtctgcagctcc

SEQ ID NO: 4293 - DNA, 20 bp, Homo sapiens
  source 1..20: mol_type = genomic DNA; note = Gene: JAK1; note = Location (start to end; relative to TSS): JAK1_74_104; note = Orientation (relative to transcription): antisense; note = sgRNA Position: 64966471; note = Sequence Name: 56322-704_101_SL_seq_4293
ggggtcgcggcgaggacagc

SEQ ID NO: 4294 - DNA, 20 bp, Homo sapiens
  source 1..20: mol_type = genomic DNA; note = Gene: JAK1; note = Location (start to end; relative to TSS): JAK1_28_58; note = Orientation (relative to transcription): sense; note = sgRNA Position: 64966497; note = Sequence Name: 56322-704_101_SL_seq_4294
tcctggagctgcagacagtg

SEQ ID NO: 4295 - DNA, 20 bp, Homo sapiens
  source 1..20: mol_type = genomic DNA; note = Gene: JAK1; note = Location (start to end; relative to TSS): JAK1_73_103; note = Orientation (relative to transcription): antisense; note = sgRNA Position: 64966472; note = Sequence Name: 56322-704_101_SL_seq_4295
gggtcgcggcgaggacagcc

SEQ ID NO: 4296 - DNA, 20 bp, Homo sapiens
  source 1..20: mol_type = genomic DNA; note = Gene: JAK1; note = Location (start to end; relative to TSS): JAK1_27_57; note = Orientation (relative to transcription): antisense; note = sgRNA Position: 64966518; note = Sequence Name: 56322-704_101_SL_seq_4296
tgcagctccaggatactccg

SEQ ID NO: 4297 - DNA, 20 bp, Homo sapiens
  source 1..20: mol_type = genomic DNA; note = Gene: JAK1; note = Location (start to end; relative to TSS): JAK1_67_97; note = Orientation (relative to transcription): antisense; note = sgRNA Position: 64966478; note = Sequence Name: 56322-704_101_SL_seq_4297
cggcgaggacagccgggact

SEQ ID NO: 4298 - DNA, 20 bp, Homo sapiens
  source 1..20: mol_type = genomic DNA; note = Gene: JAK1; note = Location (start to end; relative to TSS): JAK1_18_48; note = Orientation (relative to transcription): antisense; note = sgRNA Position: 64966527; note = Sequence Name: 56322-704_101_SL_seq_4298
aggatactccgcggccgccg

SEQ ID NO: 4299 - DNA, 20 bp, Homo sapiens
  source 1..20: mol_type = genomic DNA; note = Gene: JAK1; note = Location (start to end; relative to TSS): JAK1_61_91; note = Orientation (relative to transcription): antisense; note = sgRNA Position: 64966484; note = Sequence Name: 56322-704_101_SL_seq_4299
ggacagccgggactgggcgc

SEQ ID NO: 4300 - DNA, 20 bp, Homo sapiens
  source 1..20: mol_type = genomic DNA; note = Gene: JAK2; note = Location (start to end; relative to TSS): JAK2_31_61; note = Orientation (relative to transcription): antisense; note = sgRNA Position: 4985309; note = Sequence Name: 56322-704_101_SL_seq_4300
cagcctgtcagcgccgaggg

SEQ ID NO: 4301 - DNA, 20 bp, Homo sapiens
  source 1..20: mol_type = genomic DNA; note = Gene: JAK2; note = Location (start to end; relative to TSS): JAK2_73_103; note = Orientation (relative to transcription): sense; note = sgRNA Position: 4985371; note = Sequence Name: 56322-704_101_SL_seq_4301
gcgtcgccacttcggcttct

SEQ ID NO: 4302 - DNA, 20 bp, Homo sapiens
  source 1..20: mol_type = genomic DNA; note = Gene: JAK2; note = Location (start to end; relative to TSS): JAK2_28_58; note = Orientation (relative to transcription): sense; note = sgRNA Position: 4985326; note = Sequence Name: 56322-704_101_SL_seq_4302
tcggcgctgacaggctgggc

SEQ ID NO: 4303 - DNA, 20 bp, Homo sapiens
  source 1..20: mol_type = genomic DNA; note = Gene: JAK2; note = Location (start to end; relative to TSS): JAK2_65_95; note = Orientation (relative to transcription): sense; note = sgRNA Position: 4985363; note = Sequence Name: 56322-704_101_SL_seq_4303
gggtgttcgcgtcgccactt

SEQ ID NO: 4304 - DNA, 20 bp, Homo sapiens
  source 1..20: mol_type = genomic DNA; note = Gene: JAK2; note = Location (start to end; relative to TSS): JAK2_19_49; note = Orientation (relative to transcription): sense; note = sgRNA Position: 4985317; note = Sequence Name: 56322-704_101_SL_seq_4304
cggcctccctcggcgctgac

SEQ ID NO: 4305 - DNA, 20 bp, Homo sapiens
  source 1..20: mol_type = genomic DNA; note = Gene: JAK2; note = Location (start to end; relative to TSS): JAK2_63_93; note = Orientation (relative to transcription): antisense; note = sgRNA Position: 4985341; note = Sequence Name: 56322-704_101_SL_seq_4305
acgcgaacacccaagcgagc

SEQ ID NO: 4306 - DNA, 20 bp, Homo sapiens
  source 1..20: mol_type = genomic DNA; note = Gene: JAK2; note = Location (start to end; relative to TSS): JAK2_21_51; note = Orientation (relative to transcription): antisense; note = sgRNA Position: 4985299; note = Sequence Name: 56322-704_101_SL_seq_4306
gcgccgagggaggccgttag

SEQ ID NO: 4307 - DNA, 20 bp, Homo sapiens
  source 1..20: mol_type = genomic DNA; note = Gene: JAK2; note = Location (start to end; relative to TSS): JAK2_62_92; note = Orientation (relative to transcription): antisense; note = sgRNA Position: 4985340; note = Sequence Name: 56322-704_101_SL_seq_4307
cgcgaacacccaagcgagcc

SEQ ID NO: 4308 - DNA, 20 bp, Homo sapiens
  source 1..20: mol_type = genomic DNA; note = Gene: JAK2; note = Location (start to end; relative to TSS): JAK2_24_54; note = Orientation (relative to transcription): sense; note = sgRNA Position: 4985322; note = Sequence Name: 56322-704_101_SL_seq_4308
tccctcggcgctgacaggct

SEQ ID NO: 4309 - DNA, 20 bp, Homo sapiens
  source 1..20: mol_type = genomic DNA; note = Gene: JAK2; note = Location (start to end; relative to TSS): JAK2_56_86; note = Orientation (relative to transcription): antisense; note = sgRNA Position: 4985334; note = Sequence Name: 56322-704_101_SL_seq_4309
cacccaagcgagccgggcgc

SEQ ID NO: 4310 - DNA, 20 bp, Homo sapiens
  source 1..20: mol_type = genomic DNA; note = Gene: JAK3; note = Location (start to end; relative to TSS): JAK3_29_59; note = Orientation (relative to transcription): sense; note = sgRNA Position: 17847929; note = Sequence Name: 56322-704_101_SL_seq_4310
gtaagagctggcgatgccgc

SEQ ID NO: 4311 - DNA, 20 bp, Homo sapiens
  source 1..20: mol_type = genomic DNA; note = Gene: JAK3; note = Location (start to end; relative to TSS): JAK3_66_96; note = Orientation (relative to transcription): sense; note = sgRNA Position: 17847892; note = Sequence Name: 56322-704_101_SL_seq_4311
ctgggggaggatggtggtgg

SEQ ID NO: 4312 - DNA, 20 bp, Homo sapiens
  source 1..20: mol_type = genomic DNA; note = Gene: JAK3; note = Location (start to end; relative to TSS): JAK3_30_60; note = Orientation (relative to transcription): sense; note = sgRNA Position: 17847928; note = Sequence Name: 56322-704_101_SL_seq_4312
taagagctggcgatgccgca

SEQ ID NO: 4313 - DNA, 20 bp, Homo sapiens
  source 1..20: mol_type = genomic DNA; note = Gene: JAK3; note = Location (start to end; relative to TSS): JAK3_63_93; note = Orientation (relative to transcription): sense; note = sgRNA Position: 17847895; note = Sequence Name: 56322-704_101_SL_seq_4313
acactgggggaggatggtgg

SEQ ID NO: 4314 - DNA, 20 bp, Homo sapiens
  source 1..20: mol_type = genomic DNA; note = Gene: JAK3; note = Location (start to end; relative to TSS): JAK3_25_55; note = Orientation (relative to transcription): antisense; note = sgRNA Position: 17847953; note = Sequence Name: 56322-704_101_SL_seq_4314
cagctcttacctagcgggca

SEQ ID NO: 4315 - DNA, 20 bp, Homo sapiens
  source 1..20: mol_type = genomic DNA; note = Gene: JAK3; note = Location (start to end; relative to TSS): JAK3_60_90; note = Orientation (relative to transcription): sense; note = sgRNA Position: 17847898; note = Sequence Name: 56322-704_101_SL_seq_4315
cagacactgggggaggatgg

SEQ ID NO: 4316 - DNA, 20 bp, Homo sapiens
  source 1..20: mol_type = genomic DNA; note = Gene: JAK3; note = Location (start to end; relative to TSS): JAK3_26_56; note = Orientation (relative to transcription): antisense; note = sgRNA Position: 17847952; note = Sequence Name: 56322-704_101_SL_seq_4316
ccagctcttacctagcgggc

SEQ ID NO: 4317 - DNA, 20 bp, Homo sapiens
  source 1..20: mol_type = genomic DNA; note = Gene: JAK3; note = Location (start to end; relative to TSS): JAK3_57_87; note = Orientation (relative to transcription): sense; note = sgRNA Position: 17847901; note = Sequence Name: 56322-704_101_SL_seq_4317
gcccagacactgggggagga

SEQ ID NO: 4318 - DNA, 20 bp, Homo sapiens
  source 1..20: mol_type = genomic DNA; note = Gene: JAK3; note = Location (start to end; relative to TSS): JAK3_18_48; note = Orientation (relative to transcription): antisense; note = sgRNA Position: 17847960; note = Sequence Name: 56322-704_101_SL_seq_4318
tacctagcgggcagggaccc

SEQ ID NO: 4319 - DNA, 20 bp, Homo sapiens
  source 1..20: mol_type = genomic DNA; note = Gene: JAK3; note = Location (start to end; relative to TSS): JAK3_48_78; note = Orientation (relative to transcription): sense; note = sgRNA Position: 17847910; note = Sequence Name: 56322-704_101_SL_seq_4319
cagggctcggcccagacact

SEQ ID NO: 4320 - DNA, 20 bp, Homo sapiens
  source 1..20: mol_type = genomic DNA; note = Gene: KALRN; note = Location (start to end; relative to TSS): KALRN_28_58; note = Orientation (relative to transcription): sense; note = sgRNA Position: 124033423; note = Sequence Name: 56322-704_101_SL_seq_4320
tgccgctgctgggggacagc

SEQ ID NO: 4321 - DNA, 20 bp, Homo sapiens
  source 1..20: mol_type = genomic DNA; note = Gene: KALRN; note = Location (start to end; relative to TSS): KALRN_85_115; note = Orientation (relative to transcription): sense; note = sgRNA Position: 124033480; note = Sequence Name: 56322-704_101_SL_seq_4321
ggccccagccagacagcagg

SEQ ID NO: 4322 - DNA, 20 bp, Homo sapiens
  source 1..20: mol_type = genomic DNA; note = Gene: KALRN; note = Location (start to end; relative to TSS): KALRN_27_57; note = Orientation (relative to transcription): sense; note = sgRNA Position: 124033422; note = Sequence Name: 56322-704_101_SL_seq_4322
ctgccgctgctgggggacag

SEQ ID NO: 4323 - DNA, 20 bp, Homo sapiens
  source 1..20: mol_type = genomic DNA; note = Gene: KALRN; note = Location (start to end; relative to TSS): KALRN_82_112; note = Orientation (relative to transcription): sense; note = sgRNA Position: 124033477; note = Sequence Name: 56322-704_101_SL_seq_4323
cccggccccagccagacagc

SEQ ID NO: 4324 - DNA, 20 bp, Homo sapiens
  source 1..20: mol_type = genomic DNA; note = Gene: KALRN; note = Location (start to end; relative to TSS): KALRN_20_50; note = Orientation (relative to transcription): sense; note = sgRNA Position: 124033415; note = Sequence Name: 56322-704_101_SL_seq_4324
gagccagctgccgctgctgg

SEQ ID NO: 4325 - DNA, 20 bp, Homo sapiens
  source 1..20: mol_type = genomic DNA; note = Gene: KALRN; note = Location (start to end; relative to TSS): KALRN_62_92; note = Orientation (relative to transcription): antisense; note = sgRNA Position: 124033437; note = Sequence Name: 56322-704_101_SL_seq_4325
ggccggggtgcgggctgcct

SEQ ID NO: 4326 - DNA, 20 bp, Homo sapiens
  source 1..20: mol_type = genomic DNA; note = Gene: KALRN; note = Location (start to end; relative to TSS): KALRN_19_49; note = Orientation (relative to transcription): sense; note = sgRNA Position: 124033414; note = Sequence Name: 56322-704_101_SL_seq_4326
agagccagctgccgctgctg

SEQ ID NO: 4327 - DNA, 20 bp, Homo sapiens
  source 1..20: mol_type = genomic DNA; note = Gene: KALRN; note = Location (start to end; relative to TSS): KALRN_58_88; note = Orientation (relative to transcription): sense; note = sgRNA Position: 124033453; note = Sequence Name: 56322-704_101_SL_seq_4327
gcagcccgcaccccggcccc

SEQ ID NO: 4328 - DNA, 20 bp, Homo sapiens
  source 1..20: mol_type = genomic DNA; note = Gene: KALRN; note = Location (start to end; relative to TSS): KALRN_18_48; note = Orientation (relative to transcription): sense; note = sgRNA Position: 124033413; note = Sequence Name: 56322-704_101_SL_seq_4328
gagagccagctgccgctgct

SEQ ID NO: 4329 - DNA, 20 bp, Homo sapiens
  source 1..20: mol_type = genomic DNA; note = Gene: KALRN; note = Location (start to end; relative to TSS): KALRN_51_81; note = Orientation (relative to transcription): sense; note = sgRNA Position: 124033446; note = Sequence Name: 56322-704_101_SL_seq_4329
cgcccaggcagcccgcaccc

SEQ ID NO: 4330 - DNA, 20 bp, Homo sapiens
  source 1..20: mol_type = genomic DNA; note = Gene: KDR; note = Location (start to end; relative to TSS): KDR_35_65; note = Orientation (relative to transcription): sense; note = sgRNA Position: 55125536; note = Sequence Name: 56322-704_101_SL_seq_4330
tgcgtttcctctgcctgcgc

SEQ ID NO: 4331 - DNA, 20 bp, Homo sapiens
  source 1..20: mol_type = genomic DNA; note = Gene: KDR; note = Location (start to end; relative to TSS): KDR_76_106; note = Orientation (relative to transcription): sense; note = sgRNA Position: 55125495; note = Sequence Name: 56322-704_101_SL_seq_4331
agaaagtccgtctggcagcc

SEQ ID NO: 4332 - DNA, 20 bp, Homo sapiens
  source 1..20: mol_type = genomic DNA; note = Gene: KDR; note = Location (start to end; relative to TSS): KDR_36_66; note = Orientation (relative to transcription): sense; note = sgRNA Position: 55125535; note = Sequence Name: 56322-704_101_SL_seq_4332
gcgtttcctctgcctgcgcc

SEQ ID NO: 4333 - DNA, 20 bp, Homo sapiens
  source 1..20: mol_type = genomic DNA; note = Gene: KDR; note = Location (start to end; relative to TSS): KDR_68_98; note = Orientation (relative to transcription): sense; note = sgRNA Position: 55125503; note = Sequence Name: 56322-704_101_SL_seq_4333
cgcgccgcagaaagtccgtc

SEQ ID NO: 4334 - DNA, 20 bp, Homo sapiens
  source 1..20: mol_type = genomic DNA; note = Gene: KDR; note = Location (start to end; relative to TSS): KDR_17_47; note = Orientation (relative to transcription): antisense; note = sgRNA Position: 55125574; note = Sequence Name: 56322-704_101_SL_seq_4334
ccacacattgaccgctctcc

SEQ ID NO: 4335 - DNA, 20 bp, Homo sapiens
  source 1..20: mol_type = genomic DNA; note = Gene: KDR; note = Location (start to end; relative to TSS): KDR_63_93; note = Orientation (relative to transcription): antisense; note = sgRNA Position: 55125528; note = Sequence Name: 56322-704_101_SL_seq_4335
tgcggcgcgcaagtgatgcc

SEQ ID NO: 4336 - DNA, 20 bp, Homo sapiens
  source 1..20: mol_type = genomic DNA; note = Gene: KDR; note = Location (start to end; relative to TSS): KDR_16_46; note = Orientation (relative to transcription): antisense; note = sgRNA Position: 55125575; note = Sequence Name: 56322-704_101_SL_seq_4336
cacacattgaccgctctccc

SEQ ID NO: 4337 - DNA, 20 bp, Homo sapiens
  source 1..20: mol_type = genomic DNA; note = Gene: KDR; note = Location (start to end; relative to TSS): KDR_57_87; note = Orientation (relative to transcription): antisense; note = sgRNA Position: 55125534; note = Sequence Name: 56322-704_101_SL_seq_4337
gcgcaagtgatgcccggcgc

SEQ ID NO: 4338 - DNA, 20 bp, Homo sapiens
  source 1..20: mol_type = genomic DNA; note = Gene: KDR; note = Location (start to end; relative to TSS): KDR_15_45; note = Orientation (relative to transcription): antisense; note = sgRNA Position: 55125576; note = Sequence Name: 56322-704_101_SL_seq_4338
acacattgaccgctctcccg

SEQ ID NO: 4339 - DNA, 20 bp, Homo sapiens
  source 1..20: mol_type = genomic DNA; note = Gene: KDR; note = Location (start to end; relative to TSS): KDR_51_81; note = Orientation (relative to transcription): antisense; note = sgRNA Position: 55125540; note = Sequence Name: 56322-704_101_SL_seq_4339
gtgatgcccggcgcaggcag

SEQ ID NO: 4340 - DNA, 20 bp, Homo sapiens
  source 1..20: mol_type = genomic DNA; note = Gene: KIT; note = Location (start to end; relative to TSS): KIT_27_57; note = Orientation (relative to transcription): antisense; note = sgRNA Position: 54657990; note = Sequence Name: 56322-704_101_SL_seq_4340
ctgcgatgggatccgagctc

SEQ ID NO: 4341 - DNA, 20 bp, Homo sapiens
  source 1..20: mol_type = genomic DNA; note = Gene: KIT; note = Location (start to end; relative to TSS): KIT_107_137; note = Orientation (relative to transcription): sense; note = sgRNA Position: 54658090; note = Sequence Name: 56322-704_101_SL_seq_4341
tccagacaggtgggacaccg

SEQ ID NO: 4342 - DNA, 20 bp, Homo sapiens
  source 1..20: mol_type = genomic DNA; note = Gene: KIT; note = Location (start to end; relative to TSS): KIT_34_64; note = Orientation (relative to transcription): sense; note = sgRNA Position: 54658017; note = Sequence Name: 56322-704_101_SL_seq_4342
atcgcagctaccgcgatgag

SEQ ID NO: 4343 - DNA, 20 bp, Homo sapiens
  source 1..20: mol_type = genomic DNA; note = Gene: KIT; note = Location (start to end; relative to TSS): KIT_102_132; note = Orientation (relative to transcription): antisense; note = sgRNA Position: 54658065; note = Sequence Name: 56322-704_101_SL_seq_4343
ctgtctggacgcgaagcagt

SEQ ID NO: 4344 - DNA, 20 bp, Homo sapiens
  source 1..20: mol_type = genomic DNA; note = Gene: KIT; note = Location (start to end; relative to TSS): KIT_40_70; note = Orientation (relative to transcription): antisense; note = sgRNA Position: 54658003; note = Sequence Name: 56322-704_101_SL_seq_4344
ctcatcgcggtagctgcgat

SEQ ID NO: 4345 - DNA, 20 bp, Homo sapiens
  source 1..20: mol_type = genomic DNA; note = Gene: KIT; note = Location (start to end; relative to TSS): KIT_98_128; note = Orientation (relative to transcription): sense; note = sgRNA Position: 54658081; note = Sequence Name: 56322-704_101_SL_seq_4345
tgcttcgcgtccagacaggt

SEQ ID NO: 4346 - DNA, 20 bp, Homo sapiens
  source 1..20: mol_type = genomic DNA; note = Gene: KIT; note = Location (start to end; relative to TSS): KIT_41_71; note = Orientation (relative to transcription): antisense; note = sgRNA Position: 54658004; note = Sequence Name: 56322-704_101_SL_seq_4346
tctcatcgcggtagctgcga

SEQ ID NO: 4347 - DNA, 20 bp, Homo sapiens
  source 1..20: mol_type = genomic DNA; note = Gene: KIT; note = Location (start to end; relative to TSS): KIT_97_127; note = Orientation (relative to transcription): sense; note = sgRNA Position: 54658080; note = Sequence Name: 56322-704_101_SL_seq_4347
ctgcttcgcgtccagacagg

SEQ ID NO: 4348 - DNA, 20 bp, Homo sapiens
  source 1..20: mol_type = genomic DNA; note = Gene: KIT; note = Location (start to end; relative to TSS): KIT_43_73; note = Orientation (relative to transcription): sense; note = sgRNA Position: 54658026; note = Sequence Name: 56322-704_101_SL_seq_4348
accgcgatgagaggcgctcg

SEQ ID NO: 4349 - DNA, 20 bp, Homo sapiens
  source 1..20: mol_type = genomic DNA; note = Gene: KIT; note = Location (start to end; relative to TSS): KIT_94_124; note = Orientation (relative to transcription): sense; note = sgRNA Position: 54658077; note = Sequence Name: 56322-704_101_SL_seq_4349
ctactgcttcgcgtccagac

SEQ ID NO: 4350 - DNA, 20 bp, Homo sapiens
  source 1..20: mol_type = genomic DNA; note = Gene: KSR1; note = Location (start to end; relative to TSS): KSR1_41_71; note = Orientation (relative to transcription): sense; note = sgRNA Position: 27456515; note = Sequence Name: 56322-704_101_SL_seq_4350
gactcagcggccggctctac

SEQ ID NO: 4351 - DNA, 20 bp, Homo sapiens
  source 1..20: mol_type = genomic DNA; note = Gene: KSR1; note = Location (start to end; relative to TSS): KSR1_77_107; note = Orientation (relative to transcription): sense; note = sgRNA Position: 27456551; note = Sequence Name: 56322-704_101_SL_seq_4351
gcagcgccgaggggcgctcc

SEQ ID NO: 4352 - DNA, 20 bp, Homo sapiens
  source 1..20: mol_type = genomic DNA; note = Gene: KSR1; note = Location (start to end; relative to TSS): KSR1_32_62; note = Orientation (relative to transcription): sense; note = sgRNA Position: 27456506; note = Sequence Name: 56322-704_101_SL_seq_4352
gaagcggcagactcagcggc

SEQ ID NO: 4353 - DNA, 20 bp, Homo sapiens
  source 1..20: mol_type = genomic DNA; note = Gene: KSR1; note = Location (start to end; relative to TSS): KSR1_66_96; note = Orientation (relative to transcription): sense; note = sgRNA Position: 27456540; note = Sequence Name: 56322-704_101_SL_seq_4353
tcccggctcgggcagcgccg

SEQ ID NO: 4354 - DNA, 20 bp, Homo sapiens
  source 1..20: mol_type = genomic DNA; note = Gene: KSR1; note = Location (start to end; relative to TSS): KSR1_28_58; note = Orientation (relative to transcription): sense; note = sgRNA Position: 27456502; note = Sequence Name: 56322-704_101_SL_seq_4354
ggtggaagcggcagactcag

SEQ ID NO: 4355 - DNA, 20 bp, Homo sapiens
  source 1..20: mol_type = genomic DNA; note = Gene: KSR1; note = Location (start to end; relative to TSS): KSR1_60_90; note = Orientation (relative to transcription): antisense; note = sgRNA Position: 27456514; note = Sequence Name: 56322-704_101_SL_seq_4355
agccgggacgccggtagagc

SEQ ID NO: 4356 - DNA, 20 bp, Homo sapiens
  source 1..20: mol_type = genomic DNA; note = Gene: KSR1; note = Location (start to end; relative to TSS): KSR1_24_54; note = Orientation (relative to transcription): antisense; note = sgRNA Position: 27456478; note = Sequence Name: 56322-704_101_SL_seq_4356
cgcttccaccctcccagccg

SEQ ID NO: 4357 - DNA, 20 bp, Homo sapiens
  source 1..20: mol_type = genomic DNA; note = Gene: KSR1; note = Location (start to end; relative to TSS): KSR1_54_84; note = Orientation (relative to transcription): sense; note = sgRNA Position: 27456528; note = Sequence Name: 56322-704_101_SL_seq_4357
gctctaccggcgtcccggct

SEQ ID NO: 4358 - DNA, 20 bp, Homo sapiens
  source 1..20: mol_type = genomic DNA; note = Gene: KSR1; note = Location (start to end; relative to TSS): KSR1_16_46; note = Orientation (relative to transcription): sense; note = sgRNA Position: 27456490; note = Sequence Name: 56322-704_101_SL_seq_4358
cgcggctgggagggtggaag

SEQ ID NO: 4359 - DNA, 20 bp, Homo sapiens
  source 1..20: mol_type = genomic DNA; note = Gene: KSR1; note = Location (start to end; relative to TSS): KSR1_49_79; note = Orientation (relative to transcription): sense; note = sgRNA Position: 27456523; note = Sequence Name: 56322-704_101_SL_seq_4359
ggccggctctaccggcgtcc

SEQ ID NO: 4360 - DNA, 20 bp, Homo sapiens
  source 1..20: mol_type = genomic DNA; note = Gene: KSR2; note = Location (start to end; relative to TSS): KSR2_52_82; note = Orientation (relative to transcription): antisense; note = sgRNA Position: 117968934; note = Sequence Name: 56322-704_101_SL_seq_4360
ccgccgggctccgggggtga

SEQ ID NO: 4361 - DNA, 20 bp, Homo sapiens
  source 1..20: mol_type = genomic DNA; note = Gene: KSR2; note = Location (start to end; relative to TSS): KSR2_115_145; note = Orientation (relative to transcription): sense; note = sgRNA Position: 117968851; note = Sequence Name: 56322-704_101_SL_seq_4361
gcagtagccgccgcagccgc

SEQ ID NO: 4362 - DNA, 20 bp, Homo sapiens
  source 1..20: mol_type = genomic DNA; note = Gene: KSR2; note = Location (start to end; relative to TSS): KSR2_46_76; note = Orientation (relative to transcription): sense; note = sgRNA Position: 117968920; note = Sequence Name: 56322-704_101_SL_seq_4362
tcacccccggagcccggcgg

SEQ ID NO: 4363 - DNA, 20 bp, Homo sapiens
  source 1..20: mol_type = genomic DNA; note = Gene: KSR2; note = Location (start to end; relative to TSS): KSR2_114_144; note = Orientation (relative to transcription): sense; note = sgRNA Position: 117968852; note = Sequence Name: 56322-704_101_SL_seq_4363
cgcagtagccgccgcagccg

SEQ ID NO: 4364 - DNA, 20 bp, Homo sapiens
  source 1..20: mol_type = genomic DNA; note = Gene: KSR2; note = Location (start to end; relative to TSS): KSR2_43_73; note = Orientation (relative to transcription): sense; note = sgRNA Position: 117968923; note = Sequence Name: 56322-704_101_SL_seq_4364
ccgtcacccccggagcccgg

SEQ ID NO: 4365 - DNA, 20 bp, Homo sapiens
  source 1..20: mol_type = genomic DNA; note = Gene: KSR2; note = Location (start to end; relative to TSS): KSR2_77_107; note = Orientation (relative to transcription): sense; note = sgRNA Position: 117968889; note = Sequence Name: 56322-704_101_SL_seq_4365
gcagcagcagcagcgcgggg

SEQ ID NO: 4366 - DNA, 20 bp, Homo sapiens
  source 1..20: mol_type = genomic DNA; note = Gene: KSR2; note = Location (start to end; relative to TSS): KSR2_33_63; note = Orientation (relative to transcription): sense; note = sgRNA Position: 117968933; note = Sequence Name: 56322-704_101_SL_seq_4366
attgcagcaaccgtcacccc

SEQ ID NO: 4367 - DNA, 20 bp, Homo sapiens
  source 1..20: mol_type = genomic DNA; note = Gene: KSR2; note = Location (start to end; relative to TSS): KSR2_74_104; note = Orientation (relative to transcription): sense; note = sgRNA Position: 117968892; note = Sequence Name: 56322-704_101_SL_seq_4367
gcagcagcagcagcagcgcg

SEQ ID NO: 4368 - DNA, 20 bp, Homo sapiens
  source 1..20: mol_type = genomic DNA; note = Gene: KSR2; note = Location (start to end; relative to TSS): KSR2_40_70; note = Orientation (relative to transcription): sense; note = sgRNA Position: 117968926; note = Sequence Name: 56322-704_101_SL_seq_4368
caaccgtcacccccggagcc

SEQ ID NO: 4369 - DNA, 20 bp, Homo sapiens
  source 1..20: mol_type = genomic DNA; note = Gene: KSR2; note = Location (start to end; relative to TSS): KSR2_72_102; note = Orientation (relative to transcription): sense; note = sgRNA Position: 117968894; note = Sequence Name: 56322-704_101_SL_seq_4369
cagcagcagcagcagcagcg

SEQ ID NO: 4370 - DNA, 20 bp, Homo sapiens
  source 1..20: mol_type = genomic DNA; note = Gene: LATS1; note = Location (start to end; relative to TSS): LATS1_44_74; note = Orientation (relative to transcription): sense; note = sgRNA Position: 149718033; note = Sequence Name: 56322-704_101_SL_seq_4370
cggcggtggcctggtgttaa

SEQ ID NO: 4371 - DNA, 20 bp, Homo sapiens
  source 1..20: mol_type = genomic DNA; note = Gene: LATS1; note = Location (start to end; relative to TSS): LATS1_75_105; note = Orientation (relative to transcription): sense; note = sgRNA Position: 149718002; note = Sequence Name: 56322-704_101_SL_seq_4371
ggtcctcacgacccctggga

SEQ ID NO: 4372 - DNA, 20 bp, Homo sapiens
  source 1..20: mol_type = genomic DNA; note = Gene: LATS1; note = Location (start to end; relative to TSS): LATS1_35_65; note = Orientation (relative to transcription): sense; note = sgRNA Position: 149718042; note = Sequence Name: 56322-704_101_SL_seq_4372
cggcggcggcggcggtggcc

SEQ ID NO: 4373 - DNA, 20 bp, Homo sapiens
  source 1..20: mol_type = genomic DNA; note = Gene: LATS1; note = Location (start to end; relative to TSS): LATS1_71_101; note = Orientation (relative to transcription): sense; note = sgRNA Position: 149718006; note = Sequence Name: 56322-704_101_SL_seq_4373
gccaggtcctcacgacccct

SEQ ID NO: 4374 - DNA, 20 bp, Homo sapiens
  source 1..20: mol_type = genomic DNA; note = Gene: LATS1; note = Location (start to end; relative to TSS): LATS1_24_54; note = Orientation (relative to transcription): sense; note = sgRNA Position: 149718053; note = Sequence Name: 56322-704_101_SL_seq_4374
aggcaaaatggcggcggcgg

SEQ ID NO: 4375 - DNA, 20 bp, Homo sapiens
  source 1..20: mol_type = genomic DNA; note = Gene: LATS1; note = Location (start to end; relative to TSS): LATS1_70_100; note = Orientation (relative to transcription): sense; note = sgRNA Position: 149718007; note = Sequence Name: 56322-704_101_SL_seq_4375
agccaggtcctcacgacccc

SEQ ID NO: 4376 - DNA, 20 bp, Homo sapiens
  source 1..20: mol_type = genomic DNA; note = Gene: LATS1; note = Location (start to end; relative to TSS): LATS1_21_51; note = Orientation (relative to transcription): sense; note = sgRNA Position: 149718056; note = Sequence Name: 56322-704_101_SL_seq_4376
ggaaggcaaaatggcggcgg

SEQ ID NO: 4377 - DNA, 20 bp, Homo sapiens
  source 1..20: mol_type = genomic DNA; note = Gene: LATS1; note = Location (start to end; relative to TSS): LATS1_62_92; note = Orientation (relative to transcription): antisense; note = sgRNA Position: 149718035; note = Sequence Name: 56322-704_101_SL_seq_4377
ctggctctccccttaacacc

SEQ ID NO: 4378 - DNA, 20 bp, Homo sapiens
  source 1..20: mol_type = genomic DNA; note = Gene: LATS1; note = Location (start to end; relative to TSS): LATS1_18_48; note = Orientation (relative to transcription): sense; note = sgRNA Position: 149718059; note = Sequence Name: 56322-704_101_SL_seq_4378
agtggaaggcaaaatggcgg

SEQ ID NO: 4379 - DNA, 20 bp, Homo sapiens
  source 1..20: mol_type = genomic DNA; note = Gene: LATS1; note = Location (start to end; relative to TSS): LATS1_54_84; note = Orientation (relative to transcription): sense; note = sgRNA Position: 149718023; note = Sequence Name: 56322-704_101_SL_seq_4379
ctggtgttaaggggagagcc

SEQ ID NO: 4380 - DNA, 20 bp, Homo sapiens
  source 1..20: mol_type = genomic DNA; note = Gene: LATS2; note = Location (start to end; relative to TSS): LATS2_47_77; note = Orientation (relative to transcription): sense; note = sgRNA Position: 21061515; note = Sequence Name: 56322-704_101_SL_seq_4380
gaaccgcggcgtgagcgccc

SEQ ID NO: 4381 - DNA, 20 bp, Homo sapiens
  source 1..20: mol_type = genomic DNA; note = Gene: LATS2; note = Location (start to end; relative to TSS): LATS2_90_120; note = Orientation (relative to transcription): sense; note = sgRNA Position: 21061472; note = Sequence Name: 56322-704_101_SL_seq_4381
ccacgccaccgccgccgccc

SEQ ID NO: 4382 - DNA, 20 bp, Homo sapiens
  source 1..20: mol_type = genomic DNA; note = Gene: LATS2; note = Location (start to end; relative to TSS): LATS2_36_66; note = Orientation (relative to transcription): antisense; note = sgRNA Position: 21061546; note = Sequence Name: 56322-704_101_SL_seq_4382
ttccaaagcgcagacccaag

SEQ ID NO: 4383 - DNA, 20 bp, Homo sapiens
  source 1..20: mol_type = genomic DNA; note = Gene: LATS2; note = Location (start to end; relative to TSS): LATS2_75_105; note = Orientation (relative to transcription): antisense; note = sgRNA Position: 21061507; note = Sequence Name: 56322-704_101_SL_seq_4383
cggcgactgctccatcttcc

SEQ ID NO: 4384 - DNA, 20 bp, Homo sapiens
  source 1..20: mol_type = genomic DNA; note = Gene: LATS2; note = Location (start to end; relative to TSS): LATS2_35_65; note = Orientation (relative to transcription): antisense; note = sgRNA Position: 21061547; note = Sequence Name: 56322-704_101_SL_seq_4384
tccaaagcgcagacccaagt

SEQ ID NO: 4385 - DNA, 20 bp, Homo sapiens
  source 1..20: mol_type = genomic DNA; note = Gene: LATS2; note = Location (start to end; relative to TSS): LATS2_74_104; note = Orientation (relative to transcription): antisense; note = sgRNA Position: 21061508; note = Sequence Name: 56322-704_101_SL_seq_4385
ggcgactgctccatcttccc

SEQ ID NO: 4386 - DNA, 20 bp, Homo sapiens
  source 1..20: mol_type = genomic DNA; note = Gene: LATS2; note = Location (start to end; relative to TSS): LATS2_33_63; note = Orientation (relative to transcription): sense; note = sgRNA Position: 21061529; note = Sequence Name: 56322-704_101_SL_seq_4386
gggtctgcgctttggaaccg

SEQ ID NO: 4387 - DNA, 20 bp, Homo sapiens
  source 1..20: mol_type = genomic DNA; note = Gene: LATS2; note = Location (start to end; relative to TSS): LATS2_73_103; note = Orientation (relative to transcription): antisense; note = sgRNA Position: 21061509; note = Sequence Name: 56322-704_101_SL_seq_4387
gcgactgctccatcttcccg

SEQ ID NO: 4388 - DNA, 20 bp, Homo sapiens
  source 1..20: mol_type = genomic DNA; note = Gene: LATS2; note = Location (start to end; relative to TSS): LATS2_25_55; note = Orientation (relative to transcription): sense; note = sgRNA Position: 21061537; note = Sequence Name: 56322-704_101_SL_seq_4388
tcccacttgggtctgcgctt

SEQ ID NO: 4389 - DNA, 20 bp, Homo sapiens
  source 1..20: mol_type = genomic DNA; note = Gene: LATS2; note = Location (start to end; relative to TSS): LATS2_55_85; note = Orientation (relative to transcription): sense; note = sgRNA Position: 21061507; note = Sequence Name: 56322-704_101_SL_seq_4389
gcgtgagcgccccgggaaga

SEQ ID NO: 4390 - DNA, 20 bp, Homo sapiens
  source 1..20: mol_type = genomic DNA; note = Gene: LCK; note = Location (start to end; relative to TSS): LCK_42_72; note = Orientation (relative to transcription): antisense; note = sgRNA Position: 32251313; note = Sequence Name: 56322-704_101_SL_seq_4390
cctggcctaacctggctgcc

SEQ ID NO: 4391 - DNA, 20 bp, Homo sapiens
  source 1..20: mol_type = genomic DNA; note = Gene: LCK; note = Location (start to end; relative to TSS): LCK_81_111; note = Orientation (relative to transcription): sense; note = sgRNA Position: 32251372; note = Sequence Name: 56322-704_101_SL_seq_4391
gctcccgggctgggcaggta

SEQ ID NO: 4392 - DNA, 20 bp, Homo sapiens
  source 1..20: mol_type = genomic DNA; note = Gene: LCK; note = Location (start to end; relative to TSS): LCK_33_63; note = Orientation (relative to transcription): sense; note = sgRNA Position: 32251324; note = Sequence Name: 56322-704_101_SL_seq_4392
ccaggcagccaggttaggcc

SEQ ID NO: 4393 - DNA, 20 bp, Homo sapiens
  source 1..20: mol_type = genomic DNA; note = Gene: LCK; note = Location (start to end; relative to TSS): LCK_76_106; note = Orientation (relative to transcription): sense; note = sgRNA Position: 32251367; note = Sequence Name: 56322-704_101_SL_seq_4393
agagggctcccgggctgggc

SEQ ID NO: 4394 - DNA, 20 bp, Homo sapiens
  source 1..20: mol_type = genomic DNA; note = Gene: LCK; note = Location (start to end; relative to TSS): LCK_36_66; note = Orientation (relative to transcription): sense; note = sgRNA Position: 32251327; note = Sequence Name: 56322-704_101_SL_seq_4394
ggcagccaggttaggccagg

SEQ ID NO: 4395 - DNA, 20 bp, Homo sapiens
  source 1..20: mol_type = genomic DNA; note = Gene: LCK; note = Location (start to end; relative to TSS): LCK_69_99; note = Orientation (relative to transcription): antisense; note = sgRNA Position: 32251340; note = Sequence Name: 56322-704_101_SL_seq_4395
gccctctggccccattcaca

SEQ ID NO: 4396 - DNA, 20 bp, Homo sapiens
  source 1..20: mol_type = genomic DNA; note = Gene: LCK; note = Location (start to end; relative to TSS): LCK_23_53; note = Orientation (relative to transcription): sense; note = sgRNA Position: 32251314; note = Sequence Name: 56322-704_101_SL_seq_4396
ctgagactgtccaggcagcc

SEQ ID NO: 4397 - DNA, 20 bp, Homo sapiens
  source 1..20: mol_type = genomic DNA; note = Gene: LCK; note = Location (start to end; relative to TSS): LCK_60_90; note = Orientation (relative to transcription): antisense; note = sgRNA Position: 32251331; note = Sequence Name: 56322-704_101_SL_seq_4397
ccccattcacatggtcctcc

SEQ ID NO: 4398 - DNA, 20 bp, Homo sapiens
  source 1..20: mol_type = genomic DNA; note = Gene: LCK; note = Location (start to end; relative to TSS): LCK_28_58; note = Orientation (relative to transcription): sense; note = sgRNA Position: 32251319; note = Sequence Name: 56322-704_101_SL_seq_4398
actgtccaggcagccaggtt

SEQ ID NO: 4399 - DNA, 20 bp, Homo sapiens
  source 1..20: mol_type = genomic DNA; note = Gene: LCK; note = Location (start to end; relative to TSS): LCK_58_88; note = Orientation (relative to transcription): sense; note = sgRNA Position: 32251349; note = Sequence Name: 56322-704_101_SL_seq_4399
gaccatgtgaatggggccag

SEQ ID NO: 4400 - DNA, 20 bp, Homo sapiens
  source 1..20: mol_type = genomic DNA; note = Gene: LIMK1; note = Location (start to end; relative to TSS): LIMK1_25_55; note = Orientation (relative to transcription): sense; note = sgRNA Position: 74083855; note = Sequence Name: 56322-704_101_SL_seq_4400
tttccccgccggtgtccgag

SEQ ID NO: 4401 - DNA, 20 bp, Homo sapiens
  source 1..20: mol_type = genomic DNA; note = Gene: LIMK1; note = Location (start to end; relative to TSS): LIMK1_88_118; note = Orientation (relative to transcription): sense; note = sgRNA Position: 74083918; note = Sequence Name: 56322-704_101_SL_seq_4401
ccgcctccccgggccggcgg

SEQ ID NO: 4402 - DNA, 20 bp, Homo sapiens
  source 1..20: mol_type = genomic DNA; note = Gene: LIMK1; note = Location (start to end; relative to TSS): LIMK1_30_60; note = Orientation (relative to transcription): antisense; note = sgRNA Position: 74083840; note = Sequence Name: 56322-704_101_SL_seq_4402
tcggacaccggcggggaaac

SEQ ID NO: 4403 - DNA, 20 bp, Homo sapiens
  source 1..20: mol_type = genomic DNA; note = Gene: LIMK1; note = Location (start to end; relative to TSS): LIMK1_87_117; note = Orientation (relative to transcription): antisense; note = sgRNA Position: 74083897; note = Sequence Name: 56322-704_101_SL_seq_4403
cccggggaggcgggggcgga

SEQ ID NO: 4404 - DNA, 20 bp, Homo sapiens
  source 1..20: mol_type = genomic DNA; note = Gene: LIMK1; note = Location (start to end; relative to TSS): LIMK1_34_64; note = Orientation (relative to transcription): sense; note = sgRNA Position: 74083864; note = Sequence Name: 56322-704_101_SL_seq_4404
cggtgtccgagaggcgcccc

SEQ ID NO: 4405 - DNA, 20 bp, Homo sapiens
  source 1..20: mol_type = genomic DNA; note = Gene: LIMK1; note = Location (start to end; relative to TSS): LIMK1_85_115; note = Orientation (relative to transcription): sense; note = sgRNA Position: 74083915; note = Sequence Name: 56322-704_101_SL_seq_4405
cccccgcctccccgggccgg

SEQ ID NO: 4406 - DNA, 20 bp, Homo sapiens
  source 1..20: mol_type = genomic DNA; note = Gene: LIMK1; note = Location (start to end; relative to TSS): LIMK1_37_67; note = Orientation (relative to transcription): antisense; note = sgRNA Position: 74083847; note = Sequence Name: 56322-704_101_SL_seq_4406
gcgcctctcggacaccggcg

SEQ ID NO: 4407 - DNA, 20 bp, Homo sapiens
  source 1..20: mol_type = genomic DNA; note = Gene: LIMK1; note = Location (start to end; relative to TSS): LIMK1_82_112; note = Orientation (relative to transcription): sense; note = sgRNA Position: 74083912; note = Sequence Name: 56322-704_101_SL_seq_4407
ccgcccccgcctccccgggc

SEQ ID NO: 4408 - DNA, 20 bp, Homo sapiens
  source 1..20: mol_type = genomic DNA; note = Gene: LIMK1; note = Location (start to end; relative to TSS): LIMK1_38_68; note = Orientation (relative to transcription): antisense; note = sgRNA Position: 74083848; note = Sequence Name: 56322-704_101_SL_seq_4408
ggcgcctctcggacaccggc

SEQ ID NO: 4409 - DNA, 20 bp, Homo sapiens
  source 1..20: mol_type = genomic DNA; note = Gene: LIMK1; note = Location (start to end; relative to TSS): LIMK1_78_108; note = Orientation (relative to transcription): sense; note = sgRNA Position: 74083908; note = Sequence Name: 56322-704_101_SL_seq_4409
ccctccgcccccgcctcccc

SEQ ID NO: 4410 - DNA, 20 bp, Homo sapiens
  source 1..20: mol_type = genomic DNA; note = Gene: LIMK2; note = Location (start to end; relative to TSS): LIMK2_27_57; note = Orientation (relative to transcription): sense; note = sgRNA Position: 31212351; note = Sequence Name: 56322-704_101_SL_seq_4410
aggggagttgtagggaactg

SEQ ID NO: 4411 - DNA, 20 bp, Homo sapiens
  source 1..20: mol_type = genomic DNA; note = Gene: LIMK2; note = Location (start to end; relative to TSS): LIMK2_76_106; note = Orientation (relative to transcription): sense; note = sgRNA Position: 31212400; note = Sequence Name: 56322-704_101_SL_seq_4411
ctccccatttccgcgctccc

SEQ ID NO: 4412 - DNA, 20 bp, Homo sapiens
  source 1..20: mol_type = genomic DNA; note = Gene: LIMK2; note = Location (start to end; relative to TSS): LIMK2_28_58; note = Orientation (relative to transcription): sense; note = sgRNA Position: 31212352; note = Sequence Name: 56322-704_101_SL_seq_4412
ggggagttgtagggaactga

SEQ ID NO: 4413 - DNA, 20 bp, Homo sapiens
  source 1..20: mol_type = genomic DNA; note = Gene: LIMK2; note = Location (start to end; relative to TSS): LIMK2_75_105; note = Orientation (relative to transcription): antisense; note = sgRNA Position: 31212379; note = Sequence Name: 56322-704_101_SL_seq_4413
cggaaatggggaggaggagg

SEQ ID NO: 4414 - DNA, 20 bp, Homo sapiens
  source 1..20: mol_type = genomic DNA; note = Gene: LIMK2; note = Location (start to end; relative to TSS): LIMK2_29_59; note = Orientation (relative to transcription): sense; note = sgRNA Position: 31212353; note = Sequence Name: 56322-704_101_SL_seq_4414
gggagttgtagggaactgag

SEQ ID NO: 4415 - DNA, 20 bp, Homo sapiens
  source 1..20: mol_type = genomic DNA; note = Gene: LIMK2; note = Location (start to end; relative to TSS): LIMK2_74_104; note = Orientation (relative to transcription): antisense; note = sgRNA Position: 31212378; note = Sequence Name: 56322-704_101_SL_seq_4415
ggaaatggggaggaggaggc

SEQ ID NO: 4416 - DNA, 20 bp, Homo sapiens
  source 1..20: mol_type = genomic DNA; note = Gene: LIMK2; note = Location (start to end; relative to TSS): LIMK2_19_49; note = Orientation (relative to transcription): sense; note = sgRNA Position: 31212343; note = Sequence Name: 56322-704_101_SL_seq_4416
aggagctgaggggagttgta

SEQ ID NO: 4417 - DNA, 20 bp, Homo sapiens
  source 1..20: mol_type = genomic DNA; note = Gene: LIMK2; note = Location (start to end; relative to TSS): LIMK2_73_103; note = Orientation (relative to transcription): antisense; note = sgRNA Position: 31212377; note = Sequence Name: 56322-704_101_SL_seq_4417
gaaatggggaggaggaggcg

SEQ ID NO: 4418 - DNA, 20 bp, Homo sapiens
  source 1..20: mol_type = genomic DNA; note = Gene: LIMK2; note = Location (start to end; relative to TSS): LIMK2_18_48; note = Orientation (relative to transcription): sense; note = sgRNA Position: 31212342; note = Sequence Name: 56322-704_101_SL_seq_4418
caggagctgaggggagttgt

SEQ ID NO: 4419 - DNA, 20 bp, Homo sapiens
  source 1..20: mol_type = genomic DNA; note = Gene: LIMK2; note = Location (start to end; relative to TSS): LIMK2_72_102; note = Orientation (relative to transcription): antisense; note = sgRNA Position: 31212376; note = Sequence Name: 56322-704_101_SL_seq_4419
aaatggggaggaggaggcgg

SEQ ID NO: 4420 - DNA, 20 bp, Homo sapiens
  source 1..20: mol_type = genomic DNA; note = Gene: LMTK2; note = Location (start to end; relative to TSS): LMTK2_47_77; note = Orientation (relative to transcription): antisense; note = sgRNA Position: 98106915; note = Sequence Name: 56322-704_101_SL_seq_4420
cagcagccctgcggagcggc

SEQ ID NO: 4421 - DNA, 20 bp, Homo sapiens
  source 1..20: mol_type = genomic DNA; note = Gene: LMTK2; note = Location (start to end; relative to TSS): LMTK2_92_122; note = Orientation (relative to transcription): sense; note = sgRNA Position: 98106980; note = Sequence Name: 56322-704_101_SL_seq_4421
gcgcaggcgggcgggaagga

SEQ ID NO: 4422 - DNA, 20 bp, Homo sapiens
  source 1..20: mol_type = genomic DNA; note = Gene: LMTK2; note = Location (start to end; relative to TSS): LMTK2_51_81; note = Orientation (relative to transcription): antisense; note = sgRNA Position: 98106919; note = Sequence Name: 56322-704_101_SL_seq_4422
acgccagcagccctgcggag

SEQ ID NO: 4423 - DNA, 20 bp, Homo sapiens
  source 1..20: mol_type = genomic DNA; note = Gene: LMTK2; note = Location (start to end; relative to TSS): LMTK2_88_118; note = Orientation (relative to transcription): sense; note = sgRNA Position: 98106976; note = Sequence Name: 56322-704_101_SL_seq_4423
ggcggcgcaggcgggcggga

SEQ ID NO: 4424 - DNA, 20 bp, Homo sapiens
  source 1..20: mol_type = genomic DNA; note = Gene: LMTK2; note = Location (start to end; relative to TSS): LMTK2_32_62; note = Orientation (relative to transcription): sense; note = sgRNA Position: 98106920; note = Sequence Name: 56322-704_101_SL_seq_4424
cccaggcccgccgctccgca

SEQ ID NO: 4425 - DNA, 20 bp, Homo sapiens
  source 1..20: mol_type = genomic DNA; note = Gene: LMTK2; note = Location (start to end; relative to TSS): LMTK2_64_94; note = Orientation (relative to transcription): sense; note = sgRNA Position: 98106952; note = Sequence Name: 56322-704_101_SL_seq_4425
ttgctgctgttgagaggcgg

SEQ ID NO: 4426 - DNA, 20 bp, Homo sapiens
  source 1..20: mol_type = genomic DNA; note = Gene: LMTK2; note = Location (start to end; relative to TSS): LMTK2_15_45; note = Orientation (relative to transcription): sense; note = sgRNA Position: 98106903; note = Sequence Name: 56322-704_101_SL_seq_4426
cggcgggagcgcggcttccc

SEQ ID NO: 4427 - DNA, 20 bp, Homo sapiens
  source 1..20: mol_type = genomic DNA; note = Gene: LMTK2; note = Location (start to end; relative to TSS): LMTK2_48_78; note = Orientation (relative to transcription): antisense; note = sgRNA Position: 98106916; note = Sequence Name: 56322-704_101_SL_seq_4427
ccagcagccctgcggagcgg

SEQ ID NO: 4428 - DNA, 20 bp, Homo sapiens
  source 1..20: mol_type = genomic DNA; note = Gene: LMTK2; note = Location (start to end; relative to TSS): LMTK2_14_44; note = Orientation (relative to transcription): antisense; note = sgRNA Position: 98106882; note = Sequence Name: 56322-704_101_SL_seq_4428
cgcgctcccgccgccatgat

SEQ ID NO: 4429 - DNA, 20 bp, Homo sapiens
  source 1..20: mol_type = genomic DNA; note = Gene: LMTK2; note = Location (start to end; relative to TSS): LMTK2_47_77; note = Orientation (relative to transcription): antisense; note = sgRNA Position: 98106915; note = Sequence Name: 56322-704_101_SL_seq_4429
cagcagccctgcggagcggc

SEQ ID NO: 4430 - DNA, 20 bp, Homo sapiens
  source 1..20: mol_type = genomic DNA; note = Gene: LMTK3; note = Location (start to end; relative to TSS): LMTK3_32_62; note = Orientation (relative to transcription): antisense; note = sgRNA Position: 48511799; note = Sequence Name: 56322-704_101_SL_seq_4430
agggatggagaggcggacag

SEQ ID NO: 4431 - DNA, 20 bp, Homo sapiens
  source 1..20: mol_type = genomic DNA; note = Gene: LMTK3; note = Location (start to end; relative to TSS): LMTK3_67_97; note = Orientation (relative to transcription): antisense; note = sgRNA Position: 48511764; note = Sequence Name: 56322-704_101_SL_seq_4431
cccccctccccctctttgaa

SEQ ID NO: 4432 - DNA, 20 bp, Homo sapiens
  source 1..20: mol_type = genomic DNA; note = Gene: LMTK3; note = Location (start to end; relative to TSS): LMTK3_13_43; note = Orientation (relative to transcription): antisense; note = sgRNA Position: 48511818; note = Sequence Name: 56322-704_101_SL_seq_4432
gaggagagatgctggggagc

SEQ ID NO: 4433 - DNA, 20 bp, Homo sapiens
  source 1..20: mol_type = genomic DNA; note = Gene: LMTK3; note = Location (start to end; relative to TSS): LMTK3_48_78; note = Orientation (relative to transcription): sense; note = sgRNA Position: 48511763; note = Sequence Name: 56322-704_101_SL_seq_4433
atccgtctgtcccttcaaag

SEQ ID NO: 4434 - DNA, 20 bp, Homo sapiens
  source 1..20: mol_type = genomic DNA; note = Gene: LMTK3; note = Location (start to end; relative to TSS): LMTK3_12_42; note = Orientation (relative to transcription): antisense; note = sgRNA Position: 48511819; note = Sequence Name: 56322-704_101_SL_seq_4434
aggagagatgctggggagcc

SEQ ID NO: 4435 - DNA, 20 bp, Homo sapiens
  source 1..20: mol_type = genomic DNA; note = Gene: LMTK3; note = Location (start to end; relative to TSS): LMTK3_47_77; note = Orientation (relative to transcription): antisense; note = sgRNA Position: 48511784; note = Sequence Name: 56322-704_101_SL_seq_4435
gggacagacggatgaaggga

SEQ ID NO: 4436 - DNA, 20 bp, Homo sapiens
  source 1..20: mol_type = genomic DNA; note = Gene: LMTK3; note = Location (start to end; relative to TSS): LMTK3_11_41; note = Orientation (relative to transcription): antisense; note = sgRNA Position: 48511820; note = Sequence Name: 56322-704_101_SL_seq_4436
ggagagatgctggggagccg

SEQ ID NO: 4437 - DNA, 20 bp, Homo sapiens
  source 1..20: mol_type = genomic DNA; note = Gene: LMTK3; note = Location (start to end; relative to TSS): LMTK3_42_72; note = Orientation (relative to transcription): antisense; note = sgRNA Position: 48511789; note = Sequence Name: 56322-704_101_SL_seq_4437
agacggatgaagggatggag

SEQ ID NO: 4438 - DNA, 20 bp, Homo sapiens
  source 1..20: mol_type = genomic DNA; note = Gene: LMTK3; note = Location (start to end; relative to TSS): LMTK3_3_33; note = Orientation (relative to transcription): antisense; note = sgRNA Position: 48511828; note = Sequence Name: 56322-704_101_SL_seq_4438
gctggggagccggggttgct

SEQ ID NO: 4439 - DNA, 20 bp, Homo sapiens
  source 1..20: mol_type = genomic DNA; note = Gene: LMTK3; note = Location (start to end; relative to TSS): LMTK3_39_69; note = Orientation (relative to transcription): antisense; note = sgRNA Position: 48511792; note = Sequence Name: 56322-704_101_SL_seq_4439
cggatgaagggatggagagg

SEQ ID NO: 4440 - DNA, 20 bp, Homo sapiens
  source 1..20: mol_type = genomic DNA; note = Gene: LRGUK; note = Location (start to end; relative to TSS): LRGUK_38_68; note = Orientation (relative to transcription): antisense; note = sgRNA Position: 134127384; note = Sequence Name: 56322-704_101_SL_seq_4440
ggtcctcaggagagccctct

SEQ ID NO: 4441 - DNA, 20 bp, Homo sapiens
  source 1..20: mol_type = genomic DNA; note = Gene: LRGUK; note = Location (start to end; relative to TSS): LRGUK_73_103; note = Orientation (relative to transcription): sense; note = sgRNA Position: 134127439; note = Sequence Name: 56322-704_101_SL_seq_4441
ggcttgggcagatcccgaac

SEQ ID NO: 4442 - DNA, 20 bp, Homo sapiens
  source 1..20: mol_type = genomic DNA; note = Gene: LRGUK; note = Location (start to end; relative to TSS): LRGUK_35_65; note = Orientation (relative to transcription): antisense; note = sgRNA Position: 134127381; note = Sequence Name: 56322-704_101_SL_seq_4442
cctcaggagagccctctcgg

SEQ ID NO: 4443 - DNA, 20 bp, Homo sapiens
  source 1..20: mol_type = genomic DNA; note = Gene: LRGUK; note = Location (start to end; relative to TSS): LRGUK_68_98; note = Orientation (relative to transcription): antisense; note = sgRNA Position: 134127414; note = Sequence Name: 56322-704_101_SL_seq_4443
gcccaagcctctcaggagag

SEQ ID NO: 4444 - DNA, 20 bp, Homo sapiens
  source 1..20: mol_type = genomic DNA; note = Gene: LRGUK; note = Location (start to end; relative to TSS): LRGUK_26_56; note = Orientation (relative to transcription): sense; note = sgRNA Position: 134127392; note = Sequence Name: 56322-704_101_SL_seq_4444
cctccgagagggctctcctg

SEQ ID NO: 4445 - DNA, 20 bp, Homo sapiens
  source 1..20: mol_type = genomic DNA; note = Gene: LRGUK; note = Location (start to end; relative to TSS): LRGUK_57_87; note = Orientation (relative to transcription): sense; note = sgRNA Position: 134127423; note = Sequence Name: 56322-704_101_SL_seq_4445
tgcctctctcctgagaggct

SEQ ID NO: 4446 - DNA, 20 bp, Homo sapiens
  source 1..20: mol_type = genomic DNA; note = Gene: LRGUK; note = Location (start to end; relative to TSS): LRGUK_16_46; note = Orientation (relative to transcription): antisense; note = sgRNA Position: 134127362; note = Sequence Name: 56322-704_101_SL_seq_4446
gaggtcgccatcttgtttag

SEQ ID NO: 4447 - DNA, 20 bp, Homo sapiens
  source 1..20: mol_type = genomic DNA; note = Gene: LRGUK; note = Location (start to end; relative to TSS): LRGUK_52_82; note = Orientation (relative to transcription): sense; note = sgRNA Position: 134127418; note = Sequence Name: 56322-704_101_SL_seq_4447
agagctgcctctctcctgag

SEQ ID NO: 4448 - DNA, 20 bp, Homo sapiens
  source 1..20: mol_type = genomic DNA; note = Gene: LRGUK; note = Location (start to end; relative to TSS): LRGUK_15_45; note = Orientation (relative to transcription): sense; note = sgRNA Position: 134127381; note = Sequence Name: 56322-704_101_SL_seq_4448
caagatggcgacctccgaga

SEQ ID NO: 4449 - DNA, 20 bp, Homo sapiens
  source 1..20: mol_type = genomic DNA; note = Gene: LRGUK; note = Location (start to end; relative to TSS): LRGUK_51_81; note = Orientation (relative to transcription): antisense; note = sgRNA Position: 134127397; note = Sequence Name: 56322-704_101_SL_seq_4449
gagaggcagctctggtcctc

SEQ ID NO: 4450 - DNA, 20 bp, Homo sapiens
  source 1..20: mol_type = genomic DNA; note = Gene: LRRK1; note = Location (start to end; relative to TSS): LRRK1_46_76; note = Orientation (relative to transcription): sense; note = sgRNA Position: 100919429; note = Sequence Name: 56322-704_101_SL_seq_4450
cgtcccggagcgcccgcacc

SEQ ID NO: 4451 - DNA, 20 bp, Homo sapiens
  source 1..20: mol_type = genomic DNA; note = Gene: LRRK1; note = Location (start to end; relative to TSS): LRRK1_80_110; note = Orientation (relative to transcription): antisense; note = sgRNA Position: 100919443; note = Sequence Name: 56322-704_101_SL_seq_4451
gcgcttacctgaggcggcgg

SEQ ID NO: 4452 - DNA, 20 bp, Homo sapiens
  source 1..20: mol_type = genomic DNA; note = Gene: LRRK1; note = Location (start to end; relative to TSS): LRRK1_28_58; note = Orientation (relative to transcription): antisense; note = sgRNA Position: 100919391; note = Sequence Name: 56322-704_101_SL_seq_4452
gccgggcggacacactggcg

SEQ ID NO: 4453 - DNA, 20 bp, Homo sapiens
  source 1..20: mol_type = genomic DNA; note = Gene: LRRK1; note = Location (start to end; relative to TSS): LRRK1_78_108; note = Orientation (relative to transcription): antisense; note = sgRNA Position: 100919441; note = Sequence Name: 56322-704_101_SL_seq_4453
gcttacctgaggcggcggcg

SEQ ID NO: 4454 - DNA, 20 bp, Homo sapiens
  source 1..20: mol_type = genomic DNA; note = Gene: LRRK1; note = Location (start to end; relative to TSS): LRRK1_23_53; note = Orientation (relative to transcription): antisense; note = sgRNA Position: 100919386; note = Sequence Name: 56322-704_101_SL_seq_4454
gcggacacactggcggggcc

SEQ ID NO: 4455 - DNA, 20 bp, Homo sapiens
  source 1..20: mol_type = genomic DNA; note = Gene: LRRK1; note = Location (start to end; relative to TSS): LRRK1_73_103; note = Orientation (relative to transcription): antisense; note = sgRNA Position: 100919436; note = Sequence Name: 56322-704_101_SL_seq_4455
cctgaggcggcggcggggcc

SEQ ID NO: 4456 - DNA, 20 bp, Homo sapiens
  source 1..20: mol_type = genomic DNA; note = Gene: LRRK1; note = Location (start to end; relative to TSS): LRRK1_22_52; note = Orientation (relative to transcription): antisense; note = sgRNA Position: 100919385; note = Sequence Name: 56322-704_101_SL_seq_4456
cggacacactggcggggccg

SEQ ID NO: 4457 - DNA, 20 bp, Homo sapiens
  source 1..20: mol_type = genomic DNA; note = Gene: LRRK1; note = Location (start to end; relative to TSS): LRRK1_64_94; note = Orientation (relative to transcription): sense; note = sgRNA Position: 100919447; note = Sequence Name: 56322-704_101_SL_seq_4457
cccggccccgccgccgcctc

SEQ ID NO: 4458 - DNA, 20 bp, Homo sapiens
  source 1..20: mol_type = genomic DNA; note = Gene: LRRK1; note = Location (start to end; relative to TSS): LRRK1_18_48; note = Orientation (relative to transcription): sense; note = sgRNA Position: 100919401; note = Sequence Name: 56322-704_101_SL_seq_4458
gccccgccagtgtgtccgcc

SEQ ID NO: 4459 - DNA, 20 bp, Homo sapiens
  source 1..20: mol_type = genomic DNA; note = Gene: LRRK1; note = Location (start to end; relative to TSS): LRRK1_50_80; note = Orientation (relative to transcription): antisense; note = sgRNA Position: 100919413; note = Sequence Name: 56322-704_101_SL_seq_4459
tgcgggcgctccgggacgcg

SEQ ID NO: 4460 - DNA, 20 bp, Homo sapiens
  source 1..20: mol_type = genomic DNA; note = Gene: LRRK2; note = Location (start to end; relative to TSS): LRRK2_33_63; note = Orientation (relative to transcription): sense; note = sgRNA Position: 40225056; note = Sequence Name: 56322-704_101_SL_seq_4460
cgcccccggggagctgtggc

SEQ ID NO: 4461 - DNA, 20 bp, Homo sapiens
  source 1..20: mol_type = genomic DNA; note = Gene: LRRK2; note = Location (start to end; relative to TSS): LRRK2_69_99; note = Orientation (relative to transcription): antisense; note = sgRNA Position: 40225072; note = Sequence Name: 56322-704_101_SL_seq_4461
ccgctgctcagggaaccggc

SEQ ID NO: 4462 - DNA, 20 bp, Homo sapiens
  source 1..20: mol_type = genomic DNA; note = Gene: LRRK2; note = Location (start to end; relative to TSS): LRRK2_21_51; note = Orientation (relative to transcription): sense; note = sgRNA Position: 40225044; note = Sequence Name: 56322-704_101_SL_seq_4462
gtgagctgagctcgcccccg

SEQ ID NO: 4463 - DNA, 20 bp, Homo sapiens
  source 1..20: mol_type = genomic DNA; note = Gene: LRRK2; note = Location (start to end; relative to TSS): LRRK2_68_98; note = Orientation (relative to transcription): antisense; note = sgRNA Position: 40225071; note = Sequence Name: 56322-704_101_SL_seq_4463
cgctgctcagggaaccggca

SEQ ID NO: 4464 - DNA, 20 bp, Homo sapiens
  source 1..20: mol_type = genomic DNA; note = Gene: LRRK2; note = Location (start to end; relative to TSS): LRRK2_29_59; note = Orientation (relative to transcription): sense; note = sgRNA Position: 40225052; note = Sequence Name: 56322-704_101_SL_seq_4464
agctcgcccccggggagctg

SEQ ID NO: 4465 - DNA, 20 bp, Homo sapiens
  source 1..20: mol_type = genomic DNA; note = Gene: LRRK2; note = Location (start to end; relative to TSS): LRRK2_67_97; note = Orientation (relative to transcription): antisense; note = sgRNA Position: 40225070; note = Sequence Name: 56322-704_101_SL_seq_4465
gctgctcagggaaccggcag

SEQ ID NO: 4466 - DNA, 20 bp, Homo sapiens
  source 1..20: mol_type = genomic DNA; note = Gene: LRRK2; note = Location (start to end; relative to TSS): LRRK2_20_50; note = Orientation (relative to transcription): sense; note = sgRNA Position: 40225043; note = Sequence Name: 56322-704_101_SL_seq_4466
ggtgagctgagctcgccccc

SEQ ID NO: 4467 - DNA, 20 bp, Homo sapiens
  source 1..20: mol_type = genomic DNA; note = Gene: LRRK2; note = Location (start to end; relative to TSS): LRRK2_61_91; note = Orientation (relative to transcription): antisense; note = sgRNA Position: 40225064; note = Sequence Name: 56322-704_101_SL_seq_4467
cagggaaccggcaggggcgc

SEQ ID NO: 4468 - DNA, 20 bp, Homo sapiens
  source 1..20: mol_type = genomic DNA; note = Gene: LRRK2; note = Location (start to end; relative to TSS): LRRK2_19_49; note = Orientation (relative to transcription): sense; note = sgRNA Position: 40225042; note = Sequence Name: 56322-704_101_SL_seq_4468
cggtgagctgagctcgcccc

SEQ ID NO: 4469 - DNA, 20 bp, Homo sapiens
  source 1..20: mol_type = genomic DNA; note = Gene: LRRK2; note = Location (start to end; relative to TSS): LRRK2_60_90; note = Orientation (relative to transcription): sense; note = sgRNA Position: 40225083; note = Sequence Name: 56322-704_101_SL_seq_4469
cctgccggttccctgagcag

SEQ ID NO: 4470 - DNA, 20 bp, Homo sapiens
  source 1..20: mol_type = genomic DNA; note = Gene: LTK; note = Location (start to end; relative to TSS): LTK_44_74; note = Orientation (relative to transcription): sense; note = sgRNA Position: 41513759; note = Sequence Name: 56322-704_101_SL_seq_4470
actttaggttgacaggggtg

SEQ ID NO: 4471 - DNA, 20 bp, Homo sapiens
  source 1..20: mol_type = genomic DNA; note = Gene: LTK; note = Location (start to end; relative to TSS): LTK_82_112; note = Orientation (relative to transcription): antisense; note = sgRNA Position: 41513741; note = Sequence Name: 56322-704_101_SL_seq_4471
cccggcaacaaaagcccttg

SEQ ID NO: 4472 - DNA, 20 bp, Homo sapiens
  source 1..20: mol_type = genomic DNA; note = Gene: LTK; note = Location (start to end; relative to TSS): LTK_37_67; note = Orientation (relative to transcription): sense; note = sgRNA Position: 41513766; note = Sequence Name: 56322-704_101_SL_seq_4472
gctgtcaactttaggttgac

SEQ ID NO: 4473 - DNA, 20 bp, Homo sapiens
  source 1..20: mol_type = genomic DNA; note = Gene: LTK; note = Location (start to end; relative to TSS): LTK_76_106; note = Orientation (relative to transcription): sense; note = sgRNA Position: 41513727; note = Sequence Name: 56322-704_101_SL_seq_4473
caagggcttttgttgccggg

SEQ ID NO: 4474 - DNA, 20 bp, Homo sapiens
  source 1..20: mol_type = genomic DNA; note = Gene: LTK; note = Location (start to end; relative to TSS): LTK_38_68; note = Orientation (relative to transcription): sense; note = sgRNA Position: 41513765; note = Sequence Name: 56322-704_101_SL_seq_4474
ctgtcaactttaggttgaca

SEQ ID NO: 4475 - DNA, 20 bp, Homo sapiens
  source 1..20: mol_type = genomic DNA; note = Gene: LTK; note = Location (start to end; relative to TSS): LTK_73_103; note = Orientation (relative to transcription): sense; note = sgRNA Position: 41513730; note = Sequence Name: 56322-704_101_SL_seq_4475
ccgcaagggcttttgttgcc

SEQ ID NO: 4476 - DNA, 20 bp, Homo sapiens
  source 1..20: mol_type = genomic DNA; note = Gene: LTK; note = Location (start to end; relative to TSS): LTK_39_69; note = Orientation (relative to transcription): sense; note = sgRNA Position: 41513764; note = Sequence Name: 56322-704_101_SL_seq_4476
tgtcaactttaggttgacag

SEQ ID NO: 4477 - DNA, 20 bp, Homo sapiens
  source 1..20: mol_type = genomic DNA; note = Gene: LTK; note = Location (start to end; relative to TSS): LTK_72_102; note = Orientation (relative to transcription): sense; note = sgRNA Position: 41513731; note = Sequence Name: 56322-704_101_SL_seq_4477
accgcaagggcttttgttgc

SEQ ID NO: 4478 - DNA, 20 bp, Homo sapiens
  source 1..20: mol_type = genomic DNA; note = Gene: LTK; note = Location (start to end; relative to TSS): LTK_23_53; note = Orientation (relative to transcription): antisense; note = sgRNA Position: 41513800; note = Sequence Name: 56322-704_101_SL_seq_4478
tcattttgccacggcagccc

SEQ ID NO: 4479 - DNA, 20 bp, Homo sapiens
  source 1..20: mol_type = genomic DNA; note = Gene: LTK; note = Location (start to end; relative to TSS): LTK_58_88; note = Orientation (relative to transcription): sense; note = sgRNA Position: 41513745; note = Sequence Name: 56322-704_101_SL_seq_4479
ggggtgtggccgcgaccgca

SEQ ID NO: 4480 - DNA, 20 bp, Homo sapiens
  source 1..20: mol_type = genomic DNA; note = Gene: LYN; note = Location (start to end; relative to TSS): LYN_41_71; note = Orientation (relative to transcription): antisense; note = sgRNA Position: 55879882; note = Sequence Name: 56322-704_101_SL_seq_4480
ggcccggaggcgccacggcc

SEQ ID NO: 4481 - DNA, 20 bp, Homo sapiens
  source 1..20: mol_type = genomic DNA; note = Gene: LYN; note = Location (start to end; relative to TSS): LYN_77_107; note = Orientation (relative to transcription): antisense; note = sgRNA Position: 55879918; note = Sequence Name: 56322-704_101_SL_seq_4481
ccccgcttgccgcgggctgg

SEQ ID NO: 4482 - DNA, 20 bp, Homo sapiens
  source 1..20: mol_type = genomic DNA; note = Gene: LYN; note = Location (start to end; relative to TSS): LYN_40_70; note = Orientation (relative to transcription): antisense; note = sgRNA Position: 55879881; note = Sequence Name: 56322-704_101_SL_seq_4482
gcccggaggcgccacggccg

SEQ ID NO: 4483 - DNA, 20 bp, Homo sapiens
  source 1..20: mol_type = genomic DNA; note = Gene: LYN; note = Location (start to end; relative to TSS): LYN_71_101; note = Orientation (relative to transcription): sense; note = sgRNA Position: 55879932; note = Sequence Name: 56322-704_101_SL_seq_4483
ccagcccgcggcaagcgggg

SEQ ID NO: 4484 - DNA, 20 bp, Homo sapiens
  source 1..20: mol_type = genomic DNA; note = Gene: LYN; note = Location (start to end; relative to TSS): LYN_30_60; note = Orientation (relative to transcription): sense; note = sgRNA Position: 55879891; note = Sequence Name: 56322-704_101_SL_seq_4484
tccccggccgtggcgcctcc

SEQ ID NO: 4485 - DNA, 20 bp, Homo sapiens
  source 1..20: mol_type = genomic DNA; note = Gene: LYN; note = Location (start to end; relative to TSS): LYN_62_92; note = Orientation (relative to transcription): antisense; note = sgRNA Position: 55879903; note = Sequence Name: 56322-704_101_SL_seq_4485
gctggaggctgcagcgcgtc

SEQ ID NO: 4486 - DNA, 20 bp, Homo sapiens
  source 1..20: mol_type = genomic DNA; note = Gene: LYN; note = Location (start to end; relative to TSS): LYN_23_53; note = Orientation (relative to transcription): antisense; note = sgRNA Position: 55879864; note = Sequence Name: 56322-704_101_SL_seq_4486
ccggggagcgagcggcagcg

SEQ ID NO: 4487 - DNA, 20 bp, Homo sapiens
  source 1..20: mol_type = genomic DNA; note = Gene: LYN; note = Location (start to end; relative to TSS): LYN_57_87; note = Orientation (relative to transcription): antisense; note = sgRNA Position: 55879898; note = Sequence Name: 56322-704_101_SL_seq_4487
aggctgcagcgcgtctggcc

SEQ ID NO: 4488 - DNA, 20 bp, Homo sapiens
  source 1..20: mol_type = genomic DNA; note = Gene: LYN; note = Location (start to end; relative to TSS): LYN_20_50; note = Orientation (relative to transcription): sense; note = sgRNA Position: 55879881; note = Sequence Name: 56322-704_101_SL_seq_4488
tgccgctcgctccccggccg

SEQ ID NO: 4489 - DNA, 20 bp, Homo sapiens
  source 1..20: mol_type = genomic DNA; note = Gene: LYN; note = Location (start to end; relative to TSS): LYN_54_84; note = Orientation (relative to transcription): antisense; note = sgRNA Position: 55879895; note = Sequence Name: 56322-704_101_SL_seq_4489
ctgcagcgcgtctggcccgg

SEQ ID NO: 4490 - DNA, 20 bp, Homo sapiens
  source 1..20: mol_type = genomic DNA; note = Gene: MAGI1; note = Location (start to end; relative to TSS): MAGI1_66_96; note = Orientation (relative to transcription): sense; note = sgRNA Position: 66038828; note = Sequence Name: 56322-704_101_SL_seq_4490
gagcctttgtatctgcttaa

SEQ ID NO: 4491 - DNA, 20 bp, Homo sapiens
  source 1..20: mol_type = genomic DNA; note = Gene: MAGI1; note = Location (start to end; relative to TSS): MAGI1_100_130; note = Orientation (relative to transcription): antisense; note = sgRNA Position: 66038814; note = Sequence Name: 56322-704_101_SL_seq_4491
gggcgggaggtaagtgctcg

SEQ ID NO: 4492 - DNA, 20 bp, Homo sapiens
  source 1..20: mol_type = genomic DNA; note = Gene: MAGI1; note = Location (start to end; relative to TSS): MAGI1_36_66; note = Orientation (relative to transcription): antisense; note = sgRNA Position: 66038878; note = Sequence Name: 56322-704_101_SL_seq_4492
gttcattctattccgcgccg

SEQ ID NO: 4493 - DNA, 20 bp, Homo sapiens
  source 1..20: mol_type = genomic DNA; note = Gene: MAGI1; note = Location (start to end; relative to TSS): MAGI1_73_103; note = Orientation (relative to transcription): antisense; note = sgRNA Position: 66038841; note = Sequence Name: 56322-704_101_SL_seq_4493
tttaagcagatacaaaggct

SEQ ID NO: 4494 - DNA, 20 bp, Homo sapiens
  source 1..20: mol_type = genomic DNA; note = Gene: MAGI1; note = Location (start to end; relative to TSS): MAGI1_26_56; note = Orientation (relative to transcription): antisense; note = sgRNA Position: 66038888; note = Sequence Name: 56322-704_101_SL_seq_4494
ttccgcgccgcggagcgcag

SEQ ID NO: 4495 - DNA, 20 bp, Homo sapiens
  source 1..20: mol_type = genomic DNA; note = Gene: MAGI1; note = Location (start to end; relative to TSS): MAGI1_68_98; note = Orientation (relative to transcription): sense; note = sgRNA Position: 66038826; note = Sequence Name: 56322-704_101_SL_seq_4495
gcctttgtatctgcttaaag

SEQ ID NO: 4496 - DNA, 20 bp, Homo sapiens
  source 1..20: mol_type = genomic DNA; note = Gene: MAGI1; note = Location (start to end; relative to TSS): MAGI1_15_45; note = Orientation (relative to transcription): sense; note = sgRNA Position: 66038879; note = Sequence Name: 56322-704_101_SL_seq_4496
ggccgctgcgctccgcggcg

SEQ ID NO: 4497 - DNA, 20 bp, Homo sapiens
  source 1..20: mol_type = genomic DNA; note = Gene: MAGI1; note = Location (start to end; relative to TSS): MAGI1_67_97; note = Orientation (relative to transcription): sense; note = sgRNA Position: 66038827; note = Sequence Name: 56322-704_101_SL_seq_4497
agcctttgtatctgcttaaa

SEQ ID NO: 4498 - DNA, 20 bp, Homo sapiens
  source 1..20: mol_type = genomic DNA; note = Gene: MAGI1; note = Location (start to end; relative to TSS): MAGI1_10_40; note = Orientation (relative to transcription): sense; note = sgRNA Position: 66038884; note = Sequence Name: 56322-704_101_SL_seq_4498
tcgccggccgctgcgctccg

SEQ ID NO: 4499 - DNA, 20 bp, Homo sapiens
  source 1..20: mol_type = genomic DNA; note = Gene: MAGI1; note = Location (start to end; relative to TSS): MAGI1_66_96; note = Orientation (relative to transcription): sense; note = sgRNA Position: 66038828; note = Sequence Name: 56322-704_101_SL_seq_4499
gagcctttgtatctgcttaa

SEQ ID NO: 4500 - DNA, 20 bp, Homo sapiens
  source 1..20: mol_type = genomic DNA; note = Gene: MAGI2; note = Location (start to end; relative to TSS): MAGI2_55_85; note = Orientation (relative to transcription): antisense; note = sgRNA Position: 79453608; note = Sequence Name: 56322-704_101_SL_seq_4500
ggaagcagtggtggtggcgt

SEQ ID NO: 4501 - DNA, 20 bp, Homo sapiens
  source 1..20: mol_type = genomic DNA; note = Gene: MAGI2; note = Location (start to end; relative to TSS): MAGI2_90_120; note = Orientation (relative to transcription): antisense; note = sgRNA Position: 79453573; note = Sequence Name: 56322-704_101_SL_seq_4501
ttgaatgacactcaaggctg

SEQ ID NO: 4502 - DNA, 20 bp, Homo sapiens
  source 1..20: mol_type = genomic DNA; note = Gene: MAGI2; note = Location (start to end; relative to TSS): MAGI2_49_79; note = Orientation (relative to transcription): antisense; note = sgRNA Position: 79453614; note = Sequence Name: 56322-704_101_SL_seq_4502
agtggtggtggcgtcggcgg

SEQ ID NO: 4503 - DNA, 20 bp, Homo sapiens
  source 1..20: mol_type = genomic DNA; note = Gene: MAGI2; note = Location (start to end; relative to TSS): MAGI2_84_114; note = Orientation (relative to transcription): sense; note = sgRNA Position: 79453559; note = Sequence Name: 56322-704_101_SL_seq_4503
cagccttgagtgtcattcaa

SEQ ID NO: 4504 - DNA, 20 bp, Homo sapiens
  source 1..20: mol_type = genomic DNA; note = Gene: MAGI2; note = Location (start to end; relative to TSS): MAGI2_52_82; note = Orientation (relative to transcription): antisense; note = sgRNA Position: 79453611; note = Sequence Name: 56322-704_101_SL_seq_4504
agcagtggtggtggcgtcgg

SEQ ID NO: 4505 - DNA, 20 bp, Homo sapiens
  source 1..20: mol_type = genomic DNA; note = Gene: MAGI2; note = Location (start to end; relative to TSS): MAGI2_83_113; note = Orientation (relative to transcription): sense; note = sgRNA Position: 79453560; note = Sequence Name: 56322-704_101_SL_seq_4505
acagccttgagtgtcattca

SEQ ID NO: 4506 - DNA, 20 bp, Homo sapiens
  source 1..20: mol_type = genomic DNA; note = Gene: MAGI2; note = Location (start to end; relative to TSS): MAGI2_46_76; note = Orientation (relative to transcription): antisense; note = sgRNA Position: 79453617; note = Sequence Name: 56322-704_101_SL_seq_4506
ggtggtggcgtcggcggcgg

SEQ ID NO: 4507 - DNA, 20 bp, Homo sapiens
  source 1..20: mol_type = genomic DNA; note = Gene: MAGI2; note = Location (start to end; relative to TSS): MAGI2_76_106; note = Orientation (relative to transcription): antisense; note = sgRNA Position: 79453587; note = Sequence Name: 56322-704_101_SL_seq_4507
aggctgtggccccgcagcag

SEQ ID NO: 4508 - DNA, 20 bp, Homo sapiens
  source 1..20: mol_type = genomic DNA; note = Gene: MAGI2; note = Location (start to end; relative to TSS): MAGI2_12_42; note = Orientation (relative to transcription): antisense; note = sgRNA Position: 79453651; note = Sequence Name: 56322-704_101_SL_seq_4508
ggagcgagcagtagccgagc

SEQ ID NO: 4509 - DNA, 20 bp, Homo sapiens
  source 1..20: mol_type = genomic DNA; note = Gene: MAGI2; note = Location (start to end; relative to TSS): MAGI2_46_76; note = Orientation (relative to transcription): antisense; note = sgRNA Position: 79453617; note = Sequence Name: 56322-704_101_SL_seq_4509
ggtggtggcgtcggcggcgg

SEQ ID NO: 4510 - DNA, 20 bp, Homo sapiens
  source 1..20: mol_type = genomic DNA; note = Gene: MAGI3; note = Location (start to end; relative to TSS): MAGI3_45_75; note = Orientation (relative to transcription): antisense; note = sgRNA Position: 113390566; note = Sequence Name: 56322-704_101_SL_seq_4510
gggatcgatcgtggccgctg

SEQ ID NO: 4511 - DNA, 20 bp, Homo sapiens
  source 1..20: mol_type = genomic DNA; note = Gene: MAGI3; note = Location (start to end; relative to TSS): MAGI3_97_127; note = Orientation (relative to transcription): antisense; note = sgRNA Position: 113390618; note = Sequence Name: 56322-704_101_SL_seq_4511
ggaacgggaaaaatccgtgg

SEQ ID NO: 4512 - DNA, 20 bp, Homo sapiens
  source 1..20: mol_type = genomic DNA; note = Gene: MAGI3; note = Location (start to end; relative to TSS): MAGI3_44_74; note = Orientation (relative to transcription): sense; note = sgRNA Position: 113390585; note = Sequence Name: 56322-704_101_SL_seq_4512
gccacgatcgatcccgcgac

SEQ ID NO: 4513 - DNA, 20 bp, Homo sapiens
  source 1..20: mol_type = genomic DNA; note = Gene: MAGI3; note = Location (start to end; relative to TSS): MAGI3_96_126; note = Orientation (relative to transcription): antisense; note = sgRNA Position: 113390617; note = Sequence Name: 56322-704_101_SL_seq_4513
gaacgggaaaaatccgtggg

SEQ ID NO: 4514 - DNA, 20 bp, Homo sapiens
  source 1..20: mol_type = genomic DNA; note = Gene: MAGI3; note = Location (start to end; relative to TSS): MAGI3_43_73; note = Orientation (relative to transcription): sense; note = sgRNA Position: 113390584; note = Sequence Name: 56322-704_101_SL_seq_4514
ggccacgatcgatcccgcga

SEQ ID NO: 4515 - DNA, 20 bp, Homo sapiens
  source 1..20: mol_type = genomic DNA; note = Gene: MAGI3; note = Location (start to end; relative to TSS): MAGI3_74_104; note = Orientation (relative to transcription): sense; note = sgRNA Position: 113390615; note = Sequence Name: 56322-704_101_SL_seq_4515
gcgcttctgcgcgcccccca

SEQ ID NO: 4516 - DNA, 20 bp, Homo sapiens
  source 1..20: mol_type = genomic DNA; note = Gene: MAGI3; note = Location (start to end; relative to TSS): MAGI3_32_62; note = Orientation (relative to transcription): antisense; note = sgRNA Position: 113390553; note = Sequence Name: 56322-704_101_SL_seq_4516
gccgctgcggagctgtagcg

SEQ ID NO: 4517 - DNA, 20 bp, Homo sapiens
  source 1..20: mol_type = genomic DNA; note = Gene: MAGI3; note = Location (start to end; relative to TSS): MAGI3_65_95; note = Orientation (relative to transcription): antisense; note = sgRNA Position: 113390586; note = Sequence Name: 56322-704_101_SL_seq_4517
agcgcgcgtagacccgtcgc

SEQ ID NO: 4518 - DNA, 20 bp, Homo sapiens
  source 1..20: mol_type = genomic DNA; note = Gene: MAGI3; note = Location (start to end; relative to TSS): MAGI3_22_52; note = Orientation (relative to transcription): sense; note = sgRNA Position: 113390563; note = Sequence Name: 56322-704_101_SL_seq_4518
tccgcgctacagctccgcag

SEQ ID NO: 4519 - DNA, 20 bp, Homo sapiens
  source 1..20: mol_type = genomic DNA; note = Gene: MAGI3; note = Location (start to end; relative to TSS): MAGI3_54_84; note = Orientation (relative to transcription): antisense; note = sgRNA Position: 113390575; note = Sequence Name: 56322-704_101_SL_seq_4519
acccgtcgcgggatcgatcg

SEQ ID NO: 4520 - DNA, 20 bp, Homo sapiens
  source 1..20: mol_type = genomic DNA; note = Gene: MAK; note = Location (start to end; relative to TSS): MAK_41_71; note = Orientation (relative to transcription): sense; note = sgRNA Position: 10838474; note = Sequence Name: 56322-704_101_SL_seq_4520
cgcggacaggtaatccccag

SEQ ID NO: 4521 - DNA, 20 bp, Homo sapiens
  source 1..20: mol_type = genomic DNA; note = Gene: MAK; note = Location (start to end; relative to TSS): MAK_89_119; note = Orientation (relative to transcription): antisense; note = sgRNA Position: 10838446; note = Sequence Name: 56322-704_101_SL_seq_4521
gctccggctgggtcggacag

SEQ ID NO: 4522 - DNA, 20 bp, Homo sapiens
  source 1..20: mol_type = genomic DNA; note = Gene: MAK; note = Location (start to end; relative to TSS): MAK_42_72; note = Orientation (relative to transcription): sense; note = sgRNA Position: 10838473; note = Sequence Name: 56322-704_101_SL_seq_4522
gcggacaggtaatccccagc

SEQ ID NO: 4523 - DNA, 20 bp, Homo sapiens
  source 1..20: mol_type = genomic DNA; note = Gene: MAK; note = Location (start to end; relative to TSS): MAK_77_107; note = Orientation (relative to transcription): sense; note = sgRNA Position: 10838438; note = Sequence Name: 56322-704_101_SL_seq_4523
caccctctgtccgacccagc

SEQ ID NO: 4524 - DNA, 20 bp, Homo sapiens
  source 1..20: mol_type = genomic DNA; note = Gene: MAK; note = Location (start to end; relative to TSS): MAK_23_53; note = Orientation (relative to transcription): sense; note = sgRNA Position: 10838492; note = Sequence Name: 56322-704_101_SL_seq_4524
aacgaggtaagcagcaggcg

SEQ ID NO: 4525 - DNA, 20 bp, Homo sapiens
  source 1..20: mol_type = genomic DNA; note = Gene: MAK; note = Location (start to end; relative to TSS): MAK_65_95; note = Orientation (relative to transcription): antisense; note = sgRNA Position: 10838470; note = Sequence Name: 56322-704_101_SL_seq_4525
tggtggccctgcagcccgct

SEQ ID NO: 4526 - DNA, 20 bp, Homo sapiens
  source 1..20: mol_type = genomic DNA; note = Gene: MAK; note = Location (start to end; relative to TSS): MAK_28_58; note = Orientation (relative to transcription): sense; note = sgRNA Position: 10838487; note = Sequence Name: 56322-704_101_SL_seq_4526
ggtaagcagcaggcgcggac

SEQ ID NO: 4527 - DNA, 20 bp, Homo sapiens
  source 1..20: mol_type = genomic DNA; note = Gene: MAK; note = Location (start to end; relative to TSS): MAK_64_94; note = Orientation (relative to transcription): antisense; note = sgRNA Position: 10838471; note = Sequence Name: 56322-704_101_SL_seq_4527
ggtggccctgcagcccgctg

SEQ ID NO: 4528 - DNA, 20 bp, Homo sapiens
  source 1..20: mol_type = genomic DNA; note = Gene: MAK; note = Location (start to end; relative to TSS): MAK_18_48; note = Orientation (relative to transcription): sense; note = sgRNA Position: 10838497; note = Sequence Name: 56322-704_101_SL_seq_4528
gagcgaacgaggtaagcagc

SEQ ID NO: 4529 - DNA, 20 bp, Homo sapiens
  source 1..20: mol_type = genomic DNA; note = Gene: MAK; note = Location (start to end; relative to TSS): MAK_49_79; note = Orientation (relative to transcription): sense; note = sgRNA Position: 10838466; note = Sequence Name: 56322-704_101_SL_seq_4529
ggtaatccccagcgggctgc

SEQ ID NO: 4530 - DNA, 20 bp, Homo sapiens
  source 1..20: mol_type = genomic DNA; note = Gene: MAP2K1; note = Location (start to end; relative to TSS): MAP2K1_41_71; note = Orientation (relative to transcription): sense; note = sgRNA Position: 66386979; note = Sequence Name: 56322-704_101_SL_seq_4530
gcactttccccggcaggagc

SEQ ID NO: 4531 - DNA, 20 bp, Homo sapiens
  source 1..20: mol_type = genomic DNA; note = Gene: MAP2K1; note = Location (start to end; relative to TSS): MAP2K1_87_117; note = Orientation (relative to transcription): sense; note = sgRNA Position: 66387025; note = Sequence Name: 56322-704_101_SL_seq_4531
gctgtgccgcccgagccgga

SEQ ID NO: 4532 - DNA, 20 bp, Homo sapiens
  source 1..20: mol_type = genomic DNA; note = Gene: MAP2K1; note = Location (start to end; relative to TSS): MAP2K1_48_78; note = Orientation (relative to transcription): sense; note = sgRNA Position: 66386986; note = Sequence Name: 56322-704_101_SL_seq_4532
ccccggcaggagctggagct

SEQ ID NO: 4533 - DNA, 20 bp, Homo sapiens
  source 1..20: mol_type = genomic DNA; note = Gene: MAP2K1; note = Location (start to end; relative to TSS): MAP2K1_86_116; note = Orientation (relative to transcription): sense; note = sgRNA Position: 66387024; note = Sequence Name: 56322-704_101_SL_seq_4533
ggctgtgccgcccgagccgg

SEQ ID NO: 4534 - DNA, 20 bp, Homo sapiens
  source 1..20: mol_type = genomic DNA; note = Gene: MAP2K1; note = Location (start to end; relative to TSS): MAP2K1_35_65; note = Orientation (relative to transcription): sense; note = sgRNA Position: 66386973; note = Sequence Name: 56322-704_101_SL_seq_4534
gcggcggcactttccccggc

SEQ ID NO: 4535 - DNA, 20 bp, Homo sapiens
  source 1..20: mol_type = genomic DNA; note = Gene: MAP2K1; note = Location (start to end; relative to TSS): MAP2K1_83_113; note = Orientation (relative to transcription): sense; note = sgRNA Position: 66387021; note = Sequence Name: 56322-704_101_SL_seq_4535
cgcggctgtgccgcccgagc

SEQ ID NO: 4536 - DNA, 20 bp, Homo sapiens
  source 1..20: mol_type = genomic DNA; note = Gene: MAP2K1; note = Location (start to end; relative to TSS): MAP2K1_31_61; note = Orientation (relative to transcription): sense; note = sgRNA Position: 66386969; note = Sequence Name: 56322-704_101_SL_seq_4536
ggcggcggcggcactttccc

SEQ ID NO: 4537 - DNA, 20 bp, Homo sapiens
  source 1..20: mol_type = genomic DNA; note = Gene: MAP2K1; note = Location (start to end; relative to TSS): MAP2K1_65_95; note = Orientation (relative to transcription): sense; note = sgRNA Position: 66387003; note = Sequence Name: 56322-704_101_SL_seq_4537
gctgggctctggtgcgcgcg

SEQ ID NO: 4538 - DNA, 20 bp, Homo sapiens
  source 1..20: mol_type = genomic DNA; note = Gene: MAP2K1; note = Location (start to end; relative to TSS): MAP2K1_19_49; note = Orientation (relative to transcription): sense; note = sgRNA Position: 66386957; note = Sequence Name: 56322-704_101_SL_seq_4538
ggctaggagcacggcggcgg

SEQ ID NO: 4539 - DNA, 20 bp, Homo sapiens
  source 1..20: mol_type = genomic DNA; note = Gene: MAP2K1; note = Location (start to end; relative to TSS): MAP2K1_54_84; note = Orientation (relative to transcription): sense; note = sgRNA Position: 66386992; note = Sequence Name: 56322-704_101_SL_seq_4539
caggagctggagctgggctc

SEQ ID NO: 4540 - DNA, 20 bp, Homo sapiens
  source 1..20: mol_type = genomic DNA; note = Gene: MAP2K2; note = Location (start to end; relative to TSS): MAP2K2_38_68; note = Orientation (relative to transcription): antisense; note = sgRNA Position: 4124080; note = Sequence Name: 56322-704_101_SL_seq_4540
gcgagccgctaccgctgccg

SEQ ID NO: 4541 - DNA, 20 bp, Homo sapiens
  source 1..20: mol_type = genomic DNA; note = Gene: MAP2K2; note = Location (start to end; relative to TSS): MAP2K2_78_108; note = Orientation (relative to transcription): antisense; note = sgRNA Position: 4124040; note = Sequence Name: 56322-704_101_SL_seq_4541
ctgggccgagggtagccgag

SEQ ID NO: 4542 - DNA, 20 bp, Homo sapiens
  source 1..20: mol_type = genomic DNA; note = Gene: MAP2K2; note = Location (start to end; relative to TSS): MAP2K2_27_57; note = Orientation (relative to transcription): antisense; note = sgRNA Position: 4124091; note = Sequence Name: 56322-704_101_SL_seq_4542
ccgctgccgaggcccgaaga

SEQ ID NO: 4543 - DNA, 20 bp, Homo sapiens
  source 1..20: mol_type = genomic DNA; note = Gene: MAP2K2; note = Location (start to end; relative to TSS): MAP2K2_71_101; note = Orientation (relative to transcription): antisense; note = sgRNA Position: 4124047; note = Sequence Name: 56322-704_101_SL_seq_4543
gagggtagccgaggggcgct

SEQ ID NO: 4544 - DNA, 20 bp, Homo sapiens
  source 1..20: mol_type = genomic DNA; note = Gene: MAP2K2; note = Location (start to end; relative to TSS): MAP2K2_24_54; note = Orientation (relative to transcription): sense; note = sgRNA Position: 4124074; note = Sequence Name: 56322-704_101_SL_seq_4544
tcgggcctcggcagcggtag

SEQ ID NO: 4545 - DNA, 20 bp, Homo sapiens
  source 1..20: mol_type = genomic DNA; note = Gene: MAP2K2; note = Location (start to end; relative to TSS): MAP2K2_70_100; note = Orientation (relative to transcription): antisense; note = sgRNA Position: 4124048; note = Sequence Name: 56322-704_101_SL_seq_4545
agggtagccgaggggcgctg

SEQ ID NO: 4546 - DNA, 20 bp, Homo sapiens
  source 1..20: mol_type = genomic DNA; note = Gene: MAP2K2; note = Location (start to end; relative to TSS): MAP2K2_18_48; note = Orientation (relative to transcription): sense; note = sgRNA Position: 4124080; note = Sequence Name: 56322-704_101_SL_seq_4546
ccttcttcgggcctcggcag

SEQ ID NO: 4547 - DNA, 20 bp, Homo sapiens
  source 1..20: mol_type = genomic DNA; note = Gene: MAP2K2; note = Location (start to end; relative to TSS): MAP2K2_64_94; note = Orientation (relative to transcription): sense; note = sgRNA Position: 4124034; note = Sequence Name: 56322-704_101_SL_seq_4547
cagcgcccctcggctaccct

SEQ ID NO: 4548 - DNA, 20 bp, Homo sapiens
  source 1..20: mol_type = genomic DNA; note = Gene: MAP2K2; note = Location (start to end; relative to TSS): MAP2K2_12_42; note = Orientation (relative to transcription): sense; note = sgRNA Position: 4124086; note = Sequence Name: 56322-704_101_SL_seq_4548
cgtcagccttcttcgggcct

SEQ ID NO: 4549 - DNA, 20 bp, Homo sapiens
  source 1..20: mol_type = genomic DNA; note = Gene: MAP2K2; note = Location (start to end; relative to TSS): MAP2K2_54_84; note = Orientation (relative to transcription): sense; note = sgRNA Position: 4124044; note = Sequence Name: 56322-704_101_SL_seq_4549
gcctcagccccagcgcccct

SEQ ID NO: 4550 - DNA, 20 bp, Homo sapiens
  source 1..20: mol_type = genomic DNA; note = Gene: MAP2K3; note = Location (start to end; relative to TSS): MAP2K3_34_64; note = Orientation (relative to transcription): antisense; note = sgRNA Position: 21284751; note = Sequence Name: 56322-704_101_SL_seq_4550
ctgcggcggcgactgcagca

SEQ ID NO: 4551 - DNA, 20 bp, Homo sapiens
  source 1..20: mol_type = genomic DNA; note = Gene: MAP2K3; note = Location (start to end; relative to TSS): MAP2K3_87_117; note = Orientation (relative to transcription): antisense; note = sgRNA Position: 21284804; note = Sequence Name: 56322-704_101_SL_seq_4551
aggcggaggagcagcggcgg

SEQ ID NO: 4552 - DNA, 20 bp, Homo sapiens
  source 1..20: mol_type = genomic DNA; note = Gene: MAP2K3; note = Location (start to end; relative to TSS): MAP2K3_48_78; note = Orientation (relative to transcription): antisense; note = sgRNA Position: 21284765; note = Sequence Name: 56322-704_101_SL_seq_4552
gactgcggcgaggactgcgg

SEQ ID NO: 4553 - DNA, 20 bp, Homo sapiens
  source 1..20: mol_type = genomic DNA; note = Gene: MAP2K3; note = Location (start to end; relative to TSS): MAP2K3_80_110; note = Orientation (relative to transcription): sense; note = sgRNA Position: 21284817; note = Sequence Name: 56322-704_101_SL_seq_4553
gccgccgctgctcctccgcc

SEQ ID NO: 4554 - DNA, 20 bp, Homo sapiens
  source 1..20: mol_type = genomic DNA; note = Gene: MAP2K3; note = Location (start to end; relative to TSS): MAP2K3_19_49; note = Orientation (relative to transcription): antisense; note = sgRNA Position: 21284736; note = Sequence Name: 56322-704_101_SL_seq_4554
cagcaaggacgagtccgcga

SEQ ID NO: 4555 - DNA, 20 bp, Homo sapiens
  source 1..20: mol_type = genomic DNA; note = Gene: MAP2K3; note = Location (start to end; relative to TSS): MAP2K3_58_88; note = Orientation (relative to transcription): antisense; note = sgRNA Position: 21284775; note = Sequence Name: 56322-704_101_SL_seq_4555
cggcggcggcgactgcggcg

SEQ ID NO: 4556 - DNA, 20 bp, Homo sapiens
  source 1..20: mol_type = genomic DNA; note = Gene: MAP2K3; note = Location (start to end; relative to TSS): MAP2K3_18_48; note = Orientation (relative to transcription): antisense; note = sgRNA Position: 21284735; note = Sequence Name: 56322-704_101_SL_seq_4556
agcaaggacgagtccgcgac

SEQ ID NO: 4557 - DNA, 20 bp, Homo sapiens
  source 1..20: mol_type = genomic DNA; note = Gene: MAP2K3; note = Location (start to end; relative to TSS): MAP2K3_51_81; note = Orientation (relative to transcription): antisense; note = sgRNA Position: 21284768; note = Sequence Name: 56322-704_101_SL_seq_4557
ggcgactgcggcgaggactg

SEQ ID NO: 4558 - DNA, 20 bp, Homo sapiens
  source 1..20: mol_type = genomic DNA; note = Gene: MAP2K3; note = Location (start to end; relative to TSS): MAP2K3_15_45; note = Orientation (relative to transcription): antisense; note = sgRNA Position: 21284732; note = Sequence Name: 56322-704_101_SL_seq_4558
aaggacgagtccgcgacggg

SEQ ID NO: 4559 - DNA, 20 bp, Homo sapiens
  source 1..20: mol_type = genomic DNA; note = Gene: MAP2K3; note = Location (start to end; relative to TSS): MAP2K3_48_78; note = Orientation (relative to transcription): antisense; note = sgRNA Position: 21284765; note = Sequence Name: 56322-704_101_SL_seq_4559
gactgcggcgaggactgcgg

SEQ ID NO: 4560 - DNA, 20 bp, Homo sapiens
  source 1..20: mol_type = genomic DNA; note = Gene: MAP2K4; note = Location (start to end; relative to TSS): MAP2K4_52_82; note = Orientation (relative to transcription): sense; note = sgRNA Position: 12020955; note = Sequence Name: 56322-704_101_SL_seq_4560
agcggcacccccggccccgt

SEQ ID NO: 4561 - DNA, 20 bp, Homo sapiens
  source 1..20: mol_type = genomic DNA; note = Gene: MAP2K4; note = Location (start to end; relative to TSS): MAP2K4_87_117; note = Orientation (relative to transcription): antisense; note = sgRNA Position: 12020970; note = Sequence Name: 56322-704_101_SL_seq_4561
cggccgggtggcctggcgcc

SEQ ID NO: 4562 - DNA, 20 bp, Homo sapiens
  source 1..20: mol_type = genomic DNA; note = Gene: MAP2K4; note = Location (start to end; relative to TSS): MAP2K4_53_83; note = Orientation (relative to transcription): sense; note = sgRNA Position: 12020956; note = Sequence Name: 56322-704_101_SL_seq_4562
gcggcacccccggccccgta

SEQ ID NO: 4563 - DNA, 20 bp, Homo sapiens
  source 1..20: mol_type = genomic DNA; note = Gene: MAP2K4; note = Location (start to end; relative to TSS): MAP2K4_86_116; note = Orientation (relative to transcription): antisense; note = sgRNA Position: 12020969; note = Sequence Name: 56322-704_101_SL_seq_4563
ggccgggtggcctggcgccg

SEQ ID NO: 4564 - DNA, 20 bp, Homo sapiens
  source 1..20: mol_type = genomic DNA; note = Gene: MAP2K4; note = Location (start to end; relative to TSS): MAP2K4_24_54; note = Orientation (relative to transcription): antisense; note = sgRNA Position: 12020907; note = Sequence Name: 56322-704_101_SL_seq_4564
cggagccgccgccgccgctc

SEQ ID NO: 4565 - DNA, 20 bp, Homo sapiens
  source 1..20: mol_type = genomic DNA; note = Gene: MAP2K4; note = Location (start to end; relative to TSS): MAP2K4_60_90; note = Orientation (relative to transcription): sense; note = sgRNA Position: 12020963; note = Sequence Name: 56322-704_101_SL_seq_4565
ccccggccccgtagggtccc

SEQ ID NO: 4566 - DNA, 20 bp, Homo sapiens
  source 1..20: mol_type = genomic DNA; note = Gene: MAP2K4; note = Location (start to end; relative to TSS): MAP2K4_18_48; note = Orientation (relative to transcription): sense; note = sgRNA Position: 12020921; note = Sequence Name: 56322-704_101_SL_seq_4566
gagcggcggcggcggctccg

SEQ ID NO: 4567 - DNA, 20 bp, Homo sapiens
  source 1..20: mol_type = genomic DNA; note = Gene: MAP2K4; note = Location (start to end; relative to TSS): MAP2K4_53_83; note = Orientation (relative to transcription): sense; note = sgRNA Position: 12020956; note = Sequence Name: 56322-704_101_SL_seq_4567
gcggcacccccggccccgta

SEQ ID NO: 4568 - DNA, 20 bp, Homo sapiens
  source 1..20: mol_type = genomic DNA; note = Gene: MAP2K4; note = Location (start to end; relative to TSS): MAP2K4_10_40; note = Orientation (relative to transcription): sense; note = sgRNA Position: 12020913; note = Sequence Name: 56322-704_101_SL_seq_4568
ccgagcccgagcggcggcgg

SEQ ID NO: 4569 - DNA, 20 bp, Homo sapiens
  source 1..20: mol_type = genomic DNA; note = Gene: MAP2K4; note = Location (start to end; relative to TSS): MAP2K4_52_82; note = Orientation (relative to transcription): sense; note = sgRNA Position: 12020955; note = Sequence Name: 56322-704_101_SL_seq_4569
agcggcacccccggccccgt

SEQ ID NO: 4570 - DNA, 20 bp, Homo sapiens
  source 1..20: mol_type = genomic DNA; note = Gene: MAP2K5; note = Location (start to end; relative to TSS): MAP2K5_39_69; note = Orientation (relative to transcription): antisense; note = sgRNA Position: 67542748; note = Sequence Name: 56322-704_101_SL_seq_4570
cggactggcggcggctgcgg

SEQ ID NO: 4571 - DNA, 20 bp, Homo sapiens
  source 1..20: mol_type = genomic DNA; note = Gene: MAP2K5; note = Location (start to end; relative to TSS): MAP2K5_86_116; note = Orientation (relative to transcription): sense; note = sgRNA Position: 67542815; note = Sequence Name: 56322-704_101_SL_seq_4571
gcgccgcgccctgtgtctcc

SEQ ID NO: 4572 - DNA, 20 bp, Homo sapiens
  source 1..20: mol_type = genomic DNA; note = Gene: MAP2K5; note = Location (start to end; relative to TSS): MAP2K5_45_75; note = Orientation (relative to transcription): sense; note = sgRNA Position: 67542774; note = Sequence Name: 56322-704_101_SL_seq_4572
ccagtccgcgcggcctcggg

SEQ ID NO: 4573 - DNA, 20 bp, Homo sapiens
  source 1..20: mol_type = genomic DNA; note = Gene: MAP2K5; note = Location (start to end; relative to TSS): MAP2K5_77_107; note = Orientation (relative to transcription): antisense; note = sgRNA Position: 67542786; note = Sequence Name: 56322-704_101_SL_seq_4573
ggcgcgcgcaggctgagctc

SEQ ID NO: 4574 - DNA, 20 bp, Homo sapiens
  source 1..20: mol_type = genomic DNA; note = Gene: MAP2K5; note = Location (start to end; relative to TSS): MAP2K5_35_65; note = Orientation (relative to transcription): sense; note = sgRNA Position: 67542764; note = Sequence Name: 56322-704_101_SL_seq_4574
gcagccgccgccagtccgcg

SEQ ID NO: 4575 - DNA, 20 bp, Homo sapiens
  source 1..20: mol_type = genomic DNA; note = Gene: MAP2K5; note = Location (start to end; relative to TSS): MAP2K5_67_97; note = Orientation (relative to transcription): antisense; note = sgRNA Position: 67542776; note = Sequence Name: 56322-704_101_SL_seq_4575
ggctgagctccggccacccg

SEQ ID NO: 4576 - DNA, 20 bp, Homo sapiens
  source 1..20: mol_type = genomic DNA; note = Gene: MAP2K5; note = Location (start to end; relative to TSS): MAP2K5_27_57; note = Orientation (relative to transcription): antisense; note = sgRNA Position: 67542736; note = Sequence Name: 56322-704_101_SL_seq_4576
ggctgcggcggcggcgacgg

SEQ ID NO: 4577 - DNA, 20 bp, Homo sapiens
  source 1..20: mol_type = genomic DNA; note = Gene: MAP2K5; note = Location (start to end; relative to TSS): MAP2K5_59_89; note = Orientation (relative to transcription): antisense; note = sgRNA Position: 67542768; note = Sequence Name: 56322-704_101_SL_seq_4577
tccggccacccgaggccgcg

SEQ ID NO: 4578 - DNA, 20 bp, Homo sapiens
  source 1..20: mol_type = genomic DNA; note = Gene: MAP2K5; note = Location (start to end; relative to TSS): MAP2K5_21_51; note = Orientation (relative to transcription): antisense; note = sgRNA Position: 67542730; note = Sequence Name: 56322-704_101_SL_seq_4578
ggcggcggcgacggcggtag

SEQ ID NO: 4579 - DNA, 20 bp, Homo sapiens
  source 1..20: mol_type = genomic DNA; note = Gene: MAP2K5; note = Location (start to end; relative to TSS): MAP2K5_51_81; note = Orientation (relative to transcription): antisense; note = sgRNA Position: 67542760; note = Sequence Name: 56322-704_101_SL_seq_4579
cccgaggccgcgcggactgg

SEQ ID NO: 4580 - DNA, 20 bp, Homo sapiens
  source 1..20: mol_type = genomic DNA; note = Gene: MAP2K6; note = Location (start to end; relative to TSS): MAP2K6_37_67; note = Orientation (relative to transcription): antisense; note = sgRNA Position: 69414740; note = Sequence Name: 56322-704_101_SL_seq_4580
gctgtgctgcagctacatga

SEQ ID NO: 4581 - DNA, 20 bp, Homo sapiens
  source 1..20: mol_type = genomic DNA; note = Gene: MAP2K6; note = Location (start to end; relative to TSS): MAP2K6_96_126; note = Orientation (relative to transcription): antisense; note = sgRNA Position: 69414799; note = Sequence Name: 56322-704_101_SL_seq_4581
gcacaccttgcaaaacagac

SEQ ID NO: 4582 - DNA, 20 bp, Homo sapiens
  source 1..20: mol_type = genomic DNA; note = Gene: MAP2K6; note = Location (start to end; relative to TSS): MAP2K6_36_66; note = Orientation (relative to transcription): antisense; note = sgRNA Position: 69414739; note = Sequence Name: 56322-704_101_SL_seq_4582
ctgtgctgcagctacatgat

SEQ ID NO: 4583 - DNA, 20 bp, Homo sapiens
  source 1..20: mol_type = genomic DNA; note = Gene: MAP2K6; note = Location (start to end; relative to TSS): MAP2K6_82_112; note = Orientation (relative to transcription): sense; note = sgRNA Position: 69414805; note = Sequence Name: 56322-704_101_SL_seq_4583
actttccagtctgttttgca

SEQ ID NO: 4584 - DNA, 20 bp, Homo sapiens
  source 1..20: mol_type = genomic DNA; note = Gene: MAP2K6; note = Location (start to end; relative to TSS): MAP2K6_30_60; note = Orientation (relative to transcription): antisense; note = sgRNA Position: 69414733; note = Sequence Name: 56322-704_101_SL_seq_4584
tgcagctacatgatgggcca

SEQ ID NO: 4585 - DNA, 20 bp, Homo sapiens
  source 1..20: mol_type = genomic DNA; note = Gene: MAP2K6; note = Location (start to end; relative to TSS): MAP2K6_64_94; note = Orientation (relative to transcription): antisense; note = sgRNA Position: 69414767; note = Sequence Name: 56322-704_101_SL_seq_4585
tttcccccagttgcaacgtt

SEQ ID NO: 4586 - DNA, 20 bp, Homo sapiens
  source 1..20: mol_type = genomic DNA; note = Gene: MAP2K6; note = Location (start to end; relative to TSS): MAP2K6_31_61; note = Orientation (relative to transcription): antisense; note = sgRNA Position: 69414734; note = Sequence Name: 56322-704_101_SL_seq_4586
ctgcagctacatgatgggcc

SEQ ID NO: 4587 - DNA, 20 bp, Homo sapiens
  source 1..20: mol_type = genomic DNA; note = Gene: MAP2K6; note = Location (start to end; relative to TSS): MAP2K6_63_93; note = Orientation (relative to transcription): antisense; note = sgRNA Position: 69414766; note = Sequence Name: 56322-704_101_SL_seq_4587
ttcccccagttgcaacgtta

SEQ ID NO: 4588 - DNA, 20 bp, Homo sapiens
  source 1..20: mol_type = genomic DNA; note = Gene: MAP2K6; note = Location (start to end; relative to TSS): MAP2K6_26_56; note = Orientation (relative to transcription): antisense; note = sgRNA Position: 69414729; note = Sequence Name: 56322-704_101_SL_seq_4588
gctacatgatgggccagggc

SEQ ID NO: 4589 - DNA, 20 bp, Homo sapiens
  source 1..20: mol_type = genomic DNA; note = Gene: MAP2K6; note = Location (start to end; relative to TSS): MAP2K6_59_89; note = Orientation (relative to transcription): antisense; note = sgRNA Position: 69414762; note = Sequence Name: 56322-704_101_SL_seq_4589
cccagttgcaacgttaggga

SEQ ID NO: 4590 - DNA, 20 bp, Homo sapiens
  source 1..20: mol_type = genomic DNA; note = Gene: MAP2K7; note = Location (start to end; relative to TSS): MAP2K7_55_85; note = Orientation (relative to transcription): sense; note = sgRNA Position: 7903958; note = Sequence Name: 56322-704_101_SL_seq_4590
gaagatggcggcgtcctccc

SEQ ID NO: 4591 - DNA, 20 bp, Homo sapiens
  source 1..20: mol_type = genomic DNA; note = Gene: MAP2K7; note = Location (start to end; relative to TSS): MAP2K7_94_124; note = Orientation (relative to transcription): sense; note = sgRNA Position: 7903997; note = Sequence Name: 56322-704_101_SL_seq_4591
cctggaagcaaagctgaagc

SEQ ID NO: 4592 - DNA, 20 bp, Homo sapiens
  source 1..20: mol_type = genomic DNA; note = Gene: MAP2K7; note = Location (start to end; relative to TSS): MAP2K7_43_73; note = Orientation (relative to transcription): sense; note = sgRNA Position: 7903946; note = Sequence Name: 56322-704_101_SL_seq_4592
ggtggcggcggggaagatgg

SEQ ID NO: 4593 - DNA, 20 bp, Homo sapiens
  source 1..20: mol_type = genomic DNA; note = Gene: MAP2K7; note = Location (start to end; relative to TSS): MAP2K7_81_111; note = Orientation (relative to transcription): antisense; note = sgRNA Position: 7903964; note = Sequence Name: 56322-704_101_SL_seq_4593
gcgggacagcttctgttcca

SEQ ID NO: 4594 - DNA, 20 bp, Homo sapiens
  source 1..20: mol_type = genomic DNA; note = Gene: MAP2K7; note = Location (start to end; relative to TSS): MAP2K7_40_70; note = Orientation (relative to transcription): sense; note = sgRNA Position: 7903943; note = Sequence Name: 56322-704_101_SL_seq_4594
ggcggtggcggcggggaaga

SEQ ID NO: 4595 - DNA, 20 bp, Homo sapiens
  source 1..20: mol_type = genomic DNA; note = Gene: MAP2K7; note = Location (start to end; relative to TSS): MAP2K7_78_108; note = Orientation (relative to transcription): antisense; note = sgRNA Position: 7903961; note = Sequence Name: 56322-704_101_SL_seq_4595
ggacagcttctgttccaggg

SEQ ID NO: 4596 - DNA, 20 bp, Homo sapiens
  source 1..20: mol_type = genomic DNA; note = Gene: MAP2K7; note = Location (start to end; relative to TSS): MAP2K7_17_47; note = Orientation (relative to transcription): antisense; note = sgRNA Position: 7903900; note = Sequence Name: 56322-704_101_SL_seq_4596
cgcccggccgcccgtcagtc

SEQ ID NO: 4597 - DNA, 20 bp, Homo sapiens
  source 1..20: mol_type = genomic DNA; note = Gene: MAP2K7; note = Location (start to end; relative to TSS): MAP2K7_76_106; note = Orientation (relative to transcription): sense; note = sgRNA Position: 7903979; note = Sequence Name: 56322-704_101_SL_seq_4597
ggaacagaagctgtcccgcc

SEQ ID NO: 4598 - DNA, 20 bp, Homo sapiens
  source 1..20: mol_type = genomic DNA; note = Gene: MAP2K7; note = Location (start to end; relative to TSS): MAP2K7_16_46; note = Orientation (relative to transcription): sense; note = sgRNA Position: 7903919; note = Sequence Name: 56322-704_101_SL_seq_4598
acgggcggccgggcggtgcg

SEQ ID NO: 4599 - DNA, 20 bp, Homo sapiens
  source 1..20: mol_type = genomic DNA; note = Gene: MAP2K7; note = Location (start to end; relative to TSS): MAP2K7_55_85; note = Orientation (relative to transcription): sense; note = sgRNA Position: 7903958; note = Sequence Name: 56322-704_101_SL_seq_4599
gaagatggcggcgtcctccc

SEQ ID NO: 4600 - DNA, 20 bp, Homo sapiens
  source 1..20: mol_type = genomic DNA; note = Gene: MAP3K1; note = Location (start to end; relative to TSS): MAP3K1_47_77; note = Orientation (relative to transcription): sense; note = sgRNA Position: 56815622; note = Sequence Name: 56322-704_101_SL_seq_4600
cgtcgggattcccgggcgcc

SEQ ID NO: 4601 - DNA, 20 bp, Homo sapiens
  source 1..20: mol_type = genomic DNA; note = Gene: MAP3K1; note = Location (start to end; relative to TSS): MAP3K1_79_109; note = Orientation (relative to transcription): sense; note = sgRNA Position: 56815654; note = Sequence Name: 56322-704_101_SL_seq_4601
cctgaggcaggcggcggcgg

SEQ ID NO: 4602 - DNA, 20 bp, Homo sapiens
  source 1..20: mol_type = genomic DNA; note = Gene: MAP3K1; note = Location (start to end; relative to TSS): MAP3K1_40_70; note = Orientation (relative to transcription): sense; note = sgRNA Position: 56815615; note = Sequence Name: 56322-704_101_SL_seq_4602
gcctcgtcgtcgggattccc

SEQ ID NO: 4603 - DNA, 20 bp, Homo sapiens
  source 1..20: mol_type = genomic DNA; note = Gene: MAP3K1; note = Location (start to end; relative to TSS): MAP3K1_73_103; note = Orientation (relative to transcription): sense; note = sgRNA Position: 56815648; note = Sequence Name: 56322-704_101_SL_seq_4603
acgagccctgaggcaggcgg

SEQ ID NO: 4604 - DNA, 20 bp, Homo sapiens
  source 1..20: mol_type = genomic DNA; note = Gene: MAP3K1; note = Location (start to end; relative to TSS): MAP3K1_39_69; note = Orientation (relative to transcription): sense; note = sgRNA Position: 56815614; note = Sequence Name: 56322-704_101_SL_seq_4604
cgcctcgtcgtcgggattcc

SEQ ID NO: 4605 - DNA, 20 bp, Homo sapiens
  source 1..20: mol_type = genomic DNA; note = Gene: MAP3K1; note = Location (start to end; relative to TSS): MAP3K1_70_100; note = Orientation (relative to transcription): sense; note = sgRNA Position: 56815645; note = Sequence Name: 56322-704_101_SL_seq_4605
gctacgagccctgaggcagg

SEQ ID NO: 4606 - DNA, 20 bp, Homo sapiens
  source 1..20: mol_type = genomic DNA; note = Gene: MAP3K1; note = Location (start to end; relative to TSS): MAP3K1_30_60; note = Orientation (relative to transcription): sense; note = sgRNA Position: 56815605; note = Sequence Name: 56322-704_101_SL_seq_4606
ggggaatcgcgcctcgtcgt

SEQ ID NO: 4607 - DNA, 20 bp, Homo sapiens
  source 1..20: mol_type = genomic DNA; note = Gene: MAP3K1; note = Location (start to end; relative to TSS): MAP3K1_66_96; note = Orientation (relative to transcription): antisense; note = sgRNA Position: 56815621; note = Sequence Name: 56322-704_101_SL_seq_4607
ggctcgtagccctggcgccc

SEQ ID NO: 4608 - DNA, 20 bp, Homo sapiens
  source 1..20: mol_type = genomic DNA; note = Gene: MAP3K1; note = Location (start to end; relative to TSS): MAP3K1_31_61; note = Orientation (relative to transcription): sense; note = sgRNA Position: 56815606; note = Sequence Name: 56322-704_101_SL_seq_4608
gggaatcgcgcctcgtcgtc

SEQ ID NO: 4609 - DNA, 20 bp, Homo sapiens
  source 1..20: mol_type = genomic DNA; note = Gene: MAP3K1; note = Location (start to end; relative to TSS): MAP3K1_63_93; note = Orientation (relative to transcription): sense; note = sgRNA Position: 56815638; note = Sequence Name: 56322-704_101_SL_seq_4609
cgccagggctacgagccctg

SEQ ID NO: 4610 - DNA, 20 bp, Homo sapiens
  source 1..20: mol_type = genomic DNA; note = Gene: MAP3K10; note = Location (start to end; relative to TSS): MAP3K10_40_70; note = Orientation (relative to transcription): sense; note = sgRNA Position: 40191492; note = Sequence Name: 56322-704_101_SL_seq_4610
aggggctggggccgaccggg

SEQ ID NO: 4611 - DNA, 20 bp, Homo sapiens
  source 1..20: mol_type = genomic DNA; note = Gene: MAP3K10; note = Location (start to end; relative to TSS): MAP3K10_72_102; note = Orientation (relative to transcription): antisense; note = sgRNA Position: 40191504; note = Sequence Name: 56322-704_101_SL_seq_4611
gcggcccccatccttggcac

SEQ ID NO: 4612 - DNA, 20 bp, Homo sapiens
  source 1..20: mol_type = genomic DNA; note = Gene: MAP3K10; note = Location (start to end; relative to TSS): MAP3K10_37_67; note = Orientation (relative to transcription): sense; note = sgRNA Position: 40191489; note = Sequence Name: 56322-704_101_SL_seq_4612
ggcaggggctggggccgacc

SEQ ID NO: 4613 - DNA, 20 bp, Homo sapiens
  source 1..20: mol_type = genomic DNA; note = Gene: MAP3K10; note = Location (start to end; relative to TSS): MAP3K10_67_97; note = Orientation (relative to transcription): sense; note = sgRNA Position: 40191519; note = Sequence Name: 56322-704_101_SL_seq_4613
tgccaaggatgggggccgcc

SEQ ID NO: 4614 - DNA, 20 bp, Homo sapiens
  source 1..20: mol_type = genomic DNA; note = Gene: MAP3K10; note = Location (start to end; relative to TSS): MAP3K10_23_53; note = Orientation (relative to transcription): antisense; note = sgRNA Position: 40191455; note = Sequence Name: 56322-704_101_SL_seq_4614
ccccgcccgtgctgcttccc

SEQ ID NO: 4615 - DNA, 20 bp, Homo sapiens
  source 1..20: mol_type = genomic DNA; note = Gene: MAP3K10; note = Location (start to end; relative to TSS): MAP3K10_57_87; note = Orientation (relative to transcription): sense; note = sgRNA Position: 40191509; note = Sequence Name: 56322-704_101_SL_seq_4615
gggaggccggtgccaaggat

SEQ ID NO: 4616 - DNA, 20 bp, Homo sapiens
  source 1..20: mol_type = genomic DNA; note = Gene: MAP3K10; note = Location (start to end; relative to TSS): MAP3K10_21_51; note = Orientation (relative to transcription): sense; note = sgRNA Position: 40191473; note = Sequence Name: 56322-704_101_SL_seq_4616
agcagcacgggcggggggca

SEQ ID NO: 4617 - DNA, 20 bp, Homo sapiens
  source 1..20: mol_type = genomic DNA; note = Gene: MAP3K10; note = Location (start to end; relative to TSS): MAP3K10_56_86; note = Orientation (relative to transcription): sense; note = sgRNA Position: 40191508; note = Sequence Name: 56322-704_101_SL_seq_4617
cgggaggccggtgccaagga

SEQ ID NO: 4618 - DNA, 20 bp, Homo sapiens
  source 1..20: mol_type = genomic DNA; note = Gene: MAP3K10; note = Location (start to end; relative to TSS): MAP3K10_22_52; note = Orientation (relative to transcription): antisense; note = sgRNA Position: 40191454; note = Sequence Name: 56322-704_101_SL_seq_4618
cccgcccgtgctgcttcccc

SEQ ID NO: 4619 - DNA, 20 bp, Homo sapiens
  source 1..20: mol_type = genomic DNA; note = Gene: MAP3K10; note = Location (start to end; relative to TSS): MAP3K10_52_82; note = Orientation (relative to transcription): sense; note = sgRNA Position: 40191504; note = Sequence Name: 56322-704_101_SL_seq_4619
cgaccgggaggccggtgcca

SEQ ID NO: 4620 - DNA, 20 bp, Homo sapiens
  source 1..20: mol_type = genomic DNA; note = Gene: MAP3K11; note = Location (start to end; relative to TSS): MAP3K11_52_82; note = Orientation (relative to transcription): antisense; note = sgRNA Position: 65614165; note = Sequence Name: 56322-704_101_SL_seq_4620
tggagggagcgtccgcagtt

SEQ ID NO: 4621 - DNA, 20 bp, Homo sapiens
  source 1..20: mol_type = genomic DNA; note = Gene: MAP3K11; note = Location (start to end; relative to TSS): MAP3K11_93_123; note = Orientation (relative to transcription): antisense; note = sgRNA Position: 65614124; note = Sequence Name: 56322-704_101_SL_seq_4621
ggcagcgcctcaactccggt

SEQ ID NO: 4622 - DNA, 20 bp, Homo sapiens
  source 1..20: mol_type = genomic DNA; note = Gene: MAP3K11; note = Location (start to end; relative to TSS): MAP3K11_53_83; note = Orientation (relative to transcription): antisense; note = sgRNA Position: 65614164; note = Sequence Name: 56322-704_101_SL_seq_4622
gtggagggagcgtccgcagt

SEQ ID NO: 4623 - DNA, 20 bp, Homo sapiens
  source 1..20: mol_type = genomic DNA; note = Gene: MAP3K11; note = Location (start to end; relative to TSS): MAP3K11_92_122; note = Orientation (relative to transcription): sense; note = sgRNA Position: 65614105; note = Sequence Name: 56322-704_101_SL_seq_4623
agttgaggcgctgcccctga

SEQ ID NO: 4624 - DNA, 20 bp, Homo sapiens
  source 1..20: mol_type = genomic DNA; note = Gene: MAP3K11; note = Location (start to end; relative to TSS): MAP3K11_32_62; note = Orientation (relative to transcription): antisense; note = sgRNA Position: 65614185; note = Sequence Name: 56322-704_101_SL_seq_4624
gggccgagactgcctgttcc

SEQ ID NO: 4625 - DNA, 20 bp, Homo sapiens
  source 1..20: mol_type = genomic DNA; note = Gene: MAP3K11; note = Location (start to end; relative to TSS): MAP3K11_69_99; note = Orientation (relative to transcription): sense; note = sgRNA Position: 65614128; note = Sequence Name: 56322-704_101_SL_seq_4625
cctgcgcaaaaagacccaac

SEQ ID NO: 4626 - DNA, 20 bp, Homo sapiens
  source 1..20: mol_type = genomic DNA; note = Gene: MAP3K11; note = Location (start to end; relative to TSS): MAP3K11_31_61; note = Orientation (relative to transcription): sense; note = sgRNA Position: 65614166; note = Sequence Name: 56322-704_101_SL_seq_4626
aggcagtctcggcccaactg

SEQ ID NO: 4627 - DNA, 20 bp, Homo sapiens
  source 1..20: mol_type = genomic DNA; note = Gene: MAP3K11; note = Location (start to end; relative to TSS): MAP3K11_68_98; note = Orientation (relative to transcription): antisense; note = sgRNA Position: 65614149; note = Sequence Name: 56322-704_101_SL_seq_4627
ctttttgcgcagggggtgga

SEQ ID NO: 4628 - DNA, 20 bp, Homo sapiens
  source 1..20: mol_type = genomic DNA; note = Gene: MAP3K11; note = Location (start to end; relative to TSS): MAP3K11_20_50; note = Orientation (relative to transcription): sense; note = sgRNA Position: 65614177; note = Sequence Name: 56322-704_101_SL_seq_4628
gggccaggaacaggcagtct

SEQ ID NO: 4629 - DNA, 20 bp, Homo sapiens
  source 1..20: mol_type = genomic DNA; note = Gene: MAP3K11; note = Location (start to end; relative to TSS): MAP3K11_52_82; note = Orientation (relative to transcription): antisense; note = sgRNA Position: 65614165; note = Sequence Name: 56322-704_101_SL_seq_4629
tggagggagcgtccgcagtt

SEQ ID NO: 4630 - DNA, 20 bp, Homo sapiens
  source 1..20: mol_type = genomic DNA; note = Gene: MAP3K12; note = Location (start to end; relative to TSS): MAP3K12_46_76; note = Orientation (relative to transcription): sense; note = sgRNA Position: 53499388; note = Sequence Name: 56322-704_101_SL_seq_4630
ggggggtggggggcagggat

SEQ ID NO: 4631 - DNA, 20 bp, Homo sapiens
  source 1..20: mol_type = genomic DNA; note = Gene: MAP3K12; note = Location (start to end; relative to TSS): MAP3K12_78_108; note = Orientation (relative to transcription): sense; note = sgRNA Position: 53499356; note = Sequence Name: 56322-704_101_SL_seq_4631
tgggatccgggcgtggaggg

SEQ ID NO: 4632 - DNA, 20 bp, Homo sapiens
  source 1..20: mol_type = genomic DNA; note = Gene: MAP3K12; note = Location (start to end; relative to TSS): MAP3K12_45_75; note = Orientation (relative to transcription): antisense; note = sgRNA Position: 53499409; note = Sequence Name: 56322-704_101_SL_seq_4632
ccccccacccccccacaact

SEQ ID NO: 4633 - DNA, 20 bp, Homo sapiens
  source 1..20: mol_type = genomic DNA; note = Gene: MAP3K12; note = Location (start to end; relative to TSS): MAP3K12_75_105; note = Orientation (relative to transcription): sense; note = sgRNA Position: 53499359; note = Sequence Name: 56322-704_101_SL_seq_4633
tcctgggatccgggcgtgga

SEQ ID NO: 4634 - DNA, 20 bp, Homo sapiens
  source 1..20: mol_type = genomic DNA; note = Gene: MAP3K12; note = Location (start to end; relative to TSS): MAP3K12_26_56; note = Orientation (relative to transcription): antisense; note = sgRNA Position: 53499428; note = Sequence Name: 56322-704_101_SL_seq_4634
tcggccaggctctcacctcg

SEQ ID NO: 4635 - DNA, 20 bp, Homo sapiens
  source 1..20: mol_type = genomic DNA; note = Gene: MAP3K12; note = Location (start to end; relative to TSS): MAP3K12_66_96; note = Orientation (relative to transcription): sense; note = sgRNA Position: 53499368; note = Sequence Name: 56322-704_101_SL_seq_4635
gggtctgggtcctgggatcc

SEQ ID NO: 4636 - DNA, 20 bp, Homo sapiens
  source 1..20: mol_type = genomic DNA; note = Gene: MAP3K12; note = Location (start to end; relative to TSS): MAP3K12_24_54; note = Orientation (relative to transcription): sense; note = sgRNA Position: 53499410; note = Sequence Name: 56322-704_101_SL_seq_4636
gtgagagcctggccgagttg

SEQ ID NO: 4637 - DNA, 20 bp, Homo sapiens
  source 1..20: mol_type = genomic DNA; note = Gene: MAP3K12; note = Location (start to end; relative to TSS): MAP3K12_65_95; note = Orientation (relative to transcription): sense; note = sgRNA Position: 53499369; note = Sequence Name: 56322-704_101_SL_seq_4637
tgggtctgggtcctgggatc

SEQ ID NO: 4638 - DNA, 20 bp, Homo sapiens
  source 1..20: mol_type = genomic DNA; note = Gene: MAP3K12; note = Location (start to end; relative to TSS): MAP3K12_25_55; note = Orientation (relative to transcription): antisense; note = sgRNA Position: 53499429; note = Sequence Name: 56322-704_101_SL_seq_4638
cggccaggctctcacctcgg

SEQ ID NO: 4639 - DNA, 20 bp, Homo sapiens
  source 1..20: mol_type = genomic DNA; note = Gene: MAP3K12; note = Location (start to end; relative to TSS): MAP3K12_59_89; note = Orientation (relative to transcription): sense; note = sgRNA Position: 53499375; note = Sequence Name: 56322-704_101_SL_seq_4639
cagggatgggtctgggtcct

SEQ ID NO: 4640 - DNA, 20 bp, Homo sapiens
  source 1..20: mol_type = genomic DNA; note = Gene: MAP3K13; note = Location (start to end; relative to TSS): MAP3K13_55_85; note = Orientation (relative to transcription): antisense; note = sgRNA Position: 185363197; note = Sequence Name: 56322-704_101_SL_seq_4640
tgacgtcacagattcatgaa

SEQ ID NO: 4641 - DNA, 20 bp, Homo sapiens
  source 1..20: mol_type = genomic DNA; note = Gene: MAP3K13; note = Location (start to end; relative to TSS): MAP3K13_90_120; note = Orientation (relative to transcription): sense; note = sgRNA Position: 185363252; note = Sequence Name: 56322-704_101_SL_seq_4641
cggtgggctggaggattgtg

SEQ ID NO: 4642 - DNA, 20 bp, Homo sapiens
  source 1..20: mol_type = genomic DNA; note = Gene: MAP3K13; note = Location (start to end; relative to TSS): MAP3K13_43_73; note = Orientation (relative to transcription): antisense; note = sgRNA Position: 185363185; note = Sequence Name: 56322-704_101_SL_seq_4642
ttcatgaatggatgtaaatt

SEQ ID NO: 4643 - DNA, 20 bp, Homo sapiens
  source 1..20: mol_type = genomic DNA; note = Gene: MAP3K13; note = Location (start to end; relative to TSS): MAP3K13_74_104; note = Orientation (relative to transcription): sense; note = sgRNA Position: 185363236; note = Sequence Name: 56322-704_101_SL_seq_4643
cctttgggctcctttgcggt

SEQ ID NO: 4644 - DNA, 20 bp, Homo sapiens
  source 1..20: mol_type = genomic DNA; note = Gene: MAP3K13; note = Location (start to end; relative to TSS): MAP3K13_33_63; note = Orientation (relative to transcription): antisense; note = sgRNA Position: 185363175; note = Sequence Name: 56322-704_101_SL_seq_4644
gatgtaaattgggctggttt

SEQ ID NO: 4645 - DNA, 20 bp, Homo sapiens
  source 1..20: mol_type = genomic DNA; note = Gene: MAP3K13; note = Location (start to end; relative to TSS): MAP3K13_73_103; note = Orientation (relative to transcription): sense; note = sgRNA Position: 185363235; note = Sequence Name: 56322-704_101_SL_seq_4645
gcctttgggctcctttgcgg

SEQ ID NO: 4646 - DNA, 20 bp, Homo sapiens
  source 1..20: mol_type = genomic DNA; note = Gene: MAP3K13; note = Location (start to end; relative to TSS): MAP3K13_39_69; note = Orientation (relative to transcription): antisense; note = sgRNA Position: 185363181; note = Sequence Name: 56322-704_101_SL_seq_4646
tgaatggatgtaaattgggc

SEQ ID NO: 4647 - DNA, 20 bp, Homo sapiens
  source 1..20: mol_type = genomic DNA; note = Gene: MAP3K13; note = Location (start to end; relative to TSS): MAP3K13_70_100; note = Orientation (relative to transcription): sense; note = sgRNA Position: 185363232; note = Sequence Name: 56322-704_101_SL_seq_4647
caagcctttgggctcctttg

SEQ ID NO: 4648 - DNA, 20 bp, Homo sapiens
  source 1..20: mol_type = genomic DNA; note = Gene: MAP3K13; note = Location (start to end; relative to TSS): MAP3K13_10_40; note = Orientation (relative to transcription): antisense; note = sgRNA Position: 185363152; note = Sequence Name: 56322-704_101_SL_seq_4648
attccgcacagacttcgctg

SEQ ID NO: 4649 - DNA, 20 bp, Homo sapiens
  source 1..20: mol_type = genomic DNA; note = Gene: MAP3K13; note = Location (start to end; relative to TSS): MAP3K13_43_73; note = Orientation (relative to transcription): antisense; note = sgRNA Position: 185363185; note = Sequence Name: 56322-704_101_SL_seq_4649
ttcatgaatggatgtaaatt

SEQ ID NO: 4650 - DNA, 20 bp, Homo sapiens
  source 1..20: mol_type = genomic DNA; note = Gene: MAP3K14; note = Location (start to end; relative to TSS): MAP3K14_41_71; note = Orientation (relative to transcription): sense; note = sgRNA Position: 45316955; note = Sequence Name: 56322-704_101_SL_seq_4650
ggcgcttggccggtaggtga

SEQ ID NO: 4651 - DNA, 20 bp, Homo sapiens
  source 1..20: mol_type = genomic DNA; note = Gene: MAP3K14; note = Location (start to end; relative to TSS): MAP3K14_81_111; note = Orientation (relative to transcription): antisense; note = sgRNA Position: 45316935; note = Sequence Name: 56322-704_101_SL_seq_4651
gtcgcctcgcaccgggcccc

SEQ ID NO: 4652 - DNA, 20 bp, Homo sapiens
  source 1..20: mol_type = genomic DNA; note = Gene: MAP3K14; note = Location (start to end; relative to TSS): MAP3K14_42_72; note = Orientation (relative to transcription): sense; note = sgRNA Position: 45316954; note = Sequence Name: 56322-704_101_SL_seq_4652
gcgcttggccggtaggtgac

SEQ ID NO: 4653 - DNA, 20 bp, Homo sapiens
  source 1..20: mol_type = genomic DNA; note = Gene: MAP3K14; note = Location (start to end; relative to TSS): MAP3K14_80_110; note = Orientation (relative to transcription): antisense; note = sgRNA Position: 45316936; note = Sequence Name: 56322-704_101_SL_seq_4653
tcgcctcgcaccgggcccca

SEQ ID NO: 4654 - DNA, 20 bp, Homo sapiens
  source 1..20: mol_type = genomic DNA; note = Gene: MAP3K14; note = Location (start to end; relative to TSS): MAP3K14_43_73; note = Orientation (relative to transcription): sense; note = sgRNA Position: 45316953; note = Sequence Name: 56322-704_101_SL_seq_4654
cgcttggccggtaggtgacg

SEQ ID NO: 4655 - DNA, 20 bp, Homo sapiens
  source 1..20: mol_type = genomic DNA; note = Gene: MAP3K14; note = Location (start to end; relative to TSS): MAP3K14_77_107; note = Orientation (relative to transcription): sense; note = sgRNA Position: 45316919; note = Sequence Name: 56322-704_101_SL_seq_4655
ggcccggtgcgaggcgacca

SEQ ID NO: 4656 - DNA, 20 bp, Homo sapiens
  source 1..20: mol_type = genomic DNA; note = Gene: MAP3K14; note = Location (start to end; relative to TSS): MAP3K14_46_76; note = Orientation (relative to transcription): sense; note = sgRNA Position: 45316950; note = Sequence Name: 56322-704_101_SL_seq_4656
ttggccggtaggtgacgggg

SEQ ID NO: 4657 - DNA, 20 bp, Homo sapiens
  source 1..20: mol_type = genomic DNA; note = Gene: MAP3K14; note = Location (start to end; relative to TSS): MAP3K14_76_106; note = Orientation (relative to transcription): sense; note = sgRNA Position: 45316920; note = Sequence Name: 56322-704_101_SL_seq_4657
gggcccggtgcgaggcgacc

SEQ ID NO: 4658 - DNA, 20 bp, Homo sapiens
  source 1..20: mol_type = genomic DNA; note = Gene: MAP3K14; note = Location (start to end; relative to TSS): MAP3K14_20_50; note = Orientation (relative to transcription): sense; note = sgRNA Position: 45316976; note = Sequence Name: 56322-704_101_SL_seq_4658
actcgcttggttggggagat

SEQ ID NO: 4659 - DNA, 20 bp, Homo sapiens
  source 1..20: mol_type = genomic DNA; note = Gene: MAP3K14; note = Location (start to end; relative to TSS): MAP3K14_55_85; note = Orientation (relative to transcription): sense; note = sgRNA Position: 45316941; note = Sequence Name: 56322-704_101_SL_seq_4659
aggtgacggggcgggaccct

SEQ ID NO: 4660 - DNA, 20 bp, Homo sapiens
  source 1..20: mol_type = genomic DNA; note = Gene: MAP3K15; note = Location (start to end; relative to TSS): MAP3K15_38_68; note = Orientation (relative to transcription): sense; note = sgRNA Position: 19515446; note = Sequence Name: 56322-704_101_SL_seq_4660
agcgtcaggctgcagcctag

SEQ ID NO: 4661 - DNA, 20 bp, Homo sapiens
  source 1..20: mol_type = genomic DNA; note = Gene: MAP3K15; note = Location (start to end; relative to TSS): MAP3K15_98_128; note = Orientation (relative to transcription): antisense; note = sgRNA Position: 19515406; note = Sequence Name: 56322-704_101_SL_seq_4661
cgagggaacggagcgcaccg

SEQ ID NO: 4662 - DNA, 20 bp, Homo sapiens
  source 1..20: mol_type = genomic DNA; note = Gene: MAP3K15; note = Location (start to end; relative to TSS): MAP3K15_37_67; note = Orientation (relative to transcription): sense; note = sgRNA Position: 19515447; note = Sequence Name: 56322-704_101_SL_seq_4662
gagcgtcaggctgcagccta

SEQ ID NO: 4663 - DNA, 20 bp, Homo sapiens
  source 1..20: mol_type = genomic DNA; note = Gene: MAP3K15; note = Location (start to end; relative to TSS): MAP3K15_89_119; note = Orientation (relative to transcription): antisense; note = sgRNA Position: 19515415; note = Sequence Name: 56322-704_101_SL_seq_4663
ggagcgcaccggggaccccg

SEQ ID NO: 4664 - DNA, 20 bp, Homo sapiens
  source 1..20: mol_type = genomic DNA; note = Gene: MAP3K15; note = Location (start to end; relative to TSS): MAP3K15_36_66; note = Orientation (relative to transcription): sense; note = sgRNA Position: 19515448; note = Sequence Name: 56322-704_101_SL_seq_4664
tgagcgtcaggctgcagcct

SEQ ID NO: 4665 - DNA, 20 bp, Homo sapiens
  source 1..20: mol_type = genomic DNA; note = Gene: MAP3K15; note = Location (start to end; relative to TSS): MAP3K15_86_116; note = Orientation (relative to transcription): antisense; note = sgRNA Position: 19515418; note = Sequence Name: 56322-704_101_SL_seq_4665
gcgcaccggggaccccgcgg

SEQ ID NO: 4666 - DNA, 20 bp, Homo sapiens
  source 1..20: mol_type = genomic DNA; note = Gene: MAP3K15; note = Location (start to end; relative to TSS): MAP3K15_35_65; note = Orientation (relative to transcription): antisense; note = sgRNA Position: 19515469; note = Sequence Name: 56322-704_101_SL_seq_4666
agcctgacgctcaggcccca

SEQ ID NO: 4667 - DNA, 20 bp, Homo sapiens
  source 1..20: mol_type = genomic DNA; note = Gene: MAP3K15; note = Location (start to end; relative to TSS): MAP3K15_75_105; note = Orientation (relative to transcription): antisense; note = sgRNA Position: 19515429; note = Sequence Name: 56322-704_101_SL_seq_4667
accccgcggcgggccgaaga

SEQ ID NO: 4668 - DNA, 20 bp, Homo sapiens
  source 1..20: mol_type = genomic DNA; note = Gene: MAP3K15; note = Location (start to end; relative to TSS): MAP3K15_24_54; note = Orientation (relative to transcription): sense; note = sgRNA Position: 19515460; note = Sequence Name: 56322-704_101_SL_seq_4668
ggccttggggcctgagcgtc

SEQ ID NO: 4669 - DNA, 20 bp, Homo sapiens
  source 1..20: mol_type = genomic DNA; note = Gene: MAP3K15; note = Location (start to end; relative to TSS): MAP3K15_72_102; note = Orientation (relative to transcription): sense; note = sgRNA Position: 19515412; note = Sequence Name: 56322-704_101_SL_seq_4669
tcggcccgccgcggggtccc

SEQ ID NO: 4670 - DNA, 20 bp, Homo sapiens
  source 1..20: mol_type = genomic DNA; note = Gene: MAP3K19; note = Location (start to end; relative to TSS): MAP3K19_41_71; note = Orientation (relative to transcription): antisense; note = sgRNA Position: 135047402; note = Sequence Name: 56322-704_101_SL_seq_4670
aattttgtctttaattaagc

SEQ ID NO: 4671 - DNA, 20 bp, Homo sapiens
  source 1..20: mol_type = genomic DNA; note = Gene: MAP3K19; note = Location (start to end; relative to TSS): MAP3K19_121_151; note = Orientation (relative to transcription): sense; note = sgRNA Position: 135047302; note = Sequence Name: 56322-704_101_SL_seq_4671
tggatccctggttgaagtgt

SEQ ID NO: 4672 - DNA, 20 bp, Homo sapiens
  source 1..20: mol_type = genomic DNA; note = Gene: MAP3K19; note = Location (start to end; relative to TSS): MAP3K19_39_69; note = Orientation (relative to transcription): sense; note = sgRNA Position: 135047384; note = Sequence Name: 56322-704_101_SL_seq_4672
aattaaagacaaaatttaaa

SEQ ID NO: 4673 - DNA, 20 bp, Homo sapiens
  source 1..20: mol_type = genomic DNA; note = Gene: MAP3K19; note = Location (start to end; relative to TSS): MAP3K19_120_150; note = Orientation (relative to transcription): sense; note = sgRNA Position: 135047303; note = Sequence Name: 56322-704_101_SL_seq_4673
atggatccctggttgaagtg

SEQ ID NO: 4674 - DNA, 20 bp, Homo sapiens
  source 1..20: mol_type = genomic DNA; note = Gene: MAP3K19; note = Location (start to end; relative to TSS): MAP3K19_8_38; note = Orientation (relative to transcription): sense; note = sgRNA Position: 135047415; note = Sequence Name: 56322-704_101_SL_seq_4674
actaaagggtttgtgcatgc

SEQ ID NO: 4675 - DNA, 20 bp, Homo sapiens
  source 1..20: mol_type = genomic DNA; note = Gene: MAP3K19; note = Location (start to end; relative to TSS): MAP3K19_109_139; note = Orientation (relative to transcription): sense; note = sgRNA Position: 135047314; note = Sequence Name: 56322-704_101_SL_seq_4675
gctgtttttaaatggatccc

SEQ ID NO: 4676 - DNA, 20 bp, Homo sapiens
  source 1..20: mol_type = genomic DNA; note = Gene: MAP3K19; note = Location (start to end; relative to TSS): MAP3K19_-6_24; note = Orientation (relative to transcription): sense; note = sgRNA Position: 135047429; note = Sequence Name: 56322-704_101_SL_seq_4676
tctatttgcagctaactaaa

SEQ ID NO: 4677 - DNA, 20 bp, Homo sapiens
  source 1..20: mol_type = genomic DNA; note = Gene: MAP3K19; note = Location (start to end; relative to TSS): MAP3K19_39_69; note = Orientation (relative to transcription): sense; note = sgRNA Position: 135047384; note = Sequence Name: 56322-704_101_SL_seq_4677
aattaaagacaaaatttaaa

SEQ ID NO: 4678 - DNA, 20 bp, Homo sapiens
  source 1..20: mol_type = genomic DNA; note = Gene: MAP3K19; note = Location (start to end; relative to TSS): MAP3K19_-7_23; note = Orientation (relative to transcription): sense; note = sgRNA Position: 135047430; note = Sequence Name: 56322-704_101_SL_seq_4678
gtctatttgcagctaactaa

SEQ ID NO: 4679 - DNA, 20 bp, Homo sapiens
  source 1..20: mol_type = genomic DNA; note = Gene: MAP3K19; note = Location (start to end; relative to TSS): MAP3K19_41_71; note = Orientation (relative to transcription): antisense; note = sgRNA Position: 135047402; note = Sequence Name: 56322-704_101_SL_seq_4679
aattttgtctttaattaagc

SEQ ID NO: 4680 - DNA, 20 bp, Homo sapiens
  source 1..20: mol_type = genomic DNA; note = Gene: MAP3K2; note = Location (start to end; relative to TSS): MAP3K2_38_68; note = Orientation (relative to transcription): antisense; note = sgRNA Position: 127387933; note = Sequence Name: 56322-704_101_SL_seq_4680
tcgtcaggcgccgccgctga

SEQ ID NO: 4681 - DNA, 20 bp, Homo sapiens
  source 1..20: mol_type = genomic DNA; note = Gene: MAP3K2; note = Location (start to end; relative to TSS): MAP3K2_71_101; note = Orientation (relative to transcription): sense; note = sgRNA Position: 127387880; note = Sequence Name: 56322-704_101_SL_seq_4681
cgcagcgttcgggggttgca

SEQ ID NO: 4682 - DNA, 20 bp, Homo sapiens
  source 1..20: mol_type = genomic DNA; note = Gene: MAP3K2; note = Location (start to end; relative to TSS): MAP3K2_34_64; note = Orientation (relative to transcription): antisense; note = sgRNA Position: 127387937; note = Sequence Name: 56322-704_101_SL_seq_4682
caggcgccgccgctgagggc

SEQ ID NO: 4683 - DNA, 20 bp, Homo sapiens
  source 1..20: mol_type = genomic DNA; note = Gene: MAP3K2; note = Location (start to end; relative to TSS): MAP3K2_66_96; note = Orientation (relative to transcription): antisense; note = sgRNA Position: 127387905; note = Sequence Name: 56322-704_101_SL_seq_4683
aacgctgcgcccagcggccg

SEQ ID NO: 4684 - DNA, 20 bp, Homo sapiens
  source 1..20: mol_type = genomic DNA; note = Gene: MAP3K2; note = Location (start to end; relative to TSS): MAP3K2_31_61; note = Orientation (relative to transcription): sense; note = sgRNA Position: 127387920; note = Sequence Name: 56322-704_101_SL_seq_4684
ctcagcggcggcgcctgacg

SEQ ID NO: 4685 - DNA, 20 bp, Homo sapiens
  source 1..20: mol_type = genomic DNA; note = Gene: MAP3K2; note = Location (start to end; relative to TSS): MAP3K2_63_93; note = Orientation (relative to transcription): sense; note = sgRNA Position: 127387888; note = Sequence Name: 56322-704_101_SL_seq_4685
ccgctgggcgcagcgttcgg

SEQ ID NO: 4686 - DNA, 20 bp, Homo sapiens
  source 1..20: mol_type = genomic DNA; note = Gene: MAP3K2; note = Location (start to end; relative to TSS): MAP3K2_32_62; note = Orientation (relative to transcription): sense; note = sgRNA Position: 127387919; note = Sequence Name: 56322-704_101_SL_seq_4686
tcagcggcggcgcctgacga

SEQ ID NO: 4687 - DNA, 20 bp, Homo sapiens
  source 1..20: mol_type = genomic DNA; note = Gene: MAP3K2; note = Location (start to end; relative to TSS): MAP3K2_62_92; note = Orientation (relative to transcription): sense; note = sgRNA Position: 127387889; note = Sequence Name: 56322-704_101_SL_seq_4687
gccgctgggcgcagcgttcg

SEQ ID NO: 4688 - DNA, 20 bp, Homo sapiens
  source 1..20: mol_type = genomic DNA; note = Gene: MAP3K2; note = Location (start to end; relative to TSS): MAP3K2_19_49; note = Orientation (relative to transcription): sense; note = sgRNA Position: 127387932; note = Sequence Name: 56322-704_101_SL_seq_4688
gggctgcctgccctcagcgg

SEQ ID NO: 4689 - DNA, 20 bp, Homo sapiens
  source 1..20: mol_type = genomic DNA; note = Gene: MAP3K2; note = Location (start to end; relative to TSS): MAP3K2_53_83; note = Orientation (relative to transcription): antisense; note = sgRNA Position: 127387918; note = Sequence Name: 56322-704_101_SL_seq_4689
gcggccgcggcaccctcgtc

SEQ ID NO: 4690 - DNA, 20 bp, Homo sapiens
  source 1..20: mol_type = genomic DNA; note = Gene: MAP3K20; note = Location (start to end; relative to TSS): MAP3K20_38_68; note = Orientation (relative to transcription): sense; note = sgRNA Position: 173075910; note = Sequence Name: 56322-704_101_SL_seq_4690
gcggaaacgtgggagccgcg

SEQ ID NO: 4691 - DNA, 20 bp, Homo sapiens
  source 1..20: mol_type = genomic DNA; note = Gene: MAP3K20; note = Location (start to end; relative to TSS): MAP3K20_86_116; note = Orientation (relative to transcription): antisense; note = sgRNA Position: 173075938; note = Sequence Name: 56322-704_101_SL_seq_4691
gcgcgcgacgagggcggcgg

SEQ ID NO: 4692 - DNA, 20 bp, Homo sapiens
  source 1..20: mol_type = genomic DNA; note = Gene: MAP3K20; note = Location (start to end; relative to TSS): MAP3K20_37_67; note = Orientation (relative to transcription): antisense; note = sgRNA Position: 173075889; note = Sequence Name: 56322-704_101_SL_seq_4692
cccacgtttccgctgcagtt

SEQ ID NO: 4693 - DNA, 20 bp, Homo sapiens
  source 1..20: mol_type = genomic DNA; note = Gene: MAP3K20; note = Location (start to end; relative to TSS): MAP3K20_81_111; note = Orientation (relative to transcription): sense; note = sgRNA Position: 173075953; note = Sequence Name: 56322-704_101_SL_seq_4693
cgccgccctcgtcgcgcgcg

SEQ ID NO: 4694 - DNA, 20 bp, Homo sapiens
  source 1..20: mol_type = genomic DNA; note = Gene: MAP3K20; note = Location (start to end; relative to TSS): MAP3K20_19_49; note = Orientation (relative to transcription): sense; note = sgRNA Position: 173075891; note = Sequence Name: 56322-704_101_SL_seq_4694
tgttcaactcctaactgcag

SEQ ID NO: 4695 - DNA, 20 bp, Homo sapiens
  source 1..20: mol_type = genomic DNA; note = Gene: MAP3K20; note = Location (start to end; relative to TSS): MAP3K20_79_109; note = Orientation (relative to transcription): sense; note = sgRNA Position: 173075951; note = Sequence Name: 56322-704_101_SL_seq_4695
cccgccgccctcgtcgcgcg

SEQ ID NO: 4696 - DNA, 20 bp, Homo sapiens
  source 1..20: mol_type = genomic DNA; note = Gene: MAP3K20; note = Location (start to end; relative to TSS): MAP3K20_27_57; note = Orientation (relative to transcription): sense; note = sgRNA Position: 173075899; note = Sequence Name: 56322-704_101_SL_seq_4696
tcctaactgcagcggaaacg

SEQ ID NO: 4697 - DNA, 20 bp, Homo sapiens
  source 1..20: mol_type = genomic DNA; note = Gene: MAP3K20; note = Location (start to end; relative to TSS): MAP3K20_71_101; note = Orientation (relative to transcription): antisense; note = sgRNA Position: 173075923; note = Sequence Name: 56322-704_101_SL_seq_4697
ggcgggggttgggacgacag

SEQ ID NO: 4698 - DNA, 20 bp, Homo sapiens
  source 1..20: mol_type = genomic DNA; note = Gene: MAP3K20; note = Location (start to end; relative to TSS): MAP3K20_28_58; note = Orientation (relative to transcription): sense; note = sgRNA Position: 173075900; note = Sequence Name: 56322-704_101_SL_seq_4698
cctaactgcagcggaaacgt

SEQ ID NO: 4699 - DNA, 20 bp, Homo sapiens
  source 1..20: mol_type = genomic DNA; note = Gene: MAP3K20; note = Location (start to end; relative to TSS): MAP3K20_62_92; note = Orientation (relative to transcription): antisense; note = sgRNA Position: 173075914; note = Sequence Name: 56322-704_101_SL_seq_4699
tgggacgacagcggcccgcg

SEQ ID NO: 4700 - DNA, 20 bp, Homo sapiens
  source 1..20: mol_type = genomic DNA; note = Gene: MAP3K21; note = Location (start to end; relative to TSS): MAP3K21_49_79; note = Orientation (relative to transcription): antisense; note = sgRNA Position: 233327779; note = Sequence Name: 56322-704_101_SL_seq_4700
gtcccaccatggtcgtgccc

SEQ ID NO: 4701 - DNA, 20 bp, Homo sapiens
  source 1..20: mol_type = genomic DNA; note = Gene: MAP3K21; note = Location (start to end; relative to TSS): MAP3K21_92_122; note = Orientation (relative to transcription): antisense; note = sgRNA Position: 233327822; note = Sequence Name: 56322-704_101_SL_seq_4701
agccgcctctgctgccgcag

SEQ ID NO: 4702 - DNA, 20 bp, Homo sapiens
  source 1..20: mol_type = genomic DNA; note = Gene: MAP3K21; note = Location (start to end; relative to TSS): MAP3K21_41_71; note = Orientation (relative to transcription): antisense; note = sgRNA Position: 233327771; note = Sequence Name: 56322-704_101_SL_seq_4702
atggtcgtgcccaggccctg

SEQ ID NO: 4703 - DNA, 20 bp, Homo sapiens
  source 1..20: mol_type = genomic DNA; note = Gene: MAP3K21; note = Location (start to end; relative to TSS): MAP3K21_78_108; note = Orientation (relative to transcription): sense; note = sgRNA Position: 233327828; note = Sequence Name: 56322-704_101_SL_seq_4703
ggggaccgctgcggcagcag

SEQ ID NO: 4704 - DNA, 20 bp, Homo sapiens
  source 1..20: mol_type = genomic DNA; note = Gene: MAP3K21; note = Location (start to end; relative to TSS): MAP3K21_38_68; note = Orientation (relative to transcription): sense; note = sgRNA Position: 233327788; note = Sequence Name: 56322-704_101_SL_seq_4704
ggcctgggcacgaccatggt

SEQ ID NO: 4705 - DNA, 20 bp, Homo sapiens
  source 1..20: mol_type = genomic DNA; note = Gene: MAP3K21; note = Location (start to end; relative to TSS): MAP3K21_77_107; note = Orientation (relative to transcription): antisense; note = sgRNA Position: 233327807; note = Sequence Name: 56322-704_101_SL_seq_4705
cgcagcggtccccgaagccg

SEQ ID NO: 4706 - DNA, 20 bp, Homo sapiens
  source 1..20: mol_type = genomic DNA; note = Gene: MAP3K21; note = Location (start to end; relative to TSS): MAP3K21_37_67; note = Orientation (relative to transcription): sense; note = sgRNA Position: 233327787; note = Sequence Name: 56322-704_101_SL_seq_4706
gggcctgggcacgaccatgg

SEQ ID NO: 4707 - DNA, 20 bp, Homo sapiens
  source 1..20: mol_type = genomic DNA; note = Gene: MAP3K21; note = Location (start to end; relative to TSS): MAP3K21_76_106; note = Orientation (relative to transcription): antisense; note = sgRNA Position: 233327806; note = Sequence Name: 56322-704_101_SL_seq_4707
gcagcggtccccgaagccgc

SEQ ID NO: 4708 - DNA, 20 bp, Homo sapiens
  source 1..20: mol_type = genomic DNA; note = Gene: MAP3K21; note = Location (start to end; relative to TSS): MAP3K21_34_64; note = Orientation (relative to transcription): sense; note = sgRNA Position: 233327784; note = Sequence Name: 56322-704_101_SL_seq_4708
gcagggcctgggcacgacca

SEQ ID NO: 4709 - DNA, 20 bp, Homo sapiens
  source 1..20: mol_type = genomic DNA; note = Gene: MAP3K21; note = Location (start to end; relative to TSS): MAP3K21_69_99; note = Orientation (relative to transcription): sense; note = sgRNA Position: 233327819; note = Sequence Name: 56322-704_101_SL_seq_4709
cgcggcttcggggaccgctg

SEQ ID NO: 4710 - DNA, 20 bp, Homo sapiens
  source 1..20: mol_type = genomic DNA; note = Gene: MAP3K3; note = Location (start to end; relative to TSS): MAP3K3_35_65; note = Orientation (relative to transcription): antisense; note = sgRNA Position: 63622458; note = Sequence Name: 56322-704_101_SL_seq_4710
agacccgcagtctctccgtc

SEQ ID NO: 4711 - DNA, 20 bp, Homo sapiens
  source 1..20: mol_type = genomic DNA; note = Gene: MAP3K3; note = Location (start to end; relative to TSS): MAP3K3_93_123; note = Orientation (relative to transcription): antisense; note = sgRNA Position: 63622516; note = Sequence Name: 56322-704_101_SL_seq_4711
ggctcggcccagcccggcct

SEQ ID NO: 4712 - DNA, 20 bp, Homo sapiens
  source 1..20: mol_type = genomic DNA; note = Gene: MAP3K3; note = Location (start to end; relative to TSS): MAP3K3_22_52; note = Orientation (relative to transcription): sense; note = sgRNA Position: 63622465; note = Sequence Name: 56322-704_101_SL_seq_4712
gtggccggacggagagactg

SEQ ID NO: 4713 - DNA, 20 bp, Homo sapiens
  source 1..20: mol_type = genomic DNA; note = Gene: MAP3K3; note = Location (start to end; relative to TSS): MAP3K3_90_120; note = Orientation (relative to transcription): antisense; note = sgRNA Position: 63622513; note = Sequence Name: 56322-704_101_SL_seq_4713
tcggcccagcccggcctcgg

SEQ ID NO: 4714 - DNA, 20 bp, Homo sapiens
  source 1..20: mol_type = genomic DNA; note = Gene: MAP3K3; note = Location (start to end; relative to TSS): MAP3K3_23_53; note = Orientation (relative to transcription): sense; note = sgRNA Position: 63622466; note = Sequence Name: 56322-704_101_SL_seq_4714
tggccggacggagagactgc

SEQ ID NO: 4715 - DNA, 20 bp, Homo sapiens
  source 1..20: mol_type = genomic DNA; note = Gene: MAP3K3; note = Location (start to end; relative to TSS): MAP3K3_88_118; note = Orientation (relative to transcription): sense; note = sgRNA Position: 63622531; note = Sequence Name: 56322-704_101_SL_seq_4715
ggccgggctgggccgagccc

SEQ ID NO: 4716 - DNA, 20 bp, Homo sapiens
  source 1..20: mol_type = genomic DNA; note = Gene: MAP3K3; note = Location (start to end; relative to TSS): MAP3K3_30_60; note = Orientation (relative to transcription): sense; note = sgRNA Position: 63622473; note = Sequence Name: 56322-704_101_SL_seq_4716
acggagagactgcgggtctg

SEQ ID NO: 4717 - DNA, 20 bp, Homo sapiens
  source 1..20: mol_type = genomic DNA; note = Gene: MAP3K3; note = Location (start to end; relative to TSS): MAP3K3_72_102; note = Orientation (relative to transcription): sense; note = sgRNA Position: 63622515; note = Sequence Name: 56322-704_101_SL_seq_4717
cgagcggcgccgccgaggcc

SEQ ID NO: 4718 - DNA, 20 bp, Homo sapiens
  source 1..20: mol_type = genomic DNA; note = Gene: MAP3K3; note = Location (start to end; relative to TSS): MAP3K3_31_61; note = Orientation (relative to transcription): sense; note = sgRNA Position: 63622474; note = Sequence Name: 56322-704_101_SL_seq_4718
cggagagactgcgggtctga

SEQ ID NO: 4719 - DNA, 20 bp, Homo sapiens
  source 1..20: mol_type = genomic DNA; note = Gene: MAP3K3; note = Location (start to end; relative to TSS): MAP3K3_67_97; note = Orientation (relative to transcription): sense; note = sgRNA Position: 63622510; note = Sequence Name: 56322-704_101_SL_seq_4719
cgggccgagcggcgccgccg

SEQ ID NO: 4720 - DNA, 20 bp, Homo sapiens
  source 1..20: mol_type = genomic DNA; note = Gene: MAP3K4; note = Location (start to end; relative to TSS): MAP3K4_37_67; note = Orientation (relative to transcription): sense; note = sgRNA Position: 160991832; note = Sequence Name: 56322-704_101_SL_seq_4720
ctgcggcggggtagaggcgg

SEQ ID NO: 4721 - DNA, 20 bp, Homo sapiens
  source 1..20: mol_type = genomic DNA; note = Gene: MAP3K4; note = Location (start to end; relative to TSS): MAP3K4_85_115; note = Orientation (relative to transcription): antisense; note = sgRNA Position: 160991860; note = Sequence Name: 56322-704_101_SL_seq_4721
ggcaccggagccccgaagtg

SEQ ID NO: 4722 - DNA, 20 bp, Homo sapiens
  source 1..20: mol_type = genomic DNA; note = Gene: MAP3K4; note = Location (start to end; relative to TSS): MAP3K4_19_49; note = Orientation (relative to transcription): antisense; note = sgRNA Position: 160991794; note = Sequence Name: 56322-704_101_SL_seq_4722
cgtgcgcgccgcggccatct

SEQ ID NO: 4723 - DNA, 20 bp, Homo sapiens
  source 1..20: mol_type = genomic DNA; note = Gene: MAP3K4; note = Location (start to end; relative to TSS): MAP3K4_84_114; note = Orientation (relative to transcription): antisense; note = sgRNA Position: 160991859; note = Sequence Name: 56322-704_101_SL_seq_4723
gcaccggagccccgaagtgc

SEQ ID NO: 4724 - DNA, 20 bp, Homo sapiens
  source 1..20: mol_type = genomic DNA; note = Gene: MAP3K4; note = Location (start to end; relative to TSS): MAP3K4_28_58; note = Orientation (relative to transcription): antisense; note = sgRNA Position: 160991803; note = Sequence Name: 56322-704_101_SL_seq_4724
cgcaggagccgtgcgcgccg

SEQ ID NO: 4725 - DNA, 20 bp, Homo sapiens
  source 1..20: mol_type = genomic DNA; note = Gene: MAP3K4; note = Location (start to end; relative to TSS): MAP3K4_72_102; note = Orientation (relative to transcription): sense; note = sgRNA Position: 160991867; note = Sequence Name: 56322-704_101_SL_seq_4725
actcccgcacttcggggctc

SEQ ID NO: 4726 - DNA, 20 bp, Homo sapiens
  source 1..20: mol_type = genomic DNA; note = Gene: MAP3K4; note = Location (start to end; relative to TSS): MAP3K4_31_61; note = Orientation (relative to transcription): sense; note = sgRNA Position: 160991826; note = Sequence Name: 56322-704_101_SL_seq_4726
cggctcctgcggcggggtag

SEQ ID NO: 4727 - DNA, 20 bp, Homo sapiens
  source 1..20: mol_type = genomic DNA; note = Gene: MAP3K4; note = Location (start to end; relative to TSS): MAP3K4_66_96; note = Orientation (relative to transcription): sense; note = sgRNA Position: 160991861; note = Sequence Name: 56322-704_101_SL_seq_4727
cgagtcactcccgcacttcg

SEQ ID NO: 4728 - DNA, 20 bp, Homo sapiens
  source 1..20: mol_type = genomic DNA; note = Gene: MAP3K4; note = Location (start to end; relative to TSS): MAP3K4_34_64; note = Orientation (relative to transcription): sense; note = sgRNA Position: 160991829; note = Sequence Name: 56322-704_101_SL_seq_4728
ctcctgcggcggggtagagg

SEQ ID NO: 4729 - DNA, 20 bp, Homo sapiens
  source 1..20: mol_type = genomic DNA; note = Gene: MAP3K4; note = Location (start to end; relative to TSS): MAP3K4_64_94; note = Orientation (relative to transcription): sense; note = sgRNA Position: 160991859; note = Sequence Name: 56322-704_101_SL_seq_4729
gtcgagtcactcccgcactt

SEQ ID NO: 4730 - DNA, 20 bp, Homo sapiens
  source 1..20: mol_type = genomic DNA; note = Gene: MAP3K5; note = Location (start to end; relative to TSS): MAP3K5_45_75; note = Orientation (relative to transcription): antisense; note = sgRNA Position: 136792428; note = Sequence Name: 56322-704_101_SL_seq_4730
ggtggggaagccgggtgagc

SEQ ID NO: 4731 - DNA, 20 bp, Homo sapiens
  source 1..20: mol_type = genomic DNA; note = Gene: MAP3K5; note = Location (start to end; relative to TSS): MAP3K5_94_124; note = Orientation (relative to transcription): sense; note = sgRNA Position: 136792359; note = Sequence Name: 56322-704_101_SL_seq_4731
cggccacggaggcgccgagg

SEQ ID NO: 4732 - DNA, 20 bp, Homo sapiens
  source 1..20: mol_type = genomic DNA; note = Gene: MAP3K5; note = Location (start to end; relative to TSS): MAP3K5_41_71; note = Orientation (relative to transcription): antisense; note = sgRNA Position: 136792432; note = Sequence Name: 56322-704_101_SL_seq_4732
gggaagccgggtgagcggga

SEQ ID NO: 4733 - DNA, 20 bp, Homo sapiens
  source 1..20: mol_type = genomic DNA; note = Gene: MAP3K5; note = Location (start to end; relative to TSS): MAP3K5_91_121; note = Orientation (relative to transcription): sense; note = sgRNA Position: 136792362; note = Sequence Name: 56322-704_101_SL_seq_4733
gcgcggccacggaggcgccg

SEQ ID NO: 4734 - DNA, 20 bp, Homo sapiens
  source 1..20: mol_type = genomic DNA; note = Gene: MAP3K5; note = Location (start to end; relative to TSS): MAP3K5_40_70; note = Orientation (relative to transcription): antisense; note = sgRNA Position: 136792433; note = Sequence Name: 56322-704_101_SL_seq_4734
ggaagccgggtgagcgggaa

SEQ ID NO: 4735 - DNA, 20 bp, Homo sapiens
  source 1..20: mol_type = genomic DNA; note = Gene: MAP3K5; note = Location (start to end; relative to TSS): MAP3K5_83_113; note = Orientation (relative to transcription): sense; note = sgRNA Position: 136792370; note = Sequence Name: 56322-704_101_SL_seq_4735
ggcgagcggcgcggccacgg

SEQ ID NO: 4736 - DNA, 20 bp, Homo sapiens
  source 1..20: mol_type = genomic DNA; note = Gene: MAP3K5; note = Location (start to end; relative to TSS): MAP3K5_36_66; note = Orientation (relative to transcription): antisense; note = sgRNA Position: 136792437; note = Sequence Name: 56322-704_101_SL_seq_4736
gccgggtgagcgggaaggga

SEQ ID NO: 4737 - DNA, 20 bp, Homo sapiens
  source 1..20: mol_type = genomic DNA; note = Gene: MAP3K5; note = Location (start to end; relative to TSS): MAP3K5_80_110; note = Orientation (relative to transcription): sense; note = sgRNA Position: 136792373; note = Sequence Name: 56322-704_101_SL_seq_4737
gagggcgagcggcgcggcca

SEQ ID NO: 4738 - DNA, 20 bp, Homo sapiens
  source 1..20: mol_type = genomic DNA; note = Gene: MAP3K5; note = Location (start to end; relative to TSS): MAP3K5_26_56; note = Orientation (relative to transcription): sense; note = sgRNA Position: 136792427; note = Sequence Name: 56322-704_101_SL_seq_4738
tccgtcccttcccgctcacc

SEQ ID NO: 4739 - DNA, 20 bp, Homo sapiens
  source 1..20: mol_type = genomic DNA; note = Gene: MAP3K5; note = Location (start to end; relative to TSS): MAP3K5_61_91; note = Orientation (relative to transcription): sense; note = sgRNA Position: 136792392; note = Sequence Name: 56322-704_101_SL_seq_4739
ttgtactctaaactctgcag

SEQ ID NO: 4740 - DNA, 20 bp, Homo sapiens
  source 1..20: mol_type = genomic DNA; note = Gene: MAP3K6; note = Location (start to end; relative to TSS): MAP3K6_34_64; note = Orientation (relative to transcription): antisense; note = sgRNA Position: 27366923; note = Sequence Name: 56322-704_101_SL_seq_4740
ccgccacctggacttctcaa

SEQ ID NO: 4741 - DNA, 20 bp, Homo sapiens
  source 1..20: mol_type = genomic DNA; note = Gene: MAP3K6; note = Location (start to end; relative to TSS): MAP3K6_74_104; note = Orientation (relative to transcription): antisense; note = sgRNA Position: 27366883; note = Sequence Name: 56322-704_101_SL_seq_4741
agagccacttgggggatcct

SEQ ID NO: 4742 - DNA, 20 bp, Homo sapiens
  source 1..20: mol_type = genomic DNA; note = Gene: MAP3K6; note = Location (start to end; relative to TSS): MAP3K6_26_56; note = Orientation (relative to transcription): sense; note = sgRNA Position: 27366911; note = Sequence Name: 56322-704_101_SL_seq_4742
ccttgagaagtccaggtggc

SEQ ID NO: 4743 - DNA, 20 bp, Homo sapiens
  source 1..20: mol_type = genomic DNA; note = Gene: MAP3K6; note = Location (start to end; relative to TSS): MAP3K6_68_98; note = Orientation (relative to transcription): antisense; note = sgRNA Position: 27366889; note = Sequence Name: 56322-704_101_SL_seq_4743
acttgggggatcctgggaat

SEQ ID NO: 4744 - DNA, 20 bp, Homo sapiens
  source 1..20: mol_type = genomic DNA; note = Gene: MAP3K6; note = Location (start to end; relative to TSS): MAP3K6_25_55; note = Orientation (relative to transcription): sense; note = sgRNA Position: 27366912; note = Sequence Name: 56322-704_101_SL_seq_4744
cccttgagaagtccaggtgg

SEQ ID NO: 4745 - DNA, 20 bp, Homo sapiens
  source 1..20: mol_type = genomic DNA; note = Gene: MAP3K6; note = Location (start to end; relative to TSS): MAP3K6_63_93; note = Orientation (relative to transcription): antisense; note = sgRNA Position: 27366894; note = Sequence Name: 56322-704_101_SL_seq_4745
ggggatcctgggaatcggct

SEQ ID NO: 4746 - DNA, 20 bp, Homo sapiens
  source 1..20: mol_type = genomic DNA; note = Gene: MAP3K6; note = Location (start to end; relative to TSS): MAP3K6_22_52; note = Orientation (relative to transcription): sense; note = sgRNA Position: 27366915; note = Sequence Name: 56322-704_101_SL_seq_4746
gctcccttgagaagtccagg

SEQ ID NO: 4747 - DNA, 20 bp, Homo sapiens
  source 1..20: mol_type = genomic DNA; note = Gene: MAP3K6; note = Location (start to end; relative to TSS): MAP3K6_61_91; note = Orientation (relative to transcription): sense; note = sgRNA Position: 27366876; note = Sequence Name: 56322-704_101_SL_seq_4747
gattcccaggatcccccaag

SEQ ID NO: 4748 - DNA, 20 bp, Homo sapiens
  source 1..20: mol_type = genomic DNA; note = Gene: MAP3K6; note = Location (start to end; relative to TSS): MAP3K6_19_49; note = Orientation (relative to transcription): sense; note = sgRNA Position: 27366918; note = Sequence Name: 56322-704_101_SL_seq_4748
ggcgctcccttgagaagtcc

SEQ ID NO: 4749 - DNA, 20 bp, Homo sapiens
  source 1..20: mol_type = genomic DNA; note = Gene: MAP3K6; note = Location (start to end; relative to TSS): MAP3K6_60_90; note = Orientation (relative to transcription): antisense; note = sgRNA Position: 27366897; note = Sequence Name: 56322-704_101_SL_seq_4749
gatcctgggaatcggctcgg

SEQ ID NO: 4750 - DNA, 20 bp, Homo sapiens
  source 1..20: mol_type = genomic DNA; note = Gene: MAP3K7; note = Location (start to end; relative to TSS): MAP3K7_43_73; note = Orientation (relative to transcription): sense; note = sgRNA Position: 90587005; note = Sequence Name: 56322-704_101_SL_seq_4750
tacccccgccacggatcgcc

SEQ ID NO: 4751 - DNA, 20 bp, Homo sapiens
  source 1..20: mol_type = genomic DNA; note = Gene: MAP3K7; note = Location (start to end; relative to TSS): MAP3K7_73_103; note = Orientation (relative to transcription): sense; note = sgRNA Position: 90586975; note = Sequence Name: 56322-704_101_SL_seq_4751
actgcgcggctccaggctga

SEQ ID NO: 4752 - DNA, 20 bp, Homo sapiens
  source 1..20: mol_type = genomic DNA; note = Gene: MAP3K7; note = Location (start to end; relative to TSS): MAP3K7_42_72; note = Orientation (relative to transcription): antisense; note = sgRNA Position: 90587026; note = Sequence Name: 56322-704_101_SL_seq_4752
cgtggcgggggtagaggcag

SEQ ID NO: 4753 - DNA, 20 bp, Homo sapiens
  source 1..20: mol_type = genomic DNA; note = Gene: MAP3K7; note = Location (start to end; relative to TSS): MAP3K7_72_102; note = Orientation (relative to transcription): sense; note = sgRNA Position: 90586976; note = Sequence Name: 56322-704_101_SL_seq_4753
gactgcgcggctccaggctg

SEQ ID NO: 4754 - DNA, 20 bp, Homo sapiens
  source 1..20: mol_type = genomic DNA; note = Gene: MAP3K7; note = Location (start to end; relative to TSS): MAP3K7_34_64; note = Orientation (relative to transcription): sense; note = sgRNA Position: 90587014; note = Sequence Name: 56322-704_101_SL_seq_4754
cgctgcctctacccccgcca

SEQ ID NO: 4755 - DNA, 20 bp, Homo sapiens
  source 1..20: mol_type = genomic DNA; note = Gene: MAP3K7; note = Location (start to end; relative to TSS): MAP3K7_66_96; note = Orientation (relative to transcription): sense; note = sgRNA Position: 90586982; note = Sequence Name: 56322-704_101_SL_seq_4755
tagtaggactgcgcggctcc

SEQ ID NO: 4756 - DNA, 20 bp, Homo sapiens
  source 1..20: mol_type = genomic DNA; note = Gene: MAP3K7; note = Location (start to end; relative to TSS): MAP3K7_26_56; note = Orientation (relative to transcription): antisense; note = sgRNA Position: 90587042; note = Sequence Name: 56322-704_101_SL_seq_4756
gcagcggccacagccgtgtc

SEQ ID NO: 4757 - DNA, 20 bp, Homo sapiens
  source 1..20: mol_type = genomic DNA; note = Gene: MAP3K7; note = Location (start to end; relative to TSS): MAP3K7_56_86; note = Orientation (relative to transcription): antisense; note = sgRNA Position: 90587012; note = Sequence Name: 56322-704_101_SL_seq_4757
actacccggcgatccgtggc

SEQ ID NO: 4758 - DNA, 20 bp, Homo sapiens
  source 1..20: mol_type = genomic DNA; note = Gene: MAP3K7; note = Location (start to end; relative to TSS): MAP3K7_20_50; note = Orientation (relative to transcription): antisense; note = sgRNA Position: 90587048; note = Sequence Name: 56322-704_101_SL_seq_4758
gccacagccgtgtccggctc

SEQ ID NO: 4759 - DNA, 20 bp, Homo sapiens
  source 1..20: mol_type = genomic DNA; note = Gene: MAP3K7; note = Location (start to end; relative to TSS): MAP3K7_50_80; note = Orientation (relative to transcription): sense; note = sgRNA Position: 90586998; note = Sequence Name: 56322-704_101_SL_seq_4759
gccacggatcgccgggtagt

SEQ ID NO: 4760 - DNA, 20 bp, Homo sapiens
  source 1..20: mol_type = genomic DNA; note = Gene: MAP3K8; note = Location (start to end; relative to TSS): MAP3K8_49_79; note = Orientation (relative to transcription): antisense; note = sgRNA Position: 30434239; note = Sequence Name: 56322-704_101_SL_seq_4760
cagcggcagaagcaggaacc

SEQ ID NO: 4761 - DNA, 20 bp, Homo sapiens
  source 1..20: mol_type = genomic DNA; note = Gene: MAP3K8; note = Location (start to end; relative to TSS): MAP3K8_85_115; note = Orientation (relative to transcription): antisense; note = sgRNA Position: 30434275; note = Sequence Name: 56322-704_101_SL_seq_4761
agccgagcacgccgggccac

SEQ ID NO: 4762 - DNA, 20 bp, Homo sapiens
  source 1..20: mol_type = genomic DNA; note = Gene: MAP3K8; note = Location (start to end; relative to TSS): MAP3K8_50_80; note = Orientation (relative to transcription): sense; note = sgRNA Position: 30434260; note = Sequence Name: 56322-704_101_SL_seq_4762
gcttctgccgctgccgccgc

SEQ ID NO: 4763 - DNA, 20 bp, Homo sapiens
  source 1..20: mol_type = genomic DNA; note = Gene: MAP3K8; note = Location (start to end; relative to TSS): MAP3K8_84_114; note = Orientation (relative to transcription): antisense; note = sgRNA Position: 30434274; note = Sequence Name: 56322-704_101_SL_seq_4763
gccgagcacgccgggccact

SEQ ID NO: 4764 - DNA, 20 bp, Homo sapiens
  source 1..20: mol_type = genomic DNA; note = Gene: MAP3K8; note = Location (start to end; relative to TSS): MAP3K8_48_78; note = Orientation (relative to transcription): antisense; note = sgRNA Position: 30434238; note = Sequence Name: 56322-704_101_SL_seq_4764
agcggcagaagcaggaacca

SEQ ID NO: 4765 - DNA, 20 bp, Homo sapiens
  source 1..20: mol_type = genomic DNA; note = Gene: MAP3K8; note = Location (start to end; relative to TSS): MAP3K8_78_108; note = Orientation (relative to transcription): antisense; note = sgRNA Position: 30434268; note = Sequence Name: 56322-704_101_SL_seq_4765
cacgccgggccactgggatc

SEQ ID NO: 4766 - DNA, 20 bp, Homo sapiens
  source 1..20: mol_type = genomic DNA; note = Gene: MAP3K8; note = Location (start to end; relative to TSS): MAP3K8_42_72; note = Orientation (relative to transcription): antisense; note = sgRNA Position: 30434232; note = Sequence Name: 56322-704_101_SL_seq_4766
agaagcaggaaccagggcgc

SEQ ID NO: 4767 - DNA, 20 bp, Homo sapiens
  source 1..20: mol_type = genomic DNA; note = Gene: MAP3K8; note = Location (start to end; relative to TSS): MAP3K8_72_102; note = Orientation (relative to transcription): antisense; note = sgRNA Position: 30434262; note = Sequence Name: 56322-704_101_SL_seq_4767
gggccactgggatccggcgg

SEQ ID NO: 4768 - DNA, 20 bp, Homo sapiens
  source 1..20: mol_type = genomic DNA; note = Gene: MAP3K8; note = Location (start to end; relative to TSS): MAP3K8_22_52; note = Orientation (relative to transcription): sense; note = sgRNA Position: 30434232; note = Sequence Name: 56322-704_101_SL_seq_4768
cgctctggggtccggcgccc

SEQ ID NO: 4769 - DNA, 20 bp, Homo sapiens
  source 1..20: mol_type = genomic DNA; note = Gene: MAP3K8; note = Location (start to end; relative to TSS): MAP3K8_56_86; note = Orientation (relative to transcription): antisense; note = sgRNA Position: 30434246; note = Sequence Name: 56322-704_101_SL_seq_4769
gcggcggcagcggcagaagc

SEQ ID NO: 4770 - DNA, 20 bp, Homo sapiens
  source 1..20: mol_type = genomic DNA; note = Gene: MAP3K9; note = Location (start to end; relative to TSS): MAP3K9_40_70; note = Orientation (relative to transcription): sense; note = sgRNA Position: 70809449; note = Sequence Name: 56322-704_101_SL_seq_4770
cgagcaggtaccggcggcag

SEQ ID NO: 4771 - DNA, 20 bp, Homo sapiens
  source 1..20: mol_type = genomic DNA; note = Gene: MAP3K9; note = Location (start to end; relative to TSS): MAP3K9_79_109; note = Orientation (relative to transcription): sense; note = sgRNA Position: 70809410; note = Sequence Name: 56322-704_101_SL_seq_4771
gggggggcgagcgggcaggc

SEQ ID NO: 4772 - DNA, 20 bp, Homo sapiens
  source 1..20: mol_type = genomic DNA; note = Gene: MAP3K9; note = Location (start to end; relative to TSS): MAP3K9_34_64; note = Orientation (relative to transcription): sense; note = sgRNA Position: 70809455; note = Sequence Name: 56322-704_101_SL_seq_4772
gctgcgcgagcaggtaccgg

SEQ ID NO: 4773 - DNA, 20 bp, Homo sapiens
  source 1..20: mol_type = genomic DNA; note = Gene: MAP3K9; note = Location (start to end; relative to TSS): MAP3K9_75_105; note = Orientation (relative to transcription): sense; note = sgRNA Position: 70809414; note = Sequence Name: 56322-704_101_SL_seq_4773
ccccgggggggcgagcgggc

SEQ ID NO: 4774 - DNA, 20 bp, Homo sapiens
  source 1..20: mol_type = genomic DNA; note = Gene: MAP3K9; note = Location (start to end; relative to TSS): MAP3K9_31_61; note = Orientation (relative to transcription): sense; note = sgRNA Position: 70809458; note = Sequence Name: 56322-704_101_SL_seq_4774
ccggctgcgcgagcaggtac

SEQ ID NO: 4775 - DNA, 20 bp, Homo sapiens
  source 1..20: mol_type = genomic DNA; note = Gene: MAP3K9; note = Location (start to end; relative to TSS): MAP3K9_61_91; note = Orientation (relative to transcription): sense; note = sgRNA Position: 70809428; note = Sequence Name: 56322-704_101_SL_seq_4775
ggtgacgaggccgcccccgg

SEQ ID NO: 4776 - DNA, 20 bp, Homo sapiens
  source 1..20: mol_type = genomic DNA; note = Gene: MAP3K9; note = Location (start to end; relative to TSS): MAP3K9_25_55; note = Orientation (relative to transcription): sense; note = sgRNA Position: 70809464; note = Sequence Name: 56322-704_101_SL_seq_4776
cgggcaccggctgcgcgagc

SEQ ID NO: 4777 - DNA, 20 bp, Homo sapiens
  source 1..20: mol_type = genomic DNA; note = Gene: MAP3K9; note = Location (start to end; relative to TSS): MAP3K9_60_90; note = Orientation (relative to transcription): sense; note = sgRNA Position: 70809429; note = Sequence Name: 56322-704_101_SL_seq_4777
aggtgacgaggccgcccccg

SEQ ID NO: 4778 - DNA, 20 bp, Homo sapiens
  source 1..20: mol_type = genomic DNA; note = Gene: MAP3K9; note = Location (start to end; relative to TSS): MAP3K9_20_50; note = Orientation (relative to transcription): antisense; note = sgRNA Position: 70809489; note = Sequence Name: 56322-704_101_SL_seq_4778
cggtgcccgccgctgccagc

SEQ ID NO: 4779 - DNA, 20 bp, Homo sapiens
  source 1..20: mol_type = genomic DNA; note = Gene: MAP3K9; note = Location (start to end; relative to TSS): MAP3K9_59_89; note = Orientation (relative to transcription): antisense; note = sgRNA Position: 70809450; note = Sequence Name: 56322-704_101_SL_seq_4779
ggcctcgtcacctctgccgc

SEQ ID NO: 4780 - DNA, 20 bp, Homo sapiens
  source 1..20: mol_type = genomic DNA; note = Gene: MAP4K1; note = Location (start to end; relative to TSS): MAP4K1_40_70; note = Orientation (relative to transcription): sense; note = sgRNA Position: 38617889; note = Sequence Name: 56322-704_101_SL_seq_4780
gcccccagggatggacgtcg

SEQ ID NO: 4781 - DNA, 20 bp, Homo sapiens
  source 1..20: mol_type = genomic DNA; note = Gene: MAP4K1; note = Location (start to end; relative to TSS): MAP4K1_74_104; note = Orientation (relative to transcription): antisense; note = sgRNA Position: 38617875; note = Sequence Name: 56322-704_101_SL_seq_4781
gggtctctattgaaaatgtc

SEQ ID NO: 4782 - DNA, 20 bp, Homo sapiens
  source 1..20: mol_type = genomic DNA; note = Gene: MAP4K1; note = Location (start to end; relative to TSS): MAP4K1_25_55; note = Orientation (relative to transcription): antisense; note = sgRNA Position: 38617924; note = Sequence Name: 56322-704_101_SL_seq_4782
tgagctgggcctgcgcccag

SEQ ID NO: 4783 - DNA, 20 bp, Homo sapiens
  source 1..20: mol_type = genomic DNA; note = Gene: MAP4K1; note = Location (start to end; relative to TSS): MAP4K1_73_103; note = Orientation (relative to transcription): antisense; note = sgRNA Position: 38617876; note = Sequence Name: 56322-704_101_SL_seq_4783
ggtctctattgaaaatgtca

SEQ ID NO: 4784 - DNA, 20 bp, Homo sapiens
  source 1..20: mol_type = genomic DNA; note = Gene: MAP4K1; note = Location (start to end; relative to TSS): MAP4K1_31_61; note = Orientation (relative to transcription): sense; note = sgRNA Position: 38617898; note = Sequence Name: 56322-704_101_SL_seq_4784
ccagctcaggcccccaggga

SEQ ID NO: 4785 - DNA, 20 bp, Homo sapiens
  source 1..20: mol_type = genomic DNA; note = Gene: MAP4K1; note = Location (start to end; relative to TSS): MAP4K1_70_100; note = Orientation (relative to transcription): sense; note = sgRNA Position: 38617859; note = Sequence Name: 56322-704_101_SL_seq_4785
cattttcaatagagaccccc

SEQ ID NO: 4786 - DNA, 20 bp, Homo sapiens
  source 1..20: mol_type = genomic DNA; note = Gene: MAP4K1; note = Location (start to end; relative to TSS): MAP4K1_39_69; note = Orientation (relative to transcription): antisense; note = sgRNA Position: 38617910; note = Sequence Name: 56322-704_101_SL_seq_4786
catccctgggggcctgagct

SEQ ID NO: 4787 - DNA, 20 bp, Homo sapiens
  source 1..20: mol_type = genomic DNA; note = Gene: MAP4K1; note = Location (start to end; relative to TSS): MAP4K1_69_99; note = Orientation (relative to transcription): sense; note = sgRNA Position: 38617860; note = Sequence Name: 56322-704_101_SL_seq_4787
acattttcaatagagacccc

SEQ ID NO: 4788 - DNA, 20 bp, Homo sapiens
  source 1..20: mol_type = genomic DNA; note = Gene: MAP4K1; note = Location (start to end; relative to TSS): MAP4K1_18_48; note = Orientation (relative to transcription): sense; note = sgRNA Position: 38617911; note = Sequence Name: 56322-704_101_SL_seq_4788
cctgggcgcaggcccagctc

SEQ ID NO: 4789 - DNA, 20 bp, Homo sapiens
  source 1..20: mol_type = genomic DNA; note = Gene: MAP4K1; note = Location (start to end; relative to TSS): MAP4K1_50_80; note = Orientation (relative to transcription): antisense; note = sgRNA Position: 38617899; note = Sequence Name: 56322-704_101_SL_seq_4789
tccacgacgtccatccctgg

SEQ ID NO: 4790 - DNA, 20 bp, Homo sapiens
  source 1..20: mol_type = genomic DNA; note = Gene: MAP4K2; note = Location (start to end; relative to TSS): MAP4K2_49_79; note = Orientation (relative to transcription): sense; note = sgRNA Position: 64803141; note = Sequence Name: 56322-704_101_SL_seq_4790
gccgggccatggcgctgctg

SEQ ID NO: 4791 - DNA, 20 bp, Homo sapiens
  source 1..20: mol_type = genomic DNA; note = Gene: MAP4K2; note = Location (start to end; relative to TSS): MAP4K2_101_131; note = Orientation (relative to transcription): sense; note = sgRNA Position: 64803089; note = Sequence Name: 56322-704_101_SL_seq_4791
cttcgagctgctgcagcgcg

SEQ ID NO: 4792 - DNA, 20 bp, Homo sapiens
  source 1..20: mol_type = genomic DNA; note = Gene: MAP4K2; note = Location (start to end; relative to TSS): MAP4K2_50_80; note = Orientation (relative to transcription): sense; note = sgRNA Position: 64803140; note = Sequence Name: 56322-704_101_SL_seq_4792
ccgggccatggcgctgctgc

SEQ ID NO: 4793 - DNA, 20 bp, Homo sapiens
  source 1..20: mol_type = genomic DNA; note = Gene: MAP4K2; note = Location (start to end; relative to TSS): MAP4K2_99_129; note = Orientation (relative to transcription): antisense; note = sgRNA Position: 64803111; note = Sequence Name: 56322-704_101_SL_seq_4793
agcagctcgaagcggtcccg

SEQ ID NO: 4794 - DNA, 20 bp, Homo sapiens
  source 1..20: mol_type = genomic DNA; note = Gene: MAP4K2; note = Location (start to end; relative to TSS): MAP4K2_52_82; note = Orientation (relative to transcription): antisense; note = sgRNA Position: 64803158; note = Sequence Name: 56322-704_101_SL_seq_4794
cagcgccatggcccggcgcc

SEQ ID NO: 4795 - DNA, 20 bp, Homo sapiens
  source 1..20: mol_type = genomic DNA; note = Gene: MAP4K2; note = Location (start to end; relative to TSS): MAP4K2_98_128; note = Orientation (relative to transcription): antisense; note = sgRNA Position: 64803112; note = Sequence Name: 56322-704_101_SL_seq_4795
gcagctcgaagcggtcccgc

SEQ ID NO: 4796 - DNA, 20 bp, Homo sapiens
  source 1..20: mol_type = genomic DNA; note = Gene: MAP4K2; note = Location (start to end; relative to TSS): MAP4K2_20_50; note = Orientation (relative to transcription): antisense; note = sgRNA Position: 64803190; note = Sequence Name: 56322-704_101_SL_seq_4796
aggcgggcgggcgcgagctg

SEQ ID NO: 4797 - DNA, 20 bp, Homo sapiens
  source 1..20: mol_type = genomic DNA; note = Gene: MAP4K2; note = Location (start to end; relative to TSS): MAP4K2_50_80; note = Orientation (relative to transcription): sense; note = sgRNA Position: 64803140; note = Sequence Name: 56322-704_101_SL_seq_4797
ccgggccatggcgctgctgc

SEQ ID NO: 4798 - DNA, 20 bp, Homo sapiens
  source 1..20: mol_type = genomic DNA; note = Gene: MAP4K2; note = Location (start to end; relative to TSS): MAP4K2_9_39; note = Orientation (relative to transcription): antisense; note = sgRNA Position: 64803201; note = Sequence Name: 56322-704_101_SL_seq_4798
cgcgagctgcggagccggcg

SEQ ID NO: 4799 - DNA, 20 bp, Homo sapiens
  source 1..20: mol_type = genomic DNA; note = Gene: MAP4K2; note = Location (start to end; relative to TSS): MAP4K2_49_79; note = Orientation (relative to transcription): sense; note = sgRNA Position: 64803141; note = Sequence Name: 56322-704_101_SL_seq_4799
gccgggccatggcgctgctg

SEQ ID NO: 4800 - DNA, 20 bp, Homo sapiens
  source 1..20: mol_type = genomic DNA; note = Gene: MAP4K3; note = Location (start to end; relative to TSS): MAP4K3_30_60; note = Orientation (relative to transcription): sense; note = sgRNA Position: 39437231; note = Sequence Name: 56322-704_101_SL_seq_4800
cgagggttctcctctccttg

SEQ ID NO: 4801 - DNA, 20 bp, Homo sapiens
  source 1..20: mol_type = genomic DNA; note = Gene: MAP4K3; note = Location (start to end; relative to TSS): MAP4K3_81_111; note = Orientation (relative to transcription): sense; note = sgRNA Position: 39437180; note = Sequence Name: 56322-704_101_SL_seq_4801
ccgcggggggcggggacgat

SEQ ID NO: 4802 - DNA, 20 bp, Homo sapiens
  source 1..20: mol_type = genomic DNA; note = Gene: MAP4K3; note = Location (start to end; relative to TSS): MAP4K3_31_61; note = Orientation (relative to transcription): sense; note = sgRNA Position: 39437230; note = Sequence Name: 56322-704_101_SL_seq_4802
gagggttctcctctccttgt

SEQ ID NO: 4803 - DNA, 20 bp, Homo sapiens
  source 1..20: mol_type = genomic DNA; note = Gene: MAP4K3; note = Location (start to end; relative to TSS): MAP4K3_68_98; note = Orientation (relative to transcription): antisense; note = sgRNA Position: 39437213; note = Sequence Name: 56322-704_101_SL_seq_4803
gcccgccgccgcgccgaacc

SEQ ID NO: 4804 - DNA, 20 bp, Homo sapiens
  source 1..20: mol_type = genomic DNA; note = Gene: MAP4K3; note = Location (start to end; relative to TSS): MAP4K3_22_52; note = Orientation (relative to transcription): antisense; note = sgRNA Position: 39437259; note = Sequence Name: 56322-704_101_SL_seq_4804
ccctcgcagcccctcgctcg

SEQ ID NO: 4805 - DNA, 20 bp, Homo sapiens
  source 1..20: mol_type = genomic DNA; note = Gene: MAP4K3; note = Location (start to end; relative to TSS): MAP4K3_58_88; note = Orientation (relative to transcription): sense; note = sgRNA Position: 39437203; note = Sequence Name: 56322-704_101_SL_seq_4805
accaggttcggcgcggcggc

SEQ ID NO: 4806 - DNA, 20 bp, Homo sapiens
  source 1..20: mol_type = genomic DNA; note = Gene: MAP4K3; note = Location (start to end; relative to TSS): MAP4K3_23_53; note = Orientation (relative to transcription): antisense; note = sgRNA Position: 39437258; note = Sequence Name: 56322-704_101_SL_seq_4806
accctcgcagcccctcgctc

SEQ ID NO: 4807 - DNA, 20 bp, Homo sapiens
  source 1..20: mol_type = genomic DNA; note = Gene: MAP4K3; note = Location (start to end; relative to TSS): MAP4K3_57_87; note = Orientation (relative to transcription): sense; note = sgRNA Position: 39437204; note = Sequence Name: 56322-704_101_SL_seq_4807
gaccaggttcggcgcggcgg

SEQ ID NO: 4808 - DNA, 20 bp, Homo sapiens
  source 1..20: mol_type = genomic DNA; note = Gene: MAP4K3; note = Location (start to end; relative to TSS): MAP4K3_24_54; note = Orientation (relative to transcription): antisense; note = sgRNA Position: 39437257; note = Sequence Name: 56322-704_101_SL_seq_4808
aaccctcgcagcccctcgct

SEQ ID NO: 4809 - DNA, 20 bp, Homo sapiens
  source 1..20: mol_type = genomic DNA; note = Gene: MAP4K3; note = Location (start to end; relative to TSS): MAP4K3_54_84; note = Orientation (relative to transcription): antisense; note = sgRNA Position: 39437227; note = Sequence Name: 56322-704_101_SL_seq_4809
cgaacctggtcacacccaca

SEQ ID NO: 4810 - DNA, 20 bp, Homo sapiens
  source 1..20: mol_type = genomic DNA; note = Gene: MAP4K4; note = Location (start to end; relative to TSS): MAP4K4_21_51; note = Orientation (relative to transcription): sense; note = sgRNA Position: 101697754; note = Sequence Name: 56322-704_101_SL_seq_4810
acgctccgggcccgtcctcg

SEQ ID NO: 4811 - DNA, 20 bp, Homo sapiens
  source 1..20: mol_type = genomic DNA; note = Gene: MAP4K4; note = Location (start to end; relative to TSS): MAP4K4_88_118; note = Orientation (relative to transcription): sense; note = sgRNA Position: 101697821; note = Sequence Name: 56322-704_101_SL_seq_4811
acgcccgggggcctgacggc

SEQ ID NO: 4812 - DNA, 20 bp, Homo sapiens
  source 1..20: mol_type = genomic DNA; note = Gene: MAP4K4; note = Location (start to end; relative to TSS): MAP4K4_26_56; note = Orientation (relative to transcription): antisense; note = sgRNA Position: 101697739; note = Sequence Name: 56322-704_101_SL_seq_4812
gaggacgggcccggagcgtg

SEQ ID NO: 4813 - DNA, 20 bp, Homo sapiens
  source 1..20: mol_type = genomic DNA; note = Gene: MAP4K4; note = Location (start to end; relative to TSS): MAP4K4_84_114; note = Orientation (relative to transcription): sense; note = sgRNA Position: 101697817; note = Sequence Name: 56322-704_101_SL_seq_4813
ggcgacgcccgggggcctga

SEQ ID NO: 4814 - DNA, 20 bp, Homo sapiens
  source 1..20: mol_type = genomic DNA; note = Gene: MAP4K4; note = Location (start to end; relative to TSS): MAP4K4_27_57; note = Orientation (relative to transcription): antisense; note = sgRNA Position: 101697740; note = Sequence Name: 56322-704_101_SL_seq_4814
cgaggacgggcccggagcgt

SEQ ID NO: 4815 - DNA, 20 bp, Homo sapiens
  source 1..20: mol_type = genomic DNA; note = Gene: MAP4K4; note = Location (start to end; relative to TSS): MAP4K4_81_111; note = Orientation (relative to transcription): antisense; note = sgRNA Position: 101697794; note = Sequence Name: 56322-704_101_SL_seq_4815
cgggcgtcgcccgccgcctc

SEQ ID NO: 4816 - DNA, 20 bp, Homo sapiens
  source 1..20: mol_type = genomic DNA; note = Gene: MAP4K4; note = Location (start to end; relative to TSS): MAP4K4_28_58; note = Orientation (relative to transcription): sense; note = sgRNA Position: 101697761; note = Sequence Name: 56322-704_101_SL_seq_4816
gggcccgtcctcgaggcgcg

SEQ ID NO: 4817 - DNA, 20 bp, Homo sapiens
  source 1..20: mol_type = genomic DNA; note = Gene: MAP4K4; note = Location (start to end; relative to TSS): MAP4K4_76_106; note = Orientation (relative to transcription): sense; note = sgRNA Position: 101697809; note = Sequence Name: 56322-704_101_SL_seq_4817
aggcggcgggcgacgcccgg

SEQ ID NO: 4818 - DNA, 20 bp, Homo sapiens
  source 1..20: mol_type = genomic DNA; note = Gene: MAP4K4; note = Location (start to end; relative to TSS): MAP4K4_33_63; note = Orientation (relative to transcription): sense; note = sgRNA Position: 101697766; note = Sequence Name: 56322-704_101_SL_seq_4818
cgtcctcgaggcgcgcggcg

SEQ ID NO: 4819 - DNA, 20 bp, Homo sapiens
  source 1..20: mol_type = genomic DNA; note = Gene: MAP4K4; note = Location (start to end; relative to TSS): MAP4K4_75_105; note = Orientation (relative to transcription): sense; note = sgRNA Position: 101697808; note = Sequence Name: 56322-704_101_SL_seq_4819
gaggcggcgggcgacgcccg

SEQ ID NO: 4820 - DNA, 20 bp, Homo sapiens
  source 1..20: mol_type = genomic DNA; note = Gene: MAP4K5; note = Location (start to end; relative to TSS): MAP4K5_29_59; note = Orientation (relative to transcription): sense; note = sgRNA Position: 50532516; note = Sequence Name: 56322-704_101_SL_seq_4820
cagcggctgagtggcggcgg

SEQ ID NO: 4821 - DNA, 20 bp, Homo sapiens
  source 1..20: mol_type = genomic DNA; note = Gene: MAP4K5; note = Location (start to end; relative to TSS): MAP4K5_68_98; note = Orientation (relative to transcription): sense; note = sgRNA Position: 50532477; note = Sequence Name: 56322-704_101_SL_seq_4821
gctgccggccggcgcgcggg

SEQ ID NO: 4822 - DNA, 20 bp, Homo sapiens
  source 1..20: mol_type = genomic DNA; note = Gene: MAP4K5; note = Location (start to end; relative to TSS): MAP4K5_26_56; note = Orientation (relative to transcription): sense; note = sgRNA Position: 50532519; note = Sequence Name: 56322-704_101_SL_seq_4822
gtgcagcggctgagtggcgg

SEQ ID NO: 4823 - DNA, 20 bp, Homo sapiens
  source 1..20: mol_type = genomic DNA; note = Gene: MAP4K5; note = Location (start to end; relative to TSS): MAP4K5_65_95; note = Orientation (relative to transcription): sense; note = sgRNA Position: 50532480; note = Sequence Name: 56322-704_101_SL_seq_4823
ggagctgccggccggcgcgc

SEQ ID NO: 4824 - DNA, 20 bp, Homo sapiens
  source 1..20: mol_type = genomic DNA; note = Gene: MAP4K5; note = Location (start to end; relative to TSS): MAP4K5_18_48; note = Orientation (relative to transcription): antisense; note = sgRNA Position: 50532547; note = Sequence Name: 56322-704_101_SL_seq_4824
ctgcacggcgcgtcctctcg

SEQ ID NO: 4825 - DNA, 20 bp, Homo sapiens
  source 1..20: mol_type = genomic DNA; note = Gene: MAP4K5; note = Location (start to end; relative to TSS): MAP4K5_64_94; note = Orientation (relative to transcription): sense; note = sgRNA Position: 50532481; note = Sequence Name: 56322-704_101_SL_seq_4825
cggagctgccggccggcgcg

SEQ ID NO: 4826 - DNA, 20 bp, Homo sapiens
  source 1..20: mol_type = genomic DNA; note = Gene: MAP4K5; note = Location (start to end; relative to TSS): MAP4K5_20_50; note = Orientation (relative to transcription): sense; note = sgRNA Position: 50532525; note = Sequence Name: 56322-704_101_SL_seq_4826
cgcgccgtgcagcggctgag

SEQ ID NO: 4827 - DNA, 20 bp, Homo sapiens
  source 1..20: mol_type = genomic DNA; note = Gene: MAP4K5; note = Location (start to end; relative to TSS): MAP4K5_57_87; note = Orientation (relative to transcription): sense; note = sgRNA Position: 50532488; note = Sequence Name: 56322-704_101_SL_seq_4827
gcaaacccggagctgccggc

SEQ ID NO: 4828 - DNA, 20 bp, Homo sapiens
  source 1..20: mol_type = genomic DNA; note = Gene: MAP4K5; note = Location (start to end; relative to TSS): MAP4K5_23_53; note = Orientation (relative to transcription): sense; note = sgRNA Position: 50532522; note = Sequence Name: 56322-704_101_SL_seq_4828
gccgtgcagcggctgagtgg

SEQ ID NO: 4829 - DNA, 20 bp, Homo sapiens
  source 1..20: mol_type = genomic DNA; note = Gene: MAP4K5; note = Location (start to end; relative to TSS): MAP4K5_53_83; note = Orientation (relative to transcription): sense; note = sgRNA Position: 50532492; note = Sequence Name: 56322-704_101_SL_seq_4829
gacggcaaacccggagctgc

SEQ ID NO: 4830 - DNA, 20 bp, Homo sapiens
  source 1..20: mol_type = genomic DNA; note = Gene: MAPK1; note = Location (start to end; relative to TSS): MAPK1_63_93; note = Orientation (relative to transcription): sense; note = sgRNA Position: 21867558; note = Sequence Name: 56322-704_101_SL_seq_4830
ttcctcctcccggtcagcgt

SEQ ID NO: 4831 - DNA, 20 bp, Homo sapiens
  source 1..20: mol_type = genomic DNA; note = Gene: MAPK1; note = Location (start to end; relative to TSS): MAPK1_95_125; note = Orientation (relative to transcription): sense; note = sgRNA Position: 21867526; note = Sequence Name: 56322-704_101_SL_seq_4831
cggcggcggcgcagtccctg

SEQ ID NO: 4832 - DNA, 20 bp, Homo sapiens
  source 1..20: mol_type = genomic DNA; note = Gene: MAPK1; note = Location (start to end; relative to TSS): MAPK1_28_58; note = Orientation (relative to transcription): antisense; note = sgRNA Position: 21867613; note = Sequence Name: 56322-704_101_SL_seq_4832
ctgaagagccgacagccact

SEQ ID NO: 4833 - DNA, 20 bp, Homo sapiens
  source 1..20: mol_type = genomic DNA; note = Gene: MAPK1; note = Location (start to end; relative to TSS): MAPK1_74_104; note = Orientation (relative to transcription): antisense; note = sgRNA Position: 21867567; note = Sequence Name: 56322-704_101_SL_seq_4833
cgccgacgctgaccgggagg

SEQ ID NO: 4834 - DNA, 20 bp, Homo sapiens
  source 1..20: mol_type = genomic DNA; note = Gene: MAPK1; note = Location (start to end; relative to TSS): MAPK1_32_62; note = Orientation (relative to transcription): sense; note = sgRNA Position: 21867589; note = Sequence Name: 56322-704_101_SL_seq_4834
ggctcttcagctctcccgct

SEQ ID NO: 4835 - DNA, 20 bp, Homo sapiens
  source 1..20: mol_type = genomic DNA; note = Gene: MAPK1; note = Location (start to end; relative to TSS): MAPK1_70_100; note = Orientation (relative to transcription): antisense; note = sgRNA Position: 21867571; note = Sequence Name: 56322-704_101_SL_seq_4835
gacgctgaccgggaggagga

SEQ ID NO: 4836 - DNA, 20 bp, Homo sapiens
  source 1..20: mol_type = genomic DNA; note = Gene: MAPK1; note = Location (start to end; relative to TSS): MAPK1_11_41; note = Orientation (relative to transcription): sense; note = sgRNA Position: 21867610; note = Sequence Name: 56322-704_101_SL_seq_4836
caatcggtccgagtggctgt

SEQ ID NO: 4837 - DNA, 20 bp, Homo sapiens
  source 1..20: mol_type = genomic DNA; note = Gene: MAPK1; note = Location (start to end; relative to TSS): MAPK1_66_96; note = Orientation (relative to transcription): sense; note = sgRNA Position: 21867555; note = Sequence Name: 56322-704_101_SL_seq_4837
ctcctcccggtcagcgtcgg

SEQ ID NO: 4838 - DNA, 20 bp, Homo sapiens
  source 1..20: mol_type = genomic DNA; note = Gene: MAPK1; note = Location (start to end; relative to TSS): MAPK1_4_34; note = Orientation (relative to transcription): sense; note = sgRNA Position: 21867617; note = Sequence Name: 56322-704_101_SL_seq_4838
aggcaggcaatcggtccgag

SEQ ID NO: 4839 - DNA, 20 bp, Homo sapiens
  source 1..20: mol_type = genomic DNA; note = Gene: MAPK1; note = Location (start to end; relative to TSS): MAPK1_63_93; note = Orientation (relative to transcription): sense; note = sgRNA Position: 21867558; note = Sequence Name: 56322-704_101_SL_seq_4839
ttcctcctcccggtcagcgt

SEQ ID NO: 4840 - DNA, 20 bp, Homo sapiens
  source 1..20: mol_type = genomic DNA; note = Gene: MAPK10; note = Location (start to end; relative to TSS): MAPK10_23_53; note = Orientation (relative to transcription): sense; note = sgRNA Position: 86360006; note = Sequence Name: 56322-704_101_SL_seq_4840
tggtttccaggcagtgaaag

SEQ ID NO: 4841 - DNA, 20 bp, Homo sapiens
  source 1..20: mol_type = genomic DNA; note = Gene: MAPK10; note = Location (start to end; relative to TSS): MAPK10_92_122; note = Orientation (relative to transcription): antisense; note = sgRNA Position: 86359957; note = Sequence Name: 56322-704_101_SL_seq_4841
aaaaataaaaagtgaagggg

SEQ ID NO: 4842 - DNA, 20 bp, Homo sapiens
  source 1..20: mol_type = genomic DNA; note = Gene: MAPK10; note = Location (start to end; relative to TSS): MAPK10_38_68; note = Orientation (relative to transcription): antisense; note = sgRNA Position: 86360011; note = Sequence Name: 56322-704_101_SL_seq_4842
aatcaccctctttcactgcc

SEQ ID NO: 4843 - DNA, 20 bp, Homo sapiens
  source 1..20: mol_type = genomic DNA; note = Gene: MAPK10; note = Location (start to end; relative to TSS): MAPK10_90_120; note = Orientation (relative to transcription): sense; note = sgRNA Position: 86359939; note = Sequence Name: 56322-704_101_SL_seq_4843
ttcactttttatttttatgg

SEQ ID NO: 4844 - DNA, 20 bp, Homo sapiens
  source 1..20: mol_type = genomic DNA; note = Gene: MAPK10; note = Location (start to end; relative to TSS): MAPK10_24_54; note = Orientation (relative to transcription): sense; note = sgRNA Position: 86360005; note = Sequence Name: 56322-704_101_SL_seq_4844
ggtttccaggcagtgaaaga

SEQ ID NO: 4845 - DNA, 20 bp, Homo sapiens
  source 1..20: mol_type = genomic DNA; note = Gene: MAPK10; note = Location (start to end; relative to TSS): MAPK10_89_119; note = Orientation (relative to transcription): sense; note = sgRNA Position: 86359940; note = Sequence Name: 56322-704_101_SL_seq_4845
cttcactttttatttttatg

SEQ ID NO: 4846 - DNA, 20 bp, Homo sapiens
  source 1..20: mol_type = genomic DNA; note = Gene: MAPK10; note = Location (start to end; relative to TSS): MAPK10_11_41; note = Orientation (relative to transcription): sense; note = sgRNA Position: 86360018; note = Sequence Name: 56322-704_101_SL_seq_4846
cacgctgcacaatggtttcc

SEQ ID NO: 4847 - DNA, 20 bp, Homo sapiens
  source 1..20: mol_type = genomic DNA; note = Gene: MAPK10; note = Location (start to end; relative to TSS): MAPK10_68_98; note = Orientation (relative to transcription): antisense; note = sgRNA Position: 86359981; note = Sequence Name: 56322-704_101_SL_seq_4847
taaagaaaatagaagaagag

SEQ ID NO: 4848 - DNA, 20 bp, Homo sapiens
  source 1..20: mol_type = genomic DNA; note = Gene: MAPK10; note = Location (start to end; relative to TSS): MAPK10_3_33; note = Orientation (relative to transcription): sense; note = sgRNA Position: 86360026; note = Sequence Name: 56322-704_101_SL_seq_4848
ggcagcatcacgctgcacaa

SEQ ID NO: 4849 - DNA, 20 bp, Homo sapiens
  source 1..20: mol_type = genomic DNA; note = Gene: MAPK10; note = Location (start to end; relative to TSS): MAPK10_38_68; note = Orientation (relative to transcription): antisense; note = sgRNA Position: 86360011; note = Sequence Name: 56322-704_101_SL_seq_4849
aatcaccctctttcactgcc

SEQ ID NO: 4850 - DNA, 20 bp, Homo sapiens
  source 1..20: mol_type = genomic DNA; note = Gene: MAPK11; note = Location (start to end; relative to TSS): MAPK11_61_91; note = Orientation (relative to transcription): antisense; note = sgRNA Position: 50270315; note = Sequence Name: 56322-704_101_SL_seq_4850
gagcagccgccgctccgccc

SEQ ID NO: 4851 - DNA, 20 bp, Homo sapiens
  source 1..20: mol_type = genomic DNA; note = Gene: MAPK11; note = Location (start to end; relative to TSS): MAPK11_91_121; note = Orientation (relative to transcription): sense; note = sgRNA Position: 50270265; note = Sequence Name: 56322-704_101_SL_seq_4851
tcgcgccggcttctaccggc

SEQ ID NO: 4852 - DNA, 20 bp, Homo sapiens
  source 1..20: mol_type = genomic DNA; note = Gene: MAPK11; note = Location (start to end; relative to TSS): MAPK11_38_68; note = Orientation (relative to transcription): sense; note = sgRNA Position: 50270318; note = Sequence Name: 56322-704_101_SL_seq_4852
ggcgcggggctgggcccggg

SEQ ID NO: 4853 - DNA, 20 bp, Homo sapiens
  source 1..20: mol_type = genomic DNA; note = Gene: MAPK11; note = Location (start to end; relative to TSS): MAPK11_77_107; note = Orientation (relative to transcription): sense; note = sgRNA Position: 50270279; note = Sequence Name: 56322-704_101_SL_seq_4853
gacatgtcgggccctcgcgc

SEQ ID NO: 4854 - DNA, 20 bp, Homo sapiens
  source 1..20: mol_type = genomic DNA; note = Gene: MAPK11; note = Location (start to end; relative to TSS): MAPK11_11_41; note = Orientation (relative to transcription): antisense; note = sgRNA Position: 50270365; note = Sequence Name: 56322-704_101_SL_seq_4854
cgagccgagcccgagccgag

SEQ ID NO: 4855 - DNA, 20 bp, Homo sapiens
  source 1..20: mol_type = genomic DNA; note = Gene: MAPK11; note = Location (start to end; relative to TSS): MAPK11_64_94; note = Orientation (relative to transcription): sense; note = sgRNA Position: 50270292; note = Sequence Name: 56322-704_101_SL_seq_4855
ggcggctgctccggacatgt

SEQ ID NO: 4856 - DNA, 20 bp, Homo sapiens
  source 1..20: mol_type = genomic DNA; note = Gene: MAPK11; note = Location (start to end; relative to TSS): MAPK11_6_36; note = Orientation (relative to transcription): antisense; note = sgRNA Position: 50270370; note = Sequence Name: 56322-704_101_SL_seq_4856
cgagcccgagccgagcggag

SEQ ID NO: 4857 - DNA, 20 bp, Homo sapiens
  source 1..20: mol_type = genomic DNA; note = Gene: MAPK11; note = Location (start to end; relative to TSS): MAPK11_61_91; note = Orientation (relative to transcription): antisense; note = sgRNA Position: 50270315; note = Sequence Name: 56322-704_101_SL_seq_4857
gagcagccgccgctccgccc

SEQ ID NO: 4858 - DNA, 20 bp, Homo sapiens
  source 1..20: mol_type = genomic DNA; note = Gene: MAPK11; note = Location (start to end; relative to TSS): MAPK11_4_34; note = Orientation (relative to transcription): sense; note = sgRNA Position: 50270352; note = Sequence Name: 56322-704_101_SL_seq_4858
gctcggctcgggctcggctc

SEQ ID NO: 4859 - DNA, 20 bp, Homo sapiens
  source 1..20: mol_type = genomic DNA; note = Gene: MAPK11; note = Location (start to end; relative to TSS): MAPK11_38_68; note = Orientation (relative to transcription): sense; note = sgRNA Position: 50270318; note = Sequence Name: 56322-704_101_SL_seq_4859
ggcgcggggctgggcccggg

SEQ ID NO: 4860 - DNA, 20 bp, Homo sapiens
  source 1..20: mol_type = genomic DNA; note = Gene: MAPK12; note = Location (start to end; relative to TSS): MAPK12_46_76; note = Orientation (relative to transcription): antisense; note = sgRNA Position: 50261633; note = Sequence Name: 56322-704_101_SL_seq_4860
ccgctcgcccgcccgcccgc

SEQ ID NO: 4861 - DNA, 20 bp, Homo sapiens
  source 1..20: mol_type = genomic DNA; note = Gene: MAPK12; note = Location (start to end; relative to TSS): MAPK12_96_126; note = Orientation (relative to transcription): sense; note = sgRNA Position: 50261563; note = Sequence Name: 56322-704_101_SL_seq_4861
gggagccccgtccccggtcg

SEQ ID NO: 4862 - DNA, 20 bp, Homo sapiens
  source 1..20: mol_type = genomic DNA; note = Gene: MAPK12; note = Location (start to end; relative to TSS): MAPK12_37_67; note = Orientation (relative to transcription): antisense; note = sgRNA Position: 50261642; note = Sequence Name: 56322-704_101_SL_seq_4862
cgcccgcccgccggccgctg

SEQ ID NO: 4863 - DNA, 20 bp, Homo sapiens
  source 1..20: mol_type = genomic DNA; note = Gene: MAPK12; note = Location (start to end; relative to TSS): MAPK12_90_120; note = Orientation (relative to transcription): sense; note = sgRNA Position: 50261569; note = Sequence Name: 56322-704_101_SL_seq_4863
cgccgagggagccccgtccc

SEQ ID NO: 4864 - DNA, 20 bp, Homo sapiens
  source 1..20: mol_type = genomic DNA; note = Gene: MAPK12; note = Location (start to end; relative to TSS): MAPK12_45_75; note = Orientation (relative to transcription): sense; note = sgRNA Position: 50261614; note = Sequence Name: 56322-704_101_SL_seq_4864
cgggcgggcgagcggacgag

SEQ ID NO: 4865 - DNA, 20 bp, Homo sapiens
  source 1..20: mol_type = genomic DNA; note = Gene: MAPK12; note = Location (start to end; relative to TSS): MAPK12_84_114; note = Orientation (relative to transcription): antisense; note = sgRNA Position: 50261595; note = Sequence Name: 56322-704_101_SL_seq_4865
cctcggcgcgcgcctcgggc

SEQ ID NO: 4866 - DNA, 20 bp, Homo sapiens
  source 1..20: mol_type = genomic DNA; note = Gene: MAPK12; note = Location (start to end; relative to TSS): MAPK12_25_55; note = Orientation (relative to transcription): sense; note = sgRNA Position: 50261634; note = Sequence Name: 56322-704_101_SL_seq_4866
gcgccccagcggccggcggg

SEQ ID NO: 4867 - DNA, 20 bp, Homo sapiens
  source 1..20: mol_type = genomic DNA; note = Gene: MAPK12; note = Location (start to end; relative to TSS): MAPK12_75_105; note = Orientation (relative to transcription): sense; note = sgRNA Position: 50261584; note = Sequence Name: 56322-704_101_SL_seq_4867
ccggcccgaggcgcgcgccg

SEQ ID NO: 4868 - DNA, 20 bp, Homo sapiens
  source 1..20: mol_type = genomic DNA; note = Gene: MAPK12; note = Location (start to end; relative to TSS): MAPK12_22_52; note = Orientation (relative to transcription): antisense; note = sgRNA Position: 50261657; note = Sequence Name: 56322-704_101_SL_seq_4868
cgctggggcgctcccgctcc

SEQ ID NO: 4869 - DNA, 20 bp, Homo sapiens
  source 1..20: mol_type = genomic DNA; note = Gene: MAPK12; note = Location (start to end; relative to TSS): MAPK12_63_93; note = Orientation (relative to transcription): sense; note = sgRNA Position: 50261596; note = Sequence Name: 56322-704_101_SL_seq_4869
agcggcgcggagccggcccg

SEQ ID NO: 4870 - DNA, 20 bp, Homo sapiens
  source 1..20: mol_type = genomic DNA; note = Gene: MAPK13; note = Location (start to end; relative to TSS): MAPK13_38_68; note = Orientation (relative to transcription): sense; note = sgRNA Position: 36130577; note = Sequence Name: 56322-704_101_SL_seq_4870
gccgccgagatcgggtgccc

SEQ ID NO: 4871 - DNA, 20 bp, Homo sapiens
  source 1..20: mol_type = genomic DNA; note = Gene: MAPK13; note = Location (start to end; relative to TSS): MAPK13_95_125; note = Orientation (relative to transcription): sense; note = sgRNA Position: 36130634; note = Sequence Name: 56322-704_101_SL_seq_4871
aggacgtcaacaagacagcc

SEQ ID NO: 4872 - DNA, 20 bp, Homo sapiens
  source 1..20: mol_type = genomic DNA; note = Gene: MAPK13; note = Location (start to end; relative to TSS): MAPK13_37_67; note = Orientation (relative to transcription): antisense; note = sgRNA Position: 36130556; note = Sequence Name: 56322-704_101_SL_seq_4872
cgatctcggcggccccagcg

SEQ ID NO: 4873 - DNA, 20 bp, Homo sapiens
  source 1..20: mol_type = genomic DNA; note = Gene: MAPK13; note = Location (start to end; relative to TSS): MAPK13_75_105; note = Orientation (relative to transcription): sense; note = sgRNA Position: 36130614; note = Sequence Name: 56322-704_101_SL_seq_4873
gaaaaagggcttctacaagc

SEQ ID NO: 4874 - DNA, 20 bp, Homo sapiens
  source 1..20: mol_type = genomic DNA; note = Gene: MAPK13; note = Location (start to end; relative to TSS): MAPK13_34_64; note = Orientation (relative to transcription): antisense; note = sgRNA Position: 36130553; note = Sequence Name: 56322-704_101_SL_seq_4874
tctcggcggccccagcgtgg

SEQ ID NO: 4875 - DNA, 20 bp, Homo sapiens
  source 1..20: mol_type = genomic DNA; note = Gene: MAPK13; note = Location (start to end; relative to TSS): MAPK13_64_94; note = Orientation (relative to transcription): antisense; note = sgRNA Position: 36130583; note = Sequence Name: 56322-704_101_SL_seq_4875
ttccggatgaggctcatccc

SEQ ID NO: 4876 - DNA, 20 bp, Homo sapiens
  source 1..20: mol_type = genomic DNA; note = Gene: MAPK13; note = Location (start to end; relative to TSS): MAPK13_30_60; note = Orientation (relative to transcription): sense; note = sgRNA Position: 36130569; note = Sequence Name: 56322-704_101_SL_seq_4876
acgctggggccgccgagatc

SEQ ID NO: 4877 - DNA, 20 bp, Homo sapiens
  source 1..20: mol_type = genomic DNA; note = Gene: MAPK13; note = Location (start to end; relative to TSS): MAPK13_60_90; note = Orientation (relative to transcription): sense; note = sgRNA Position: 36130599; note = Sequence Name: 56322-704_101_SL_seq_4877
gatgagcctcatccggaaaa

SEQ ID NO: 4878 - DNA, 20 bp, Homo sapiens
  source 1..20: mol_type = genomic DNA; note = Gene: MAPK13; note = Location (start to end; relative to TSS): MAPK13_22_52; note = Orientation (relative to transcription): antisense; note = sgRNA Position: 36130541; note = Sequence Name: 56322-704_101_SL_seq_4878
cagcgtggcggctgcgttcg

SEQ ID NO: 4879 - DNA, 20 bp, Homo sapiens
  source 1..20: mol_type = genomic DNA; note = Gene: MAPK13; note = Location (start to end; relative to TSS): MAPK13_53_83; note = Orientation (relative to transcription): sense; note = sgRNA Position: 36130592; note = Sequence Name: 56322-704_101_SL_seq_4879
tgcccgggatgagcctcatc

SEQ ID NO: 4880 - DNA, 20 bp, Homo sapiens
  source 1..20: mol_type = genomic DNA; note = Gene: MAPK14; note = Location (start to end; relative to TSS): MAPK14_38_68; note = Orientation (relative to transcription): sense; note = sgRNA Position: 36027872; note = Sequence Name: 56322-704_101_SL_seq_4880
cagcccggagtcggccttgt

SEQ ID NO: 4881 - DNA, 20 bp, Homo sapiens
  source 1..20: mol_type = genomic DNA; note = Gene: MAPK14; note = Location (start to end; relative to TSS): MAPK14_107_137; note = Orientation (relative to transcription): sense; note = sgRNA Position: 36027941; note = Sequence Name: 56322-704_101_SL_seq_4881
agcgcgtccctgcccttagc

SEQ ID NO: 4882 - DNA, 20 bp, Homo sapiens
  source 1..20: mol_type = genomic DNA; note = Gene: MAPK14; note = Location (start to end; relative to TSS): MAPK14_40_70; note = Orientation (relative to transcription): sense; note = sgRNA Position: 36027874; note = Sequence Name: 56322-704_101_SL_seq_4882
gcccggagtcggccttgtag

SEQ ID NO: 4883 - DNA, 20 bp, Homo sapiens
  source 1..20: mol_type = genomic DNA; note = Gene: MAPK14; note = Location (start to end; relative to TSS): MAPK14_106_136; note = Orientation (relative to transcription): sense; note = sgRNA Position: 36027940; note = Sequence Name: 56322-704_101_SL_seq_4883
gagcgcgtccctgcccttag

SEQ ID NO: 4884 - DNA, 20 bp, Homo sapiens
  source 1..20: mol_type = genomic DNA; note = Gene: MAPK14; note = Location (start to end; relative to TSS): MAPK14_39_69; note = Orientation (relative to transcription): sense; note = sgRNA Position: 36027873; note = Sequence Name: 56322-704_101_SL_seq_4884
agcccggagtcggccttgta

SEQ ID NO: 4885 - DNA, 20 bp, Homo sapiens
  source 1..20: mol_type = genomic DNA; note = Gene: MAPK14; note = Location (start to end; relative to TSS): MAPK14_84_114; note = Orientation (relative to transcription): sense; note = sgRNA Position: 36027918; note = Sequence Name: 56322-704_101_SL_seq_4885
gcgggcgcagtcttgagcgc

SEQ ID NO: 4886 - DNA, 20 bp, Homo sapiens
  source 1..20: mol_type = genomic DNA; note = Gene: MAPK14; note = Location (start to end; relative to TSS): MAPK14_29_59; note = Orientation (relative to transcription): sense; note = sgRNA Position: 36027863; note = Sequence Name: 56322-704_101_SL_seq_4886
actgcgacgcagcccggagt

SEQ ID NO: 4887 - DNA, 20 bp, Homo sapiens
  source 1..20: mol_type = genomic DNA; note = Gene: MAPK14; note = Location (start to end; relative to TSS): MAPK14_61_91; note = Orientation (relative to transcription): antisense; note = sgRNA Position: 36027875; note = Sequence Name: 56322-704_101_SL_seq_4887
cctgcaccttcgcccctaca

SEQ ID NO: 4888 - DNA, 20 bp, Homo sapiens
  source 1..20: mol_type = genomic DNA; note = Gene: MAPK14; note = Location (start to end; relative to TSS): MAPK14_23_53; note = Orientation (relative to transcription): sense; note = sgRNA Position: 36027857; note = Sequence Name: 56322-704_101_SL_seq_4888
gggagtactgcgacgcagcc

SEQ ID NO: 4889 - DNA, 20 bp, Homo sapiens
  source 1..20: mol_type = genomic DNA; note = Gene: MAPK14; note = Location (start to end; relative to TSS): MAPK14_53_83; note = Orientation (relative to transcription): sense; note = sgRNA Position: 36027887; note = Sequence Name: 56322-704_101_SL_seq_4889
cttgtaggggcgaaggtgca

SEQ ID NO: 4890 - DNA, 20 bp, Homo sapiens
  source 1..20: mol_type = genomic DNA; note = Gene: MAPK15; note = Location (start to end; relative to TSS): MAPK15_36_66; note = Orientation (relative to transcription): antisense; note = sgRNA Position: 143716391; note = Sequence Name: 56322-704_101_SL_seq_4890
gacaatgcgagggtccacta

SEQ ID NO: 4891 - DNA, 20 bp, Homo sapiens
  source 1..20: mol_type = genomic DNA; note = Gene: MAPK15; note = Location (start to end; relative to TSS): MAPK15_67_97; note = Orientation (relative to transcription): antisense; note = sgRNA Position: 143716422; note = Sequence Name: 56322-704_101_SL_seq_4891
gcccgagctgccgcctgagt

SEQ ID NO: 4892 - DNA, 20 bp, Homo sapiens
  source 1..20: mol_type = genomic DNA; note = Gene: MAPK15; note = Location (start to end; relative to TSS): MAPK15_30_60; note = Orientation (relative to transcription): sense; note = sgRNA Position: 143716405; note = Sequence Name: 56322-704_101_SL_seq_4892
tagtggaccctcgcattgtc

SEQ ID NO: 4893 - DNA, 20 bp, Homo sapiens
  source 1..20: mol_type = genomic DNA; note = Gene: MAPK15; note = Location (start to end; relative to TSS): MAPK15_62_92; note = Orientation (relative to transcription): sense; note = sgRNA Position: 143716437; note = Sequence Name: 56322-704_101_SL_seq_4893
ctcaggcggcagctcgggca

SEQ ID NO: 4894 - DNA, 20 bp, Homo sapiens
  source 1..20: mol_type = genomic DNA; note = Gene: MAPK15; note = Location (start to end; relative to TSS): MAPK15_27_57; note = Orientation (relative to transcription): antisense; note = sgRNA Position: 143716382; note = Sequence Name: 56322-704_101_SL_seq_4894
agggtccactacggtgcaca

SEQ ID NO: 4895 - DNA, 20 bp, Homo sapiens
  source 1..20: mol_type = genomic DNA; note = Gene: MAPK15; note = Location (start to end; relative to TSS): MAPK15_58_88; note = Orientation (relative to transcription): antisense; note = sgRNA Position: 143716413; note = Sequence Name: 56322-704_101_SL_seq_4895
gccgcctgagtaggtatctc

SEQ ID NO: 4896 - DNA, 20 bp, Homo sapiens
  source 1..20: mol_type = genomic DNA; note = Gene: MAPK15; note = Location (start to end; relative to TSS): MAPK15_19_49; note = Orientation (relative to transcription): antisense; note = sgRNA Position: 143716374; note = Sequence Name: 56322-704_101_SL_seq_4896
ctacggtgcacatggcggcc

SEQ ID NO: 4897 - DNA, 20 bp, Homo sapiens
  source 1..20: mol_type = genomic DNA; note = Gene: MAPK15; note = Location (start to end; relative to TSS): MAPK15_57_87; note = Orientation (relative to transcription): sense; note = sgRNA Position: 143716432; note = Sequence Name: 56322-704_101_SL_seq_4897
acctactcaggcggcagctc

SEQ ID NO: 4898 - DNA, 20 bp, Homo sapiens
  source 1..20: mol_type = genomic DNA; note = Gene: MAPK15; note = Location (start to end; relative to TSS): MAPK15_24_54; note = Orientation (relative to transcription): antisense; note = sgRNA Position: 143716379; note = Sequence Name: 56322-704_101_SL_seq_4898
gtccactacggtgcacatgg

SEQ ID NO: 4899 - DNA, 20 bp, Homo sapiens
  source 1..20: mol_type = genomic DNA; note = Gene: MAPK15; note = Location (start to end; relative to TSS): MAPK15_56_86; note = Orientation (relative to transcription): sense; note = sgRNA Position: 143716431; note = Sequence Name: 56322-704_101_SL_seq_4899
tacctactcaggcggcagct

SEQ ID NO: 4900 - DNA, 20 bp, Homo sapiens
  source 1..20: mol_type = genomic DNA; note = Gene: MAPK3; note = Location (start to end; relative to TSS): MAPK3_42_72; note = Orientation (relative to transcription): sense; note = sgRNA Position: 30123154; note = Sequence Name: 56322-704_101_SL_seq_4900
ccccgtagaaccgagggggt

SEQ ID NO: 4901 - DNA, 20 bp, Homo sapiens
  source 1..20: mol_type = genomic DNA; note = Gene: MAPK3; note = Location (start to end; relative to TSS): MAPK3_77_107; note = Orientation (relative to transcription): sense; note = sgRNA Position: 30123119; note = Sequence Name: 56322-704_101_SL_seq_4901
gggggaggtggagatggtga

SEQ ID NO: 4902 - DNA, 20 bp, Homo sapiens
  source 1..20: mol_type = genomic DNA; note = Gene: MAPK3; note = Location (start to end; relative to TSS): MAPK3_37_67; note = Orientation (relative to transcription): sense; note = sgRNA Position: 30123159; note = Sequence Name: 56322-704_101_SL_seq_4902
gggagccccgtagaaccgag

SEQ ID NO: 4903 - DNA, 20 bp, Homo sapiens
  source 1..20: mol_type = genomic DNA; note = Gene: MAPK3; note = Location (start to end; relative to TSS): MAPK3_75_105; note = Orientation (relative to transcription): antisense; note = sgRNA Position: 30123141; note = Sequence Name: 56322-704_101_SL_seq_4903
tccacctcccccgggacccc

SEQ ID NO: 4904 - DNA, 20 bp, Homo sapiens
  source 1..20: mol_type = genomic DNA; note = Gene: MAPK3; note = Location (start to end; relative to TSS): MAPK3_38_68; note = Orientation (relative to transcription): sense; note = sgRNA Position: 30123158; note = Sequence Name: 56322-704_101_SL_seq_4904
ggagccccgtagaaccgagg

SEQ ID NO: 4905 - DNA, 20 bp, Homo sapiens
  source 1..20: mol_type = genomic DNA; note = Gene: MAPK3; note = Location (start to end; relative to TSS): MAPK3_74_104; note = Orientation (relative to transcription): antisense; note = sgRNA Position: 30123142; note = Sequence Name: 56322-704_101_SL_seq_4905
ccacctcccccgggaccccc

SEQ ID NO: 4906 - DNA, 20 bp, Homo sapiens
  source 1..20: mol_type = genomic DNA; note = Gene: MAPK3; note = Location (start to end; relative to TSS): MAPK3_36_66; note = Orientation (relative to transcription): sense; note = sgRNA Position: 30123160; note = Sequence Name: 56322-704_101_SL_seq_4906
ggggagccccgtagaaccga

SEQ ID NO: 4907 - DNA, 20 bp, Homo sapiens
  source 1..20: mol_type = genomic DNA; note = Gene: MAPK3; note = Location (start to end; relative to TSS): MAPK3_71_101; note = Orientation (relative to transcription): sense; note = sgRNA Position: 30123125; note = Sequence Name: 56322-704_101_SL_seq_4907
ggtcccgggggaggtggaga

SEQ ID NO: 4908 - DNA, 20 bp, Homo sapiens
  source 1..20: mol_type = genomic DNA; note = Gene: MAPK3; note = Location (start to end; relative to TSS): MAPK3_35_65; note = Orientation (relative to transcription): sense; note = sgRNA Position: 30123161; note = Sequence Name: 56322-704_101_SL_seq_4908
cggggagccccgtagaaccg

SEQ ID NO: 4909 - DNA, 20 bp, Homo sapiens
  source 1..20: mol_type = genomic DNA; note = Gene: MAPK3; note = Location (start to end; relative to TSS): MAPK3_65_95; note = Orientation (relative to transcription): sense; note = sgRNA Position: 30123131; note = Sequence Name: 56322-704_101_SL_seq_4909
cccgggggtcccgggggagg

SEQ ID NO: 4910 - DNA, 20 bp, Homo sapiens
  source 1..20: mol_type = genomic DNA; note = Gene: MAPK4; note = Location (start to end; relative to TSS): MAPK4_44_74; note = Orientation (relative to transcription): sense; note = sgRNA Position: 50560157; note = Sequence Name: 56322-704_101_SL_seq_4910
ccgtgcgccgtggctgggac

SEQ ID NO: 4911 - DNA, 20 bp, Homo sapiens
  source 1..20: mol_type = genomic DNA; note = Gene: MAPK4; note = Location (start to end; relative to TSS): MAPK4_87_117; note = Orientation (relative to transcription): sense; note = sgRNA Position: 50560200; note = Sequence Name: 56322-704_101_SL_seq_4911
ccgcggccgcagacaaaggg

SEQ ID NO: 4912 - DNA, 20 bp, Homo sapiens
  source 1..20: mol_type = genomic DNA; note = Gene: MAPK4; note = Location (start to end; relative to TSS): MAPK4_34_64; note = Orientation (relative to transcription): sense; note = sgRNA Position: 50560147; note = Sequence Name: 56322-704_101_SL_seq_4912
cgggagctcgccgtgcgccg

SEQ ID NO: 4913 - DNA, 20 bp, Homo sapiens
  source 1..20: mol_type = genomic DNA; note = Gene: MAPK4; note = Location (start to end; relative to TSS): MAPK4_84_114; note = Orientation (relative to transcription): sense; note = sgRNA Position: 50560197; note = Sequence Name: 56322-704_101_SL_seq_4913
gcgccgcggccgcagacaaa

SEQ ID NO: 4914 - DNA, 20 bp, Homo sapiens
  source 1..20: mol_type = genomic DNA; note = Gene: MAPK4; note = Location (start to end; relative to TSS): MAPK4_40_70; note = Orientation (relative to transcription): antisense; note = sgRNA Position: 50560133; note = Sequence Name: 56322-704_101_SL_seq_4914
cggcgcacggcgagctcccg

SEQ ID NO: 4915 - DNA, 20 bp, Homo sapiens
  source 1..20: mol_type = genomic DNA; note = Gene: MAPK4; note = Location (start to end; relative to TSS): MAPK4_72_102; note = Orientation (relative to transcription): antisense; note = sgRNA Position: 50560165; note = Sequence Name: 56322-704_101_SL_seq_4915
gccggcgcgctcggccaggc

SEQ ID NO: 4916 - DNA, 20 bp, Homo sapiens
  source 1..20: mol_type = genomic DNA; note = Gene: MAPK4; note = Location (start to end; relative to TSS): MAPK4_39_69; note = Orientation (relative to transcription): sense; note = sgRNA Position: 50560152; note = Sequence Name: 56322-704_101_SL_seq_4916
gctcgccgtgcgccgtggct

SEQ ID NO: 4917 - DNA, 20 bp, Homo sapiens
  source 1..20: mol_type = genomic DNA; note = Gene: MAPK4; note = Location (start to end; relative to TSS): MAPK4_70_100; note = Orientation (relative to transcription): sense; note = sgRNA Position: 50560183; note = Sequence Name: 56322-704_101_SL_seq_4917
ggccgagcgcgccggcgccg

SEQ ID NO: 4918 - DNA, 20 bp, Homo sapiens
  source 1..20: mol_type = genomic DNA; note = Gene: MAPK4; note = Location (start to end; relative to TSS): MAPK4_23_53; note = Orientation (relative to transcription): antisense; note = sgRNA Position: 50560116; note = Sequence Name: 56322-704_101_SL_seq_4918
ccgcggtcgccccgacagcc

SEQ ID NO: 4919 - DNA, 20 bp, Homo sapiens
  source 1..20: mol_type = genomic DNA; note = Gene: MAPK4; note = Location (start to end; relative to TSS): MAPK4_53_83; note = Orientation (relative to transcription): antisense; note = sgRNA Position: 50560146; note = Sequence Name: 56322-704_101_SL_seq_4919
ccggtcccagccacggcgca

SEQ ID NO: 4920 - DNA, 20 bp, Homo sapiens
  source 1..20: mol_type = genomic DNA; note = Gene: MAPK6; note = Location (start to end; relative to TSS): MAPK6_33_63; note = Orientation (relative to transcription): sense; note = sgRNA Position: 52019278; note = Sequence Name: 56322-704_101_SL_seq_4920
ctgcggcaaagcgagagcct

SEQ ID NO: 4921 - DNA, 20 bp, Homo sapiens
  source 1..20: mol_type = genomic DNA; note = Gene: MAPK6; note = Location (start to end; relative to TSS): MAPK6_79_109; note = Orientation (relative to transcription): sense; note = sgRNA Position: 52019324; note = Sequence Name: 56322-704_101_SL_seq_4921
ccggagacctgagccgacac

SEQ ID NO: 4922 - DNA, 20 bp, Homo sapiens
  source 1..20: mol_type = genomic DNA; note = Gene: MAPK6; note = Location (start to end; relative to TSS): MAPK6_16_46; note = Orientation (relative to transcription): sense; note = sgRNA Position: 52019261; note = Sequence Name: 56322-704_101_SL_seq_4922
gggttacatggcggcgactg

SEQ ID NO: 4923 - DNA, 20 bp, Homo sapiens
  source 1..20: mol_type = genomic DNA; note = Gene: MAPK6; note = Location (start to end; relative to TSS): MAPK6_76_106; note = Orientation (relative to transcription): antisense; note = sgRNA Position: 52019301; note = Sequence Name: 56322-704_101_SL_seq_4923
caggtctccggctgtgctgg

SEQ ID NO: 4924 - DNA, 20 bp, Homo sapiens
  source 1..20: mol_type = genomic DNA; note = Gene: MAPK6; note = Location (start to end; relative to TSS): MAPK6_9_39; note = Orientation (relative to transcription): antisense; note = sgRNA Position: 52019234; note = Sequence Name: 56322-704_101_SL_seq_4924
gtaaccccgacccgcgagag

SEQ ID NO: 4925 - DNA, 20 bp, Homo sapiens
  source 1..20: mol_type = genomic DNA; note = Gene: MAPK6; note = Location (start to end; relative to TSS): MAPK6_70_100; note = Orientation (relative to transcription): antisense; note = sgRNA Position: 52019295; note = Sequence Name: 56322-704_101_SL_seq_4925
tccggctgtgctggcggcag

SEQ ID NO: 4926 - DNA, 20 bp, Homo sapiens
  source 1..20: mol_type = genomic DNA; note = Gene: MAPK6; note = Location (start to end; relative to TSS): MAPK6_8_38; note = Orientation (relative to transcription): antisense; note = sgRNA Position: 52019233; note = Sequence Name: 56322-704_101_SL_seq_4926
taaccccgacccgcgagaga

SEQ ID NO: 4927 - DNA, 20 bp, Homo sapiens
  source 1..20: mol_type = genomic DNA; note = Gene: MAPK6; note = Location (start to end; relative to TSS): MAPK6_60_90; note = Orientation (relative to transcription): sense; note = sgRNA Position: 52019305; note = Sequence Name: 56322-704_101_SL_seq_4927
gccgctgccgccagcacagc

SEQ ID NO: 4928 - DNA, 20 bp, Homo sapiens
  source 1..20: mol_type = genomic DNA; note = Gene: MAPK6; note = Location (start to end; relative to TSS): MAPK6_7_37; note = Orientation (relative to transcription): sense; note = sgRNA Position: 52019252; note = Sequence Name: 56322-704_101_SL_seq_4928
cgcgggtcggggttacatgg

SEQ ID NO: 4929 - DNA, 20 bp, Homo sapiens
  source 1..20: mol_type = genomic DNA; note = Gene: MAPK6; note = Location (start to end; relative to TSS): MAPK6_59_89; note = Orientation (relative to transcription): antisense; note = sgRNA Position: 52019284; note = Sequence Name: 56322-704_101_SL_seq_4929
tggcggcagcggcgtctccg

SEQ ID NO: 4930 - DNA, 20 bp, Homo sapiens
  source 1..20: mol_type = genomic DNA; note = Gene: MAPK7; note = Location (start to end; relative to TSS): MAPK7_47_77; note = Orientation (relative to transcription): sense; note = sgRNA Position: 19378571; note = Sequence Name: 56322-704_101_SL_seq_4930
accctcggagacccccgcgc

SEQ ID NO: 4931 - DNA, 20 bp, Homo sapiens
  source 1..20: mol_type = genomic DNA; note = Gene: MAPK7; note = Location (start to end; relative to TSS): MAPK7_99_129; note = Orientation (relative to transcription): sense; note = sgRNA Position: 19378623; note = Sequence Name: 56322-704_101_SL_seq_4931
ctgaaagccttgaggaggcg

SEQ ID NO: 4932 - DNA, 20 bp, Homo sapiens
  source 1..20: mol_type = genomic DNA; note = Gene: MAPK7; note = Location (start to end; relative to TSS): MAPK7_48_78; note = Orientation (relative to transcription): sense; note = sgRNA Position: 19378572; note = Sequence Name: 56322-704_101_SL_seq_4932
ccctcggagacccccgcgct

SEQ ID NO: 4933 - DNA, 20 bp, Homo sapiens
  source 1..20: mol_type = genomic DNA; note = Gene: MAPK7; note = Location (start to end; relative to TSS): MAPK7_94_124; note = Orientation (relative to transcription): sense; note = sgRNA Position: 19378618; note = Sequence Name: 56322-704_101_SL_seq_4933
gacctctgaaagccttgagg

SEQ ID NO: 4934 - DNA, 20 bp, Homo sapiens
  source 1..20: mol_type = genomic DNA; note = Gene: MAPK7; note = Location (start to end; relative to TSS): MAPK7_49_79; note = Orientation (relative to transcription): sense; note = sgRNA Position: 19378573; note = Sequence Name: 56322-704_101_SL_seq_4934
cctcggagacccccgcgctg

SEQ ID NO: 4935 - DNA, 20 bp, Homo sapiens
  source 1..20: mol_type = genomic DNA; note = Gene: MAPK7; note = Location (start to end; relative to TSS): MAPK7_91_121; note = Orientation (relative to transcription): sense; note = sgRNA Position: 19378615; note = Sequence Name: 56322-704_101_SL_seq_4935
cgggacctctgaaagccttg

SEQ ID NO: 4936 - DNA, 20 bp, Homo sapiens
  source 1..20: mol_type = genomic DNA; note = Gene: MAPK7; note = Location (start to end; relative to TSS): MAPK7_32_62; note = Orientation (relative to transcription): sense; note = sgRNA Position: 19378556; note = Sequence Name: 56322-704_101_SL_seq_4936
acaagtaagtgagccaccct

SEQ ID NO: 4937 - DNA, 20 bp, Homo sapiens
  source 1..20: mol_type = genomic DNA; note = Gene: MAPK7; note = Location (start to end; relative to TSS): MAPK7_68_98; note = Orientation (relative to transcription): antisense; note = sgRNA Position: 19378572; note = Sequence Name: 56322-704_101_SL_seq_4937
ggcctcccgtccccagcgcg

SEQ ID NO: 4938 - DNA, 20 bp, Homo sapiens
  source 1..20: mol_type = genomic DNA; note = Gene: MAPK7; note = Location (start to end; relative to TSS): MAPK7_34_64; note = Orientation (relative to transcription): antisense; note = sgRNA Position: 19378538; note = Sequence Name: 56322-704_101_SL_seq_4938
tggctcacttacttgttcaa

SEQ ID NO: 4939 - DNA, 20 bp, Homo sapiens
  source 1..20: mol_type = genomic DNA; note = Gene: MAPK7; note = Location (start to end; relative to TSS): MAPK7_67_97; note = Orientation (relative to transcription): antisense; note = sgRNA Position: 19378571; note = Sequence Name: 56322-704_101_SL_seq_4939
gcctcccgtccccagcgcgg

SEQ ID NO: 4940 - DNA, 20 bp, Homo sapiens
  source 1..20: mol_type = genomic DNA; note = Gene: MAPK8; note = Location (start to end; relative to TSS): MAPK8_47_77; note = Orientation (relative to transcription): sense; note = sgRNA Position: 48306750; note = Sequence Name: 56322-704_101_SL_seq_4940
gcagcgctgggtaacggccg

SEQ ID NO: 4941 - DNA, 20 bp, Homo sapiens
  source 1..20: mol_type = genomic DNA; note = Gene: MAPK8; note = Location (start to end; relative to TSS): MAPK8_82_112; note = Orientation (relative to transcription): sense; note = sgRNA Position: 48306785; note = Sequence Name: 56322-704_101_SL_seq_4941
acggcccctgtccccgctgg

SEQ ID NO: 4942 - DNA, 20 bp, Homo sapiens
  source 1..20: mol_type = genomic DNA; note = Gene: MAPK8; note = Location (start to end; relative to TSS): MAPK8_41_71; note = Orientation (relative to transcription): sense; note = sgRNA Position: 48306744; note = Sequence Name: 56322-704_101_SL_seq_4942
ccgcgagcagcgctgggtaa

SEQ ID NO: 4943 - DNA, 20 bp, Homo sapiens
  source 1..20: mol_type = genomic DNA; note = Gene: MAPK8; note = Location (start to end; relative to TSS): MAPK8_79_109; note = Orientation (relative to transcription): sense; note = sgRNA Position: 48306782; note = Sequence Name: 56322-704_101_SL_seq_4943
cggacggcccctgtccccgc

SEQ ID NO: 4944 - DNA, 20 bp, Homo sapiens
  source 1..20: mol_type = genomic DNA; note = Gene: MAPK8; note = Location (start to end; relative to TSS): MAPK8_35_65; note = Orientation (relative to transcription): sense; note = sgRNA Position: 48306738; note = Sequence Name: 56322-704_101_SL_seq_4944
gcggagccgcgagcagcgct

SEQ ID NO: 4945 - DNA, 20 bp, Homo sapiens
  source 1..20: mol_type = genomic DNA; note = Gene: MAPK8; note = Location (start to end; relative to TSS): MAPK8_73_103; note = Orientation (relative to transcription): antisense; note = sgRNA Position: 48306756; note = Sequence Name: 56322-704_101_SL_seq_4945
gccgtccggggtggtcgccg

SEQ ID NO: 4946 - DNA, 20 bp, Homo sapiens
  source 1..20: mol_type = genomic DNA; note = Gene: MAPK8; note = Location (start to end; relative to TSS): MAPK8_23_53; note = Orientation (relative to transcription): antisense; note = sgRNA Position: 48306706; note = Sequence Name: 56322-704_101_SL_seq_4946
gcaatccaagccgcgtcgtc

SEQ ID NO: 4947 - DNA, 20 bp, Homo sapiens
  source 1..20: mol_type = genomic DNA; note = Gene: MAPK8; note = Location (start to end; relative to TSS): MAPK8_59_89; note = Orientation (relative to transcription): sense; note = sgRNA Position: 48306762; note = Sequence Name: 56322-704_101_SL_seq_4947
aacggccgcggcgaccaccc

SEQ ID NO: 4948 - DNA, 20 bp, Homo sapiens
  source 1..20: mol_type = genomic DNA; note = Gene: MAPK8; note = Location (start to end; relative to TSS): MAPK8_17_47; note = Orientation (relative to transcription): antisense; note = sgRNA Position: 48306700; note = Sequence Name: 56322-704_101_SL_seq_4948
caagccgcgtcgtccggcct

SEQ ID NO: 4949 - DNA, 20 bp, Homo sapiens
  source 1..20: mol_type = genomic DNA; note = Gene: MAPK8; note = Location (start to end; relative to TSS): MAPK8_47_77; note = Orientation (relative to transcription): sense; note = sgRNA Position: 48306750; note = Sequence Name: 56322-704_101_SL_seq_4949
gcagcgctgggtaacggccg

SEQ ID NO: 4950 - DNA, 20 bp, Homo sapiens
  source 1..20: mol_type = genomic DNA; note = Gene: MAPK9; note = Location (start to end; relative to TSS): MAPK9_46_76; note = Orientation (relative to transcription): antisense; note = sgRNA Position: 180292033; note = Sequence Name: 56322-704_101_SL_seq_4950
ccggggcgctgcgacccttc

SEQ ID NO: 4951 - DNA, 20 bp, Homo sapiens
  source 1..20: mol_type = genomic DNA; note = Gene: MAPK9; note = Location (start to end; relative to TSS): MAPK9_80_110; note = Orientation (relative to transcription): antisense; note = sgRNA Position: 180291999; note = Sequence Name: 56322-704_101_SL_seq_4951
gccgccgccgccgccgcagt

SEQ ID NO: 4952 - DNA, 20 bp, Homo sapiens
  source 1..20: mol_type = genomic DNA; note = Gene: MAPK9; note = Location (start to end; relative to TSS): MAPK9_37_67; note = Orientation (relative to transcription): sense; note = sgRNA Position: 180292022; note = Sequence Name: 56322-704_101_SL_seq_4952
ccggaagggtcgcagcgccc

SEQ ID NO: 4953 - DNA, 20 bp, Homo sapiens
  source 1..20: mol_type = genomic DNA; note = Gene: MAPK9; note = Location (start to end; relative to TSS): MAPK9_67_97; note = Orientation (relative to transcription): sense; note = sgRNA Position: 180291992; note = Sequence Name: 56322-704_101_SL_seq_4953
cacacccactgcggcggcgg

SEQ ID NO: 4954 - DNA, 20 bp, Homo sapiens
  source 1..20: mol_type = genomic DNA; note = Gene: MAPK9; note = Location (start to end; relative to TSS): MAPK9_18_48; note = Orientation (relative to transcription): sense; note = sgRNA Position: 180292041; note = Sequence Name: 56322-704_101_SL_seq_4954
ggcggagaagggagcgggac

SEQ ID NO: 4955 - DNA, 20 bp, Homo sapiens
  source 1..20: mol_type = genomic DNA; note = Gene: MAPK9; note = Location (start to end; relative to TSS): MAPK9_63_93; note = Orientation (relative to transcription): antisense; note = sgRNA Position: 180292016; note = Sequence Name: 56322-704_101_SL_seq_4955
agtgggtgtgaggggcgccg

SEQ ID NO: 4956 - DNA, 20 bp, Homo sapiens
  source 1..20: mol_type = genomic DNA; note = Gene: MAPK9; note = Location (start to end; relative to TSS): MAPK9_22_52; note = Orientation (relative to transcription): sense; note = sgRNA Position: 180292037; note = Sequence Name: 56322-704_101_SL_seq_4956
gagaagggagcgggaccgga

SEQ ID NO: 4957 - DNA, 20 bp, Homo sapiens
  source 1..20: mol_type = genomic DNA; note = Gene: MAPK9; note = Location (start to end; relative to TSS): MAPK9_61_91; note = Orientation (relative to transcription): sense; note = sgRNA Position: 180291998; note = Sequence Name: 56322-704_101_SL_seq_4957
gcccctcacacccactgcgg

SEQ ID NO: 4958 - DNA, 20 bp, Homo sapiens
  source 1..20: mol_type = genomic DNA; note = Gene: MAPK9; note = Location (start to end; relative to TSS): MAPK9_23_53; note = Orientation (relative to transcription): sense; note = sgRNA Position: 180292036; note = Sequence Name: 56322-704_101_SL_seq_4958
agaagggagcgggaccggaa

SEQ ID NO: 4959 - DNA, 20 bp, Homo sapiens
  source 1..20: mol_type = genomic DNA; note = Gene: MAPK9; note = Location (start to end; relative to TSS): MAPK9_58_88; note = Orientation (relative to transcription): sense; note = sgRNA Position: 180292001; note = Sequence Name: 56322-704_101_SL_seq_4959
ggcgcccctcacacccactg

SEQ ID NO: 4960 - DNA, 20 bp, Homo sapiens
  source 1..20: mol_type = genomic DNA; note = Gene: MAPKAPK2; note = Location (start to end; relative to TSS): MAPKAPK2_49_79; note = Orientation (relative to transcription): antisense; note = sgRNA Position: 206684960; note = Sequence Name: 56322-704_101_SL_seq_4960
gcggcgggggcccggccggg

SEQ ID NO: 4961 - DNA, 20 bp, Homo sapiens
  source 1..20: mol_type = genomic DNA; note = Gene: MAPKAPK2; note = Location (start to end; relative to TSS): MAPKAPK2_80_110; note = Orientation (relative to transcription): antisense; note = sgRNA Position: 206684991; note = Sequence Name: 56322-704_101_SL_seq_4961
cccgggggcctggcgctctg

SEQ ID NO: 4962 - DNA, 20 bp, Homo sapiens
  source 1..20: mol_type = genomic DNA; note = Gene: MAPKAPK2; note = Location (start to end; relative to TSS): MAPKAPK2_30_60; note = Orientation (relative to transcription): sense; note = sgRNA Position: 206684961; note = Sequence Name: 56322-704_101_SL_seq_4962
gcggccgcttccccccggcc

SEQ ID NO: 4963 - DNA, 20 bp, Homo sapiens
  source 1..20: mol_type = genomic DNA; note = Gene: MAPKAPK2; note = Location (start to end; relative to TSS): MAPKAPK2_68_98; note = Orientation (relative to transcription): antisense; note = sgRNA Position: 206684979; note = Sequence Name: 56322-704_101_SL_seq_4963
gcgctctggggaccgcgggg

SEQ ID NO: 4964 - DNA, 20 bp, Homo sapiens
  source 1..20: mol_type = genomic DNA; note = Gene: MAPKAPK2; note = Location (start to end; relative to TSS): MAPKAPK2_25_55; note = Orientation (relative to transcription): sense; note = sgRNA Position: 206684956; note = Sequence Name: 56322-704_101_SL_seq_4964
gtcgcgcggccgcttccccc

SEQ ID NO: 4965 - DNA, 20 bp, Homo sapiens
  source 1..20: mol_type = genomic DNA; note = Gene: MAPKAPK2; note = Location (start to end; relative to TSS): MAPKAPK2_62_92; note = Orientation (relative to transcription): antisense; note = sgRNA Position: 206684973; note = Sequence Name: 56322-704_101_SL_seq_4965
tggggaccgcggggcggcgg

SEQ ID NO: 4966 - DNA, 20 bp, Homo sapiens
  source 1..20: mol_type = genomic DNA; note = Gene: MAPKAPK2; note = Location (start to end; relative to TSS): MAPKAPK2_17_47; note = Orientation (relative to transcription): antisense; note = sgRNA Position: 206684928; note = Sequence Name: 56322-704_101_SL_seq_4966
cgcgacaatgtacccagccc

SEQ ID NO: 4967 - DNA, 20 bp, Homo sapiens
  source 1..20: mol_type = genomic DNA; note = Gene: MAPKAPK2; note = Location (start to end; relative to TSS): MAPKAPK2_49_79; note = Orientation (relative to transcription): antisense; note = sgRNA Position: 206684960; note = Sequence Name: 56322-704_101_SL_seq_4967
gcggcgggggcccggccggg

SEQ ID NO: 4968 - DNA, 20 bp, Homo sapiens
  source 1..20: mol_type = genomic DNA; note = Gene: MAPKAPK2; note = Location (start to end; relative to TSS): MAPKAPK2_16_46; note = Orientation (relative to transcription): antisense; note = sgRNA Position: 206684927; note = Sequence Name: 56322-704_101_SL_seq_4968
gcgacaatgtacccagcccc

SEQ ID NO: 4969 - DNA, 20 bp, Homo sapiens
  source 1..20: mol_type = genomic DNA; note = Gene: MAPKAPK2; note = Location (start to end; relative to TSS): MAPKAPK2_47_77; note = Orientation (relative to transcription): sense; note = sgRNA Position: 206684978; note = Sequence Name: 56322-704_101_SL_seq_4969
gccgggcccccgccgccccg

SEQ ID NO: 4970 - DNA, 20 bp, Homo sapiens
  source 1..20: mol_type = genomic DNA; note = Gene: MAPKAPK3; note = Location (start to end; relative to TSS): MAPKAPK3_32_62; note = Orientation (relative to transcription): sense; note = sgRNA Position: 50617209; note = Sequence Name: 56322-704_101_SL_seq_4970
ccgcctctcctgcccctcgc

SEQ ID NO: 4971 - DNA, 20 bp, Homo sapiens
  source 1..20: mol_type = genomic DNA; note = Gene: MAPKAPK3; note = Location (start to end; relative to TSS): MAPKAPK3_75_105; note = Orientation (relative to transcription): sense; note = sgRNA Position: 50617252; note = Sequence Name: 56322-704_101_SL_seq_4971
ccgccaggtacgccctcgct

SEQ ID NO: 4972 - DNA, 20 bp, Homo sapiens
  source 1..20: mol_type = genomic DNA; note = Gene: MAPKAPK3; note = Location (start to end; relative to TSS): MAPKAPK3_34_64; note = Orientation (relative to transcription): antisense; note = sgRNA Position: 50617191; note = Sequence Name: 56322-704_101_SL_seq_4972
ggggcaggagaggcggtcgc

SEQ ID NO: 4973 - DNA, 20 bp, Homo sapiens
  source 1..20: mol_type = genomic DNA; note = Gene: MAPKAPK3; note = Location (start to end; relative to TSS): MAPKAPK3_74_104; note = Orientation (relative to transcription): sense; note = sgRNA Position: 50617251; note = Sequence Name: 56322-704_101_SL_seq_4973
gccgccaggtacgccctcgc

SEQ ID NO: 4974 - DNA, 20 bp, Homo sapiens
  source 1..20: mol_type = genomic DNA; note = Gene: MAPKAPK3; note = Location (start to end; relative to TSS): MAPKAPK3_35_65; note = Orientation (relative to transcription): antisense; note = sgRNA Position: 50617192; note = Sequence Name: 56322-704_101_SL_seq_4974
aggggcaggagaggcggtcg

SEQ ID NO: 4975 - DNA, 20 bp, Homo sapiens
  source 1..20: mol_type = genomic DNA; note = Gene: MAPKAPK3; note = Location (start to end; relative to TSS): MAPKAPK3_66_96; note = Orientation (relative to transcription): antisense; note = sgRNA Position: 50617223; note = Sequence Name: 56322-704_101_SL_seq_4975
ggcggcaacgcaccttgctg

SEQ ID NO: 4976 - DNA, 20 bp, Homo sapiens
  source 1..20: mol_type = genomic DNA; note = Gene: MAPKAPK3; note = Location (start to end; relative to TSS): MAPKAPK3_28_58; note = Orientation (relative to transcription): antisense; note = sgRNA Position: 50617185; note = Sequence Name: 56322-704_101_SL_seq_4976
ggagaggcggtcgcgggagc

SEQ ID NO: 4977 - DNA, 20 bp, Homo sapiens
  source 1..20: mol_type = genomic DNA; note = Gene: MAPKAPK3; note = Location (start to end; relative to TSS): MAPKAPK3_60_90; note = Orientation (relative to transcription): antisense; note = sgRNA Position: 50617217; note = Sequence Name: 56322-704_101_SL_seq_4977
aacgcaccttgctgaggtac

SEQ ID NO: 4978 - DNA, 20 bp, Homo sapiens
  source 1..20: mol_type = genomic DNA; note = Gene: MAPKAPK3; note = Location (start to end; relative to TSS): MAPKAPK3_25_55; note = Orientation (relative to transcription): antisense; note = sgRNA Position: 50617182; note = Sequence Name: 56322-704_101_SL_seq_4978
gaggcggtcgcgggagctgg

SEQ ID NO: 4979 - DNA, 20 bp, Homo sapiens
  source 1..20: mol_type = genomic DNA; note = Gene: MAPKAPK3; note = Location (start to end; relative to TSS): MAPKAPK3_55_85; note = Orientation (relative to transcription): antisense; note = sgRNA Position: 50617212; note = Sequence Name: 56322-704_101_SL_seq_4979
accttgctgaggtaccggcg

SEQ ID NO: 4980 - DNA, 20 bp, Homo sapiens
  source 1..20: mol_type = genomic DNA; note = Gene: MAPKAPK5; note = Location (start to end; relative to TSS): MAPKAPK5_52_82; note = Orientation (relative to transcription): sense; note = sgRNA Position: 111842306; note = Sequence Name: 56322-704_101_SL_seq_4980
cttcggcttcggcttcgcgg

SEQ ID NO: 4981 - DNA, 20 bp, Homo sapiens
  source 1..20: mol_type = genomic DNA; note = Gene: MAPKAPK5; note = Location (start to end; relative to TSS): MAPKAPK5_91_121; note = Orientation (relative to transcription): sense; note = sgRNA Position: 111842345; note = Sequence Name: 56322-704_101_SL_seq_4981
ggaggcgcaggctcttcttt

SEQ ID NO: 4982 - DNA, 20 bp, Homo sapiens
  source 1..20: mol_type = genomic DNA; note = Gene: MAPKAPK5; note = Location (start to end; relative to TSS): MAPKAPK5_49_79; note = Orientation (relative to transcription): sense; note = sgRNA Position: 111842303; note = Sequence Name: 56322-704_101_SL_seq_4982
cggcttcggcttcggcttcg

SEQ ID NO: 4983 - DNA, 20 bp, Homo sapiens
  source 1..20: mol_type = genomic DNA; note = Gene: MAPKAPK5; note = Location (start to end; relative to TSS): MAPKAPK5_79_109; note = Orientation (relative to transcription): sense; note = sgRNA Position: 111842333; note = Sequence Name: 56322-704_101_SL_seq_4983
ggcggcggaggcggaggcgc

SEQ ID NO: 4984 - DNA, 20 bp, Homo sapiens
  source 1..20: mol_type = genomic DNA; note = Gene: MAPKAPK5; note = Location (start to end; relative to TSS): MAPKAPK5_35_65; note = Orientation (relative to transcription): sense; note = sgRNA Position: 111842289; note = Sequence Name: 56322-704_101_SL_seq_4984
gccgagctctgcttcggctt

SEQ ID NO: 4985 - DNA, 20 bp, Homo sapiens
  source 1..20: mol_type = genomic DNA; note = Gene: MAPKAPK5; note = Location (start to end; relative to TSS): MAPKAPK5_70_100; note = Orientation (relative to transcription): sense; note = sgRNA Position: 111842324; note = Sequence Name: 56322-704_101_SL_seq_4985
ggcggtgcaggcggcggagg

SEQ ID NO: 4986 - DNA, 20 bp, Homo sapiens
  source 1..20: mol_type = genomic DNA; note = Gene: MAPKAPK5; note = Location (start to end; relative to TSS): MAPKAPK5_29_59; note = Orientation (relative to transcription): sense; note = sgRNA Position: 111842283; note = Sequence Name: 56322-704_101_SL_seq_4986
agcggcgccgagctctgctt

SEQ ID NO: 4987 - DNA, 20 bp, Homo sapiens
  source 1..20: mol_type = genomic DNA; note = Gene: MAPKAPK5; note = Location (start to end; relative to TSS): MAPKAPK5_61_91; note = Orientation (relative to transcription): sense; note = sgRNA Position: 111842315; note = Sequence Name: 56322-704_101_SL_seq_4987
cggcttcgcggcggtgcagg

SEQ ID NO: 4988 - DNA, 20 bp, Homo sapiens
  source 1..20: mol_type = genomic DNA; note = Gene: MAPKAPK5; note = Location (start to end; relative to TSS): MAPKAPK5_11_41; note = Orientation (relative to transcription): sense; note = sgRNA Position: 111842265; note = Sequence Name: 56322-704_101_SL_seq_4988
tgaggcggcggcgggagcag

SEQ ID NO: 4989 - DNA, 20 bp, Homo sapiens
  source 1..20: mol_type = genomic DNA; note = Gene: MAPKAPK5; note = Location (start to end; relative to TSS): MAPKAPK5_49_79; note = Orientation (relative to transcription): sense; note = sgRNA Position: 111842303; note = Sequence Name: 56322-704_101_SL_seq_4989
cggcttcggcttcggcttcg

SEQ ID NO: 4990 - DNA, 20 bp, Homo sapiens
  source 1..20: mol_type = genomic DNA; note = Gene: MARK1; note = Location (start to end; relative to TSS): MARK1_53_83; note = Orientation (relative to transcription): antisense; note = sgRNA Position: 220528195; note = Sequence Name: 56322-704_101_SL_seq_4990
cggcccgagccggctgcgcg

SEQ ID NO: 4991 - DNA, 20 bp, Homo sapiens
  source 1..20: mol_type = genomic DNA; note = Gene: MARK1; note = Location (start to end; relative to TSS): MARK1_91_121; note = Orientation (relative to transcription): sense; note = sgRNA Position: 220528253; note = Sequence Name: 56322-704_101_SL_seq_4991
cggcggtggctgtgaccgcg

SEQ ID NO: 4992 - DNA, 20 bp, Homo sapiens
  source 1..20: mol_type = genomic DNA; note = Gene: MARK1; note = Location (start to end; relative to TSS): MARK1_45_75; note = Orientation (relative to transcription): antisense; note = sgRNA Position: 220528187; note = Sequence Name: 56322-704_101_SL_seq_4992
gccggctgcgcgcggagcag

SEQ ID NO: 4993 - DNA, 20 bp, Homo sapiens
  source 1..20: mol_type = genomic DNA; note = Gene: MARK1; note = Location (start to end; relative to TSS): MARK1_77_107; note = Orientation (relative to transcription): sense; note = sgRNA Position: 220528239; note = Sequence Name: 56322-704_101_SL_seq_4993
ctgaggcgcggcggcggcgg

SEQ ID NO: 4994 - DNA, 20 bp, Homo sapiens
  source 1..20: mol_type = genomic DNA; note = Gene: MARK1; note = Location (start to end; relative to TSS): MARK1_39_69; note = Orientation (relative to transcription): antisense; note = sgRNA Position: 220528181; note = Sequence Name: 56322-704_101_SL_seq_4994
tgcgcgcggagcagcgggcg

SEQ ID NO: 4995 - DNA, 20 bp, Homo sapiens
  source 1..20: mol_type = genomic DNA; note = Gene: MARK1; note = Location (start to end; relative to TSS): MARK1_71_101; note = Orientation (relative to transcription): sense; note = sgRNA Position: 220528233; note = Sequence Name: 56322-704_101_SL_seq_4995
tcctgactgaggcgcggcgg

SEQ ID NO: 4996 - DNA, 20 bp, Homo sapiens
  source 1..20: mol_type = genomic DNA; note = Gene: MARK1; note = Location (start to end; relative to TSS): MARK1_35_65; note = Orientation (relative to transcription): sense; note = sgRNA Position: 220528197; note = Sequence Name: 56322-704_101_SL_seq_4996
cccgctgctccgcgcgcagc

SEQ ID NO: 4997 - DNA, 20 bp, Homo sapiens
  source 1..20: mol_type = genomic DNA; note = Gene: MARK1; note = Location (start to end; relative to TSS): MARK1_65_95; note = Orientation (relative to transcription): sense; note = sgRNA Position: 220528227; note = Sequence Name: 56322-704_101_SL_seq_4997
cgctcctcctgactgaggcg

SEQ ID NO: 4998 - DNA, 20 bp, Homo sapiens
  source 1..20: mol_type = genomic DNA; note = Gene: MARK1; note = Location (start to end; relative to TSS): MARK1_22_52; note = Orientation (relative to transcription): antisense; note = sgRNA Position: 220528164; note = Sequence Name: 56322-704_101_SL_seq_4998
gcgcggcacgcagcgcccag

SEQ ID NO: 4999 - DNA, 20 bp, Homo sapiens
  source 1..20: mol_type = genomic DNA; note = Gene: MARK1; note = Location (start to end; relative to TSS): MARK1_53_83; note = Orientation (relative to transcription): antisense; note = sgRNA Position: 220528195; note = Sequence Name: 56322-704_101_SL_seq_4999
cggcccgagccggctgcgcg

SEQ ID NO: 5000 - DNA, 20 bp, Homo sapiens
  source 1..20: mol_type = genomic DNA; note = Gene: MARK2; note = Location (start to end; relative to TSS): MARK2_47_77; note = Orientation (relative to transcription): antisense; note = sgRNA Position: 63839163; note = Sequence Name: 56322-704_101_SL_seq_5000
ctgctccgcgcccggcacac

SEQ ID NO: 5001 - DNA, 20 bp, Homo sapiens
  source 1..20: mol_type = genomic DNA; note = Gene: MARK2; note = Location (start to end; relative to TSS): MARK2_77_107; note = Orientation (relative to transcription): sense; note = sgRNA Position: 63839213; note = Sequence Name: 56322-704_101_SL_seq_5001
ggaggagcgaggcaggcggc

SEQ ID NO: 5002 - DNA, 20 bp, Homo sapiens
  source 1..20: mol_type = genomic DNA; note = Gene: MARK2; note = Location (start to end; relative to TSS): MARK2_33_63; note = Orientation (relative to transcription): sense; note = sgRNA Position: 63839169; note = Sequence Name: 56322-704_101_SL_seq_5002
ggctgcctgtgtgccgggcg

SEQ ID NO: 5003 - DNA, 20 bp, Homo sapiens
  source 1..20: mol_type = genomic DNA; note = Gene: MARK2; note = Location (start to end; relative to TSS): MARK2_72_102; note = Orientation (relative to transcription): antisense; note = sgRNA Position: 63839188; note = Sequence Name: 56322-704_101_SL_seq_5003
cgctcctcccctgccctcag

SEQ ID NO: 5004 - DNA, 20 bp, Homo sapiens
  source 1..20: mol_type = genomic DNA; note = Gene: MARK2; note = Location (start to end; relative to TSS): MARK2_34_64; note = Orientation (relative to transcription): antisense; note = sgRNA Position: 63839150; note = Sequence Name: 56322-704_101_SL_seq_5004
ggcacacaggcagccgccgc

SEQ ID NO: 5005 - DNA, 20 bp, Homo sapiens
  source 1..20: mol_type = genomic DNA; note = Gene: MARK2; note = Location (start to end; relative to TSS): MARK2_70_100; note = Orientation (relative to transcription): sense; note = sgRNA Position: 63839206; note = Sequence Name: 56322-704_101_SL_seq_5005
gggcaggggaggagcgaggc

SEQ ID NO: 5006 - DNA, 20 bp, Homo sapiens
  source 1..20: mol_type = genomic DNA; note = Gene: MARK2; note = Location (start to end; relative to TSS): MARK2_27_57; note = Orientation (relative to transcription): sense; note = sgRNA Position: 63839163; note = Sequence Name: 56322-704_101_SL_seq_5006
ggcggcggctgcctgtgtgc

SEQ ID NO: 5007 - DNA, 20 bp, Homo sapiens
  source 1..20: mol_type = genomic DNA; note = Gene: MARK2; note = Location (start to end; relative to TSS): MARK2_66_96; note = Orientation (relative to transcription): sense; note = sgRNA Position: 63839202; note = Sequence Name: 56322-704_101_SL_seq_5007
ctgagggcaggggaggagcg

SEQ ID NO: 5008 - DNA, 20 bp, Homo sapiens
  source 1..20: mol_type = genomic DNA; note = Gene: MARK2; note = Location (start to end; relative to TSS): MARK2_28_58; note = Orientation (relative to transcription): sense; note = sgRNA Position: 63839164; note = Sequence Name: 56322-704_101_SL_seq_5008
gcggcggctgcctgtgtgcc

SEQ ID NO: 5009 - DNA, 20 bp, Homo sapiens
  source 1..20: mol_type = genomic DNA; note = Gene: MARK2; note = Location (start to end; relative to TSS): MARK2_59_89; note = Orientation (relative to transcription): sense; note = sgRNA Position: 63839195; note = Sequence Name: 56322-704_101_SL_seq_5009
agtgccgctgagggcagggg

SEQ ID NO: 5010 - DNA, 20 bp, Homo sapiens
  source 1..20: mol_type = genomic DNA; note = Gene: MARK3; note = Location (start to end; relative to TSS): MARK3_48_78; note = Orientation (relative to transcription): antisense; note = sgRNA Position: 103385469; note = Sequence Name: 56322-704_101_SL_seq_5010
tgcctcagcctccgccctgc

SEQ ID NO: 5011 - DNA, 20 bp, Homo sapiens
  source 1..20: mol_type = genomic DNA; note = Gene: MARK3; note = Location (start to end; relative to TSS): MARK3_103_133; note = Orientation (relative to transcription): sense; note = sgRNA Position: 103385544; note = Sequence Name: 56322-704_101_SL_seq_5011
ctcctccgcagcccgctcca

SEQ ID NO: 5012 - DNA, 20 bp, Homo sapiens
  source 1..20: mol_type = genomic DNA; note = Gene: MARK3; note = Location (start to end; relative to TSS): MARK3_37_67; note = Orientation (relative to transcription): sense; note = sgRNA Position: 103385478; note = Sequence Name: 56322-704_101_SL_seq_5012
ggccagcagggcggaggctg

SEQ ID NO: 5013 - DNA, 20 bp, Homo sapiens
  source 1..20: mol_type = genomic DNA; note = Gene: MARK3; note = Location (start to end; relative to TSS): MARK3_71_101; note = Orientation (relative to transcription): sense; note = sgRNA Position: 103385512; note = Sequence Name: 56322-704_101_SL_seq_5013
ctagagagggagaagcagtc

SEQ ID NO: 5014 - DNA, 20 bp, Homo sapiens
  source 1..20: mol_type = genomic DNA; note = Gene: MARK3; note = Location (start to end; relative to TSS): MARK3_28_58; note = Orientation (relative to transcription): sense; note = sgRNA Position: 103385469; note = Sequence Name: 56322-704_101_SL_seq_5014
ggcagcggcggccagcaggg

SEQ ID NO: 5015 - DNA, 20 bp, Homo sapiens
  source 1..20: mol_type = genomic DNA; note = Gene: MARK3; note = Location (start to end; relative to TSS): MARK3_70_100; note = Orientation (relative to transcription): sense; note = sgRNA Position: 103385511; note = Sequence Name: 56322-704_101_SL_seq_5015
gctagagagggagaagcagt

SEQ ID NO: 5016 - DNA, 20 bp, Homo sapiens
  source 1..20: mol_type = genomic DNA; note = Gene: MARK3; note = Location (start to end; relative to TSS): MARK3_25_55; note = Orientation (relative to transcription): sense; note = sgRNA Position: 103385466; note = Sequence Name: 56322-704_101_SL_seq_5016
ggcggcagcggcggccagca

SEQ ID NO: 5017 - DNA, 20 bp, Homo sapiens
  source 1..20: mol_type = genomic DNA; note = Gene: MARK3; note = Location (start to end; relative to TSS): MARK3_58_88; note = Orientation (relative to transcription): sense; note = sgRNA Position: 103385499; note = Sequence Name: 56322-704_101_SL_seq_5017
ggcagcaagctcgctagaga

SEQ ID NO: 5018 - DNA, 20 bp, Homo sapiens
  source 1..20: mol_type = genomic DNA; note = Gene: MARK3; note = Location (start to end; relative to TSS): MARK3_22_52; note = Orientation (relative to transcription): antisense; note = sgRNA Position: 103385443; note = Sequence Name: 56322-704_101_SL_seq_5018
ccgctgccgccgccgcaccc

SEQ ID NO: 5019 - DNA, 20 bp, Homo sapiens
  source 1..20: mol_type = genomic DNA; note = Gene: MARK3; note = Location (start to end; relative to TSS): MARK3_57_87; note = Orientation (relative to transcription): sense; note = sgRNA Position: 103385498; note = Sequence Name: 56322-704_101_SL_seq_5019
aggcagcaagctcgctagag

SEQ ID NO: 5020 - DNA, 20 bp, Homo sapiens
  source 1..20: mol_type = genomic DNA; note = Gene: MARK4; note = Location (start to end; relative to TSS): MARK4_26_56; note = Orientation (relative to transcription): antisense; note = sgRNA Position: 45251303; note = Sequence Name: 56322-704_101_SL_seq_5020
ccggcccaagcggcggcgga

SEQ ID NO: 5021 - DNA, 20 bp, Homo sapiens
  source 1..20: mol_type = genomic DNA; note = Gene: MARK4; note = Location (start to end; relative to TSS): MARK4_86_116; note = Orientation (relative to transcription): antisense; note = sgRNA Position: 45251363; note = Sequence Name: 56322-704_101_SL_seq_5021
ccgggcgccatgggggcggc

SEQ ID NO: 5022 - DNA, 20 bp, Homo sapiens
  source 1..20: mol_type = genomic DNA; note = Gene: MARK4; note = Location (start to end; relative to TSS): MARK4_33_63; note = Orientation (relative to transcription): antisense; note = sgRNA Position: 45251310; note = Sequence Name: 56322-704_101_SL_seq_5022
cgcggagccggcccaagcgg

SEQ ID NO: 5023 - DNA, 20 bp, Homo sapiens
  source 1..20: mol_type = genomic DNA; note = Gene: MARK4; note = Location (start to end; relative to TSS): MARK4_79_109; note = Orientation (relative to transcription): sense; note = sgRNA Position: 45251376; note = Sequence Name: 56322-704_101_SL_seq_5023
cgccgcccccatggcgcccg

SEQ ID NO: 5024 - DNA, 20 bp, Homo sapiens
  source 1..20: mol_type = genomic DNA; note = Gene: MARK4; note = Location (start to end; relative to TSS): MARK4_36_66; note = Orientation (relative to transcription): sense; note = sgRNA Position: 45251333; note = Sequence Name: 56322-704_101_SL_seq_5024
ccggctccgcgccccctccg

SEQ ID NO: 5025 - DNA, 20 bp, Homo sapiens
  source 1..20: mol_type = genomic DNA; note = Gene: MARK4; note = Location (start to end; relative to TSS): MARK4_78_108; note = Orientation (relative to transcription): sense; note = sgRNA Position: 45251375; note = Sequence Name: 56322-704_101_SL_seq_5025
ccgccgcccccatggcgccc

SEQ ID NO: 5026 - DNA, 20 bp, Homo sapiens
  source 1..20: mol_type = genomic DNA; note = Gene: MARK4; note = Location (start to end; relative to TSS): MARK4_23_53; note = Orientation (relative to transcription): antisense; note = sgRNA Position: 45251300; note = Sequence Name: 56322-704_101_SL_seq_5026
gcccaagcggcggcggaggg

SEQ ID NO: 5027 - DNA, 20 bp, Homo sapiens
  source 1..20: mol_type = genomic DNA; note = Gene: MARK4; note = Location (start to end; relative to TSS): MARK4_77_107; note = Orientation (relative to transcription): sense; note = sgRNA Position: 45251374; note = Sequence Name: 56322-704_101_SL_seq_5027
cccgccgcccccatggcgcc

SEQ ID NO: 5028 - DNA, 20 bp, Homo sapiens
  source 1..20: mol_type = genomic DNA; note = Gene: MARK4; note = Location (start to end; relative to TSS): MARK4_17_47; note = Orientation (relative to transcription): sense; note = sgRNA Position: 45251314; note = Sequence Name: 56322-704_101_SL_seq_5028
ccctccgccgccgcttgggc

SEQ ID NO: 5029 - DNA, 20 bp, Homo sapiens
  source 1..20: mol_type = genomic DNA; note = Gene: MARK4; note = Location (start to end; relative to TSS): MARK4_70_100; note = Orientation (relative to transcription): sense; note = sgRNA Position: 45251367; note = Sequence Name: 56322-704_101_SL_seq_5029
ccgcctgcccgccgccccca

SEQ ID NO: 5030 - DNA, 20 bp, Homo sapiens
  source 1..20: mol_type = genomic DNA; note = Gene: MAST1; note = Location (start to end; relative to TSS): MAST1_34_64; note = Orientation (relative to transcription): antisense; note = sgRNA Position: 12838555; note = Sequence Name: 56322-704_101_SL_seq_5030
acccggcggcggcgacatgg

SEQ ID NO: 5031 - DNA, 20 bp, Homo sapiens
  source 1..20: mol_type = genomic DNA; note = Gene: MAST1; note = Location (start to end; relative to TSS): MAST1_101_131; note = Orientation (relative to transcription): antisense; note = sgRNA Position: 12838622; note = Sequence Name: 56322-704_101_SL_seq_5031
catactgccgccggggaagg

SEQ ID NO: 5032 - DNA, 20 bp, Homo sapiens
  source 1..20: mol_type = genomic DNA; note = Gene: MAST1; note = Location (start to end; relative to TSS): MAST1_30_60; note = Orientation (relative to transcription): antisense; note = sgRNA Position: 12838551; note = Sequence Name: 56322-704_101_SL_seq_5032
ggcggcggcgacatggtggc

SEQ ID NO: 5033 - DNA, 20 bp, Homo sapiens
  source 1..20: mol_type = genomic DNA; note = Gene: MAST1; note = Location (start to end; relative to TSS): MAST1_100_130; note = Orientation (relative to transcription): antisense; note = sgRNA Position: 12838621; note = Sequence Name: 56322-704_101_SL_seq_5033
atactgccgccggggaagga

SEQ ID NO: 5034 - DNA, 20 bp, Homo sapiens
  source 1..20: mol_type = genomic DNA; note = Gene: MAST1; note = Location (start to end; relative to TSS): MAST1_23_53; note = Orientation (relative to transcription): sense; note = sgRNA Position: 12838564; note = Sequence Name: 56322-704_101_SL_seq_5034
tgccaccatgtcgccgccgc

SEQ ID NO: 5035 - DNA, 20 bp, Homo sapiens
  source 1..20: mol_type = genomic DNA; note = Gene: MAST1; note = Location (start to end; relative to TSS): MAST1_85_115; note = Orientation (relative to transcription): sense; note = sgRNA Position: 12838626; note = Sequence Name: 56322-704_101_SL_seq_5035
tcgatgccctccttccccgg

SEQ ID NO: 5036 - DNA, 20 bp, Homo sapiens
  source 1..20: mol_type = genomic DNA; note = Gene: MAST1; note = Location (start to end; relative to TSS): MAST1_24_54; note = Orientation (relative to transcription): sense; note = sgRNA Position: 12838565; note = Sequence Name: 56322-704_101_SL_seq_5036
gccaccatgtcgccgccgcc

SEQ ID NO: 5037 - DNA, 20 bp, Homo sapiens
  source 1..20: mol_type = genomic DNA; note = Gene: MAST1; note = Location (start to end; relative to TSS): MAST1_82_112; note = Orientation (relative to transcription): sense; note = sgRNA Position: 12838623; note = Sequence Name: 56322-704_101_SL_seq_5037
ttctcgatgccctccttccc

SEQ ID NO: 5038 - DNA, 20 bp, Homo sapiens
  source 1..20: mol_type = genomic DNA; note = Gene: MAST1; note = Location (start to end; relative to TSS): MAST1_25_55; note = Orientation (relative to transcription): antisense; note = sgRNA Position: 12838546; note = Sequence Name: 56322-704_101_SL_seq_5038
cggcgacatggtggcaggtg

SEQ ID NO: 5039 - DNA, 20 bp, Homo sapiens
  source 1..20: mol_type = genomic DNA; note = Gene: MAST1; note = Location (start to end; relative to TSS): MAST1_77_107; note = Orientation (relative to transcription): antisense; note = sgRNA Position: 12838598; note = Sequence Name: 56322-704_101_SL_seq_5039
catcgagaaattagaaagcg

SEQ ID NO: 5040 - DNA, 20 bp, Homo sapiens
  source 1..20: mol_type = genomic DNA; note = Gene: MAST2; note = Location (start to end; relative to TSS): MAST2_36_66; note = Orientation (relative to transcription): antisense; note = sgRNA Position: 45803654; note = Sequence Name: 56322-704_101_SL_seq_5040
ttctcccacccagcacacgt

SEQ ID NO: 5041 - DNA, 20 bp, Homo sapiens
  source 1..20: mol_type = genomic DNA; note = Gene: MAST2; note = Location (start to end; relative to TSS): MAST2_108_138; note = Orientation (relative to transcription): sense; note = sgRNA Position: 45803746; note = Sequence Name: 56322-704_101_SL_seq_5041
ggaggccccagaaggctcga

SEQ ID NO: 5042 - DNA, 20 bp, Homo sapiens
  source 1..20: mol_type = genomic DNA; note = Gene: MAST2; note = Location (start to end; relative to TSS): MAST2_35_65; note = Orientation (relative to transcription): antisense; note = sgRNA Position: 45803653; note = Sequence Name: 56322-704_101_SL_seq_5042
tctcccacccagcacacgtt

SEQ ID NO: 5043 - DNA, 20 bp, Homo sapiens
  source 1..20: mol_type = genomic DNA; note = Gene: MAST2; note = Location (start to end; relative to TSS): MAST2_90_120; note = Orientation (relative to transcription): sense; note = sgRNA Position: 45803728; note = Sequence Name: 56322-704_101_SL_seq_5043
agaggaggtcgcggcgccgg

SEQ ID NO: 5044 - DNA, 20 bp, Homo sapiens
  source 1..20: mol_type = genomic DNA; note = Gene: MAST2; note = Location (start to end; relative to TSS): MAST2_22_52; note = Orientation (relative to transcription): sense; note = sgRNA Position: 45803660; note = Sequence Name: 56322-704_101_SL_seq_5044
cctgcccaacgtgtgctggg

SEQ ID NO: 5045 - DNA, 20 bp, Homo sapiens
  source 1..20: mol_type = genomic DNA; note = Gene: MAST2; note = Location (start to end; relative to TSS): MAST2_86_116; note = Orientation (relative to transcription): antisense; note = sgRNA Position: 45803704; note = Sequence Name: 56322-704_101_SL_seq_5045
gacctcctctgcgctcctca

SEQ ID NO: 5046 - DNA, 20 bp, Homo sapiens
  source 1..20: mol_type = genomic DNA; note = Gene: MAST2; note = Location (start to end; relative to TSS): MAST2_19_49; note = Orientation (relative to transcription): sense; note = sgRNA Position: 45803657; note = Sequence Name: 56322-704_101_SL_seq_5046
tggcctgcccaacgtgtgct

SEQ ID NO: 5047 - DNA, 20 bp, Homo sapiens
  source 1..20: mol_type = genomic DNA; note = Gene: MAST2; note = Location (start to end; relative to TSS): MAST2_72_102; note = Orientation (relative to transcription): sense; note = sgRNA Position: 45803710; note = Sequence Name: 56322-704_101_SL_seq_5047
ctcttccgtgaggagcgcag

SEQ ID NO: 5048 - DNA, 20 bp, Homo sapiens
  source 1..20: mol_type = genomic DNA; note = Gene: MAST2; note = Location (start to end; relative to TSS): MAST2_18_48; note = Orientation (relative to transcription): sense; note = sgRNA Position: 45803656; note = Sequence Name: 56322-704_101_SL_seq_5048
gtggcctgcccaacgtgtgc

SEQ ID NO: 5049 - DNA, 20 bp, Homo sapiens
  source 1..20: mol_type = genomic DNA; note = Gene: MAST2; note = Location (start to end; relative to TSS): MAST2_62_92; note = Orientation (relative to transcription): sense; note = sgRNA Position: 45803700; note = Sequence Name: 56322-704_101_SL_seq_5049
gcgatgctgtctcttccgtg

SEQ ID NO: 5050 - DNA, 20 bp, Homo sapiens
  source 1..20: mol_type = genomic DNA; note = Gene: MAST3; note = Location (start to end; relative to TSS): MAST3_32_62; note = Orientation (relative to transcription): antisense; note = sgRNA Position: 18097816; note = Sequence Name: 56322-704_101_SL_seq_5050
cctggagcccgcggcgccgc

SEQ ID NO: 5051 - DNA, 20 bp, Homo sapiens
  source 1..20: mol_type = genomic DNA; note = Gene: MAST3; note = Location (start to end; relative to TSS): MAST3_93_123; note = Orientation (relative to transcription): sense; note = sgRNA Position: 18097897; note = Sequence Name: 56322-704_101_SL_seq_5051
gacgcggcctgaaaggtgcc

SEQ ID NO: 5052 - DNA, 20 bp, Homo sapiens
  source 1..20: mol_type = genomic DNA; note = Gene: MAST3; note = Location (start to end; relative to TSS): MAST3_39_69; note = Orientation (relative to transcription): sense; note = sgRNA Position: 18097843; note = Sequence Name: 56322-704_101_SL_seq_5052
ctccaggtgaggcccctgcg

SEQ ID NO: 5053 - DNA, 20 bp, Homo sapiens
  source 1..20: mol_type = genomic DNA; note = Gene: MAST3; note = Location (start to end; relative to TSS): MAST3_92_122; note = Orientation (relative to transcription): sense; note = sgRNA Position: 18097896; note = Sequence Name: 56322-704_101_SL_seq_5053
ggacgcggcctgaaaggtgc

SEQ ID NO: 5054 - DNA, 20 bp, Homo sapiens
  source 1..20: mol_type = genomic DNA; note = Gene: MAST3; note = Location (start to end; relative to TSS): MAST3_40_70; note = Orientation (relative to transcription): sense; note = sgRNA Position: 18097844; note = Sequence Name: 56322-704_101_SL_seq_5054
tccaggtgaggcccctgcgc

SEQ ID NO: 5055 - DNA, 20 bp, Homo sapiens
  source 1..20: mol_type = genomic DNA; note = Gene: MAST3; note = Location (start to end; relative to TSS): MAST3_86_116; note = Orientation (relative to transcription): sense; note = sgRNA Position: 18097890; note = Sequence Name: 56322-704_101_SL_seq_5055
ccaagtggacgcggcctgaa

SEQ ID NO: 5056 - DNA, 20 bp, Homo sapiens
  source 1..20: mol_type = genomic DNA; note = Gene: MAST3; note = Location (start to end; relative to TSS): MAST3_28_58; note = Orientation (relative to transcription): sense; note = sgRNA Position: 18097832; note = Sequence Name: 56322-704_101_SL_seq_5056
ggcgccgcgggctccaggtg

SEQ ID NO: 5057 - DNA, 20 bp, Homo sapiens
  source 1..20: mol_type = genomic DNA; note = Gene: MAST3; note = Location (start to end; relative to TSS): MAST3_77_107; note = Orientation (relative to transcription): sense; note = sgRNA Position: 18097881; note = Sequence Name: 56322-704_101_SL_seq_5057
agggcgcggccaagtggacg

SEQ ID NO: 5058 - DNA, 20 bp, Homo sapiens
  source 1..20: mol_type = genomic DNA; note = Gene: MAST3; note = Location (start to end; relative to TSS): MAST3_29_59; note = Orientation (relative to transcription): antisense; note = sgRNA Position: 18097813; note = Sequence Name: 56322-704_101_SL_seq_5058
ggagcccgcggcgccgcagg

SEQ ID NO: 5059 - DNA, 20 bp, Homo sapiens
  source 1..20: mol_type = genomic DNA; note = Gene: MAST3; note = Location (start to end; relative to TSS): MAST3_60_90; note = Orientation (relative to transcription): antisense; note = sgRNA Position: 18097844; note = Sequence Name: 56322-704_101_SL_seq_5059
ccttccgcccgcccgcgcag

SEQ ID NO: 5060 - DNA, 20 bp, Homo sapiens
  source 1..20: mol_type = genomic DNA; note = Gene: MAST4; note = Location (start to end; relative to TSS): MAST4_47_77; note = Orientation (relative to transcription): sense; note = sgRNA Position: 66596466; note = Sequence Name: 56322-704_101_SL_seq_5060
cgtttgcggccgggcccggg

SEQ ID NO: 5061 - DNA, 20 bp, Homo sapiens
  source 1..20: mol_type = genomic DNA; note = Gene: MAST4; note = Location (start to end; relative to TSS): MAST4_100_130; note = Orientation (relative to transcription): antisense; note = sgRNA Position: 66596499; note = Sequence Name: 56322-704_101_SL_seq_5061
catggcagtgacggggccgc

SEQ ID NO: 5062 - DNA, 20 bp, Homo sapiens
  source 1..20: mol_type = genomic DNA; note = Gene: MAST4; note = Location (start to end; relative to TSS): MAST4_33_63; note = Orientation (relative to transcription): sense; note = sgRNA Position: 66596452; note = Sequence Name: 56322-704_101_SL_seq_5062
cgcgcgggagcctccgtttg

SEQ ID NO: 5063 - DNA, 20 bp, Homo sapiens
  source 1..20: mol_type = genomic DNA; note = Gene: MAST4; note = Location (start to end; relative to TSS): MAST4_66_96; note = Orientation (relative to transcription): sense; note = sgRNA Position: 66596485; note = Sequence Name: 56322-704_101_SL_seq_5063
gcggctgtgaacttagcagc

SEQ ID NO: 5064 - DNA, 20 bp, Homo sapiens
  source 1..20: mol_type = genomic DNA; note = Gene: MAST4; note = Location (start to end; relative to TSS): MAST4_23_53; note = Orientation (relative to transcription): antisense; note = sgRNA Position: 66596422; note = Sequence Name: 56322-704_101_SL_seq_5064
cgcgcggggacatgcccgct

SEQ ID NO: 5065 - DNA, 20 bp, Homo sapiens
  source 1..20: mol_type = genomic DNA; note = Gene: MAST4; note = Location (start to end; relative to TSS): MAST4_65_95; note = Orientation (relative to transcription): sense; note = sgRNA Position: 66596484; note = Sequence Name: 56322-704_101_SL_seq_5065
ggcggctgtgaacttagcag

SEQ ID NO: 5066 - DNA, 20 bp, Homo sapiens
  source 1..20: mol_type = genomic DNA; note = Gene: MAST4; note = Location (start to end; relative to TSS): MAST4_22_52; note = Orientation (relative to transcription): antisense; note = sgRNA Position: 66596421; note = Sequence Name: 56322-704_101_SL_seq_5066
gcgcggggacatgcccgctc

SEQ ID NO: 5067 - DNA, 20 bp, Homo sapiens
  source 1..20: mol_type = genomic DNA; note = Gene: MAST4; note = Location (start to end; relative to TSS): MAST4_55_85; note = Orientation (relative to transcription): antisense; note = sgRNA Position: 66596454; note = Sequence Name: 56322-704_101_SL_seq_5067
cgcccgggcccggccgcaaa

SEQ ID NO: 5068 - DNA, 20 bp, Homo sapiens
  source 1..20: mol_type = genomic DNA; note = Gene: MAST4; note = Location (start to end; relative to TSS): MAST4_18_48; note = Orientation (relative to transcription): sense; note = sgRNA Position: 66596437; note = Sequence Name: 56322-704_101_SL_seq_5068
gcgggcatgtccccgcgcgc

SEQ ID NO: 5069 - DNA, 20 bp, Homo sapiens
  source 1..20: mol_type = genomic DNA; note = Gene: MAST4; note = Location (start to end; relative to TSS): MAST4_52_82; note = Orientation (relative to transcription): antisense; note = sgRNA Position: 66596451; note = Sequence Name: 56322-704_101_SL_seq_5069
ccgggcccggccgcaaacgg

SEQ ID NO: 5070 - DNA, 20 bp, Homo sapiens
  source 1..20: mol_type = genomic DNA; note = Gene: MASTL; note = Location (start to end; relative to TSS): MASTL_55_85; note = Orientation (relative to transcription): antisense; note = sgRNA Position: 27155413; note = Sequence Name: 56322-704_101_SL_seq_5070
catcgctggacagcatacag

SEQ ID NO: 5071 - DNA, 20 bp, Homo sapiens
  source 1..20: mol_type = genomic DNA; note = Gene: MASTL; note = Location (start to end; relative to TSS): MASTL_85_115; note = Orientation (relative to transcription): antisense; note = sgRNA Position: 27155443; note = Sequence Name: 56322-704_101_SL_seq_5071
aggctccttcttgcttcccg

SEQ ID NO: 5072 - DNA, 20 bp, Homo sapiens
  source 1..20: mol_type = genomic DNA; note = Gene: MASTL; note = Location (start to end; relative to TSS): MASTL_47_77; note = Orientation (relative to transcription): sense; note = sgRNA Position: 27155425; note = Sequence Name: 56322-704_101_SL_seq_5072
cgctgtatgctgtccagcga

SEQ ID NO: 5073 - DNA, 20 bp, Homo sapiens
  source 1..20: mol_type = genomic DNA; note = Gene: MASTL; note = Location (start to end; relative to TSS): MASTL_78_108; note = Orientation (relative to transcription): sense; note = sgRNA Position: 27155456; note = Sequence Name: 56322-704_101_SL_seq_5073
gcgggaagcaagaaggagcc

SEQ ID NO: 5074 - DNA, 20 bp, Homo sapiens
  source 1..20: mol_type = genomic DNA; note = Gene: MASTL; note = Location (start to end; relative to TSS): MASTL_21_51; note = Orientation (relative to transcription): sense; note = sgRNA Position: 27155399; note = Sequence Name: 56322-704_101_SL_seq_5074
tcgcggaggggcagtgtctg

SEQ ID NO: 5075 - DNA, 20 bp, Homo sapiens
  source 1..20: mol_type = genomic DNA; note = Gene: MASTL; note = Location (start to end; relative to TSS): MASTL_60_90; note = Orientation (relative to transcription): sense; note = sgRNA Position: 27155438; note = Sequence Name: 56322-704_101_SL_seq_5075
ccagcgatggatcccaccgc

SEQ ID NO: 5076 - DNA, 20 bp, Homo sapiens
  source 1..20: mol_type = genomic DNA; note = Gene: MASTL; note = Location (start to end; relative to TSS): MASTL_22_52; note = Orientation (relative to transcription): sense; note = sgRNA Position: 27155400; note = Sequence Name: 56322-704_101_SL_seq_5076
cgcggaggggcagtgtctgc

SEQ ID NO: 5077 - DNA, 20 bp, Homo sapiens
  source 1..20: mol_type = genomic DNA; note = Gene: MASTL; note = Location (start to end; relative to TSS): MASTL_59_89; note = Orientation (relative to transcription): sense; note = sgRNA Position: 27155437; note = Sequence Name: 56322-704_101_SL_seq_5077
tccagcgatggatcccaccg

SEQ ID NO: 5078 - DNA, 20 bp, Homo sapiens
  source 1..20: mol_type = genomic DNA; note = Gene: MASTL; note = Location (start to end; relative to TSS): MASTL_23_53; note = Orientation (relative to transcription): sense; note = sgRNA Position: 27155401; note = Sequence Name: 56322-704_101_SL_seq_5078
gcggaggggcagtgtctgcg

SEQ ID NO: 5079 - DNA, 20 bp, Homo sapiens
  source 1..20: mol_type = genomic DNA; note = Gene: MASTL; note = Location (start to end; relative to TSS): MASTL_55_85; note = Orientation (relative to transcription): antisense; note = sgRNA Position: 27155413; note = Sequence Name: 56322-704_101_SL_seq_5079
catcgctggacagcatacag

SEQ ID NO: 5080 - DNA, 20 bp, Homo sapiens
  source 1..20: mol_type = genomic DNA; note = Gene: MATK; note = Location (start to end; relative to TSS): MATK_47_77; note = Orientation (relative to transcription): antisense; note = sgRNA Position: 3786330; note = Sequence Name: 56322-704_101_SL_seq_5080
ggggagtgggggaaagcggg

SEQ ID NO: 5081 - DNA, 20 bp, Homo sapiens
  source 1..20: mol_type = genomic DNA; note = Gene: MATK; note = Location (start to end; relative to TSS): MATK_82_112; note = Orientation (relative to transcription): antisense; note = sgRNA Position: 3786295; note = Sequence Name: 56322-704_101_SL_seq_5081
gctccgtttcctcattttgg

SEQ ID NO: 5082 - DNA, 20 bp, Homo sapiens
  source 1..20: mol_type = genomic DNA; note = Gene: MATK; note = Location (start to end; relative to TSS): MATK_39_69; note = Orientation (relative to transcription): antisense; note = sgRNA Position: 3786338; note = Sequence Name: 56322-704_101_SL_seq_5082
ggggaaagcgggaggcgccg

SEQ ID NO: 5083 - DNA, 20 bp, Homo sapiens
  source 1..20: mol_type = genomic DNA; note = Gene: MATK; note = Location (start to end; relative to TSS): MATK_70_100; note = Orientation (relative to transcription): sense; note = sgRNA Position: 3786287; note = Sequence Name: 56322-704_101_SL_seq_5083
tcgcccccaaaatgaggaaa

SEQ ID NO: 5084 - DNA, 20 bp, Homo sapiens
  source 1..20: mol_type = genomic DNA; note = Gene: MATK; note = Location (start to end; relative to TSS): MATK_30_60; note = Orientation (relative to transcription): antisense; note = sgRNA Position: 3786347; note = Sequence Name: 56322-704_101_SL_seq_5084
gggaggcgccgcggcctggg

SEQ ID NO: 5085 - DNA, 20 bp, Homo sapiens
  source 1..20: mol_type = genomic DNA; note = Gene: MATK; note = Location (start to end; relative to TSS): MATK_60_90; note = Orientation (relative to transcription): antisense; note = sgRNA Position: 3786317; note = Sequence Name: 56322-704_101_SL_seq_5085
gcgaagaagggtcggggagt

SEQ ID NO: 5086 - DNA, 20 bp, Homo sapiens
  source 1..20: mol_type = genomic DNA; note = Gene: MATK; note = Location (start to end; relative to TSS): MATK_21_51; note = Orientation (relative to transcription): antisense; note = sgRNA Position: 3786356; note = Sequence Name: 56322-704_101_SL_seq_5086
cgcggcctgggaggcccccg

SEQ ID NO: 5087 - DNA, 20 bp, Homo sapiens
  source 1..20: mol_type = genomic DNA; note = Gene: MATK; note = Location (start to end; relative to TSS): MATK_51_81; note = Orientation (relative to transcription): antisense; note = sgRNA Position: 3786326; note = Sequence Name: 56322-704_101_SL_seq_5087
ggtcggggagtgggggaaag

SEQ ID NO: 5088 - DNA, 20 bp, Homo sapiens
  source 1..20: mol_type = genomic DNA; note = Gene: MATK; note = Location (start to end; relative to TSS): MATK_20_50; note = Orientation (relative to transcription): antisense; note = sgRNA Position: 3786357; note = Sequence Name: 56322-704_101_SL_seq_5088
gcggcctgggaggcccccgc

SEQ ID NO: 5089 - DNA, 20 bp, Homo sapiens
  source 1..20: mol_type = genomic DNA; note = Gene: MATK; note = Location (start to end; relative to TSS): MATK_50_80; note = Orientation (relative to transcription): antisense; note = sgRNA Position: 3786327; note = Sequence Name: 56322-704_101_SL_seq_5089
gtcggggagtgggggaaagc

SEQ ID NO: 5090 - DNA, 20 bp, Homo sapiens
  source 1..20: mol_type = genomic DNA; note = Gene: MELK; note = Location (start to end; relative to TSS): MELK_42_72; note = Orientation (relative to transcription): antisense; note = sgRNA Position: 36572943; note = Sequence Name: 56322-704_101_SL_seq_5090
gcctgctgtcctgagagacg

SEQ ID NO: 5091 - DNA, 20 bp, Homo sapiens
  source 1..20: mol_type = genomic DNA; note = Gene: MELK; note = Location (start to end; relative to TSS): MELK_85_115; note = Orientation (relative to transcription): antisense; note = sgRNA Position: 36572986; note = Sequence Name: 56322-704_101_SL_seq_5091
gggcggagggcacggctgag

SEQ ID NO: 5092 - DNA, 20 bp, Homo sapiens
  source 1..20: mol_type = genomic DNA; note = Gene: MELK; note = Location (start to end; relative to TSS): MELK_38_68; note = Orientation (relative to transcription): antisense; note = sgRNA Position: 36572939; note = Sequence Name: 56322-704_101_SL_seq_5092
gctgtcctgagagacgcggc

SEQ ID NO: 5093 - DNA, 20 bp, Homo sapiens
  source 1..20: mol_type = genomic DNA; note = Gene: MELK; note = Location (start to end; relative to TSS): MELK_82_112; note = Orientation (relative to transcription): sense; note = sgRNA Position: 36573003; note = Sequence Name: 56322-704_101_SL_seq_5093
agccgtgccctccgcccctc

SEQ ID NO: 5094 - DNA, 20 bp, Homo sapiens
  source 1..20: mol_type = genomic DNA; note = Gene: MELK; note = Location (start to end; relative to TSS): MELK_33_63; note = Orientation (relative to transcription): antisense; note = sgRNA Position: 36572934; note = Sequence Name: 56322-704_101_SL_seq_5094
cctgagagacgcggctggta

SEQ ID NO: 5095 - DNA, 20 bp, Homo sapiens
  source 1..20: mol_type = genomic DNA; note = Gene: MELK; note = Location (start to end; relative to TSS): MELK_66_96; note = Orientation (relative to transcription): antisense; note = sgRNA Position: 36572967; note = Sequence Name: 56322-704_101_SL_seq_5095
gcggcgcccgacagaaggac

SEQ ID NO: 5096 - DNA, 20 bp, Homo sapiens
  source 1..20: mol_type = genomic DNA; note = Gene: MELK; note = Location (start to end; relative to TSS): MELK_24_54; note = Orientation (relative to transcription): sense; note = sgRNA Position: 36572945; note = Sequence Name: 56322-704_101_SL_seq_5096
ccgtaccagccgcgtctctc

SEQ ID NO: 5097 - DNA, 20 bp, Homo sapiens
  source 1..20: mol_type = genomic DNA; note = Gene: MELK; note = Location (start to end; relative to TSS): MELK_65_95; note = Orientation (relative to transcription): antisense; note = sgRNA Position: 36572966; note = Sequence Name: 56322-704_101_SL_seq_5097
cggcgcccgacagaaggaca

SEQ ID NO: 5098 - DNA, 20 bp, Homo sapiens
  source 1..20: mol_type = genomic DNA; note = Gene: MELK; note = Location (start to end; relative to TSS): MELK_32_62; note = Orientation (relative to transcription): sense; note = sgRNA Position: 36572953; note = Sequence Name: 56322-704_101_SL_seq_5098
gccgcgtctctcaggacagc

SEQ ID NO: 5099 - DNA, 20 bp, Homo sapiens
  source 1..20: mol_type = genomic DNA; note = Gene: MELK; note = Location (start to end; relative to TSS): MELK_64_94; note = Orientation (relative to transcription): antisense; note = sgRNA Position: 36572965; note = Sequence Name: 56322-704_101_SL_seq_5099
ggcgcccgacagaaggacag

SEQ ID NO: 5100 - DNA, 20 bp, Homo sapiens
  source 1..20: mol_type = genomic DNA; note = Gene: MERTK; note = Location (start to end; relative to TSS): MERTK_27_57; note = Orientation (relative to transcription): sense; note = sgRNA Position: 111898660; note = Sequence Name: 56322-704_101_SL_seq_5100
gcttcgctggcgcgcttggc

SEQ ID NO: 5101 - DNA, 20 bp, Homo sapiens
  source 1..20: mol_type = genomic DNA; note = Gene: MERTK; note = Location (start to end; relative to TSS): MERTK_96_126; note = Orientation (relative to transcription): sense; note = sgRNA Position: 111898729; note = Sequence Name: 56322-704_101_SL_seq_5101
aaattacagatccgcagccc

SEQ ID NO: 5102 - DNA, 20 bp, Homo sapiens
  source 1..20: mol_type = genomic DNA; note = Gene: MERTK; note = Location (start to end; relative to TSS): MERTK_25_55; note = Orientation (relative to transcription): antisense; note = sgRNA Position: 111898638; note = Sequence Name: 56322-704_101_SL_seq_5102
cgccagcgaagctccctgtc

SEQ ID NO: 5103 - DNA, 20 bp, Homo sapiens
  source 1..20: mol_type = genomic DNA; note = Gene: MERTK; note = Location (start to end; relative to TSS): MERTK_93_123; note = Orientation (relative to transcription): antisense; note = sgRNA Position: 111898706; note = Sequence Name: 56322-704_101_SL_seq_5103
atctgtaatttctctccgga

SEQ ID NO: 5104 - DNA, 20 bp, Homo sapiens
  source 1..20: mol_type = genomic DNA; note = Gene: MERTK; note = Location (start to end; relative to TSS): MERTK_21_51; note = Orientation (relative to transcription): antisense; note = sgRNA Position: 111898634; note = Sequence Name: 56322-704_101_SL_seq_5104
agcgaagctccctgtccggg

SEQ ID NO: 5105 - DNA, 20 bp, Homo sapiens
  source 1..20: mol_type = genomic DNA; note = Gene: MERTK; note = Location (start to end; relative to TSS): MERTK_89_119; note = Orientation (relative to transcription): antisense; note = sgRNA Position: 111898702; note = Sequence Name: 56322-704_101_SL_seq_5105
gtaatttctctccggacgga

SEQ ID NO: 5106 - DNA, 20 bp, Homo sapiens
  source 1..20: mol_type = genomic DNA; note = Gene: MERTK; note = Location (start to end; relative to TSS): MERTK_23_53; note = Orientation (relative to transcription): sense; note = sgRNA Position: 111898656; note = Sequence Name: 56322-704_101_SL_seq_5106
gggagcttcgctggcgcgct

SEQ ID NO: 5107 - DNA, 20 bp, Homo sapiens
  source 1..20: mol_type = genomic DNA; note = Gene: MERTK; note = Location (start to end; relative to TSS): MERTK_69_99; note = Orientation (relative to transcription): sense; note = sgRNA Position: 111898702; note = Sequence Name: 56322-704_101_SL_seq_5107
cgtccatctgtccatccgtc

SEQ ID NO: 5108 - DNA, 20 bp, Homo sapiens
  source 1..20: mol_type = genomic DNA; note = Gene: MERTK; note = Location (start to end; relative to TSS): MERTK_24_54; note = Orientation (relative to transcription): antisense; note = sgRNA Position: 111898637; note = Sequence Name: 56322-704_101_SL_seq_5108
gccagcgaagctccctgtcc

SEQ ID NO: 5109 - DNA, 20 bp, Homo sapiens
  source 1..20: mol_type = genomic DNA; note = Gene: MERTK; note = Location (start to end; relative to TSS): MERTK_55_85; note = Orientation (relative to transcription): antisense; note = sgRNA Position: 111898668; note = Sequence Name: 56322-704_101_SL_seq_5109
tcccgaacctgtcctgtcgc

SEQ ID NO: 5110 - DNA, 20 bp, Homo sapiens
  source 1..20: mol_type = genomic DNA; note = Gene: MET; note = Location (start to end; relative to TSS): MET_43_73; note = Orientation (relative to transcription): antisense; note = sgRNA Position: 116672245; note = Sequence Name: 56322-704_101_SL_seq_5110
ttggggccggaggcaccgcc

SEQ ID NO: 5111 - DNA, 20 bp, Homo sapiens
  source 1..20: mol_type = genomic DNA; note = Gene: MET; note = Location (start to end; relative to TSS): MET_86_116; note = Orientation (relative to transcription): sense; note = sgRNA Position: 116672308; note = Sequence Name: 56322-704_101_SL_seq_5111
ccgatgcccggctgagtcac

SEQ ID NO: 5112 - DNA, 20 bp, Homo sapiens
  source 1..20: mol_type = genomic DNA; note = Gene: MET; note = Location (start to end; relative to TSS): MET_44_74; note = Orientation (relative to transcription): sense; note = sgRNA Position: 116672266; note = Sequence Name: 56322-704_101_SL_seq_5112
cctccggccccaacgcgccc

SEQ ID NO: 5113 - DNA, 20 bp, Homo sapiens
  source 1..20: mol_type = genomic DNA; note = Gene: MET; note = Location (start to end; relative to TSS): MET_79_109; note = Orientation (relative to transcription): antisense; note = sgRNA Position: 116672281; note = Sequence Name: 56322-704_101_SL_seq_5113
gcatcggcgcgcgcggcccg

SEQ ID NO: 5114 - DNA, 20 bp, Homo sapiens
  source 1..20: mol_type = genomic DNA; note = Gene: MET; note = Location (start to end; relative to TSS): MET_28_58; note = Orientation (relative to transcription): sense; note = sgRNA Position: 116672250; note = Sequence Name: 56322-704_101_SL_seq_5114
tggtcgcctggcggtgcctc

SEQ ID NO: 5115 - DNA, 20 bp, Homo sapiens
  source 1..20: mol_type = genomic DNA; note = Gene: MET; note = Location (start to end; relative to TSS): MET_76_106; note = Orientation (relative to transcription): antisense; note = sgRNA Position: 116672278; note = Sequence Name: 56322-704_101_SL_seq_5115
tcggcgcgcgcggcccgcgg

SEQ ID NO: 5116 - DNA, 20 bp, Homo sapiens
  source 1..20: mol_type = genomic DNA; note = Gene: MET; note = Location (start to end; relative to TSS): MET_29_59; note = Orientation (relative to transcription): antisense; note = sgRNA Position: 116672231; note = Sequence Name: 56322-704_101_SL_seq_5116
accgccaggcgaccagactg

SEQ ID NO: 5117 - DNA, 20 bp, Homo sapiens
  source 1..20: mol_type = genomic DNA; note = Gene: MET; note = Location (start to end; relative to TSS): MET_60_90; note = Orientation (relative to transcription): antisense; note = sgRNA Position: 116672262; note = Sequence Name: 56322-704_101_SL_seq_5117
gcggcggcccgggcgcgttg

SEQ ID NO: 5118 - DNA, 20 bp, Homo sapiens
  source 1..20: mol_type = genomic DNA; note = Gene: MET; note = Location (start to end; relative to TSS): MET_19_49; note = Orientation (relative to transcription): sense; note = sgRNA Position: 116672241; note = Sequence Name: 56322-704_101_SL_seq_5118
gcctcagtctggtcgcctgg

SEQ ID NO: 5119 - DNA, 20 bp, Homo sapiens
  source 1..20: mol_type = genomic DNA; note = Gene: MET; note = Location (start to end; relative to TSS): MET_53_83; note = Orientation (relative to transcription): antisense; note = sgRNA Position: 116672255; note = Sequence Name: 56322-704_101_SL_seq_5119
cccgggcgcgttggggccgg

SEQ ID NO: 5120 - DNA, 20 bp, Homo sapiens
  source 1..20: mol_type = genomic DNA; note = Gene: MINK1; note = Location (start to end; relative to TSS): MINK1_29_59; note = Orientation (relative to transcription): sense; note = sgRNA Position: 4833395; note = Sequence Name: 56322-704_101_SL_seq_5120
aggctcgggtggctggctcc

SEQ ID NO: 5121 - DNA, 20 bp, Homo sapiens
  source 1..20: mol_type = genomic DNA; note = Gene: MINK1; note = Location (start to end; relative to TSS): MINK1_86_116; note = Orientation (relative to transcription): sense; note = sgRNA Position: 4833452; note = Sequence Name: 56322-704_101_SL_seq_5121
gcgccggccctccccctccc

SEQ ID NO: 5122 - DNA, 20 bp, Homo sapiens
  source 1..20: mol_type = genomic DNA; note = Gene: MINK1; note = Location (start to end; relative to TSS): MINK1_30_60; note = Orientation (relative to transcription): sense; note = sgRNA Position: 4833396; note = Sequence Name: 56322-704_101_SL_seq_5122
ggctcgggtggctggctccg

SEQ ID NO: 5123 - DNA, 20 bp, Homo sapiens
  source 1..20: mol_type = genomic DNA; note = Gene: MINK1; note = Location (start to end; relative to TSS): MINK1_70_100; note = Orientation (relative to transcription): sense; note = sgRNA Position: 4833436; note = Sequence Name: 56322-704_101_SL_seq_5123
cggtgggtcggtcctcgcgc

SEQ ID NO: 5124 - DNA, 20 bp, Homo sapiens
  source 1..20: mol_type = genomic DNA; note = Gene: MINK1; note = Location (start to end; relative to TSS): MINK1_28_58; note = Orientation (relative to transcription): sense; note = sgRNA Position: 4833394; note = Sequence Name: 56322-704_101_SL_seq_5124
taggctcgggtggctggctc

SEQ ID NO: 5125 - DNA, 20 bp, Homo sapiens
  source 1..20: mol_type = genomic DNA; note = Gene: MINK1; note = Location (start to end; relative to TSS): MINK1_58_88; note = Orientation (relative to transcription): sense; note = sgRNA Position: 4833424; note = Sequence Name: 56322-704_101_SL_seq_5125
gcgcctgtcagtcggtgggt

SEQ ID NO: 5126 - DNA, 20 bp, Homo sapiens
  source 1..20: mol_type = genomic DNA; note = Gene: MINK1; note = Location (start to end; relative to TSS): MINK1_18_48; note = Orientation (relative to transcription): sense; note = sgRNA Position: 4833384; note = Sequence Name: 56322-704_101_SL_seq_5126
ggagaggtggtaggctcggg

SEQ ID NO: 5127 - DNA, 20 bp, Homo sapiens
  source 1..20: mol_type = genomic DNA; note = Gene: MINK1; note = Location (start to end; relative to TSS): MINK1_53_83; note = Orientation (relative to transcription): sense; note = sgRNA Position: 4833419; note = Sequence Name: 56322-704_101_SL_seq_5127
agatagcgcctgtcagtcgg

SEQ ID NO: 5128 - DNA, 20 bp, Homo sapiens
  source 1..20: mol_type = genomic DNA; note = Gene: MINK1; note = Location (start to end; relative to TSS): MINK1_19_49; note = Orientation (relative to transcription): antisense; note = sgRNA Position: 4833365; note = Sequence Name: 56322-704_101_SL_seq_5128
gcctaccacctctcctgcgc

SEQ ID NO: 5129 - DNA, 20 bp, Homo sapiens
  source 1..20: mol_type = genomic DNA; note = Gene: MINK1; note = Location (start to end; relative to TSS): MINK1_50_80; note = Orientation (relative to transcription): sense; note = sgRNA Position: 4833416; note = Sequence Name: 56322-704_101_SL_seq_5129
gggagatagcgcctgtcagt

SEQ ID NO: 5130 - DNA, 20 bp, Homo sapiens
  source 1..20: mol_type = genomic DNA; note = Gene: MKNK1; note = Location (start to end; relative to TSS): MKNK1_38_68; note = Orientation (relative to transcription): sense; note = sgRNA Position: 46604206; note = Sequence Name: 56322-704_101_SL_seq_5130
gggtgcgcgcgaccgctccc

SEQ ID NO: 5131 - DNA, 20 bp, Homo sapiens
  source 1..20: mol_type = genomic DNA; note = Gene: MKNK1; note = Location (start to end; relative to TSS): MKNK1_94_124; note = Orientation (relative to transcription): sense; note = sgRNA Position: 46604150; note = Sequence Name: 56322-704_101_SL_seq_5131
aggtattcctccgagctaaa

SEQ ID NO: 5132 - DNA, 20 bp, Homo sapiens
  source 1..20: mol_type = genomic DNA; note = Gene: MKNK1; note = Location (start to end; relative to TSS): MKNK1_41_71; note = Orientation (relative to transcription): sense; note = sgRNA Position: 46604203; note = Sequence Name: 56322-704_101_SL_seq_5132
tgcgcgcgaccgctccccgg

SEQ ID NO: 5133 - DNA, 20 bp, Homo sapiens
  source 1..20: mol_type = genomic DNA; note = Gene: MKNK1; note = Location (start to end; relative to TSS): MKNK1_76_106; note = Orientation (relative to transcription): antisense; note = sgRNA Position: 46604188; note = Sequence Name: 56322-704_101_SL_seq_5133
ggtctcgcttttaccttcgc

SEQ ID NO: 5134 - DNA, 20 bp, Homo sapiens
  source 1..20: mol_type = genomic DNA; note = Gene: MKNK1; note = Location (start to end; relative to TSS): MKNK1_42_72; note = Orientation (relative to transcription): sense; note = sgRNA Position: 46604202; note = Sequence Name: 56322-704_101_SL_seq_5134
gcgcgcgaccgctccccggc

SEQ ID NO: 5135 - DNA, 20 bp, Homo sapiens
  source 1..20: mol_type = genomic DNA; note = Gene: MKNK1; note = Location (start to end; relative to TSS): MKNK1_74_104; note = Orientation (relative to transcription): sense; note = sgRNA Position: 46604170; note = Sequence Name: 56322-704_101_SL_seq_5135
aggtaaaagcgagacctgcg

SEQ ID NO: 5136 - DNA, 20 bp, Homo sapiens
  source 1..20: mol_type = genomic DNA; note = Gene: MKNK1; note = Location (start to end; relative to TSS): MKNK1_18_48; note = Orientation (relative to transcription): sense; note = sgRNA Position: 46604226; note = Sequence Name: 56322-704_101_SL_seq_5136
gaggagcgatctgcaggtag

SEQ ID NO: 5137 - DNA, 20 bp, Homo sapiens
  source 1..20: mol_type = genomic DNA; note = Gene: MKNK1; note = Location (start to end; relative to TSS): MKNK1_59_89; note = Orientation (relative to transcription): antisense; note = sgRNA Position: 46604205; note = Sequence Name: 56322-704_101_SL_seq_5137
cgctggctcccgccggggag

SEQ ID NO: 5138 - DNA, 20 bp, Homo sapiens
  source 1..20: mol_type = genomic DNA; note = Gene: MKNK1; note = Location (start to end; relative to TSS): MKNK1_17_47; note = Orientation (relative to transcription): sense; note = sgRNA Position: 46604227; note = Sequence Name: 56322-704_101_SL_seq_5138
ggaggagcgatctgcaggta

SEQ ID NO: 5139 - DNA, 20 bp, Homo sapiens
  source 1..20: mol_type = genomic DNA; note = Gene: MKNK1; note = Location (start to end; relative to TSS): MKNK1_54_84; note = Orientation (relative to transcription): sense; note = sgRNA Position: 46604190; note = Sequence Name: 56322-704_101_SL_seq_5139
tccccggcgggagccagcga

SEQ ID NO: 5140 - DNA, 20 bp, Homo sapiens
  source 1..20: mol_type = genomic DNA; note = Gene: MKNK2; note = Location (start to end; relative to TSS): MKNK2_38_68; note = Orientation (relative to transcription): antisense; note = sgRNA Position: 2051202; note = Sequence Name: 56322-704_101_SL_seq_5140
cgccgccgccgccgccagcg

SEQ ID NO: 5141 - DNA, 20 bp, Homo sapiens
  source 1..20: mol_type = genomic DNA; note = Gene: MKNK2; note = Location (start to end; relative to TSS): MKNK2_68_98; note = Orientation (relative to transcription): antisense; note = sgRNA Position: 2051172; note = Sequence Name: 56322-704_101_SL_seq_5141
accccgctccgcggaccgcg

SEQ ID NO: 5142 - DNA, 20 bp, Homo sapiens
  source 1..20: mol_type = genomic DNA; note = Gene: MKNK2; note = Location (start to end; relative to TSS): MKNK2_24_54; note = Orientation (relative to transcription): antisense; note = sgRNA Position: 2051216; note = Sequence Name: 56322-704_101_SL_seq_5142
ccagcgcggacccctctacc

SEQ ID NO: 5143 - DNA, 20 bp, Homo sapiens
  source 1..20: mol_type = genomic DNA; note = Gene: MKNK2; note = Location (start to end; relative to TSS): MKNK2_66_96; note = Orientation (relative to transcription): antisense; note = sgRNA Position: 2051174; note = Sequence Name: 56322-704_101_SL_seq_5143
cccgctccgcggaccgcgcg

SEQ ID NO: 5144 - DNA, 20 bp, Homo sapiens
  source 1..20: mol_type = genomic DNA; note = Gene: MKNK2; note = Location (start to end; relative to TSS): MKNK2_23_53; note = Orientation (relative to transcription): antisense; note = sgRNA Position: 2051217; note = Sequence Name: 56322-704_101_SL_seq_5144
cagcgcggacccctctacct

SEQ ID NO: 5145 - DNA, 20 bp, Homo sapiens
  source 1..20: mol_type = genomic DNA; note = Gene: MKNK2; note = Location (start to end; relative to TSS): MKNK2_58_88; note = Orientation (relative to transcription): sense; note = sgRNA Position: 2051162; note = Sequence Name: 56322-704_101_SL_seq_5145
cccgcgcggtccgcggagcg

SEQ ID NO: 5146 - DNA, 20 bp, Homo sapiens
  source 1..20: mol_type = genomic DNA; note = Gene: MKNK2; note = Location (start to end; relative to TSS): MKNK2_21_51; note = Orientation (relative to transcription): sense; note = sgRNA Position: 2051199; note = Sequence Name: 56322-704_101_SL_seq_5146
agaggggtccgcgctggcgg

SEQ ID NO: 5147 - DNA, 20 bp, Homo sapiens
  source 1..20: mol_type = genomic DNA; note = Gene: MKNK2; note = Location (start to end; relative to TSS): MKNK2_56_86; note = Orientation (relative to transcription): sense; note = sgRNA Position: 2051164; note = Sequence Name: 56322-704_101_SL_seq_5147
tccccgcgcggtccgcggag

SEQ ID NO: 5148 - DNA, 20 bp, Homo sapiens
  source 1..20: mol_type = genomic DNA; note = Gene: MKNK2; note = Location (start to end; relative to TSS): MKNK2_18_48; note = Orientation (relative to transcription): sense; note = sgRNA Position: 2051202; note = Sequence Name: 56322-704_101_SL_seq_5148
ggtagaggggtccgcgctgg

SEQ ID NO: 5149 - DNA, 20 bp, Homo sapiens
  source 1..20: mol_type = genomic DNA; note = Gene: MKNK2; note = Location (start to end; relative to TSS): MKNK2_51_81; note = Orientation (relative to transcription): sense; note = sgRNA Position: 2051169; note = Sequence Name: 56322-704_101_SL_seq_5149
gctgttccccgcgcggtccg

SEQ ID NO: 5150 - DNA, 20 bp, Homo sapiens
  source 1..20: mol_type = genomic DNA; note = Gene: MLKL; note = Location (start to end; relative to TSS): MLKL_56_86; note = Orientation (relative to transcription): sense; note = sgRNA Position: 74700782; note = Sequence Name: 56322-704_101_SL_seq_5150
gcatcacagacctgaggcag

SEQ ID NO: 5151 - DNA, 20 bp, Homo sapiens
  source 1..20: mol_type = genomic DNA; note = Gene: MLKL; note = Location (start to end; relative to TSS): MLKL_88_118; note = Orientation (relative to transcription): antisense; note = sgRNA Position: 74700770; note = Sequence Name: 56322-704_101_SL_seq_5151
ttctgtccagtgccctccgg

SEQ ID NO: 5152 - DNA, 20 bp, Homo sapiens
  source 1..20: mol_type = genomic DNA; note = Gene: MLKL; note = Location (start to end; relative to TSS): MLKL_34_64; note = Orientation (relative to transcription): sense; note = sgRNA Position: 74700804; note = Sequence Name: 56322-704_101_SL_seq_5152
agtgtcgcagcattctctgc

SEQ ID NO: 5153 - DNA, 20 bp, Homo sapiens
  source 1..20: mol_type = genomic DNA; note = Gene: MLKL; note = Location (start to end; relative to TSS): MLKL_66_96; note = Orientation (relative to transcription): sense; note = sgRNA Position: 74700772; note = Sequence Name: 56322-704_101_SL_seq_5153
cctgaggcagtggcctccgg

SEQ ID NO: 5154 - DNA, 20 bp, Homo sapiens
  source 1..20: mol_type = genomic DNA; note = Gene: MLKL; note = Location (start to end; relative to TSS): MLKL_27_57; note = Orientation (relative to transcription): antisense; note = sgRNA Position: 74700831; note = Sequence Name: 56322-704_101_SL_seq_5154
cgacacttccccctccgacg

SEQ ID NO: 5155 - DNA, 20 bp, Homo sapiens
  source 1..20: mol_type = genomic DNA; note = Gene: MLKL; note = Location (start to end; relative to TSS): MLKL_63_93; note = Orientation (relative to transcription): sense; note = sgRNA Position: 74700775; note = Sequence Name: 56322-704_101_SL_seq_5155
agacctgaggcagtggcctc

SEQ ID NO: 5156 - DNA, 20 bp, Homo sapiens
  source 1..20: mol_type = genomic DNA; note = Gene: MLKL; note = Location (start to end; relative to TSS): MLKL_10_40; note = Orientation (relative to transcription): sense; note = sgRNA Position: 74700828; note = Sequence Name: 56322-704_101_SL_seq_5156
agctggagccacgtcggagg

SEQ ID NO: 5157 - DNA, 20 bp, Homo sapiens
  source 1..20: mol_type = genomic DNA; note = Gene: MLKL; note = Location (start to end; relative to TSS): MLKL_56_86; note = Orientation (relative to transcription): sense; note = sgRNA Position: 74700782; note = Sequence Name: 56322-704_101_SL_seq_5157
gcatcacagacctgaggcag

SEQ ID NO: 5158 - DNA, 20 bp, Homo sapiens
  source 1..20: mol_type = genomic DNA; note = Gene: MLKL; note = Location (start to end; relative to TSS): MLKL_9_39; note = Orientation (relative to transcription): sense; note = sgRNA Position: 74700829; note = Sequence Name: 56322-704_101_SL_seq_5158
cagctggagccacgtcggag

SEQ ID NO: 5159 - DNA, 20 bp, Homo sapiens
  source 1..20: mol_type = genomic DNA; note = Gene: MLKL; note = Location (start to end; relative to TSS): MLKL_50_80; note = Orientation (relative to transcription): sense; note = sgRNA Position: 74700788; note = Sequence Name: 56322-704_101_SL_seq_5159
ctgcaggcatcacagacctg

SEQ ID NO: 5160 - DNA, 20 bp, Homo sapiens
  source 1..20: mol_type = genomic DNA; note = Gene: MOK; note = Location (start to end; relative to TSS): MOK_50_80; note = Orientation (relative to transcription): sense; note = sgRNA Position: 102305090; note = Sequence Name: 56322-704_101_SL_seq_5160
tctccttcgagggaccacca

SEQ ID NO: 5161 - DNA, 20 bp, Homo sapiens
  source 1..20: mol_type = genomic DNA; note = Gene: MOK; note = Location (start to end; relative to TSS): MOK_85_115; note = Orientation (relative to transcription): sense; note = sgRNA Position: 102305055; note = Sequence Name: 56322-704_101_SL_seq_5161
gggaccccgcctcagggaag

SEQ ID NO: 5162 - DNA, 20 bp, Homo sapiens
  source 1..20: mol_type = genomic DNA; note = Gene: MOK; note = Location (start to end; relative to TSS): MOK_39_69; note = Orientation (relative to transcription): sense; note = sgRNA Position: 102305101; note = Sequence Name: 56322-704_101_SL_seq_5162
atctctaacgctctccttcg

SEQ ID NO: 5163 - DNA, 20 bp, Homo sapiens
  source 1..20: mol_type = genomic DNA; note = Gene: MOK; note = Location (start to end; relative to TSS): MOK_76_106; note = Orientation (relative to transcription): antisense; note = sgRNA Position: 102305084; note = Sequence Name: 56322-704_101_SL_seq_5163
gtcccgcactaggatctccg

SEQ ID NO: 5164 - DNA, 20 bp, Homo sapiens
  source 1..20: mol_type = genomic DNA; note = Gene: MOK; note = Location (start to end; relative to TSS): MOK_40_70; note = Orientation (relative to transcription): sense; note = sgRNA Position: 102305100; note = Sequence Name: 56322-704_101_SL_seq_5164
tctctaacgctctccttcga

SEQ ID NO: 5165 - DNA, 20 bp, Homo sapiens
  source 1..20: mol_type = genomic DNA; note = Gene: MOK; note = Location (start to end; relative to TSS): MOK_73_103; note = Orientation (relative to transcription): antisense; note = sgRNA Position: 102305087; note = Sequence Name: 56322-704_101_SL_seq_5165
ccgcactaggatctccgtgg

SEQ ID NO: 5166 - DNA, 20 bp, Homo sapiens
  source 1..20: mol_type = genomic DNA; note = Gene: MOK; note = Location (start to end; relative to TSS): MOK_16_46; note = Orientation (relative to transcription): sense; note = sgRNA Position: 102305124; note = Sequence Name: 56322-704_101_SL_seq_5166
cagggacacaacatggcggc

SEQ ID NO: 5167 - DNA, 20 bp, Homo sapiens
  source 1..20: mol_type = genomic DNA; note = Gene: MOK; note = Location (start to end; relative to TSS): MOK_62_92; note = Orientation (relative to transcription): antisense; note = sgRNA Position: 102305098; note = Sequence Name: 56322-704_101_SL_seq_5167
tctccgtggtggtccctcga

SEQ ID NO: 5168 - DNA, 20 bp, Homo sapiens
  source 1..20: mol_type = genomic DNA; note = Gene: MOK; note = Location (start to end; relative to TSS): MOK_15_45; note = Orientation (relative to transcription): sense; note = sgRNA Position: 102305125; note = Sequence Name: 56322-704_101_SL_seq_5168
acagggacacaacatggcgg

SEQ ID NO: 5169 - DNA, 20 bp, Homo sapiens
  source 1..20: mol_type = genomic DNA; note = Gene: MOK; note = Location (start to end; relative to TSS): MOK_50_80; note = Orientation (relative to transcription): sense; note = sgRNA Position: 102305090; note = Sequence Name: 56322-704_101_SL_seq_5169
tctccttcgagggaccacca

SEQ ID NO: 5170 - DNA, 20 bp, Homo sapiens
  source 1..20: mol_type = genomic DNA; note = Gene: MOS; note = Location (start to end; relative to TSS): MOS_24_54; note = Orientation (relative to transcription): sense; note = sgRNA Position: 56113934; note = Sequence Name: 56322-704_101_SL_seq_5170
ccggagcgagttttccccat

SEQ ID NO: 5171 - DNA, 20 bp, Homo sapiens
  source 1..20: mol_type = genomic DNA; note = Gene: MOS; note = Location (start to end; relative to TSS): MOS_80_110; note = Orientation (relative to transcription): antisense; note = sgRNA Position: 56113898; note = Sequence Name: 56322-704_101_SL_seq_5171
cagcttcgcaggtagctctg

SEQ ID NO: 5172 - DNA, 20 bp, Homo sapiens
  source 1..20: mol_type = genomic DNA; note = Gene: MOS; note = Location (start to end; relative to TSS): MOS_25_55; note = Orientation (relative to transcription): antisense; note = sgRNA Position: 56113953; note = Sequence Name: 56322-704_101_SL_seq_5172
gaaaactcgctccggaggta

SEQ ID NO: 5173 - DNA, 20 bp, Homo sapiens
  source 1..20: mol_type = genomic DNA; note = Gene: MOS; note = Location (start to end; relative to TSS): MOS_79_109; note = Orientation (relative to transcription): antisense; note = sgRNA Position: 56113899; note = Sequence Name: 56322-704_101_SL_seq_5173
agcttcgcaggtagctctga

SEQ ID NO: 5174 - DNA, 20 bp, Homo sapiens
  source 1..20: mol_type = genomic DNA; note = Gene: MOS; note = Location (start to end; relative to TSS): MOS_26_56; note = Orientation (relative to transcription): antisense; note = sgRNA Position: 56113952; note = Sequence Name: 56322-704_101_SL_seq_5174
ggaaaactcgctccggaggt

SEQ ID NO: 5175 - DNA, 20 bp, Homo sapiens
  source 1..20: mol_type = genomic DNA; note = Gene: MOS; note = Location (start to end; relative to TSS): MOS_68_98; note = Orientation (relative to transcription): antisense; note = sgRNA Position: 56113910; note = Sequence Name: 56322-704_101_SL_seq_5175
tagctctgagggactgctgc

SEQ ID NO: 5176 - DNA, 20 bp, Homo sapiens
  source 1..20: mol_type = genomic DNA; note = Gene: MOS; note = Location (start to end; relative to TSS): MOS_27_57; note = Orientation (relative to transcription): sense; note = sgRNA Position: 56113931; note = Sequence Name: 56322-704_101_SL_seq_5176
gagcgagttttccccatcgg

SEQ ID NO: 5177 - DNA, 20 bp, Homo sapiens
  source 1..20: mol_type = genomic DNA; note = Gene: MOS; note = Location (start to end; relative to TSS): MOS_67_97; note = Orientation (relative to transcription): antisense; note = sgRNA Position: 56113911; note = Sequence Name: 56322-704_101_SL_seq_5177
agctctgagggactgctgca

SEQ ID NO: 5178 - DNA, 20 bp, Homo sapiens
  source 1..20: mol_type = genomic DNA; note = Gene: MOS; note = Location (start to end; relative to TSS): MOS_18_48; note = Orientation (relative to transcription): antisense; note = sgRNA Position: 56113960; note = Sequence Name: 56322-704_101_SL_seq_5178
cgctccggaggtaggggcgt

SEQ ID NO: 5179 - DNA, 20 bp, Homo sapiens
  source 1..20: mol_type = genomic DNA; note = Gene: MOS; note = Location (start to end; relative to TSS): MOS_48_78; note = Orientation (relative to transcription): antisense; note = sgRNA Position: 56113930; note = Sequence Name: 56322-704_101_SL_seq_5179
agggccgcgcgtccaccgat

SEQ ID NO: 5180 - DNA, 20 bp, Homo sapiens
  source 1..20: mol_type = genomic DNA; note = Gene: MST1R; note = Location (start to end; relative to TSS): MST1R_56_86; note = Orientation (relative to transcription): sense; note = sgRNA Position: 49903793; note = Sequence Name: 56322-704_101_SL_seq_5180
gcgtcaggtgctcagacccg

SEQ ID NO: 5181 - DNA, 20 bp, Homo sapiens
  source 1..20: mol_type = genomic DNA; note = Gene: MST1R; note = Location (start to end; relative to TSS): MST1R_89_119; note = Orientation (relative to transcription): antisense; note = sgRNA Position: 49903780; note = Sequence Name: 56322-704_101_SL_seq_5181
gtgaaacccaaatcccttcc

SEQ ID NO: 5182 - DNA, 20 bp, Homo sapiens
  source 1..20: mol_type = genomic DNA; note = Gene: MST1R; note = Location (start to end; relative to TSS): MST1R_41_71; note = Orientation (relative to transcription): sense; note = sgRNA Position: 49903808; note = Sequence Name: 56322-704_101_SL_seq_5182
gtcgtgcgtccgcaggcgtc

SEQ ID NO: 5183 - DNA, 20 bp, Homo sapiens
  source 1..20: mol_type = genomic DNA; note = Gene: MST1R; note = Location (start to end; relative to TSS): MST1R_81_111; note = Orientation (relative to transcription): antisense; note = sgRNA Position: 49903788; note = Sequence Name: 56322-704_101_SL_seq_5183
caaatcccttcccggccctc

SEQ ID NO: 5184 - DNA, 20 bp, Homo sapiens
  source 1..20: mol_type = genomic DNA; note = Gene: MST1R; note = Location (start to end; relative to TSS): MST1R_34_64; note = Orientation (relative to transcription): sense; note = sgRNA Position: 49903815; note = Sequence Name: 56322-704_101_SL_seq_5184
cgttgctgtcgtgcgtccgc

SEQ ID NO: 5185 - DNA, 20 bp, Homo sapiens
  source 1..20: mol_type = genomic DNA; note = Gene: MST1R; note = Location (start to end; relative to TSS): MST1R_66_96; note = Orientation (relative to transcription): sense; note = sgRNA Position: 49903783; note = Sequence Name: 56322-704_101_SL_seq_5185
ctcagacccgagggccggga

SEQ ID NO: 5186 - DNA, 20 bp, Homo sapiens
  source 1..20: mol_type = genomic DNA; note = Gene: MST1R; note = Location (start to end; relative to TSS): MST1R_11_41; note = Orientation (relative to transcription): sense; note = sgRNA Position: 49903838; note = Sequence Name: 56322-704_101_SL_seq_5186
ggcggcaggtgaggcggctg

SEQ ID NO: 5187 - DNA, 20 bp, Homo sapiens
  source 1..20: mol_type = genomic DNA; note = Gene: MST1R; note = Location (start to end; relative to TSS): MST1R_56_86; note = Orientation (relative to transcription): sense; note = sgRNA Position: 49903793; note = Sequence Name: 56322-704_101_SL_seq_5187
gcgtcaggtgctcagacccg

SEQ ID NO: 5188 - DNA, 20 bp, Homo sapiens
  source 1..20: mol_type = genomic DNA; note = Gene: MST1R; note = Location (start to end; relative to TSS): MST1R_10_40; note = Orientation (relative to transcription): sense; note = sgRNA Position: 49903839; note = Sequence Name: 56322-704_101_SL_seq_5188
gggcggcaggtgaggcggct

SEQ ID NO: 5189 - DNA, 20 bp, Homo sapiens
  source 1..20: mol_type = genomic DNA; note = Gene: MST1R; note = Location (start to end; relative to TSS): MST1R_41_71; note = Orientation (relative to transcription): sense; note = sgRNA Position: 49903808; note = Sequence Name: 56322-704_101_SL_seq_5189
gtcgtgcgtccgcaggcgtc

SEQ ID NO: 5190 - DNA, 20 bp, Homo sapiens
  source 1..20: mol_type = genomic DNA; note = Gene: MTOR; note = Location (start to end; relative to TSS): MTOR_42_72; note = Orientation (relative to transcription): sense; note = sgRNA Position: 11262485; note = Sequence Name: 56322-704_101_SL_seq_5190
tgaagcggcggtaccggtgc

SEQ ID NO: 5191 - DNA, 20 bp, Homo sapiens
  source 1..20: mol_type = genomic DNA; note = Gene: MTOR; note = Location (start to end; relative to TSS): MTOR_88_118; note = Orientation (relative to transcription): sense; note = sgRNA Position: 11262439; note = Sequence Name: 56322-704_101_SL_seq_5191
gaagccgcgcggtgagtcta

SEQ ID NO: 5192 - DNA, 20 bp, Homo sapiens
  source 1..20: mol_type = genomic DNA; note = Gene: MTOR; note = Location (start to end; relative to TSS): MTOR_36_66; note = Orientation (relative to transcription): sense; note = sgRNA Position: 11262491; note = Sequence Name: 56322-704_101_SL_seq_5192
ggggcctgaagcggcggtac

SEQ ID NO: 5193 - DNA, 20 bp, Homo sapiens
  source 1..20: mol_type = genomic DNA; note = Gene: MTOR; note = Location (start to end; relative to TSS): MTOR_87_117; note = Orientation (relative to transcription): sense; note = sgRNA Position: 11262440; note = Sequence Name: 56322-704_101_SL_seq_5193
cgaagccgcgcggtgagtct

SEQ ID NO: 5194 - DNA, 20 bp, Homo sapiens
  source 1..20: mol_type = genomic DNA; note = Gene: MTOR; note = Location (start to end; relative to TSS): MTOR_45_75; note = Orientation (relative to transcription): sense; note = sgRNA Position: 11262482; note = Sequence Name: 56322-704_101_SL_seq_5194
agcggcggtaccggtgctgg

SEQ ID NO: 5195 - DNA, 20 bp, Homo sapiens
  source 1..20: mol_type = genomic DNA; note = Gene: MTOR; note = Location (start to end; relative to TSS): MTOR_77_107; note = Orientation (relative to transcription): sense; note = sgRNA Position: 11262450; note = Sequence Name: 56322-704_101_SL_seq_5195
aggccttggccgaagccgcg

SEQ ID NO: 5196 - DNA, 20 bp, Homo sapiens
  source 1..20: mol_type = genomic DNA; note = Gene: MTOR; note = Location (start to end; relative to TSS): MTOR_30_60; note = Orientation (relative to transcription): sense; note = sgRNA Position: 11262497; note = Sequence Name: 56322-704_101_SL_seq_5196
gggcagggggcctgaagcgg

SEQ ID NO: 5197 - DNA, 20 bp, Homo sapiens
  source 1..20: mol_type = genomic DNA; note = Gene: MTOR; note = Location (start to end; relative to TSS): MTOR_63_93; note = Orientation (relative to transcription): sense; note = sgRNA Position: 11262464; note = Sequence Name: 56322-704_101_SL_seq_5197
ggcggcggcagctgaggcct

SEQ ID NO: 5198 - DNA, 20 bp, Homo sapiens
  source 1..20: mol_type = genomic DNA; note = Gene: MTOR; note = Location (start to end; relative to TSS): MTOR_27_57; note = Orientation (relative to transcription): sense; note = sgRNA Position: 11262500; note = Sequence Name: 56322-704_101_SL_seq_5198
gtggggcagggggcctgaag

SEQ ID NO: 5199 - DNA, 20 bp, Homo sapiens
  source 1..20: mol_type = genomic DNA; note = Gene: MTOR; note = Location (start to end; relative to TSS): MTOR_57_87; note = Orientation (relative to transcription): sense; note = sgRNA Position: 11262470; note = Sequence Name: 56322-704_101_SL_seq_5199
ggtgctggcggcggcagctg

SEQ ID NO: 5200 - DNA, 20 bp, Homo sapiens
  source 1..20: mol_type = genomic DNA; note = Gene: MUSK; note = Location (start to end; relative to TSS): MUSK_65_95; note = Orientation (relative to transcription): antisense; note = sgRNA Position: 110668862; note = Sequence Name: 56322-704_101_SL_seq_5200
agttccttctggacaacgca

SEQ ID NO: 5201 - DNA, 20 bp, Homo sapiens
  source 1..20: mol_type = genomic DNA; note = Gene: MUSK; note = Location (start to end; relative to TSS): MUSK_102_132; note = Orientation (relative to transcription): antisense; note = sgRNA Position: 110668899; note = Sequence Name: 56322-704_101_SL_seq_5201
agctctctcatgattaatcc

SEQ ID NO: 5202 - DNA, 20 bp, Homo sapiens
  source 1..20: mol_type = genomic DNA; note = Gene: MUSK; note = Location (start to end; relative to TSS): MUSK_58_88; note = Orientation (relative to transcription): antisense; note = sgRNA Position: 110668855; note = Sequence Name: 56322-704_101_SL_seq_5202
tctggacaacgcaaggaaaa

SEQ ID NO: 5203 - DNA, 20 bp, Homo sapiens
  source 1..20: mol_type = genomic DNA; note = Gene: MUSK; note = Location (start to end; relative to TSS): MUSK_92_122; note = Orientation (relative to transcription): antisense; note = sgRNA Position: 110668889; note = Sequence Name: 56322-704_101_SL_seq_5203
tgattaatccaggctcacgc

SEQ ID NO: 5204 - DNA, 20 bp, Homo sapiens
  source 1..20: mol_type = genomic DNA; note = Gene: MUSK; note = Location (start to end; relative to TSS): MUSK_24_54; note = Orientation (relative to transcription): sense; note = sgRNA Position: 110668841; note = Sequence Name: 56322-704_101_SL_seq_5204
atgctttaaaatgtaaactg

SEQ ID NO: 5205 - DNA, 20 bp, Homo sapiens
  source 1..20: mol_type = genomic DNA; note = Gene: MUSK; note = Location (start to end; relative to TSS): MUSK_75_105; note = Orientation (relative to transcription): sense; note = sgRNA Position: 110668892; note = Sequence Name: 56322-704_101_SL_seq_5205
aacttcgtcctgcgtgagcc

SEQ ID NO: 5206 - DNA, 20 bp, Homo sapiens
  source 1..20: mol_type = genomic DNA; note = Gene: MUSK; note = Location (start to end; relative to TSS): MUSK_17_47; note = Orientation (relative to transcription): antisense; note = sgRNA Position: 110668814; note = Sequence Name: 56322-704_101_SL_seq_5206
aaagcatactttgttgcaaa

SEQ ID NO: 5207 - DNA, 20 bp, Homo sapiens
  source 1..20: mol_type = genomic DNA; note = Gene: MUSK; note = Location (start to end; relative to TSS): MUSK_65_95; note = Orientation (relative to transcription): antisense; note = sgRNA Position: 110668862; note = Sequence Name: 56322-704_101_SL_seq_5207
agttccttctggacaacgca

SEQ ID NO: 5208 - DNA, 20 bp, Homo sapiens
  source 1..20: mol_type = genomic DNA; note = Gene: MUSK; note = Location (start to end; relative to TSS): MUSK_16_46; note = Orientation (relative to transcription): antisense; note = sgRNA Position: 110668813; note = Sequence Name: 56322-704_101_SL_seq_5208
aagcatactttgttgcaaaa

SEQ ID NO: 5209 - DNA, 20 bp, Homo sapiens
  source 1..20: mol_type = genomic DNA; note = Gene: MUSK; note = Location (start to end; relative to TSS): MUSK_58_88; note = Orientation (relative to transcription): antisense; note = sgRNA Position: 110668855; note = Sequence Name: 56322-704_101_SL_seq_5209
tctggacaacgcaaggaaaa

SEQ ID NO: 5210 - DNA, 20 bp, Homo sapiens
  source 1..20: mol_type = genomic DNA; note = Gene: MVK; note = Location (start to end; relative to TSS): MVK_24_54; note = Orientation (relative to transcription): sense; note = sgRNA Position: 109573844; note = Sequence Name: 56322-704_101_SL_seq_5210
gcttcggcgcggaggggcgg

SEQ ID NO: 5211 - DNA, 20 bp, Homo sapiens
  source 1..20: mol_type = genomic DNA; note = Gene: MVK; note = Location (start to end; relative to TSS): MVK_66_96; note = Orientation (relative to transcription): sense; note = sgRNA Position: 109573886; note = Sequence Name: 56322-704_101_SL_seq_5211
ggcaggtgagaggccggggt

SEQ ID NO: 5212 - DNA, 20 bp, Homo sapiens
  source 1..20: mol_type = genomic DNA; note = Gene: MVK; note = Location (start to end; relative to TSS): MVK_21_51; note = Orientation (relative to transcription): sense; note = sgRNA Position: 109573841; note = Sequence Name: 56322-704_101_SL_seq_5212
ccggcttcggcgcggagggg

SEQ ID NO: 5213 - DNA, 20 bp, Homo sapiens
  source 1..20: mol_type = genomic DNA; note = Gene: MVK; note = Location (start to end; relative to TSS): MVK_62_92; note = Orientation (relative to transcription): sense; note = sgRNA Position: 109573882; note = Sequence Name: 56322-704_101_SL_seq_5213
cggcggcaggtgagaggccg

SEQ ID NO: 5214 - DNA, 20 bp, Homo sapiens
  source 1..20: mol_type = genomic DNA; note = Gene: MVK; note = Location (start to end; relative to TSS): MVK_18_48; note = Orientation (relative to transcription): sense; note = sgRNA Position: 109573838; note = Sequence Name: 56322-704_101_SL_seq_5214
gctccggcttcggcgcggag

SEQ ID NO: 5215 - DNA, 20 bp, Homo sapiens
  source 1..20: mol_type = genomic DNA; note = Gene: MVK; note = Location (start to end; relative to TSS): MVK_61_91; note = Orientation (relative to transcription): sense; note = sgRNA Position: 109573881; note = Sequence Name: 56322-704_101_SL_seq_5215
gcggcggcaggtgagaggcc

SEQ ID NO: 5216 - DNA, 20 bp, Homo sapiens
  source 1..20: mol_type = genomic DNA; note = Gene: MVK; note = Location (start to end; relative to TSS): MVK_17_47; note = Orientation (relative to transcription): sense; note = sgRNA Position: 109573837; note = Sequence Name: 56322-704_101_SL_seq_5216
tgctccggcttcggcgcgga

SEQ ID NO: 5217 - DNA, 20 bp, Homo sapiens
  source 1..20: mol_type = genomic DNA; note = Gene: MVK; note = Location (start to end; relative to TSS): MVK_60_90; note = Orientation (relative to transcription): sense; note = sgRNA Position: 109573880; note = Sequence Name: 56322-704_101_SL_seq_5217
ggcggcggcaggtgagaggc

SEQ ID NO: 5218 - DNA, 20 bp, Homo sapiens
  source 1..20: mol_type = genomic DNA; note = Gene: MVK; note = Location (start to end; relative to TSS): MVK_16_46; note = Orientation (relative to transcription): sense; note = sgRNA Position: 109573836; note = Sequence Name: 56322-704_101_SL_seq_5218
ctgctccggcttcggcgcgg

SEQ ID NO: 5219 - DNA, 20 bp, Homo sapiens
  source 1..20: mol_type = genomic DNA; note = Gene: MVK; note = Location (start to end; relative to TSS): MVK_56_86; note = Orientation (relative to transcription): sense; note = sgRNA Position: 109573876; note = Sequence Name: 56322-704_101_SL_seq_5219
cggcggcggcggcaggtgag

SEQ ID NO: 5220 - DNA, 20 bp, Homo sapiens
  source 1..20: mol_type = genomic DNA; note = Gene: MYLK; note = Location (start to end; relative to TSS): MYLK_51_81; note = Orientation (relative to transcription): antisense; note = sgRNA Position: 123884277; note = Sequence Name: 56322-704_101_SL_seq_5220
cggccgcaggcgcacagcgc

SEQ ID NO: 5221 - DNA, 20 bp, Homo sapiens
  source 1..20: mol_type = genomic DNA; note = Gene: MYLK; note = Location (start to end; relative to TSS): MYLK_96_126; note = Orientation (relative to transcription): sense; note = sgRNA Position: 123884212; note = Sequence Name: 56322-704_101_SL_seq_5221
cccgggccgccttcgccgcg

SEQ ID NO: 5222 - DNA, 20 bp, Homo sapiens
  source 1..20: mol_type = genomic DNA; note = Gene: MYLK; note = Location (start to end; relative to TSS): MYLK_45_75; note = Orientation (relative to transcription): sense; note = sgRNA Position: 123884263; note = Sequence Name: 56322-704_101_SL_seq_5222
gcgctgtgcgcctgcggccg

SEQ ID NO: 5223 - DNA, 20 bp, Homo sapiens
  source 1..20: mol_type = genomic DNA; note = Gene: MYLK; note = Location (start to end; relative to TSS): MYLK_79_109; note = Orientation (relative to transcription): sense; note = sgRNA Position: 123884229; note = Sequence Name: 56322-704_101_SL_seq_5223
gcgccggtgccccggctccc

SEQ ID NO: 5224 - DNA, 20 bp, Homo sapiens
  source 1..20: mol_type = genomic DNA; note = Gene: MYLK; note = Location (start to end; relative to TSS): MYLK_39_69; note = Orientation (relative to transcription): sense; note = sgRNA Position: 123884269; note = Sequence Name: 56322-704_101_SL_seq_5224
gagcccgcgctgtgcgcctg

SEQ ID NO: 5225 - DNA, 20 bp, Homo sapiens
  source 1..20: mol_type = genomic DNA; note = Gene: MYLK; note = Location (start to end; relative to TSS): MYLK_71_101; note = Orientation (relative to transcription): sense; note = sgRNA Position: 123884237; note = Sequence Name: 56322-704_101_SL_seq_5225
cccgccgagcgccggtgccc

SEQ ID NO: 5226 - DNA, 20 bp, Homo sapiens
  source 1..20: mol_type = genomic DNA; note = Gene: MYLK; note = Location (start to end; relative to TSS): MYLK_17_47; note = Orientation (relative to transcription): sense; note = sgRNA Position: 123884291; note = Sequence Name: 56322-704_101_SL_seq_5226
agcagggcgctgagcgagct

SEQ ID NO: 5227 - DNA, 20 bp, Homo sapiens
  source 1..20: mol_type = genomic DNA; note = Gene: MYLK; note = Location (start to end; relative to TSS): MYLK_52_82; note = Orientation (relative to transcription): antisense; note = sgRNA Position: 123884276; note = Sequence Name: 56322-704_101_SL_seq_5227
ccggccgcaggcgcacagcg

SEQ ID NO: 5228 - DNA, 20 bp, Homo sapiens
  source 1..20: mol_type = genomic DNA; note = Gene: MYLK; note = Location (start to end; relative to TSS): MYLK_16_46; note = Orientation (relative to transcription): antisense; note = sgRNA Position: 123884312; note = Sequence Name: 56322-704_101_SL_seq_5228
tcagcgccctgctgccgacc

SEQ ID NO: 5229 - DNA, 20 bp, Homo sapiens
  source 1..20: mol_type = genomic DNA; note = Gene: MYLK; note = Location (start to end; relative to TSS): MYLK_51_81; note = Orientation (relative to transcription): antisense; note = sgRNA Position: 123884277; note = Sequence Name: 56322-704_101_SL_seq_5229
cggccgcaggcgcacagcgc

SEQ ID NO: 5230 - DNA, 20 bp, Homo sapiens
  source 1..20: mol_type = genomic DNA; note = Gene: MYLK2; note = Location (start to end; relative to TSS): MYLK2_49_79; note = Orientation (relative to transcription): antisense; note = sgRNA Position: 31819411; note = Sequence Name: 56322-704_101_SL_seq_5230
tggagcaaagaggggcaacc

SEQ ID NO: 5231 - DNA, 20 bp, Homo sapiens
  source 1..20: mol_type = genomic DNA; note = Gene: MYLK2; note = Location (start to end; relative to TSS): MYLK2_83_113; note = Orientation (relative to transcription): antisense; note = sgRNA Position: 31819445; note = Sequence Name: 56322-704_101_SL_seq_5231
gccgaggcctgctaactgag

SEQ ID NO: 5232 - DNA, 20 bp, Homo sapiens
  source 1..20: mol_type = genomic DNA; note = Gene: MYLK2; note = Location (start to end; relative to TSS): MYLK2_42_72; note = Orientation (relative to transcription): sense; note = sgRNA Position: 31819424; note = Sequence Name: 56322-704_101_SL_seq_5232
aggttgcccctctttgctcc

SEQ ID NO: 5233 - DNA, 20 bp, Homo sapiens
  source 1..20: mol_type = genomic DNA; note = Gene: MYLK2; note = Location (start to end; relative to TSS): MYLK2_73_103; note = Orientation (relative to transcription): sense; note = sgRNA Position: 31819455; note = Sequence Name: 56322-704_101_SL_seq_5233
tcccctcagttagcaggcct

SEQ ID NO: 5234 - DNA, 20 bp, Homo sapiens
  source 1..20: mol_type = genomic DNA; note = Gene: MYLK2; note = Location (start to end; relative to TSS): MYLK2_28_58; note = Orientation (relative to transcription): antisense; note = sgRNA Position: 31819390; note = Sequence Name: 56322-704_101_SL_seq_5234
ggttgccgtctgtctcccag

SEQ ID NO: 5235 - DNA, 20 bp, Homo sapiens
  source 1..20: mol_type = genomic DNA; note = Gene: MYLK2; note = Location (start to end; relative to TSS): MYLK2_58_88; note = Orientation (relative to transcription): antisense; note = sgRNA Position: 31819420; note = Sequence Name: 56322-704_101_SL_seq_5235
agaggtacctggagcaaaga

SEQ ID NO: 5236 - DNA, 20 bp, Homo sapiens
  source 1..20: mol_type = genomic DNA; note = Gene: MYLK2; note = Location (start to end; relative to TSS): MYLK2_22_52; note = Orientation (relative to transcription): sense; note = sgRNA Position: 31819404; note = Sequence Name: 56322-704_101_SL_seq_5236
ctgggagacagacggcaacc

SEQ ID NO: 5237 - DNA, 20 bp, Homo sapiens
  source 1..20: mol_type = genomic DNA; note = Gene: MYLK2; note = Location (start to end; relative to TSS): MYLK2_57_87; note = Orientation (relative to transcription): antisense; note = sgRNA Position: 31819419; note = Sequence Name: 56322-704_101_SL_seq_5237
gaggtacctggagcaaagag

SEQ ID NO: 5238 - DNA, 20 bp, Homo sapiens
  source 1..20: mol_type = genomic DNA; note = Gene: MYLK2; note = Location (start to end; relative to TSS): MYLK2_19_49; note = Orientation (relative to transcription): antisense; note = sgRNA Position: 31819381; note = Sequence Name: 56322-704_101_SL_seq_5238
ctgtctcccagcggctgctc

SEQ ID NO: 5239 - DNA, 20 bp, Homo sapiens
  source 1..20: mol_type = genomic DNA; note = Gene: MYLK2; note = Location (start to end; relative to TSS): MYLK2_49_79; note = Orientation (relative to transcription): antisense; note = sgRNA Position: 31819411; note = Sequence Name: 56322-704_101_SL_seq_5239
tggagcaaagaggggcaacc

SEQ ID NO: 5240 - DNA, 20 bp, Homo sapiens
  source 1..20: mol_type = genomic DNA; note = Gene: MYLK3; note = Location (start to end; relative to TSS): MYLK3_23_53; note = Orientation (relative to transcription): sense; note = sgRNA Position: 46748297; note = Sequence Name: 56322-704_101_SL_seq_5240
tgccaggagtctgtcagcta

SEQ ID NO: 5241 - DNA, 20 bp, Homo sapiens
  source 1..20: mol_type = genomic DNA; note = Gene: MYLK3; note = Location (start to end; relative to TSS): MYLK3_76_106; note = Orientation (relative to transcription): antisense; note = sgRNA Position: 46748264; note = Sequence Name: 56322-704_101_SL_seq_5241
cctggttctcactcaggcgg

SEQ ID NO: 5242 - DNA, 20 bp, Homo sapiens
  source 1..20: mol_type = genomic DNA; note = Gene: MYLK3; note = Location (start to end; relative to TSS): MYLK3_26_56; note = Orientation (relative to transcription): sense; note = sgRNA Position: 46748294; note = Sequence Name: 56322-704_101_SL_seq_5242
caggagtctgtcagctacgg

SEQ ID NO: 5243 - DNA, 20 bp, Homo sapiens
  source 1..20: mol_type = genomic DNA; note = Gene: MYLK3; note = Location (start to end; relative to TSS): MYLK3_69_99; note = Orientation (relative to transcription): sense; note = sgRNA Position: 46748251; note = Sequence Name: 56322-704_101_SL_seq_5243
accgcctgagtgagaaccag

SEQ ID NO: 5244 - DNA, 20 bp, Homo sapiens
  source 1..20: mol_type = genomic DNA; note = Gene: MYLK3; note = Location (start to end; relative to TSS): MYLK3_34_64; note = Orientation (relative to transcription): antisense; note = sgRNA Position: 46748306; note = Sequence Name: 56322-704_101_SL_seq_5244
ctccgtagctgacagactcc

SEQ ID NO: 5245 - DNA, 20 bp, Homo sapiens
  source 1..20: mol_type = genomic DNA; note = Gene: MYLK3; note = Location (start to end; relative to TSS): MYLK3_68_98; note = Orientation (relative to transcription): sense; note = sgRNA Position: 46748252; note = Sequence Name: 56322-704_101_SL_seq_5245
caccgcctgagtgagaacca

SEQ ID NO: 5246 - DNA, 20 bp, Homo sapiens
  source 1..20: mol_type = genomic DNA; note = Gene: MYLK3; note = Location (start to end; relative to TSS): MYLK3_13_43; note = Orientation (relative to transcription): antisense; note = sgRNA Position: 46748327; note = Sequence Name: 56322-704_101_SL_seq_5246
ggcagcaccaacctccacga

SEQ ID NO: 5247 - DNA, 20 bp, Homo sapiens
  source 1..20: mol_type = genomic DNA; note = Gene: MYLK3; note = Location (start to end; relative to TSS): MYLK3_67_97; note = Orientation (relative to transcription): sense; note = sgRNA Position: 46748253; note = Sequence Name: 56322-704_101_SL_seq_5247
ccaccgcctgagtgagaacc

SEQ ID NO: 5248 - DNA, 20 bp, Homo sapiens
  source 1..20: mol_type = genomic DNA; note = Gene: MYLK3; note = Location (start to end; relative to TSS): MYLK3_8_38; note = Orientation (relative to transcription): antisense; note = sgRNA Position: 46748332; note = Sequence Name: 56322-704_101_SL_seq_5248
caccaacctccacgatggcc

SEQ ID NO: 5249 - DNA, 20 bp, Homo sapiens
  source 1..20: mol_type = genomic DNA; note = Gene: MYLK3; note = Location (start to end; relative to TSS): MYLK3_65_95; note = Orientation (relative to transcription): antisense; note = sgRNA Position: 46748275; note = Sequence Name: 56322-704_101_SL_seq_5249
ctcaggcggtggtgtctgca

SEQ ID NO: 5250 - DNA, 20 bp, Homo sapiens
  source 1..20: mol_type = genomic DNA; note = Gene: MYLK4; note = Location (start to end; relative to TSS): MYLK4_79_109; note = Orientation (relative to transcription): antisense; note = sgRNA Position: 2750839; note = Sequence Name: 56322-704_101_SL_seq_5250
aaactgactatgaaagtctc

SEQ ID NO: 5251 - DNA, 20 bp, Homo sapiens
  source 1..20: mol_type = genomic DNA; note = Gene: MYLK4; note = Location (start to end; relative to TSS): MYLK4_126_156; note = Orientation (relative to transcription): sense; note = sgRNA Position: 2750772; note = Sequence Name: 56322-704_101_SL_seq_5251
tgtatgctctagacttggag

SEQ ID NO: 5252 - DNA, 20 bp, Homo sapiens
  source 1..20: mol_type = genomic DNA; note = Gene: MYLK4; note = Location (start to end; relative to TSS): MYLK4_18_48; note = Orientation (relative to transcription): antisense; note = sgRNA Position: 2750900; note = Sequence Name: 56322-704_101_SL_seq_5252
agacaagtgtccactacgag

SEQ ID NO: 5253 - DNA, 20 bp, Homo sapiens
  source 1..20: mol_type = genomic DNA; note = Gene: MYLK4; note = Location (start to end; relative to TSS): MYLK4_121_151; note = Orientation (relative to transcription): sense; note = sgRNA Position: 2750777; note = Sequence Name: 56322-704_101_SL_seq_5253
tggaatgtatgctctagact

SEQ ID NO: 5254 - DNA, 20 bp, Homo sapiens
  source 1..20: mol_type = genomic DNA; note = Gene: MYLK4; note = Location (start to end; relative to TSS): MYLK4_-1_29; note = Orientation (relative to transcription): sense; note = sgRNA Position: 2750899; note = Sequence Name: 56322-704_101_SL_seq_5254
gaagatacttcctctcgtag

SEQ ID NO: 5255 - DNA, 20 bp, Homo sapiens
  source 1..20: mol_type = genomic DNA; note = Gene: MYLK4; note = Location (start to end; relative to TSS): MYLK4_79_109; note = Orientation (relative to transcription): antisense; note = sgRNA Position: 2750839; note = Sequence Name: 56322-704_101_SL_seq_5255
aaactgactatgaaagtctc

SEQ ID NO: 5256 - DNA, 20 bp, Homo sapiens
  source 1..20: mol_type = genomic DNA; note = Gene: MYLK4; note = Location (start to end; relative to TSS): MYLK4_-35_-5; note = Orientation (relative to transcription): sense; note = sgRNA Position: 2750933; note = Sequence Name: 56322-704_101_SL_seq_5256
atttaaacaggggctgaaag

SEQ ID NO: 5257 - DNA, 20 bp, Homo sapiens
  source 1..20: mol_type = genomic DNA; note = Gene: MYLK4; note = Location (start to end; relative to TSS): MYLK4_-1_29; note = Orientation (relative to transcription): sense; note = sgRNA Position: 2750899; note = Sequence Name: 56322-704_101_SL_seq_5257
gaagatacttcctctcgtag

SEQ ID NO: 5258 - DNA, 20 bp, Homo sapiens
  source 1..20: mol_type = genomic DNA; note = Gene: MYLK4; note = Location (start to end; relative to TSS): MYLK4_-45_-15; note = Orientation (relative to transcription): sense; note = sgRNA Position: 2750943; note = Sequence Name: 56322-704_101_SL_seq_5258
agccatattaatttaaacag

SEQ ID NO: 5259 - DNA, 20 bp, Homo sapiens
  source 1..20: mol_type = genomic DNA; note = Gene: MYLK4; note = Location (start to end; relative to TSS): MYLK4_18_48; note = Orientation (relative to transcription): antisense; note = sgRNA Position: 2750900; note = Sequence Name: 56322-704_101_SL_seq_5259
agacaagtgtccactacgag

SEQ ID NO: 5260 - DNA, 20 bp, Homo sapiens
  source 1..20: mol_type = genomic DNA; note = Gene: MYO3A; note = Location (start to end; relative to TSS): MYO3A_32_62; note = Orientation (relative to transcription): antisense; note = sgRNA Position: 25934267; note = Sequence Name: 56322-704_101_SL_seq_5260
ggctacgggcgctccctcga

SEQ ID NO: 5261 - DNA, 20 bp, Homo sapiens
  source 1..20: mol_type = genomic DNA; note = Gene: MYO3A; note = Location (start to end; relative to TSS): MYO3A_79_109; note = Orientation (relative to transcription): sense; note = sgRNA Position: 25934334; note = Sequence Name: 56322-704_101_SL_seq_5261
cttcccgcccaggtacgtgt

SEQ ID NO: 5262 - DNA, 20 bp, Homo sapiens
  source 1..20: mol_type = genomic DNA; note = Gene: MYO3A; note = Location (start to end; relative to TSS): MYO3A_31_61; note = Orientation (relative to transcription): antisense; note = sgRNA Position: 25934266; note = Sequence Name: 56322-704_101_SL_seq_5262
gctacgggcgctccctcgag

SEQ ID NO: 5263 - DNA, 20 bp, Homo sapiens
  source 1..20: mol_type = genomic DNA; note = Gene: MYO3A; note = Location (start to end; relative to TSS): MYO3A_69_99; note = Orientation (relative to transcription): sense; note = sgRNA Position: 25934324; note = Sequence Name: 56322-704_101_SL_seq_5263
aggcgcccggcttcccgccc

SEQ ID NO: 5264 - DNA, 20 bp, Homo sapiens
  source 1..20: mol_type = genomic DNA; note = Gene: MYO3A; note = Location (start to end; relative to TSS): MYO3A_28_58; note = Orientation (relative to transcription): antisense; note = sgRNA Position: 25934263; note = Sequence Name: 56322-704_101_SL_seq_5264
acgggcgctccctcgagggg

SEQ ID NO: 5265 - DNA, 20 bp, Homo sapiens
  source 1..20: mol_type = genomic DNA; note = Gene: MYO3A; note = Location (start to end; relative to TSS): MYO3A_60_90; note = Orientation (relative to transcription): antisense; note = sgRNA Position: 25934295; note = Sequence Name: 56322-704_101_SL_seq_5265
cgcctccttatttctttacg

SEQ ID NO: 5266 - DNA, 20 bp, Homo sapiens
  source 1..20: mol_type = genomic DNA; note = Gene: MYO3A; note = Location (start to end; relative to TSS): MYO3A_27_57; note = Orientation (relative to transcription): antisense; note = sgRNA Position: 25934262; note = Sequence Name: 56322-704_101_SL_seq_5266
cgggcgctccctcgaggggc

SEQ ID NO: 5267 - DNA, 20 bp, Homo sapiens
  source 1..20: mol_type = genomic DNA; note = Gene: MYO3A; note = Location (start to end; relative to TSS): MYO3A_59_89; note = Orientation (relative to transcription): antisense; note = sgRNA Position: 25934294; note = Sequence Name: 56322-704_101_SL_seq_5267
gcctccttatttctttacgg

SEQ ID NO: 5268 - DNA, 20 bp, Homo sapiens
  source 1..20: mol_type = genomic DNA; note = Gene: MYO3A; note = Location (start to end; relative to TSS): MYO3A_22_52; note = Orientation (relative to transcription): antisense; note = sgRNA Position: 25934257; note = Sequence Name: 56322-704_101_SL_seq_5268
gctccctcgaggggcgggca

SEQ ID NO: 5269 - DNA, 20 bp, Homo sapiens
  source 1..20: mol_type = genomic DNA; note = Gene: MYO3A; note = Location (start to end; relative to TSS): MYO3A_53_83; note = Orientation (relative to transcription): antisense; note = sgRNA Position: 25934288; note = Sequence Name: 56322-704_101_SL_seq_5269
ttatttctttacgggggcgc

SEQ ID NO: 5270 - DNA, 20 bp, Homo sapiens
  source 1..20: mol_type = genomic DNA; note = Gene: MYO3B; note = Location (start to end; relative to TSS): MYO3B_61_91; note = Orientation (relative to transcription): sense; note = sgRNA Position: 170178234; note = Sequence Name: 56322-704_101_SL_seq_5270
agtgttctgctggtttttgg

SEQ ID NO: 5271 - DNA, 20 bp, Homo sapiens
  source 1..20: mol_type = genomic DNA; note = Gene: MYO3B; note = Location (start to end; relative to TSS): MYO3B_103_133; note = Orientation (relative to transcription): sense; note = sgRNA Position: 170178276; note = Sequence Name: 56322-704_101_SL_seq_5271
ataagccggattcagaaaat

SEQ ID NO: 5272 - DNA, 20 bp, Homo sapiens
  source 1..20: mol_type = genomic DNA; note = Gene: MYO3B; note = Location (start to end; relative to TSS): MYO3B_51_81; note = Orientation (relative to transcription): sense; note = sgRNA Position: 170178224; note = Sequence Name: 56322-704_101_SL_seq_5272
ctgggcctgaagtgttctgc

SEQ ID NO: 5273 - DNA, 20 bp, Homo sapiens
  source 1..20: mol_type = genomic DNA; note = Gene: MYO3B; note = Location (start to end; relative to TSS): MYO3B_102_132; note = Orientation (relative to transcription): antisense; note = sgRNA Position: 170178255; note = Sequence Name: 56322-704_101_SL_seq_5273
gaatccggcttatgagagat

SEQ ID NO: 5274 - DNA, 20 bp, Homo sapiens
  source 1..20: mol_type = genomic DNA; note = Gene: MYO3B; note = Location (start to end; relative to TSS): MYO3B_53_83; note = Orientation (relative to transcription): antisense; note = sgRNA Position: 170178206; note = Sequence Name: 56322-704_101_SL_seq_5274
aacacttcaggcccagaaaa

SEQ ID NO: 5275 - DNA, 20 bp, Homo sapiens
  source 1..20: mol_type = genomic DNA; note = Gene: MYO3B; note = Location (start to end; relative to TSS): MYO3B_89_119; note = Orientation (relative to transcription): sense; note = sgRNA Position: 170178262; note = Sequence Name: 56322-704_101_SL_seq_5275
gaatccaatctctcataagc

SEQ ID NO: 5276 - DNA, 20 bp, Homo sapiens
  source 1..20: mol_type = genomic DNA; note = Gene: MYO3B; note = Location (start to end; relative to TSS): MYO3B_33_63; note = Orientation (relative to transcription): sense; note = sgRNA Position: 170178206; note = Sequence Name: 56322-704_101_SL_seq_5276
catcaaagacaccattttct

SEQ ID NO: 5277 - DNA, 20 bp, Homo sapiens
  source 1..20: mol_type = genomic DNA; note = Gene: MYO3B; note = Location (start to end; relative to TSS): MYO3B_65_95; note = Orientation (relative to transcription): antisense; note = sgRNA Position: 170178218; note = Sequence Name: 56322-704_101_SL_seq_5277
aaaaaccagcagaacacttc

SEQ ID NO: 5278 - DNA, 20 bp, Homo sapiens
  source 1..20: mol_type = genomic DNA; note = Gene: MYO3B; note = Location (start to end; relative to TSS): MYO3B_11_41; note = Orientation (relative to transcription): antisense; note = sgRNA Position: 170178164; note = Sequence Name: 56322-704_101_SL_seq_5278
gtatgacacatcattaccaa

SEQ ID NO: 5279 - DNA, 20 bp, Homo sapiens
  source 1..20: mol_type = genomic DNA; note = Gene: MYO3B; note = Location (start to end; relative to TSS): MYO3B_51_81; note = Orientation (relative to transcription): sense; note = sgRNA Position: 170178224; note = Sequence Name: 56322-704_101_SL_seq_5279
ctgggcctgaagtgttctgc

SEQ ID NO: 5280 - DNA, 20 bp, Homo sapiens
  source 1..20: mol_type = genomic DNA; note = Gene: NADK; note = Location (start to end; relative to TSS): NADK_43_73; note = Orientation (relative to transcription): sense; note = sgRNA Position: 1778403; note = Sequence Name: 56322-704_101_SL_seq_5280
ggcggccatggggcaacagg

SEQ ID NO: 5281 - DNA, 20 bp, Homo sapiens
  source 1..20: mol_type = genomic DNA; note = Gene: NADK; note = Location (start to end; relative to TSS): NADK_76_106; note = Orientation (relative to transcription): sense; note = sgRNA Position: 1778370; note = Sequence Name: 56322-704_101_SL_seq_5281
aagggccaggtagcgacggc

SEQ ID NO: 5282 - DNA, 20 bp, Homo sapiens
  source 1..20: mol_type = genomic DNA; note = Gene: NADK; note = Location (start to end; relative to TSS): NADK_40_70; note = Orientation (relative to transcription): sense; note = sgRNA Position: 1778406; note = Sequence Name: 56322-704_101_SL_seq_5282
ccgggcggccatggggcaac

SEQ ID NO: 5283 - DNA, 20 bp, Homo sapiens
  source 1..20: mol_type = genomic DNA; note = Gene: NADK; note = Location (start to end; relative to TSS): NADK_75_105; note = Orientation (relative to transcription): antisense; note = sgRNA Position: 1778391; note = Sequence Name: 56322-704_101_SL_seq_5283
ctacctggcccttggcgccc

SEQ ID NO: 5284 - DNA, 20 bp, Homo sapiens
  source 1..20: mol_type = genomic DNA; note = Gene: NADK; note = Location (start to end; relative to TSS): NADK_42_72; note = Orientation (relative to transcription): antisense; note = sgRNA Position: 1778424; note = Sequence Name: 56322-704_101_SL_seq_5284
ccccatggccgcccggaccc

SEQ ID NO: 5285 - DNA, 20 bp, Homo sapiens
  source 1..20: mol_type = genomic DNA; note = Gene: NADK; note = Location (start to end; relative to TSS): NADK_72_102; note = Orientation (relative to transcription): sense; note = sgRNA Position: 1778374; note = Sequence Name: 56322-704_101_SL_seq_5285
cgccaagggccaggtagcga

SEQ ID NO: 5286 - DNA, 20 bp, Homo sapiens
  source 1..20: mol_type = genomic DNA; note = Gene: NADK; note = Location (start to end; relative to TSS): NADK_33_63; note = Orientation (relative to transcription): sense; note = sgRNA Position: 1778413; note = Sequence Name: 56322-704_101_SL_seq_5286
ccggggtccgggcggccatg

SEQ ID NO: 5287 - DNA, 20 bp, Homo sapiens
  source 1..20: mol_type = genomic DNA; note = Gene: NADK; note = Location (start to end; relative to TSS): NADK_63_93; note = Orientation (relative to transcription): sense; note = sgRNA Position: 1778383; note = Sequence Name: 56322-704_101_SL_seq_5287
cggccagggcgccaagggcc

SEQ ID NO: 5288 - DNA, 20 bp, Homo sapiens
  source 1..20: mol_type = genomic DNA; note = Gene: NADK; note = Location (start to end; relative to TSS): NADK_25_55; note = Orientation (relative to transcription): sense; note = sgRNA Position: 1778421; note = Sequence Name: 56322-704_101_SL_seq_5288
cgccggcgccggggtccggg

SEQ ID NO: 5289 - DNA, 20 bp, Homo sapiens
  source 1..20: mol_type = genomic DNA; note = Gene: NADK; note = Location (start to end; relative to TSS): NADK_57_87; note = Orientation (relative to transcription): antisense; note = sgRNA Position: 1778409; note = Sequence Name: 56322-704_101_SL_seq_5289
cctggccgcctgttgcccca

SEQ ID NO: 5290 - DNA, 20 bp, Homo sapiens
  source 1..20: mol_type = genomic DNA; note = Gene: NADK2; note = Location (start to end; relative to TSS): NADK2_44_74; note = Orientation (relative to transcription): sense; note = sgRNA Position: 36241857; note = Sequence Name: 56322-704_101_SL_seq_5290
cggcgcgcactcccggcggt

SEQ ID NO: 5291 - DNA, 20 bp, Homo sapiens
  source 1..20: mol_type = genomic DNA; note = Gene: NADK2; note = Location (start to end; relative to TSS): NADK2_111_141; note = Orientation (relative to transcription): antisense; note = sgRNA Position: 36241810; note = Sequence Name: 56322-704_101_SL_seq_5291
agtcatcgtgggccgggccg

SEQ ID NO: 5292 - DNA, 20 bp, Homo sapiens
  source 1..20: mol_type = genomic DNA; note = Gene: NADK2; note = Location (start to end; relative to TSS): NADK2_40_70; note = Orientation (relative to transcription): sense; note = sgRNA Position: 36241861; note = Sequence Name: 56322-704_101_SL_seq_5292
cggacggcgcgcactcccgg

SEQ ID NO: 5293 - DNA, 20 bp, Homo sapiens
  source 1..20: mol_type = genomic DNA; note = Gene: NADK2; note = Location (start to end; relative to TSS): NADK2_85_115; note = Orientation (relative to transcription): sense; note = sgRNA Position: 36241816; note = Sequence Name: 56322-704_101_SL_seq_5293
cgagcccaagcccgcggccg

SEQ ID NO: 5294 - DNA, 20 bp, Homo sapiens
  source 1..20: mol_type = genomic DNA; note = Gene: NADK2; note = Location (start to end; relative to TSS): NADK2_38_68; note = Orientation (relative to transcription): antisense; note = sgRNA Position: 36241883; note = Sequence Name: 56322-704_101_SL_seq_5294
gcgcgccgtccgcgccgccc

SEQ ID NO: 5295 - DNA, 20 bp, Homo sapiens
  source 1..20: mol_type = genomic DNA; note = Gene: NADK2; note = Location (start to end; relative to TSS): NADK2_79_109; note = Orientation (relative to transcription): sense; note = sgRNA Position: 36241822; note = Sequence Name: 56322-704_101_SL_seq_5295
ggggcccgagcccaagcccg

SEQ ID NO: 5296 - DNA, 20 bp, Homo sapiens
  source 1..20: mol_type = genomic DNA; note = Gene: NADK2; note = Location (start to end; relative to TSS): NADK2_24_54; note = Orientation (relative to transcription): sense; note = sgRNA Position: 36241877; note = Sequence Name: 56322-704_101_SL_seq_5296
agaggcccgggcggcgcgga

SEQ ID NO: 5297 - DNA, 20 bp, Homo sapiens
  source 1..20: mol_type = genomic DNA; note = Gene: NADK2; note = Location (start to end; relative to TSS): NADK2_58_88; note = Orientation (relative to transcription): sense; note = sgRNA Position: 36241843; note = Sequence Name: 56322-704_101_SL_seq_5297
ggcggtagggagctgaggca

SEQ ID NO: 5298 - DNA, 20 bp, Homo sapiens
  source 1..20: mol_type = genomic DNA; note = Gene: NADK2; note = Location (start to end; relative to TSS): NADK2_20_50; note = Orientation (relative to transcription): sense; note = sgRNA Position: 36241881; note = Sequence Name: 56322-704_101_SL_seq_5298
agttagaggcccgggcggcg

SEQ ID NO: 5299 - DNA, 20 bp, Homo sapiens
  source 1..20: mol_type = genomic DNA; note = Gene: NADK2; note = Location (start to end; relative to TSS): NADK2_53_83; note = Orientation (relative to transcription): sense; note = sgRNA Position: 36241848; note = Sequence Name: 56322-704_101_SL_seq_5299
ctcccggcggtagggagctg

SEQ ID NO: 5300 - DNA, 20 bp, Homo sapiens
  source 1..20: mol_type = genomic DNA; note = Gene: NAGK; note = Location (start to end; relative to TSS): NAGK_34_64; note = Orientation (relative to transcription): sense; note = sgRNA Position: 71068708; note = Sequence Name: 56322-704_101_SL_seq_5300
cgatctatgggggtgtagag

SEQ ID NO: 5301 - DNA, 20 bp, Homo sapiens
  source 1..20: mol_type = genomic DNA; note = Gene: NAGK; note = Location (start to end; relative to TSS): NAGK_71_101; note = Orientation (relative to transcription): sense; note = sgRNA Position: 71068745; note = Sequence Name: 56322-704_101_SL_seq_5301
cggagggagcctgggcccga

SEQ ID NO: 5302 - DNA, 20 bp, Homo sapiens
  source 1..20: mol_type = genomic DNA; note = Gene: NAGK; note = Location (start to end; relative to TSS): NAGK_22_52; note = Orientation (relative to transcription): sense; note = sgRNA Position: 71068696; note = Sequence Name: 56322-704_101_SL_seq_5302
gcagcatggccgcgatctat

SEQ ID NO: 5303 - DNA, 20 bp, Homo sapiens
  source 1..20: mol_type = genomic DNA; note = Gene: NAGK; note = Location (start to end; relative to TSS): NAGK_63_93; note = Orientation (relative to transcription): sense; note = sgRNA Position: 71068737; note = Sequence Name: 56322-704_101_SL_seq_5303
cggcccggcggagggagcct

SEQ ID NO: 5304 - DNA, 20 bp, Homo sapiens
  source 1..20: mol_type = genomic DNA; note = Gene: NAGK; note = Location (start to end; relative to TSS): NAGK_24_54; note = Orientation (relative to transcription): sense; note = sgRNA Position: 71068698; note = Sequence Name: 56322-704_101_SL_seq_5304
agcatggccgcgatctatgg

SEQ ID NO: 5305 - DNA, 20 bp, Homo sapiens
  source 1..20: mol_type = genomic DNA; note = Gene: NAGK; note = Location (start to end; relative to TSS): NAGK_55_85; note = Orientation (relative to transcription): sense; note = sgRNA Position: 71068729; note = Sequence Name: 56322-704_101_SL_seq_5305
ggtgagtgcggcccggcgga

SEQ ID NO: 5306 - DNA, 20 bp, Homo sapiens
  source 1..20: mol_type = genomic DNA; note = Gene: NAGK; note = Location (start to end; relative to TSS): NAGK_23_53; note = Orientation (relative to transcription): sense; note = sgRNA Position: 71068697; note = Sequence Name: 56322-704_101_SL_seq_5306
cagcatggccgcgatctatg

SEQ ID NO: 5307 - DNA, 20 bp, Homo sapiens
  source 1..20: mol_type = genomic DNA; note = Gene: NAGK; note = Location (start to end; relative to TSS): NAGK_54_84; note = Orientation (relative to transcription): sense; note = sgRNA Position: 71068728; note = Sequence Name: 56322-704_101_SL_seq_5307
gggtgagtgcggcccggcgg

SEQ ID NO: 5308 - DNA, 20 bp, Homo sapiens
  source 1..20: mol_type = genomic DNA; note = Gene: NAGK; note = Location (start to end; relative to TSS): NAGK_21_51; note = Orientation (relative to transcription): sense; note = sgRNA Position: 71068695; note = Sequence Name: 56322-704_101_SL_seq_5308
agcagcatggccgcgatcta

SEQ ID NO: 5309 - DNA, 20 bp, Homo sapiens
  source 1..20: mol_type = genomic DNA; note = Gene: NAGK; note = Location (start to end; relative to TSS): NAGK_51_81; note = Orientation (relative to transcription): sense; note = sgRNA Position: 71068725; note = Sequence Name: 56322-704_101_SL_seq_5309
gaggggtgagtgcggcccgg

SEQ ID NO: 5310 - DNA, 20 bp, Homo sapiens
  source 1..20: mol_type = genomic DNA; note = Gene: NEK1; note = Location (start to end; relative to TSS): NEK1_46_76; note = Orientation (relative to transcription): antisense; note = sgRNA Position: 169612533; note = Sequence Name: 56322-704_101_SL_seq_5310
actgctcgagaggccagggt

SEQ ID NO: 5311 - DNA, 20 bp, Homo sapiens
  source 1..20: mol_type = genomic DNA; note = Gene: NEK1; note = Location (start to end; relative to TSS): NEK1_80_110; note = Orientation (relative to transcription): sense; note = sgRNA Position: 169612479; note = Sequence Name: 56322-704_101_SL_seq_5311
tagagccgctgttgcgaggc

SEQ ID NO: 5312 - DNA, 20 bp, Homo sapiens
  source 1..20: mol_type = genomic DNA; note = Gene: NEK1; note = Location (start to end; relative to TSS): NEK1_45_75; note = Orientation (relative to transcription): antisense; note = sgRNA Position: 169612534; note = Sequence Name: 56322-704_101_SL_seq_5312
ctgctcgagaggccagggta

SEQ ID NO: 5313 - DNA, 20 bp, Homo sapiens
  source 1..20: mol_type = genomic DNA; note = Gene: NEK1; note = Location (start to end; relative to TSS): NEK1_76_106; note = Orientation (relative to transcription): sense; note = sgRNA Position: 169612483; note = Sequence Name: 56322-704_101_SL_seq_5313
aatctagagccgctgttgcg

SEQ ID NO: 5314 - DNA, 20 bp, Homo sapiens
  source 1..20: mol_type = genomic DNA; note = Gene: NEK1; note = Location (start to end; relative to TSS): NEK1_40_70; note = Orientation (relative to transcription): antisense; note = sgRNA Position: 169612539; note = Sequence Name: 56322-704_101_SL_seq_5314
cgagaggccagggtagggta

SEQ ID NO: 5315 - DNA, 20 bp, Homo sapiens
  source 1..20: mol_type = genomic DNA; note = Gene: NEK1; note = Location (start to end; relative to TSS): NEK1_73_103; note = Orientation (relative to transcription): antisense; note = sgRNA Position: 169612506; note = Sequence Name: 56322-704_101_SL_seq_5315
ggctctagattccgagttat

SEQ ID NO: 5316 - DNA, 20 bp, Homo sapiens
  source 1..20: mol_type = genomic DNA; note = Gene: NEK1; note = Location (start to end; relative to TSS): NEK1_25_55; note = Orientation (relative to transcription): antisense; note = sgRNA Position: 169612554; note = Sequence Name: 56322-704_101_SL_seq_5316
gggtaaggactccgcaacct

SEQ ID NO: 5317 - DNA, 20 bp, Homo sapiens
  source 1..20: mol_type = genomic DNA; note = Gene: NEK1; note = Location (start to end; relative to TSS): NEK1_72_102; note = Orientation (relative to transcription): antisense; note = sgRNA Position: 169612507; note = Sequence Name: 56322-704_101_SL_seq_5317
gctctagattccgagttatg

SEQ ID NO: 5318 - DNA, 20 bp, Homo sapiens
  source 1..20: mol_type = genomic DNA; note = Gene: NEK1; note = Location (start to end; relative to TSS): NEK1_24_54; note = Orientation (relative to transcription): sense; note = sgRNA Position: 169612535; note = Sequence Name: 56322-704_101_SL_seq_5318
gcggagtccttaccctaccc

SEQ ID NO: 5319 - DNA, 20 bp, Homo sapiens
  source 1..20: mol_type = genomic DNA; note = Gene: NEK1; note = Location (start to end; relative to TSS): NEK1_56_86; note = Orientation (relative to transcription): antisense; note = sgRNA Position: 169612523; note = Sequence Name: 56322-704_101_SL_seq_5319
tatggggacaactgctcgag

SEQ ID NO: 5320 - DNA, 20 bp, Homo sapiens
  source 1..20: mol_type = genomic DNA; note = Gene: NEK10; note = Location (start to end; relative to TSS): NEK10_23_53; note = Orientation (relative to transcription): sense; note = sgRNA Position: 27369336; note = Sequence Name: 56322-704_101_SL_seq_5320
ggaataggctggggggagga

SEQ ID NO: 5321 - DNA, 20 bp, Homo sapiens
  source 1..20: mol_type = genomic DNA; note = Gene: NEK10; note = Location (start to end; relative to TSS): NEK10_79_109; note = Orientation (relative to transcription): antisense; note = sgRNA Position: 27369300; note = Sequence Name: 56322-704_101_SL_seq_5321
gtcacctgctgctgcagacc

SEQ ID NO: 5322 - DNA, 20 bp, Homo sapiens
  source 1..20: mol_type = genomic DNA; note = Gene: NEK10; note = Location (start to end; relative to TSS): NEK10_24_54; note = Orientation (relative to transcription): sense; note = sgRNA Position: 27369335; note = Sequence Name: 56322-704_101_SL_seq_5322
gaataggctggggggaggac

SEQ ID NO: 5323 - DNA, 20 bp, Homo sapiens
  source 1..20: mol_type = genomic DNA; note = Gene: NEK10; note = Location (start to end; relative to TSS): NEK10_78_108; note = Orientation (relative to transcription): antisense; note = sgRNA Position: 27369301; note = Sequence Name: 56322-704_101_SL_seq_5323
tcacctgctgctgcagaccg

SEQ ID NO: 5324 - DNA, 20 bp, Homo sapiens
  source 1..20: mol_type = genomic DNA; note = Gene: NEK10; note = Location (start to end; relative to TSS): NEK10_28_58; note = Orientation (relative to transcription): sense; note = sgRNA Position: 27369331; note = Sequence Name: 56322-704_101_SL_seq_5324
aggctggggggaggacggga

SEQ ID NO: 5325 - DNA, 20 bp, Homo sapiens
  source 1..20: mol_type = genomic DNA; note = Gene: NEK10; note = Location (start to end; relative to TSS): NEK10_77_107; note = Orientation (relative to transcription): antisense; note = sgRNA Position: 27369302; note = Sequence Name: 56322-704_101_SL_seq_5325
cacctgctgctgcagaccgg

SEQ ID NO: 5326 - DNA, 20 bp, Homo sapiens
  source 1..20: mol_type = genomic DNA; note = Gene: NEK10; note = Location (start to end; relative to TSS): NEK10_29_59; note = Orientation (relative to transcription): sense; note = sgRNA Position: 27369330; note = Sequence Name: 56322-704_101_SL_seq_5326
ggctggggggaggacgggac

SEQ ID NO: 5327 - DNA, 20 bp, Homo sapiens
  source 1..20: mol_type = genomic DNA; note = Gene: NEK10; note = Location (start to end; relative to TSS): NEK10_66_96; note = Orientation (relative to transcription): sense; note = sgRNA Position: 27369293; note = Sequence Name: 56322-704_101_SL_seq_5327
gacccccggtctgcagcagc

SEQ ID NO: 5328 - DNA, 20 bp, Homo sapiens
  source 1..20: mol_type = genomic DNA; note = Gene: NEK10; note = Location (start to end; relative to TSS): NEK10_19_49; note = Orientation (relative to transcription): sense; note = sgRNA Position: 27369340; note = Sequence Name: 56322-704_101_SL_seq_5328
accgggaataggctgggggg

SEQ ID NO: 5329 - DNA, 20 bp, Homo sapiens
  source 1..20: mol_type = genomic DNA; note = Gene: NEK10; note = Location (start to end; relative to TSS): NEK10_52_82; note = Orientation (relative to transcription): sense; note = sgRNA Position: 27369307; note = Sequence Name: 56322-704_101_SL_seq_5329
ctgagactggacgggacccc

SEQ ID NO: 5330 - DNA, 20 bp, Homo sapiens
  source 1..20: mol_type = genomic DNA; note = Gene: NEK11; note = Location (start to end; relative to TSS): NEK11_35_65; note = Orientation (relative to transcription): sense; note = sgRNA Position: 131026938; note = Sequence Name: 56322-704_101_SL_seq_5330
gtgtggttgcccctagtttg

SEQ ID NO: 5331 - DNA, 20 bp, Homo sapiens
  source 1..20: mol_type = genomic DNA; note = Gene: NEK11; note = Location (start to end; relative to TSS): NEK11_67_97; note = Orientation (relative to transcription): antisense; note = sgRNA Position: 131026950; note = Sequence Name: 56322-704_101_SL_seq_5331
agtcttgcgggtaatcgggc

SEQ ID NO: 5332 - DNA, 20 bp, Homo sapiens
  source 1..20: mol_type = genomic DNA; note = Gene: NEK11; note = Location (start to end; relative to TSS): NEK11_18_48; note = Orientation (relative to transcription): sense; note = sgRNA Position: 131026921; note = Sequence Name: 56322-704_101_SL_seq_5332
tgtctggcgctcggtgggtg

SEQ ID NO: 5333 - DNA, 20 bp, Homo sapiens
  source 1..20: mol_type = genomic DNA; note = Gene: NEK11; note = Location (start to end; relative to TSS): NEK11_61_91; note = Orientation (relative to transcription): sense; note = sgRNA Position: 131026964; note = Sequence Name: 56322-704_101_SL_seq_5333
gcccgattacccgcaagact

SEQ ID NO: 5334 - DNA, 20 bp, Homo sapiens
  source 1..20: mol_type = genomic DNA; note = Gene: NEK11; note = Location (start to end; relative to TSS): NEK11_20_50; note = Orientation (relative to transcription): antisense; note = sgRNA Position: 131026903; note = Sequence Name: 56322-704_101_SL_seq_5334
caccgagcgccagacaccgc

SEQ ID NO: 5335 - DNA, 20 bp, Homo sapiens
  source 1..20: mol_type = genomic DNA; note = Gene: NEK11; note = Location (start to end; relative to TSS): NEK11_55_85; note = Orientation (relative to transcription): antisense; note = sgRNA Position: 131026938; note = Sequence Name: 56322-704_101_SL_seq_5335
aatcgggcaggcctcaaact

SEQ ID NO: 5336 - DNA, 20 bp, Homo sapiens
  source 1..20: mol_type = genomic DNA; note = Gene: NEK11; note = Location (start to end; relative to TSS): NEK11_21_51; note = Orientation (relative to transcription): antisense; note = sgRNA Position: 131026904; note = Sequence Name: 56322-704_101_SL_seq_5336
ccaccgagcgccagacaccg

SEQ ID NO: 5337 - DNA, 20 bp, Homo sapiens
  source 1..20: mol_type = genomic DNA; note = Gene: NEK11; note = Location (start to end; relative to TSS): NEK11_54_84; note = Orientation (relative to transcription): antisense; note = sgRNA Position: 131026937; note = Sequence Name: 56322-704_101_SL_seq_5337
atcgggcaggcctcaaacta

SEQ ID NO: 5338 - DNA, 20 bp, Homo sapiens
  source 1..20: mol_type = genomic DNA; note = Gene: NEK11; note = Location (start to end; relative to TSS): NEK11_14_44; note = Orientation (relative to transcription): antisense; note = sgRNA Position: 131026897; note = Sequence Name: 56322-704_101_SL_seq_5338
gcgccagacaccgcgggcca

SEQ ID NO: 5339 - DNA, 20 bp, Homo sapiens
  source 1..20: mol_type = genomic DNA; note = Gene: NEK11; note = Location (start to end; relative to TSS): NEK11_53_83; note = Orientation (relative to transcription): antisense; note = sgRNA Position: 131026936; note = Sequence Name: 56322-704_101_SL_seq_5339
tcgggcaggcctcaaactag

SEQ ID NO: 5340 - DNA, 20 bp, Homo sapiens
  source 1..20: mol_type = genomic DNA; note = Gene: NEK2; note = Location (start to end; relative to TSS): NEK2_51_81; note = Orientation (relative to transcription): antisense; note = sgRNA Position: 211675566; note = Sequence Name: 56322-704_101_SL_seq_5340
aggaactccagggacctgga

SEQ ID NO: 5341 - DNA, 20 bp, Homo sapiens
  source 1..20: mol_type = genomic DNA; note = Gene: NEK2; note = Location (start to end; relative to TSS): NEK2_84_114; note = Orientation (relative to transcription): sense; note = sgRNA Position: 211675513; note = Sequence Name: 56322-704_101_SL_seq_5341
ttggcggcgcaacctgcgtg

SEQ ID NO: 5342 - DNA, 20 bp, Homo sapiens
  source 1..20: mol_type = genomic DNA; note = Gene: NEK2; note = Location (start to end; relative to TSS): NEK2_35_65; note = Orientation (relative to transcription): sense; note = sgRNA Position: 211675562; note = Sequence Name: 56322-704_101_SL_seq_5342
ggcttctccatccaggtccc

SEQ ID NO: 5343 - DNA, 20 bp, Homo sapiens
  source 1..20: mol_type = genomic DNA; note = Gene: NEK2; note = Location (start to end; relative to TSS): NEK2_65_95; note = Orientation (relative to transcription): sense; note = sgRNA Position: 211675532; note = Sequence Name: 56322-704_101_SL_seq_5343
ggtccctggagctccgcact

SEQ ID NO: 5344 - DNA, 20 bp, Homo sapiens
  source 1..20: mol_type = genomic DNA; note = Gene: NEK2; note = Location (start to end; relative to TSS): NEK2_28_58; note = Orientation (relative to transcription): sense; note = sgRNA Position: 211675569; note = Sequence Name: 56322-704_101_SL_seq_5344
gctcgggggcttctccatcc

SEQ ID NO: 5345 - DNA, 20 bp, Homo sapiens
  source 1..20: mol_type = genomic DNA; note = Gene: NEK2; note = Location (start to end; relative to TSS): NEK2_61_91; note = Orientation (relative to transcription): antisense; note = sgRNA Position: 211675556; note = Sequence Name: 56322-704_101_SL_seq_5345
tccagggaccaggaactcca

SEQ ID NO: 5346 - DNA, 20 bp, Homo sapiens
  source 1..20: mol_type = genomic DNA; note = Gene: NEK2; note = Location (start to end; relative to TSS): NEK2_14_44; note = Orientation (relative to transcription): sense; note = sgRNA Position: 211675583; note = Sequence Name: 56322-704_101_SL_seq_5346
ggcgggtcagtgctgctcgg

SEQ ID NO: 5347 - DNA, 20 bp, Homo sapiens
  source 1..20: mol_type = genomic DNA; note = Gene: NEK2; note = Location (start to end; relative to TSS): NEK2_55_85; note = Orientation (relative to transcription): antisense; note = sgRNA Position: 211675562; note = Sequence Name: 56322-704_101_SL_seq_5347
gaccaggaactccagggacc

SEQ ID NO: 5348 - DNA, 20 bp, Homo sapiens
  source 1..20: mol_type = genomic DNA; note = Gene: NEK2; note = Location (start to end; relative to TSS): NEK2_13_43; note = Orientation (relative to transcription): sense; note = sgRNA Position: 211675584; note = Sequence Name: 56322-704_101_SL_seq_5348
tggcgggtcagtgctgctcg

SEQ ID NO: 5349 - DNA, 20 bp, Homo sapiens
  source 1..20: mol_type = genomic DNA; note = Gene: NEK2; note = Location (start to end; relative to TSS): NEK2_51_81; note = Orientation (relative to transcription): antisense; note = sgRNA Position: 211675566; note = Sequence Name: 56322-704_101_SL_seq_5349
aggaactccagggacctgga

SEQ ID NO: 5350 - DNA, 20 bp, Homo sapiens
  source 1..20: mol_type = genomic DNA; note = Gene: NEK3; note = Location (start to end; relative to TSS): NEK3_23_53; note = Orientation (relative to transcription): antisense; note = sgRNA Position: 52159570; note = Sequence Name: 56322-704_101_SL_seq_5350
ggcgaccctagtccactcct

SEQ ID NO: 5351 - DNA, 20 bp, Homo sapiens
  source 1..20: mol_type = genomic DNA; note = Gene: NEK3; note = Location (start to end; relative to TSS): NEK3_68_98; note = Orientation (relative to transcription): sense; note = sgRNA Position: 52159505; note = Sequence Name: 56322-704_101_SL_seq_5351
gggctgcctctagaacgagg

SEQ ID NO: 5352 - DNA, 20 bp, Homo sapiens
  source 1..20: mol_type = genomic DNA; note = Gene: NEK3; note = Location (start to end; relative to TSS): NEK3_24_54; note = Orientation (relative to transcription): sense; note = sgRNA Position: 52159549; note = Sequence Name: 56322-704_101_SL_seq_5352
gactagggtcgccggggaag

SEQ ID NO: 5353 - DNA, 20 bp, Homo sapiens
  source 1..20: mol_type = genomic DNA; note = Gene: NEK3; note = Location (start to end; relative to TSS): NEK3_67_97; note = Orientation (relative to transcription): antisense; note = sgRNA Position: 52159526; note = Sequence Name: 56322-704_101_SL_seq_5353
ctagaggcagcccgccaggg

SEQ ID NO: 5354 - DNA, 20 bp, Homo sapiens
  source 1..20: mol_type = genomic DNA; note = Gene: NEK3; note = Location (start to end; relative to TSS): NEK3_32_62; note = Orientation (relative to transcription): sense; note = sgRNA Position: 52159541; note = Sequence Name: 56322-704_101_SL_seq_5354
tcgccggggaagcgggtgag

SEQ ID NO: 5355 - DNA, 20 bp, Homo sapiens
  source 1..20: mol_type = genomic DNA; note = Gene: NEK3; note = Location (start to end; relative to TSS): NEK3_66_96; note = Orientation (relative to transcription): antisense; note = sgRNA Position: 52159527; note = Sequence Name: 56322-704_101_SL_seq_5355
tagaggcagcccgccagggc

SEQ ID NO: 5356 - DNA, 20 bp, Homo sapiens
  source 1..20: mol_type = genomic DNA; note = Gene: NEK3; note = Location (start to end; relative to TSS): NEK3_25_55; note = Orientation (relative to transcription): sense; note = sgRNA Position: 52159548; note = Sequence Name: 56322-704_101_SL_seq_5356
actagggtcgccggggaagc

SEQ ID NO: 5357 - DNA, 20 bp, Homo sapiens
  source 1..20: mol_type = genomic DNA; note = Gene: NEK3; note = Location (start to end; relative to TSS): NEK3_65_95; note = Orientation (relative to transcription): sense; note = sgRNA Position: 52159508; note = Sequence Name: 56322-704_101_SL_seq_5357
ggcgggctgcctctagaacg

SEQ ID NO: 5358 - DNA, 20 bp, Homo sapiens
  source 1..20: mol_type = genomic DNA; note = Gene: NEK3; note = Location (start to end; relative to TSS): NEK3_18_48; note = Orientation (relative to transcription): sense; note = sgRNA Position: 52159555; note = Sequence Name: 56322-704_101_SL_seq_5358
ggagtggactagggtcgccg

SEQ ID NO: 5359 - DNA, 20 bp, Homo sapiens
  source 1..20: mol_type = genomic DNA; note = Gene: NEK3; note = Location (start to end; relative to TSS): NEK3_48_78; note = Orientation (relative to transcription): sense; note = sgRNA Position: 52159525; note = Sequence Name: 56322-704_101_SL_seq_5359
tgagtggtccccgccctggc

SEQ ID NO: 5360 - DNA, 20 bp, Homo sapiens
  source 1..20: mol_type = genomic DNA; note = Gene: NEK4; note = Location (start to end; relative to TSS): NEK4_46_76; note = Orientation (relative to transcription): sense; note = sgRNA Position: 52770870; note = Sequence Name: 56322-704_101_SL_seq_5360
ccagcaatcccgcccgggcc

SEQ ID NO: 5361 - DNA, 20 bp, Homo sapiens
  source 1..20: mol_type = genomic DNA; note = Gene: NEK4; note = Location (start to end; relative to TSS): NEK4_82_112; note = Orientation (relative to transcription): sense; note = sgRNA Position: 52770834; note = Sequence Name: 56322-704_101_SL_seq_5361
cgcccccactgccccctctc

SEQ ID NO: 5362 - DNA, 20 bp, Homo sapiens
  source 1..20: mol_type = genomic DNA; note = Gene: NEK4; note = Location (start to end; relative to TSS): NEK4_48_78; note = Orientation (relative to transcription): antisense; note = sgRNA Position: 52770888; note = Sequence Name: 56322-704_101_SL_seq_5362
cgggcgggattgctggggcc

SEQ ID NO: 5363 - DNA, 20 bp, Homo sapiens
  source 1..20: mol_type = genomic DNA; note = Gene: NEK4; note = Location (start to end; relative to TSS): NEK4_81_111; note = Orientation (relative to transcription): sense; note = sgRNA Position: 52770835; note = Sequence Name: 56322-704_101_SL_seq_5363
ccgcccccactgccccctct

SEQ ID NO: 5364 - DNA, 20 bp, Homo sapiens
  source 1..20: mol_type = genomic DNA; note = Gene: NEK4; note = Location (start to end; relative to TSS): NEK4_41_71; note = Orientation (relative to transcription): sense; note = sgRNA Position: 52770875; note = Sequence Name: 56322-704_101_SL_seq_5364
gggccccagcaatcccgccc

SEQ ID NO: 5365 - DNA, 20 bp, Homo sapiens
  source 1..20: mol_type = genomic DNA; note = Gene: NEK4; note = Location (start to end; relative to TSS): NEK4_74_104; note = Orientation (relative to transcription): antisense; note = sgRNA Position: 52770862; note = Sequence Name: 56322-704_101_SL_seq_5365
ggggcggctgttgaggcagc

SEQ ID NO: 5366 - DNA, 20 bp, Homo sapiens
  source 1..20: mol_type = genomic DNA; note = Gene: NEK4; note = Location (start to end; relative to TSS): NEK4_40_70; note = Orientation (relative to transcription): sense; note = sgRNA Position: 52770876; note = Sequence Name: 56322-704_101_SL_seq_5366
cgggccccagcaatcccgcc

SEQ ID NO: 5367 - DNA, 20 bp, Homo sapiens
  source 1..20: mol_type = genomic DNA; note = Gene: NEK4; note = Location (start to end; relative to TSS): NEK4_73_103; note = Orientation (relative to transcription): antisense; note = sgRNA Position: 52770863; note = Sequence Name: 56322-704_101_SL_seq_5367
gggcggctgttgaggcagcc

SEQ ID NO: 5368 - DNA, 20 bp, Homo sapiens
  source 1..20: mol_type = genomic DNA; note = Gene: NEK4; note = Location (start to end; relative to TSS): NEK4_16_46; note = Orientation (relative to transcription): antisense; note = sgRNA Position: 52770920; note = Sequence Name: 56322-704_101_SL_seq_5368
acgccgctgccatagcgatc

SEQ ID NO: 5369 - DNA, 20 bp, Homo sapiens
  source 1..20: mol_type = genomic DNA; note = Gene: NEK4; note = Location (start to end; relative to TSS): NEK4_46_76; note = Orientation (relative to transcription): sense; note = sgRNA Position: 52770870; note = Sequence Name: 56322-704_101_SL_seq_5369
ccagcaatcccgcccgggcc

SEQ ID NO: 5370 - DNA, 20 bp, Homo sapiens
  source 1..20: mol_type = genomic DNA; note = Gene: NEK5; note = Location (start to end; relative to TSS): NEK5_24_54; note = Orientation (relative to transcription): antisense; note = sgRNA Position: 52129045; note = Sequence Name: 56322-704_101_SL_seq_5370
cctgctccgccggctccgcg

SEQ ID NO: 5371 - DNA, 20 bp, Homo sapiens
  source 1..20: mol_type = genomic DNA; note = Gene: NEK5; note = Location (start to end; relative to TSS): NEK5_65_95; note = Orientation (relative to transcription): antisense; note = sgRNA Position: 52129004; note = Sequence Name: 56322-704_101_SL_seq_5371
gcggctccgggcaagaacta

SEQ ID NO: 5372 - DNA, 20 bp, Homo sapiens
  source 1..20: mol_type = genomic DNA; note = Gene: NEK5; note = Location (start to end; relative to TSS): NEK5_26_56; note = Orientation (relative to transcription): antisense; note = sgRNA Position: 52129043; note = Sequence Name: 56322-704_101_SL_seq_5372
tacctgctccgccggctccg

SEQ ID NO: 5373 - DNA, 20 bp, Homo sapiens
  source 1..20: mol_type = genomic DNA; note = Gene: NEK5; note = Location (start to end; relative to TSS): NEK5_64_94; note = Orientation (relative to transcription): antisense; note = sgRNA Position: 52129005; note = Sequence Name: 56322-704_101_SL_seq_5373
cggctccgggcaagaactaa

SEQ ID NO: 5374 - DNA, 20 bp, Homo sapiens
  source 1..20: mol_type = genomic DNA; note = Gene: NEK5; note = Location (start to end; relative to TSS): NEK5_27_57; note = Orientation (relative to transcription): sense; note = sgRNA Position: 52129022; note = Sequence Name: 56322-704_101_SL_seq_5374
ggcggagcaggtacgcttgc

SEQ ID NO: 5375 - DNA, 20 bp, Homo sapiens
  source 1..20: mol_type = genomic DNA; note = Gene: NEK5; note = Location (start to end; relative to TSS): NEK5_63_93; note = Orientation (relative to transcription): sense; note = sgRNA Position: 52128986; note = Sequence Name: 56322-704_101_SL_seq_5375
tcttgcccggagccgccaca

SEQ ID NO: 5376 - DNA, 20 bp, Homo sapiens
  source 1..20: mol_type = genomic DNA; note = Gene: NEK5; note = Location (start to end; relative to TSS): NEK5_28_58; note = Orientation (relative to transcription): sense; note = sgRNA Position: 52129021; note = Sequence Name: 56322-704_101_SL_seq_5376
gcggagcaggtacgcttgca

SEQ ID NO: 5377 - DNA, 20 bp, Homo sapiens
  source 1..20: mol_type = genomic DNA; note = Gene: NEK5; note = Location (start to end; relative to TSS): NEK5_62_92; note = Orientation (relative to transcription): sense; note = sgRNA Position: 52128987; note = Sequence Name: 56322-704_101_SL_seq_5377
ttcttgcccggagccgccac

SEQ ID NO: 5378 - DNA, 20 bp, Homo sapiens
  source 1..20: mol_type = genomic DNA; note = Gene: NEK5; note = Location (start to end; relative to TSS): NEK5_29_59; note = Orientation (relative to transcription): sense; note = sgRNA Position: 52129020; note = Sequence Name: 56322-704_101_SL_seq_5378
cggagcaggtacgcttgcag

SEQ ID NO: 5379 - DNA, 20 bp, Homo sapiens
  source 1..20: mol_type = genomic DNA; note = Gene: NEK5; note = Location (start to end; relative to TSS): NEK5_61_91; note = Orientation (relative to transcription): antisense; note = sgRNA Position: 52129008; note = Sequence Name: 56322-704_101_SL_seq_5379
ctccgggcaagaactaaggg

SEQ ID NO: 5380 - DNA, 20 bp, Homo sapiens
  source 1..20: mol_type = genomic DNA; note = Gene: NEK6; note = Location (start to end; relative to TSS): NEK6_49_79; note = Orientation (relative to transcription): antisense; note = sgRNA Position: 124258004; note = Sequence Name: 56322-704_101_SL_seq_5380
gtgcgtcccacacgagtttg

SEQ ID NO: 5381 - DNA, 20 bp, Homo sapiens
  source 1..20: mol_type = genomic DNA; note = Gene: NEK6; note = Location (start to end; relative to TSS): NEK6_83_113; note = Orientation (relative to transcription): antisense; note = sgRNA Position: 124258038; note = Sequence Name: 56322-704_101_SL_seq_5381
ggaccggtgcgctggcccgc

SEQ ID NO: 5382 - DNA, 20 bp, Homo sapiens
  source 1..20: mol_type = genomic DNA; note = Gene: NEK6; note = Location (start to end; relative to TSS): NEK6_33_63; note = Orientation (relative to transcription): sense; note = sgRNA Position: 124258008; note = Sequence Name: 56322-704_101_SL_seq_5382
cgctgcgccgcaaactcgtg

SEQ ID NO: 5383 - DNA, 20 bp, Homo sapiens
  source 1..20: mol_type = genomic DNA; note = Gene: NEK6; note = Location (start to end; relative to TSS): NEK6_82_112; note = Orientation (relative to transcription): sense; note = sgRNA Position: 124258057; note = Sequence Name: 56322-704_101_SL_seq_5383
ccagcgcaccggtcccccag

SEQ ID NO: 5384 - DNA, 20 bp, Homo sapiens
  source 1..20: mol_type = genomic DNA; note = Gene: NEK6; note = Location (start to end; relative to TSS): NEK6_34_64; note = Orientation (relative to transcription): sense; note = sgRNA Position: 124258009; note = Sequence Name: 56322-704_101_SL_seq_5384
gctgcgccgcaaactcgtgt

SEQ ID NO: 5385 - DNA, 20 bp, Homo sapiens
  source 1..20: mol_type = genomic DNA; note = Gene: NEK6; note = Location (start to end; relative to TSS): NEK6_80_110; note = Orientation (relative to transcription): antisense; note = sgRNA Position: 124258035; note = Sequence Name: 56322-704_101_SL_seq_5385
ccggtgcgctggcccgcggg

SEQ ID NO: 5386 - DNA, 20 bp, Homo sapiens
  source 1..20: mol_type = genomic DNA; note = Gene: NEK6; note = Location (start to end; relative to TSS): NEK6_41_71; note = Orientation (relative to transcription): antisense; note = sgRNA Position: 124257996; note = Sequence Name: 56322-704_101_SL_seq_5386
cacacgagtttgcggcgcag

SEQ ID NO: 5387 - DNA, 20 bp, Homo sapiens
  source 1..20: mol_type = genomic DNA; note = Gene: NEK6; note = Location (start to end; relative to TSS): NEK6_71_101; note = Orientation (relative to transcription): antisense; note = sgRNA Position: 124258026; note = Sequence Name: 56322-704_101_SL_seq_5387
tggcccgcgggcggctggag

SEQ ID NO: 5388 - DNA, 20 bp, Homo sapiens
  source 1..20: mol_type = genomic DNA; note = Gene: NEK6; note = Location (start to end; relative to TSS): NEK6_21_51; note = Orientation (relative to transcription): antisense; note = sgRNA Position: 124257976; note = Sequence Name: 56322-704_101_SL_seq_5388
cggccgcacgcccgtcagct

SEQ ID NO: 5389 - DNA, 20 bp, Homo sapiens
  source 1..20: mol_type = genomic DNA; note = Gene: NEK6; note = Location (start to end; relative to TSS): NEK6_58_88; note = Orientation (relative to transcription): sense; note = sgRNA Position: 124258033; note = Sequence Name: 56322-704_101_SL_seq_5389
cgcaccgctccagccgcccg

SEQ ID NO: 5390 - DNA, 20 bp, Homo sapiens
  source 1..20: mol_type = genomic DNA; note = Gene: NEK7; note = Location (start to end; relative to TSS): NEK7_46_76; note = Orientation (relative to transcription): sense; note = sgRNA Position: 198157070; note = Sequence Name: 56322-704_101_SL_seq_5390
ccgccgctaggctcgcactc

SEQ ID NO: 5391 - DNA, 20 bp, Homo sapiens
  source 1..20: mol_type = genomic DNA; note = Gene: NEK7; note = Location (start to end; relative to TSS): NEK7_83_113; note = Orientation (relative to transcription): antisense; note = sgRNA Position: 198157087; note = Sequence Name: 56322-704_101_SL_seq_5391
cacccaccctgcgcactgcg

SEQ ID NO: 5392 - DNA, 20 bp, Homo sapiens
  source 1..20: mol_type = genomic DNA; note = Gene: NEK7; note = Location (start to end; relative to TSS): NEK7_34_64; note = Orientation (relative to transcription): sense; note = sgRNA Position: 198157058; note = Sequence Name: 56322-704_101_SL_seq_5392
cgggaggatgggccgccgct

SEQ ID NO: 5393 - DNA, 20 bp, Homo sapiens
  source 1..20: mol_type = genomic DNA; note = Gene: NEK7; note = Location (start to end; relative to TSS): NEK7_68_98; note = Orientation (relative to transcription): sense; note = sgRNA Position: 198157092; note = Sequence Name: 56322-704_101_SL_seq_5393
gacgcgcctcgcagtgcgca

SEQ ID NO: 5394 - DNA, 20 bp, Homo sapiens
  source 1..20: mol_type = genomic DNA; note = Gene: NEK7; note = Location (start to end; relative to TSS): NEK7_23_53; note = Orientation (relative to transcription): sense; note = sgRNA Position: 198157047; note = Sequence Name: 56322-704_101_SL_seq_5394
atcgggagtcgcgggaggat

SEQ ID NO: 5395 - DNA, 20 bp, Homo sapiens
  source 1..20: mol_type = genomic DNA; note = Gene: NEK7; note = Location (start to end; relative to TSS): NEK7_67_97; note = Orientation (relative to transcription): sense; note = sgRNA Position: 198157091; note = Sequence Name: 56322-704_101_SL_seq_5395
ggacgcgcctcgcagtgcgc

SEQ ID NO: 5396 - DNA, 20 bp, Homo sapiens
  source 1..20: mol_type = genomic DNA; note = Gene: NEK7; note = Location (start to end; relative to TSS): NEK7_22_52; note = Orientation (relative to transcription): sense; note = sgRNA Position: 198157046; note = Sequence Name: 56322-704_101_SL_seq_5396
gatcgggagtcgcgggagga

SEQ ID NO: 5397 - DNA, 20 bp, Homo sapiens
  source 1..20: mol_type = genomic DNA; note = Gene: NEK7; note = Location (start to end; relative to TSS): NEK7_58_88; note = Orientation (relative to transcription): antisense; note = sgRNA Position: 198157062; note = Sequence Name: 56322-704_101_SL_seq_5397
cgtccggagtgcgagcctag

SEQ ID NO: 5398 - DNA, 20 bp, Homo sapiens
  source 1..20: mol_type = genomic DNA; note = Gene: NEK7; note = Location (start to end; relative to TSS): NEK7_18_48; note = Orientation (relative to transcription): sense; note = sgRNA Position: 198157042; note = Sequence Name: 56322-704_101_SL_seq_5398
ggaggatcgggagtcgcggg

SEQ ID NO: 5399 - DNA, 20 bp, Homo sapiens
  source 1..20: mol_type = genomic DNA; note = Gene: NEK7; note = Location (start to end; relative to TSS): NEK7_55_85; note = Orientation (relative to transcription): antisense; note = sgRNA Position: 198157059; note = Sequence Name: 56322-704_101_SL_seq_5399
ccggagtgcgagcctagcgg

SEQ ID NO: 5400 - DNA, 20 bp, Homo sapiens
  source 1..20: mol_type = genomic DNA; note = Gene: NEK8; note = Location (start to end; relative to TSS): NEK8_32_62; note = Orientation (relative to transcription): sense; note = sgRNA Position: 28728846; note = Sequence Name: 56322-704_101_SL_seq_5400
cggatccgagtggtggggag

SEQ ID NO: 5401 - DNA, 20 bp, Homo sapiens
  source 1..20: mol_type = genomic DNA; note = Gene: NEK8; note = Location (start to end; relative to TSS): NEK8_64_94; note = Orientation (relative to transcription): sense; note = sgRNA Position: 28728878; note = Sequence Name: 56322-704_101_SL_seq_5401
gtgagccagggctctggggg

SEQ ID NO: 5402 - DNA, 20 bp, Homo sapiens
  source 1..20: mol_type = genomic DNA; note = Gene: NEK8; note = Location (start to end; relative to TSS): NEK8_27_57; note = Orientation (relative to transcription): sense; note = sgRNA Position: 28728841; note = Sequence Name: 56322-704_101_SL_seq_5402
acgagcggatccgagtggtg

SEQ ID NO: 5403 - DNA, 20 bp, Homo sapiens
  source 1..20: mol_type = genomic DNA; note = Gene: NEK8; note = Location (start to end; relative to TSS): NEK8_61_91; note = Orientation (relative to transcription): sense; note = sgRNA Position: 28728875; note = Sequence Name: 56322-704_101_SL_seq_5403
cgggtgagccagggctctgg

SEQ ID NO: 5404 - DNA, 20 bp, Homo sapiens
  source 1..20: mol_type = genomic DNA; note = Gene: NEK8; note = Location (start to end; relative to TSS): NEK8_25_55; note = Orientation (relative to transcription): sense; note = sgRNA Position: 28728839; note = Sequence Name: 56322-704_101_SL_seq_5404
gtacgagcggatccgagtgg

SEQ ID NO: 5405 - DNA, 20 bp, Homo sapiens
  source 1..20: mol_type = genomic DNA; note = Gene: NEK8; note = Location (start to end; relative to TSS): NEK8_60_90; note = Orientation (relative to transcription): sense; note = sgRNA Position: 28728874; note = Sequence Name: 56322-704_101_SL_seq_5405
tcgggtgagccagggctctg

SEQ ID NO: 5406 - DNA, 20 bp, Homo sapiens
  source 1..20: mol_type = genomic DNA; note = Gene: NEK8; note = Location (start to end; relative to TSS): NEK8_26_56; note = Orientation (relative to transcription): sense; note = sgRNA Position: 28728840; note = Sequence Name: 56322-704_101_SL_seq_5406
tacgagcggatccgagtggt

SEQ ID NO: 5407 - DNA, 20 bp, Homo sapiens
  source 1..20: mol_type = genomic DNA; note = Gene: NEK8; note = Location (start to end; relative to TSS): NEK8_59_89; note = Orientation (relative to transcription): sense; note = sgRNA Position: 28728873; note = Sequence Name: 56322-704_101_SL_seq_5407
ttcgggtgagccagggctct

SEQ ID NO: 5408 - DNA, 20 bp, Homo sapiens
  source 1..20: mol_type = genomic DNA; note = Gene: NEK8; note = Location (start to end; relative to TSS): NEK8_22_52; note = Orientation (relative to transcription): sense; note = sgRNA Position: 28728836; note = Sequence Name: 56322-704_101_SL_seq_5408
gaagtacgagcggatccgag

SEQ ID NO: 5409 - DNA, 20 bp, Homo sapiens
  source 1..20: mol_type = genomic DNA; note = Gene: NEK8; note = Location (start to end; relative to TSS): NEK8_52_82; note = Orientation (relative to transcription): sense; note = sgRNA Position: 28728866; note = Sequence Name: 56322-704_101_SL_seq_5409
aggtgccttcgggtgagcca

SEQ ID NO: 5410 - DNA, 20 bp, Homo sapiens
  source 1..20: mol_type = genomic DNA; note = Gene: NEK9; note = Location (start to end; relative to TSS): NEK9_44_74; note = Orientation (relative to transcription): sense; note = sgRNA Position: 75126980; note = Sequence Name: 56322-704_101_SL_seq_5410
gaagcgagcgggacgcagcg

SEQ ID NO: 5411 - DNA, 20 bp, Homo sapiens
  source 1..20: mol_type = genomic DNA; note = Gene: NEK9; note = Location (start to end; relative to TSS): NEK9_81_111; note = Orientation (relative to transcription): sense; note = sgRNA Position: 75126943; note = Sequence Name: 56322-704_101_SL_seq_5411
catacgcaggctggtcccca

SEQ ID NO: 5412 - DNA, 20 bp, Homo sapiens
  source 1..20: mol_type = genomic DNA; note = Gene: NEK9; note = Location (start to end; relative to TSS): NEK9_32_62; note = Orientation (relative to transcription): sense; note = sgRNA Position: 75126992; note = Sequence Name: 56322-704_101_SL_seq_5412
gggccggcatctgaagcgag

SEQ ID NO: 5413 - DNA, 20 bp, Homo sapiens
  source 1..20: mol_type = genomic DNA; note = Gene: NEK9; note = Location (start to end; relative to TSS): NEK9_76_106; note = Orientation (relative to transcription): antisense; note = sgRNA Position: 75126968; note = Sequence Name: 56322-704_101_SL_seq_5413
ctgcgtatgcccggaggccc

SEQ ID NO: 5414 - DNA, 20 bp, Homo sapiens
  source 1..20: mol_type = genomic DNA; note = Gene: NEK9; note = Location (start to end; relative to TSS): NEK9_33_63; note = Orientation (relative to transcription): sense; note = sgRNA Position: 75126991; note = Sequence Name: 56322-704_101_SL_seq_5414
ggccggcatctgaagcgagc

SEQ ID NO: 5415 - DNA, 20 bp, Homo sapiens
  source 1..20: mol_type = genomic DNA; note = Gene: NEK9; note = Location (start to end; relative to TSS): NEK9_72_102; note = Orientation (relative to transcription): sense; note = sgRNA Position: 75126952; note = Sequence Name: 56322-704_101_SL_seq_5415
gcctccgggcatacgcaggc

SEQ ID NO: 5416 - DNA, 20 bp, Homo sapiens
  source 1..20: mol_type = genomic DNA; note = Gene: NEK9; note = Location (start to end; relative to TSS): NEK9_37_67; note = Orientation (relative to transcription): antisense; note = sgRNA Position: 75127007; note = Sequence Name: 56322-704_101_SL_seq_5416
tcgcttcagatgccggcccg

SEQ ID NO: 5417 - DNA, 20 bp, Homo sapiens
  source 1..20: mol_type = genomic DNA; note = Gene: NEK9; note = Location (start to end; relative to TSS): NEK9_68_98; note = Orientation (relative to transcription): sense; note = sgRNA Position: 75126956; note = Sequence Name: 56322-704_101_SL_seq_5417
cagggcctccgggcatacgc

SEQ ID NO: 5418 - DNA, 20 bp, Homo sapiens
  source 1..20: mol_type = genomic DNA; note = Gene: NEK9; note = Location (start to end; relative to TSS): NEK9_16_46; note = Orientation (relative to transcription): sense; note = sgRNA Position: 75127008; note = Sequence Name: 56322-704_101_SL_seq_5418
gggctgacggatccgcgggc

SEQ ID NO: 5419 - DNA, 20 bp, Homo sapiens
  source 1..20: mol_type = genomic DNA; note = Gene: NEK9; note = Location (start to end; relative to TSS): NEK9_50_80; note = Orientation (relative to transcription): sense; note = sgRNA Position: 75126974; note = Sequence Name: 56322-704_101_SL_seq_5419
agcgggacgcagcgcggcca

SEQ ID NO: 5420 - DNA, 20 bp, Homo sapiens
  source 1..20: mol_type = genomic DNA; note = Gene: NIM1K; note = Location (start to end; relative to TSS): NIM1K_37_67; note = Orientation (relative to transcription): antisense; note = sgRNA Position: 43192268; note = Sequence Name: 56322-704_101_SL_seq_5420
gaggctcccggagctgtcag

SEQ ID NO: 5421 - DNA, 20 bp, Homo sapiens
  source 1..20: mol_type = genomic DNA; note = Gene: NIM1K; note = Location (start to end; relative to TSS): NIM1K_82_112; note = Orientation (relative to transcription): antisense; note = sgRNA Position: 43192313; note = Sequence Name: 56322-704_101_SL_seq_5421
gtcggtgtgtggatgtcccg

SEQ ID NO: 5422 - DNA, 20 bp, Homo sapiens
  source 1..20: mol_type = genomic DNA; note = Gene: NIM1K; note = Location (start to end; relative to TSS): NIM1K_34_64; note = Orientation (relative to transcription): antisense; note = sgRNA Position: 43192265; note = Sequence Name: 56322-704_101_SL_seq_5422
gctcccggagctgtcagggg

SEQ ID NO: 5423 - DNA, 20 bp, Homo sapiens
  source 1..20: mol_type = genomic DNA; note = Gene: NIM1K; note = Location (start to end; relative to TSS): NIM1K_77_107; note = Orientation (relative to transcription): antisense; note = sgRNA Position: 43192308; note = Sequence Name: 56322-704_101_SL_seq_5423
tgtgtggatgtcccgaggtg

SEQ ID NO: 5424 - DNA, 20 bp, Homo sapiens
  source 1..20: mol_type = genomic DNA; note = Gene: NIM1K; note = Location (start to end; relative to TSS): NIM1K_42_72; note = Orientation (relative to transcription): sense; note = sgRNA Position: 43192293; note = Sequence Name: 56322-704_101_SL_seq_5424
gggagcctcaagcgcgacag

SEQ ID NO: 5425 - DNA, 20 bp, Homo sapiens
  source 1..20: mol_type = genomic DNA; note = Gene: NIM1K; note = Location (start to end; relative to TSS): NIM1K_76_106; note = Orientation (relative to transcription): antisense; note = sgRNA Position: 43192307; note = Sequence Name: 56322-704_101_SL_seq_5425
gtgtggatgtcccgaggtga

SEQ ID NO: 5426 - DNA, 20 bp, Homo sapiens
  source 1..20: mol_type = genomic DNA; note = Gene: NIM1K; note = Location (start to end; relative to TSS): NIM1K_22_52; note = Orientation (relative to transcription): sense; note = sgRNA Position: 43192273; note = Sequence Name: 56322-704_101_SL_seq_5426
cggccgcccctgacagctcc

SEQ ID NO: 5427 - DNA, 20 bp, Homo sapiens
  source 1..20: mol_type = genomic DNA; note = Gene: NIM1K; note = Location (start to end; relative to TSS): NIM1K_57_87; note = Orientation (relative to transcription): sense; note = sgRNA Position: 43192308; note = Sequence Name: 56322-704_101_SL_seq_5427
gacagcggcgccctcacctc

SEQ ID NO: 5428 - DNA, 20 bp, Homo sapiens
  source 1..20: mol_type = genomic DNA; note = Gene: NIM1K; note = Location (start to end; relative to TSS): NIM1K_21_51; note = Orientation (relative to transcription): antisense; note = sgRNA Position: 43192252; note = Sequence Name: 56322-704_101_SL_seq_5428
tcaggggcggccgacctgac

SEQ ID NO: 5429 - DNA, 20 bp, Homo sapiens
  source 1..20: mol_type = genomic DNA; note = Gene: NIM1K; note = Location (start to end; relative to TSS): NIM1K_56_86; note = Orientation (relative to transcription): sense; note = sgRNA Position: 43192307; note = Sequence Name: 56322-704_101_SL_seq_5429
cgacagcggcgccctcacct

SEQ ID NO: 5430 - DNA, 20 bp, Homo sapiens
  source 1..20: mol_type = genomic DNA; note = Gene: NLK; note = Location (start to end; relative to TSS): NLK_34_64; note = Orientation (relative to transcription): antisense; note = sgRNA Position: 28042717; note = Sequence Name: 56322-704_101_SL_seq_5430
gatcttggtgtttaattttg

SEQ ID NO: 5431 - DNA, 20 bp, Homo sapiens
  source 1..20: mol_type = genomic DNA; note = Gene: NLK; note = Location (start to end; relative to TSS): NLK_91_121; note = Orientation (relative to transcription): sense; note = sgRNA Position: 28042794; note = Sequence Name: 56322-704_101_SL_seq_5431
gttttttgaggtggagtgag

SEQ ID NO: 5432 - DNA, 20 bp, Homo sapiens
  source 1..20: mol_type = genomic DNA; note = Gene: NLK; note = Location (start to end; relative to TSS): NLK_49_79; note = Orientation (relative to transcription): antisense; note = sgRNA Position: 28042732; note = Sequence Name: 56322-704_101_SL_seq_5432
ccaaacaagttagaggatct

SEQ ID NO: 5433 - DNA, 20 bp, Homo sapiens
  source 1..20: mol_type = genomic DNA; note = Gene: NLK; note = Location (start to end; relative to TSS): NLK_82_112; note = Orientation (relative to transcription): sense; note = sgRNA Position: 28042785; note = Sequence Name: 56322-704_101_SL_seq_5433
aagctctatgttttttgagg

SEQ ID NO: 5434 - DNA, 20 bp, Homo sapiens
  source 1..20: mol_type = genomic DNA; note = Gene: NLK; note = Location (start to end; relative to TSS): NLK_21_51; note = Orientation (relative to transcription): antisense; note = sgRNA Position: 28042704; note = Sequence Name: 56322-704_101_SL_seq_5434
aattttggggtgagcgtgtg

SEQ ID NO: 5435 - DNA, 20 bp, Homo sapiens
  source 1..20: mol_type = genomic DNA; note = Gene: NLK; note = Location (start to end; relative to TSS): NLK_79_109; note = Orientation (relative to transcription): sense; note = sgRNA Position: 28042782; note = Sequence Name: 56322-704_101_SL_seq_5435
ataaagctctatgttttttg

SEQ ID NO: 5436 - DNA, 20 bp, Homo sapiens
  source 1..20: mol_type = genomic DNA; note = Gene: NLK; note = Location (start to end; relative to TSS): NLK_17_47; note = Orientation (relative to transcription): antisense; note = sgRNA Position: 28042700; note = Sequence Name: 56322-704_101_SL_seq_5436
ttggggtgagcgtgtgtgga

SEQ ID NO: 5437 - DNA, 20 bp, Homo sapiens
  source 1..20: mol_type = genomic DNA; note = Gene: NLK; note = Location (start to end; relative to TSS): NLK_56_86; note = Orientation (relative to transcription): antisense; note = sgRNA Position: 28042739; note = Sequence Name: 56322-704_101_SL_seq_5437
agtcaatccaaacaagttag

SEQ ID NO: 5438 - DNA, 20 bp, Homo sapiens
  source 1..20: mol_type = genomic DNA; note = Gene: NLK; note = Location (start to end; relative to TSS): NLK_16_46; note = Orientation (relative to transcription): antisense; note = sgRNA Position: 28042699; note = Sequence Name: 56322-704_101_SL_seq_5438
tggggtgagcgtgtgtggaa

SEQ ID NO: 5439 - DNA, 20 bp, Homo sapiens
  source 1..20: mol_type = genomic DNA; note = Gene: NLK; note = Location (start to end; relative to TSS): NLK_49_79; note = Orientation (relative to transcription): antisense; note = sgRNA Position: 28042732; note = Sequence Name: 56322-704_101_SL_seq_5439
ccaaacaagttagaggatct

SEQ ID NO: 5440 - DNA, 20 bp, Homo sapiens
  source 1..20: mol_type = genomic DNA; note = Gene: NME1; note = Location (start to end; relative to TSS): NME1_47_77; note = Orientation (relative to transcription): sense; note = sgRNA Position: 51153632; note = Sequence Name: 56322-704_101_SL_seq_5440
cgggtgctggcggctgcagc

SEQ ID NO: 5441 - DNA, 20 bp, Homo sapiens
  source 1..20: mol_type = genomic DNA; note = Gene: NME1; note = Location (start to end; relative to TSS): NME1_80_110; note = Orientation (relative to transcription): sense; note = sgRNA Position: 51153665; note = Sequence Name: 56322-704_101_SL_seq_5441
taagcagctggaagggtaag

SEQ ID NO: 5442 - DNA, 20 bp, Homo sapiens
  source 1..20: mol_type = genomic DNA; note = Gene: NME1; note = Location (start to end; relative to TSS): NME1_44_74; note = Orientation (relative to transcription): antisense; note = sgRNA Position: 51153609; note = Sequence Name: 56322-704_101_SL_seq_5442
gccagcacccgaaacgcgcc

SEQ ID NO: 5443 - DNA, 20 bp, Homo sapiens
  source 1..20: mol_type = genomic DNA; note = Gene: NME1; note = Location (start to end; relative to TSS): NME1_75_105; note = Orientation (relative to transcription): antisense; note = sgRNA Position: 51153640; note = Sequence Name: 56322-704_101_SL_seq_5443
agctgcttaggtttgaactc

SEQ ID NO: 5444 - DNA, 20 bp, Homo sapiens
  source 1..20: mol_type = genomic DNA; note = Gene: NME1; note = Location (start to end; relative to TSS): NME1_43_73; note = Orientation (relative to transcription): antisense; note = sgRNA Position: 51153608; note = Sequence Name: 56322-704_101_SL_seq_5444
ccagcacccgaaacgcgccc

SEQ ID NO: 5445 - DNA, 20 bp, Homo sapiens
  source 1..20: mol_type = genomic DNA; note = Gene: NME1; note = Location (start to end; relative to TSS): NME1_73_103; note = Orientation (relative to transcription): sense; note = sgRNA Position: 51153658; note = Sequence Name: 56322-704_101_SL_seq_5445
tcaaacctaagcagctggaa

SEQ ID NO: 5446 - DNA, 20 bp, Homo sapiens
  source 1..20: mol_type = genomic DNA; note = Gene: NME1; note = Location (start to end; relative to TSS): NME1_33_63; note = Orientation (relative to transcription): antisense; note = sgRNA Position: 51153598; note = Sequence Name: 56322-704_101_SL_seq_5446
aaacgcgcccgggacccacg

SEQ ID NO: 5447 - DNA, 20 bp, Homo sapiens
  source 1..20: mol_type = genomic DNA; note = Gene: NME1; note = Location (start to end; relative to TSS): NME1_72_102; note = Orientation (relative to transcription): sense; note = sgRNA Position: 51153657; note = Sequence Name: 56322-704_101_SL_seq_5447
ttcaaacctaagcagctgga

SEQ ID NO: 5448 - DNA, 20 bp, Homo sapiens
  source 1..20: mol_type = genomic DNA; note = Gene: NME1; note = Location (start to end; relative to TSS): NME1_37_67; note = Orientation (relative to transcription): sense; note = sgRNA Position: 51153622; note = Sequence Name: 56322-704_101_SL_seq_5448
gggcgcgtttcgggtgctgg

SEQ ID NO: 5449 - DNA, 20 bp, Homo sapiens
  source 1..20: mol_type = genomic DNA; note = Gene: NME1; note = Location (start to end; relative to TSS): NME1_68_98; note = Orientation (relative to transcription): sense; note = sgRNA Position: 51153653; note = Sequence Name: 56322-704_101_SL_seq_5449
ggagttcaaacctaagcagc

SEQ ID NO: 5450 - DNA, 20 bp, Homo sapiens
  source 1..20: mol_type = genomic DNA; note = Gene: NME2; note = Location (start to end; relative to TSS): NME2_15_45; note = Orientation (relative to transcription): antisense; note = sgRNA Position: 51166432; note = Sequence Name: 56322-704_101_SL_seq_5450
gctggtgcgaccaccacacc

SEQ ID NO: 5451 - DNA, 20 bp, Homo sapiens
  source 1..20: mol_type = genomic DNA; note = Gene: NME2; note = Location (start to end; relative to TSS): NME2_66_96; note = Orientation (relative to transcription): antisense; note = sgRNA Position: 51166483; note = Sequence Name: 56322-704_101_SL_seq_5451
accgggaagctggaggggcc

SEQ ID NO: 5452 - DNA, 20 bp, Homo sapiens
  source 1..20: mol_type = genomic DNA; note = Gene: NME2; note = Location (start to end; relative to TSS): NME2_14_44; note = Orientation (relative to transcription): antisense; note = sgRNA Position: 51166431; note = Sequence Name: 56322-704_101_SL_seq_5452
ctggtgcgaccaccacaccc

SEQ ID NO: 5453 - DNA, 20 bp, Homo sapiens
  source 1..20: mol_type = genomic DNA; note = Gene: NME2; note = Location (start to end; relative to TSS): NME2_64_94; note = Orientation (relative to transcription): sense; note = sgRNA Position: 51166501; note = Sequence Name: 56322-704_101_SL_seq_5453
cctccagcttcccggtaagg

SEQ ID NO: 5454 - DNA, 20 bp, Homo sapiens
  source 1..20: mol_type = genomic DNA; note = Gene: NME2; note = Location (start to end; relative to TSS): NME2_8_38; note = Orientation (relative to transcription): antisense; note = sgRNA Position: 51166425; note = Sequence Name: 56322-704_101_SL_seq_5454
cgaccaccacacccgggagc

SEQ ID NO: 5455 - DNA, 20 bp, Homo sapiens
  source 1..20: mol_type = genomic DNA; note = Gene: NME2; note = Location (start to end; relative to TSS): NME2_63_93; note = Orientation (relative to transcription): antisense; note = sgRNA Position: 51166480; note = Sequence Name: 56322-704_101_SL_seq_5455
gggaagctggaggggccggg

SEQ ID NO: 5456 - DNA, 20 bp, Homo sapiens
  source 1..20: mol_type = genomic DNA; note = Gene: NME2; note = Location (start to end; relative to TSS): NME2_5_35; note = Orientation (relative to transcription): antisense; note = sgRNA Position: 51166422; note = Sequence Name: 56322-704_101_SL_seq_5456
ccaccacacccgggagccgg

SEQ ID NO: 5457 - DNA, 20 bp, Homo sapiens
  source 1..20: mol_type = genomic DNA; note = Gene: NME2; note = Location (start to end; relative to TSS): NME2_61_91; note = Orientation (relative to transcription): sense; note = sgRNA Position: 51166498; note = Sequence Name: 56322-704_101_SL_seq_5457
gcccctccagcttcccggta

SEQ ID NO: 5458 - DNA, 20 bp, Homo sapiens
  source 1..20: mol_type = genomic DNA; note = Gene: NME2; note = Location (start to end; relative to TSS): NME2_2_32; note = Orientation (relative to transcription): antisense; note = sgRNA Position: 51166419; note = Sequence Name: 56322-704_101_SL_seq_5458
ccacacccgggagccggcgg

SEQ ID NO: 5459 - DNA, 20 bp, Homo sapiens
  source 1..20: mol_type = genomic DNA; note = Gene: NME2; note = Location (start to end; relative to TSS): NME2_56_86; note = Orientation (relative to transcription): sense; note = sgRNA Position: 51166493; note = Sequence Name: 56322-704_101_SL_seq_5459
gcccggcccctccagcttcc

SEQ ID NO: 5460 - DNA, 20 bp, Homo sapiens
  source 1..20: mol_type = genomic DNA; note = Gene: NME3; note = Location (start to end; relative to TSS): NME3_43_73; note = Orientation (relative to transcription): sense; note = sgRNA Position: 1771476; note = Sequence Name: 56322-704_101_SL_seq_5460
gcgggtgagccgcgcggcgc

SEQ ID NO: 5461 - DNA, 20 bp, Homo sapiens
  source 1..20: mol_type = genomic DNA; note = Gene: NME3; note = Location (start to end; relative to TSS): NME3_75_105; note = Orientation (relative to transcription): antisense; note = sgRNA Position: 1771464; note = Sequence Name: 56322-704_101_SL_seq_5461
cagcaccggccacccgcccc

SEQ ID NO: 5462 - DNA, 20 bp, Homo sapiens
  source 1..20: mol_type = genomic DNA; note = Gene: NME3; note = Location (start to end; relative to TSS): NME3_24_54; note = Orientation (relative to transcription): sense; note = sgRNA Position: 1771495; note = Sequence Name: 56322-704_101_SL_seq_5462
cttcgctaacctcttccccg

SEQ ID NO: 5463 - DNA, 20 bp, Homo sapiens
  source 1..20: mol_type = genomic DNA; note = Gene: NME3; note = Location (start to end; relative to TSS): NME3_72_102; note = Orientation (relative to transcription): sense; note = sgRNA Position: 1771447; note = Sequence Name: 56322-704_101_SL_seq_5463
gcgggtggccggtgctgggc

SEQ ID NO: 5464 - DNA, 20 bp, Homo sapiens
  source 1..20: mol_type = genomic DNA; note = Gene: NME3; note = Location (start to end; relative to TSS): NME3_29_59; note = Orientation (relative to transcription): antisense; note = sgRNA Position: 1771510; note = Sequence Name: 56322-704_101_SL_seq_5464
ggggaagaggttagcgaaga

SEQ ID NO: 5465 - DNA, 20 bp, Homo sapiens
  source 1..20: mol_type = genomic DNA; note = Gene: NME3; note = Location (start to end; relative to TSS): NME3_68_98; note = Orientation (relative to transcription): sense; note = sgRNA Position: 1771451; note = Sequence Name: 56322-704_101_SL_seq_5465
gggggcgggtggccggtgct

SEQ ID NO: 5466 - DNA, 20 bp, Homo sapiens
  source 1..20: mol_type = genomic DNA; note = Gene: NME3; note = Location (start to end; relative to TSS): NME3_25_55; note = Orientation (relative to transcription): sense; note = sgRNA Position: 1771494; note = Sequence Name: 56322-704_101_SL_seq_5466
ttcgctaacctcttccccgc

SEQ ID NO: 5467 - DNA, 20 bp, Homo sapiens
  source 1..20: mol_type = genomic DNA; note = Gene: NME3; note = Location (start to end; relative to TSS): NME3_61_91; note = Orientation (relative to transcription): antisense; note = sgRNA Position: 1771478; note = Sequence Name: 56322-704_101_SL_seq_5467
cgcccccggcccgcgccgcg

SEQ ID NO: 5468 - DNA, 20 bp, Homo sapiens
  source 1..20: mol_type = genomic DNA; note = Gene: NME3; note = Location (start to end; relative to TSS): NME3_18_48; note = Orientation (relative to transcription): antisense; note = sgRNA Position: 1771521; note = Sequence Name: 56322-704_101_SL_seq_5468
tagcgaagatggtcagcacc

SEQ ID NO: 5469 - DNA, 20 bp, Homo sapiens
  source 1..20: mol_type = genomic DNA; note = Gene: NME3; note = Location (start to end; relative to TSS): NME3_48_78; note = Orientation (relative to transcription): antisense; note = sgRNA Position: 1771491; note = Sequence Name: 56322-704_101_SL_seq_5469
cgccgcgcggctcacccgcg

SEQ ID NO: 5470 - DNA, 20 bp, Homo sapiens
  source 1..20: mol_type = genomic DNA; note = Gene: NME4; note = Location (start to end; relative to TSS): NME4_39_69; note = Orientation (relative to transcription): sense; note = sgRNA Position: 397264; note = Sequence Name: 56322-704_101_SL_seq_5470
gcgctgcgggggctgcgctg

SEQ ID NO: 5471 - DNA, 20 bp, Homo sapiens
  source 1..20: mol_type = genomic DNA; note = Gene: NME4; note = Location (start to end; relative to TSS): NME4_84_114; note = Orientation (relative to transcription): sense; note = sgRNA Position: 397309; note = Sequence Name: 56322-704_101_SL_seq_5471
ctgctagtgcgccacggctc

SEQ ID NO: 5472 - DNA, 20 bp, Homo sapiens
  source 1..20: mol_type = genomic DNA; note = Gene: NME4; note = Location (start to end; relative to TSS): NME4_32_62; note = Orientation (relative to transcription): antisense; note = sgRNA Position: 397237; note = Sequence Name: 56322-704_101_SL_seq_5472
gcagcgcggagcgccagaag

SEQ ID NO: 5473 - DNA, 20 bp, Homo sapiens
  source 1..20: mol_type = genomic DNA; note = Gene: NME4; note = Location (start to end; relative to TSS): NME4_83_113; note = Orientation (relative to transcription): sense; note = sgRNA Position: 397308; note = Sequence Name: 56322-704_101_SL_seq_5473
cctgctagtgcgccacggct

SEQ ID NO: 5474 - DNA, 20 bp, Homo sapiens
  source 1..20: mol_type = genomic DNA; note = Gene: NME4; note = Location (start to end; relative to TSS): NME4_27_57; note = Orientation (relative to transcription): sense; note = sgRNA Position: 397252; note = Sequence Name: 56322-704_101_SL_seq_5474
ttctggcgctccgcgctgcg

SEQ ID NO: 5475 - DNA, 20 bp, Homo sapiens
  source 1..20: mol_type = genomic DNA; note = Gene: NME4; note = Location (start to end; relative to TSS): NME4_79_109; note = Orientation (relative to transcription): antisense; note = sgRNA Position: 397284; note = Sequence Name: 56322-704_101_SL_seq_5475
cactagcaggctcgggcccg

SEQ ID NO: 5476 - DNA, 20 bp, Homo sapiens
  source 1..20: mol_type = genomic DNA; note = Gene: NME4; note = Location (start to end; relative to TSS): NME4_25_55; note = Orientation (relative to transcription): sense; note = sgRNA Position: 397250; note = Sequence Name: 56322-704_101_SL_seq_5476
tcttctggcgctccgcgctg

SEQ ID NO: 5477 - DNA, 20 bp, Homo sapiens
  source 1..20: mol_type = genomic DNA; note = Gene: NME4; note = Location (start to end; relative to TSS): NME4_78_108; note = Orientation (relative to transcription): sense; note = sgRNA Position: 397303; note = Sequence Name: 56322-704_101_SL_seq_5477
ccgagcctgctagtgcgcca

SEQ ID NO: 5478 - DNA, 20 bp, Homo sapiens
  source 1..20: mol_type = genomic DNA; note = Gene: NME4; note = Location (start to end; relative to TSS): NME4_28_58; note = Orientation (relative to transcription): sense; note = sgRNA Position: 397253; note = Sequence Name: 56322-704_101_SL_seq_5478
tctggcgctccgcgctgcgg

SEQ ID NO: 5479 - DNA, 20 bp, Homo sapiens
  source 1..20: mol_type = genomic DNA; note = Gene: NME4; note = Location (start to end; relative to TSS): NME4_72_102; note = Orientation (relative to transcription): antisense; note = sgRNA Position: 397277; note = Sequence Name: 56322-704_101_SL_seq_5479
aggctcgggcccggggcccg

SEQ ID NO: 5480 - DNA, 20 bp, Homo sapiens
  source 1..20: mol_type = genomic DNA; note = Gene: NME6; note = Location (start to end; relative to TSS): NME6_41_71; note = Orientation (relative to transcription): sense; note = sgRNA Position: 48301302; note = Sequence Name: 56322-704_101_SL_seq_5480
ctccgaatgacccagaatct

SEQ ID NO: 5481 - DNA, 20 bp, Homo sapiens
  source 1..20: mol_type = genomic DNA; note = Gene: NME6; note = Location (start to end; relative to TSS): NME6_74_104; note = Orientation (relative to transcription): sense; note = sgRNA Position: 48301269; note = Sequence Name: 56322-704_101_SL_seq_5481
gccccgggtacgaggggtga

SEQ ID NO: 5482 - DNA, 20 bp, Homo sapiens
  source 1..20: mol_type = genomic DNA; note = Gene: NME6; note = Location (start to end; relative to TSS): NME6_40_70; note = Orientation (relative to transcription): sense; note = sgRNA Position: 48301303; note = Sequence Name: 56322-704_101_SL_seq_5482
gctccgaatgacccagaatc

SEQ ID NO: 5483 - DNA, 20 bp, Homo sapiens
  source 1..20: mol_type = genomic DNA; note = Gene: NME6; note = Location (start to end; relative to TSS): NME6_73_103; note = Orientation (relative to transcription): sense; note = sgRNA Position: 48301270; note = Sequence Name: 56322-704_101_SL_seq_5483
ggccccgggtacgaggggtg

SEQ ID NO: 5484 - DNA, 20 bp, Homo sapiens
  source 1..20: mol_type = genomic DNA; note = Gene: NME6; note = Location (start to end; relative to TSS): NME6_18_48; note = Orientation (relative to transcription): sense; note = sgRNA Position: 48301325; note = Sequence Name: 56322-704_101_SL_seq_5484
gccggacttctgctgcactg

SEQ ID NO: 5485 - DNA, 20 bp, Homo sapiens
  source 1..20: mol_type = genomic DNA; note = Gene: NME6; note = Location (start to end; relative to TSS): NME6_59_89; note = Orientation (relative to transcription): sense; note = sgRNA Position: 48301284; note = Sequence Name: 56322-704_101_SL_seq_5485
ctggggtgggcttaggcccc

SEQ ID NO: 5486 - DNA, 20 bp, Homo sapiens
  source 1..20: mol_type = genomic DNA; note = Gene: NME6; note = Location (start to end; relative to TSS): NME6_21_51; note = Orientation (relative to transcription): antisense; note = sgRNA Position: 48301342; note = Sequence Name: 56322-704_101_SL_seq_5486
tgcagcagaagtccggctgc

SEQ ID NO: 5487 - DNA, 20 bp, Homo sapiens
  source 1..20: mol_type = genomic DNA; note = Gene: NME6; note = Location (start to end; relative to TSS): NME6_58_88; note = Orientation (relative to transcription): sense; note = sgRNA Position: 48301285; note = Sequence Name: 56322-704_101_SL_seq_5487
tctggggtgggcttaggccc

SEQ ID NO: 5488 - DNA, 20 bp, Homo sapiens
  source 1..20: mol_type = genomic DNA; note = Gene: NME6; note = Location (start to end; relative to TSS): NME6_22_52; note = Orientation (relative to transcription): antisense; note = sgRNA Position: 48301341; note = Sequence Name: 56322-704_101_SL_seq_5488
gtgcagcagaagtccggctg

SEQ ID NO: 5489 - DNA, 20 bp, Homo sapiens
  source 1..20: mol_type = genomic DNA; note = Gene: NME6; note = Location (start to end; relative to TSS): NME6_52_82; note = Orientation (relative to transcription): antisense; note = sgRNA Position: 48301311; note = Sequence Name: 56322-704_101_SL_seq_5489
accccagattctgggtcatt

SEQ ID NO: 5490 - DNA, 20 bp, Homo sapiens
  source 1..20: mol_type = genomic DNA; note = Gene: NMRK1; note = Location (start to end; relative to TSS): NMRK1_45_75; note = Orientation (relative to transcription): sense; note = sgRNA Position: 75088086; note = Sequence Name: 56322-704_101_SL_seq_5490
ggggagcgagctgcgggtag

SEQ ID NO: 5491 - DNA, 20 bp, Homo sapiens
  source 1..20: mol_type = genomic DNA; note = Gene: NMRK1; note = Location (start to end; relative to TSS): NMRK1_109_139; note = Orientation (relative to transcription): antisense; note = sgRNA Position: 75088042; note = Sequence Name: 56322-704_101_SL_seq_5491
cctcccaaacacagcggcag

SEQ ID NO: 5492 - DNA, 20 bp, Homo sapiens
  source 1..20: mol_type = genomic DNA; note = Gene: NMRK1; note = Location (start to end; relative to TSS): NMRK1_38_68; note = Orientation (relative to transcription): sense; note = sgRNA Position: 75088093; note = Sequence Name: 56322-704_101_SL_seq_5492
gcctctcggggagcgagctg

SEQ ID NO: 5493 - DNA, 20 bp, Homo sapiens
  source 1..20: mol_type = genomic DNA; note = Gene: NMRK1; note = Location (start to end; relative to TSS): NMRK1_100_130; note = Orientation (relative to transcription): sense; note = sgRNA Position: 75088031; note = Sequence Name: 56322-704_101_SL_seq_5493
cctctgccgctgtgtttggg

SEQ ID NO: 5494 - DNA, 20 bp, Homo sapiens
  source 1..20: mol_type = genomic DNA; note = Gene: NMRK1; note = Location (start to end; relative to TSS): NMRK1_39_69; note = Orientation (relative to transcription): sense; note = sgRNA Position: 75088092; note = Sequence Name: 56322-704_101_SL_seq_5494
cctctcggggagcgagctgc

SEQ ID NO: 5495 - DNA, 20 bp, Homo sapiens
  source 1..20: mol_type = genomic DNA; note = Gene: NMRK1; note = Location (start to end; relative to TSS): NMRK1_71_101; note = Orientation (relative to transcription): sense; note = sgRNA Position: 75088060; note = Sequence Name: 56322-704_101_SL_seq_5495
actgggtacaggcgcgcgct

SEQ ID NO: 5496 - DNA, 20 bp, Homo sapiens
  source 1..20: mol_type = genomic DNA; note = Gene: NMRK1; note = Location (start to end; relative to TSS): NMRK1_26_56; note = Orientation (relative to transcription): sense; note = sgRNA Position: 75088105; note = Sequence Name: 56322-704_101_SL_seq_5496
aaggggctgtgggcctctcg

SEQ ID NO: 5497 - DNA, 20 bp, Homo sapiens
  source 1..20: mol_type = genomic DNA; note = Gene: NMRK1; note = Location (start to end; relative to TSS): NMRK1_60_90; note = Orientation (relative to transcription): sense; note = sgRNA Position: 75088071; note = Sequence Name: 56322-704_101_SL_seq_5497
ggtagcggcgcactgggtac

SEQ ID NO: 5498 - DNA, 20 bp, Homo sapiens
  source 1..20: mol_type = genomic DNA; note = Gene: NMRK1; note = Location (start to end; relative to TSS): NMRK1_24_54; note = Orientation (relative to transcription): sense; note = sgRNA Position: 75088107; note = Sequence Name: 56322-704_101_SL_seq_5498
gaaaggggctgtgggcctct

SEQ ID NO: 5499 - DNA, 20 bp, Homo sapiens
  source 1..20: mol_type = genomic DNA; note = Gene: NMRK1; note = Location (start to end; relative to TSS): NMRK1_54_84; note = Orientation (relative to transcription): sense; note = sgRNA Position: 75088077; note = Sequence Name: 56322-704_101_SL_seq_5499
gctgcgggtagcggcgcact

SEQ ID NO: 5500 - DNA, 20 bp, Homo sapiens
  source 1..20: mol_type = genomic DNA; note = Gene: NMRK2; note = Location (start to end; relative to TSS): NMRK2_38_68; note = Orientation (relative to transcription): antisense; note = sgRNA Position: 3933113; note = Sequence Name: 56322-704_101_SL_seq_5500
ttcgttttccaacgaggtca

SEQ ID NO: 5501 - DNA, 20 bp, Homo sapiens
  source 1..20: mol_type = genomic DNA; note = Gene: NMRK2; note = Location (start to end; relative to TSS): NMRK2_68_98; note = Orientation (relative to transcription): sense; note = sgRNA Position: 3933163; note = Sequence Name: 56322-704_101_SL_seq_5501
cggcctctagggctgctgtg

SEQ ID NO: 5502 - DNA, 20 bp, Homo sapiens
  source 1..20: mol_type = genomic DNA; note = Gene: NMRK2; note = Location (start to end; relative to TSS): NMRK2_28_58; note = Orientation (relative to transcription): antisense; note = sgRNA Position: 3933103; note = Sequence Name: 56322-704_101_SL_seq_5502
aacgaggtcagggccaaggt

SEQ ID NO: 5503 - DNA, 20 bp, Homo sapiens
  source 1..20: mol_type = genomic DNA; note = Gene: NMRK2; note = Location (start to end; relative to TSS): NMRK2_66_96; note = Orientation (relative to transcription): antisense; note = sgRNA Position: 3933141; note = Sequence Name: 56322-704_101_SL_seq_5503
ccctagaggccgggaccctg

SEQ ID NO: 5504 - DNA, 20 bp, Homo sapiens
  source 1..20: mol_type = genomic DNA; note = Gene: NMRK2; note = Location (start to end; relative to TSS): NMRK2_29_59; note = Orientation (relative to transcription): antisense; note = sgRNA Position: 3933104; note = Sequence Name: 56322-704_101_SL_seq_5504
caacgaggtcagggccaagg

SEQ ID NO: 5505 - DNA, 20 bp, Homo sapiens
  source 1..20: mol_type = genomic DNA; note = Gene: NMRK2; note = Location (start to end; relative to TSS): NMRK2_65_95; note = Orientation (relative to transcription): antisense; note = sgRNA Position: 3933140; note = Sequence Name: 56322-704_101_SL_seq_5505
cctagaggccgggaccctgc

SEQ ID NO: 5506 - DNA, 20 bp, Homo sapiens
  source 1..20: mol_type = genomic DNA; note = Gene: NMRK2; note = Location (start to end; relative to TSS): NMRK2_32_62; note = Orientation (relative to transcription): antisense; note = sgRNA Position: 3933107; note = Sequence Name: 56322-704_101_SL_seq_5506
ttccaacgaggtcagggcca

SEQ ID NO: 5507 - DNA, 20 bp, Homo sapiens
  source 1..20: mol_type = genomic DNA; note = Gene: NMRK2; note = Location (start to end; relative to TSS): NMRK2_64_94; note = Orientation (relative to transcription): antisense; note = sgRNA Position: 3933139; note = Sequence Name: 56322-704_101_SL_seq_5507
ctagaggccgggaccctgcg

SEQ ID NO: 5508 - DNA, 20 bp, Homo sapiens
  source 1..20: mol_type = genomic DNA; note = Gene: NMRK2; note = Location (start to end; relative to TSS): NMRK2_21_51; note = Orientation (relative to transcription): sense; note = sgRNA Position: 3933116; note = Sequence Name: 56322-704_101_SL_seq_5508
caccttggccctgacctcgt

SEQ ID NO: 5509 - DNA, 20 bp, Homo sapiens
  source 1..20: mol_type = genomic DNA; note = Gene: NMRK2; note = Location (start to end; relative to TSS): NMRK2_56_86; note = Orientation (relative to transcription): sense; note = sgRNA Position: 3933151; note = Sequence Name: 56322-704_101_SL_seq_5509
cccgcagggtcccggcctct

SEQ ID NO: 5510 - DNA, 20 bp, Homo sapiens
  source 1..20: mol_type = genomic DNA; note = Gene: NPR1; note = Location (start to end; relative to TSS): NPR1_51_81; note = Orientation (relative to transcription): antisense; note = sgRNA Position: 153678745; note = Sequence Name: 56322-704_101_SL_seq_5510
tgagagagggcgcgcgaggg

SEQ ID NO: 5511 - DNA, 20 bp, Homo sapiens
  source 1..20: mol_type = genomic DNA; note = Gene: NPR1; note = Location (start to end; relative to TSS): NPR1_132_162; note = Orientation (relative to transcription): sense; note = sgRNA Position: 153678846; note = Sequence Name: 56322-704_101_SL_seq_5511
cactcccagttgttcacact

SEQ ID NO: 5512 - DNA, 20 bp, Homo sapiens
  source 1..20: mol_type = genomic DNA; note = Gene: NPR1; note = Location (start to end; relative to TSS): NPR1_54_84; note = Orientation (relative to transcription): antisense; note = sgRNA Position: 153678748; note = Sequence Name: 56322-704_101_SL_seq_5512
ggatgagagagggcgcgcga

SEQ ID NO: 5513 - DNA, 20 bp, Homo sapiens
  source 1..20: mol_type = genomic DNA; note = Gene: NPR1; note = Location (start to end; relative to TSS): NPR1_102_132; note = Orientation (relative to transcription): antisense; note = sgRNA Position: 153678796; note = Sequence Name: 56322-704_101_SL_seq_5513
agagagagagagagagagaa

SEQ ID NO: 5514 - DNA, 20 bp, Homo sapiens
  source 1..20: mol_type = genomic DNA; note = Gene: NPR1; note = Location (start to end; relative to TSS): NPR1_55_85; note = Orientation (relative to transcription): antisense; note = sgRNA Position: 153678749; note = Sequence Name: 56322-704_101_SL_seq_5514
aggatgagagagggcgcgcg

SEQ ID NO: 5515 - DNA, 20 bp, Homo sapiens
  source 1..20: mol_type = genomic DNA; note = Gene: NPR1; note = Location (start to end; relative to TSS): NPR1_101_131; note = Orientation (relative to transcription): antisense; note = sgRNA Position: 153678795; note = Sequence Name: 56322-704_101_SL_seq_5515
gagagagagagagagagaaa

SEQ ID NO: 5516 - DNA, 20 bp, Homo sapiens
  source 1..20: mol_type = genomic DNA; note = Gene: NPR1; note = Location (start to end; relative to TSS): NPR1_44_74; note = Orientation (relative to transcription): antisense; note = sgRNA Position: 153678738; note = Sequence Name: 56322-704_101_SL_seq_5516
gggcgcgcgagggaggaaag

SEQ ID NO: 5517 - DNA, 20 bp, Homo sapiens
  source 1..20: mol_type = genomic DNA; note = Gene: NPR1; note = Location (start to end; relative to TSS): NPR1_75_105; note = Orientation (relative to transcription): antisense; note = sgRNA Position: 153678769; note = Sequence Name: 56322-704_101_SL_seq_5517
gagtgagcgcttcgtgaaga

SEQ ID NO: 5518 - DNA, 20 bp, Homo sapiens
  source 1..20: mol_type = genomic DNA; note = Gene: NPR1; note = Location (start to end; relative to TSS): NPR1_6_36; note = Orientation (relative to transcription): antisense; note = sgRNA Position: 153678700; note = Sequence Name: 56322-704_101_SL_seq_5518
cgtgcgtgagcgcctgcccc

SEQ ID NO: 5519 - DNA, 20 bp, Homo sapiens
  source 1..20: mol_type = genomic DNA; note = Gene: NPR1; note = Location (start to end; relative to TSS): NPR1_44_74; note = Orientation (relative to transcription): antisense; note = sgRNA Position: 153678738; note = Sequence Name: 56322-704_101_SL_seq_5519
gggcgcgcgagggaggaaag

SEQ ID NO: 5520 - DNA, 20 bp, Homo sapiens
  source 1..20: mol_type = genomic DNA; note = Gene: NPR2; note = Location (start to end; relative to TSS): NPR2_46_76; note = Orientation (relative to transcription): antisense; note = sgRNA Position: 35791643; note = Sequence Name: 56322-704_101_SL_seq_5520
tcgtccgggtcaggtcgcct

SEQ ID NO: 5521 - DNA, 20 bp, Homo sapiens
  source 1..20: mol_type = genomic DNA; note = Gene: NPR2; note = Location (start to end; relative to TSS): NPR2_91_121; note = Orientation (relative to transcription): sense; note = sgRNA Position: 35791708; note = Sequence Name: 56322-704_101_SL_seq_5521
gaggaagcgccgggcagcgc

SEQ ID NO: 5522 - DNA, 20 bp, Homo sapiens
  source 1..20: mol_type = genomic DNA; note = Gene: NPR2; note = Location (start to end; relative to TSS): NPR2_41_71; note = Orientation (relative to transcription): sense; note = sgRNA Position: 35791658; note = Sequence Name: 56322-704_101_SL_seq_5522
ggcgacctgacccggacgag

SEQ ID NO: 5523 - DNA, 20 bp, Homo sapiens
  source 1..20: mol_type = genomic DNA; note = Gene: NPR2; note = Location (start to end; relative to TSS): NPR2_84_114; note = Orientation (relative to transcription): antisense; note = sgRNA Position: 35791681; note = Sequence Name: 56322-704_101_SL_seq_5523
cttcctcccgccccccgcct

SEQ ID NO: 5524 - DNA, 20 bp, Homo sapiens
  source 1..20: mol_type = genomic DNA; note = Gene: NPR2; note = Location (start to end; relative to TSS): NPR2_33_63; note = Orientation (relative to transcription): sense; note = sgRNA Position: 35791650; note = Sequence Name: 56322-704_101_SL_seq_5524
cgggccgaggcgacctgacc

SEQ ID NO: 5525 - DNA, 20 bp, Homo sapiens
  source 1..20: mol_type = genomic DNA; note = Gene: NPR2; note = Location (start to end; relative to TSS): NPR2_82_112; note = Orientation (relative to transcription): sense; note = sgRNA Position: 35791699; note = Sequence Name: 56322-704_101_SL_seq_5525
ggggggcgggaggaagcgcc

SEQ ID NO: 5526 - DNA, 20 bp, Homo sapiens
  source 1..20: mol_type = genomic DNA; note = Gene: NPR2; note = Location (start to end; relative to TSS): NPR2_20_50; note = Orientation (relative to transcription): sense; note = sgRNA Position: 35791637; note = Sequence Name: 56322-704_101_SL_seq_5526
agcggagacgggccgggccg

SEQ ID NO: 5527 - DNA, 20 bp, Homo sapiens
  source 1..20: mol_type = genomic DNA; note = Gene: NPR2; note = Location (start to end; relative to TSS): NPR2_52_82; note = Orientation (relative to transcription): sense; note = sgRNA Position: 35791669; note = Sequence Name: 56322-704_101_SL_seq_5527
ccggacgagcggcgcgcgcg

SEQ ID NO: 5528 - DNA, 20 bp, Homo sapiens
  source 1..20: mol_type = genomic DNA; note = Gene: NPR2; note = Location (start to end; relative to TSS): NPR2_18_48; note = Orientation (relative to transcription): antisense; note = sgRNA Position: 35791615; note = Sequence Name: 56322-704_101_SL_seq_5528
cccgtctccgctcgctgcgc

SEQ ID NO: 5529 - DNA, 20 bp, Homo sapiens
  source 1..20: mol_type = genomic DNA; note = Gene: NPR2; note = Location (start to end; relative to TSS): NPR2_50_80; note = Orientation (relative to transcription): sense; note = sgRNA Position: 35791667; note = Sequence Name: 56322-704_101_SL_seq_5529
acccggacgagcggcgcgcg

SEQ ID NO: 5530 - DNA, 20 bp, Homo sapiens
  source 1..20: mol_type = genomic DNA; note = Gene: NRBP1; note = Location (start to end; relative to TSS): NRBP1_47_77; note = Orientation (relative to transcription): antisense; note = sgRNA Position: 27428684; note = Sequence Name: 56322-704_101_SL_seq_5530
cagctccagctcgggttccg

SEQ ID NO: 5531 - DNA, 20 bp, Homo sapiens
  source 1..20: mol_type = genomic DNA; note = Gene: NRBP1; note = Location (start to end; relative to TSS): NRBP1_83_113; note = Orientation (relative to transcription): sense; note = sgRNA Position: 27428740; note = Sequence Name: 56322-704_101_SL_seq_5531
agtcgggaggtgagcgccca

SEQ ID NO: 5532 - DNA, 20 bp, Homo sapiens
  source 1..20: mol_type = genomic DNA; note = Gene: NRBP1; note = Location (start to end; relative to TSS): NRBP1_41_71; note = Orientation (relative to transcription): antisense; note = sgRNA Position: 27428678; note = Sequence Name: 56322-704_101_SL_seq_5532
cagctcgggttccggggccc

SEQ ID NO: 5533 - DNA, 20 bp, Homo sapiens
  source 1..20: mol_type = genomic DNA; note = Gene: NRBP1; note = Location (start to end; relative to TSS): NRBP1_82_112; note = Orientation (relative to transcription): sense; note = sgRNA Position: 27428739; note = Sequence Name: 56322-704_101_SL_seq_5533
gagtcgggaggtgagcgccc

SEQ ID NO: 5534 - DNA, 20 bp, Homo sapiens
  source 1..20: mol_type = genomic DNA; note = Gene: NRBP1; note = Location (start to end; relative to TSS): NRBP1_33_63; note = Orientation (relative to transcription): sense; note = sgRNA Position: 27428690; note = Sequence Name: 56322-704_101_SL_seq_5534
cggggccccggaacccgagc

SEQ ID NO: 5535 - DNA, 20 bp, Homo sapiens
  source 1..20: mol_type = genomic DNA; note = Gene: NRBP1; note = Location (start to end; relative to TSS): NRBP1_70_100; note = Orientation (relative to transcription): sense; note = sgRNA Position: 27428727; note = Sequence Name: 56322-704_101_SL_seq_5535
ctgcggggcgcggagtcggg

SEQ ID NO: 5536 - DNA, 20 bp, Homo sapiens
  source 1..20: mol_type = genomic DNA; note = Gene: NRBP1; note = Location (start to end; relative to TSS): NRBP1_21_51; note = Orientation (relative to transcription): sense; note = sgRNA Position: 27428678; note = Sequence Name: 56322-704_101_SL_seq_5536
gtcgctgtgatccggggccc

SEQ ID NO: 5537 - DNA, 20 bp, Homo sapiens
  source 1..20: mol_type = genomic DNA; note = Gene: NRBP1; note = Location (start to end; relative to TSS): NRBP1_53_83; note = Orientation (relative to transcription): sense; note = sgRNA Position: 27428710; note = Sequence Name: 56322-704_101_SL_seq_5537
tggagctgaagcgcaggctg

SEQ ID NO: 5538 - DNA, 20 bp, Homo sapiens
  source 1..20: mol_type = genomic DNA; note = Gene: NRBP1; note = Location (start to end; relative to TSS): NRBP1_15_45; note = Orientation (relative to transcription): sense; note = sgRNA Position: 27428672; note = Sequence Name: 56322-704_101_SL_seq_5538
gagggagtcgctgtgatccg

SEQ ID NO: 5539 - DNA, 20 bp, Homo sapiens
  source 1..20: mol_type = genomic DNA; note = Gene: NRBP1; note = Location (start to end; relative to TSS): NRBP1_47_77; note = Orientation (relative to transcription): antisense; note = sgRNA Position: 27428684; note = Sequence Name: 56322-704_101_SL_seq_5539
cagctccagctcgggttccg

SEQ ID NO: 5540 - DNA, 20 bp, Homo sapiens
  source 1..20: mol_type = genomic DNA; note = Gene: NRBP2; note = Location (start to end; relative to TSS): NRBP2_46_76; note = Orientation (relative to transcription): sense; note = sgRNA Position: 143840903; note = Sequence Name: 56322-704_101_SL_seq_5540
tgctgggcgcgaggccaggg

SEQ ID NO: 5541 - DNA, 20 bp, Homo sapiens
  source 1..20: mol_type = genomic DNA; note = Gene: NRBP2; note = Location (start to end; relative to TSS): NRBP2_84_114; note = Orientation (relative to transcription): sense; note = sgRNA Position: 143840865; note = Sequence Name: 56322-704_101_SL_seq_5541
gccggcggcggatcgcgcag

SEQ ID NO: 5542 - DNA, 20 bp, Homo sapiens
  source 1..20: mol_type = genomic DNA; note = Gene: NRBP2; note = Location (start to end; relative to TSS): NRBP2_47_77; note = Orientation (relative to transcription): sense; note = sgRNA Position: 143840902; note = Sequence Name: 56322-704_101_SL_seq_5542
gctgggcgcgaggccagggc

SEQ ID NO: 5543 - DNA, 20 bp, Homo sapiens
  source 1..20: mol_type = genomic DNA; note = Gene: NRBP2; note = Location (start to end; relative to TSS): NRBP2_79_109; note = Orientation (relative to transcription): antisense; note = sgRNA Position: 143840890; note = Sequence Name: 56322-704_101_SL_seq_5543
gccgccggcgcagcctctcc

SEQ ID NO: 5544 - DNA, 20 bp, Homo sapiens
  source 1..20: mol_type = genomic DNA; note = Gene: NRBP2; note = Location (start to end; relative to TSS): NRBP2_37_67; note = Orientation (relative to transcription): sense; note = sgRNA Position: 143840912; note = Sequence Name: 56322-704_101_SL_seq_5544
aggctgggctgctgggcgcg

SEQ ID NO: 5545 - DNA, 20 bp, Homo sapiens
  source 1..20: mol_type = genomic DNA; note = Gene: NRBP2; note = Location (start to end; relative to TSS): NRBP2_69_99; note = Orientation (relative to transcription): sense; note = sgRNA Position: 143840880; note = Sequence Name: 56322-704_101_SL_seq_5545
gccgggagaggctgcgccgg

SEQ ID NO: 5546 - DNA, 20 bp, Homo sapiens
  source 1..20: mol_type = genomic DNA; note = Gene: NRBP2; note = Location (start to end; relative to TSS): NRBP2_33_63; note = Orientation (relative to transcription): antisense; note = sgRNA Position: 143840936; note = Sequence Name: 56322-704_101_SL_seq_5546
agcccagcctagagccgccg

SEQ ID NO: 5547 - DNA, 20 bp, Homo sapiens
  source 1..20: mol_type = genomic DNA; note = Gene: NRBP2; note = Location (start to end; relative to TSS): NRBP2_66_96; note = Orientation (relative to transcription): sense; note = sgRNA Position: 143840883; note = Sequence Name: 56322-704_101_SL_seq_5547
cgggccgggagaggctgcgc

SEQ ID NO: 5548 - DNA, 20 bp, Homo sapiens
  source 1..20: mol_type = genomic DNA; note = Gene: NRBP2; note = Location (start to end; relative to TSS): NRBP2_22_52; note = Orientation (relative to transcription): sense; note = sgRNA Position: 143840927; note = Sequence Name: 56322-704_101_SL_seq_5548
tgccgcggcggctctaggct

SEQ ID NO: 5549 - DNA, 20 bp, Homo sapiens
  source 1..20: mol_type = genomic DNA; note = Gene: NRBP2; note = Location (start to end; relative to TSS): NRBP2_57_87; note = Orientation (relative to transcription): sense; note = sgRNA Position: 143840892; note = Sequence Name: 56322-704_101_SL_seq_5549
aggccagggcgggccgggag

SEQ ID NO: 5550 - DNA, 20 bp, Homo sapiens
  source 1..20: mol_type = genomic DNA; note = Gene: NRK; note = Location (start to end; relative to TSS): NRK_46_76; note = Orientation (relative to transcription): antisense; note = sgRNA Position: 105822591; note = Sequence Name: 56322-704_101_SL_seq_5550
aggagcctgagcgtcagtcc

SEQ ID NO: 5551 - DNA, 20 bp, Homo sapiens
  source 1..20: mol_type = genomic DNA; note = Gene: NRK; note = Location (start to end; relative to TSS): NRK_94_124; note = Orientation (relative to transcription): antisense; note = sgRNA Position: 105822639; note = Sequence Name: 56322-704_101_SL_seq_5551
gaaaccggagtttgcgaggc

SEQ ID NO: 5552 - DNA, 20 bp, Homo sapiens
  source 1..20: mol_type = genomic DNA; note = Gene: NRK; note = Location (start to end; relative to TSS): NRK_19_49; note = Orientation (relative to transcription): sense; note = sgRNA Position: 105822584; note = Sequence Name: 56322-704_101_SL_seq_5552
cttctagcttcttcgtctcc

SEQ ID NO: 5553 - DNA, 20 bp, Homo sapiens
  source 1..20: mol_type = genomic DNA; note = Gene: NRK; note = Location (start to end; relative to TSS): NRK_82_112; note = Orientation (relative to transcription): antisense; note = sgRNA Position: 105822627; note = Sequence Name: 56322-704_101_SL_seq_5553
tgcgaggcgggaaagcaagt

SEQ ID NO: 5554 - DNA, 20 bp, Homo sapiens
  source 1..20: mol_type = genomic DNA; note = Gene: NRK; note = Location (start to end; relative to TSS): NRK_26_56; note = Orientation (relative to transcription): antisense; note = sgRNA Position: 105822571; note = Sequence Name: 56322-704_101_SL_seq_5554
tggagacgaagaagctagaa

SEQ ID NO: 5555 - DNA, 20 bp, Homo sapiens
  source 1..20: mol_type = genomic DNA; note = Gene: NRK; note = Location (start to end; relative to TSS): NRK_81_111; note = Orientation (relative to transcription): sense; note = sgRNA Position: 105822646; note = Sequence Name: 56322-704_101_SL_seq_5555
ctttcccgcctcgcaaactc

SEQ ID NO: 5556 - DNA, 20 bp, Homo sapiens
  source 1..20: mol_type = genomic DNA; note = Gene: NRK; note = Location (start to end; relative to TSS): NRK_27_57; note = Orientation (relative to transcription): antisense; note = sgRNA Position: 105822572; note = Sequence Name: 56322-704_101_SL_seq_5556
ctggagacgaagaagctaga

SEQ ID NO: 5557 - DNA, 20 bp, Homo sapiens
  source 1..20: mol_type = genomic DNA; note = Gene: NRK; note = Location (start to end; relative to TSS): NRK_75_105; note = Orientation (relative to transcription): antisense; note = sgRNA Position: 105822620; note = Sequence Name: 56322-704_101_SL_seq_5557
cgggaaagcaagttgggcta

SEQ ID NO: 5558 - DNA, 20 bp, Homo sapiens
  source 1..20: mol_type = genomic DNA; note = Gene: NRK; note = Location (start to end; relative to TSS): NRK_32_62; note = Orientation (relative to transcription): sense; note = sgRNA Position: 105822597; note = Sequence Name: 56322-704_101_SL_seq_5558
cgtctccaggactgacgctc

SEQ ID NO: 5559 - DNA, 20 bp, Homo sapiens
  source 1..20: mol_type = genomic DNA; note = Gene: NRK; note = Location (start to end; relative to TSS): NRK_66_96; note = Orientation (relative to transcription): antisense; note = sgRNA Position: 105822611; note = Sequence Name: 56322-704_101_SL_seq_5559
aagttgggctaaggcgagag

SEQ ID NO: 5560 - DNA, 20 bp, Homo sapiens
  source 1..20: mol_type = genomic DNA; note = Gene: NTRK1; note = Location (start to end; relative to TSS): NTRK1_42_72; note = Orientation (relative to transcription): antisense; note = sgRNA Position: 156860913; note = Sequence Name: 56322-704_101_SL_seq_5560
cggcgcccgcctcgctcagg

SEQ ID NO: 5561 - DNA, 20 bp, Homo sapiens
  source 1..20: mol_type = genomic DNA; note = Gene: NTRK1; note = Location (start to end; relative to TSS): NTRK1_74_104; note = Orientation (relative to transcription): sense; note = sgRNA Position: 156860965; note = Sequence Name: 56322-704_101_SL_seq_5561
gacggcgcgggcagcttggc

SEQ ID NO: 5562 - DNA, 20 bp, Homo sapiens
  source 1..20: mol_type = genomic DNA; note = Gene: NTRK1; note = Location (start to end; relative to TSS): NTRK1_40_70; note = Orientation (relative to transcription): antisense; note = sgRNA Position: 156860911; note = Sequence Name: 56322-704_101_SL_seq_5562
gcgcccgcctcgctcaggcg

SEQ ID NO: 5563 - DNA, 20 bp, Homo sapiens
  source 1..20: mol_type = genomic DNA; note = Gene: NTRK1; note = Location (start to end; relative to TSS): NTRK1_70_100; note = Orientation (relative to transcription): sense; note = sgRNA Position: 156860961; note = Sequence Name: 56322-704_101_SL_seq_5563
ggcggacggcgcgggcagct

SEQ ID NO: 5564 - DNA, 20 bp, Homo sapiens
  source 1..20: mol_type = genomic DNA; note = Gene: NTRK1; note = Location (start to end; relative to TSS): NTRK1_28_58; note = Orientation (relative to transcription): sense; note = sgRNA Position: 156860919; note = Sequence Name: 56322-704_101_SL_seq_5564
ctgccccgcctgagcgaggc

SEQ ID NO: 5565 - DNA, 20 bp, Homo sapiens
  source 1..20: mol_type = genomic DNA; note = Gene: NTRK1; note = Location (start to end; relative to TSS): NTRK1_62_92; note = Orientation (relative to transcription): antisense; note = sgRNA Position: 156860933; note = Sequence Name: 56322-704_101_SL_seq_5565
tccgcctcgcagcatcgcgg

SEQ ID NO: 5566 - DNA, 20 bp, Homo sapiens
  source 1..20: mol_type = genomic DNA; note = Gene: NTRK1; note = Location (start to end; relative to TSS): NTRK1_27_57; note = Orientation (relative to transcription): sense; note = sgRNA Position: 156860918; note = Sequence Name: 56322-704_101_SL_seq_5566
gctgccccgcctgagcgagg

SEQ ID NO: 5567 - DNA, 20 bp, Homo sapiens
  source 1..20: mol_type = genomic DNA; note = Gene: NTRK1; note = Location (start to end; relative to TSS): NTRK1_61_91; note = Orientation (relative to transcription): sense; note = sgRNA Position: 156860952; note = Sequence Name: 56322-704_101_SL_seq_5567
atgctgcgaggcggacggcg

SEQ ID NO: 5568 - DNA, 20 bp, Homo sapiens
  source 1..20: mol_type = genomic DNA; note = Gene: NTRK1; note = Location (start to end; relative to TSS): NTRK1_24_54; note = Orientation (relative to transcription): sense; note = sgRNA Position: 156860915; note = Sequence Name: 56322-704_101_SL_seq_5568
acggctgccccgcctgagcg

SEQ ID NO: 5569 - DNA, 20 bp, Homo sapiens
  source 1..20: mol_type = genomic DNA; note = Gene: NTRK1; note = Location (start to end; relative to TSS): NTRK1_56_86; note = Orientation (relative to transcription): sense; note = sgRNA Position: 156860947; note = Sequence Name: 56322-704_101_SL_seq_5569
ccgcgatgctgcgaggcgga

SEQ ID NO: 5570 - DNA, 20 bp, Homo sapiens
  source 1..20: mol_type = genomic DNA; note = Gene: NTRK2; note = Location (start to end; relative to TSS): NTRK2_35_65; note = Orientation (relative to transcription): antisense; note = sgRNA Position: 84669770; note = Sequence Name: 56322-704_101_SL_seq_5570
tcctgctccaacccaattcc

SEQ ID NO: 5571 - DNA, 20 bp, Homo sapiens
  source 1..20: mol_type = genomic DNA; note = Gene: NTRK2; note = Location (start to end; relative to TSS): NTRK2_88_118; note = Orientation (relative to transcription): sense; note = sgRNA Position: 84669843; note = Sequence Name: 56322-704_101_SL_seq_5571
ccccggcggtagcaggagcc

SEQ ID NO: 5572 - DNA, 20 bp, Homo sapiens
  source 1..20: mol_type = genomic DNA; note = Gene: NTRK2; note = Location (start to end; relative to TSS): NTRK2_36_66; note = Orientation (relative to transcription): sense; note = sgRNA Position: 84669791; note = Sequence Name: 56322-704_101_SL_seq_5572
ggttggagcaggagcctcgc

SEQ ID NO: 5573 - DNA, 20 bp, Homo sapiens
  source 1..20: mol_type = genomic DNA; note = Gene: NTRK2; note = Location (start to end; relative to TSS): NTRK2_81_111; note = Orientation (relative to transcription): sense; note = sgRNA Position: 84669836; note = Sequence Name: 56322-704_101_SL_seq_5573
gctcagtccccggcggtagc

SEQ ID NO: 5574 - DNA, 20 bp, Homo sapiens
  source 1..20: mol_type = genomic DNA; note = Gene: NTRK2; note = Location (start to end; relative to TSS): NTRK2_25_55; note = Orientation (relative to transcription): sense; note = sgRNA Position: 84669780; note = Sequence Name: 56322-704_101_SL_seq_5574
tcccggaattgggttggagc

SEQ ID NO: 5575 - DNA, 20 bp, Homo sapiens
  source 1..20: mol_type = genomic DNA; note = Gene: NTRK2; note = Location (start to end; relative to TSS): NTRK2_74_104; note = Orientation (relative to transcription): sense; note = sgRNA Position: 84669829; note = Sequence Name: 56322-704_101_SL_seq_5575
tctacgcgctcagtccccgg

SEQ ID NO: 5576 - DNA, 20 bp, Homo sapiens
  source 1..20: mol_type = genomic DNA; note = Gene: NTRK2; note = Location (start to end; relative to TSS): NTRK2_19_49; note = Orientation (relative to transcription): sense; note = sgRNA Position: 84669774; note = Sequence Name: 56322-704_101_SL_seq_5576
ggcggctcccggaattgggt

SEQ ID NO: 5577 - DNA, 20 bp, Homo sapiens
  source 1..20: mol_type = genomic DNA; note = Gene: NTRK2; note = Location (start to end; relative to TSS): NTRK2_71_101; note = Orientation (relative to transcription): sense; note = sgRNA Position: 84669826; note = Sequence Name: 56322-704_101_SL_seq_5577
cgctctacgcgctcagtccc

SEQ ID NO: 5578 - DNA, 20 bp, Homo sapiens
  source 1..20: mol_type = genomic DNA; note = Gene: NTRK2; note = Location (start to end; relative to TSS): NTRK2_15_45; note = Orientation (relative to transcription): sense; note = sgRNA Position: 84669770; note = Sequence Name: 56322-704_101_SL_seq_5578
cggcggcggctcccggaatt

SEQ ID NO: 5579 - DNA, 20 bp, Homo sapiens
  source 1..20: mol_type = genomic DNA; note = Gene: NTRK2; note = Location (start to end; relative to TSS): NTRK2_59_89; note = Orientation (relative to transcription): antisense; note = sgRNA Position: 84669794; note = Sequence Name: 56322-704_101_SL_seq_5579
cgcgagcgaagcagccagcg

SEQ ID NO: 5580 - DNA, 20 bp, Homo sapiens
  source 1..20: mol_type = genomic DNA; note = Gene: NTRK3; note = Location (start to end; relative to TSS): NTRK3_57_87; note = Orientation (relative to transcription): antisense; note = sgRNA Position: 88256678; note = Sequence Name: 56322-704_101_SL_seq_5580
gaagagaaggaagatgcagt

SEQ ID NO: 5581 - DNA, 20 bp, Homo sapiens
  source 1..20: mol_type = genomic DNA; note = Gene: NTRK3; note = Location (start to end; relative to TSS): NTRK3_93_123; note = Orientation (relative to transcription): antisense; note = sgRNA Position: 88256642; note = Sequence Name: 56322-704_101_SL_seq_5581
ctctcacacatacacacacc

SEQ ID NO: 5582 - DNA, 20 bp, Homo sapiens
  source 1..20: mol_type = genomic DNA; note = Gene: NTRK3; note = Location (start to end; relative to TSS): NTRK3_33_63; note = Orientation (relative to transcription): antisense; note = sgRNA Position: 88256702; note = Sequence Name: 56322-704_101_SL_seq_5582
gctgcagcagccgccgcgaa

SEQ ID NO: 5583 - DNA, 20 bp, Homo sapiens
  source 1..20: mol_type = genomic DNA; note = Gene: NTRK3; note = Location (start to end; relative to TSS): NTRK3_65_95; note = Orientation (relative to transcription): sense; note = sgRNA Position: 88256650; note = Sequence Name: 56322-704_101_SL_seq_5583
ctcttcctttcctcgggctc

SEQ ID NO: 5584 - DNA, 20 bp, Homo sapiens
  source 1..20: mol_type = genomic DNA; note = Gene: NTRK3; note = Location (start to end; relative to TSS): NTRK3_21_51; note = Orientation (relative to transcription): antisense; note = sgRNA Position: 88256714; note = Sequence Name: 56322-704_101_SL_seq_5584
gccgcgaatggctcgccgcg

SEQ ID NO: 5585 - DNA, 20 bp, Homo sapiens
  source 1..20: mol_type = genomic DNA; note = Gene: NTRK3; note = Location (start to end; relative to TSS): NTRK3_59_89; note = Orientation (relative to transcription): sense; note = sgRNA Position: 88256656; note = Sequence Name: 56322-704_101_SL_seq_5585
ttccttctcttcctttcctc

SEQ ID NO: 5586 - DNA, 20 bp, Homo sapiens
  source 1..20: mol_type = genomic DNA; note = Gene: NTRK3; note = Location (start to end; relative to TSS): NTRK3_14_44; note = Orientation (relative to transcription): sense; note = sgRNA Position: 88256701; note = Sequence Name: 56322-704_101_SL_seq_5586
gcgcggcgagccattcgcgg

SEQ ID NO: 5587 - DNA, 20 bp, Homo sapiens
  source 1..20: mol_type = genomic DNA; note = Gene: NTRK3; note = Location (start to end; relative to TSS): NTRK3_58_88; note = Orientation (relative to transcription): sense; note = sgRNA Position: 88256657; note = Sequence Name: 56322-704_101_SL_seq_5587
cttccttctcttcctttcct

SEQ ID NO: 5588 - DNA, 20 bp, Homo sapiens
  source 1..20: mol_type = genomic DNA; note = Gene: NTRK3; note = Location (start to end; relative to TSS): NTRK3_11_41; note = Orientation (relative to transcription): sense; note = sgRNA Position: 88256704; note = Sequence Name: 56322-704_101_SL_seq_5588
gccgcgcggcgagccattcg

SEQ ID NO: 5589 - DNA, 20 bp, Homo sapiens
  source 1..20: mol_type = genomic DNA; note = Gene: NTRK3; note = Location (start to end; relative to TSS): NTRK3_57_87; note = Orientation (relative to transcription): antisense; note = sgRNA Position: 88256678; note = Sequence Name: 56322-704_101_SL_seq_5589
gaagagaaggaagatgcagt

SEQ ID NO: 5590 - DNA, 20 bp, Homo sapiens
  source 1..20: mol_type = genomic DNA; note = Gene: NUAK1; note = Location (start to end; relative to TSS): NUAK1_37_67; note = Orientation (relative to transcription): antisense; note = sgRNA Position: 106138913; note = Sequence Name: 56322-704_101_SL_seq_5590
gcgaggtggcggcggtggca

SEQ ID NO: 5591 - DNA, 20 bp, Homo sapiens
  source 1..20: mol_type = genomic DNA; note = Gene: NUAK1; note = Location (start to end; relative to TSS): NUAK1_70_100; note = Orientation (relative to transcription): sense; note = sgRNA Position: 106138860; note = Sequence Name: 56322-704_101_SL_seq_5591
cgcggccggggggcggtgcg

SEQ ID NO: 5592 - DNA, 20 bp, Homo sapiens
  source 1..20: mol_type = genomic DNA; note = Gene: NUAK1; note = Location (start to end; relative to TSS): NUAK1_36_66; note = Orientation (relative to transcription): antisense; note = sgRNA Position: 106138914; note = Sequence Name: 56322-704_101_SL_seq_5592
cgaggtggcggcggtggcag

SEQ ID NO: 5593 - DNA, 20 bp, Homo sapiens
  source 1..20: mol_type = genomic DNA; note = Gene: NUAK1; note = Location (start to end; relative to TSS): NUAK1_68_98; note = Orientation (relative to transcription): antisense; note = sgRNA Position: 106138882; note = Sequence Name: 56322-704_101_SL_seq_5593
cccccggccgcggcgagctg

SEQ ID NO: 5594 - DNA, 20 bp, Homo sapiens
  source 1..20: mol_type = genomic DNA; note = Gene: NUAK1; note = Location (start to end; relative to TSS): NUAK1_33_63; note = Orientation (relative to transcription): antisense; note = sgRNA Position: 106138917; note = Sequence Name: 56322-704_101_SL_seq_5594
ggtggcggcggtggcagggg

SEQ ID NO: 5595 - DNA, 20 bp, Homo sapiens
  source 1..20: mol_type = genomic DNA; note = Gene: NUAK1; note = Location (start to end; relative to TSS): NUAK1_63_93; note = Orientation (relative to transcription): sense; note = sgRNA Position: 106138867; note = Sequence Name: 56322-704_101_SL_seq_5595
agctcgccgcggccgggggg

SEQ ID NO: 5596 - DNA, 20 bp, Homo sapiens
  source 1..20: mol_type = genomic DNA; note = Gene: NUAK1; note = Location (start to end; relative to TSS): NUAK1_30_60; note = Orientation (relative to transcription): antisense; note = sgRNA Position: 106138920; note = Sequence Name: 56322-704_101_SL_seq_5596
ggcggcggtggcaggggagg

SEQ ID NO: 5597 - DNA, 20 bp, Homo sapiens
  source 1..20: mol_type = genomic DNA; note = Gene: NUAK1; note = Location (start to end; relative to TSS): NUAK1_60_90; note = Orientation (relative to transcription): sense; note = sgRNA Position: 106138870; note = Sequence Name: 56322-704_101_SL_seq_5597
cacagctcgccgcggccggg

SEQ ID NO: 5598 - DNA, 20 bp, Homo sapiens
  source 1..20: mol_type = genomic DNA; note = Gene: NUAK1; note = Location (start to end; relative to TSS): NUAK1_27_57; note = Orientation (relative to transcription): antisense; note = sgRNA Position: 106138923; note = Sequence Name: 56322-704_101_SL_seq_5598
ggcggtggcaggggaggcgg

SEQ ID NO: 5599 - DNA, 20 bp, Homo sapiens
  source 1..20: mol_type = genomic DNA; note = Gene: NUAK1; note = Location (start to end; relative to TSS): NUAK1_57_87; note = Orientation (relative to transcription): sense; note = sgRNA Position: 106138873; note = Sequence Name: 56322-704_101_SL_seq_5599
ctccacagctcgccgcggcc

SEQ ID NO: 5600 - DNA, 20 bp, Homo sapiens
  source 1..20: mol_type = genomic DNA; note = Gene: NUAK2; note = Location (start to end; relative to TSS): NUAK2_43_73; note = Orientation (relative to transcription): antisense; note = sgRNA Position: 205321698; note = Sequence Name: 56322-704_101_SL_seq_5600
agggctgaagcgcggggcac

SEQ ID NO: 5601 - DNA, 20 bp, Homo sapiens
  source 1..20: mol_type = genomic DNA; note = Gene: NUAK2; note = Location (start to end; relative to TSS): NUAK2_76_106; note = Orientation (relative to transcription): antisense; note = sgRNA Position: 205321665; note = Sequence Name: 56322-704_101_SL_seq_5601
agggcggcaggggaatcagt

SEQ ID NO: 5602 - DNA, 20 bp, Homo sapiens
  source 1..20: mol_type = genomic DNA; note = Gene: NUAK2; note = Location (start to end; relative to TSS): NUAK2_31_61; note = Orientation (relative to transcription): antisense; note = sgRNA Position: 205321710; note = Sequence Name: 56322-704_101_SL_seq_5602
cggggcacaggtcccgcacc

SEQ ID NO: 5603 - DNA, 20 bp, Homo sapiens
  source 1..20: mol_type = genomic DNA; note = Gene: NUAK2; note = Location (start to end; relative to TSS): NUAK2_67_97; note = Orientation (relative to transcription): antisense; note = sgRNA Position: 205321674; note = Sequence Name: 56322-704_101_SL_seq_5603
ggggaatcagtaggctgtgc

SEQ ID NO: 5604 - DNA, 20 bp, Homo sapiens
  source 1..20: mol_type = genomic DNA; note = Gene: NUAK2; note = Location (start to end; relative to TSS): NUAK2_27_57; note = Orientation (relative to transcription): antisense; note = sgRNA Position: 205321714; note = Sequence Name: 56322-704_101_SL_seq_5604
gcacaggtcccgcaccagga

SEQ ID NO: 5605 - DNA, 20 bp, Homo sapiens
  source 1..20: mol_type = genomic DNA; note = Gene: NUAK2; note = Location (start to end; relative to TSS): NUAK2_66_96; note = Orientation (relative to transcription): antisense; note = sgRNA Position: 205321675; note = Sequence Name: 56322-704_101_SL_seq_5605
gggaatcagtaggctgtgcg

SEQ ID NO: 5606 - DNA, 20 bp, Homo sapiens
  source 1..20: mol_type = genomic DNA; note = Gene: NUAK2; note = Location (start to end; relative to TSS): NUAK2_26_56; note = Orientation (relative to transcription): antisense; note = sgRNA Position: 205321715; note = Sequence Name: 56322-704_101_SL_seq_5606
cacaggtcccgcaccaggac

SEQ ID NO: 5607 - DNA, 20 bp, Homo sapiens
  source 1..20: mol_type = genomic DNA; note = Gene: NUAK2; note = Location (start to end; relative to TSS): NUAK2_63_93; note = Orientation (relative to transcription): antisense; note = sgRNA Position: 205321678; note = Sequence Name: 56322-704_101_SL_seq_5607
aatcagtaggctgtgcgggg

SEQ ID NO: 5608 - DNA, 20 bp, Homo sapiens
  source 1..20: mol_type = genomic DNA; note = Gene: NUAK2; note = Location (start to end; relative to TSS): NUAK2_25_55; note = Orientation (relative to transcription): antisense; note = sgRNA Position: 205321716; note = Sequence Name: 56322-704_101_SL_seq_5608
acaggtcccgcaccaggacg

SEQ ID NO: 5609 - DNA, 20 bp, Homo sapiens
  source 1..20: mol_type = genomic DNA; note = Gene: NUAK2; note = Location (start to end; relative to TSS): NUAK2_62_92; note = Orientation (relative to transcription): antisense; note = sgRNA Position: 205321679; note = Sequence Name: 56322-704_101_SL_seq_5609
atcagtaggctgtgcgggga

SEQ ID NO: 5610 - DNA, 20 bp, Homo sapiens
  source 1..20: mol_type = genomic DNA; note = Gene: OBSCN; note = Location (start to end; relative to TSS): OBSCN_30_60; note = Orientation (relative to transcription): sense; note = sgRNA Position: 228208100; note = Sequence Name: 56322-704_101_SL_seq_5610
gcctgctggtcctgggccct

SEQ ID NO: 5611 - DNA, 20 bp, Homo sapiens
  source 1..20: mol_type = genomic DNA; note = Gene: OBSCN; note = Location (start to end; relative to TSS): OBSCN_91_121; note = Orientation (relative to transcription): antisense; note = sgRNA Position: 228208141; note = Sequence Name: 56322-704_101_SL_seq_5611
gcaggctgggggcacaggct

SEQ ID NO: 5612 - DNA, 20 bp, Homo sapiens
  source 1..20: mol_type = genomic DNA; note = Gene: OBSCN; note = Location (start to end; relative to TSS): OBSCN_33_63; note = Orientation (relative to transcription): sense; note = sgRNA Position: 228208103; note = Sequence Name: 56322-704_101_SL_seq_5612
tgctggtcctgggccctcgg

SEQ ID NO: 5613 - DNA, 20 bp, Homo sapiens
  source 1..20: mol_type = genomic DNA; note = Gene: OBSCN; note = Location (start to end; relative to TSS): OBSCN_88_118; note = Orientation (relative to transcription): antisense; note = sgRNA Position: 228208138; note = Sequence Name: 56322-704_101_SL_seq_5613
ggctgggggcacaggctggg

SEQ ID NO: 5614 - DNA, 20 bp, Homo sapiens
  source 1..20: mol_type = genomic DNA; note = Gene: OBSCN; note = Location (start to end; relative to TSS): OBSCN_34_64; note = Orientation (relative to transcription): sense; note = sgRNA Position: 228208104; note = Sequence Name: 56322-704_101_SL_seq_5614
gctggtcctgggccctcgga

SEQ ID NO: 5615 - DNA, 20 bp, Homo sapiens
  source 1..20: mol_type = genomic DNA; note = Gene: OBSCN; note = Location (start to end; relative to TSS): OBSCN_83_113; note = Orientation (relative to transcription): antisense; note = sgRNA Position: 228208133; note = Sequence Name: 56322-704_101_SL_seq_5615
ggggcacaggctgggaggca

SEQ ID NO: 5616 - DNA, 20 bp, Homo sapiens
  source 1..20: mol_type = genomic DNA; note = Gene: OBSCN; note = Location (start to end; relative to TSS): OBSCN_37_67; note = Orientation (relative to transcription): sense; note = sgRNA Position: 228208107; note = Sequence Name: 56322-704_101_SL_seq_5616
ggtcctgggccctcggaggg

SEQ ID NO: 5617 - DNA, 20 bp, Homo sapiens
  source 1..20: mol_type = genomic DNA; note = Gene: OBSCN; note = Location (start to end; relative to TSS): OBSCN_74_104; note = Orientation (relative to transcription): antisense; note = sgRNA Position: 228208124; note = Sequence Name: 56322-704_101_SL_seq_5617
gctgggaggcaggggctgcc

SEQ ID NO: 5618 - DNA, 20 bp, Homo sapiens
  source 1..20: mol_type = genomic DNA; note = Gene: OBSCN; note = Location (start to end; relative to TSS): OBSCN_23_53; note = Orientation (relative to transcription): sense; note = sgRNA Position: 228208093; note = Sequence Name: 56322-704_101_SL_seq_5618
gtaggcagcctgctggtcct

SEQ ID NO: 5619 - DNA, 20 bp, Homo sapiens
  source 1..20: mol_type = genomic DNA; note = Gene: OBSCN; note = Location (start to end; relative to TSS): OBSCN_55_85; note = Orientation (relative to transcription): antisense; note = sgRNA Position: 228208105; note = Sequence Name: 56322-704_101_SL_seq_5619
cgggtctcacctccctccga

SEQ ID NO: 5620 - DNA, 20 bp, Homo sapiens
  source 1..20: mol_type = genomic DNA; note = Gene: OXSR1; note = Location (start to end; relative to TSS): OXSR1_55_85; note = Orientation (relative to transcription): sense; note = sgRNA Position: 38165618; note = Sequence Name: 56322-704_101_SL_seq_5620
cgctgctgctgcggaggccg

SEQ ID NO: 5621 - DNA, 20 bp, Homo sapiens
  source 1..20: mol_type = genomic DNA; note = Gene: OXSR1; note = Location (start to end; relative to TSS): OXSR1_86_116; note = Orientation (relative to transcription): sense; note = sgRNA Position: 38165649; note = Sequence Name: 56322-704_101_SL_seq_5621
tgggctgggccgggcagtgc

SEQ ID NO: 5622 - DNA, 20 bp, Homo sapiens
  source 1..20: mol_type = genomic DNA; note = Gene: OXSR1; note = Location (start to end; relative to TSS): OXSR1_49_79; note = Orientation (relative to transcription): sense; note = sgRNA Position: 38165612; note = Sequence Name: 56322-704_101_SL_seq_5622
ttctgtcgctgctgctgcgg

SEQ ID NO: 5623 - DNA, 20 bp, Homo sapiens
  source 1..20: mol_type = genomic DNA; note = Gene: OXSR1; note = Location (start to end; relative to TSS): OXSR1_81_111; note = Orientation (relative to transcription): antisense; note = sgRNA Position: 38165624; note = Sequence Name: 56322-704_101_SL_seq_5623
cccagcccacgtcctgtcct

SEQ ID NO: 5624 - DNA, 20 bp, Homo sapiens
  source 1..20: mol_type = genomic DNA; note = Gene: OXSR1; note = Location (start to end; relative to TSS): OXSR1_47_77; note = Orientation (relative to transcription): antisense; note = sgRNA Position: 38165590; note = Sequence Name: 56322-704_101_SL_seq_5624
gcagcgacagaagctttgcc

SEQ ID NO: 5625 - DNA, 20 bp, Homo sapiens
  source 1..20: mol_type = genomic DNA; note = Gene: OXSR1; note = Location (start to end; relative to TSS): OXSR1_77_107; note = Orientation (relative to transcription): sense; note = sgRNA Position: 38165640; note = Sequence Name: 56322-704_101_SL_seq_5625
gacaggacgtgggctgggcc

SEQ ID NO: 5626 - DNA, 20 bp, Homo sapiens
  source 1..20: mol_type = genomic DNA; note = Gene: OXSR1; note = Location (start to end; relative to TSS): OXSR1_46_76; note = Orientation (relative to transcription): antisense; note = sgRNA Position: 38165589; note = Sequence Name: 56322-704_101_SL_seq_5626
cagcgacagaagctttgcct

SEQ ID NO: 5627 - DNA, 20 bp, Homo sapiens
  source 1..20: mol_type = genomic DNA; note = Gene: OXSR1; note = Location (start to end; relative to TSS): OXSR1_76_106; note = Orientation (relative to transcription): sense; note = sgRNA Position: 38165639; note = Sequence Name: 56322-704_101_SL_seq_5627
ggacaggacgtgggctgggc

SEQ ID NO: 5628 - DNA, 20 bp, Homo sapiens
  source 1..20: mol_type = genomic DNA; note = Gene: OXSR1; note = Location (start to end; relative to TSS): OXSR1_7_37; note = Orientation (relative to transcription): sense; note = sgRNA Position: 38165570; note = Sequence Name: 56322-704_101_SL_seq_5628
tggggtggagggcgggacag

SEQ ID NO: 5629 - DNA, 20 bp, Homo sapiens
  source 1..20: mol_type = genomic DNA; note = Gene: OXSR1; note = Location (start to end; relative to TSS): OXSR1_46_76; note = Orientation (relative to transcription): antisense; note = sgRNA Position: 38165589; note = Sequence Name: 56322-704_101_SL_seq_5629
cagcgacagaagctttgcct

SEQ ID NO: 5630 - DNA, 20 bp, Homo sapiens
  source 1..20: mol_type = genomic DNA; note = Gene: PAK1; note = Location (start to end; relative to TSS): PAK1_34_64; note = Orientation (relative to transcription): antisense; note = sgRNA Position: 77474056; note = Sequence Name: 56322-704_101_SL_seq_5630
ctccggctgcagccgcggga

SEQ ID NO: 5631 - DNA, 20 bp, Homo sapiens
  source 1..20: mol_type = genomic DNA; note = Gene: PAK1; note = Location (start to end; relative to TSS): PAK1_87_117; note = Orientation (relative to transcription): antisense; note = sgRNA Position: 77474003; note = Sequence Name: 56322-704_101_SL_seq_5631
agcgtgtgggggaagccgtg

SEQ ID NO: 5632 - DNA, 20 bp, Homo sapiens
  source 1..20: mol_type = genomic DNA; note = Gene: PAK1; note = Location (start to end; relative to TSS): PAK1_35_65; note = Orientation (relative to transcription): sense; note = sgRNA Position: 77474035; note = Sequence Name: 56322-704_101_SL_seq_5632
gctgcagccggagccgaagg

SEQ ID NO: 5633 - DNA, 20 bp, Homo sapiens
  source 1..20: mol_type = genomic DNA; note = Gene: PAK1; note = Location (start to end; relative to TSS): PAK1_86_116; note = Orientation (relative to transcription): antisense; note = sgRNA Position: 77474004; note = Sequence Name: 56322-704_101_SL_seq_5633
gcgtgtgggggaagccgtga

SEQ ID NO: 5634 - DNA, 20 bp, Homo sapiens
  source 1..20: mol_type = genomic DNA; note = Gene: PAK1; note = Location (start to end; relative to TSS): PAK1_38_68; note = Orientation (relative to transcription): sense; note = sgRNA Position: 77474032; note = Sequence Name: 56322-704_101_SL_seq_5634
gcagccggagccgaaggtgg

SEQ ID NO: 5635 - DNA, 20 bp, Homo sapiens
  source 1..20: mol_type = genomic DNA; note = Gene: PAK1; note = Location (start to end; relative to TSS): PAK1_85_115; note = Orientation (relative to transcription): antisense; note = sgRNA Position: 77474005; note = Sequence Name: 56322-704_101_SL_seq_5635
cgtgtgggggaagccgtgag

SEQ ID NO: 5636 - DNA, 20 bp, Homo sapiens
  source 1..20: mol_type = genomic DNA; note = Gene: PAK1; note = Location (start to end; relative to TSS): PAK1_39_69; note = Orientation (relative to transcription): antisense; note = sgRNA Position: 77474051; note = Sequence Name: 56322-704_101_SL_seq_5636
ttcggctccggctgcagccg

SEQ ID NO: 5637 - DNA, 20 bp, Homo sapiens
  source 1..20: mol_type = genomic DNA; note = Gene: PAK1; note = Location (start to end; relative to TSS): PAK1_84_114; note = Orientation (relative to transcription): antisense; note = sgRNA Position: 77474006; note = Sequence Name: 56322-704_101_SL_seq_5637
gtgtgggggaagccgtgagg

SEQ ID NO: 5638 - DNA, 20 bp, Homo sapiens
  source 1..20: mol_type = genomic DNA; note = Gene: PAK1; note = Location (start to end; relative to TSS): PAK1_32_62; note = Orientation (relative to transcription): sense; note = sgRNA Position: 77474038; note = Sequence Name: 56322-704_101_SL_seq_5638
gcggctgcagccggagccga

SEQ ID NO: 5639 - DNA, 20 bp, Homo sapiens
  source 1..20: mol_type = genomic DNA; note = Gene: PAK1; note = Location (start to end; relative to TSS): PAK1_63_93; note = Orientation (relative to transcription): sense; note = sgRNA Position: 77474007; note = Sequence Name: 56322-704_101_SL_seq_5639
gcacagtagacgccccctca

SEQ ID NO: 5640 - DNA, 20 bp, Homo sapiens
  source 1..20: mol_type = genomic DNA; note = Gene: PAK2; note = Location (start to end; relative to TSS): PAK2_47_77; note = Orientation (relative to transcription): antisense; note = sgRNA Position: 196739910; note = Sequence Name: 56322-704_101_SL_seq_5640
ggcccgggccggaggggaag

SEQ ID NO: 5641 - DNA, 20 bp, Homo sapiens
  source 1..20: mol_type = genomic DNA; note = Gene: PAK2; note = Location (start to end; relative to TSS): PAK2_77_107; note = Orientation (relative to transcription): sense; note = sgRNA Position: 196739960; note = Sequence Name: 56322-704_101_SL_seq_5641
gctccctcccctcccctccc

SEQ ID NO: 5642 - DNA, 20 bp, Homo sapiens
  source 1..20: mol_type = genomic DNA; note = Gene: PAK2; note = Location (start to end; relative to TSS): PAK2_36_66; note = Orientation (relative to transcription): sense; note = sgRNA Position: 196739919; note = Sequence Name: 56322-704_101_SL_seq_5642
ttccgcttcccctccggccc

SEQ ID NO: 5643 - DNA, 20 bp, Homo sapiens
  source 1..20: mol_type = genomic DNA; note = Gene: PAK2; note = Location (start to end; relative to TSS): PAK2_74_104; note = Orientation (relative to transcription): antisense; note = sgRNA Position: 196739937; note = Sequence Name: 56322-704_101_SL_seq_5643
ggggagggagccttcggcaa

SEQ ID NO: 5644 - DNA, 20 bp, Homo sapiens
  source 1..20: mol_type = genomic DNA; note = Gene: PAK2; note = Location (start to end; relative to TSS): PAK2_35_65; note = Orientation (relative to transcription): sense; note = sgRNA Position: 196739918; note = Sequence Name: 56322-704_101_SL_seq_5644
gttccgcttcccctccggcc

SEQ ID NO: 5645 - DNA, 20 bp, Homo sapiens
  source 1..20: mol_type = genomic DNA; note = Gene: PAK2; note = Location (start to end; relative to TSS): PAK2_68_98; note = Orientation (relative to transcription): antisense; note = sgRNA Position: 196739931; note = Sequence Name: 56322-704_101_SL_seq_5645
ggagccttcggcaatggcga

SEQ ID NO: 5646 - DNA, 20 bp, Homo sapiens
  source 1..20: mol_type = genomic DNA; note = Gene: PAK2; note = Location (start to end; relative to TSS): PAK2_30_60; note = Orientation (relative to transcription): sense; note = sgRNA Position: 196739913; note = Sequence Name: 56322-704_101_SL_seq_5646
cggttgttccgcttcccctc

SEQ ID NO: 5647 - DNA, 20 bp, Homo sapiens
  source 1..20: mol_type = genomic DNA; note = Gene: PAK2; note = Location (start to end; relative to TSS): PAK2_62_92; note = Orientation (relative to transcription): antisense; note = sgRNA Position: 196739925; note = Sequence Name: 56322-704_101_SL_seq_5647
ttcggcaatggcgacggccc

SEQ ID NO: 5648 - DNA, 20 bp, Homo sapiens
  source 1..20: mol_type = genomic DNA; note = Gene: PAK2; note = Location (start to end; relative to TSS): PAK2_23_53; note = Orientation (relative to transcription): antisense; note = sgRNA Position: 196739886; note = Sequence Name: 56322-704_101_SL_seq_5648
acaaccgccgccgctgcgcg

SEQ ID NO: 5649 - DNA, 20 bp, Homo sapiens
  source 1..20: mol_type = genomic DNA; note = Gene: PAK2; note = Location (start to end; relative to TSS): PAK2_53_83; note = Orientation (relative to transcription): antisense; note = sgRNA Position: 196739916; note = Sequence Name: 56322-704_101_SL_seq_5649
ggcgacggcccgggccggag

SEQ ID NO: 5650 - DNA, 20 bp, Homo sapiens
  source 1..20: mol_type = genomic DNA; note = Gene: PAK3; note = Location (start to end; relative to TSS): PAK3_54_84; note = Orientation (relative to transcription): sense; note = sgRNA Position: 111096271; note = Sequence Name: 56322-704_101_SL_seq_5650
ccccgcctcgagccagtgtg

SEQ ID NO: 5651 - DNA, 20 bp, Homo sapiens
  source 1..20: mol_type = genomic DNA; note = Gene: PAK3; note = Location (start to end; relative to TSS): PAK3_86_116; note = Orientation (relative to transcription): sense; note = sgRNA Position: 111096303; note = Sequence Name: 56322-704_101_SL_seq_5651
aagagccagggggagcgggc

SEQ ID NO: 5652 - DNA, 20 bp, Homo sapiens
  source 1..20: mol_type = genomic DNA; note = Gene: PAK3; note = Location (start to end; relative to TSS): PAK3_18_48; note = Orientation (relative to transcription): sense; note = sgRNA Position: 111096235; note = Sequence Name: 56322-704_101_SL_seq_5652
accgtctgggatctcgcact

SEQ ID NO: 5653 - DNA, 20 bp, Homo sapiens
  source 1..20: mol_type = genomic DNA; note = Gene: PAK3; note = Location (start to end; relative to TSS): PAK3_57_87; note = Orientation (relative to transcription): sense; note = sgRNA Position: 111096274; note = Sequence Name: 56322-704_101_SL_seq_5653
cgcctcgagccagtgtgcgg

SEQ ID NO: 5654 - DNA, 20 bp, Homo sapiens
  source 1..20: mol_type = genomic DNA; note = Gene: PAK3; note = Location (start to end; relative to TSS): PAK3_20_50; note = Orientation (relative to transcription): sense; note = sgRNA Position: 111096237; note = Sequence Name: 56322-704_101_SL_seq_5654
cgtctgggatctcgcactgg

SEQ ID NO: 5655 - DNA, 20 bp, Homo sapiens
  source 1..20: mol_type = genomic DNA; note = Gene: PAK3; note = Location (start to end; relative to TSS): PAK3_56_86; note = Orientation (relative to transcription): sense; note = sgRNA Position: 111096273; note = Sequence Name: 56322-704_101_SL_seq_5655
ccgcctcgagccagtgtgcg

SEQ ID NO: 5656 - DNA, 20 bp, Homo sapiens
  source 1..20: mol_type = genomic DNA; note = Gene: PAK3; note = Location (start to end; relative to TSS): PAK3_19_49; note = Orientation (relative to transcription): sense; note = sgRNA Position: 111096236; note = Sequence Name: 56322-704_101_SL_seq_5656
ccgtctgggatctcgcactg

SEQ ID NO: 5657 - DNA, 20 bp, Homo sapiens
  source 1..20: mol_type = genomic DNA; note = Gene: PAK3; note = Location (start to end; relative to TSS): PAK3_55_85; note = Orientation (relative to transcription): sense; note = sgRNA Position: 111096272; note = Sequence Name: 56322-704_101_SL_seq_5657
cccgcctcgagccagtgtgc

SEQ ID NO: 5658 - DNA, 20 bp, Homo sapiens
  source 1..20: mol_type = genomic DNA; note = Gene: PAK3; note = Location (start to end; relative to TSS): PAK3_17_47; note = Orientation (relative to transcription): sense; note = sgRNA Position: 111096234; note = Sequence Name: 56322-704_101_SL_seq_5658
aaccgtctgggatctcgcac

SEQ ID NO: 5659 - DNA, 20 bp, Homo sapiens
  source 1..20: mol_type = genomic DNA; note = Gene: PAK3; note = Location (start to end; relative to TSS): PAK3_54_84; note = Orientation (relative to transcription): sense; note = sgRNA Position: 111096271; note = Sequence Name: 56322-704_101_SL_seq_5659
ccccgcctcgagccagtgtg

SEQ ID NO: 5660 - DNA, 20 bp, Homo sapiens
  source 1..20: mol_type = genomic DNA; note = Gene: PAK4; note = Location (start to end; relative to TSS): PAK4_37_67; note = Orientation (relative to transcription): sense; note = sgRNA Position: 39125849; note = Sequence Name: 56322-704_101_SL_seq_5660
gtggcggtgcaagagagctg

SEQ ID NO: 5661 - DNA, 20 bp, Homo sapiens
  source 1..20: mol_type = genomic DNA; note = Gene: PAK4; note = Location (start to end; relative to TSS): PAK4_92_122; note = Orientation (relative to transcription): sense; note = sgRNA Position: 39125904; note = Sequence Name: 56322-704_101_SL_seq_5661
agttaggccgcgagcgactg

SEQ ID NO: 5662 - DNA, 20 bp, Homo sapiens
  source 1..20: mol_type = genomic DNA; note = Gene: PAK4; note = Location (start to end; relative to TSS): PAK4_38_68; note = Orientation (relative to transcription): antisense; note = sgRNA Position: 39125830; note = Sequence Name: 56322-704_101_SL_seq_5662
ctcttgcaccgccaccaccg

SEQ ID NO: 5663 - DNA, 20 bp, Homo sapiens
  source 1..20: mol_type = genomic DNA; note = Gene: PAK4; note = Location (start to end; relative to TSS): PAK4_90_120; note = Orientation (relative to transcription): antisense; note = sgRNA Position: 39125882; note = Sequence Name: 56322-704_101_SL_seq_5663
cgcggcctaactgctcgacc

SEQ ID NO: 5664 - DNA, 20 bp, Homo sapiens
  source 1..20: mol_type = genomic DNA; note = Gene: PAK4; note = Location (start to end; relative to TSS): PAK4_41_71; note = Orientation (relative to transcription): sense; note = sgRNA Position: 39125853; note = Sequence Name: 56322-704_101_SL_seq_5664
cggtgcaagagagctgaggg

SEQ ID NO: 5665 - DNA, 20 bp, Homo sapiens
  source 1..20: mol_type = genomic DNA; note = Gene: PAK4; note = Location (start to end; relative to TSS): PAK4_76_106; note = Orientation (relative to transcription): sense; note = sgRNA Position: 39125888; note = Sequence Name: 56322-704_101_SL_seq_5665
gagttccaggtcgagcagtt

SEQ ID NO: 5666 - DNA, 20 bp, Homo sapiens
  source 1..20: mol_type = genomic DNA; note = Gene: PAK4; note = Location (start to end; relative to TSS): PAK4_21_51; note = Orientation (relative to transcription): sense; note = sgRNA Position: 39125833; note = Sequence Name: 56322-704_101_SL_seq_5666
gggagtgtccgcggtggtgg

SEQ ID NO: 5667 - DNA, 20 bp, Homo sapiens
  source 1..20: mol_type = genomic DNA; note = Gene: PAK4; note = Location (start to end; relative to TSS): PAK4_63_93; note = Orientation (relative to transcription): sense; note = sgRNA Position: 39125875; note = Sequence Name: 56322-704_101_SL_seq_5667
gcgcgagggcgcggagttcc

SEQ ID NO: 5668 - DNA, 20 bp, Homo sapiens
  source 1..20: mol_type = genomic DNA; note = Gene: PAK4; note = Location (start to end; relative to TSS): PAK4_18_48; note = Orientation (relative to transcription): sense; note = sgRNA Position: 39125830; note = Sequence Name: 56322-704_101_SL_seq_5668
ggcgggagtgtccgcggtgg

SEQ ID NO: 5669 - DNA, 20 bp, Homo sapiens
  source 1..20: mol_type = genomic DNA; note = Gene: PAK4; note = Location (start to end; relative to TSS): PAK4_48_78; note = Orientation (relative to transcription): sense; note = sgRNA Position: 39125860; note = Sequence Name: 56322-704_101_SL_seq_5669
agagagctgagggaggcgcg

SEQ ID NO: 5670 - DNA, 20 bp, Homo sapiens
  source 1..20: mol_type = genomic DNA; note = Gene: PAK5; note = Location (start to end; relative to TSS): PAK5_33_63; note = Orientation (relative to transcription): antisense; note = sgRNA Position: 9839039; note = Sequence Name: 56322-704_101_SL_seq_5670
gcagctgctccgggttttcg

SEQ ID NO: 5671 - DNA, 20 bp, Homo sapiens
  source 1..20: mol_type = genomic DNA; note = Gene: PAK5; note = Location (start to end; relative to TSS): PAK5_70_100; note = Orientation (relative to transcription): sense; note = sgRNA Position: 9838982; note = Sequence Name: 56322-704_101_SL_seq_5671
aggggcgaagccgggcagct

SEQ ID NO: 5672 - DNA, 20 bp, Homo sapiens
  source 1..20: mol_type = genomic DNA; note = Gene: PAK5; note = Location (start to end; relative to TSS): PAK5_26_56; note = Orientation (relative to transcription): antisense; note = sgRNA Position: 9839046; note = Sequence Name: 56322-704_101_SL_seq_5672
ctccgggttttcgtggcagc

SEQ ID NO: 5673 - DNA, 20 bp, Homo sapiens
  source 1..20: mol_type = genomic DNA; note = Gene: PAK5; note = Location (start to end; relative to TSS): PAK5_62_92; note = Orientation (relative to transcription): sense; note = sgRNA Position: 9838990; note = Sequence Name: 56322-704_101_SL_seq_5673
gtcctccgaggggcgaagcc

SEQ ID NO: 5674 - DNA, 20 bp, Homo sapiens
  source 1..20: mol_type = genomic DNA; note = Gene: PAK5; note = Location (start to end; relative to TSS): PAK5_23_53; note = Orientation (relative to transcription): antisense; note = sgRNA Position: 9839049; note = Sequence Name: 56322-704_101_SL_seq_5674
cgggttttcgtggcagccgg

SEQ ID NO: 5675 - DNA, 20 bp, Homo sapiens
  source 1..20: mol_type = genomic DNA; note = Gene: PAK5; note = Location (start to end; relative to TSS): PAK5_61_91; note = Orientation (relative to transcription): sense; note = sgRNA Position: 9838991; note = Sequence Name: 56322-704_101_SL_seq_5675
agtcctccgaggggcgaagc

SEQ ID NO: 5676 - DNA, 20 bp, Homo sapiens
  source 1..20: mol_type = genomic DNA; note = Gene: PAK5; note = Location (start to end; relative to TSS): PAK5_22_52; note = Orientation (relative to transcription): antisense; note = sgRNA Position: 9839050; note = Sequence Name: 56322-704_101_SL_seq_5676
gggttttcgtggcagccggc

SEQ ID NO: 5677 - DNA, 20 bp, Homo sapiens
  source 1..20: mol_type = genomic DNA; note = Gene: PAK5; note = Location (start to end; relative to TSS): PAK5_52_82; note = Orientation (relative to transcription): sense; note = sgRNA Position: 9839000; note = Sequence Name: 56322-704_101_SL_seq_5677
ctcatggacagtcctccgag

SEQ ID NO: 5678 - DNA, 20 bp, Homo sapiens
  source 1..20: mol_type = genomic DNA; note = Gene: PAK5; note = Location (start to end; relative to TSS): PAK5_19_49; note = Orientation (relative to transcription): antisense; note = sgRNA Position: 9839053; note = Sequence Name: 56322-704_101_SL_seq_5678
ttttcgtggcagccggcggg

SEQ ID NO: 5679 - DNA, 20 bp, Homo sapiens
  source 1..20: mol_type = genomic DNA; note = Gene: PAK5; note = Location (start to end; relative to TSS): PAK5_50_80; note = Orientation (relative to transcription): sense; note = sgRNA Position: 9839002; note = Sequence Name: 56322-704_101_SL_seq_5679
cgctcatggacagtcctccg

SEQ ID NO: 5680 - DNA, 20 bp, Homo sapiens
  source 1..20: mol_type = genomic DNA; note = Gene: PAK6; note = Location (start to end; relative to TSS): PAK6_50_80; note = Orientation (relative to transcription): sense; note = sgRNA Position: 40239139; note = Sequence Name: 56322-704_101_SL_seq_5680
ggagaaatcccaaagtgagc

SEQ ID NO: 5681 - DNA, 20 bp, Homo sapiens
  source 1..20: mol_type = genomic DNA; note = Gene: PAK6; note = Location (start to end; relative to TSS): PAK6_94_124; note = Orientation (relative to transcription): sense; note = sgRNA Position: 40239183; note = Sequence Name: 56322-704_101_SL_seq_5681
gcgccgcagccggggccgct

SEQ ID NO: 5682 - DNA, 20 bp, Homo sapiens
  source 1..20: mol_type = genomic DNA; note = Gene: PAK6; note = Location (start to end; relative to TSS): PAK6_51_81; note = Orientation (relative to transcription): sense; note = sgRNA Position: 40239140; note = Sequence Name: 56322-704_101_SL_seq_5682
gagaaatcccaaagtgagcc

SEQ ID NO: 5683 - DNA, 20 bp, Homo sapiens
  source 1..20: mol_type = genomic DNA; note = Gene: PAK6; note = Location (start to end; relative to TSS): PAK6_86_116; note = Orientation (relative to transcription): sense; note = sgRNA Position: 40239175; note = Sequence Name: 56322-704_101_SL_seq_5683
ggaggggcgcgccgcagccg

SEQ ID NO: 5684 - DNA, 20 bp, Homo sapiens
  source 1..20: mol_type = genomic DNA; note = Gene: PAK6; note = Location (start to end; relative to TSS): PAK6_45_75; note = Orientation (relative to transcription): antisense; note = sgRNA Position: 40239114; note = Sequence Name: 56322-704_101_SL_seq_5684
gatttctccattaaatcctc

SEQ ID NO: 5685 - DNA, 20 bp, Homo sapiens
  source 1..20: mol_type = genomic DNA; note = Gene: PAK6; note = Location (start to end; relative to TSS): PAK6_78_108; note = Orientation (relative to transcription): antisense; note = sgRNA Position: 40239147; note = Sequence Name: 56322-704_101_SL_seq_5685
ccctcctccaccgcgcgccc

SEQ ID NO: 5686 - DNA, 20 bp, Homo sapiens
  source 1..20: mol_type = genomic DNA; note = Gene: PAK6; note = Location (start to end; relative to TSS): PAK6_24_54; note = Orientation (relative to transcription): antisense; note = sgRNA Position: 40239093; note = Sequence Name: 56322-704_101_SL_seq_5686
ggcatcgacctgctcgtttg

SEQ ID NO: 5687 - DNA, 20 bp, Homo sapiens
  source 1..20: mol_type = genomic DNA; note = Gene: PAK6; note = Location (start to end; relative to TSS): PAK6_59_89; note = Orientation (relative to transcription): sense; note = sgRNA Position: 40239148; note = Sequence Name: 56322-704_101_SL_seq_5687
ccaaagtgagccggggcgcg

SEQ ID NO: 5688 - DNA, 20 bp, Homo sapiens
  source 1..20: mol_type = genomic DNA; note = Gene: PAK6; note = Location (start to end; relative to TSS): PAK6_20_50; note = Orientation (relative to transcription): sense; note = sgRNA Position: 40239109; note = Sequence Name: 56322-704_101_SL_seq_5688
aacgagcaggtcgatgcctg

SEQ ID NO: 5689 - DNA, 20 bp, Homo sapiens
  source 1..20: mol_type = genomic DNA; note = Gene: PAK6; note = Location (start to end; relative to TSS): PAK6_50_80; note = Orientation (relative to transcription): sense; note = sgRNA Position: 40239139; note = Sequence Name: 56322-704_101_SL_seq_5689
ggagaaatcccaaagtgagc

SEQ ID NO: 5690 - DNA, 20 bp, Homo sapiens
  source 1..20: mol_type = genomic DNA; note = Gene: PAN3; note = Location (start to end; relative to TSS): PAN3_45_75; note = Orientation (relative to transcription): antisense; note = sgRNA Position: 28138596; note = Sequence Name: 56322-704_101_SL_seq_5690
gccgccaccaccatagacgg

SEQ ID NO: 5691 - DNA, 20 bp, Homo sapiens
  source 1..20: mol_type = genomic DNA; note = Gene: PAN3; note = Location (start to end; relative to TSS): PAN3_95_125; note = Orientation (relative to transcription): sense; note = sgRNA Position: 28138666; note = Sequence Name: 56322-704_101_SL_seq_5691
ggcgttgccatgaacagtgg

SEQ ID NO: 5692 - DNA, 20 bp, Homo sapiens
  source 1..20: mol_type = genomic DNA; note = Gene: PAN3; note = Location (start to end; relative to TSS): PAN3_46_76; note = Orientation (relative to transcription): antisense; note = sgRNA Position: 28138597; note = Sequence Name: 56322-704_101_SL_seq_5692
cgccgccaccaccatagacg

SEQ ID NO: 5693 - DNA, 20 bp, Homo sapiens
  source 1..20: mol_type = genomic DNA; note = Gene: PAN3; note = Location (start to end; relative to TSS): PAN3_92_122; note = Orientation (relative to transcription): sense; note = sgRNA Position: 28138663; note = Sequence Name: 56322-704_101_SL_seq_5693
tgcggcgttgccatgaacag

SEQ ID NO: 5694 - DNA, 20 bp, Homo sapiens
  source 1..20: mol_type = genomic DNA; note = Gene: PAN3; note = Location (start to end; relative to TSS): PAN3_47_77; note = Orientation (relative to transcription): antisense; note = sgRNA Position: 28138598; note = Sequence Name: 56322-704_101_SL_seq_5694
ccgccgccaccaccatagac

SEQ ID NO: 5695 - DNA, 20 bp, Homo sapiens
  source 1..20: mol_type = genomic DNA; note = Gene: PAN3; note = Location (start to end; relative to TSS): PAN3_92_122; note = Orientation (relative to transcription): sense; note = sgRNA Position: 28138663; note = Sequence Name: 56322-704_101_SL_seq_5695
tgcggcgttgccatgaacag

SEQ ID NO: 5696 - DNA, 20 bp, Homo sapiens
  source 1..20: mol_type = genomic DNA; note = Gene: PAN3; note = Location (start to end; relative to TSS): PAN3_26_56; note = Orientation (relative to transcription): sense; note = sgRNA Position: 28138597; note = Sequence Name: 56322-704_101_SL_seq_5696
ttcctttcctcccccgtcta

SEQ ID NO: 5697 - DNA, 20 bp, Homo sapiens
  source 1..20: mol_type = genomic DNA; note = Gene: PAN3; note = Location (start to end; relative to TSS): PAN3_59_89; note = Orientation (relative to transcription): sense; note = sgRNA Position: 28138630; note = Sequence Name: 56322-704_101_SL_seq_5697
ggcggctcctcgggcggcgg

SEQ ID NO: 5698 - DNA, 20 bp, Homo sapiens
  source 1..20: mol_type = genomic DNA; note = Gene: PAN3; note = Location (start to end; relative to TSS): PAN3_6_36; note = Orientation (relative to transcription): antisense; note = sgRNA Position: 28138557; note = Sequence Name: 56322-704_101_SL_seq_5698
gccggtgccggataaaagcc

SEQ ID NO: 5699 - DNA, 20 bp, Homo sapiens
  source 1..20: mol_type = genomic DNA; note = Gene: PAN3; note = Location (start to end; relative to TSS): PAN3_42_72; note = Orientation (relative to transcription): antisense; note = sgRNA Position: 28138593; note = Sequence Name: 56322-704_101_SL_seq_5699
gccaccaccatagacggggg

SEQ ID NO: 5700 - DNA, 20 bp, Homo sapiens
  source 1..20: mol_type = genomic DNA; note = Gene: PANK1; note = Location (start to end; relative to TSS): PANK1_46_76; note = Orientation (relative to transcription): sense; note = sgRNA Position: 89645172; note = Sequence Name: 56322-704_101_SL_seq_5700
aaggcgggcggcgggagccc

SEQ ID NO: 5701 - DNA, 20 bp, Homo sapiens
  source 1..20: mol_type = genomic DNA; note = Gene: PANK1; note = Location (start to end; relative to TSS): PANK1_82_112; note = Orientation (relative to transcription): sense; note = sgRNA Position: 89645136; note = Sequence Name: 56322-704_101_SL_seq_5701
gggatccccgattccgcgcc

SEQ ID NO: 5702 - DNA, 20 bp, Homo sapiens
  source 1..20: mol_type = genomic DNA; note = Gene: PANK1; note = Location (start to end; relative to TSS): PANK1_38_68; note = Orientation (relative to transcription): sense; note = sgRNA Position: 89645180; note = Sequence Name: 56322-704_101_SL_seq_5702
atcaggggaaggcgggcggc

SEQ ID NO: 5703 - DNA, 20 bp, Homo sapiens
  source 1..20: mol_type = genomic DNA; note = Gene: PANK1; note = Location (start to end; relative to TSS): PANK1_73_103; note = Orientation (relative to transcription): antisense; note = sgRNA Position: 89645165; note = Sequence Name: 56322-704_101_SL_seq_5703
atccccgcgcacccccagcc

SEQ ID NO: 5704 - DNA, 20 bp, Homo sapiens
  source 1..20: mol_type = genomic DNA; note = Gene: PANK1; note = Location (start to end; relative to TSS): PANK1_40_70; note = Orientation (relative to transcription): antisense; note = sgRNA Position: 89645198; note = Sequence Name: 56322-704_101_SL_seq_5704
cccgccttcccctgatcccc

SEQ ID NO: 5705 - DNA, 20 bp, Homo sapiens
  source 1..20: mol_type = genomic DNA; note = Gene: PANK1; note = Location (start to end; relative to TSS): PANK1_72_102; note = Orientation (relative to transcription): antisense; note = sgRNA Position: 89645166; note = Sequence Name: 56322-704_101_SL_seq_5705
tccccgcgcacccccagccg

SEQ ID NO: 5706 - DNA, 20 bp, Homo sapiens
  source 1..20: mol_type = genomic DNA; note = Gene: PANK1; note = Location (start to end; relative to TSS): PANK1_22_52; note = Orientation (relative to transcription): sense; note = sgRNA Position: 89645196; note = Sequence Name: 56322-704_101_SL_seq_5706
gtcgcgcggcctggggatca

SEQ ID NO: 5707 - DNA, 20 bp, Homo sapiens
  source 1..20: mol_type = genomic DNA; note = Gene: PANK1; note = Location (start to end; relative to TSS): PANK1_52_82; note = Orientation (relative to transcription): sense; note = sgRNA Position: 89645166; note = Sequence Name: 56322-704_101_SL_seq_5707
ggcggcgggagccccggctg

SEQ ID NO: 5708 - DNA, 20 bp, Homo sapiens
  source 1..20: mol_type = genomic DNA; note = Gene: PANK1; note = Location (start to end; relative to TSS): PANK1_20_50; note = Orientation (relative to transcription): antisense; note = sgRNA Position: 89645218; note = Sequence Name: 56322-704_101_SL_seq_5708
aggccgcgcgacttcaaacg

SEQ ID NO: 5709 - DNA, 20 bp, Homo sapiens
  source 1..20: mol_type = genomic DNA; note = Gene: PANK1; note = Location (start to end; relative to TSS): PANK1_51_81; note = Orientation (relative to transcription): sense; note = sgRNA Position: 89645167; note = Sequence Name: 56322-704_101_SL_seq_5709
gggcggcgggagccccggct

SEQ ID NO: 5710 - DNA, 20 bp, Homo sapiens
  source 1..20: mol_type = genomic DNA; note = Gene: PANK2; note = Location (start to end; relative to TSS): PANK2_33_63; note = Orientation (relative to transcription): sense; note = sgRNA Position: 3889446; note = Sequence Name: 56322-704_101_SL_seq_5710
cgctggggggcttgctcggg

SEQ ID NO: 5711 - DNA, 20 bp, Homo sapiens
  source 1..20: mol_type = genomic DNA; note = Gene: PANK2; note = Location (start to end; relative to TSS): PANK2_66_96; note = Orientation (relative to transcription): sense; note = sgRNA Position: 3889479; note = Sequence Name: 56322-704_101_SL_seq_5711
tgctgcggatgggagggggc

SEQ ID NO: 5712 - DNA, 20 bp, Homo sapiens
  source 1..20: mol_type = genomic DNA; note = Gene: PANK2; note = Location (start to end; relative to TSS): PANK2_30_60; note = Orientation (relative to transcription): sense; note = sgRNA Position: 3889443; note = Sequence Name: 56322-704_101_SL_seq_5712
cgacgctggggggcttgctc

SEQ ID NO: 5713 - DNA, 20 bp, Homo sapiens
  source 1..20: mol_type = genomic DNA; note = Gene: PANK2; note = Location (start to end; relative to TSS): PANK2_60_90; note = Orientation (relative to transcription): sense; note = sgRNA Position: 3889473; note = Sequence Name: 56322-704_101_SL_seq_5713
gactgctgctgcggatggga

SEQ ID NO: 5714 - DNA, 20 bp, Homo sapiens
  source 1..20: mol_type = genomic DNA; note = Gene: PANK2; note = Location (start to end; relative to TSS): PANK2_20_50; note = Orientation (relative to transcription): sense; note = sgRNA Position: 3889433; note = Sequence Name: 56322-704_101_SL_seq_5714
agaaggaatccgacgctggg

SEQ ID NO: 5715 - DNA, 20 bp, Homo sapiens
  source 1..20: mol_type = genomic DNA; note = Gene: PANK2; note = Location (start to end; relative to TSS): PANK2_59_89; note = Orientation (relative to transcription): sense; note = sgRNA Position: 3889472; note = Sequence Name: 56322-704_101_SL_seq_5715
cgactgctgctgcggatggg

SEQ ID NO: 5716 - DNA, 20 bp, Homo sapiens
  source 1..20: mol_type = genomic DNA; note = Gene: PANK2; note = Location (start to end; relative to TSS): PANK2_19_49; note = Orientation (relative to transcription): sense; note = sgRNA Position: 3889432; note = Sequence Name: 56322-704_101_SL_seq_5716
gagaaggaatccgacgctgg

SEQ ID NO: 5717 - DNA, 20 bp, Homo sapiens
  source 1..20: mol_type = genomic DNA; note = Gene: PANK2; note = Location (start to end; relative to TSS): PANK2_56_86; note = Orientation (relative to transcription): sense; note = sgRNA Position: 3889469; note = Sequence Name: 56322-704_101_SL_seq_5717
cagcgactgctgctgcggat

SEQ ID NO: 5718 - DNA, 20 bp, Homo sapiens
  source 1..20: mol_type = genomic DNA; note = Gene: PANK2; note = Location (start to end; relative to TSS): PANK2_18_48; note = Orientation (relative to transcription): sense; note = sgRNA Position: 3889431; note = Sequence Name: 56322-704_101_SL_seq_5718
cgagaaggaatccgacgctg

SEQ ID NO: 5719 - DNA, 20 bp, Homo sapiens
  source 1..20: mol_type = genomic DNA; note = Gene: PANK2; note = Location (start to end; relative to TSS): PANK2_51_81; note = Orientation (relative to transcription): sense; note = sgRNA Position: 3889464; note = Sequence Name: 56322-704_101_SL_seq_5719
ggcggcagcgactgctgctg

SEQ ID NO: 5720 - DNA, 20 bp, Homo sapiens
  source 1..20: mol_type = genomic DNA; note = Gene: PANK3; note = Location (start to end; relative to TSS): PANK3_45_75; note = Orientation (relative to transcription): antisense; note = sgRNA Position: 168579319; note = Sequence Name: 56322-704_101_SL_seq_5720
gatggacggcctccgatccg

SEQ ID NO: 5721 - DNA, 20 bp, Homo sapiens
  source 1..20: mol_type = genomic DNA; note = Gene: PANK3; note = Location (start to end; relative to TSS): PANK3_84_114; note = Orientation (relative to transcription): antisense; note = sgRNA Position: 168579280; note = Sequence Name: 56322-704_101_SL_seq_5721
cttggcatctttgatcttca

SEQ ID NO: 5722 - DNA, 20 bp, Homo sapiens
  source 1..20: mol_type = genomic DNA; note = Gene: PANK3; note = Location (start to end; relative to TSS): PANK3_46_76; note = Orientation (relative to transcription): sense; note = sgRNA Position: 168579298; note = Sequence Name: 56322-704_101_SL_seq_5722
gaggccgtccatcgcccctc

SEQ ID NO: 5723 - DNA, 20 bp, Homo sapiens
  source 1..20: mol_type = genomic DNA; note = Gene: PANK3; note = Location (start to end; relative to TSS): PANK3_78_108; note = Orientation (relative to transcription): antisense; note = sgRNA Position: 168579286; note = Sequence Name: 56322-704_101_SL_seq_5723
atctttgatcttcatggcgt

SEQ ID NO: 5724 - DNA, 20 bp, Homo sapiens
  source 1..20: mol_type = genomic DNA; note = Gene: PANK3; note = Location (start to end; relative to TSS): PANK3_30_60; note = Orientation (relative to transcription): antisense; note = sgRNA Position: 168579334; note = Sequence Name: 56322-704_101_SL_seq_5724
atccggggcactgagagcag

SEQ ID NO: 5725 - DNA, 20 bp, Homo sapiens
  source 1..20: mol_type = genomic DNA; note = Gene: PANK3; note = Location (start to end; relative to TSS): PANK3_69_99; note = Orientation (relative to transcription): antisense; note = sgRNA Position: 168579295; note = Sequence Name: 56322-704_101_SL_seq_5725
cttcatggcgtcggcccgag

SEQ ID NO: 5726 - DNA, 20 bp, Homo sapiens
  source 1..20: mol_type = genomic DNA; note = Gene: PANK3; note = Location (start to end; relative to TSS): PANK3_24_54; note = Orientation (relative to transcription): sense; note = sgRNA Position: 168579320; note = Sequence Name: 56322-704_101_SL_seq_5726
ctgctctcagtgccccggat

SEQ ID NO: 5727 - DNA, 20 bp, Homo sapiens
  source 1..20: mol_type = genomic DNA; note = Gene: PANK3; note = Location (start to end; relative to TSS): PANK3_63_93; note = Orientation (relative to transcription): antisense; note = sgRNA Position: 168579301; note = Sequence Name: 56322-704_101_SL_seq_5727
ggcgtcggcccgaggggcga

SEQ ID NO: 5728 - DNA, 20 bp, Homo sapiens
  source 1..20: mol_type = genomic DNA; note = Gene: PANK3; note = Location (start to end; relative to TSS): PANK3_19_49; note = Orientation (relative to transcription): sense; note = sgRNA Position: 168579325; note = Sequence Name: 56322-704_101_SL_seq_5728
cgcctctgctctcagtgccc

SEQ ID NO: 5729 - DNA, 20 bp, Homo sapiens
  source 1..20: mol_type = genomic DNA; note = Gene: PANK3; note = Location (start to end; relative to TSS): PANK3_59_89; note = Orientation (relative to transcription): antisense; note = sgRNA Position: 168579305; note = Sequence Name: 56322-704_101_SL_seq_5729
tcggcccgaggggcgatgga

SEQ ID NO: 5730 - DNA, 20 bp, Homo sapiens
  source 1..20: mol_type = genomic DNA; note = Gene: PANK4; note = Location (start to end; relative to TSS): PANK4_18_48; note = Orientation (relative to transcription): sense; note = sgRNA Position: 2526554; note = Sequence Name: 56322-704_101_SL_seq_5730
gagcggcagcgggagcagcg

SEQ ID NO: 5731 - DNA, 20 bp, Homo sapiens
  source 1..20: mol_type = genomic DNA; note = Gene: PANK4; note = Location (start to end; relative to TSS): PANK4_79_109; note = Orientation (relative to transcription): antisense; note = sgRNA Position: 2526513; note = Sequence Name: 56322-704_101_SL_seq_5731
aggttgcggaagatctcgtc

SEQ ID NO: 5732 - DNA, 20 bp, Homo sapiens
  source 1..20: mol_type = genomic DNA; note = Gene: PANK4; note = Location (start to end; relative to TSS): PANK4_27_57; note = Orientation (relative to transcription): sense; note = sgRNA Position: 2526545; note = Sequence Name: 56322-704_101_SL_seq_5732
cgggagcagcggggacagtc

SEQ ID NO: 5733 - DNA, 20 bp, Homo sapiens
  source 1..20: mol_type = genomic DNA; note = Gene: PANK4; note = Location (start to end; relative to TSS): PANK4_78_108; note = Orientation (relative to transcription): antisense; note = sgRNA Position: 2526514; note = Sequence Name: 56322-704_101_SL_seq_5733
ggttgcggaagatctcgtcg

SEQ ID NO: 5734 - DNA, 20 bp, Homo sapiens
  source 1..20: mol_type = genomic DNA; note = Gene: PANK4; note = Location (start to end; relative to TSS): PANK4_16_46; note = Orientation (relative to transcription): sense; note = sgRNA Position: 2526556; note = Sequence Name: 56322-704_101_SL_seq_5734
gcgagcggcagcgggagcag

SEQ ID NO: 5735 - DNA, 20 bp, Homo sapiens
  source 1..20: mol_type = genomic DNA; note = Gene: PANK4; note = Location (start to end; relative to TSS): PANK4_77_107; note = Orientation (relative to transcription): antisense; note = sgRNA Position: 2526515; note = Sequence Name: 56322-704_101_SL_seq_5735
gttgcggaagatctcgtcgg

SEQ ID NO: 5736 - DNA, 20 bp, Homo sapiens
  source 1..20: mol_type = genomic DNA; note = Gene: PANK4; note = Location (start to end; relative to TSS): PANK4_8_38; note = Orientation (relative to transcription): sense; note = sgRNA Position: 2526564; note = Sequence Name: 56322-704_101_SL_seq_5736
agtgtggagcgagcggcagc

SEQ ID NO: 5737 - DNA, 20 bp, Homo sapiens
  source 1..20: mol_type = genomic DNA; note = Gene: PANK4; note = Location (start to end; relative to TSS): PANK4_76_106; note = Orientation (relative to transcription): antisense; note = sgRNA Position: 2526516; note = Sequence Name: 56322-704_101_SL_seq_5737
ttgcggaagatctcgtcggg

SEQ ID NO: 5738 - DNA, 20 bp, Homo sapiens
  source 1..20: mol_type = genomic DNA; note = Gene: PANK4; note = Location (start to end; relative to TSS): PANK4_7_37; note = Orientation (relative to transcription): sense; note = sgRNA Position: 2526565; note = Sequence Name: 56322-704_101_SL_seq_5738
gagtgtggagcgagcggcag

SEQ ID NO: 5739 - DNA, 20 bp, Homo sapiens
  source 1..20: mol_type = genomic DNA; note = Gene: PANK4; note = Location (start to end; relative to TSS): PANK4_72_102; note = Orientation (relative to transcription): sense; note = sgRNA Position: 2526500; note = Sequence Name: 56322-704_101_SL_seq_5739
cgacgagatcttccgcaacc

SEQ ID NO: 5740 - DNA, 20 bp, Homo sapiens
  source 1..20: mol_type = genomic DNA; note = Gene: PASK; note = Location (start to end; relative to TSS): PASK_44_74; note = Orientation (relative to transcription): antisense; note = sgRNA Position: 241149424; note = Sequence Name: 56322-704_101_SL_seq_5740
atctcacctggatcaggcga

SEQ ID NO: 5741 - DNA, 20 bp, Homo sapiens
  source 1..20: mol_type = genomic DNA; note = Gene: PASK; note = Location (start to end; relative to TSS): PASK_83_113; note = Orientation (relative to transcription): sense; note = sgRNA Position: 241149365; note = Sequence Name: 56322-704_101_SL_seq_5741
gctccgccatctccccaggg

SEQ ID NO: 5742 - DNA, 20 bp, Homo sapiens
  source 1..20: mol_type = genomic DNA; note = Gene: PASK; note = Location (start to end; relative to TSS): PASK_45_75; note = Orientation (relative to transcription): antisense; note = sgRNA Position: 241149423; note = Sequence Name: 56322-704_101_SL_seq_5742
tatctcacctggatcaggcg

SEQ ID NO: 5743 - DNA, 20 bp, Homo sapiens
  source 1..20: mol_type = genomic DNA; note = Gene: PASK; note = Location (start to end; relative to TSS): PASK_80_110; note = Orientation (relative to transcription): sense; note = sgRNA Position: 241149368; note = Sequence Name: 56322-704_101_SL_seq_5743
cgggctccgccatctcccca

SEQ ID NO: 5744 - DNA, 20 bp, Homo sapiens
  source 1..20: mol_type = genomic DNA; note = Gene: PASK; note = Location (start to end; relative to TSS): PASK_47_77; note = Orientation (relative to transcription): sense; note = sgRNA Position: 241149401; note = Sequence Name: 56322-704_101_SL_seq_5744
ccaggtgagatacctgcgct

SEQ ID NO: 5745 - DNA, 20 bp, Homo sapiens
  source 1..20: mol_type = genomic DNA; note = Gene: PASK; note = Location (start to end; relative to TSS): PASK_79_109; note = Orientation (relative to transcription): sense; note = sgRNA Position: 241149369; note = Sequence Name: 56322-704_101_SL_seq_5745
ccgggctccgccatctcccc

SEQ ID NO: 5746 - DNA, 20 bp, Homo sapiens
  source 1..20: mol_type = genomic DNA; note = Gene: PASK; note = Location (start to end; relative to TSS): PASK_29_59; note = Orientation (relative to transcription): sense; note = sgRNA Position: 241149419; note = Sequence Name: 56322-704_101_SL_seq_5746
gcgtgaccctcgcctgatcc

SEQ ID NO: 5747 - DNA, 20 bp, Homo sapiens
  source 1..20: mol_type = genomic DNA; note = Gene: PASK; note = Location (start to end; relative to TSS): PASK_61_91; note = Orientation (relative to transcription): sense; note = sgRNA Position: 241149387; note = Sequence Name: 56322-704_101_SL_seq_5747
tgcgctcgggagagcgggcc

SEQ ID NO: 5748 - DNA, 20 bp, Homo sapiens
  source 1..20: mol_type = genomic DNA; note = Gene: PASK; note = Location (start to end; relative to TSS): PASK_30_60; note = Orientation (relative to transcription): antisense; note = sgRNA Position: 241149438; note = Sequence Name: 56322-704_101_SL_seq_5748
aggcgagggtcacgccaagc

SEQ ID NO: 5749 - DNA, 20 bp, Homo sapiens
  source 1..20: mol_type = genomic DNA; note = Gene: PASK; note = Location (start to end; relative to TSS): PASK_60_90; note = Orientation (relative to transcription): sense; note = sgRNA Position: 241149388; note = Sequence Name: 56322-704_101_SL_seq_5749
ctgcgctcgggagagcgggc

SEQ ID NO: 5750 - DNA, 20 bp, Homo sapiens
  source 1..20: mol_type = genomic DNA; note = Gene: PBK; note = Location (start to end; relative to TSS): PBK_41_71; note = Orientation (relative to transcription): sense; note = sgRNA Position: 27837752; note = Sequence Name: 56322-704_101_SL_seq_5750
tggtgctagaggcagctgca

SEQ ID NO: 5751 - DNA, 20 bp, Homo sapiens
  source 1..20: mol_type = genomic DNA; note = Gene: PBK; note = Location (start to end; relative to TSS): PBK_95_125; note = Orientation (relative to transcription): antisense; note = sgRNA Position: 27837718; note = Sequence Name: 56322-704_101_SL_seq_5751
gccaagtacctcttcaaaat

SEQ ID NO: 5752 - DNA, 20 bp, Homo sapiens
  source 1..20: mol_type = genomic DNA; note = Gene: PBK; note = Location (start to end; relative to TSS): PBK_40_70; note = Orientation (relative to transcription): sense; note = sgRNA Position: 27837753; note = Sequence Name: 56322-704_101_SL_seq_5752
ttggtgctagaggcagctgc

SEQ ID NO: 5753 - DNA, 20 bp, Homo sapiens
  source 1..20: mol_type = genomic DNA; note = Gene: PBK; note = Location (start to end; relative to TSS): PBK_85_115; note = Orientation (relative to transcription): antisense; note = sgRNA Position: 27837728; note = Sequence Name: 56322-704_101_SL_seq_5753
tcttcaaaattggtcccgag

SEQ ID NO: 5754 - DNA, 20 bp, Homo sapiens
  source 1..20: mol_type = genomic DNA; note = Gene: PBK; note = Location (start to end; relative to TSS): PBK_36_66; note = Orientation (relative to transcription): antisense; note = sgRNA Position: 27837777; note = Sequence Name: 56322-704_101_SL_seq_5754
ctagcaccaacacatacgcc

SEQ ID NO: 5755 - DNA, 20 bp, Homo sapiens
  source 1..20: mol_type = genomic DNA; note = Gene: PBK; note = Location (start to end; relative to TSS): PBK_78_108; note = Orientation (relative to transcription): sense; note = sgRNA Position: 27837715; note = Sequence Name: 56322-704_101_SL_seq_5755
gctcgggaccaattttgaag

SEQ ID NO: 5756 - DNA, 20 bp, Homo sapiens
  source 1..20: mol_type = genomic DNA; note = Gene: PBK; note = Location (start to end; relative to TSS): PBK_30_60; note = Orientation (relative to transcription): sense; note = sgRNA Position: 27837763; note = Sequence Name: 56322-704_101_SL_seq_5756
ggcgtatgtgttggtgctag

SEQ ID NO: 5757 - DNA, 20 bp, Homo sapiens
  source 1..20: mol_type = genomic DNA; note = Gene: PBK; note = Location (start to end; relative to TSS): PBK_61_91; note = Orientation (relative to transcription): sense; note = sgRNA Position: 27837732; note = Sequence Name: 56322-704_101_SL_seq_5757
gggtctcgctgggggccgct

SEQ ID NO: 5758 - DNA, 20 bp, Homo sapiens
  source 1..20: mol_type = genomic DNA; note = Gene: PBK; note = Location (start to end; relative to TSS): PBK_21_51; note = Orientation (relative to transcription): sense; note = sgRNA Position: 27837772; note = Sequence Name: 56322-704_101_SL_seq_5758
cagctgccgggcgtatgtgt

SEQ ID NO: 5759 - DNA, 20 bp, Homo sapiens
  source 1..20: mol_type = genomic DNA; note = Gene: PBK; note = Location (start to end; relative to TSS): PBK_51_81; note = Orientation (relative to transcription): sense; note = sgRNA Position: 27837742; note = Sequence Name: 56322-704_101_SL_seq_5759
ggcagctgcagggtctcgct

SEQ ID NO: 5760 - DNA, 20 bp, Homo sapiens
  source 1..20: mol_type = genomic DNA; note = Gene: PDGFRA; note = Location (start to end; relative to TSS): PDGFRA_58_88; note = Orientation (relative to transcription): sense; note = sgRNA Position: 54229377; note = Sequence Name: 56322-704_101_SL_seq_5760
cacgctctttactccatgtg

SEQ ID NO: 5761 - DNA, 20 bp, Homo sapiens
  source 1..20: mol_type = genomic DNA; note = Gene: PDGFRA; note = Location (start to end; relative to TSS): PDGFRA_92_122; note = Orientation (relative to transcription): sense; note = sgRNA Position: 54229411; note = Sequence Name: 56322-704_101_SL_seq_5761
cggaataacatcggaggaga

SEQ ID NO: 5762 - DNA, 20 bp, Homo sapiens
  source 1..20: mol_type = genomic DNA; note = Gene: PDGFRA; note = Location (start to end; relative to TSS): PDGFRA_35_65; note = Orientation (relative to transcription): sense; note = sgRNA Position: 54229354; note = Sequence Name: 56322-704_101_SL_seq_5762
aagagatcattggaggccgt

SEQ ID NO: 5763 - DNA, 20 bp, Homo sapiens
  source 1..20: mol_type = genomic DNA; note = Gene: PDGFRA; note = Location (start to end; relative to TSS): PDGFRA_80_110; note = Orientation (relative to transcription): antisense; note = sgRNA Position: 54229379; note = Sequence Name: 56322-704_101_SL_seq_5763
cgcaatgaatgtcccacaca

SEQ ID NO: 5764 - DNA, 20 bp, Homo sapiens
  source 1..20: mol_type = genomic DNA; note = Gene: PDGFRA; note = Location (start to end; relative to TSS): PDGFRA_34_64; note = Orientation (relative to transcription): sense; note = sgRNA Position: 54229353; note = Sequence Name: 56322-704_101_SL_seq_5764
caagagatcattggaggccg

SEQ ID NO: 5765 - DNA, 20 bp, Homo sapiens
  source 1..20: mol_type = genomic DNA; note = Gene: PDGFRA; note = Location (start to end; relative to TSS): PDGFRA_72_102; note = Orientation (relative to transcription): sense; note = sgRNA Position: 54229391; note = Sequence Name: 56322-704_101_SL_seq_5765
catgtgtgggacattcattg

SEQ ID NO: 5766 - DNA, 20 bp, Homo sapiens
  source 1..20: mol_type = genomic DNA; note = Gene: PDGFRA; note = Location (start to end; relative to TSS): PDGFRA_25_55; note = Orientation (relative to transcription): sense; note = sgRNA Position: 54229344; note = Sequence Name: 56322-704_101_SL_seq_5766
aggagactgcaagagatcat

SEQ ID NO: 5767 - DNA, 20 bp, Homo sapiens
  source 1..20: mol_type = genomic DNA; note = Gene: PDGFRA; note = Location (start to end; relative to TSS): PDGFRA_59_89; note = Orientation (relative to transcription): sense; note = sgRNA Position: 54229378; note = Sequence Name: 56322-704_101_SL_seq_5767
acgctctttactccatgtgt

SEQ ID NO: 5768 - DNA, 20 bp, Homo sapiens
  source 1..20: mol_type = genomic DNA; note = Gene: PDGFRA; note = Location (start to end; relative to TSS): PDGFRA_28_58; note = Orientation (relative to transcription): sense; note = sgRNA Position: 54229347; note = Sequence Name: 56322-704_101_SL_seq_5768
agactgcaagagatcattgg

SEQ ID NO: 5769 - DNA, 20 bp, Homo sapiens
  source 1..20: mol_type = genomic DNA; note = Gene: PDGFRA; note = Location (start to end; relative to TSS): PDGFRA_58_88; note = Orientation (relative to transcription): sense; note = sgRNA Position: 54229377; note = Sequence Name: 56322-704_101_SL_seq_5769
cacgctctttactccatgtg

SEQ ID NO: 5770 - DNA, 20 bp, Homo sapiens
  source 1..20: mol_type = genomic DNA; note = Gene: PDGFRB; note = Location (start to end; relative to TSS): PDGFRB_30_60; note = Orientation (relative to transcription): sense; note = sgRNA Position: 150155791; note = Sequence Name: 56322-704_101_SL_seq_5770
ggatcgctctgtgagcaact

SEQ ID NO: 5771 - DNA, 20 bp, Homo sapiens
  source 1..20: mol_type = genomic DNA; note = Gene: PDGFRB; note = Location (start to end; relative to TSS): PDGFRB_101_131; note = Orientation (relative to transcription): antisense; note = sgRNA Position: 150155740; note = Sequence Name: 56322-704_101_SL_seq_5771
tgctgggcagcagggctgag

SEQ ID NO: 5772 - DNA, 20 bp, Homo sapiens
  source 1..20: mol_type = genomic DNA; note = Gene: PDGFRB; note = Location (start to end; relative to TSS): PDGFRB_24_54; note = Orientation (relative to transcription): antisense; note = sgRNA Position: 150155817; note = Sequence Name: 56322-704_101_SL_seq_5772
agcgatcctgggtcccagat

SEQ ID NO: 5773 - DNA, 20 bp, Homo sapiens
  source 1..20: mol_type = genomic DNA; note = Gene: PDGFRB; note = Location (start to end; relative to TSS): PDGFRB_97_127; note = Orientation (relative to transcription): antisense; note = sgRNA Position: 150155744; note = Sequence Name: 56322-704_101_SL_seq_5773
gggcagcagggctgaggggc

SEQ ID NO: 5774 - DNA, 20 bp, Homo sapiens
  source 1..20: mol_type = genomic DNA; note = Gene: PDGFRB; note = Location (start to end; relative to TSS): PDGFRB_23_53; note = Orientation (relative to transcription): antisense; note = sgRNA Position: 150155818; note = Sequence Name: 56322-704_101_SL_seq_5774
gcgatcctgggtcccagata

SEQ ID NO: 5775 - DNA, 20 bp, Homo sapiens
  source 1..20: mol_type = genomic DNA; note = Gene: PDGFRB; note = Location (start to end; relative to TSS): PDGFRB_69_99; note = Orientation (relative to transcription): sense; note = sgRNA Position: 150155752; note = Sequence Name: 56322-704_101_SL_seq_5775
aacaaggaggaggagagagc

SEQ ID NO: 5776 - DNA, 20 bp, Homo sapiens
  source 1..20: mol_type = genomic DNA; note = Gene: PDGFRB; note = Location (start to end; relative to TSS): PDGFRB_20_50; note = Orientation (relative to transcription): antisense; note = sgRNA Position: 150155821; note = Sequence Name: 56322-704_101_SL_seq_5776
atcctgggtcccagataggg

SEQ ID NO: 5777 - DNA, 20 bp, Homo sapiens
  source 1..20: mol_type = genomic DNA; note = Gene: PDGFRB; note = Location (start to end; relative to TSS): PDGFRB_64_94; note = Orientation (relative to transcription): antisense; note = sgRNA Position: 150155777; note = Sequence Name: 56322-704_101_SL_seq_5777
ctccttgttgatctcctctc

SEQ ID NO: 5778 - DNA, 20 bp, Homo sapiens
  source 1..20: mol_type = genomic DNA; note = Gene: PDGFRB; note = Location (start to end; relative to TSS): PDGFRB_19_49; note = Orientation (relative to transcription): antisense; note = sgRNA Position: 150155822; note = Sequence Name: 56322-704_101_SL_seq_5778
tcctgggtcccagatagggc

SEQ ID NO: 5779 - DNA, 20 bp, Homo sapiens
  source 1..20: mol_type = genomic DNA; note = Gene: PDGFRB; note = Location (start to end; relative to TSS): PDGFRB_59_89; note = Orientation (relative to transcription): sense; note = sgRNA Position: 150155762; note = Sequence Name: 56322-704_101_SL_seq_5779
agaggagatcaacaaggagg

SEQ ID NO: 5780 - DNA, 20 bp, Homo sapiens
  source 1..20: mol_type = genomic DNA; note = Gene: PDIK1L; note = Location (start to end; relative to TSS): PDIK1L_47_77; note = Orientation (relative to transcription): antisense; note = sgRNA Position: 26111877; note = Sequence Name: 56322-704_101_SL_seq_5780
ctccctctcatgggctctgc

SEQ ID NO: 5781 - DNA, 20 bp, Homo sapiens
  source 1..20: mol_type = genomic DNA; note = Gene: PDIK1L; note = Location (start to end; relative to TSS): PDIK1L_83_113; note = Orientation (relative to transcription): sense; note = sgRNA Position: 26111933; note = Sequence Name: 56322-704_101_SL_seq_5781
gtaaatctggcctttcggcg

SEQ ID NO: 5782 - DNA, 20 bp, Homo sapiens
  source 1..20: mol_type = genomic DNA; note = Gene: PDIK1L; note = Location (start to end; relative to TSS): PDIK1L_44_74; note = Orientation (relative to transcription): sense; note = sgRNA Position: 26111894; note = Sequence Name: 56322-704_101_SL_seq_5782
gagcccatgagagggagaag

SEQ ID NO: 5783 - DNA, 20 bp, Homo sapiens
  source 1..20: mol_type = genomic DNA; note = Gene: PDIK1L; note = Location (start to end; relative to TSS): PDIK1L_78_108; note = Orientation (relative to transcription): sense; note = sgRNA Position: 26111928; note = Sequence Name: 56322-704_101_SL_seq_5783
ctgaggtaaatctggccttt

SEQ ID NO: 5784 - DNA, 20 bp, Homo sapiens
  source 1..20: mol_type = genomic DNA; note = Gene: PDIK1L; note = Location (start to end; relative to TSS): PDIK1L_33_63; note = Orientation (relative to transcription): antisense; note = sgRNA Position: 26111863; note = Sequence Name: 56322-704_101_SL_seq_5784
ctctgcaggccgccattatc

SEQ ID NO: 5785 - DNA, 20 bp, Homo sapiens
  source 1..20: mol_type = genomic DNA; note = Gene: PDIK1L; note = Location (start to end; relative to TSS): PDIK1L_70_100; note = Orientation (relative to transcription): sense; note = sgRNA Position: 26111920; note = Sequence Name: 56322-704_101_SL_seq_5785
cgtctaccctgaggtaaatc

SEQ ID NO: 5786 - DNA, 20 bp, Homo sapiens
  source 1..20: mol_type = genomic DNA; note = Gene: PDIK1L; note = Location (start to end; relative to TSS): PDIK1L_15_45; note = Orientation (relative to transcription): sense; note = sgRNA Position: 26111865; note = Sequence Name: 56322-704_101_SL_seq_5786
cgcgagctgcccgataatgg

SEQ ID NO: 5787 - DNA, 20 bp, Homo sapiens
  source 1..20: mol_type = genomic DNA; note = Gene: PDIK1L; note = Location (start to end; relative to TSS): PDIK1L_56_86; note = Orientation (relative to transcription): antisense; note = sgRNA Position: 26111886; note = Sequence Name: 56322-704_101_SL_seq_5787
ctgccgcttctccctctcat

SEQ ID NO: 5788 - DNA, 20 bp, Homo sapiens
  source 1..20: mol_type = genomic DNA; note = Gene: PDIK1L; note = Location (start to end; relative to TSS): PDIK1L_12_42; note = Orientation (relative to transcription): sense; note = sgRNA Position: 26111862; note = Sequence Name: 56322-704_101_SL_seq_5788
aggcgcgagctgcccgataa

SEQ ID NO: 5789 - DNA, 20 bp, Homo sapiens
  source 1..20: mol_type = genomic DNA; note = Gene: PDIK1L; note = Location (start to end; relative to TSS): PDIK1L_47_77; note = Orientation (relative to transcription): antisense; note = sgRNA Position: 26111877; note = Sequence Name: 56322-704_101_SL_seq_5789
ctccctctcatgggctctgc

SEQ ID NO: 5790 - DNA, 20 bp, Homo sapiens
  source 1..20: mol_type = genomic DNA; note = Gene: PDK1; note = Location (start to end; relative to TSS): PDK1_39_69; note = Orientation (relative to transcription): sense; note = sgRNA Position: 172556155; note = Sequence Name: 56322-704_101_SL_seq_5790
agcgggactcggcatgaggc

SEQ ID NO: 5791 - DNA, 20 bp, Homo sapiens
  source 1..20: mol_type = genomic DNA; note = Gene: PDK1; note = Location (start to end; relative to TSS): PDK1_83_113; note = Orientation (relative to transcription): sense; note = sgRNA Position: 172556199; note = Sequence Name: 56322-704_101_SL_seq_5791
ccttggccggcccgggcccg

SEQ ID NO: 5792 - DNA, 20 bp, Homo sapiens
  source 1..20: mol_type = genomic DNA; note = Gene: PDK1; note = Location (start to end; relative to TSS): PDK1_35_65; note = Orientation (relative to transcription): sense; note = sgRNA Position: 172556151; note = Sequence Name: 56322-704_101_SL_seq_5792
ctctagcgggactcggcatg

SEQ ID NO: 5793 - DNA, 20 bp, Homo sapiens
  source 1..20: mol_type = genomic DNA; note = Gene: PDK1; note = Location (start to end; relative to TSS): PDK1_76_106; note = Orientation (relative to transcription): sense; note = sgRNA Position: 172556192; note = Sequence Name: 56322-704_101_SL_seq_5793
ggagccgccttggccggccc

SEQ ID NO: 5794 - DNA, 20 bp, Homo sapiens
  source 1..20: mol_type = genomic DNA; note = Gene: PDK1; note = Location (start to end; relative to TSS): PDK1_28_58; note = Orientation (relative to transcription): sense; note = sgRNA Position: 172556144; note = Sequence Name: 56322-704_101_SL_seq_5794
gtggcttctctagcgggact

SEQ ID NO: 5795 - DNA, 20 bp, Homo sapiens
  source 1..20: mol_type = genomic DNA; note = Gene: PDK1; note = Location (start to end; relative to TSS): PDK1_70_100; note = Orientation (relative to transcription): sense; note = sgRNA Position: 172556186; note = Sequence Name: 56322-704_101_SL_seq_5795
cttcgcggagccgccttggc

SEQ ID NO: 5796 - DNA, 20 bp, Homo sapiens
  source 1..20: mol_type = genomic DNA; note = Gene: PDK1; note = Location (start to end; relative to TSS): PDK1_21_51; note = Orientation (relative to transcription): sense; note = sgRNA Position: 172556137; note = Sequence Name: 56322-704_101_SL_seq_5796
actggctgtggcttctctag

SEQ ID NO: 5797 - DNA, 20 bp, Homo sapiens
  source 1..20: mol_type = genomic DNA; note = Gene: PDK1; note = Location (start to end; relative to TSS): PDK1_66_96; note = Orientation (relative to transcription): sense; note = sgRNA Position: 172556182; note = Sequence Name: 56322-704_101_SL_seq_5797
gctgcttcgcggagccgcct

SEQ ID NO: 5798 - DNA, 20 bp, Homo sapiens
  source 1..20: mol_type = genomic DNA; note = Gene: PDK1; note = Location (start to end; relative to TSS): PDK1_22_52; note = Orientation (relative to transcription): antisense; note = sgRNA Position: 172556118; note = Sequence Name: 56322-704_101_SL_seq_5798
gaagccacagccagtacgcc

SEQ ID NO: 5799 - DNA, 20 bp, Homo sapiens
  source 1..20: mol_type = genomic DNA; note = Gene: PDK1; note = Location (start to end; relative to TSS): PDK1_55_85; note = Orientation (relative to transcription): sense; note = sgRNA Position: 172556171; note = Sequence Name: 56322-704_101_SL_seq_5799
aggctggcgcggctgcttcg

SEQ ID NO: 5800 - DNA, 20 bp, Homo sapiens
  source 1..20: mol_type = genomic DNA; note = Gene: PDK2; note = Location (start to end; relative to TSS): PDK2_45_75; note = Orientation (relative to transcription): antisense; note = sgRNA Position: 50095402; note = Sequence Name: 56322-704_101_SL_seq_5800
ctttggttgtggtccccgcg

SEQ ID NO: 5801 - DNA, 20 bp, Homo sapiens
  source 1..20: mol_type = genomic DNA; note = Gene: PDK2; note = Location (start to end; relative to TSS): PDK2_83_113; note = Orientation (relative to transcription): antisense; note = sgRNA Position: 50095440; note = Sequence Name: 56322-704_101_SL_seq_5801
cagcgcccacacccagcgca

SEQ ID NO: 5802 - DNA, 20 bp, Homo sapiens
  source 1..20: mol_type = genomic DNA; note = Gene: PDK2; note = Location (start to end; relative to TSS): PDK2_44_74; note = Orientation (relative to transcription): antisense; note = sgRNA Position: 50095401; note = Sequence Name: 56322-704_101_SL_seq_5802
tttggttgtggtccccgcgc

SEQ ID NO: 5803 - DNA, 20 bp, Homo sapiens
  source 1..20: mol_type = genomic DNA; note = Gene: PDK2; note = Location (start to end; relative to TSS): PDK2_77_107; note = Orientation (relative to transcription): antisense; note = sgRNA Position: 50095434; note = Sequence Name: 56322-704_101_SL_seq_5803
ccacacccagcgcatggctg

SEQ ID NO: 5804 - DNA, 20 bp, Homo sapiens
  source 1..20: mol_type = genomic DNA; note = Gene: PDK2; note = Location (start to end; relative to TSS): PDK2_42_72; note = Orientation (relative to transcription): sense; note = sgRNA Position: 50095419; note = Sequence Name: 56322-704_101_SL_seq_5804
ggggaccacaaccaaagtcg

SEQ ID NO: 5805 - DNA, 20 bp, Homo sapiens
  source 1..20: mol_type = genomic DNA; note = Gene: PDK2; note = Location (start to end; relative to TSS): PDK2_74_104; note = Orientation (relative to transcription): antisense; note = sgRNA Position: 50095431; note = Sequence Name: 56322-704_101_SL_seq_5805
cacccagcgcatggctgcgg

SEQ ID NO: 5806 - DNA, 20 bp, Homo sapiens
  source 1..20: mol_type = genomic DNA; note = Gene: PDK2; note = Location (start to end; relative to TSS): PDK2_21_51; note = Orientation (relative to transcription): sense; note = sgRNA Position: 50095398; note = Sequence Name: 56322-704_101_SL_seq_5806
gtgcgcgagcgctgcccgcg

SEQ ID NO: 5807 - DNA, 20 bp, Homo sapiens
  source 1..20: mol_type = genomic DNA; note = Gene: PDK2; note = Location (start to end; relative to TSS): PDK2_62_92; note = Orientation (relative to transcription): antisense; note = sgRNA Position: 50095419; note = Sequence Name: 56322-704_101_SL_seq_5807
ggctgcggcggccgcgactt

SEQ ID NO: 5808 - DNA, 20 bp, Homo sapiens
  source 1..20: mol_type = genomic DNA; note = Gene: PDK2; note = Location (start to end; relative to TSS): PDK2_23_53; note = Orientation (relative to transcription): sense; note = sgRNA Position: 50095400; note = Sequence Name: 56322-704_101_SL_seq_5808
gcgcgagcgctgcccgcgcg

SEQ ID NO: 5809 - DNA, 20 bp, Homo sapiens
  source 1..20: mol_type = genomic DNA; note = Gene: PDK2; note = Location (start to end; relative to TSS): PDK2_56_86; note = Orientation (relative to transcription): antisense; note = sgRNA Position: 50095413; note = Sequence Name: 56322-704_101_SL_seq_5809
ggcggccgcgactttggttg

SEQ ID NO: 5810 - DNA, 20 bp, Homo sapiens
  source 1..20: mol_type = genomic DNA; note = Gene: PDK3; note = Location (start to end; relative to TSS): PDK3_39_69; note = Orientation (relative to transcription): sense; note = sgRNA Position: 24465351; note = Sequence Name: 56322-704_101_SL_seq_5810
cgaggccgagatcgaggccg

SEQ ID NO: 5811 - DNA, 20 bp, Homo sapiens
  source 1..20: mol_type = genomic DNA; note = Gene: PDK3; note = Location (start to end; relative to TSS): PDK3_90_120; note = Orientation (relative to transcription): antisense; note = sgRNA Position: 24465382; note = Sequence Name: 56322-704_101_SL_seq_5811
gcagccaagccgcacggata

SEQ ID NO: 5812 - DNA, 20 bp, Homo sapiens
  source 1..20: mol_type = genomic DNA; note = Gene: PDK3; note = Location (start to end; relative to TSS): PDK3_38_68; note = Orientation (relative to transcription): antisense; note = sgRNA Position: 24465330; note = Sequence Name: 56322-704_101_SL_seq_5812
gatctcggcctcggcgccgc

SEQ ID NO: 5813 - DNA, 20 bp, Homo sapiens
  source 1..20: mol_type = genomic DNA; note = Gene: PDK3; note = Location (start to end; relative to TSS): PDK3_77_107; note = Orientation (relative to transcription): sense; note = sgRNA Position: 24465389; note = Sequence Name: 56322-704_101_SL_seq_5813
cgtgccctatccgtgcggct

SEQ ID NO: 5814 - DNA, 20 bp, Homo sapiens
  source 1..20: mol_type = genomic DNA; note = Gene: PDK3; note = Location (start to end; relative to TSS): PDK3_37_67; note = Orientation (relative to transcription): sense; note = sgRNA Position: 24465349; note = Sequence Name: 56322-704_101_SL_seq_5814
gccgaggccgagatcgaggc

SEQ ID NO: 5815 - DNA, 20 bp, Homo sapiens
  source 1..20: mol_type = genomic DNA; note = Gene: PDK3; note = Location (start to end; relative to TSS): PDK3_72_102; note = Orientation (relative to transcription): sense; note = sgRNA Position: 24465384; note = Sequence Name: 56322-704_101_SL_seq_5815
gcaaacgtgccctatccgtg

SEQ ID NO: 5816 - DNA, 20 bp, Homo sapiens
  source 1..20: mol_type = genomic DNA; note = Gene: PDK3; note = Location (start to end; relative to TSS): PDK3_33_63; note = Orientation (relative to transcription): sense; note = sgRNA Position: 24465345; note = Sequence Name: 56322-704_101_SL_seq_5816
cggcgccgaggccgagatcg

SEQ ID NO: 5817 - DNA, 20 bp, Homo sapiens
  source 1..20: mol_type = genomic DNA; note = Gene: PDK3; note = Location (start to end; relative to TSS): PDK3_65_95; note = Orientation (relative to transcription): antisense; note = sgRNA Position: 24465357; note = Sequence Name: 56322-704_101_SL_seq_5817
cgtttgcgaagcgcgcaccc

SEQ ID NO: 5818 - DNA, 20 bp, Homo sapiens
  source 1..20: mol_type = genomic DNA; note = Gene: PDK3; note = Location (start to end; relative to TSS): PDK3_21_51; note = Orientation (relative to transcription): sense; note = sgRNA Position: 24465333; note = Sequence Name: 56322-704_101_SL_seq_5818
cggctgcaccggcggcgccg

SEQ ID NO: 5819 - DNA, 20 bp, Homo sapiens
  source 1..20: mol_type = genomic DNA; note = Gene: PDK3; note = Location (start to end; relative to TSS): PDK3_53_83; note = Orientation (relative to transcription): antisense; note = sgRNA Position: 24465345; note = Sequence Name: 56322-704_101_SL_seq_5819
gcgcaccccggcctcgatct

SEQ ID NO: 5820 - DNA, 20 bp, Homo sapiens
  source 1..20: mol_type = genomic DNA; note = Gene: PDK4; note = Location (start to end; relative to TSS): PDK4_59_89; note = Orientation (relative to transcription): antisense; note = sgRNA Position: 95596453; note = Sequence Name: 56322-704_101_SL_seq_5820
gctggggtttgagggtgccg

SEQ ID NO: 5821 - DNA, 20 bp, Homo sapiens
  source 1..20: mol_type = genomic DNA; note = Gene: PDK4; note = Location (start to end; relative to TSS): PDK4_101_131; note = Orientation (relative to transcription): antisense; note = sgRNA Position: 95596411; note = Sequence Name: 56322-704_101_SL_seq_5821
aggactgcaggtgcgctggc

SEQ ID NO: 5822 - DNA, 20 bp, Homo sapiens
  source 1..20: mol_type = genomic DNA; note = Gene: PDK4; note = Location (start to end; relative to TSS): PDK4_55_85; note = Orientation (relative to transcription): sense; note = sgRNA Position: 95596437; note = Sequence Name: 56322-704_101_SL_seq_5822
gcaccctcaaaccccagccc

SEQ ID NO: 5823 - DNA, 20 bp, Homo sapiens
  source 1..20: mol_type = genomic DNA; note = Gene: PDK4; note = Location (start to end; relative to TSS): PDK4_99_129; note = Orientation (relative to transcription): sense; note = sgRNA Position: 95596393; note = Sequence Name: 56322-704_101_SL_seq_5823
gcgcacctgcagtcctcgcc

SEQ ID NO: 5824 - DNA, 20 bp, Homo sapiens
  source 1..20: mol_type = genomic DNA; note = Gene: PDK4; note = Location (start to end; relative to TSS): PDK4_44_74; note = Orientation (relative to transcription): antisense; note = sgRNA Position: 95596468; note = Sequence Name: 56322-704_101_SL_seq_5824
tgccgcggagtgaagagtct

SEQ ID NO: 5825 - DNA, 20 bp, Homo sapiens
  source 1..20: mol_type = genomic DNA; note = Gene: PDK4; note = Location (start to end; relative to TSS): PDK4_87_117; note = Orientation (relative to transcription): antisense; note = sgRNA Position: 95596425; note = Sequence Name: 56322-704_101_SL_seq_5825
gctggctggcttgtgcgccc

SEQ ID NO: 5826 - DNA, 20 bp, Homo sapiens
  source 1..20: mol_type = genomic DNA; note = Gene: PDK4; note = Location (start to end; relative to TSS): PDK4_45_75; note = Orientation (relative to transcription): antisense; note = sgRNA Position: 95596467; note = Sequence Name: 56322-704_101_SL_seq_5826
gtgccgcggagtgaagagtc

SEQ ID NO: 5827 - DNA, 20 bp, Homo sapiens
  source 1..20: mol_type = genomic DNA; note = Gene: PDK4; note = Location (start to end; relative to TSS): PDK4_75_105; note = Orientation (relative to transcription): antisense; note = sgRNA Position: 95596437; note = Sequence Name: 56322-704_101_SL_seq_5827
gtgcgccccggcctgggctg

SEQ ID NO: 5828 - DNA, 20 bp, Homo sapiens
  source 1..20: mol_type = genomic DNA; note = Gene: PDK4; note = Location (start to end; relative to TSS): PDK4_33_63; note = Orientation (relative to transcription): sense; note = sgRNA Position: 95596459; note = Sequence Name: 56322-704_101_SL_seq_5828
tgcccagactcttcactccg

SEQ ID NO: 5829 - DNA, 20 bp, Homo sapiens
  source 1..20: mol_type = genomic DNA; note = Gene: PDK4; note = Location (start to end; relative to TSS): PDK4_67_97; note = Orientation (relative to transcription): antisense; note = sgRNA Position: 95596445; note = Sequence Name: 56322-704_101_SL_seq_5829
cggcctgggctggggtttga

SEQ ID NO: 5830 - DNA, 20 bp, Homo sapiens
  source 1..20: mol_type = genomic DNA; note = Gene: PDPK1; note = Location (start to end; relative to TSS): PDPK1_43_73; note = Orientation (relative to transcription): antisense; note = sgRNA Position: 2538070; note = Sequence Name: 56322-704_101_SL_seq_5830
ccccgcagcgctgcgcggct

SEQ ID NO: 5831 - DNA, 20 bp, Homo sapiens
  source 1..20: mol_type = genomic DNA; note = Gene: PDPK1; note = Location (start to end; relative to TSS): PDPK1_78_108; note = Orientation (relative to transcription): antisense; note = sgRNA Position: 2538105; note = Sequence Name: 56322-704_101_SL_seq_5831
cctggccatgggccccgcgt

SEQ ID NO: 5832 - DNA, 20 bp, Homo sapiens
  source 1..20: mol_type = genomic DNA; note = Gene: PDPK1; note = Location (start to end; relative to TSS): PDPK1_35_65; note = Orientation (relative to transcription): sense; note = sgRNA Position: 2538082; note = Sequence Name: 56322-704_101_SL_seq_5832
cgagccgcgcagcgctgcgg

SEQ ID NO: 5833 - DNA, 20 bp, Homo sapiens
  source 1..20: mol_type = genomic DNA; note = Gene: PDPK1; note = Location (start to end; relative to TSS): PDPK1_73_103; note = Orientation (relative to transcription): antisense; note = sgRNA Position: 2538100; note = Sequence Name: 56322-704_101_SL_seq_5833
ccatgggccccgcgtcggcg

SEQ ID NO: 5834 - DNA, 20 bp, Homo sapiens
  source 1..20: mol_type = genomic DNA; note = Gene: PDPK1; note = Location (start to end; relative to TSS): PDPK1_38_68; note = Orientation (relative to transcription): sense; note = sgRNA Position: 2538085; note = Sequence Name: 56322-704_101_SL_seq_5834
gccgcgcagcgctgcggggg

SEQ ID NO: 5835 - DNA, 20 bp, Homo sapiens
  source 1..20: mol_type = genomic DNA; note = Gene: PDPK1; note = Location (start to end; relative to TSS): PDPK1_72_102; note = Orientation (relative to transcription): antisense; note = sgRNA Position: 2538099; note = Sequence Name: 56322-704_101_SL_seq_5835
catgggccccgcgtcggcgc

SEQ ID NO: 5836 - DNA, 20 bp, Homo sapiens
  source 1..20: mol_type = genomic DNA; note = Gene: PDPK1; note = Location (start to end; relative to TSS): PDPK1_32_62; note = Orientation (relative to transcription): sense; note = sgRNA Position: 2538079; note = Sequence Name: 56322-704_101_SL_seq_5836
cgccgagccgcgcagcgctg

SEQ ID NO: 5837 - DNA, 20 bp, Homo sapiens
  source 1..20: mol_type = genomic DNA; note = Gene: PDPK1; note = Location (start to end; relative to TSS): PDPK1_69_99; note = Orientation (relative to transcription): sense; note = sgRNA Position: 2538116; note = Sequence Name: 56322-704_101_SL_seq_5837
ccgacgcggggcccatggcc

SEQ ID NO: 5838 - DNA, 20 bp, Homo sapiens
  source 1..20: mol_type = genomic DNA; note = Gene: PDPK1; note = Location (start to end; relative to TSS): PDPK1_34_64; note = Orientation (relative to transcription): sense; note = sgRNA Position: 2538081; note = Sequence Name: 56322-704_101_SL_seq_5838
ccgagccgcgcagcgctgcg

SEQ ID NO: 5839 - DNA, 20 bp, Homo sapiens
  source 1..20: mol_type = genomic DNA; note = Gene: PDPK1; note = Location (start to end; relative to TSS): PDPK1_64_94; note = Orientation (relative to transcription): sense; note = sgRNA Position: 2538111; note = Sequence Name: 56322-704_101_SL_seq_5839
ccgcgccgacgcggggccca

SEQ ID NO: 5840 - DNA, 20 bp, Homo sapiens
  source 1..20: mol_type = genomic DNA; note = Gene: PDXK; note = Location (start to end; relative to TSS): PDXK_46_76; note = Orientation (relative to transcription): antisense; note = sgRNA Position: 43719181; note = Sequence Name: 56322-704_101_SL_seq_5840
gctcccctcggctgcgactc

SEQ ID NO: 5841 - DNA, 20 bp, Homo sapiens
  source 1..20: mol_type = genomic DNA; note = Gene: PDXK; note = Location (start to end; relative to TSS): PDXK_86_116; note = Orientation (relative to transcription): antisense; note = sgRNA Position: 43719221; note = Sequence Name: 56322-704_101_SL_seq_5841
ctcgggctccggctcggctc

SEQ ID NO: 5842 - DNA, 20 bp, Homo sapiens
  source 1..20: mol_type = genomic DNA; note = Gene: PDXK; note = Location (start to end; relative to TSS): PDXK_42_72; note = Orientation (relative to transcription): sense; note = sgRNA Position: 43719197; note = Sequence Name: 56322-704_101_SL_seq_5842
gtcgcagccgaggggagccg

SEQ ID NO: 5843 - DNA, 20 bp, Homo sapiens
  source 1..20: mol_type = genomic DNA; note = Gene: PDXK; note = Location (start to end; relative to TSS): PDXK_84_114; note = Orientation (relative to transcription): sense; note = sgRNA Position: 43719239; note = Sequence Name: 56322-704_101_SL_seq_5843
cgagccggagcccgagcgag

SEQ ID NO: 5844 - DNA, 20 bp, Homo sapiens
  source 1..20: mol_type = genomic DNA; note = Gene: PDXK; note = Location (start to end; relative to TSS): PDXK_41_71; note = Orientation (relative to transcription): sense; note = sgRNA Position: 43719196; note = Sequence Name: 56322-704_101_SL_seq_5844
agtcgcagccgaggggagcc

SEQ ID NO: 5845 - DNA, 20 bp, Homo sapiens
  source 1..20: mol_type = genomic DNA; note = Gene: PDXK; note = Location (start to end; relative to TSS): PDXK_80_110; note = Orientation (relative to transcription): antisense; note = sgRNA Position: 43719215; note = Sequence Name: 56322-704_101_SL_seq_5845
ctccggctcggctcgggctc

SEQ ID NO: 5846 - DNA, 20 bp, Homo sapiens
  source 1..20: mol_type = genomic DNA; note = Gene: PDXK; note = Location (start to end; relative to TSS): PDXK_40_70; note = Orientation (relative to transcription): antisense; note = sgRNA Position: 43719175; note = Sequence Name: 56322-704_101_SL_seq_5846
ctcggctgcgactctggctc

SEQ ID NO: 5847 - DNA, 20 bp, Homo sapiens
  source 1..20: mol_type = genomic DNA; note = Gene: PDXK; note = Location (start to end; relative to TSS): PDXK_74_104; note = Orientation (relative to transcription): antisense; note = sgRNA Position: 43719209; note = Sequence Name: 56322-704_101_SL_seq_5847
ctcggctcgggctcgggctc

SEQ ID NO: 5848 - DNA, 20 bp, Homo sapiens
  source 1..20: mol_type = genomic DNA; note = Gene: PDXK; note = Location (start to end; relative to TSS): PDXK_30_60; note = Orientation (relative to transcription): antisense; note = sgRNA Position: 43719165; note = Sequence Name: 56322-704_101_SL_seq_5848
actctggctctggcgcgcgg

SEQ ID NO: 5849 - DNA, 20 bp, Homo sapiens
  source 1..20: mol_type = genomic DNA; note = Gene: PDXK; note = Location (start to end; relative to TSS): PDXK_68_98; note = Orientation (relative to transcription): antisense; note = sgRNA Position: 43719203; note = Sequence Name: 56322-704_101_SL_seq_5849
tcgggctcgggctccggccc

SEQ ID NO: 5850 - DNA, 20 bp, Homo sapiens
  source 1..20: mol_type = genomic DNA; note = Gene: PEAK1; note = Location (start to end; relative to TSS): PEAK1_23_53; note = Orientation (relative to transcription): sense; note = sgRNA Position: 77420057; note = Sequence Name: 56322-704_101_SL_seq_5850
gtggtcaccaggaaggggac

SEQ ID NO: 5851 - DNA, 20 bp, Homo sapiens
  source 1..20: mol_type = genomic DNA; note = Gene: PEAK1; note = Location (start to end; relative to TSS): PEAK1_83_113; note = Orientation (relative to transcription): sense; note = sgRNA Position: 77419997; note = Sequence Name: 56322-704_101_SL_seq_5851
cccctcaggtaacagcggcc

SEQ ID NO: 5852 - DNA, 20 bp, Homo sapiens
  source 1..20: mol_type = genomic DNA; note = Gene: PEAK1; note = Location (start to end; relative to TSS): PEAK1_27_57; note = Orientation (relative to transcription): sense; note = sgRNA Position: 77420053; note = Sequence Name: 56322-704_101_SL_seq_5852
tcaccaggaaggggacggga

SEQ ID NO: 5853 - DNA, 20 bp, Homo sapiens
  source 1..20: mol_type = genomic DNA; note = Gene: PEAK1; note = Location (start to end; relative to TSS): PEAK1_78_108; note = Orientation (relative to transcription): sense; note = sgRNA Position: 77420002; note = Sequence Name: 56322-704_101_SL_seq_5853
gtgcgcccctcaggtaacag

SEQ ID NO: 5854 - DNA, 20 bp, Homo sapiens
  source 1..20: mol_type = genomic DNA; note = Gene: PEAK1; note = Location (start to end; relative to TSS): PEAK1_37_67; note = Orientation (relative to transcription): sense; note = sgRNA Position: 77420043; note = Sequence Name: 56322-704_101_SL_seq_5854
ggggacgggacggacggtga

SEQ ID NO: 5855 - DNA, 20 bp, Homo sapiens
  source 1..20: mol_type = genomic DNA; note = Gene: PEAK1; note = Location (start to end; relative to TSS): PEAK1_75_105; note = Orientation (relative to transcription): antisense; note = sgRNA Position: 77420025; note = Sequence Name: 56322-704_101_SL_seq_5855
gaggggcgcacacgccgccg

SEQ ID NO: 5856 - DNA, 20 bp, Homo sapiens
  source 1..20: mol_type = genomic DNA; note = Gene: PEAK1; note = Location (start to end; relative to TSS): PEAK1_22_52; note = Orientation (relative to transcription): sense; note = sgRNA Position: 77420058; note = Sequence Name: 56322-704_101_SL_seq_5856
cgtggtcaccaggaagggga

SEQ ID NO: 5857 - DNA, 20 bp, Homo sapiens
  source 1..20: mol_type = genomic DNA; note = Gene: PEAK1; note = Location (start to end; relative to TSS): PEAK1_52_82; note = Orientation (relative to transcription): sense; note = sgRNA Position: 77420028; note = Sequence Name: 56322-704_101_SL_seq_5857
ggtgatggtggtcgccgcgg

SEQ ID NO: 5858 - DNA, 20 bp, Homo sapiens
  source 1..20: mol_type = genomic DNA; note = Gene: PEAK1; note = Location (start to end; relative to TSS): PEAK1_18_48; note = Orientation (relative to transcription): sense; note = sgRNA Position: 77420062; note = Sequence Name: 56322-704_101_SL_seq_5858
cggccgtggtcaccaggaag

SEQ ID NO: 5859 - DNA, 20 bp, Homo sapiens
  source 1..20: mol_type = genomic DNA; note = Gene: PEAK1; note = Location (start to end; relative to TSS): PEAK1_49_79; note = Orientation (relative to transcription): sense; note = sgRNA Position: 77420031; note = Sequence Name: 56322-704_101_SL_seq_5859
gacggtgatggtggtcgccg

SEQ ID NO: 5860 - DNA, 20 bp, Homo sapiens
  source 1..20: mol_type = genomic DNA; note = Gene: PFKFB1; note = Location (start to end; relative to TSS): PFKFB1_60_90; note = Orientation (relative to transcription): antisense; note = sgRNA Position: 54994124; note = Sequence Name: 56322-704_101_SL_seq_5860
gtggacagggctgggacagg

SEQ ID NO: 5861 - DNA, 20 bp, Homo sapiens
  source 1..20: mol_type = genomic DNA; note = Gene: PFKFB1; note = Location (start to end; relative to TSS): PFKFB1_110_140; note = Orientation (relative to transcription): sense; note = sgRNA Position: 54994054; note = Sequence Name: 56322-704_101_SL_seq_5861
gtaagataggaagtgaggcc

SEQ ID NO: 5862 - DNA, 20 bp, Homo sapiens
  source 1..20: mol_type = genomic DNA; note = Gene: PFKFB1; note = Location (start to end; relative to TSS): PFKFB1_61_91; note = Orientation (relative to transcription): antisense; note = sgRNA Position: 54994123; note = Sequence Name: 56322-704_101_SL_seq_5862
ggtggacagggctgggacag

SEQ ID NO: 5863 - DNA, 20 bp, Homo sapiens
  source 1..20: mol_type = genomic DNA; note = Gene: PFKFB1; note = Location (start to end; relative to TSS): PFKFB1_105_135; note = Orientation (relative to transcription): sense; note = sgRNA Position: 54994059; note = Sequence Name: 56322-704_101_SL_seq_5863
agctagtaagataggaagtg

SEQ ID NO: 5864 - DNA, 20 bp, Homo sapiens
  source 1..20: mol_type = genomic DNA; note = Gene: PFKFB1; note = Location (start to end; relative to TSS): PFKFB1_62_92; note = Orientation (relative to transcription): antisense; note = sgRNA Position: 54994122; note = Sequence Name: 56322-704_101_SL_seq_5864
aggtggacagggctgggaca

SEQ ID NO: 5865 - DNA, 20 bp, Homo sapiens
  source 1..20: mol_type = genomic DNA; note = Gene: PFKFB1; note = Location (start to end; relative to TSS): PFKFB1_97_127; note = Orientation (relative to transcription): sense; note = sgRNA Position: 54994067; note = Sequence Name: 56322-704_101_SL_seq_5865
gaaaagacagctagtaagat

SEQ ID NO: 5866 - DNA, 20 bp, Homo sapiens
  source 1..20: mol_type = genomic DNA; note = Gene: PFKFB1; note = Location (start to end; relative to TSS): PFKFB1_51_81; note = Orientation (relative to transcription): antisense; note = sgRNA Position: 54994133; note = Sequence Name: 56322-704_101_SL_seq_5866
gctgggacagggggtgtact

SEQ ID NO: 5867 - DNA, 20 bp, Homo sapiens
  source 1..20: mol_type = genomic DNA; note = Gene: PFKFB1; note = Location (start to end; relative to TSS): PFKFB1_95_125; note = Orientation (relative to transcription): antisense; note = sgRNA Position: 54994089; note = Sequence Name: 56322-704_101_SL_seq_5867
agctgtcttttctctcgctg

SEQ ID NO: 5868 - DNA, 20 bp, Homo sapiens
  source 1..20: mol_type = genomic DNA; note = Gene: PFKFB1; note = Location (start to end; relative to TSS): PFKFB1_52_82; note = Orientation (relative to transcription): antisense; note = sgRNA Position: 54994132; note = Sequence Name: 56322-704_101_SL_seq_5868
ggctgggacagggggtgtac

SEQ ID NO: 5869 - DNA, 20 bp, Homo sapiens
  source 1..20: mol_type = genomic DNA; note = Gene: PFKFB1; note = Location (start to end; relative to TSS): PFKFB1_82_112; note = Orientation (relative to transcription): antisense; note = sgRNA Position: 54994102; note = Sequence Name: 56322-704_101_SL_seq_5869
ctcgctgtggccacagcagc

SEQ ID NO: 5870 - DNA, 20 bp, Homo sapiens
  source 1..20: mol_type = genomic DNA; note = Gene: PFKFB2; note = Location (start to end; relative to TSS): PFKFB2_35_65; note = Orientation (relative to transcription): sense; note = sgRNA Position: 207053336; note = Sequence Name: 56322-704_101_SL_seq_5870
gcaggcgccggggccaaggc

SEQ ID NO: 5871 - DNA, 20 bp, Homo sapiens
  source 1..20: mol_type = genomic DNA; note = Gene: PFKFB2; note = Location (start to end; relative to TSS): PFKFB2_86_116; note = Orientation (relative to transcription): sense; note = sgRNA Position: 207053387; note = Sequence Name: 56322-704_101_SL_seq_5871
agccacagctgcgcagcccc

SEQ ID NO: 5872 - DNA, 20 bp, Homo sapiens
  source 1..20: mol_type = genomic DNA; note = Gene: PFKFB2; note = Location (start to end; relative to TSS): PFKFB2_31_61; note = Orientation (relative to transcription): sense; note = sgRNA Position: 207053332; note = Sequence Name: 56322-704_101_SL_seq_5872
cagggcaggcgccggggcca

SEQ ID NO: 5873 - DNA, 20 bp, Homo sapiens
  source 1..20: mol_type = genomic DNA; note = Gene: PFKFB2; note = Location (start to end; relative to TSS): PFKFB2_85_115; note = Orientation (relative to transcription): sense; note = sgRNA Position: 207053386; note = Sequence Name: 56322-704_101_SL_seq_5873
gagccacagctgcgcagccc

SEQ ID NO: 5874 - DNA, 20 bp, Homo sapiens
  source 1..20: mol_type = genomic DNA; note = Gene: PFKFB2; note = Location (start to end; relative to TSS): PFKFB2_25_55; note = Orientation (relative to transcription): sense; note = sgRNA Position: 207053326; note = Sequence Name: 56322-704_101_SL_seq_5874
gcgttacagggcaggcgccg

SEQ ID NO: 5875 - DNA, 20 bp, Homo sapiens
  source 1..20: mol_type = genomic DNA; note = Gene: PFKFB2; note = Location (start to end; relative to TSS): PFKFB2_61_91; note = Orientation (relative to transcription): sense; note = sgRNA Position: 207053362; note = Sequence Name: 56322-704_101_SL_seq_5875
ggatcttaggagagatcgta

SEQ ID NO: 5876 - DNA, 20 bp, Homo sapiens
  source 1..20: mol_type = genomic DNA; note = Gene: PFKFB2; note = Location (start to end; relative to TSS): PFKFB2_24_54; note = Orientation (relative to transcription): sense; note = sgRNA Position: 207053325; note = Sequence Name: 56322-704_101_SL_seq_5876
cgcgttacagggcaggcgcc

SEQ ID NO: 5877 - DNA, 20 bp, Homo sapiens
  source 1..20: mol_type = genomic DNA; note = Gene: PFKFB2; note = Location (start to end; relative to TSS): PFKFB2_60_90; note = Orientation (relative to transcription): sense; note = sgRNA Position: 207053361; note = Sequence Name: 56322-704_101_SL_seq_5877
gggatcttaggagagatcgt

SEQ ID NO: 5878 - DNA, 20 bp, Homo sapiens
  source 1..20: mol_type = genomic DNA; note = Gene: PFKFB2; note = Location (start to end; relative to TSS): PFKFB2_23_53; note = Orientation (relative to transcription): sense; note = sgRNA Position: 207053324; note = Sequence Name: 56322-704_101_SL_seq_5878
tcgcgttacagggcaggcgc

SEQ ID NO: 5879 - DNA, 20 bp, Homo sapiens
  source 1..20: mol_type = genomic DNA; note = Gene: PFKFB2; note = Location (start to end; relative to TSS): PFKFB2_57_87; note = Orientation (relative to transcription): antisense; note = sgRNA Position: 207053338; note = Sequence Name: 56322-704_101_SL_seq_5879
cctaagatccctccctgcct

SEQ ID NO: 5880 - DNA, 20 bp, Homo sapiens
  source 1..20: mol_type = genomic DNA; note = Gene: PFKFB3; note = Location (start to end; relative to TSS): PFKFB3_61_91; note = Orientation (relative to transcription): antisense; note = sgRNA Position: 6202999; note = Sequence Name: 56322-704_101_SL_seq_5880
cggaaagctctgggatgctc

SEQ ID NO: 5881 - DNA, 20 bp, Homo sapiens
  source 1..20: mol_type = genomic DNA; note = Gene: PFKFB3; note = Location (start to end; relative to TSS): PFKFB3_94_124; note = Orientation (relative to transcription): antisense; note = sgRNA Position: 6203032; note = Sequence Name: 56322-704_101_SL_seq_5881
ctggggatgcccggcacggc

SEQ ID NO: 5882 - DNA, 20 bp, Homo sapiens
  source 1..20: mol_type = genomic DNA; note = Gene: PFKFB3; note = Location (start to end; relative to TSS): PFKFB3_18_48; note = Orientation (relative to transcription): sense; note = sgRNA Position: 6202976; note = Sequence Name: 56322-704_101_SL_seq_5882
agggcctggtggcgagagcg

SEQ ID NO: 5883 - DNA, 20 bp, Homo sapiens
  source 1..20: mol_type = genomic DNA; note = Gene: PFKFB3; note = Location (start to end; relative to TSS): PFKFB3_70_100; note = Orientation (relative to transcription): antisense; note = sgRNA Position: 6203008; note = Sequence Name: 56322-704_101_SL_seq_5883
tcgtccgctcggaaagctct

SEQ ID NO: 5884 - DNA, 20 bp, Homo sapiens
  source 1..20: mol_type = genomic DNA; note = Gene: PFKFB3; note = Location (start to end; relative to TSS): PFKFB3_31_61; note = Orientation (relative to transcription): antisense; note = sgRNA Position: 6202969; note = Sequence Name: 56322-704_101_SL_seq_5884
acagccgcgctctcgccacc

SEQ ID NO: 5885 - DNA, 20 bp, Homo sapiens
  source 1..20: mol_type = genomic DNA; note = Gene: PFKFB3; note = Location (start to end; relative to TSS): PFKFB3_66_96; note = Orientation (relative to transcription): sense; note = sgRNA Position: 6203024; note = Sequence Name: 56322-704_101_SL_seq_5885
agctttccgagcggacgagc

SEQ ID NO: 5886 - DNA, 20 bp, Homo sapiens
  source 1..20: mol_type = genomic DNA; note = Gene: PFKFB3; note = Location (start to end; relative to TSS): PFKFB3_7_37; note = Orientation (relative to transcription): sense; note = sgRNA Position: 6202965; note = Sequence Name: 56322-704_101_SL_seq_5886
aggcgagcagcagggcctgg

SEQ ID NO: 5887 - DNA, 20 bp, Homo sapiens
  source 1..20: mol_type = genomic DNA; note = Gene: PFKFB3; note = Location (start to end; relative to TSS): PFKFB3_62_92; note = Orientation (relative to transcription): antisense; note = sgRNA Position: 6203000; note = Sequence Name: 56322-704_101_SL_seq_5887
tcggaaagctctgggatgct

SEQ ID NO: 5888 - DNA, 20 bp, Homo sapiens
  source 1..20: mol_type = genomic DNA; note = Gene: PFKFB3; note = Location (start to end; relative to TSS): PFKFB3_4_34; note = Orientation (relative to transcription): sense; note = sgRNA Position: 6202962; note = Sequence Name: 56322-704_101_SL_seq_5888
aggaggcgagcagcagggcc

SEQ ID NO: 5889 - DNA, 20 bp, Homo sapiens
  source 1..20: mol_type = genomic DNA; note = Gene: PFKFB3; note = Location (start to end; relative to TSS): PFKFB3_61_91; note = Orientation (relative to transcription): antisense; note = sgRNA Position: 6202999; note = Sequence Name: 56322-704_101_SL_seq_5889
cggaaagctctgggatgctc

SEQ ID NO: 5890 - DNA, 20 bp, Homo sapiens
  source 1..20: mol_type = genomic DNA; note = Gene: PFKFB4; note = Location (start to end; relative to TSS): PFKFB4_35_65; note = Orientation (relative to transcription): antisense; note = sgRNA Position: 48556764; note = Sequence Name: 56322-704_101_SL_seq_5890
ggttctgtgtcaattcccgt

SEQ ID NO: 5891 - DNA, 20 bp, Homo sapiens
  source 1..20: mol_type = genomic DNA; note = Gene: PFKFB4; note = Location (start to end; relative to TSS): PFKFB4_78_108; note = Orientation (relative to transcription): antisense; note = sgRNA Position: 48556721; note = Sequence Name: 56322-704_101_SL_seq_5891
gcgggccgcccattgctgta

SEQ ID NO: 5892 - DNA, 20 bp, Homo sapiens
  source 1..20: mol_type = genomic DNA; note = Gene: PFKFB4; note = Location (start to end; relative to TSS): PFKFB4_34_64; note = Orientation (relative to transcription): antisense; note = sgRNA Position: 48556765; note = Sequence Name: 56322-704_101_SL_seq_5892
gttctgtgtcaattcccgtg

SEQ ID NO: 5893 - DNA, 20 bp, Homo sapiens
  source 1..20: mol_type = genomic DNA; note = Gene: PFKFB4; note = Location (start to end; relative to TSS): PFKFB4_64_94; note = Orientation (relative to transcription): sense; note = sgRNA Position: 48556715; note = Sequence Name: 56322-704_101_SL_seq_5893
ggatgccatacagcaatggg

SEQ ID NO: 5894 - DNA, 20 bp, Homo sapiens
  source 1..20: mol_type = genomic DNA; note = Gene: PFKFB4; note = Location (start to end; relative to TSS): PFKFB4_22_52; note = Orientation (relative to transcription): antisense; note = sgRNA Position: 48556777; note = Sequence Name: 56322-704_101_SL_seq_5894
ttcccgtggggacgccatcc

SEQ ID NO: 5895 - DNA, 20 bp, Homo sapiens
  source 1..20: mol_type = genomic DNA; note = Gene: PFKFB4; note = Location (start to end; relative to TSS): PFKFB4_58_88; note = Orientation (relative to transcription): antisense; note = sgRNA Position: 48556741; note = Sequence Name: 56322-704_101_SL_seq_5895
tggcatccagatcttcttca

SEQ ID NO: 5896 - DNA, 20 bp, Homo sapiens
  source 1..20: mol_type = genomic DNA; note = Gene: PFKFB4; note = Location (start to end; relative to TSS): PFKFB4_20_50; note = Orientation (relative to transcription): antisense; note = sgRNA Position: 48556779; note = Sequence Name: 56322-704_101_SL_seq_5896
cccgtggggacgccatcccg

SEQ ID NO: 5897 - DNA, 20 bp, Homo sapiens
  source 1..20: mol_type = genomic DNA; note = Gene: PFKFB4; note = Location (start to end; relative to TSS): PFKFB4_57_87; note = Orientation (relative to transcription): antisense; note = sgRNA Position: 48556742; note = Sequence Name: 56322-704_101_SL_seq_5897
ggcatccagatcttcttcag

SEQ ID NO: 5898 - DNA, 20 bp, Homo sapiens
  source 1..20: mol_type = genomic DNA; note = Gene: PFKFB4; note = Location (start to end; relative to TSS): PFKFB4_21_51; note = Orientation (relative to transcription): antisense; note = sgRNA Position: 48556778; note = Sequence Name: 56322-704_101_SL_seq_5898
tcccgtggggacgccatccc

SEQ ID NO: 5899 - DNA, 20 bp, Homo sapiens
  source 1..20: mol_type = genomic DNA; note = Gene: PFKFB4; note = Location (start to end; relative to TSS): PFKFB4_56_86; note = Orientation (relative to transcription): antisense; note = sgRNA Position: 48556743; note = Sequence Name: 56322-704_101_SL_seq_5899
gcatccagatcttcttcagg

SEQ ID NO: 5900 - DNA, 20 bp, Homo sapiens
  source 1..20: mol_type = genomic DNA; note = Gene: PGK1; note = Location (start to end; relative to TSS): PGK1_46_76; note = Orientation (relative to transcription): antisense; note = sgRNA Position: 78104300; note = Sequence Name: 56322-704_101_SL_seq_5900
ggtcggtgattcggtcaacg

SEQ ID NO: 5901 - DNA, 20 bp, Homo sapiens
  source 1..20: mol_type = genomic DNA; note = Gene: PGK1; note = Location (start to end; relative to TSS): PGK1_76_106; note = Orientation (relative to transcription): antisense; note = sgRNA Position: 78104330; note = Sequence Name: 56322-704_101_SL_seq_5901
cgacattttggaaatacagc

SEQ ID NO: 5902 - DNA, 20 bp, Homo sapiens
  source 1..20: mol_type = genomic DNA; note = Gene: PGK1; note = Location (start to end; relative to TSS): PGK1_45_75; note = Orientation (relative to transcription): antisense; note = sgRNA Position: 78104299; note = Sequence Name: 56322-704_101_SL_seq_5902
gtcggtgattcggtcaacga

SEQ ID NO: 5903 - DNA, 20 bp, Homo sapiens
  source 1..20: mol_type = genomic DNA; note = Gene: PGK1; note = Location (start to end; relative to TSS): PGK1_75_105; note = Orientation (relative to transcription): antisense; note = sgRNA Position: 78104329; note = Sequence Name: 56322-704_101_SL_seq_5903
gacattttggaaatacagct

SEQ ID NO: 5904 - DNA, 20 bp, Homo sapiens
  source 1..20: mol_type = genomic DNA; note = Gene: PGK1; note = Location (start to end; relative to TSS): PGK1_20_50; note = Orientation (relative to transcription): antisense; note = sgRNA Position: 78104274; note = Sequence Name: 56322-704_101_SL_seq_5904
ccgactgccgacgtgcgctc

SEQ ID NO: 5905 - DNA, 20 bp, Homo sapiens
  source 1..20: mol_type = genomic DNA; note = Gene: PGK1; note = Location (start to end; relative to TSS): PGK1_63_93; note = Orientation (relative to transcription): antisense; note = sgRNA Position: 78104317; note = Sequence Name: 56322-704_101_SL_seq_5905
atacagctggggagagaggt

SEQ ID NO: 5906 - DNA, 20 bp, Homo sapiens
  source 1..20: mol_type = genomic DNA; note = Gene: PGK1; note = Location (start to end; relative to TSS): PGK1_17_47; note = Orientation (relative to transcription): antisense; note = sgRNA Position: 78104271; note = Sequence Name: 56322-704_101_SL_seq_5906
actgccgacgtgcgctccgg

SEQ ID NO: 5907 - DNA, 20 bp, Homo sapiens
  source 1..20: mol_type = genomic DNA; note = Gene: PGK1; note = Location (start to end; relative to TSS): PGK1_55_85; note = Orientation (relative to transcription): antisense; note = sgRNA Position: 78104309; note = Sequence Name: 56322-704_101_SL_seq_5907
ggggagagaggtcggtgatt

SEQ ID NO: 5908 - DNA, 20 bp, Homo sapiens
  source 1..20: mol_type = genomic DNA; note = Gene: PGK1; note = Location (start to end; relative to TSS): PGK1_11_41; note = Orientation (relative to transcription): sense; note = sgRNA Position: 78104285; note = Sequence Name: 56322-704_101_SL_seq_5908
ccggagcgcacgtcggcagt

SEQ ID NO: 5909 - DNA, 20 bp, Homo sapiens
  source 1..20: mol_type = genomic DNA; note = Gene: PGK1; note = Location (start to end; relative to TSS): PGK1_45_75; note = Orientation (relative to transcription): antisense; note = sgRNA Position: 78104299; note = Sequence Name: 56322-704_101_SL_seq_5909
gtcggtgattcggtcaacga

SEQ ID NO: 5910 - DNA, 20 bp, Homo sapiens
  source 1..20: mol_type = genomic DNA; note = Gene: PGK2; note = Location (start to end; relative to TSS): PGK2_18_48; note = Orientation (relative to transcription): antisense; note = sgRNA Position: 49787263; note = Sequence Name: 56322-704_101_SL_seq_5910
ctgttgaggggctgggtcgg

SEQ ID NO: 5911 - DNA, 20 bp, Homo sapiens
  source 1..20: mol_type = genomic DNA; note = Gene: PGK2; note = Location (start to end; relative to TSS): PGK2_115_145; note = Orientation (relative to transcription): sense; note = sgRNA Position: 49787146; note = Sequence Name: 56322-704_101_SL_seq_5911
tagacaaactggatgttaga

SEQ ID NO: 5912 - DNA, 20 bp, Homo sapiens
  source 1..20: mol_type = genomic DNA; note = Gene: PGK2; note = Location (start to end; relative to TSS): PGK2_21_51; note = Orientation (relative to transcription): antisense; note = sgRNA Position: 49787260; note = Sequence Name: 56322-704_101_SL_seq_5912
ttgctgttgaggggctgggt

SEQ ID NO: 5913 - DNA, 20 bp, Homo sapiens
  source 1..20: mol_type = genomic DNA; note = Gene: PGK2; note = Location (start to end; relative to TSS): PGK2_114_144; note = Orientation (relative to transcription): sense; note = sgRNA Position: 49787147; note = Sequence Name: 56322-704_101_SL_seq_5913
ttagacaaactggatgttag

SEQ ID NO: 5914 - DNA, 20 bp, Homo sapiens
  source 1..20: mol_type = genomic DNA; note = Gene: PGK2; note = Location (start to end; relative to TSS): PGK2_25_55; note = Orientation (relative to transcription): antisense; note = sgRNA Position: 49787256; note = Sequence Name: 56322-704_101_SL_seq_5914
caacttgctgttgaggggct

SEQ ID NO: 5915 - DNA, 20 bp, Homo sapiens
  source 1..20: mol_type = genomic DNA; note = Gene: PGK2; note = Location (start to end; relative to TSS): PGK2_104_134; note = Orientation (relative to transcription): sense; note = sgRNA Position: 49787157; note = Sequence Name: 56322-704_101_SL_seq_5915
gaagttgactttagacaaac

SEQ ID NO: 5916 - DNA, 20 bp, Homo sapiens
  source 1..20: mol_type = genomic DNA; note = Gene: PGK2; note = Location (start to end; relative to TSS): PGK2_26_56; note = Orientation (relative to transcription): antisense; note = sgRNA Position: 49787255; note = Sequence Name: 56322-704_101_SL_seq_5916
ccaacttgctgttgaggggc

SEQ ID NO: 5917 - DNA, 20 bp, Homo sapiens
  source 1..20: mol_type = genomic DNA; note = Gene: PGK2; note = Location (start to end; relative to TSS): PGK2_77_107; note = Orientation (relative to transcription): antisense; note = sgRNA Position: 49787204; note = Sequence Name: 56322-704_101_SL_seq_5917
tcttgacaatataaagacat

SEQ ID NO: 5918 - DNA, 20 bp, Homo sapiens
  source 1..20: mol_type = genomic DNA; note = Gene: PGK2; note = Location (start to end; relative to TSS): PGK2_30_60; note = Orientation (relative to transcription): antisense; note = sgRNA Position: 49787251; note = Sequence Name: 56322-704_101_SL_seq_5918
agaaccaacttgctgttgag

SEQ ID NO: 5919 - DNA, 20 bp, Homo sapiens
  source 1..20: mol_type = genomic DNA; note = Gene: PGK2; note = Location (start to end; relative to TSS): PGK2_66_96; note = Orientation (relative to transcription): antisense; note = sgRNA Position: 49787215; note = Sequence Name: 56322-704_101_SL_seq_5919
taaagacataggctgacacc

SEQ ID NO: 5920 - DNA, 20 bp, Homo sapiens
  source 1..20: mol_type = genomic DNA; note = Gene: PHKG1; note = Location (start to end; relative to TSS): PHKG1_37_67; note = Orientation (relative to transcription): sense; note = sgRNA Position: 56092891; note = Sequence Name: 56322-704_101_SL_seq_5920
ctgtggtcccctctccccgg

SEQ ID NO: 5921 - DNA, 20 bp, Homo sapiens
  source 1..20: mol_type = genomic DNA; note = Gene: PHKG1; note = Location (start to end; relative to TSS): PHKG1_116_146; note = Orientation (relative to transcription): antisense; note = sgRNA Position: 56092832; note = Sequence Name: 56322-704_101_SL_seq_5921
atcactgggctagctactca

SEQ ID NO: 5922 - DNA, 20 bp, Homo sapiens
  source 1..20: mol_type = genomic DNA; note = Gene: PHKG1; note = Location (start to end; relative to TSS): PHKG1_35_65; note = Orientation (relative to transcription): sense; note = sgRNA Position: 56092893; note = Sequence Name: 56322-704_101_SL_seq_5922
ctctgtggtcccctctcccc

SEQ ID NO: 5923 - DNA, 20 bp, Homo sapiens
  source 1..20: mol_type = genomic DNA; note = Gene: PHKG1; note = Location (start to end; relative to TSS): PHKG1_109_139; note = Orientation (relative to transcription): sense; note = sgRNA Position: 56092819; note = Sequence Name: 56322-704_101_SL_seq_5923
gtgagtagctagcccagtga

SEQ ID NO: 5924 - DNA, 20 bp, Homo sapiens
  source 1..20: mol_type = genomic DNA; note = Gene: PHKG1; note = Location (start to end; relative to TSS): PHKG1_34_64; note = Orientation (relative to transcription): sense; note = sgRNA Position: 56092894; note = Sequence Name: 56322-704_101_SL_seq_5924
cctctgtggtcccctctccc

SEQ ID NO: 5925 - DNA, 20 bp, Homo sapiens
  source 1..20: mol_type = genomic DNA; note = Gene: PHKG1; note = Location (start to end; relative to TSS): PHKG1_101_131; note = Orientation (relative to transcription): antisense; note = sgRNA Position: 56092847; note = Sequence Name: 56322-704_101_SL_seq_5925
actcacggttaagtgcttgc

SEQ ID NO: 5926 - DNA, 20 bp, Homo sapiens
  source 1..20: mol_type = genomic DNA; note = Gene: PHKG1; note = Location (start to end; relative to TSS): PHKG1_36_66; note = Orientation (relative to transcription): sense; note = sgRNA Position: 56092892; note = Sequence Name: 56322-704_101_SL_seq_5926
tctgtggtcccctctccccg

SEQ ID NO: 5927 - DNA, 20 bp, Homo sapiens
  source 1..20: mol_type = genomic DNA; note = Gene: PHKG1; note = Location (start to end; relative to TSS): PHKG1_91_121; note = Orientation (relative to transcription): antisense; note = sgRNA Position: 56092857; note = Sequence Name: 56322-704_101_SL_seq_5927
aagtgcttgcaggctcttga

SEQ ID NO: 5928 - DNA, 20 bp, Homo sapiens
  source 1..20: mol_type = genomic DNA; note = Gene: PHKG1; note = Location (start to end; relative to TSS): PHKG1_20_50; note = Orientation (relative to transcription): sense; note = sgRNA Position: 56092908; note = Sequence Name: 56322-704_101_SL_seq_5928
gacacggcttcagccctctg

SEQ ID NO: 5929 - DNA, 20 bp, Homo sapiens
  source 1..20: mol_type = genomic DNA; note = Gene: PHKG1; note = Location (start to end; relative to TSS): PHKG1_53_83; note = Orientation (relative to transcription): antisense; note = sgRNA Position: 56092895; note = Sequence Name: 56322-704_101_SL_seq_5929
ccaaagccccccggggagag

SEQ ID NO: 5930 - DNA, 20 bp, Homo sapiens
  source 1..20: mol_type = genomic DNA; note = Gene: PHKG2; note = Location (start to end; relative to TSS): PHKG2_53_83; note = Orientation (relative to transcription): antisense; note = sgRNA Position: 30748484; note = Sequence Name: 56322-704_101_SL_seq_5930
gcaggctcacctgagggggc

SEQ ID NO: 5931 - DNA, 20 bp, Homo sapiens
  source 1..20: mol_type = genomic DNA; note = Gene: PHKG2; note = Location (start to end; relative to TSS): PHKG2_83_113; note = Orientation (relative to transcription): antisense; note = sgRNA Position: 30748514; note = Sequence Name: 56322-704_101_SL_seq_5931
gcgggcgcaggaaggggacg

SEQ ID NO: 5932 - DNA, 20 bp, Homo sapiens
  source 1..20: mol_type = genomic DNA; note = Gene: PHKG2; note = Location (start to end; relative to TSS): PHKG2_47_77; note = Orientation (relative to transcription): antisense; note = sgRNA Position: 30748478; note = Sequence Name: 56322-704_101_SL_seq_5932
tcacctgagggggcaggcag

SEQ ID NO: 5933 - DNA, 20 bp, Homo sapiens
  source 1..20: mol_type = genomic DNA; note = Gene: PHKG2; note = Location (start to end; relative to TSS): PHKG2_82_112; note = Orientation (relative to transcription): antisense; note = sgRNA Position: 30748513; note = Sequence Name: 56322-704_101_SL_seq_5933
cgggcgcaggaaggggacgg

SEQ ID NO: 5934 - DNA, 20 bp, Homo sapiens
  source 1..20: mol_type = genomic DNA; note = Gene: PHKG2; note = Location (start to end; relative to TSS): PHKG2_35_65; note = Orientation (relative to transcription): sense; note = sgRNA Position: 30748486; note = Sequence Name: 56322-704_101_SL_seq_5934
gctcctctgcctgccccctc

SEQ ID NO: 5935 - DNA, 20 bp, Homo sapiens
  source 1..20: mol_type = genomic DNA; note = Gene: PHKG2; note = Location (start to end; relative to TSS): PHKG2_71_101; note = Orientation (relative to transcription): antisense; note = sgRNA Position: 30748502; note = Sequence Name: 56322-704_101_SL_seq_5935
aggggacgggggtctagcgc

SEQ ID NO: 5936 - DNA, 20 bp, Homo sapiens
  source 1..20: mol_type = genomic DNA; note = Gene: PHKG2; note = Location (start to end; relative to TSS): PHKG2_14_44; note = Orientation (relative to transcription): antisense; note = sgRNA Position: 30748445; note = Sequence Name: 56322-704_101_SL_seq_5936
gacgcgagctgcgctgtcgc

SEQ ID NO: 5937 - DNA, 20 bp, Homo sapiens
  source 1..20: mol_type = genomic DNA; note = Gene: PHKG2; note = Location (start to end; relative to TSS): PHKG2_53_83; note = Orientation (relative to transcription): antisense; note = sgRNA Position: 30748484; note = Sequence Name: 56322-704_101_SL_seq_5937
gcaggctcacctgagggggc

SEQ ID NO: 5938 - DNA, 20 bp, Homo sapiens
  source 1..20: mol_type = genomic DNA; note = Gene: PHKG2; note = Location (start to end; relative to TSS): PHKG2_13_43; note = Orientation (relative to transcription): sense; note = sgRNA Position: 30748464; note = Sequence Name: 56322-704_101_SL_seq_5938
agcgcagctcgcgtcgaccc

SEQ ID NO: 5939 - DNA, 20 bp, Homo sapiens
  source 1..20: mol_type = genomic DNA; note = Gene: PHKG2; note = Location (start to end; relative to TSS): PHKG2_47_77; note = Orientation (relative to transcription): antisense; note = sgRNA Position: 30748478; note = Sequence Name: 56322-704_101_SL_seq_5939
tcacctgagggggcaggcag

SEQ ID NO: 5940 - DNA, 20 bp, Homo sapiens
  source 1..20: mol_type = genomic DNA; note = Gene: PI4K2A; note = Location (start to end; relative to TSS): PI4K2A_29_59; note = Orientation (relative to transcription): sense; note = sgRNA Position: 97640726; note = Sequence Name: 56322-704_101_SL_seq_5940
agcgcgccgggtcccggagc

SEQ ID NO: 5941 - DNA, 20 bp, Homo sapiens
  source 1..20: mol_type = genomic DNA; note = Gene: PI4K2A; note = Location (start to end; relative to TSS): PI4K2A_86_116; note = Orientation (relative to transcription): antisense; note = sgRNA Position: 97640763; note = Sequence Name: 56322-704_101_SL_seq_5941
cccgctcgggggacactagt

SEQ ID NO: 5942 - DNA, 20 bp, Homo sapiens
  source 1..20: mol_type = genomic DNA; note = Gene: PI4K2A; note = Location (start to end; relative to TSS): PI4K2A_39_69; note = Orientation (relative to transcription): sense; note = sgRNA Position: 97640736; note = Sequence Name: 56322-704_101_SL_seq_5942
gtcccggagccggctgtctg

SEQ ID NO: 5943 - DNA, 20 bp, Homo sapiens
  source 1..20: mol_type = genomic DNA; note = Gene: PI4K2A; note = Location (start to end; relative to TSS): PI4K2A_77_107; note = Orientation (relative to transcription): sense; note = sgRNA Position: 97640774; note = Sequence Name: 56322-704_101_SL_seq_5943
cccactagtgtcccccgagc

SEQ ID NO: 5944 - DNA, 20 bp, Homo sapiens
  source 1..20: mol_type = genomic DNA; note = Gene: PI4K2A; note = Location (start to end; relative to TSS): PI4K2A_40_70; note = Orientation (relative to transcription): sense; note = sgRNA Position: 97640737; note = Sequence Name: 56322-704_101_SL_seq_5944
tcccggagccggctgtctga

SEQ ID NO: 5945 - DNA, 20 bp, Homo sapiens
  source 1..20: mol_type = genomic DNA; note = Gene: PI4K2A; note = Location (start to end; relative to TSS): PI4K2A_76_106; note = Orientation (relative to transcription): sense; note = sgRNA Position: 97640773; note = Sequence Name: 56322-704_101_SL_seq_5945
gcccactagtgtcccccgag

SEQ ID NO: 5946 - DNA, 20 bp, Homo sapiens
  source 1..20: mol_type = genomic DNA; note = Gene: PI4K2A; note = Location (start to end; relative to TSS): PI4K2A_23_53; note = Orientation (relative to transcription): sense; note = sgRNA Position: 97640720; note = Sequence Name: 56322-704_101_SL_seq_5946
gtgtggagcgcgccgggtcc

SEQ ID NO: 5947 - DNA, 20 bp, Homo sapiens
  source 1..20: mol_type = genomic DNA; note = Gene: PI4K2A; note = Location (start to end; relative to TSS): PI4K2A_57_87; note = Orientation (relative to transcription): antisense; note = sgRNA Position: 97640734; note = Sequence Name: 56322-704_101_SL_seq_5947
tcgtccatccctcagacagc

SEQ ID NO: 5948 - DNA, 20 bp, Homo sapiens
  source 1..20: mol_type = genomic DNA; note = Gene: PI4K2A; note = Location (start to end; relative to TSS): PI4K2A_18_48; note = Orientation (relative to transcription): antisense; note = sgRNA Position: 97640695; note = Sequence Name: 56322-704_101_SL_seq_5948
gctccacaccactgcgctcg

SEQ ID NO: 5949 - DNA, 20 bp, Homo sapiens
  source 1..20: mol_type = genomic DNA; note = Gene: PI4K2A; note = Location (start to end; relative to TSS): PI4K2A_50_80; note = Orientation (relative to transcription): antisense; note = sgRNA Position: 97640727; note = Sequence Name: 56322-704_101_SL_seq_5949
tccctcagacagccggctcc

SEQ ID NO: 5950 - DNA, 20 bp, Homo sapiens
  source 1..20: mol_type = genomic DNA; note = Gene: PI4K2B; note = Location (start to end; relative to TSS): PI4K2B_54_84; note = Orientation (relative to transcription): antisense; note = sgRNA Position: 25234093; note = Sequence Name: 56322-704_101_SL_seq_5950
agactgggctctgcatggcg

SEQ ID NO: 5951 - DNA, 20 bp, Homo sapiens
  source 1..20: mol_type = genomic DNA; note = Gene: PI4K2B; note = Location (start to end; relative to TSS): PI4K2B_85_115; note = Orientation (relative to transcription): sense; note = sgRNA Position: 25234144; note = Sequence Name: 56322-704_101_SL_seq_5951
tgatctggtctcagcgcgga

SEQ ID NO: 5952 - DNA, 20 bp, Homo sapiens
  source 1..20: mol_type = genomic DNA; note = Gene: PI4K2B; note = Location (start to end; relative to TSS): PI4K2B_48_78; note = Orientation (relative to transcription): antisense; note = sgRNA Position: 25234087; note = Sequence Name: 56322-704_101_SL_seq_5952
ggctctgcatggcgcggaac

SEQ ID NO: 5953 - DNA, 20 bp, Homo sapiens
  source 1..20: mol_type = genomic DNA; note = Gene: PI4K2B; note = Location (start to end; relative to TSS): PI4K2B_84_114; note = Orientation (relative to transcription): sense; note = sgRNA Position: 25234143; note = Sequence Name: 56322-704_101_SL_seq_5953
ctgatctggtctcagcgcgg

SEQ ID NO: 5954 - DNA, 20 bp, Homo sapiens
  source 1..20: mol_type = genomic DNA; note = Gene: PI4K2B; note = Location (start to end; relative to TSS): PI4K2B_38_68; note = Orientation (relative to transcription): antisense; note = sgRNA Position: 25234077; note = Sequence Name: 56322-704_101_SL_seq_5954
ggcgcggaacgggagcgacc

SEQ ID NO: 5955 - DNA, 20 bp, Homo sapiens
  source 1..20: mol_type = genomic DNA; note = Gene: PI4K2B; note = Location (start to end; relative to TSS): PI4K2B_81_111; note = Orientation (relative to transcription): sense; note = sgRNA Position: 25234140; note = Sequence Name: 56322-704_101_SL_seq_5955
gctctgatctggtctcagcg

SEQ ID NO: 5956 - DNA, 20 bp, Homo sapiens
  source 1..20: mol_type = genomic DNA; note = Gene: PI4K2B; note = Location (start to end; relative to TSS): PI4K2B_30_60; note = Orientation (relative to transcription): antisense; note = sgRNA Position: 25234069; note = Sequence Name: 56322-704_101_SL_seq_5956
acgggagcgaccgggtagaa

SEQ ID NO: 5957 - DNA, 20 bp, Homo sapiens
  source 1..20: mol_type = genomic DNA; note = Gene: PI4K2B; note = Location (start to end; relative to TSS): PI4K2B_70_100; note = Orientation (relative to transcription): sense; note = sgRNA Position: 25234129; note = Sequence Name: 56322-704_101_SL_seq_5957
ggcacctggctgctctgatc

SEQ ID NO: 5958 - DNA, 20 bp, Homo sapiens
  source 1..20: mol_type = genomic DNA; note = Gene: PI4K2B; note = Location (start to end; relative to TSS): PI4K2B_11_41; note = Orientation (relative to transcription): sense; note = sgRNA Position: 25234070; note = Sequence Name: 56322-704_101_SL_seq_5958
gaggtggcgtccgttctacc

SEQ ID NO: 5959 - DNA, 20 bp, Homo sapiens
  source 1..20: mol_type = genomic DNA; note = Gene: PI4K2B; note = Location (start to end; relative to TSS): PI4K2B_48_78; note = Orientation (relative to transcription): antisense; note = sgRNA Position: 25234087; note = Sequence Name: 56322-704_101_SL_seq_5959
ggctctgcatggcgcggaac

SEQ ID NO: 5960 - DNA, 20 bp, Homo sapiens
  source 1..20: mol_type = genomic DNA; note = Gene: PI4KA; note = Location (start to end; relative to TSS): PI4KA_44_74; note = Orientation (relative to transcription): sense; note = sgRNA Position: 20858743; note = Sequence Name: 56322-704_101_SL_seq_5960
ggagccggcgggcagcgccg

SEQ ID NO: 5961 - DNA, 20 bp, Homo sapiens
  source 1..20: mol_type = genomic DNA; note = Gene: PI4KA; note = Location (start to end; relative to TSS): PI4KA_77_107; note = Orientation (relative to transcription): sense; note = sgRNA Position: 20858710; note = Sequence Name: 56322-704_101_SL_seq_5961
gatggcggcggccccggccc

SEQ ID NO: 5962 - DNA, 20 bp, Homo sapiens
  source 1..20: mol_type = genomic DNA; note = Gene: PI4KA; note = Location (start to end; relative to TSS): PI4KA_33_63; note = Orientation (relative to transcription): sense; note = sgRNA Position: 20858754; note = Sequence Name: 56322-704_101_SL_seq_5962
gccaggagcggggagccggc

SEQ ID NO: 5963 - DNA, 20 bp, Homo sapiens
  source 1..20: mol_type = genomic DNA; note = Gene: PI4KA; note = Location (start to end; relative to TSS): PI4KA_65_95; note = Orientation (relative to transcription): sense; note = sgRNA Position: 20858722; note = Sequence Name: 56322-704_101_SL_seq_5963
ggctcgtgaggtgatggcgg

SEQ ID NO: 5964 - DNA, 20 bp, Homo sapiens
  source 1..20: mol_type = genomic DNA; note = Gene: PI4KA; note = Location (start to end; relative to TSS): PI4KA_29_59; note = Orientation (relative to transcription): sense; note = sgRNA Position: 20858758; note = Sequence Name: 56322-704_101_SL_seq_5964
gcgggccaggagcggggagc

SEQ ID NO: 5965 - DNA, 20 bp, Homo sapiens
  source 1..20: mol_type = genomic DNA; note = Gene: PI4KA; note = Location (start to end; relative to TSS): PI4KA_59_89; note = Orientation (relative to transcription): sense; note = sgRNA Position: 20858728; note = Sequence Name: 56322-704_101_SL_seq_5965
cgccgcggctcgtgaggtga

SEQ ID NO: 5966 - DNA, 20 bp, Homo sapiens
  source 1..20: mol_type = genomic DNA; note = Gene: PI4KA; note = Location (start to end; relative to TSS): PI4KA_20_50; note = Orientation (relative to transcription): antisense; note = sgRNA Position: 20858787; note = Sequence Name: 56322-704_101_SL_seq_5966
cccgcgagcgcccgacctca

SEQ ID NO: 5967 - DNA, 20 bp, Homo sapiens
  source 1..20: mol_type = genomic DNA; note = Gene: PI4KA; note = Location (start to end; relative to TSS): PI4KA_57_87; note = Orientation (relative to transcription): antisense; note = sgRNA Position: 20858750; note = Sequence Name: 56322-704_101_SL_seq_5967
cgagccgcggcgctgcccgc

SEQ ID NO: 5968 - DNA, 20 bp, Homo sapiens
  source 1..20: mol_type = genomic DNA; note = Gene: PI4KA; note = Location (start to end; relative to TSS): PI4KA_23_53; note = Orientation (relative to transcription): sense; note = sgRNA Position: 20858764; note = Sequence Name: 56322-704_101_SL_seq_5968
gcgctcgcgggccaggagcg

SEQ ID NO: 5969 - DNA, 20 bp, Homo sapiens
  source 1..20: mol_type = genomic DNA; note = Gene: PI4KA; note = Location (start to end; relative to TSS): PI4KA_53_83; note = Orientation (relative to transcription): sense; note = sgRNA Position: 20858734; note = Sequence Name: 56322-704_101_SL_seq_5969
gggcagcgccgcggctcgtg

SEQ ID NO: 5970 - DNA, 20 bp, Homo sapiens
  source 1..20: mol_type = genomic DNA; note = Gene: PI4KB; note = Location (start to end; relative to TSS): PI4KB_40_70; note = Orientation (relative to transcription): sense; note = sgRNA Position: 151327352; note = Sequence Name: 56322-704_101_SL_seq_5970
cggccaatggaacccgggag

SEQ ID NO: 5971 - DNA, 20 bp, Homo sapiens
  source 1..20: mol_type = genomic DNA; note = Gene: PI4KB; note = Location (start to end; relative to TSS): PI4KB_102_132; note = Orientation (relative to transcription): sense; note = sgRNA Position: 151327290; note = Sequence Name: 56322-704_101_SL_seq_5971
gactgcccgcaccccctccg

SEQ ID NO: 5972 - DNA, 20 bp, Homo sapiens
  source 1..20: mol_type = genomic DNA; note = Gene: PI4KB; note = Location (start to end; relative to TSS): PI4KB_34_64; note = Orientation (relative to transcription): sense; note = sgRNA Position: 151327358; note = Sequence Name: 56322-704_101_SL_seq_5972
cgcaggcggccaatggaacc

SEQ ID NO: 5973 - DNA, 20 bp, Homo sapiens
  source 1..20: mol_type = genomic DNA; note = Gene: PI4KB; note = Location (start to end; relative to TSS): PI4KB_67_97; note = Orientation (relative to transcription): sense; note = sgRNA Position: 151327325; note = Sequence Name: 56322-704_101_SL_seq_5973
tgctgctgaggcggcagtgt

SEQ ID NO: 5974 - DNA, 20 bp, Homo sapiens
  source 1..20: mol_type = genomic DNA; note = Gene: PI4KB; note = Location (start to end; relative to TSS): PI4KB_27_57; note = Orientation (relative to transcription): sense; note = sgRNA Position: 151327365; note = Sequence Name: 56322-704_101_SL_seq_5974
agggaagcgcaggcggccaa

SEQ ID NO: 5975 - DNA, 20 bp, Homo sapiens
  source 1..20: mol_type = genomic DNA; note = Gene: PI4KB; note = Location (start to end; relative to TSS): PI4KB_61_91; note = Orientation (relative to transcription): antisense; note = sgRNA Position: 151327351; note = Sequence Name: 56322-704_101_SL_seq_5975
cagcagcagcgaccgctccc

SEQ ID NO: 5976 - DNA, 20 bp, Homo sapiens
  source 1..20: mol_type = genomic DNA; note = Gene: PI4KB; note = Location (start to end; relative to TSS): PI4KB_28_58; note = Orientation (relative to transcription): antisense; note = sgRNA Position: 151327384; note = Sequence Name: 56322-704_101_SL_seq_5976
cgcctgcgcttccctgacag

SEQ ID NO: 5977 - DNA, 20 bp, Homo sapiens
  source 1..20: mol_type = genomic DNA; note = Gene: PI4KB; note = Location (start to end; relative to TSS): PI4KB_58_88; note = Orientation (relative to transcription): sense; note = sgRNA Position: 151327334; note = Sequence Name: 56322-704_101_SL_seq_5977
agcggtcgctgctgctgagg

SEQ ID NO: 5978 - DNA, 20 bp, Homo sapiens
  source 1..20: mol_type = genomic DNA; note = Gene: PI4KB; note = Location (start to end; relative to TSS): PI4KB_19_49; note = Orientation (relative to transcription): antisense; note = sgRNA Position: 151327393; note = Sequence Name: 56322-704_101_SL_seq_5978
ttccctgacagcggccgcgg

SEQ ID NO: 5979 - DNA, 20 bp, Homo sapiens
  source 1..20: mol_type = genomic DNA; note = Gene: PI4KB; note = Location (start to end; relative to TSS): PI4KB_52_82; note = Orientation (relative to transcription): antisense; note = sgRNA Position: 151327360; note = Sequence Name: 56322-704_101_SL_seq_5979
cgaccgctcccgggttccat

SEQ ID NO: 5980 - DNA, 20 bp, Homo sapiens
  source 1..20: mol_type = genomic DNA; note = Gene: PIK3C2A; note = Location (start to end; relative to TSS): PIK3C2A_37_67; note = Orientation (relative to transcription): sense; note = sgRNA Position: 17207925; note = Sequence Name: 56322-704_101_SL_seq_5980
cggcggctgagccagctgag

SEQ ID NO: 5981 - DNA, 20 bp, Homo sapiens
  source 1..20: mol_type = genomic DNA; note = Gene: PIK3C2A; note = Location (start to end; relative to TSS): PIK3C2A_81_111; note = Orientation (relative to transcription): sense; note = sgRNA Position: 17207881; note = Sequence Name: 56322-704_101_SL_seq_5981
ggcttcggcggctcaggttg

SEQ ID NO: 5982 - DNA, 20 bp, Homo sapiens
  source 1..20: mol_type = genomic DNA; note = Gene: PIK3C2A; note = Location (start to end; relative to TSS): PIK3C2A_33_63; note = Orientation (relative to transcription): antisense; note = sgRNA Position: 17207949; note = Sequence Name: 56322-704_101_SL_seq_5982
tcagccgccgccgaaagctt

SEQ ID NO: 5983 - DNA, 20 bp, Homo sapiens
  source 1..20: mol_type = genomic DNA; note = Gene: PIK3C2A; note = Location (start to end; relative to TSS): PIK3C2A_75_105; note = Orientation (relative to transcription): sense; note = sgRNA Position: 17207887; note = Sequence Name: 56322-704_101_SL_seq_5983
tgtggcggcttcggcggctc

SEQ ID NO: 5984 - DNA, 20 bp, Homo sapiens
  source 1..20: mol_type = genomic DNA; note = Gene: PIK3C2A; note = Location (start to end; relative to TSS): PIK3C2A_35_65; note = Orientation (relative to transcription): sense; note = sgRNA Position: 17207927; note = Sequence Name: 56322-704_101_SL_seq_5984
ggcggcggctgagccagctg

SEQ ID NO: 5985 - DNA, 20 bp, Homo sapiens
  source 1..20: mol_type = genomic DNA; note = Gene: PIK3C2A; note = Location (start to end; relative to TSS): PIK3C2A_69_99; note = Orientation (relative to transcription): sense; note = sgRNA Position: 17207893; note = Sequence Name: 56322-704_101_SL_seq_5985
tcggactgtggcggcttcgg

SEQ ID NO: 5986 - DNA, 20 bp, Homo sapiens
  source 1..20: mol_type = genomic DNA; note = Gene: PIK3C2A; note = Location (start to end; relative to TSS): PIK3C2A_36_66; note = Orientation (relative to transcription): sense; note = sgRNA Position: 17207926; note = Sequence Name: 56322-704_101_SL_seq_5986
gcggcggctgagccagctga

SEQ ID NO: 5987 - DNA, 20 bp, Homo sapiens
  source 1..20: mol_type = genomic DNA; note = Gene: PIK3C2A; note = Location (start to end; relative to TSS): PIK3C2A_66_96; note = Orientation (relative to transcription): sense; note = sgRNA Position: 17207896; note = Sequence Name: 56322-704_101_SL_seq_5987
ggctcggactgtggcggctt

SEQ ID NO: 5988 - DNA, 20 bp, Homo sapiens
  source 1..20: mol_type = genomic DNA; note = Gene: PIK3C2A; note = Location (start to end; relative to TSS): PIK3C2A_20_50; note = Orientation (relative to transcription): sense; note = sgRNA Position: 17207942; note = Sequence Name: 56322-704_101_SL_seq_5988
tcggccgaagctttcggcgg

SEQ ID NO: 5989 - DNA, 20 bp, Homo sapiens
  source 1..20: mol_type = genomic DNA; note = Gene: PIK3C2A; note = Location (start to end; relative to TSS): PIK3C2A_50_80; note = Orientation (relative to transcription): sense; note = sgRNA Position: 17207912; note = Sequence Name: 56322-704_101_SL_seq_5989
agctgaggggaaaaatggct

SEQ ID NO: 5990 - DNA, 20 bp, Homo sapiens
  source 1..20: mol_type = genomic DNA; note = Gene: PIK3C2B; note = Location (start to end; relative to TSS): PIK3C2B_19_49; note = Orientation (relative to transcription): sense; note = sgRNA Position: 204494762; note = Sequence Name: 56322-704_101_SL_seq_5990
ggccgggtgcctgcctgtcc

SEQ ID NO: 5991 - DNA, 20 bp, Homo sapiens
  source 1..20: mol_type = genomic DNA; note = Gene: PIK3C2B; note = Location (start to end; relative to TSS): PIK3C2B_76_106; note = Orientation (relative to transcription): antisense; note = sgRNA Position: 204494725; note = Sequence Name: 56322-704_101_SL_seq_5991
cggacacccggcgcactgca

SEQ ID NO: 5992 - DNA, 20 bp, Homo sapiens
  source 1..20: mol_type = genomic DNA; note = Gene: PIK3C2B; note = Location (start to end; relative to TSS): PIK3C2B_23_53; note = Orientation (relative to transcription): antisense; note = sgRNA Position: 204494778; note = Sequence Name: 56322-704_101_SL_seq_5992
acaggcaggcacccggccgc

SEQ ID NO: 5993 - DNA, 20 bp, Homo sapiens
  source 1..20: mol_type = genomic DNA; note = Gene: PIK3C2B; note = Location (start to end; relative to TSS): PIK3C2B_75_105; note = Orientation (relative to transcription): sense; note = sgRNA Position: 204494706; note = Sequence Name: 56322-704_101_SL_seq_5993
tgcgccgggtgtccgggaga

SEQ ID NO: 5994 - DNA, 20 bp, Homo sapiens
  source 1..20: mol_type = genomic DNA; note = Gene: PIK3C2B; note = Location (start to end; relative to TSS): PIK3C2B_24_54; note = Orientation (relative to transcription): sense; note = sgRNA Position: 204494757; note = Sequence Name: 56322-704_101_SL_seq_5994
ggtgcctgcctgtccaggca

SEQ ID NO: 5995 - DNA, 20 bp, Homo sapiens
  source 1..20: mol_type = genomic DNA; note = Gene: PIK3C2B; note = Location (start to end; relative to TSS): PIK3C2B_69_99; note = Orientation (relative to transcription): sense; note = sgRNA Position: 204494712; note = Sequence Name: 56322-704_101_SL_seq_5995
gtgcagtgcgccgggtgtcc

SEQ ID NO: 5996 - DNA, 20 bp, Homo sapiens
  source 1..20: mol_type = genomic DNA; note = Gene: PIK3C2B; note = Location (start to end; relative to TSS): PIK3C2B_29_59; note = Orientation (relative to transcription): sense; note = sgRNA Position: 204494752; note = Sequence Name: 56322-704_101_SL_seq_5996
ctgcctgtccaggcagggtc

SEQ ID NO: 5997 - DNA, 20 bp, Homo sapiens
  source 1..20: mol_type = genomic DNA; note = Gene: PIK3C2B; note = Location (start to end; relative to TSS): PIK3C2B_68_98; note = Orientation (relative to transcription): sense; note = sgRNA Position: 204494713; note = Sequence Name: 56322-704_101_SL_seq_5997
cgtgcagtgcgccgggtgtc

SEQ ID NO: 5998 - DNA, 20 bp, Homo sapiens
  source 1..20: mol_type = genomic DNA; note = Gene: PIK3C2B; note = Location (start to end; relative to TSS): PIK3C2B_30_60; note = Orientation (relative to transcription): antisense; note = sgRNA Position: 204494771; note = Sequence Name: 56322-704_101_SL_seq_5998
tgcctggacaggcaggcacc

SEQ ID NO: 5999 - DNA, 20 bp, Homo sapiens
  source 1..20: mol_type = genomic DNA; note = Gene: PIK3C2B; note = Location (start to end; relative to TSS): PIK3C2B_61_91; note = Orientation (relative to transcription): sense; note = sgRNA Position: 204494720; note = Sequence Name: 56322-704_101_SL_seq_5999
gcgtcgccgtgcagtgcgcc

SEQ ID NO: 6000 - DNA, 20 bp, Homo sapiens
  source 1..20: mol_type = genomic DNA; note = Gene: PIK3C2G; note = Location (start to end; relative to TSS): PIK3C2G_85_115; note = Orientation (relative to transcription): antisense; note = sgRNA Position: 18261609; note = Sequence Name: 56322-704_101_SL_seq_6000
catgctatgtagttaagtat

SEQ ID NO: 6001 - DNA, 20 bp, Homo sapiens
  source 1..20: mol_type = genomic DNA; note = Gene: PIK3C2G; note = Location (start to end; relative to TSS): PIK3C2G_227_257; note = Orientation (relative to transcription): antisense; note = sgRNA Position: 18261751; note = Sequence Name: 56322-704_101_SL_seq_6001
tttggggaatatttacaagc

SEQ ID NO: 6002 - DNA, 20 bp, Homo sapiens
  source 1..20: mol_type = genomic DNA; note = Gene: PIK3C2G; note = Location (start to end; relative to TSS): PIK3C2G_104_134; note = Orientation (relative to transcription): sense; note = sgRNA Position: 18261648; note = Sequence Name: 56322-704_101_SL_seq_6002
tcgactcaaatatattattg

SEQ ID NO: 6003 - DNA, 20 bp, Homo sapiens
  source 1..20: mol_type = genomic DNA; note = Gene: PIK3C2G; note = Location (start to end; relative to TSS): PIK3C2G_142_172; note = Orientation (relative to transcription): sense; note = sgRNA Position: 18261686; note = Sequence Name: 56322-704_101_SL_seq_6003
attatactgtgatacaaaaa

SEQ ID NO: 6004 - DNA, 20 bp, Homo sapiens
  source 1..20: mol_type = genomic DNA; note = Gene: PIK3C2G; note = Location (start to end; relative to TSS): PIK3C2G_29_59; note = Orientation (relative to transcription): sense; note = sgRNA Position: 18261573; note = Sequence Name: 56322-704_101_SL_seq_6004
ttcaggaagatatatgcgtc

SEQ ID NO: 6005 - DNA, 20 bp, Homo sapiens
  source 1..20: mol_type = genomic DNA; note = Gene: PIK3C2G; note = Location (start to end; relative to TSS): PIK3C2G_104_134; note = Orientation (relative to transcription): sense; note = sgRNA Position: 18261648; note = Sequence Name: 56322-704_101_SL_seq_6005
tcgactcaaatatattattg

SEQ ID NO: 6006 - DNA, 20 bp, Homo sapiens
  source 1..20: mol_type = genomic DNA; note = Gene: PIK3C2G; note = Location (start to end; relative to TSS): PIK3C2G_-34_-4; note = Orientation (relative to transcription): antisense; note = sgRNA Position: 18261490; note = Sequence Name: 56322-704_101_SL_seq_6006
ctaaaacacttctatttcaa

SEQ ID NO: 6007 - DNA, 20 bp, Homo sapiens
  source 1..20: mol_type = genomic DNA; note = Gene: PIK3C2G; note = Location (start to end; relative to TSS): PIK3C2G_85_115; note = Orientation (relative to transcription): antisense; note = sgRNA Position: 18261609; note = Sequence Name: 56322-704_101_SL_seq_6007
catgctatgtagttaagtat

SEQ ID NO: 6008 - DNA, 20 bp, Homo sapiens
  source 1..20: mol_type = genomic DNA; note = Gene: PIK3C2G; note = Location (start to end; relative to TSS): PIK3C2G_-53_-23; note = Orientation (relative to transcription): antisense; note = sgRNA Position: 18261471; note = Sequence Name: 56322-704_101_SL_seq_6008
agggaacgtgatgcttccac

SEQ ID NO: 6009 - DNA, 20 bp, Homo sapiens
  source 1..20: mol_type = genomic DNA; note = Gene: PIK3C2G; note = Location (start to end; relative to TSS): PIK3C2G_29_59; note = Orientation (relative to transcription): sense; note = sgRNA Position: 18261573; note = Sequence Name: 56322-704_101_SL_seq_6009
ttcaggaagatatatgcgtc

SEQ ID NO: 6010 - DNA, 20 bp, Homo sapiens
  source 1..20: mol_type = genomic DNA; note = Gene: PIK3C3; note = Location (start to end; relative to TSS): PIK3C3_32_62; note = Orientation (relative to transcription): sense; note = sgRNA Position: 41955292; note = Sequence Name: 56322-704_101_SL_seq_6010
cctttgcagacggtgcgatg

SEQ ID NO: 6011 - DNA, 20 bp, Homo sapiens
  source 1..20: mol_type = genomic DNA; note = Gene: PIK3C3; note = Location (start to end; relative to TSS): PIK3C3_114_144; note = Orientation (relative to transcription): antisense; note = sgRNA Position: 41955354; note = Sequence Name: 56322-704_101_SL_seq_6011
tgttctcttacatcttaagc

SEQ ID NO: 6012 - DNA, 20 bp, Homo sapiens
  source 1..20: mol_type = genomic DNA; note = Gene: PIK3C3; note = Location (start to end; relative to TSS): PIK3C3_31_61; note = Orientation (relative to transcription): sense; note = sgRNA Position: 41955291; note = Sequence Name: 56322-704_101_SL_seq_6012
acctttgcagacggtgcgat

SEQ ID NO: 6013 - DNA, 20 bp, Homo sapiens
  source 1..20: mol_type = genomic DNA; note = Gene: PIK3C3; note = Location (start to end; relative to TSS): PIK3C3_111_141; note = Orientation (relative to transcription): sense; note = sgRNA Position: 41955371; note = Sequence Name: 56322-704_101_SL_seq_6013
taagatgtaagagaacactc

SEQ ID NO: 6014 - DNA, 20 bp, Homo sapiens
  source 1..20: mol_type = genomic DNA; note = Gene: PIK3C3; note = Location (start to end; relative to TSS): PIK3C3_30_60; note = Orientation (relative to transcription): sense; note = sgRNA Position: 41955290; note = Sequence Name: 56322-704_101_SL_seq_6014
tacctttgcagacggtgcga

SEQ ID NO: 6015 - DNA, 20 bp, Homo sapiens
  source 1..20: mol_type = genomic DNA; note = Gene: PIK3C3; note = Location (start to end; relative to TSS): PIK3C3_110_140; note = Orientation (relative to transcription): sense; note = sgRNA Position: 41955370; note = Sequence Name: 56322-704_101_SL_seq_6015
ttaagatgtaagagaacact

SEQ ID NO: 6016 - DNA, 20 bp, Homo sapiens
  source 1..20: mol_type = genomic DNA; note = Gene: PIK3C3; note = Location (start to end; relative to TSS): PIK3C3_26_56; note = Orientation (relative to transcription): antisense; note = sgRNA Position: 41955266; note = Sequence Name: 56322-704_101_SL_seq_6016
tgcaaaggtaccacctacag

SEQ ID NO: 6017 - DNA, 20 bp, Homo sapiens
  source 1..20: mol_type = genomic DNA; note = Gene: PIK3C3; note = Location (start to end; relative to TSS): PIK3C3_99_129; note = Orientation (relative to transcription): antisense; note = sgRNA Position: 41955339; note = Sequence Name: 56322-704_101_SL_seq_6017
taagctggacgttgatatcc

SEQ ID NO: 6018 - DNA, 20 bp, Homo sapiens
  source 1..20: mol_type = genomic DNA; note = Gene: PIK3C3; note = Location (start to end; relative to TSS): PIK3C3_25_55; note = Orientation (relative to transcription): antisense; note = sgRNA Position: 41955265; note = Sequence Name: 56322-704_101_SL_seq_6018
gcaaaggtaccacctacagc

SEQ ID NO: 6019 - DNA, 20 bp, Homo sapiens
  source 1..20: mol_type = genomic DNA; note = Gene: PIK3C3; note = Location (start to end; relative to TSS): PIK3C3_72_102; note = Orientation (relative to transcription): sense; note = sgRNA Position: 41955332; note = Sequence Name: 56322-704_101_SL_seq_6019
ctacatctatagttgtgacc

SEQ ID NO: 6020 - DNA, 20 bp, Homo sapiens
  source 1..20: mol_type = genomic DNA; note = Gene: PIK3CA; note = Location (start to end; relative to TSS): PIK3CA_47_77; note = Orientation (relative to transcription): antisense; note = sgRNA Position: 179148410; note = Sequence Name: 56322-704_101_SL_seq_6020
agccccagtcccagcggccg

SEQ ID NO: 6021 - DNA, 20 bp, Homo sapiens
  source 1..20: mol_type = genomic DNA; note = Gene: PIK3CA; note = Location (start to end; relative to TSS): PIK3CA_89_119; note = Orientation (relative to transcription): sense; note = sgRNA Position: 179148472; note = Sequence Name: 56322-704_101_SL_seq_6021
ccggccgggcagctccggag

SEQ ID NO: 6022 - DNA, 20 bp, Homo sapiens
  source 1..20: mol_type = genomic DNA; note = Gene: PIK3CA; note = Location (start to end; relative to TSS): PIK3CA_36_66; note = Orientation (relative to transcription): sense; note = sgRNA Position: 179148419; note = Sequence Name: 56322-704_101_SL_seq_6022
tgccgcggccgctgggactg

SEQ ID NO: 6023 - DNA, 20 bp, Homo sapiens
  source 1..20: mol_type = genomic DNA; note = Gene: PIK3CA; note = Location (start to end; relative to TSS): PIK3CA_77_107; note = Orientation (relative to transcription): antisense; note = sgRNA Position: 179148440; note = Sequence Name: 56322-704_101_SL_seq_6023
gggcccgagccctgcctcgc

SEQ ID NO: 6024 - DNA, 20 bp, Homo sapiens
  source 1..20: mol_type = genomic DNA; note = Gene: PIK3CA; note = Location (start to end; relative to TSS): PIK3CA_42_72; note = Orientation (relative to transcription): sense; note = sgRNA Position: 179148425; note = Sequence Name: 56322-704_101_SL_seq_6024
ggccgctgggactggggctg

SEQ ID NO: 6025 - DNA, 20 bp, Homo sapiens
  source 1..20: mol_type = genomic DNA; note = Gene: PIK3CA; note = Location (start to end; relative to TSS): PIK3CA_74_104; note = Orientation (relative to transcription): antisense; note = sgRNA Position: 179148437; note = Sequence Name: 56322-704_101_SL_seq_6025
cccgagccctgcctcgccgg

SEQ ID NO: 6026 - DNA, 20 bp, Homo sapiens
  source 1..20: mol_type = genomic DNA; note = Gene: PIK3CA; note = Location (start to end; relative to TSS): PIK3CA_21_51; note = Orientation (relative to transcription): sense; note = sgRNA Position: 179148404; note = Sequence Name: 56322-704_101_SL_seq_6026
gtgtcgggctgctgctgccg

SEQ ID NO: 6027 - DNA, 20 bp, Homo sapiens
  source 1..20: mol_type = genomic DNA; note = Gene: PIK3CA; note = Location (start to end; relative to TSS): PIK3CA_59_89; note = Orientation (relative to transcription): sense; note = sgRNA Position: 179148442; note = Sequence Name: 56322-704_101_SL_seq_6027
ctggggccgccggcgaggca

SEQ ID NO: 6028 - DNA, 20 bp, Homo sapiens
  source 1..20: mol_type = genomic DNA; note = Gene: PIK3CA; note = Location (start to end; relative to TSS): PIK3CA_22_52; note = Orientation (relative to transcription): antisense; note = sgRNA Position: 179148385; note = Sequence Name: 56322-704_101_SL_seq_6028
gcagcagcccgacacctcag

SEQ ID NO: 6029 - DNA, 20 bp, Homo sapiens
  source 1..20: mol_type = genomic DNA; note = Gene: PIK3CA; note = Location (start to end; relative to TSS): PIK3CA_53_83; note = Orientation (relative to transcription): antisense; note = sgRNA Position: 179148416; note = Sequence Name: 56322-704_101_SL_seq_6029
ggccccagccccagtcccag

SEQ ID NO: 6030 - DNA, 20 bp, Homo sapiens
  source 1..20: mol_type = genomic DNA; note = Gene: PIK3CB; note = Location (start to end; relative to TSS): PIK3CB_46_76; note = Orientation (relative to transcription): antisense; note = sgRNA Position: 138834878; note = Sequence Name: 56322-704_101_SL_seq_6030
gctccgccgcagcgccgcac

SEQ ID NO: 6031 - DNA, 20 bp, Homo sapiens
  source 1..20: mol_type = genomic DNA; note = Gene: PIK3CB; note = Location (start to end; relative to TSS): PIK3CB_81_111; note = Orientation (relative to transcription): sense; note = sgRNA Position: 138834823; note = Sequence Name: 56322-704_101_SL_seq_6031
ggcgagtgtagtgctgcgcg

SEQ ID NO: 6032 - DNA, 20 bp, Homo sapiens
  source 1..20: mol_type = genomic DNA; note = Gene: PIK3CB; note = Location (start to end; relative to TSS): PIK3CB_39_69; note = Orientation (relative to transcription): sense; note = sgRNA Position: 138834865; note = Sequence Name: 56322-704_101_SL_seq_6032
tgtgcggcgctgcggcggag

SEQ ID NO: 6033 - DNA, 20 bp, Homo sapiens
  source 1..20: mol_type = genomic DNA; note = Gene: PIK3CB; note = Location (start to end; relative to TSS): PIK3CB_80_110; note = Orientation (relative to transcription): sense; note = sgRNA Position: 138834824; note = Sequence Name: 56322-704_101_SL_seq_6033
gggcgagtgtagtgctgcgc

SEQ ID NO: 6034 - DNA, 20 bp, Homo sapiens
  source 1..20: mol_type = genomic DNA; note = Gene: PIK3CB; note = Location (start to end; relative to TSS): PIK3CB_34_64; note = Orientation (relative to transcription): sense; note = sgRNA Position: 138834870; note = Sequence Name: 56322-704_101_SL_seq_6034
cggcctgtgcggcgctgcgg

SEQ ID NO: 6035 - DNA, 20 bp, Homo sapiens
  source 1..20: mol_type = genomic DNA; note = Gene: PIK3CB; note = Location (start to end; relative to TSS): PIK3CB_79_109; note = Orientation (relative to transcription): sense; note = sgRNA Position: 138834825; note = Sequence Name: 56322-704_101_SL_seq_6035
ggggcgagtgtagtgctgcg

SEQ ID NO: 6036 - DNA, 20 bp, Homo sapiens
  source 1..20: mol_type = genomic DNA; note = Gene: PIK3CB; note = Location (start to end; relative to TSS): PIK3CB_31_61; note = Orientation (relative to transcription): sense; note = sgRNA Position: 138834873; note = Sequence Name: 56322-704_101_SL_seq_6036
tgtcggcctgtgcggcgctg

SEQ ID NO: 6037 - DNA, 20 bp, Homo sapiens
  source 1..20: mol_type = genomic DNA; note = Gene: PIK3CB; note = Location (start to end; relative to TSS): PIK3CB_72_102; note = Orientation (relative to transcription): antisense; note = sgRNA Position: 138834852; note = Sequence Name: 56322-704_101_SL_seq_6037
tcgccccctccccactgcca

SEQ ID NO: 6038 - DNA, 20 bp, Homo sapiens
  source 1..20: mol_type = genomic DNA; note = Gene: PIK3CB; note = Location (start to end; relative to TSS): PIK3CB_23_53; note = Orientation (relative to transcription): sense; note = sgRNA Position: 138834881; note = Sequence Name: 56322-704_101_SL_seq_6038
gcgtgctctgtcggcctgtg

SEQ ID NO: 6039 - DNA, 20 bp, Homo sapiens
  source 1..20: mol_type = genomic DNA; note = Gene: PIK3CB; note = Location (start to end; relative to TSS): PIK3CB_53_83; note = Orientation (relative to transcription): sense; note = sgRNA Position: 138834851; note = Sequence Name: 56322-704_101_SL_seq_6039
gcggagcgggccatggcagt

SEQ ID NO: 6040 - DNA, 20 bp, Homo sapiens
  source 1..20: mol_type = genomic DNA; note = Gene: PIK3CD; note = Location (start to end; relative to TSS): PIK3CD_41_71; note = Orientation (relative to transcription): sense; note = sgRNA Position: 9651798; note = Sequence Name: 56322-704_101_SL_seq_6040
ccctgccagctgcgccggga

SEQ ID NO: 6041 - DNA, 20 bp, Homo sapiens
  source 1..20: mol_type = genomic DNA; note = Gene: PIK3CD; note = Location (start to end; relative to TSS): PIK3CD_76_106; note = Orientation (relative to transcription): sense; note = sgRNA Position: 9651833; note = Sequence Name: 56322-704_101_SL_seq_6041
gctggctgcgtcaggggagg

SEQ ID NO: 6042 - DNA, 20 bp, Homo sapiens
  source 1..20: mol_type = genomic DNA; note = Gene: PIK3CD; note = Location (start to end; relative to TSS): PIK3CD_42_72; note = Orientation (relative to transcription): antisense; note = sgRNA Position: 9651779; note = Sequence Name: 56322-704_101_SL_seq_6042
gcgcagctggcagggctggg

SEQ ID NO: 6043 - DNA, 20 bp, Homo sapiens
  source 1..20: mol_type = genomic DNA; note = Gene: PIK3CD; note = Location (start to end; relative to TSS): PIK3CD_73_103; note = Orientation (relative to transcription): sense; note = sgRNA Position: 9651830; note = Sequence Name: 56322-704_101_SL_seq_6043
gccgctggctgcgtcagggg

SEQ ID NO: 6044 - DNA, 20 bp, Homo sapiens
  source 1..20: mol_type = genomic DNA; note = Gene: PIK3CD; note = Location (start to end; relative to TSS): PIK3CD_37_67; note = Orientation (relative to transcription): sense; note = sgRNA Position: 9651794; note = Sequence Name: 56322-704_101_SL_seq_6044
ccagccctgccagctgcgcc

SEQ ID NO: 6045 - DNA, 20 bp, Homo sapiens
  source 1..20: mol_type = genomic DNA; note = Gene: PIK3CD; note = Location (start to end; relative to TSS): PIK3CD_68_98; note = Orientation (relative to transcription): sense; note = sgRNA Position: 9651825; note = Sequence Name: 56322-704_101_SL_seq_6045
cgatcgccgctggctgcgtc

SEQ ID NO: 6046 - DNA, 20 bp, Homo sapiens
  source 1..20: mol_type = genomic DNA; note = Gene: PIK3CD; note = Location (start to end; relative to TSS): PIK3CD_30_60; note = Orientation (relative to transcription): antisense; note = sgRNA Position: 9651767; note = Sequence Name: 56322-704_101_SL_seq_6046
gggctgggcggctctgctcg

SEQ ID NO: 6047 - DNA, 20 bp, Homo sapiens
  source 1..20: mol_type = genomic DNA; note = Gene: PIK3CD; note = Location (start to end; relative to TSS): PIK3CD_64_94; note = Orientation (relative to transcription): antisense; note = sgRNA Position: 9651801; note = Sequence Name: 56322-704_101_SL_seq_6047
gcggcgatcgcttaccgtcc

SEQ ID NO: 6048 - DNA, 20 bp, Homo sapiens
  source 1..20: mol_type = genomic DNA; note = Gene: PIK3CD; note = Location (start to end; relative to TSS): PIK3CD_22_52; note = Orientation (relative to transcription): antisense; note = sgRNA Position: 9651759; note = Sequence Name: 56322-704_101_SL_seq_6048
cggctctgctcgcggccgct

SEQ ID NO: 6049 - DNA, 20 bp, Homo sapiens
  source 1..20: mol_type = genomic DNA; note = Gene: PIK3CD; note = Location (start to end; relative to TSS): PIK3CD_55_85; note = Orientation (relative to transcription): antisense; note = sgRNA Position: 9651792; note = Sequence Name: 56322-704_101_SL_seq_6049
gcttaccgtcccggcgcagc

SEQ ID NO: 6050 - DNA, 20 bp, Homo sapiens
  source 1..20: mol_type = genomic DNA; note = Gene: PIK3CG; note = Location (start to end; relative to TSS): PIK3CG_42_72; note = Orientation (relative to transcription): sense; note = sgRNA Position: 106865350; note = Sequence Name: 56322-704_101_SL_seq_6050
aatttagacgcacactgggt

SEQ ID NO: 6051 - DNA, 20 bp, Homo sapiens
  source 1..20: mol_type = genomic DNA; note = Gene: PIK3CG; note = Location (start to end; relative to TSS): PIK3CG_146_176; note = Orientation (relative to transcription): sense; note = sgRNA Position: 106865454; note = Sequence Name: 56322-704_101_SL_seq_6051
cttctattttttgctctttg

SEQ ID NO: 6052 - DNA, 20 bp, Homo sapiens
  source 1..20: mol_type = genomic DNA; note = Gene: PIK3CG; note = Location (start to end; relative to TSS): PIK3CG_38_68; note = Orientation (relative to transcription): sense; note = sgRNA Position: 106865346; note = Sequence Name: 56322-704_101_SL_seq_6052
gaagaatttagacgcacact

SEQ ID NO: 6053 - DNA, 20 bp, Homo sapiens
  source 1..20: mol_type = genomic DNA; note = Gene: PIK3CG; note = Location (start to end; relative to TSS): PIK3CG_130_160; note = Orientation (relative to transcription): antisense; note = sgRNA Position: 106865418; note = Sequence Name: 56322-704_101_SL_seq_6053
agcaatacctgataaagcag

SEQ ID NO: 6054 - DNA, 20 bp, Homo sapiens
  source 1..20: mol_type = genomic DNA; note = Gene: PIK3CG; note = Location (start to end; relative to TSS): PIK3CG_37_67; note = Orientation (relative to transcription): sense; note = sgRNA Position: 106865345; note = Sequence Name: 56322-704_101_SL_seq_6054
ggaagaatttagacgcacac

SEQ ID NO: 6055 - DNA, 20 bp, Homo sapiens
  source 1..20: mol_type = genomic DNA; note = Gene: PIK3CG; note = Location (start to end; relative to TSS): PIK3CG_127_157; note = Orientation (relative to transcription): antisense; note = sgRNA Position: 106865415; note = Sequence Name: 56322-704_101_SL_seq_6055
aatacctgataaagcagcgg

SEQ ID NO: 6056 - DNA, 20 bp, Homo sapiens
  source 1..20: mol_type = genomic DNA; note = Gene: PIK3CG; note = Location (start to end; relative to TSS): PIK3CG_34_64; note = Orientation (relative to transcription): antisense; note = sgRNA Position: 106865322; note = Sequence Name: 56322-704_101_SL_seq_6056
taaattcttccgcttttctg

SEQ ID NO: 6057 - DNA, 20 bp, Homo sapiens
  source 1..20: mol_type = genomic DNA; note = Gene: PIK3CG; note = Location (start to end; relative to TSS): PIK3CG_114_144; note = Orientation (relative to transcription): sense; note = sgRNA Position: 106865422; note = Sequence Name: 56322-704_101_SL_seq_6057
atcgcctccgctgctttatc

SEQ ID NO: 6058 - DNA, 20 bp, Homo sapiens
  source 1..20: mol_type = genomic DNA; note = Gene: PIK3CG; note = Location (start to end; relative to TSS): PIK3CG_16_46; note = Orientation (relative to transcription): sense; note = sgRNA Position: 106865324; note = Sequence Name: 56322-704_101_SL_seq_6058
tgaagggagccccagaaaag

SEQ ID NO: 6059 - DNA, 20 bp, Homo sapiens
  source 1..20: mol_type = genomic DNA; note = Gene: PIK3CG; note = Location (start to end; relative to TSS): PIK3CG_112_142; note = Orientation (relative to transcription): antisense; note = sgRNA Position: 106865400; note = Sequence Name: 56322-704_101_SL_seq_6059
agcggaggcgatgatgctga

SEQ ID NO: 6060 - DNA, 20 bp, Homo sapiens
  source 1..20: mol_type = genomic DNA; note = Gene: PIK3R4; note = Location (start to end; relative to TSS): PIK3R4_45_75; note = Orientation (relative to transcription): sense; note = sgRNA Position: 130746760; note = Sequence Name: 56322-704_101_SL_seq_6060
gctgaagtgtagtgttttct

SEQ ID NO: 6061 - DNA, 20 bp, Homo sapiens
  source 1..20: mol_type = genomic DNA; note = Gene: PIK3R4; note = Location (start to end; relative to TSS): PIK3R4_96_126; note = Orientation (relative to transcription): sense; note = sgRNA Position: 130746709; note = Sequence Name: 56322-704_101_SL_seq_6061
ttccatctccccccgcccgg

SEQ ID NO: 6062 - DNA, 20 bp, Homo sapiens
  source 1..20: mol_type = genomic DNA; note = Gene: PIK3R4; note = Location (start to end; relative to TSS): PIK3R4_51_81; note = Orientation (relative to transcription): sense; note = sgRNA Position: 130746754; note = Sequence Name: 56322-704_101_SL_seq_6062
gtgtagtgttttcttgggac

SEQ ID NO: 6063 - DNA, 20 bp, Homo sapiens
  source 1..20: mol_type = genomic DNA; note = Gene: PIK3R4; note = Location (start to end; relative to TSS): PIK3R4_93_123; note = Orientation (relative to transcription): sense; note = sgRNA Position: 130746712; note = Sequence Name: 56322-704_101_SL_seq_6063
gggttccatctccccccgcc

SEQ ID NO: 6064 - DNA, 20 bp, Homo sapiens
  source 1..20: mol_type = genomic DNA; note = Gene: PIK3R4; note = Location (start to end; relative to TSS): PIK3R4_22_52; note = Orientation (relative to transcription): antisense; note = sgRNA Position: 130746803; note = Sequence Name: 56322-704_101_SL_seq_6064
cccagcaaacgccgaactcc

SEQ ID NO: 6065 - DNA, 20 bp, Homo sapiens
  source 1..20: mol_type = genomic DNA; note = Gene: PIK3R4; note = Location (start to end; relative to TSS): PIK3R4_54_84; note = Orientation (relative to transcription): sense; note = sgRNA Position: 130746751; note = Sequence Name: 56322-704_101_SL_seq_6065
tagtgttttcttgggactgg

SEQ ID NO: 6066 - DNA, 20 bp, Homo sapiens
  source 1..20: mol_type = genomic DNA; note = Gene: PIK3R4; note = Location (start to end; relative to TSS): PIK3R4_21_51; note = Orientation (relative to transcription): antisense; note = sgRNA Position: 130746804; note = Sequence Name: 56322-704_101_SL_seq_6066
ccagcaaacgccgaactccc

SEQ ID NO: 6067 - DNA, 20 bp, Homo sapiens
  source 1..20: mol_type = genomic DNA; note = Gene: PIK3R4; note = Location (start to end; relative to TSS): PIK3R4_51_81; note = Orientation (relative to transcription): sense; note = sgRNA Position: 130746754; note = Sequence Name: 56322-704_101_SL_seq_6067
gtgtagtgttttcttgggac

SEQ ID NO: 6068 - DNA, 20 bp, Homo sapiens
  source 1..20: mol_type = genomic DNA; note = Gene: PIK3R4; note = Location (start to end; relative to TSS): PIK3R4_14_44; note = Orientation (relative to transcription): sense; note = sgRNA Position: 130746791; note = Sequence Name: 56322-704_101_SL_seq_6068
cgggagttcggcgtttgctg

SEQ ID NO: 6069 - DNA, 20 bp, Homo sapiens
  source 1..20: mol_type = genomic DNA; note = Gene: PIK3R4; note = Location (start to end; relative to TSS): PIK3R4_46_76; note = Orientation (relative to transcription): sense; note = sgRNA Position: 130746759; note = Sequence Name: 56322-704_101_SL_seq_6069
ctgaagtgtagtgttttctt

SEQ ID NO: 6070 - DNA, 20 bp, Homo sapiens
  source 1..20: mol_type = genomic DNA; note = Gene: PIKFYVE; note = Location (start to end; relative to TSS): PIKFYVE_45_75; note = Orientation (relative to transcription): antisense; note = sgRNA Position: 208266306; note = Sequence Name: 56322-704_101_SL_seq_6070
tgggctcctcaggccgcgga

SEQ ID NO: 6071 - DNA, 20 bp, Homo sapiens
  source 1..20: mol_type = genomic DNA; note = Gene: PIKFYVE; note = Location (start to end; relative to TSS): PIKFYVE_83_113; note = Orientation (relative to transcription): sense; note = sgRNA Position: 208266364; note = Sequence Name: 56322-704_101_SL_seq_6071
cgggggctgagccgttgaag

SEQ ID NO: 6072 - DNA, 20 bp, Homo sapiens
  source 1..20: mol_type = genomic DNA; note = Gene: PIKFYVE; note = Location (start to end; relative to TSS): PIKFYVE_39_69; note = Orientation (relative to transcription): antisense; note = sgRNA Position: 208266300; note = Sequence Name: 56322-704_101_SL_seq_6072
cctcaggccgcggacggttg

SEQ ID NO: 6073 - DNA, 20 bp, Homo sapiens
  source 1..20: mol_type = genomic DNA; note = Gene: PIKFYVE; note = Location (start to end; relative to TSS): PIKFYVE_71_101; note = Orientation (relative to transcription): antisense; note = sgRNA Position: 208266332; note = Sequence Name: 56322-704_101_SL_seq_6073
cggaagtcggcccccgagag

SEQ ID NO: 6074 - DNA, 20 bp, Homo sapiens
  source 1..20: mol_type = genomic DNA; note = Gene: PIKFYVE; note = Location (start to end; relative to TSS): PIKFYVE_35_65; note = Orientation (relative to transcription): antisense; note = sgRNA Position: 208266296; note = Sequence Name: 56322-704_101_SL_seq_6074
aggccgcggacggttgcggc

SEQ ID NO: 6075 - DNA, 20 bp, Homo sapiens
  source 1..20: mol_type = genomic DNA; note = Gene: PIKFYVE; note = Location (start to end; relative to TSS): PIKFYVE_65_95; note = Orientation (relative to transcription): sense; note = sgRNA Position: 208266346; note = Sequence Name: 56322-704_101_SL_seq_6075
ctctcgggggccgacttccg

SEQ ID NO: 6076 - DNA, 20 bp, Homo sapiens
  source 1..20: mol_type = genomic DNA; note = Gene: PIKFYVE; note = Location (start to end; relative to TSS): PIKFYVE_30_60; note = Orientation (relative to transcription): sense; note = sgRNA Position: 208266311; note = Sequence Name: 56322-704_101_SL_seq_6076
ccgcaaccgtccgcggcctg

SEQ ID NO: 6077 - DNA, 20 bp, Homo sapiens
  source 1..20: mol_type = genomic DNA; note = Gene: PIKFYVE; note = Location (start to end; relative to TSS): PIKFYVE_64_94; note = Orientation (relative to transcription): antisense; note = sgRNA Position: 208266325; note = Sequence Name: 56322-704_101_SL_seq_6077
cggcccccgagagcggcggt

SEQ ID NO: 6078 - DNA, 20 bp, Homo sapiens
  source 1..20: mol_type = genomic DNA; note = Gene: PIKFYVE; note = Location (start to end; relative to TSS): PIKFYVE_23_53; note = Orientation (relative to transcription): sense; note = sgRNA Position: 208266304; note = Sequence Name: 56322-704_101_SL_seq_6078
cttcctgccgcaaccgtccg

SEQ ID NO: 6079 - DNA, 20 bp, Homo sapiens
  source 1..20: mol_type = genomic DNA; note = Gene: PIKFYVE; note = Location (start to end; relative to TSS): PIKFYVE_55_85; note = Orientation (relative to transcription): antisense; note = sgRNA Position: 208266316; note = Sequence Name: 56322-704_101_SL_seq_6079
agagcggcggtgggctcctc

SEQ ID NO: 6080 - DNA, 20 bp, Homo sapiens
  source 1..20: mol_type = genomic DNA; note = Gene: PIM1; note = Location (start to end; relative to TSS): PIM1_35_65; note = Orientation (relative to transcription): sense; note = sgRNA Position: 37170213; note = Sequence Name: 56322-704_101_SL_seq_6080
ggtggctgaggaggcccgag

SEQ ID NO: 6081 - DNA, 20 bp, Homo sapiens
  source 1..20: mol_type = genomic DNA; note = Gene: PIM1; note = Location (start to end; relative to TSS): PIM1_93_123; note = Orientation (relative to transcription): antisense; note = sgRNA Position: 37170251; note = Sequence Name: 56322-704_101_SL_seq_6081
gctgctgctgctgctgctgc

SEQ ID NO: 6082 - DNA, 20 bp, Homo sapiens
  source 1..20: mol_type = genomic DNA; note = Gene: PIM1; note = Location (start to end; relative to TSS): PIM1_40_70; note = Orientation (relative to transcription): antisense; note = sgRNA Position: 37170198; note = Sequence Name: 56322-704_101_SL_seq_6082
tcgggcctcctcagccaccg

SEQ ID NO: 6083 - DNA, 20 bp, Homo sapiens
  source 1..20: mol_type = genomic DNA; note = Gene: PIM1; note = Location (start to end; relative to TSS): PIM1_93_123; note = Orientation (relative to transcription): antisense; note = sgRNA Position: 37170251; note = Sequence Name: 56322-704_101_SL_seq_6083
gctgctgctgctgctgctgc

SEQ ID NO: 6084 - DNA, 20 bp, Homo sapiens
  source 1..20: mol_type = genomic DNA; note = Gene: PIM1; note = Location (start to end; relative to TSS): PIM1_26_56; note = Orientation (relative to transcription): sense; note = sgRNA Position: 37170204; note = Sequence Name: 56322-704_101_SL_seq_6084
agcggccgcggtggctgagg

SEQ ID NO: 6085 - DNA, 20 bp, Homo sapiens
  source 1..20: mol_type = genomic DNA; note = Gene: PIM1; note = Location (start to end; relative to TSS): PIM1_56_86; note = Orientation (relative to transcription): sense; note = sgRNA Position: 37170234; note = Sequence Name: 56322-704_101_SL_seq_6085
ggagtcggtggcagcggcgg

SEQ ID NO: 6086 - DNA, 20 bp, Homo sapiens
  source 1..20: mol_type = genomic DNA; note = Gene: PIM1; note = Location (start to end; relative to TSS): PIM1_23_53; note = Orientation (relative to transcription): sense; note = sgRNA Position: 37170201; note = Sequence Name: 56322-704_101_SL_seq_6086
tgcagcggccgcggtggctg

SEQ ID NO: 6087 - DNA, 20 bp, Homo sapiens
  source 1..20: mol_type = genomic DNA; note = Gene: PIM1; note = Location (start to end; relative to TSS): PIM1_53_83; note = Orientation (relative to transcription): sense; note = sgRNA Position: 37170231; note = Sequence Name: 56322-704_101_SL_seq_6087
agaggagtcggtggcagcgg

SEQ ID NO: 6088 - DNA, 20 bp, Homo sapiens
  source 1..20: mol_type = genomic DNA; note = Gene: PIM1; note = Location (start to end; relative to TSS): PIM1_20_50; note = Orientation (relative to transcription): antisense; note = sgRNA Position: 37170178; note = Sequence Name: 56322-704_101_SL_seq_6088
cggccgctgcagcagacgcc

SEQ ID NO: 6089 - DNA, 20 bp, Homo sapiens
  source 1..20: mol_type = genomic DNA; note = Gene: PIM1; note = Location (start to end; relative to TSS): PIM1_50_80; note = Orientation (relative to transcription): sense; note = sgRNA Position: 37170228; note = Sequence Name: 56322-704_101_SL_seq_6089
ccgagaggagtcggtggcag

SEQ ID NO: 6090 - DNA, 20 bp, Homo sapiens
  source 1..20: mol_type = genomic DNA; note = Gene: PIM2; note = Location (start to end; relative to TSS): PIM2_61_91; note = Orientation (relative to transcription): sense; note = sgRNA Position: 48918939; note = Sequence Name: 56322-704_101_SL_seq_6090
agtttctctgctttccaccc

SEQ ID NO: 6091 - DNA, 20 bp, Homo sapiens
  source 1..20: mol_type = genomic DNA; note = Gene: PIM2; note = Location (start to end; relative to TSS): PIM2_95_125; note = Orientation (relative to transcription): antisense; note = sgRNA Position: 48918925; note = Sequence Name: 56322-704_101_SL_seq_6091
gctggggagccagggctggg

SEQ ID NO: 6092 - DNA, 20 bp, Homo sapiens
  source 1..20: mol_type = genomic DNA; note = Gene: PIM2; note = Location (start to end; relative to TSS): PIM2_22_52; note = Orientation (relative to transcription): sense; note = sgRNA Position: 48918978; note = Sequence Name: 56322-704_101_SL_seq_6092
tctcaacgctgcgccgtctg

SEQ ID NO: 6093 - DNA, 20 bp, Homo sapiens
  source 1..20: mol_type = genomic DNA; note = Gene: PIM2; note = Location (start to end; relative to TSS): PIM2_84_114; note = Orientation (relative to transcription): antisense; note = sgRNA Position: 48918936; note = Sequence Name: 56322-704_101_SL_seq_6093
agggctggggggcgccaggg

SEQ ID NO: 6094 - DNA, 20 bp, Homo sapiens
  source 1..20: mol_type = genomic DNA; note = Gene: PIM2; note = Location (start to end; relative to TSS): PIM2_23_53; note = Orientation (relative to transcription): sense; note = sgRNA Position: 48918977; note = Sequence Name: 56322-704_101_SL_seq_6094
ctcaacgctgcgccgtctgc

SEQ ID NO: 6095 - DNA, 20 bp, Homo sapiens
  source 1..20: mol_type = genomic DNA; note = Gene: PIM2; note = Location (start to end; relative to TSS): PIM2_77_107; note = Orientation (relative to transcription): sense; note = sgRNA Position: 48918923; note = Sequence Name: 56322-704_101_SL_seq_6095
accctggcgccccccagccc

SEQ ID NO: 6096 - DNA, 20 bp, Homo sapiens
  source 1..20: mol_type = genomic DNA; note = Gene: PIM2; note = Location (start to end; relative to TSS): PIM2_-5_25; note = Orientation (relative to transcription): sense; note = sgRNA Position: 48919005; note = Sequence Name: 56322-704_101_SL_seq_6096
agcattggggctggcgcgcg

SEQ ID NO: 6097 - DNA, 20 bp, Homo sapiens
  source 1..20: mol_type = genomic DNA; note = Gene: PIM2; note = Location (start to end; relative to TSS): PIM2_61_91; note = Orientation (relative to transcription): sense; note = sgRNA Position: 48918939; note = Sequence Name: 56322-704_101_SL_seq_6097
agtttctctgctttccaccc

SEQ ID NO: 6098 - DNA, 20 bp, Homo sapiens
  source 1..20: mol_type = genomic DNA; note = Gene: PIM2; note = Location (start to end; relative to TSS): PIM2_-7_23; note = Orientation (relative to transcription): antisense; note = sgRNA Position: 48919027; note = Sequence Name: 56322-704_101_SL_seq_6098
agccccaatgctactgagcc

SEQ ID NO: 6099 - DNA, 20 bp, Homo sapiens
  source 1..20: mol_type = genomic DNA; note = Gene: PIM2; note = Location (start to end; relative to TSS): PIM2_23_53; note = Orientation (relative to transcription): sense; note = sgRNA Position: 48918977; note = Sequence Name: 56322-704_101_SL_seq_6099
ctcaacgctgcgccgtctgc

SEQ ID NO: 6100 - DNA, 20 bp, Homo sapiens
  source 1..20: mol_type = genomic DNA; note = Gene: PIM3; note = Location (start to end; relative to TSS): PIM3_39_69; note = Orientation (relative to transcription): sense; note = sgRNA Position: 49960837; note = Sequence Name: 56322-704_101_SL_seq_6100
tccgggcccactgcgccgcg

SEQ ID NO: 6101 - DNA, 20 bp, Homo sapiens
  source 1..20: mol_type = genomic DNA; note = Gene: PIM3; note = Location (start to end; relative to TSS): PIM3_93_123; note = Orientation (relative to transcription): sense; note = sgRNA Position: 49960891; note = Sequence Name: 56322-704_101_SL_seq_6101
ggcgcgccgctcgcccggat

SEQ ID NO: 6102 - DNA, 20 bp, Homo sapiens
  source 1..20: mol_type = genomic DNA; note = Gene: PIM3; note = Location (start to end; relative to TSS): PIM3_37_67; note = Orientation (relative to transcription): antisense; note = sgRNA Position: 49960815; note = Sequence Name: 56322-704_101_SL_seq_6102
agtgggcccggaaggcccgc

SEQ ID NO: 6103 - DNA, 20 bp, Homo sapiens
  source 1..20: mol_type = genomic DNA; note = Gene: PIM3; note = Location (start to end; relative to TSS): PIM3_88_118; note = Orientation (relative to transcription): sense; note = sgRNA Position: 49960886; note = Sequence Name: 56322-704_101_SL_seq_6103
tccccggcgcgccgctcgcc

SEQ ID NO: 6104 - DNA, 20 bp, Homo sapiens
  source 1..20: mol_type = genomic DNA; note = Gene: PIM3; note = Location (start to end; relative to TSS): PIM3_36_66; note = Orientation (relative to transcription): antisense; note = sgRNA Position: 49960814; note = Sequence Name: 56322-704_101_SL_seq_6104
gtgggcccggaaggcccgcg

SEQ ID NO: 6105 - DNA, 20 bp, Homo sapiens
  source 1..20: mol_type = genomic DNA; note = Gene: PIM3; note = Location (start to end; relative to TSS): PIM3_75_105; note = Orientation (relative to transcription): antisense; note = sgRNA Position: 49960853; note = Sequence Name: 56322-704_101_SL_seq_6105
acaccggccgtccgagcccg

SEQ ID NO: 6106 - DNA, 20 bp, Homo sapiens
  source 1..20: mol_type = genomic DNA; note = Gene: PIM3; note = Location (start to end; relative to TSS): PIM3_38_68; note = Orientation (relative to transcription): antisense; note = sgRNA Position: 49960816; note = Sequence Name: 56322-704_101_SL_seq_6106
cagtgggcccggaaggcccg

SEQ ID NO: 6107 - DNA, 20 bp, Homo sapiens
  source 1..20: mol_type = genomic DNA; note = Gene: PIM3; note = Location (start to end; relative to TSS): PIM3_72_102; note = Orientation (relative to transcription): antisense; note = sgRNA Position: 49960850; note = Sequence Name: 56322-704_101_SL_seq_6107
ccggccgtccgagcccgagg

SEQ ID NO: 6108 - DNA, 20 bp, Homo sapiens
  source 1..20: mol_type = genomic DNA; note = Gene: PIM3; note = Location (start to end; relative to TSS): PIM3_22_52; note = Orientation (relative to transcription): sense; note = sgRNA Position: 49960820; note = Sequence Name: 56322-704_101_SL_seq_6108
gcggtccccgcgggccttcc

SEQ ID NO: 6109 - DNA, 20 bp, Homo sapiens
  source 1..20: mol_type = genomic DNA; note = Gene: PIM3; note = Location (start to end; relative to TSS): PIM3_54_84; note = Orientation (relative to transcription): antisense; note = sgRNA Position: 49960832; note = Sequence Name: 56322-704_101_SL_seq_6109
ggcggtccgcgcggcgcagt

SEQ ID NO: 6110 - DNA, 20 bp, Homo sapiens
  source 1..20: mol_type = genomic DNA; note = Gene: PINK1; note = Location (start to end; relative to TSS): PINK1_38_68; note = Orientation (relative to transcription): sense; note = sgRNA Position: 20633522; note = Sequence Name: 56322-704_101_SL_seq_6110
tggcggcagcggcggctgcg

SEQ ID NO: 6111 - DNA, 20 bp, Homo sapiens
  source 1..20: mol_type = genomic DNA; note = Gene: PINK1; note = Location (start to end; relative to TSS): PINK1_81_111; note = Orientation (relative to transcription): sense; note = sgRNA Position: 20633565; note = Sequence Name: 56322-704_101_SL_seq_6111
catggcggtgcgacaggcgc

SEQ ID NO: 6112 - DNA, 20 bp, Homo sapiens
  source 1..20: mol_type = genomic DNA; note = Gene: PINK1; note = Location (start to end; relative to TSS): PINK1_18_48; note = Orientation (relative to transcription): sense; note = sgRNA Position: 20633502; note = Sequence Name: 56322-704_101_SL_seq_6112
ccggcgggggacgccggtgg

SEQ ID NO: 6113 - DNA, 20 bp, Homo sapiens
  source 1..20: mol_type = genomic DNA; note = Gene: PINK1; note = Location (start to end; relative to TSS): PINK1_78_108; note = Orientation (relative to transcription): antisense; note = sgRNA Position: 20633542; note = Sequence Name: 56322-704_101_SL_seq_6113
gcaccgccatggtggcgccg

SEQ ID NO: 6114 - DNA, 20 bp, Homo sapiens
  source 1..20: mol_type = genomic DNA; note = Gene: PINK1; note = Location (start to end; relative to TSS): PINK1_21_51; note = Orientation (relative to transcription): sense; note = sgRNA Position: 20633505; note = Sequence Name: 56322-704_101_SL_seq_6114
gcgggggacgccggtggtgg

SEQ ID NO: 6115 - DNA, 20 bp, Homo sapiens
  source 1..20: mol_type = genomic DNA; note = Gene: PINK1; note = Location (start to end; relative to TSS): PINK1_75_105; note = Orientation (relative to transcription): sense; note = sgRNA Position: 20633559; note = Sequence Name: 56322-704_101_SL_seq_6115
cgccaccatggcggtgcgac

SEQ ID NO: 6116 - DNA, 20 bp, Homo sapiens
  source 1..20: mol_type = genomic DNA; note = Gene: PINK1; note = Location (start to end; relative to TSS): PINK1_27_57; note = Orientation (relative to transcription): antisense; note = sgRNA Position: 20633491; note = Sequence Name: 56322-704_101_SL_seq_6116
ccaccaccggcgtcccccgc

SEQ ID NO: 6117 - DNA, 20 bp, Homo sapiens
  source 1..20: mol_type = genomic DNA; note = Gene: PINK1; note = Location (start to end; relative to TSS): PINK1_66_96; note = Orientation (relative to transcription): sense; note = sgRNA Position: 20633550; note = Sequence Name: 56322-704_101_SL_seq_6117
gggccgcggcgccaccatgg

SEQ ID NO: 6118 - DNA, 20 bp, Homo sapiens
  source 1..20: mol_type = genomic DNA; note = Gene: PINK1; note = Location (start to end; relative to TSS): PINK1_30_60; note = Orientation (relative to transcription): sense; note = sgRNA Position: 20633514; note = Sequence Name: 56322-704_101_SL_seq_6118
gccggtggtggcggcagcgg

SEQ ID NO: 6119 - DNA, 20 bp, Homo sapiens
  source 1..20: mol_type = genomic DNA; note = Gene: PINK1; note = Location (start to end; relative to TSS): PINK1_63_93; note = Orientation (relative to transcription): sense; note = sgRNA Position: 20633547; note = Sequence Name: 56322-704_101_SL_seq_6119
accgggccgcggcgccacca

SEQ ID NO: 6120 - DNA, 20 bp, Homo sapiens
  source 1..20: mol_type = genomic DNA; note = Gene: PIP4K2A; note = Location (start to end; relative to TSS): PIP4K2A_45_75; note = Orientation (relative to transcription): antisense; note = sgRNA Position: 22714529; note = Sequence Name: 56322-704_101_SL_seq_6120
actgcgctcggctcgcgccc

SEQ ID NO: 6121 - DNA, 20 bp, Homo sapiens
  source 1..20: mol_type = genomic DNA; note = Gene: PIP4K2A; note = Location (start to end; relative to TSS): PIP4K2A_88_118; note = Orientation (relative to transcription): sense; note = sgRNA Position: 22714466; note = Sequence Name: 56322-704_101_SL_seq_6121
agtggggctgagcgcgccgg

SEQ ID NO: 6122 - DNA, 20 bp, Homo sapiens
  source 1..20: mol_type = genomic DNA; note = Gene: PIP4K2A; note = Location (start to end; relative to TSS): PIP4K2A_44_74; note = Orientation (relative to transcription): sense; note = sgRNA Position: 22714510; note = Sequence Name: 56322-704_101_SL_seq_6122
cgagccgagcgcagtctgcc

SEQ ID NO: 6123 - DNA, 20 bp, Homo sapiens
  source 1..20: mol_type = genomic DNA; note = Gene: PIP4K2A; note = Location (start to end; relative to TSS): PIP4K2A_85_115; note = Orientation (relative to transcription): sense; note = sgRNA Position: 22714469; note = Sequence Name: 56322-704_101_SL_seq_6123
ccgagtggggctgagcgcgc

SEQ ID NO: 6124 - DNA, 20 bp, Homo sapiens
  source 1..20: mol_type = genomic DNA; note = Gene: PIP4K2A; note = Location (start to end; relative to TSS): PIP4K2A_43_73; note = Orientation (relative to transcription): sense; note = sgRNA Position: 22714511; note = Sequence Name: 56322-704_101_SL_seq_6124
gcgagccgagcgcagtctgc

SEQ ID NO: 6125 - DNA, 20 bp, Homo sapiens
  source 1..20: mol_type = genomic DNA; note = Gene: PIP4K2A; note = Location (start to end; relative to TSS): PIP4K2A_76_106; note = Orientation (relative to transcription): antisense; note = sgRNA Position: 22714498; note = Sequence Name: 56322-704_101_SL_seq_6125
ctcggctcgctccgcccgct

SEQ ID NO: 6126 - DNA, 20 bp, Homo sapiens
  source 1..20: mol_type = genomic DNA; note = Gene: PIP4K2A; note = Location (start to end; relative to TSS): PIP4K2A_19_49; note = Orientation (relative to transcription): sense; note = sgRNA Position: 22714535; note = Sequence Name: 56322-704_101_SL_seq_6126
cgggcgcaggatacgggccg

SEQ ID NO: 6127 - DNA, 20 bp, Homo sapiens
  source 1..20: mol_type = genomic DNA; note = Gene: PIP4K2A; note = Location (start to end; relative to TSS): PIP4K2A_56_86; note = Orientation (relative to transcription): sense; note = sgRNA Position: 22714498; note = Sequence Name: 56322-704_101_SL_seq_6127
agtctgccgggccgagcggg

SEQ ID NO: 6128 - DNA, 20 bp, Homo sapiens
  source 1..20: mol_type = genomic DNA; note = Gene: PIP4K2A; note = Location (start to end; relative to TSS): PIP4K2A_22_52; note = Orientation (relative to transcription): antisense; note = sgRNA Position: 22714552; note = Sequence Name: 56322-704_101_SL_seq_6128
cccgtatcctgcgcccgccg

SEQ ID NO: 6129 - DNA, 20 bp, Homo sapiens
  source 1..20: mol_type = genomic DNA; note = Gene: PIP4K2A; note = Location (start to end; relative to TSS): PIP4K2A_52_82; note = Orientation (relative to transcription): sense; note = sgRNA Position: 22714502; note = Sequence Name: 56322-704_101_SL_seq_6129
gcgcagtctgccgggccgag

SEQ ID NO: 6130 - DNA, 20 bp, Homo sapiens
  source 1..20: mol_type = genomic DNA; note = Gene: PIP4K2B; note = Location (start to end; relative to TSS): PIP4K2B_28_58; note = Orientation (relative to transcription): sense; note = sgRNA Position: 38799504; note = Sequence Name: 56322-704_101_SL_seq_6130
gggggtggggatcggtccgg

SEQ ID NO: 6131 - DNA, 20 bp, Homo sapiens
  source 1..20: mol_type = genomic DNA; note = Gene: PIP4K2B; note = Location (start to end; relative to TSS): PIP4K2B_91_121; note = Orientation (relative to transcription): antisense; note = sgRNA Position: 38799461; note = Sequence Name: 56322-704_101_SL_seq_6131
gcggcgaaagaggggggcgg

SEQ ID NO: 6132 - DNA, 20 bp, Homo sapiens
  source 1..20: mol_type = genomic DNA; note = Gene: PIP4K2B; note = Location (start to end; relative to TSS): PIP4K2B_27_57; note = Orientation (relative to transcription): sense; note = sgRNA Position: 38799505; note = Sequence Name: 56322-704_101_SL_seq_6132
cgggggtggggatcggtccg

SEQ ID NO: 6133 - DNA, 20 bp, Homo sapiens
  source 1..20: mol_type = genomic DNA; note = Gene: PIP4K2B; note = Location (start to end; relative to TSS): PIP4K2B_70_100; note = Orientation (relative to transcription): antisense; note = sgRNA Position: 38799482; note = Sequence Name: 56322-704_101_SL_seq_6133
ggagacagcgcacaagccag

SEQ ID NO: 6134 - DNA, 20 bp, Homo sapiens
  source 1..20: mol_type = genomic DNA; note = Gene: PIP4K2B; note = Location (start to end; relative to TSS): PIP4K2B_26_56; note = Orientation (relative to transcription): sense; note = sgRNA Position: 38799506; note = Sequence Name: 56322-704_101_SL_seq_6134
gcgggggtggggatcggtcc

SEQ ID NO: 6135 - DNA, 20 bp, Homo sapiens
  source 1..20: mol_type = genomic DNA; note = Gene: PIP4K2B; note = Location (start to end; relative to TSS): PIP4K2B_63_93; note = Orientation (relative to transcription): antisense; note = sgRNA Position: 38799489; note = Sequence Name: 56322-704_101_SL_seq_6135
gcgcacaagccagcggcctc

SEQ ID NO: 6136 - DNA, 20 bp, Homo sapiens
  source 1..20: mol_type = genomic DNA; note = Gene: PIP4K2B; note = Location (start to end; relative to TSS): PIP4K2B_25_55; note = Orientation (relative to transcription): sense; note = sgRNA Position: 38799507; note = Sequence Name: 56322-704_101_SL_seq_6136
agcgggggtggggatcggtc

SEQ ID NO: 6137 - DNA, 20 bp, Homo sapiens
  source 1..20: mol_type = genomic DNA; note = Gene: PIP4K2B; note = Location (start to end; relative to TSS): PIP4K2B_63_93; note = Orientation (relative to transcription): antisense; note = sgRNA Position: 38799489; note = Sequence Name: 56322-704_101_SL_seq_6137
gcgcacaagccagcggcctc

SEQ ID NO: 6138 - DNA, 20 bp, Homo sapiens
  source 1..20: mol_type = genomic DNA; note = Gene: PIP4K2B; note = Location (start to end; relative to TSS): PIP4K2B_20_50; note = Orientation (relative to transcription): sense; note = sgRNA Position: 38799512; note = Sequence Name: 56322-704_101_SL_seq_6138
gagggagcgggggtggggat

SEQ ID NO: 6139 - DNA, 20 bp, Homo sapiens
  source 1..20: mol_type = genomic DNA; note = Gene: PIP4K2B; note = Location (start to end; relative to TSS): PIP4K2B_53_83; note = Orientation (relative to transcription): antisense; note = sgRNA Position: 38799499; note = Sequence Name: 56322-704_101_SL_seq_6139
cagcggcctcaggcctcccc

SEQ ID NO: 6140 - DNA, 20 bp, Homo sapiens
  source 1..20: mol_type = genomic DNA; note = Gene: PIP4K2C; note = Location (start to end; relative to TSS): PIP4K2C_47_77; note = Orientation (relative to transcription): antisense; note = sgRNA Position: 57591245; note = Sequence Name: 56322-704_101_SL_seq_6140
gccggagccggcagctatcc

SEQ ID NO: 6141 - DNA, 20 bp, Homo sapiens
  source 1..20: mol_type = genomic DNA; note = Gene: PIP4K2C; note = Location (start to end; relative to TSS): PIP4K2C_82_112; note = Orientation (relative to transcription): sense; note = sgRNA Position: 57591300; note = Sequence Name: 56322-704_101_SL_seq_6141
ggagactatggcgtcctcct

SEQ ID NO: 6142 - DNA, 20 bp, Homo sapiens
  source 1..20: mol_type = genomic DNA; note = Gene: PIP4K2C; note = Location (start to end; relative to TSS): PIP4K2C_37_67; note = Orientation (relative to transcription): sense; note = sgRNA Position: 57591255; note = Sequence Name: 56322-704_101_SL_seq_6142
gcctggatagctgccggctc

SEQ ID NO: 6143 - DNA, 20 bp, Homo sapiens
  source 1..20: mol_type = genomic DNA; note = Gene: PIP4K2C; note = Location (start to end; relative to TSS): PIP4K2C_70_100; note = Orientation (relative to transcription): sense; note = sgRNA Position: 57591288; note = Sequence Name: 56322-704_101_SL_seq_6143
gtcggttgcgcgggagacta

SEQ ID NO: 6144 - DNA, 20 bp, Homo sapiens
  source 1..20: mol_type = genomic DNA; note = Gene: PIP4K2C; note = Location (start to end; relative to TSS): PIP4K2C_34_64; note = Orientation (relative to transcription): antisense; note = sgRNA Position: 57591232; note = Sequence Name: 56322-704_101_SL_seq_6144
gctatccaggcgcccgaccc

SEQ ID NO: 6145 - DNA, 20 bp, Homo sapiens
  source 1..20: mol_type = genomic DNA; note = Gene: PIP4K2C; note = Location (start to end; relative to TSS): PIP4K2C_65_95; note = Orientation (relative to transcription): antisense; note = sgRNA Position: 57591263; note = Sequence Name: 56322-704_101_SL_seq_6145
gcaaccgaccaagtggaagc

SEQ ID NO: 6146 - DNA, 20 bp, Homo sapiens
  source 1..20: mol_type = genomic DNA; note = Gene: PIP4K2C; note = Location (start to end; relative to TSS): PIP4K2C_31_61; note = Orientation (relative to transcription): sense; note = sgRNA Position: 57591249; note = Sequence Name: 56322-704_101_SL_seq_6146
tcgggcgcctggatagctgc

SEQ ID NO: 6147 - DNA, 20 bp, Homo sapiens
  source 1..20: mol_type = genomic DNA; note = Gene: PIP4K2C; note = Location (start to end; relative to TSS): PIP4K2C_61_91; note = Orientation (relative to transcription): sense; note = sgRNA Position: 57591279; note = Sequence Name: 56322-704_101_SL_seq_6147
ttccacttggtcggttgcgc

SEQ ID NO: 6148 - DNA, 20 bp, Homo sapiens
  source 1..20: mol_type = genomic DNA; note = Gene: PIP4K2C; note = Location (start to end; relative to TSS): PIP4K2C_28_58; note = Orientation (relative to transcription): antisense; note = sgRNA Position: 57591226; note = Sequence Name: 56322-704_101_SL_seq_6148
caggcgcccgaccccggaag

SEQ ID NO: 6149 - DNA, 20 bp, Homo sapiens
  source 1..20: mol_type = genomic DNA; note = Gene: PIP4K2C; note = Location (start to end; relative to TSS): PIP4K2C_59_89; note = Orientation (relative to transcription): antisense; note = sgRNA Position: 57591257; note = Sequence Name: 56322-704_101_SL_seq_6149
gaccaagtggaagccggagc

SEQ ID NO: 6150 - DNA, 20 bp, Homo sapiens
  source 1..20: mol_type = genomic DNA; note = Gene: PIP5K1A; note = Location (start to end; relative to TSS): PIP5K1A_40_70; note = Orientation (relative to transcription): sense; note = sgRNA Position: 151198618; note = Sequence Name: 56322-704_101_SL_seq_6150
caggccgtggttaggaagga

SEQ ID NO: 6151 - DNA, 20 bp, Homo sapiens
  source 1..20: mol_type = genomic DNA; note = Gene: PIP5K1A; note = Location (start to end; relative to TSS): PIP5K1A_97_127; note = Orientation (relative to transcription): sense; note = sgRNA Position: 151198675; note = Sequence Name: 56322-704_101_SL_seq_6151
cctcgtttttttttcagatg

SEQ ID NO: 6152 - DNA, 20 bp, Homo sapiens
  source 1..20: mol_type = genomic DNA; note = Gene: PIP5K1A; note = Location (start to end; relative to TSS): PIP5K1A_32_62; note = Orientation (relative to transcription): antisense; note = sgRNA Position: 151198590; note = Sequence Name: 56322-704_101_SL_seq_6152
ggcctgttaatcgcccaacc

SEQ ID NO: 6153 - DNA, 20 bp, Homo sapiens
  source 1..20: mol_type = genomic DNA; note = Gene: PIP5K1A; note = Location (start to end; relative to TSS): PIP5K1A_88_118; note = Orientation (relative to transcription): antisense; note = sgRNA Position: 151198646; note = Sequence Name: 56322-704_101_SL_seq_6153
cgaggcatgaaaagtcccaa

SEQ ID NO: 6154 - DNA, 20 bp, Homo sapiens
  source 1..20: mol_type = genomic DNA; note = Gene: PIP5K1A; note = Location (start to end; relative to TSS): PIP5K1A_27_57; note = Orientation (relative to transcription): sense; note = sgRNA Position: 151198605; note = Sequence Name: 56322-704_101_SL_seq_6154
gttgggcgattaacaggccg

SEQ ID NO: 6155 - DNA, 20 bp, Homo sapiens
  source 1..20: mol_type = genomic DNA; note = Gene: PIP5K1A; note = Location (start to end; relative to TSS): PIP5K1A_64_94; note = Orientation (relative to transcription): sense; note = sgRNA Position: 151198642; note = Sequence Name: 56322-704_101_SL_seq_6155
gaaggggcgttcgctccttt

SEQ ID NO: 6156 - DNA, 20 bp, Homo sapiens
  source 1..20: mol_type = genomic DNA; note = Gene: PIP5K1A; note = Location (start to end; relative to TSS): PIP5K1A_21_51; note = Orientation (relative to transcription): sense; note = sgRNA Position: 151198599; note = Sequence Name: 56322-704_101_SL_seq_6156
ggccgggttgggcgattaac

SEQ ID NO: 6157 - DNA, 20 bp, Homo sapiens
  source 1..20: mol_type = genomic DNA; note = Gene: PIP5K1A; note = Location (start to end; relative to TSS): PIP5K1A_53_83; note = Orientation (relative to transcription): antisense; note = sgRNA Position: 151198611; note = Sequence Name: 56322-704_101_SL_seq_6157
ttctccgtccttcctaacca

SEQ ID NO: 6158 - DNA, 20 bp, Homo sapiens
  source 1..20: mol_type = genomic DNA; note = Gene: PIP5K1A; note = Location (start to end; relative to TSS): PIP5K1A_18_48; note = Orientation (relative to transcription): antisense; note = sgRNA Position: 151198576; note = Sequence Name: 56322-704_101_SL_seq_6158
ccaacccggccgcttcactc

SEQ ID NO: 6159 - DNA, 20 bp, Homo sapiens
  source 1..20: mol_type = genomic DNA; note = Gene: PIP5K1A; note = Location (start to end; relative to TSS): PIP5K1A_48_78; note = Orientation (relative to transcription): sense; note = sgRNA Position: 151198626; note = Sequence Name: 56322-704_101_SL_seq_6159
ggttaggaaggacggagaag

SEQ ID NO: 6160 - DNA, 20 bp, Homo sapiens
  source 1..20: mol_type = genomic DNA; note = Gene: PIP5K1B; note = Location (start to end; relative to TSS): PIP5K1B_32_62; note = Orientation (relative to transcription): antisense; note = sgRNA Position: 68705278; note = Sequence Name: 56322-704_101_SL_seq_6160
ctcgggcgcgggttcccgct

SEQ ID NO: 6161 - DNA, 20 bp, Homo sapiens
  source 1..20: mol_type = genomic DNA; note = Gene: PIP5K1B; note = Location (start to end; relative to TSS): PIP5K1B_77_107; note = Orientation (relative to transcription): antisense; note = sgRNA Position: 68705323; note = Sequence Name: 56322-704_101_SL_seq_6161
accgggaaccggggaccgag

SEQ ID NO: 6162 - DNA, 20 bp, Homo sapiens
  source 1..20: mol_type = genomic DNA; note = Gene: PIP5K1B; note = Location (start to end; relative to TSS): PIP5K1B_31_61; note = Orientation (relative to transcription): sense; note = sgRNA Position: 68705297; note = Sequence Name: 56322-704_101_SL_seq_6162
gaacccgcgcccgagcccgg

SEQ ID NO: 6163 - DNA, 20 bp, Homo sapiens
  source 1..20: mol_type = genomic DNA; note = Gene: PIP5K1B; note = Location (start to end; relative to TSS): PIP5K1B_66_96; note = Orientation (relative to transcription): antisense; note = sgRNA Position: 68705312; note = Sequence Name: 56322-704_101_SL_seq_6163
gggaccgagaggagcagcag

SEQ ID NO: 6164 - DNA, 20 bp, Homo sapiens
  source 1..20: mol_type = genomic DNA; note = Gene: PIP5K1B; note = Location (start to end; relative to TSS): PIP5K1B_28_58; note = Orientation (relative to transcription): sense; note = sgRNA Position: 68705294; note = Sequence Name: 56322-704_101_SL_seq_6164
cgggaacccgcgcccgagcc

SEQ ID NO: 6165 - DNA, 20 bp, Homo sapiens
  source 1..20: mol_type = genomic DNA; note = Gene: PIP5K1B; note = Location (start to end; relative to TSS): PIP5K1B_60_90; note = Orientation (relative to transcription): sense; note = sgRNA Position: 68705326; note = Sequence Name: 56322-704_101_SL_seq_6165
ctgctgctcctctcggtccc

SEQ ID NO: 6166 - DNA, 20 bp, Homo sapiens
  source 1..20: mol_type = genomic DNA; note = Gene: PIP5K1B; note = Location (start to end; relative to TSS): PIP5K1B_22_52; note = Orientation (relative to transcription): antisense; note = sgRNA Position: 68705268; note = Sequence Name: 56322-704_101_SL_seq_6166
ggttcccgcttggtgcgcgc

SEQ ID NO: 6167 - DNA, 20 bp, Homo sapiens
  source 1..20: mol_type = genomic DNA; note = Gene: PIP5K1B; note = Location (start to end; relative to TSS): PIP5K1B_55_85; note = Orientation (relative to transcription): antisense; note = sgRNA Position: 68705301; note = Sequence Name: 56322-704_101_SL_seq_6167
gagcagcagcggcgcccgcc

SEQ ID NO: 6168 - DNA, 20 bp, Homo sapiens
  source 1..20: mol_type = genomic DNA; note = Gene: PIP5K1B; note = Location (start to end; relative to TSS): PIP5K1B_16_46; note = Orientation (relative to transcription): antisense; note = sgRNA Position: 68705262; note = Sequence Name: 56322-704_101_SL_seq_6168
cgcttggtgcgcgccggagt

SEQ ID NO: 6169 - DNA, 20 bp, Homo sapiens
  source 1..20: mol_type = genomic DNA; note = Gene: PIP5K1B; note = Location (start to end; relative to TSS): PIP5K1B_53_83; note = Orientation (relative to transcription): sense; note = sgRNA Position: 68705319; note = Sequence Name: 56322-704_101_SL_seq_6169
ggcgccgctgctgctcctct

SEQ ID NO: 6170 - DNA, 20 bp, Homo sapiens
  source 1..20: mol_type = genomic DNA; note = Gene: PIP5K1C; note = Location (start to end; relative to TSS): PIP5K1C_45_75; note = Orientation (relative to transcription): sense; note = sgRNA Position: 3700399; note = Sequence Name: 56322-704_101_SL_seq_6170
cccccgccgccgtccgcgcg

SEQ ID NO: 6171 - DNA, 20 bp, Homo sapiens
  source 1..20: mol_type = genomic DNA; note = Gene: PIP5K1C; note = Location (start to end; relative to TSS): PIP5K1C_87_117; note = Orientation (relative to transcription): sense; note = sgRNA Position: 3700357; note = Sequence Name: 56322-704_101_SL_seq_6171
ggacgaggcggagagcgctg

SEQ ID NO: 6172 - DNA, 20 bp, Homo sapiens
  source 1..20: mol_type = genomic DNA; note = Gene: PIP5K1C; note = Location (start to end; relative to TSS): PIP5K1C_44_74; note = Orientation (relative to transcription): antisense; note = sgRNA Position: 3700420; note = Sequence Name: 56322-704_101_SL_seq_6172
acggcggcgggggcgcccga

SEQ ID NO: 6173 - DNA, 20 bp, Homo sapiens
  source 1..20: mol_type = genomic DNA; note = Gene: PIP5K1C; note = Location (start to end; relative to TSS): PIP5K1C_77_107; note = Orientation (relative to transcription): antisense; note = sgRNA Position: 3700387; note = Sequence Name: 56322-704_101_SL_seq_6173
gtccggtacctccagctcca

SEQ ID NO: 6174 - DNA, 20 bp, Homo sapiens
  source 1..20: mol_type = genomic DNA; note = Gene: PIP5K1C; note = Location (start to end; relative to TSS): PIP5K1C_43_73; note = Orientation (relative to transcription): antisense; note = sgRNA Position: 3700421; note = Sequence Name: 56322-704_101_SL_seq_6174
cggcggcgggggcgcccgag

SEQ ID NO: 6175 - DNA, 20 bp, Homo sapiens
  source 1..20: mol_type = genomic DNA; note = Gene: PIP5K1C; note = Location (start to end; relative to TSS): PIP5K1C_75_105; note = Orientation (relative to transcription): sense; note = sgRNA Position: 3700369; note = Sequence Name: 56322-704_101_SL_seq_6175
gctggaggtaccggacgagg

SEQ ID NO: 6176 - DNA, 20 bp, Homo sapiens
  source 1..20: mol_type = genomic DNA; note = Gene: PIP5K1C; note = Location (start to end; relative to TSS): PIP5K1C_19_49; note = Orientation (relative to transcription): sense; note = sgRNA Position: 3700425; note = Sequence Name: 56322-704_101_SL_seq_6176
gtcgcagctcgggtccccct

SEQ ID NO: 6177 - DNA, 20 bp, Homo sapiens
  source 1..20: mol_type = genomic DNA; note = Gene: PIP5K1C; note = Location (start to end; relative to TSS): PIP5K1C_55_85; note = Orientation (relative to transcription): antisense; note = sgRNA Position: 3700409; note = Sequence Name: 56322-704_101_SL_seq_6177
gccgcgcgcggacggcggcg

SEQ ID NO: 6178 - DNA, 20 bp, Homo sapiens
  source 1..20: mol_type = genomic DNA; note = Gene: PIP5K1C; note = Location (start to end; relative to TSS): PIP5K1C_20_50; note = Orientation (relative to transcription): sense; note = sgRNA Position: 3700424; note = Sequence Name: 56322-704_101_SL_seq_6178
tcgcagctcgggtccccctc

SEQ ID NO: 6179 - DNA, 20 bp, Homo sapiens
  source 1..20: mol_type = genomic DNA; note = Gene: PIP5K1C; note = Location (start to end; relative to TSS): PIP5K1C_51_81; note = Orientation (relative to transcription): sense; note = sgRNA Position: 3700393; note = Sequence Name: 56322-704_101_SL_seq_6179
ccgccgtccgcgcgcggcca

SEQ ID NO: 6180 - DNA, 20 bp, Homo sapiens
  source 1..20: mol_type = genomic DNA; note = Gene: PIP5KL1; note = Location (start to end; relative to TSS): PIP5KL1_47_77; note = Orientation (relative to transcription): antisense; note = sgRNA Position: 127930726; note = Sequence Name: 56322-704_101_SL_seq_6180
gggtccgcacctacctcgcg

SEQ ID NO: 6181 - DNA, 20 bp, Homo sapiens
  source 1..20: mol_type = genomic DNA; note = Gene: PIP5KL1; note = Location (start to end; relative to TSS): PIP5KL1_80_110; note = Orientation (relative to transcription): sense; note = sgRNA Position: 127930673; note = Sequence Name: 56322-704_101_SL_seq_6181
aagggttggtgggcaggggc

SEQ ID NO: 6182 - DNA, 20 bp, Homo sapiens
  source 1..20: mol_type = genomic DNA; note = Gene: PIP5KL1; note = Location (start to end; relative to TSS): PIP5KL1_46_76; note = Orientation (relative to transcription): sense; note = sgRNA Position: 127930707; note = Sequence Name: 56322-704_101_SL_seq_6182
ggtaggtgcggacccgagag

SEQ ID NO: 6183 - DNA, 20 bp, Homo sapiens
  source 1..20: mol_type = genomic DNA; note = Gene: PIP5KL1; note = Location (start to end; relative to TSS): PIP5KL1_76_106; note = Orientation (relative to transcription): sense; note = sgRNA Position: 127930677; note = Sequence Name: 56322-704_101_SL_seq_6183
agggaagggttggtgggcag

SEQ ID NO: 6184 - DNA, 20 bp, Homo sapiens
  source 1..20: mol_type = genomic DNA; note = Gene: PIP5KL1; note = Location (start to end; relative to TSS): PIP5KL1_34_64; note = Orientation (relative to transcription): sense; note = sgRNA Position: 127930719; note = Sequence Name: 56322-704_101_SL_seq_6184
ggggccccgcgaggtaggtg

SEQ ID NO: 6185 - DNA, 20 bp, Homo sapiens
  source 1..20: mol_type = genomic DNA; note = Gene: PIP5KL1; note = Location (start to end; relative to TSS): PIP5KL1_66_96; note = Orientation (relative to transcription): sense; note = sgRNA Position: 127930687; note = Sequence Name: 56322-704_101_SL_seq_6185
aggacaggagagggaagggt

SEQ ID NO: 6186 - DNA, 20 bp, Homo sapiens
  source 1..20: mol_type = genomic DNA; note = Gene: PIP5KL1; note = Location (start to end; relative to TSS): PIP5KL1_29_59; note = Orientation (relative to transcription): sense; note = sgRNA Position: 127930724; note = Sequence Name: 56322-704_101_SL_seq_6186
agcccggggccccgcgaggt

SEQ ID NO: 6187 - DNA, 20 bp, Homo sapiens
  source 1..20: mol_type = genomic DNA; note = Gene: PIP5KL1; note = Location (start to end; relative to TSS): PIP5KL1_61_91; note = Orientation (relative to transcription): sense; note = sgRNA Position: 127930692; note = Sequence Name: 56322-704_101_SL_seq_6187
gagagaggacaggagaggga

SEQ ID NO: 6188 - DNA, 20 bp, Homo sapiens
  source 1..20: mol_type = genomic DNA; note = Gene: PIP5KL1; note = Location (start to end; relative to TSS): PIP5KL1_25_55; note = Orientation (relative to transcription): sense; note = sgRNA Position: 127930728; note = Sequence Name: 56322-704_101_SL_seq_6188
gccgagcccggggccccgcg

SEQ ID NO: 6189 - DNA, 20 bp, Homo sapiens
  source 1..20: mol_type = genomic DNA; note = Gene: PIP5KL1; note = Location (start to end; relative to TSS): PIP5KL1_56_86; note = Orientation (relative to transcription): sense; note = sgRNA Position: 127930697; note = Sequence Name: 56322-704_101_SL_seq_6189
gacccgagagaggacaggag

SEQ ID NO: 6190 - DNA, 20 bp, Homo sapiens
  source 1..20: mol_type = genomic DNA; note = Gene: PKDCC; note = Location (start to end; relative to TSS): PKDCC_38_68; note = Orientation (relative to transcription): sense; note = sgRNA Position: 42048085; note = Sequence Name: 56322-704_101_SL_seq_6190
gccgccggggccatgcgcgc

SEQ ID NO: 6191 - DNA, 20 bp, Homo sapiens
  source 1..20: mol_type = genomic DNA; note = Gene: PKDCC; note = Location (start to end; relative to TSS): PKDCC_103_133; note = Orientation (relative to transcription): antisense; note = sgRNA Position: 42048130; note = Sequence Name: 56322-704_101_SL_seq_6191
gggcggctcaggctccgagg

SEQ ID NO: 6192 - DNA, 20 bp, Homo sapiens
  source 1..20: mol_type = genomic DNA; note = Gene: PKDCC; note = Location (start to end; relative to TSS): PKDCC_37_67; note = Orientation (relative to transcription): sense; note = sgRNA Position: 42048084; note = Sequence Name: 56322-704_101_SL_seq_6192
ggccgccggggccatgcgcg

SEQ ID NO: 6193 - DNA, 20 bp, Homo sapiens
  source 1..20: mol_type = genomic DNA; note = Gene: PKDCC; note = Location (start to end; relative to TSS): PKDCC_98_128; note = Orientation (relative to transcription): sense; note = sgRNA Position: 42048145; note = Sequence Name: 56322-704_101_SL_seq_6193
ctcggagcctgagccgcccg

SEQ ID NO: 6194 - DNA, 20 bp, Homo sapiens
  source 1..20: mol_type = genomic DNA; note = Gene: PKDCC; note = Location (start to end; relative to TSS): PKDCC_36_66; note = Orientation (relative to transcription): antisense; note = sgRNA Position: 42048063; note = Sequence Name: 56322-704_101_SL_seq_6194
ggccccggcggccccgaccc

SEQ ID NO: 6195 - DNA, 20 bp, Homo sapiens
  source 1..20: mol_type = genomic DNA; note = Gene: PKDCC; note = Location (start to end; relative to TSS): PKDCC_97_127; note = Orientation (relative to transcription): sense; note = sgRNA Position: 42048144; note = Sequence Name: 56322-704_101_SL_seq_6195
cctcggagcctgagccgccc

SEQ ID NO: 6196 - DNA, 20 bp, Homo sapiens
  source 1..20: mol_type = genomic DNA; note = Gene: PKDCC; note = Location (start to end; relative to TSS): PKDCC_26_56; note = Orientation (relative to transcription): antisense; note = sgRNA Position: 42048053; note = Sequence Name: 56322-704_101_SL_seq_6196
gccccgaccccggcccctcg

SEQ ID NO: 6197 - DNA, 20 bp, Homo sapiens
  source 1..20: mol_type = genomic DNA; note = Gene: PKDCC; note = Location (start to end; relative to TSS): PKDCC_82_112; note = Orientation (relative to transcription): antisense; note = sgRNA Position: 42048109; note = Sequence Name: 56322-704_101_SL_seq_6197
ggctccgctctgcgccccgc

SEQ ID NO: 6198 - DNA, 20 bp, Homo sapiens
  source 1..20: mol_type = genomic DNA; note = Gene: PKDCC; note = Location (start to end; relative to TSS): PKDCC_25_55; note = Orientation (relative to transcription): sense; note = sgRNA Position: 42048072; note = Sequence Name: 56322-704_101_SL_seq_6198
ggccggggtcggggccgccg

SEQ ID NO: 6199 - DNA, 20 bp, Homo sapiens
  source 1..20: mol_type = genomic DNA; note = Gene: PKDCC; note = Location (start to end; relative to TSS): PKDCC_57_87; note = Orientation (relative to transcription): antisense; note = sgRNA Position: 42048084; note = Sequence Name: 56322-704_101_SL_seq_6199
ccctgcccagcccgcgcgca

SEQ ID NO: 6200 - DNA, 20 bp, Homo sapiens
  source 1..20: mol_type = genomic DNA; note = Gene: PKLR; note = Location (start to end; relative to TSS): PKLR_31_61; note = Orientation (relative to transcription): antisense; note = sgRNA Position: 155301403; note = Sequence Name: 56322-704_101_SL_seq_6200
ggatcgacatgctttcagtg

SEQ ID NO: 6201 - DNA, 20 bp, Homo sapiens
  source 1..20: mol_type = genomic DNA; note = Gene: PKLR; note = Location (start to end; relative to TSS): PKLR_101_131; note = Orientation (relative to transcription): sense; note = sgRNA Position: 155301313; note = Sequence Name: 56322-704_101_SL_seq_6201
ttagcaaagtccatcctgat

SEQ ID NO: 6202 - DNA, 20 bp, Homo sapiens
  source 1..20: mol_type = genomic DNA; note = Gene: PKLR; note = Location (start to end; relative to TSS): PKLR_30_60; note = Orientation (relative to transcription): antisense; note = sgRNA Position: 155301404; note = Sequence Name: 56322-704_101_SL_seq_6202
gatcgacatgctttcagtgt

SEQ ID NO: 6203 - DNA, 20 bp, Homo sapiens
  source 1..20: mol_type = genomic DNA; note = Gene: PKLR; note = Location (start to end; relative to TSS): PKLR_70_100; note = Orientation (relative to transcription): antisense; note = sgRNA Position: 155301364; note = Sequence Name: 56322-704_101_SL_seq_6203
agacccatgaccgaagctgc

SEQ ID NO: 6204 - DNA, 20 bp, Homo sapiens
  source 1..20: mol_type = genomic DNA; note = Gene: PKLR; note = Location (start to end; relative to TSS): PKLR_25_55; note = Orientation (relative to transcription): sense; note = sgRNA Position: 155301389; note = Sequence Name: 56322-704_101_SL_seq_6204
cactgaaagcatgtcgatcc

SEQ ID NO: 6205 - DNA, 20 bp, Homo sapiens
  source 1..20: mol_type = genomic DNA; note = Gene: PKLR; note = Location (start to end; relative to TSS): PKLR_69_99; note = Orientation (relative to transcription): antisense; note = sgRNA Position: 155301365; note = Sequence Name: 56322-704_101_SL_seq_6205
gacccatgaccgaagctgca

SEQ ID NO: 6206 - DNA, 20 bp, Homo sapiens
  source 1..20: mol_type = genomic DNA; note = Gene: PKLR; note = Location (start to end; relative to TSS): PKLR_24_54; note = Orientation (relative to transcription): antisense; note = sgRNA Position: 155301410; note = Sequence Name: 56322-704_101_SL_seq_6206
catgctttcagtgtgggcct

SEQ ID NO: 6207 - DNA, 20 bp, Homo sapiens
  source 1..20: mol_type = genomic DNA; note = Gene: PKLR; note = Location (start to end; relative to TSS): PKLR_58_88; note = Orientation (relative to transcription): sense; note = sgRNA Position: 155301356; note = Sequence Name: 56322-704_101_SL_seq_6207
atccctgcagcttcggtcat

SEQ ID NO: 6208 - DNA, 20 bp, Homo sapiens
  source 1..20: mol_type = genomic DNA; note = Gene: PKLR; note = Location (start to end; relative to TSS): PKLR_23_53; note = Orientation (relative to transcription): antisense; note = sgRNA Position: 155301411; note = Sequence Name: 56322-704_101_SL_seq_6208
atgctttcagtgtgggcctg

SEQ ID NO: 6209 - DNA, 20 bp, Homo sapiens
  source 1..20: mol_type = genomic DNA; note = Gene: PKLR; note = Location (start to end; relative to TSS): PKLR_57_87; note = Orientation (relative to transcription): sense; note = sgRNA Position: 155301357; note = Sequence Name: 56322-704_101_SL_seq_6209
catccctgcagcttcggtca

SEQ ID NO: 6210 - DNA, 20 bp, Homo sapiens
  source 1..20: mol_type = genomic DNA; note = Gene: PKM; note = Location (start to end; relative to TSS): PKM_45_75; note = Orientation (relative to transcription): sense; note = sgRNA Position: 72231121; note = Sequence Name: 56322-704_101_SL_seq_6210
cccgagtcggtcagcgccgg

SEQ ID NO: 6211 - DNA, 20 bp, Homo sapiens
  source 1..20: mol_type = genomic DNA; note = Gene: PKM; note = Location (start to end; relative to TSS): PKM_86_116; note = Orientation (relative to transcription): sense; note = sgRNA Position: 72231080; note = Sequence Name: 56322-704_101_SL_seq_6211
acgccatcagtccccaccaa

SEQ ID NO: 6212 - DNA, 20 bp, Homo sapiens
  source 1..20: mol_type = genomic DNA; note = Gene: PKM; note = Location (start to end; relative to TSS): PKM_42_72; note = Orientation (relative to transcription): sense; note = sgRNA Position: 72231124; note = Sequence Name: 56322-704_101_SL_seq_6212
tagcccgagtcggtcagcgc

SEQ ID NO: 6213 - DNA, 20 bp, Homo sapiens
  source 1..20: mol_type = genomic DNA; note = Gene: PKM; note = Location (start to end; relative to TSS): PKM_85_115; note = Orientation (relative to transcription): sense; note = sgRNA Position: 72231081; note = Sequence Name: 56322-704_101_SL_seq_6213
tacgccatcagtccccacca

SEQ ID NO: 6214 - DNA, 20 bp, Homo sapiens
  source 1..20: mol_type = genomic DNA; note = Gene: PKM; note = Location (start to end; relative to TSS): PKM_32_62; note = Orientation (relative to transcription): sense; note = sgRNA Position: 72231134; note = Sequence Name: 56322-704_101_SL_seq_6214
ctttgcagcgtagcccgagt

SEQ ID NO: 6215 - DNA, 20 bp, Homo sapiens
  source 1..20: mol_type = genomic DNA; note = Gene: PKM; note = Location (start to end; relative to TSS): PKM_70_100; note = Orientation (relative to transcription): antisense; note = sgRNA Position: 72231116; note = Sequence Name: 56322-704_101_SL_seq_6215
cctcctgcaccgctcacctc

SEQ ID NO: 6216 - DNA, 20 bp, Homo sapiens
  source 1..20: mol_type = genomic DNA; note = Gene: PKM; note = Location (start to end; relative to TSS): PKM_27_57; note = Orientation (relative to transcription): antisense; note = sgRNA Position: 72231159; note = Sequence Name: 56322-704_101_SL_seq_6216
gctgcaaagacgaagagatc

SEQ ID NO: 6217 - DNA, 20 bp, Homo sapiens
  source 1..20: mol_type = genomic DNA; note = Gene: PKM; note = Location (start to end; relative to TSS): PKM_58_88; note = Orientation (relative to transcription): sense; note = sgRNA Position: 72231108; note = Sequence Name: 56322-704_101_SL_seq_6217
gcgccggaggtgagcggtgc

SEQ ID NO: 6218 - DNA, 20 bp, Homo sapiens
  source 1..20: mol_type = genomic DNA; note = Gene: PKM; note = Location (start to end; relative to TSS): PKM_19_49; note = Orientation (relative to transcription): antisense; note = sgRNA Position: 72231167; note = Sequence Name: 56322-704_101_SL_seq_6218
gacgaagagatccggagcca

SEQ ID NO: 6219 - DNA, 20 bp, Homo sapiens
  source 1..20: mol_type = genomic DNA; note = Gene: PKM; note = Location (start to end; relative to TSS): PKM_52_82; note = Orientation (relative to transcription): sense; note = sgRNA Position: 72231114; note = Sequence Name: 56322-704_101_SL_seq_6219
cggtcagcgccggaggtgag

SEQ ID NO: 6220 - DNA, 20 bp, Homo sapiens
  source 1..20: mol_type = genomic DNA; note = Gene: PKMYT1; note = Location (start to end; relative to TSS): PKMYT1_33_63; note = Orientation (relative to transcription): sense; note = sgRNA Position: 2980389; note = Sequence Name: 56322-704_101_SL_seq_6220
cgggcgtccggaacagtcga

SEQ ID NO: 6221 - DNA, 20 bp, Homo sapiens
  source 1..20: mol_type = genomic DNA; note = Gene: PKMYT1; note = Location (start to end; relative to TSS): PKMYT1_71_101; note = Orientation (relative to transcription): antisense; note = sgRNA Position: 2980371; note = Sequence Name: 56322-704_101_SL_seq_6221
cctcgggtggctcagcgggc

SEQ ID NO: 6222 - DNA, 20 bp, Homo sapiens
  source 1..20: mol_type = genomic DNA; note = Gene: PKMYT1; note = Location (start to end; relative to TSS): PKMYT1_20_50; note = Orientation (relative to transcription): antisense; note = sgRNA Position: 2980422; note = Sequence Name: 56322-704_101_SL_seq_6222
gggcggaggactcccgtgag

SEQ ID NO: 6223 - DNA, 20 bp, Homo sapiens
  source 1..20: mol_type = genomic DNA; note = Gene: PKMYT1; note = Location (start to end; relative to TSS): PKMYT1_64_94; note = Orientation (relative to transcription): sense; note = sgRNA Position: 2980358; note = Sequence Name: 56322-704_101_SL_seq_6223
ggcccgctgagccacccgag

SEQ ID NO: 6224 - DNA, 20 bp, Homo sapiens
  source 1..20: mol_type = genomic DNA; note = Gene: PKMYT1; note = Location (start to end; relative to TSS): PKMYT1_21_51; note = Orientation (relative to transcription): antisense; note = sgRNA Position: 2980421; note = Sequence Name: 56322-704_101_SL_seq_6224
cgggcggaggactcccgtga

SEQ ID NO: 6225 - DNA, 20 bp, Homo sapiens
  source 1..20: mol_type = genomic DNA; note = Gene: PKMYT1; note = Location (start to end; relative to TSS): PKMYT1_63_93; note = Orientation (relative to transcription): sense; note = sgRNA Position: 2980359; note = Sequence Name: 56322-704_101_SL_seq_6225
cggcccgctgagccacccga

SEQ ID NO: 6226 - DNA, 20 bp, Homo sapiens
  source 1..20: mol_type = genomic DNA; note = Gene: PKMYT1; note = Location (start to end; relative to TSS): PKMYT1_22_52; note = Orientation (relative to transcription): antisense; note = sgRNA Position: 2980420; note = Sequence Name: 56322-704_101_SL_seq_6226
ccgggcggaggactcccgtg

SEQ ID NO: 6227 - DNA, 20 bp, Homo sapiens
  source 1..20: mol_type = genomic DNA; note = Gene: PKMYT1; note = Location (start to end; relative to TSS): PKMYT1_62_92; note = Orientation (relative to transcription): sense; note = sgRNA Position: 2980360; note = Sequence Name: 56322-704_101_SL_seq_6227
ccggcccgctgagccacccg

SEQ ID NO: 6228 - DNA, 20 bp, Homo sapiens
  source 1..20: mol_type = genomic DNA; note = Gene: PKMYT1; note = Location (start to end; relative to TSS): PKMYT1_19_49; note = Orientation (relative to transcription): antisense; note = sgRNA Position: 2980423; note = Sequence Name: 56322-704_101_SL_seq_6228
ggcggaggactcccgtgagg

SEQ ID NO: 6229 - DNA, 20 bp, Homo sapiens
  source 1..20: mol_type = genomic DNA; note = Gene: PKMYT1; note = Location (start to end; relative to TSS): PKMYT1_49_79; note = Orientation (relative to transcription): antisense; note = sgRNA Position: 2980393; note = Sequence Name: 56322-704_101_SL_seq_6229
gagtctgccgtcgactgttc

SEQ ID NO: 6230 - DNA, 20 bp, Homo sapiens
  source 1..20: mol_type = genomic DNA; note = Gene: PKN1; note = Location (start to end; relative to TSS): PKN1_59_89; note = Orientation (relative to transcription): sense; note = sgRNA Position: 14433391; note = Sequence Name: 56322-704_101_SL_seq_6230
gaggcgggagccgagcaggc

SEQ ID NO: 6231 - DNA, 20 bp, Homo sapiens
  source 1..20: mol_type = genomic DNA; note = Gene: PKN1; note = Location (start to end; relative to TSS): PKN1_97_127; note = Orientation (relative to transcription): antisense; note = sgRNA Position: 14433409; note = Sequence Name: 56322-704_101_SL_seq_6231
gcgcgaccctccccggcgcg

SEQ ID NO: 6232 - DNA, 20 bp, Homo sapiens
  source 1..20: mol_type = genomic DNA; note = Gene: PKN1; note = Location (start to end; relative to TSS): PKN1_43_73; note = Orientation (relative to transcription): sense; note = sgRNA Position: 14433375; note = Sequence Name: 56322-704_101_SL_seq_6232
ggcggcctggccaggcgagg

SEQ ID NO: 6233 - DNA, 20 bp, Homo sapiens
  source 1..20: mol_type = genomic DNA; note = Gene: PKN1; note = Location (start to end; relative to TSS): PKN1_81_111; note = Orientation (relative to transcription): sense; note = sgRNA Position: 14433413; note = Sequence Name: 56322-704_101_SL_seq_6233
gagcgggccgcgcgccgggg

SEQ ID NO: 6234 - DNA, 20 bp, Homo sapiens
  source 1..20: mol_type = genomic DNA; note = Gene: PKN1; note = Location (start to end; relative to TSS): PKN1_40_70; note = Orientation (relative to transcription): sense; note = sgRNA Position: 14433372; note = Sequence Name: 56322-704_101_SL_seq_6234
cgcggcggcctggccaggcg

SEQ ID NO: 6235 - DNA, 20 bp, Homo sapiens
  source 1..20: mol_type = genomic DNA; note = Gene: PKN1; note = Location (start to end; relative to TSS): PKN1_78_108; note = Orientation (relative to transcription): antisense; note = sgRNA Position: 14433390; note = Sequence Name: 56322-704_101_SL_seq_6235
gcggcccgctccggcctgct

SEQ ID NO: 6236 - DNA, 20 bp, Homo sapiens
  source 1..20: mol_type = genomic DNA; note = Gene: PKN1; note = Location (start to end; relative to TSS): PKN1_19_49; note = Orientation (relative to transcription): antisense; note = sgRNA Position: 14433331; note = Sequence Name: 56322-704_101_SL_seq_6236
gccgcgccctccggccccag

SEQ ID NO: 6237 - DNA, 20 bp, Homo sapiens
  source 1..20: mol_type = genomic DNA; note = Gene: PKN1; note = Location (start to end; relative to TSS): PKN1_59_89; note = Orientation (relative to transcription): sense; note = sgRNA Position: 14433391; note = Sequence Name: 56322-704_101_SL_seq_6237
gaggcgggagccgagcaggc

SEQ ID NO: 6238 - DNA, 20 bp, Homo sapiens
  source 1..20: mol_type = genomic DNA; note = Gene: PKN1; note = Location (start to end; relative to TSS): PKN1_6_36; note = Orientation (relative to transcription): antisense; note = sgRNA Position: 14433318; note = Sequence Name: 56322-704_101_SL_seq_6238
gccccagcggccgccgggcc

SEQ ID NO: 6239 - DNA, 20 bp, Homo sapiens
  source 1..20: mol_type = genomic DNA; note = Gene: PKN1; note = Location (start to end; relative to TSS): PKN1_43_73; note = Orientation (relative to transcription): sense; note = sgRNA Position: 14433375; note = Sequence Name: 56322-704_101_SL_seq_6239
ggcggcctggccaggcgagg

SEQ ID NO: 6240 - DNA, 20 bp, Homo sapiens
  source 1..20: mol_type = genomic DNA; note = Gene: PKN2; note = Location (start to end; relative to TSS): PKN2_47_77; note = Orientation (relative to transcription): sense; note = sgRNA Position: 88684346; note = Sequence Name: 56322-704_101_SL_seq_6240
gagcgactagacgaacagtc

SEQ ID NO: 6241 - DNA, 20 bp, Homo sapiens
  source 1..20: mol_type = genomic DNA; note = Gene: PKN2; note = Location (start to end; relative to TSS): PKN2_110_140; note = Orientation (relative to transcription): sense; note = sgRNA Position: 88684409; note = Sequence Name: 56322-704_101_SL_seq_6241
ccccgccgctctcgatgaac

SEQ ID NO: 6242 - DNA, 20 bp, Homo sapiens
  source 1..20: mol_type = genomic DNA; note = Gene: PKN2; note = Location (start to end; relative to TSS): PKN2_48_78; note = Orientation (relative to transcription): antisense; note = sgRNA Position: 88684327; note = Sequence Name: 56322-704_101_SL_seq_6242
ttcgtctagtcgctccctct

SEQ ID NO: 6243 - DNA, 20 bp, Homo sapiens
  source 1..20: mol_type = genomic DNA; note = Gene: PKN2; note = Location (start to end; relative to TSS): PKN2_99_129; note = Orientation (relative to transcription): antisense; note = sgRNA Position: 88684378; note = Sequence Name: 56322-704_101_SL_seq_6243
gggagctagggcactcgtag

SEQ ID NO: 6244 - DNA, 20 bp, Homo sapiens
  source 1..20: mol_type = genomic DNA; note = Gene: PKN2; note = Location (start to end; relative to TSS): PKN2_49_79; note = Orientation (relative to transcription): antisense; note = sgRNA Position: 88684328; note = Sequence Name: 56322-704_101_SL_seq_6244
gttcgtctagtcgctccctc

SEQ ID NO: 6245 - DNA, 20 bp, Homo sapiens
  source 1..20: mol_type = genomic DNA; note = Gene: PKN2; note = Location (start to end; relative to TSS): PKN2_98_128; note = Orientation (relative to transcription): antisense; note = sgRNA Position: 88684377; note = Sequence Name: 56322-704_101_SL_seq_6245
ggagctagggcactcgtagc

SEQ ID NO: 6246 - DNA, 20 bp, Homo sapiens
  source 1..20: mol_type = genomic DNA; note = Gene: PKN2; note = Location (start to end; relative to TSS): PKN2_38_68; note = Orientation (relative to transcription): antisense; note = sgRNA Position: 88684317; note = Sequence Name: 56322-704_101_SL_seq_6246
cgctccctctgggcgacgcc

SEQ ID NO: 6247 - DNA, 20 bp, Homo sapiens
  source 1..20: mol_type = genomic DNA; note = Gene: PKN2; note = Location (start to end; relative to TSS): PKN2_75_105; note = Orientation (relative to transcription): antisense; note = sgRNA Position: 88684354; note = Sequence Name: 56322-704_101_SL_seq_6247
cttcctctcgccgccctcac

SEQ ID NO: 6248 - DNA, 20 bp, Homo sapiens
  source 1..20: mol_type = genomic DNA; note = Gene: PKN2; note = Location (start to end; relative to TSS): PKN2_24_54; note = Orientation (relative to transcription): sense; note = sgRNA Position: 88684323; note = Sequence Name: 56322-704_101_SL_seq_6248
cggctcctggcgtcgcccag

SEQ ID NO: 6249 - DNA, 20 bp, Homo sapiens
  source 1..20: mol_type = genomic DNA; note = Gene: PKN2; note = Location (start to end; relative to TSS): PKN2_56_86; note = Orientation (relative to transcription): sense; note = sgRNA Position: 88684355; note = Sequence Name: 56322-704_101_SL_seq_6249
gacgaacagtccggtgaggg

SEQ ID NO: 6250 - DNA, 20 bp, Homo sapiens
  source 1..20: mol_type = genomic DNA; note = Gene: PKN3; note = Location (start to end; relative to TSS): PKN3_48_78; note = Orientation (relative to transcription): antisense; note = sgRNA Position: 128702557; note = Sequence Name: 56322-704_101_SL_seq_6250
tcgcccgcgcccaggtcctc

SEQ ID NO: 6251 - DNA, 20 bp, Homo sapiens
  source 1..20: mol_type = genomic DNA; note = Gene: PKN3; note = Location (start to end; relative to TSS): PKN3_78_108; note = Orientation (relative to transcription): antisense; note = sgRNA Position: 128702587; note = Sequence Name: 56322-704_101_SL_seq_6251
cacccccggtttggacgctc

SEQ ID NO: 6252 - DNA, 20 bp, Homo sapiens
  source 1..20: mol_type = genomic DNA; note = Gene: PKN3; note = Location (start to end; relative to TSS): PKN3_25_55; note = Orientation (relative to transcription): antisense; note = sgRNA Position: 128702534; note = Sequence Name: 56322-704_101_SL_seq_6252
ccttccccgccgcgcgcccg

SEQ ID NO: 6253 - DNA, 20 bp, Homo sapiens
  source 1..20: mol_type = genomic DNA; note = Gene: PKN3; note = Location (start to end; relative to TSS): PKN3_65_95; note = Orientation (relative to transcription): sense; note = sgRNA Position: 128702594; note = Sequence Name: 56322-704_101_SL_seq_6253
gcctcctgagcgtccaaacc

SEQ ID NO: 6254 - DNA, 20 bp, Homo sapiens
  source 1..20: mol_type = genomic DNA; note = Gene: PKN3; note = Location (start to end; relative to TSS): PKN3_24_54; note = Orientation (relative to transcription): antisense; note = sgRNA Position: 128702533; note = Sequence Name: 56322-704_101_SL_seq_6254
cttccccgccgcgcgcccgc

SEQ ID NO: 6255 - DNA, 20 bp, Homo sapiens
  source 1..20: mol_type = genomic DNA; note = Gene: PKN3; note = Location (start to end; relative to TSS): PKN3_64_94; note = Orientation (relative to transcription): sense; note = sgRNA Position: 128702593; note = Sequence Name: 56322-704_101_SL_seq_6255
tgcctcctgagcgtccaaac

SEQ ID NO: 6256 - DNA, 20 bp, Homo sapiens
  source 1..20: mol_type = genomic DNA; note = Gene: PKN3; note = Location (start to end; relative to TSS): PKN3_23_53; note = Orientation (relative to transcription): sense; note = sgRNA Position: 128702552; note = Sequence Name: 56322-704_101_SL_seq_6256
cgcgcggcggggaaggccag

SEQ ID NO: 6257 - DNA, 20 bp, Homo sapiens
  source 1..20: mol_type = genomic DNA; note = Gene: PKN3; note = Location (start to end; relative to TSS): PKN3_56_86; note = Orientation (relative to transcription): antisense; note = sgRNA Position: 128702565; note = Sequence Name: 56322-704_101_SL_seq_6257
gaggcacatcgcccgcgccc

SEQ ID NO: 6258 - DNA, 20 bp, Homo sapiens
  source 1..20: mol_type = genomic DNA; note = Gene: PKN3; note = Location (start to end; relative to TSS): PKN3_12_42; note = Orientation (relative to transcription): sense; note = sgRNA Position: 128702541; note = Sequence Name: 56322-704_101_SL_seq_6258
gctcccgcgggcgcgcggcg

SEQ ID NO: 6259 - DNA, 20 bp, Homo sapiens
  source 1..20: mol_type = genomic DNA; note = Gene: PKN3; note = Location (start to end; relative to TSS): PKN3_48_78; note = Orientation (relative to transcription): antisense; note = sgRNA Position: 128702557; note = Sequence Name: 56322-704_101_SL_seq_6259
tcgcccgcgcccaggtcctc

SEQ ID NO: 6260 - DNA, 20 bp, Homo sapiens
  source 1..20: mol_type = genomic DNA; note = Gene: PLK1; note = Location (start to end; relative to TSS): PLK1_48_78; note = Orientation (relative to transcription): sense; note = sgRNA Position: 23678963; note = Sequence Name: 56322-704_101_SL_seq_6260
tgactgcagggaagctggca

SEQ ID NO: 6261 - DNA, 20 bp, Homo sapiens
  source 1..20: mol_type = genomic DNA; note = Gene: PLK1; note = Location (start to end; relative to TSS): PLK1_87_117; note = Orientation (relative to transcription): antisense; note = sgRNA Position: 23678982; note = Sequence Name: 56322-704_101_SL_seq_6261
gaccccggctttcccagggt

SEQ ID NO: 6262 - DNA, 20 bp, Homo sapiens
  source 1..20: mol_type = genomic DNA; note = Gene: PLK1; note = Location (start to end; relative to TSS): PLK1_49_79; note = Orientation (relative to transcription): sense; note = sgRNA Position: 23678964; note = Sequence Name: 56322-704_101_SL_seq_6262
gactgcagggaagctggcac

SEQ ID NO: 6263 - DNA, 20 bp, Homo sapiens
  source 1..20: mol_type = genomic DNA; note = Gene: PLK1; note = Location (start to end; relative to TSS): PLK1_83_113; note = Orientation (relative to transcription): antisense; note = sgRNA Position: 23678978; note = Sequence Name: 56322-704_101_SL_seq_6263
ccggctttcccagggtcggc

SEQ ID NO: 6264 - DNA, 20 bp, Homo sapiens
  source 1..20: mol_type = genomic DNA; note = Gene: PLK1; note = Location (start to end; relative to TSS): PLK1_43_73; note = Orientation (relative to transcription): sense; note = sgRNA Position: 23678958; note = Sequence Name: 56322-704_101_SL_seq_6264
tgcagtgactgcagggaagc

SEQ ID NO: 6265 - DNA, 20 bp, Homo sapiens
  source 1..20: mol_type = genomic DNA; note = Gene: PLK1; note = Location (start to end; relative to TSS): PLK1_74_104; note = Orientation (relative to transcription): sense; note = sgRNA Position: 23678989; note = Sequence Name: 56322-704_101_SL_seq_6265
ccggccgaccctgggaaagc

SEQ ID NO: 6266 - DNA, 20 bp, Homo sapiens
  source 1..20: mol_type = genomic DNA; note = Gene: PLK1; note = Location (start to end; relative to TSS): PLK1_36_66; note = Orientation (relative to transcription): sense; note = sgRNA Position: 23678951; note = Sequence Name: 56322-704_101_SL_seq_6266
tgagtgctgcagtgactgca

SEQ ID NO: 6267 - DNA, 20 bp, Homo sapiens
  source 1..20: mol_type = genomic DNA; note = Gene: PLK1; note = Location (start to end; relative to TSS): PLK1_66_96; note = Orientation (relative to transcription): sense; note = sgRNA Position: 23678981; note = Sequence Name: 56322-704_101_SL_seq_6267
cacgggcaccggccgaccct

SEQ ID NO: 6268 - DNA, 20 bp, Homo sapiens
  source 1..20: mol_type = genomic DNA; note = Gene: PLK1; note = Location (start to end; relative to TSS): PLK1_35_65; note = Orientation (relative to transcription): sense; note = sgRNA Position: 23678950; note = Sequence Name: 56322-704_101_SL_seq_6268
atgagtgctgcagtgactgc

SEQ ID NO: 6269 - DNA, 20 bp, Homo sapiens
  source 1..20: mol_type = genomic DNA; note = Gene: PLK1; note = Location (start to end; relative to TSS): PLK1_65_95; note = Orientation (relative to transcription): sense; note = sgRNA Position: 23678980; note = Sequence Name: 56322-704_101_SL_seq_6269
gcacgggcaccggccgaccc

SEQ ID NO: 6270 - DNA, 20 bp, Homo sapiens
  source 1..20: mol_type = genomic DNA; note = Gene: PLK2; note = Location (start to end; relative to TSS): PLK2_41_71; note = Orientation (relative to transcription): sense; note = sgRNA Position: 58460021; note = Sequence Name: 56322-704_101_SL_seq_6270
tgcgaggaccacggccggct

SEQ ID NO: 6271 - DNA, 20 bp, Homo sapiens
  source 1..20: mol_type = genomic DNA; note = Gene: PLK2; note = Location (start to end; relative to TSS): PLK2_73_103; note = Orientation (relative to transcription): sense; note = sgRNA Position: 58459989; note = Sequence Name: 56322-704_101_SL_seq_6271
cgcgcctagggggtggcagc

SEQ ID NO: 6272 - DNA, 20 bp, Homo sapiens
  source 1..20: mol_type = genomic DNA; note = Gene: PLK2; note = Location (start to end; relative to TSS): PLK2_37_67; note = Orientation (relative to transcription): antisense; note = sgRNA Position: 58460045; note = Sequence Name: 56322-704_101_SL_seq_6272
ggtcctcgcacccttgcctc

SEQ ID NO: 6273 - DNA, 20 bp, Homo sapiens
  source 1..20: mol_type = genomic DNA; note = Gene: PLK2; note = Location (start to end; relative to TSS): PLK2_72_102; note = Orientation (relative to transcription): sense; note = sgRNA Position: 58459990; note = Sequence Name: 56322-704_101_SL_seq_6273
ccgcgcctagggggtggcag

SEQ ID NO: 6274 - DNA, 20 bp, Homo sapiens
  source 1..20: mol_type = genomic DNA; note = Gene: PLK2; note = Location (start to end; relative to TSS): PLK2_36_66; note = Orientation (relative to transcription): sense; note = sgRNA Position: 58460026; note = Sequence Name: 56322-704_101_SL_seq_6274
aagggtgcgaggaccacggc

SEQ ID NO: 6275 - DNA, 20 bp, Homo sapiens
  source 1..20: mol_type = genomic DNA; note = Gene: PLK2; note = Location (start to end; relative to TSS): PLK2_66_96; note = Orientation (relative to transcription): sense; note = sgRNA Position: 58459996; note = Sequence Name: 56322-704_101_SL_seq_6275
gtgtgaccgcgcctaggggg

SEQ ID NO: 6276 - DNA, 20 bp, Homo sapiens
  source 1..20: mol_type = genomic DNA; note = Gene: PLK2; note = Location (start to end; relative to TSS): PLK2_32_62; note = Orientation (relative to transcription): sense; note = sgRNA Position: 58460030; note = Sequence Name: 56322-704_101_SL_seq_6276
aggcaagggtgcgaggacca

SEQ ID NO: 6277 - DNA, 20 bp, Homo sapiens
  source 1..20: mol_type = genomic DNA; note = Gene: PLK2; note = Location (start to end; relative to TSS): PLK2_62_92; note = Orientation (relative to transcription): sense; note = sgRNA Position: 58460000; note = Sequence Name: 56322-704_101_SL_seq_6277
ggacgtgtgaccgcgcctag

SEQ ID NO: 6278 - DNA, 20 bp, Homo sapiens
  source 1..20: mol_type = genomic DNA; note = Gene: PLK2; note = Location (start to end; relative to TSS): PLK2_12_42; note = Orientation (relative to transcription): antisense; note = sgRNA Position: 58460070; note = Sequence Name: 56322-704_101_SL_seq_6278
ccgactagcacccaacaccc

SEQ ID NO: 6279 - DNA, 20 bp, Homo sapiens
  source 1..20: mol_type = genomic DNA; note = Gene: PLK2; note = Location (start to end; relative to TSS): PLK2_58_88; note = Orientation (relative to transcription): antisense; note = sgRNA Position: 58460024; note = Sequence Name: 56322-704_101_SL_seq_6279
tcacacgtccgagccggccg

SEQ ID NO: 6280 - DNA, 20 bp, Homo sapiens
  source 1..20: mol_type = genomic DNA; note = Gene: PLK3; note = Location (start to end; relative to TSS): PLK3_40_70; note = Orientation (relative to transcription): antisense; note = sgRNA Position: 44800423; note = Sequence Name: 56322-704_101_SL_seq_6280
cccggcttctcggttccgcc

SEQ ID NO: 6281 - DNA, 20 bp, Homo sapiens
  source 1..20: mol_type = genomic DNA; note = Gene: PLK3; note = Location (start to end; relative to TSS): PLK3_83_113; note = Orientation (relative to transcription): antisense; note = sgRNA Position: 44800466; note = Sequence Name: 56322-704_101_SL_seq_6281
aaccggcggcaggctccatg

SEQ ID NO: 6282 - DNA, 20 bp, Homo sapiens
  source 1..20: mol_type = genomic DNA; note = Gene: PLK3; note = Location (start to end; relative to TSS): PLK3_34_64; note = Orientation (relative to transcription): antisense; note = sgRNA Position: 44800417; note = Sequence Name: 56322-704_101_SL_seq_6282
ttctcggttccgcccggccc

SEQ ID NO: 6283 - DNA, 20 bp, Homo sapiens
  source 1..20: mol_type = genomic DNA; note = Gene: PLK3; note = Location (start to end; relative to TSS): PLK3_79_109; note = Orientation (relative to transcription): antisense; note = sgRNA Position: 44800462; note = Sequence Name: 56322-704_101_SL_seq_6283
ggcggcaggctccatgcggc

SEQ ID NO: 6284 - DNA, 20 bp, Homo sapiens
  source 1..20: mol_type = genomic DNA; note = Gene: PLK3; note = Location (start to end; relative to TSS): PLK3_31_61; note = Orientation (relative to transcription): sense; note = sgRNA Position: 44800434; note = Sequence Name: 56322-704_101_SL_seq_6284
ccgggcggaaccgagaagcc

SEQ ID NO: 6285 - DNA, 20 bp, Homo sapiens
  source 1..20: mol_type = genomic DNA; note = Gene: PLK3; note = Location (start to end; relative to TSS): PLK3_72_102; note = Orientation (relative to transcription): sense; note = sgRNA Position: 44800475; note = Sequence Name: 56322-704_101_SL_seq_6285
ggccgcatggagcctgccgc

SEQ ID NO: 6286 - DNA, 20 bp, Homo sapiens
  source 1..20: mol_type = genomic DNA; note = Gene: PLK3; note = Location (start to end; relative to TSS): PLK3_30_60; note = Orientation (relative to transcription): sense; note = sgRNA Position: 44800433; note = Sequence Name: 56322-704_101_SL_seq_6286
gccgggcggaaccgagaagc

SEQ ID NO: 6287 - DNA, 20 bp, Homo sapiens
  source 1..20: mol_type = genomic DNA; note = Gene: PLK3; note = Location (start to end; relative to TSS): PLK3_64_94; note = Orientation (relative to transcription): antisense; note = sgRNA Position: 44800447; note = Sequence Name: 56322-704_101_SL_seq_6287
gcggccggcgcgtcgcagcg

SEQ ID NO: 6288 - DNA, 20 bp, Homo sapiens
  source 1..20: mol_type = genomic DNA; note = Gene: PLK3; note = Location (start to end; relative to TSS): PLK3_24_54; note = Orientation (relative to transcription): antisense; note = sgRNA Position: 44800407; note = Sequence Name: 56322-704_101_SL_seq_6288
cgcccggccccggccgcgcg

SEQ ID NO: 6289 - DNA, 20 bp, Homo sapiens
  source 1..20: mol_type = genomic DNA; note = Gene: PLK3; note = Location (start to end; relative to TSS): PLK3_59_89; note = Orientation (relative to transcription): sense; note = sgRNA Position: 44800462; note = Sequence Name: 56322-704_101_SL_seq_6289
gctgcgacgcgccggccgca

SEQ ID NO: 6290 - DNA, 20 bp, Homo sapiens
  source 1..20: mol_type = genomic DNA; note = Gene: PLK4; note = Location (start to end; relative to TSS): PLK4_48_78; note = Orientation (relative to transcription): sense; note = sgRNA Position: 127880967; note = Sequence Name: 56322-704_101_SL_seq_6290
ggcaccgcccaggcctcgga

SEQ ID NO: 6291 - DNA, 20 bp, Homo sapiens
  source 1..20: mol_type = genomic DNA; note = Gene: PLK4; note = Location (start to end; relative to TSS): PLK4_94_124; note = Orientation (relative to transcription): sense; note = sgRNA Position: 127881013; note = Sequence Name: 56322-704_101_SL_seq_6291
ttcagcgtcgtcgcctggag

SEQ ID NO: 6292 - DNA, 20 bp, Homo sapiens
  source 1..20: mol_type = genomic DNA; note = Gene: PLK4; note = Location (start to end; relative to TSS): PLK4_51_81; note = Orientation (relative to transcription): antisense; note = sgRNA Position: 127880950; note = Sequence Name: 56322-704_101_SL_seq_6292
gaggcctgggcggtgcctct

SEQ ID NO: 6293 - DNA, 20 bp, Homo sapiens
  source 1..20: mol_type = genomic DNA; note = Gene: PLK4; note = Location (start to end; relative to TSS): PLK4_89_119; note = Orientation (relative to transcription): sense; note = sgRNA Position: 127881008; note = Sequence Name: 56322-704_101_SL_seq_6293
gtggtttcagcgtcgtcgcc

SEQ ID NO: 6294 - DNA, 20 bp, Homo sapiens
  source 1..20: mol_type = genomic DNA; note = Gene: PLK4; note = Location (start to end; relative to TSS): PLK4_27_57; note = Orientation (relative to transcription): sense; note = sgRNA Position: 127880946; note = Sequence Name: 56322-704_101_SL_seq_6294
ttttcaaaatgggagcccag

SEQ ID NO: 6295 - DNA, 20 bp, Homo sapiens
  source 1..20: mol_type = genomic DNA; note = Gene: PLK4; note = Location (start to end; relative to TSS): PLK4_61_91; note = Orientation (relative to transcription): antisense; note = sgRNA Position: 127880960; note = Sequence Name: 56322-704_101_SL_seq_6295
gacaccttccgaggcctggg

SEQ ID NO: 6296 - DNA, 20 bp, Homo sapiens
  source 1..20: mol_type = genomic DNA; note = Gene: PLK4; note = Location (start to end; relative to TSS): PLK4_17_47; note = Orientation (relative to transcription): sense; note = sgRNA Position: 127880936; note = Sequence Name: 56322-704_101_SL_seq_6296
cggcgggagattttcaaaat

SEQ ID NO: 6297 - DNA, 20 bp, Homo sapiens
  source 1..20: mol_type = genomic DNA; note = Gene: PLK4; note = Location (start to end; relative to TSS): PLK4_51_81; note = Orientation (relative to transcription): antisense; note = sgRNA Position: 127880950; note = Sequence Name: 56322-704_101_SL_seq_6297
gaggcctgggcggtgcctct

SEQ ID NO: 6298 - DNA, 20 bp, Homo sapiens
  source 1..20: mol_type = genomic DNA; note = Gene: PLK4; note = Location (start to end; relative to TSS): PLK4_16_46; note = Orientation (relative to transcription): sense; note = sgRNA Position: 127880935; note = Sequence Name: 56322-704_101_SL_seq_6298
gcggcgggagattttcaaaa

SEQ ID NO: 6299 - DNA, 20 bp, Homo sapiens
  source 1..20: mol_type = genomic DNA; note = Gene: PLK4; note = Location (start to end; relative to TSS): PLK4_48_78; note = Orientation (relative to transcription): sense; note = sgRNA Position: 127880967; note = Sequence Name: 56322-704_101_SL_seq_6299
ggcaccgcccaggcctcgga

SEQ ID NO: 6300 - DNA, 20 bp, Homo sapiens
  source 1..20: mol_type = genomic DNA; note = Gene: PLK5; note = Location (start to end; relative to TSS): PLK5_48_78; note = Orientation (relative to transcription): antisense; note = sgRNA Position: 1524131; note = Sequence Name: 56322-704_101_SL_seq_6300
gggctccatcgcgcggactc

SEQ ID NO: 6301 - DNA, 20 bp, Homo sapiens
  source 1..20: mol_type = genomic DNA; note = Gene: PLK5; note = Location (start to end; relative to TSS): PLK5_98_128; note = Orientation (relative to transcription): sense; note = sgRNA Position: 1524201; note = Sequence Name: 56322-704_101_SL_seq_6301
gccgccttcctgcgagaccc

SEQ ID NO: 6302 - DNA, 20 bp, Homo sapiens
  source 1..20: mol_type = genomic DNA; note = Gene: PLK5; note = Location (start to end; relative to TSS): PLK5_51_81; note = Orientation (relative to transcription): sense; note = sgRNA Position: 1524154; note = Sequence Name: 56322-704_101_SL_seq_6302
cgatggagccccggccgcgg

SEQ ID NO: 6303 - DNA, 20 bp, Homo sapiens
  source 1..20: mol_type = genomic DNA; note = Gene: PLK5; note = Location (start to end; relative to TSS): PLK5_97_127; note = Orientation (relative to transcription): antisense; note = sgRNA Position: 1524180; note = Sequence Name: 56322-704_101_SL_seq_6303
gcaggaaggcggcgaccagg

SEQ ID NO: 6304 - DNA, 20 bp, Homo sapiens
  source 1..20: mol_type = genomic DNA; note = Gene: PLK5; note = Location (start to end; relative to TSS): PLK5_42_72; note = Orientation (relative to transcription): sense; note = sgRNA Position: 1524145; note = Sequence Name: 56322-704_101_SL_seq_6304
gagtccgcgcgatggagccc

SEQ ID NO: 6305 - DNA, 20 bp, Homo sapiens
  source 1..20: mol_type = genomic DNA; note = Gene: PLK5; note = Location (start to end; relative to TSS): PLK5_74_104; note = Orientation (relative to transcription): antisense; note = sgRNA Position: 1524157; note = Sequence Name: 56322-704_101_SL_seq_6305
cgactcctgcgccgccgccg

SEQ ID NO: 6306 - DNA, 20 bp, Homo sapiens
  source 1..20: mol_type = genomic DNA; note = Gene: PLK5; note = Location (start to end; relative to TSS): PLK5_38_68; note = Orientation (relative to transcription): antisense; note = sgRNA Position: 1524121; note = Sequence Name: 56322-704_101_SL_seq_6306
gcgcggactctggcgcagcc

SEQ ID NO: 6307 - DNA, 20 bp, Homo sapiens
  source 1..20: mol_type = genomic DNA; note = Gene: PLK5; note = Location (start to end; relative to TSS): PLK5_73_103; note = Orientation (relative to transcription): sense; note = sgRNA Position: 1524176; note = Sequence Name: 56322-704_101_SL_seq_6307
gcggcgcaggagtcgccccc

SEQ ID NO: 6308 - DNA, 20 bp, Homo sapiens
  source 1..20: mol_type = genomic DNA; note = Gene: PLK5; note = Location (start to end; relative to TSS): PLK5_18_48; note = Orientation (relative to transcription): antisense; note = sgRNA Position: 1524101; note = Sequence Name: 56322-704_101_SL_seq_6308
gggccgagaccaccgcgctg

SEQ ID NO: 6309 - DNA, 20 bp, Homo sapiens
  source 1..20: mol_type = genomic DNA; note = Gene: PLK5; note = Location (start to end; relative to TSS): PLK5_48_78; note = Orientation (relative to transcription): antisense; note = sgRNA Position: 1524131; note = Sequence Name: 56322-704_101_SL_seq_6309
gggctccatcgcgcggactc

SEQ ID NO: 6310 - DNA, 20 bp, Homo sapiens
  source 1..20: mol_type = genomic DNA; note = Gene: PMVK; note = Location (start to end; relative to TSS): PMVK_39_69; note = Orientation (relative to transcription): antisense; note = sgRNA Position: 154936676; note = Sequence Name: 56322-704_101_SL_seq_6310
ccgcggggcgcctcccagcg

SEQ ID NO: 6311 - DNA, 20 bp, Homo sapiens
  source 1..20: mol_type = genomic DNA; note = Gene: PMVK; note = Location (start to end; relative to TSS): PMVK_85_115; note = Orientation (relative to transcription): sense; note = sgRNA Position: 154936610; note = Sequence Name: 56322-704_101_SL_seq_6311
cgggaaggacttcgtgaccg

SEQ ID NO: 6312 - DNA, 20 bp, Homo sapiens
  source 1..20: mol_type = genomic DNA; note = Gene: PMVK; note = Location (start to end; relative to TSS): PMVK_31_61; note = Orientation (relative to transcription): antisense; note = sgRNA Position: 154936684; note = Sequence Name: 56322-704_101_SL_seq_6312
cgcctcccagcggggccatg

SEQ ID NO: 6313 - DNA, 20 bp, Homo sapiens
  source 1..20: mol_type = genomic DNA; note = Gene: PMVK; note = Location (start to end; relative to TSS): PMVK_70_100; note = Orientation (relative to transcription): sense; note = sgRNA Position: 154936625; note = Sequence Name: 56322-704_101_SL_seq_6313
cggcaagaggaaatccggga

SEQ ID NO: 6314 - DNA, 20 bp, Homo sapiens
  source 1..20: mol_type = genomic DNA; note = Gene: PMVK; note = Location (start to end; relative to TSS): PMVK_34_64; note = Orientation (relative to transcription): sense; note = sgRNA Position: 154936661; note = Sequence Name: 56322-704_101_SL_seq_6314
gctgggaggcgccccgcggc

SEQ ID NO: 6315 - DNA, 20 bp, Homo sapiens
  source 1..20: mol_type = genomic DNA; note = Gene: PMVK; note = Location (start to end; relative to TSS): PMVK_66_96; note = Orientation (relative to transcription): sense; note = sgRNA Position: 154936629; note = Sequence Name: 56322-704_101_SL_seq_6315
tcagcggcaagaggaaatcc

SEQ ID NO: 6316 - DNA, 20 bp, Homo sapiens
  source 1..20: mol_type = genomic DNA; note = Gene: PMVK; note = Location (start to end; relative to TSS): PMVK_30_60; note = Orientation (relative to transcription): sense; note = sgRNA Position: 154936665; note = Sequence Name: 56322-704_101_SL_seq_6316
ccccgctgggaggcgccccg

SEQ ID NO: 6317 - DNA, 20 bp, Homo sapiens
  source 1..20: mol_type = genomic DNA; note = Gene: PMVK; note = Location (start to end; relative to TSS): PMVK_65_95; note = Orientation (relative to transcription): sense; note = sgRNA Position: 154936630; note = Sequence Name: 56322-704_101_SL_seq_6317
ttcagcggcaagaggaaatc

SEQ ID NO: 6318 - DNA, 20 bp, Homo sapiens
  source 1..20: mol_type = genomic DNA; note = Gene: PMVK; note = Location (start to end; relative to TSS): PMVK_20_50; note = Orientation (relative to transcription): sense; note = sgRNA Position: 154936675; note = Sequence Name: 56322-704_101_SL_seq_6318
ggccccatggccccgctggg

SEQ ID NO: 6319 - DNA, 20 bp, Homo sapiens
  source 1..20: mol_type = genomic DNA; note = Gene: PMVK; note = Location (start to end; relative to TSS): PMVK_50_80; note = Orientation (relative to transcription): sense; note = sgRNA Position: 154936645; note = Sequence Name: 56322-704_101_SL_seq_6319
cggctggtactgctgttcag

SEQ ID NO: 6320 - DNA, 20 bp, Homo sapiens
  source 1..20: mol_type = genomic DNA; note = Gene: PNCK; note = Location (start to end; relative to TSS): PNCK_25_55; note = Orientation (relative to transcription): antisense; note = sgRNA Position: 153673784; note = Sequence Name: 56322-704_101_SL_seq_6320
agcaggtgcagacctggagc

SEQ ID NO: 6321 - DNA, 20 bp, Homo sapiens
  source 1..20: mol_type = genomic DNA; note = Gene: PNCK; note = Location (start to end; relative to TSS): PNCK_107_137; note = Orientation (relative to transcription): antisense; note = sgRNA Position: 153673702; note = Sequence Name: 56322-704_101_SL_seq_6321
aggtgtgctgcggacgcgca

SEQ ID NO: 6322 - DNA, 20 bp, Homo sapiens
  source 1..20: mol_type = genomic DNA; note = Gene: PNCK; note = Location (start to end; relative to TSS): PNCK_26_56; note = Orientation (relative to transcription): antisense; note = sgRNA Position: 153673783; note = Sequence Name: 56322-704_101_SL_seq_6322
gagcaggtgcagacctggag

SEQ ID NO: 6323 - DNA, 20 bp, Homo sapiens
  source 1..20: mol_type = genomic DNA; note = Gene: PNCK; note = Location (start to end; relative to TSS): PNCK_101_131; note = Orientation (relative to transcription): antisense; note = sgRNA Position: 153673708; note = Sequence Name: 56322-704_101_SL_seq_6323
gctgcggacgcgcaaggctg

SEQ ID NO: 6324 - DNA, 20 bp, Homo sapiens
  source 1..20: mol_type = genomic DNA; note = Gene: PNCK; note = Location (start to end; relative to TSS): PNCK_20_50; note = Orientation (relative to transcription): sense; note = sgRNA Position: 153673769; note = Sequence Name: 56322-704_101_SL_seq_6324
ctccaggtctgcacctgctc

SEQ ID NO: 6325 - DNA, 20 bp, Homo sapiens
  source 1..20: mol_type = genomic DNA; note = Gene: PNCK; note = Location (start to end; relative to TSS): PNCK_98_128; note = Orientation (relative to transcription): antisense; note = sgRNA Position: 153673711; note = Sequence Name: 56322-704_101_SL_seq_6325
gcggacgcgcaaggctgcgg

SEQ ID NO: 6326 - DNA, 20 bp, Homo sapiens
  source 1..20: mol_type = genomic DNA; note = Gene: PNCK; note = Location (start to end; relative to TSS): PNCK_21_51; note = Orientation (relative to transcription): sense; note = sgRNA Position: 153673768; note = Sequence Name: 56322-704_101_SL_seq_6326
tccaggtctgcacctgctcc

SEQ ID NO: 6327 - DNA, 20 bp, Homo sapiens
  source 1..20: mol_type = genomic DNA; note = Gene: PNCK; note = Location (start to end; relative to TSS): PNCK_66_96; note = Orientation (relative to transcription): sense; note = sgRNA Position: 153673723; note = Sequence Name: 56322-704_101_SL_seq_6327
ggcgcaccggatccggcccg

SEQ ID NO: 6328 - DNA, 20 bp, Homo sapiens
  source 1..20: mol_type = genomic DNA; note = Gene: PNCK; note = Location (start to end; relative to TSS): PNCK_22_52; note = Orientation (relative to transcription): sense; note = sgRNA Position: 153673767; note = Sequence Name: 56322-704_101_SL_seq_6328
ccaggtctgcacctgctccg

SEQ ID NO: 6329 - DNA, 20 bp, Homo sapiens
  source 1..20: mol_type = genomic DNA; note = Gene: PNCK; note = Location (start to end; relative to TSS): PNCK_53_83; note = Orientation (relative to transcription): sense; note = sgRNA Position: 153673736; note = Sequence Name: 56322-704_101_SL_seq_6329
cgcgcggggcgggggcgcac

SEQ ID NO: 6330 - DNA, 20 bp, Homo sapiens
  source 1..20: mol_type = genomic DNA; note = Gene: POMK; note = Location (start to end; relative to TSS): POMK_35_65; note = Orientation (relative to transcription): sense; note = sgRNA Position: 43093576; note = Sequence Name: 56322-704_101_SL_seq_6330
tgcaggtaggtgctgcggcg

SEQ ID NO: 6331 - DNA, 20 bp, Homo sapiens
  source 1..20: mol_type = genomic DNA; note = Gene: POMK; note = Location (start to end; relative to TSS): POMK_83_113; note = Orientation (relative to transcription): sense; note = sgRNA Position: 43093624; note = Sequence Name: 56322-704_101_SL_seq_6331
gcgtgcagctgggtttcccg

SEQ ID NO: 6332 - DNA, 20 bp, Homo sapiens
  source 1..20: mol_type = genomic DNA; note = Gene: POMK; note = Location (start to end; relative to TSS): POMK_36_66; note = Orientation (relative to transcription): sense; note = sgRNA Position: 43093577; note = Sequence Name: 56322-704_101_SL_seq_6332
gcaggtaggtgctgcggcga

SEQ ID NO: 6333 - DNA, 20 bp, Homo sapiens
  source 1..20: mol_type = genomic DNA; note = Gene: POMK; note = Location (start to end; relative to TSS): POMK_82_112; note = Orientation (relative to transcription): sense; note = sgRNA Position: 43093623; note = Sequence Name: 56322-704_101_SL_seq_6333
ggcgtgcagctgggtttccc

SEQ ID NO: 6334 - DNA, 20 bp, Homo sapiens
  source 1..20: mol_type = genomic DNA; note = Gene: POMK; note = Location (start to end; relative to TSS): POMK_37_67; note = Orientation (relative to transcription): sense; note = sgRNA Position: 43093578; note = Sequence Name: 56322-704_101_SL_seq_6334
caggtaggtgctgcggcgag

SEQ ID NO: 6335 - DNA, 20 bp, Homo sapiens
  source 1..20: mol_type = genomic DNA; note = Gene: POMK; note = Location (start to end; relative to TSS): POMK_73_103; note = Orientation (relative to transcription): sense; note = sgRNA Position: 43093614; note = Sequence Name: 56322-704_101_SL_seq_6335
gggcgagggggcgtgcagct

SEQ ID NO: 6336 - DNA, 20 bp, Homo sapiens
  source 1..20: mol_type = genomic DNA; note = Gene: POMK; note = Location (start to end; relative to TSS): POMK_30_60; note = Orientation (relative to transcription): sense; note = sgRNA Position: 43093571; note = Sequence Name: 56322-704_101_SL_seq_6336
tgggctgcaggtaggtgctg

SEQ ID NO: 6337 - DNA, 20 bp, Homo sapiens
  source 1..20: mol_type = genomic DNA; note = Gene: POMK; note = Location (start to end; relative to TSS): POMK_60_90; note = Orientation (relative to transcription): sense; note = sgRNA Position: 43093601; note = Sequence Name: 56322-704_101_SL_seq_6337
tgagagggcgaaggggcgag

SEQ ID NO: 6338 - DNA, 20 bp, Homo sapiens
  source 1..20: mol_type = genomic DNA; note = Gene: POMK; note = Location (start to end; relative to TSS): POMK_28_58; note = Orientation (relative to transcription): antisense; note = sgRNA Position: 43093549; note = Sequence Name: 56322-704_101_SL_seq_6338
acctgcagcccaagcctctg

SEQ ID NO: 6339 - DNA, 20 bp, Homo sapiens
  source 1..20: mol_type = genomic DNA; note = Gene: POMK; note = Location (start to end; relative to TSS): POMK_59_89; note = Orientation (relative to transcription): sense; note = sgRNA Position: 43093600; note = Sequence Name: 56322-704_101_SL_seq_6339
gtgagagggcgaaggggcga

SEQ ID NO: 6340 - DNA, 20 bp, Homo sapiens
  source 1..20: mol_type = genomic DNA; note = Gene: PPIP5K1; note = Location (start to end; relative to TSS): PPIP5K1_27_57; note = Orientation (relative to transcription): sense; note = sgRNA Position: 43590157; note = Sequence Name: 56322-704_101_SL_seq_6340
gggtgagtgaaggccggggg

SEQ ID NO: 6341 - DNA, 20 bp, Homo sapiens
  source 1..20: mol_type = genomic DNA; note = Gene: PPIP5K1; note = Location (start to end; relative to TSS): PPIP5K1_66_96; note = Orientation (relative to transcription): sense; note = sgRNA Position: 43590118; note = Sequence Name: 56322-704_101_SL_seq_6341
gctgggggcggtatcggacc

SEQ ID NO: 6342 - DNA, 20 bp, Homo sapiens
  source 1..20: mol_type = genomic DNA; note = Gene: PPIP5K1; note = Location (start to end; relative to TSS): PPIP5K1_22_52; note = Orientation (relative to transcription): sense; note = sgRNA Position: 43590162; note = Sequence Name: 56322-704_101_SL_seq_6342
gaggcgggtgagtgaaggcc

SEQ ID NO: 6343 - DNA, 20 bp, Homo sapiens
  source 1..20: mol_type = genomic DNA; note = Gene: PPIP5K1; note = Location (start to end; relative to TSS): PPIP5K1_65_95; note = Orientation (relative to transcription): sense; note = sgRNA Position: 43590119; note = Sequence Name: 56322-704_101_SL_seq_6343
ggctgggggcggtatcggac

SEQ ID NO: 6344 - DNA, 20 bp, Homo sapiens
  source 1..20: mol_type = genomic DNA; note = Gene: PPIP5K1; note = Location (start to end; relative to TSS): PPIP5K1_23_53; note = Orientation (relative to transcription): sense; note = sgRNA Position: 43590161; note = Sequence Name: 56322-704_101_SL_seq_6344
aggcgggtgagtgaaggccg

SEQ ID NO: 6345 - DNA, 20 bp, Homo sapiens
  source 1..20: mol_type = genomic DNA; note = Gene: PPIP5K1; note = Location (start to end; relative to TSS): PPIP5K1_60_90; note = Orientation (relative to transcription): sense; note = sgRNA Position: 43590124; note = Sequence Name: 56322-704_101_SL_seq_6345
gctggggctgggggcggtat

SEQ ID NO: 6346 - DNA, 20 bp, Homo sapiens
  source 1..20: mol_type = genomic DNA; note = Gene: PPIP5K1; note = Location (start to end; relative to TSS): PPIP5K1_24_54; note = Orientation (relative to transcription): sense; note = sgRNA Position: 43590160; note = Sequence Name: 56322-704_101_SL_seq_6346
ggcgggtgagtgaaggccgg

SEQ ID NO: 6347 - DNA, 20 bp, Homo sapiens
  source 1..20: mol_type = genomic DNA; note = Gene: PPIP5K1; note = Location (start to end; relative to TSS): PPIP5K1_54_84; note = Orientation (relative to transcription): sense; note = sgRNA Position: 43590130; note = Sequence Name: 56322-704_101_SL_seq_6347
ggagtggctggggctggggg

SEQ ID NO: 6348 - DNA, 20 bp, Homo sapiens
  source 1..20: mol_type = genomic DNA; note = Gene: PPIP5K1; note = Location (start to end; relative to TSS): PPIP5K1_21_51; note = Orientation (relative to transcription): sense; note = sgRNA Position: 43590163; note = Sequence Name: 56322-704_101_SL_seq_6348
ggaggcgggtgagtgaaggc

SEQ ID NO: 6349 - DNA, 20 bp, Homo sapiens
  source 1..20: mol_type = genomic DNA; note = Gene: PPIP5K1; note = Location (start to end; relative to TSS): PPIP5K1_51_81; note = Orientation (relative to transcription): sense; note = sgRNA Position: 43590133; note = Sequence Name: 56322-704_101_SL_seq_6349
gggggagtggctggggctgg

SEQ ID NO: 6350 - DNA, 20 bp, Homo sapiens
  source 1..20: mol_type = genomic DNA; note = Gene: PPIP5K2; note = Location (start to end; relative to TSS): PPIP5K2_54_84; note = Orientation (relative to transcription): antisense; note = sgRNA Position: 103120361; note = Sequence Name: 56322-704_101_SL_seq_6350
tcagttgtaggcgtggacgt

SEQ ID NO: 6351 - DNA, 20 bp, Homo sapiens
  source 1..20: mol_type = genomic DNA; note = Gene: PPIP5K2; note = Location (start to end; relative to TSS): PPIP5K2_88_118; note = Orientation (relative to transcription): sense; note = sgRNA Position: 103120415; note = Sequence Name: 56322-704_101_SL_seq_6351
acccctgcctccgggatgaa

SEQ ID NO: 6352 - DNA, 20 bp, Homo sapiens
  source 1..20: mol_type = genomic DNA; note = Gene: PPIP5K2; note = Location (start to end; relative to TSS): PPIP5K2_28_58; note = Orientation (relative to transcription): antisense; note = sgRNA Position: 103120335; note = Sequence Name: 56322-704_101_SL_seq_6352
cttccttcagtaacagctat

SEQ ID NO: 6353 - DNA, 20 bp, Homo sapiens
  source 1..20: mol_type = genomic DNA; note = Gene: PPIP5K2; note = Location (start to end; relative to TSS): PPIP5K2_79_109; note = Orientation (relative to transcription): sense; note = sgRNA Position: 103120406; note = Sequence Name: 56322-704_101_SL_seq_6353
aaacacctcacccctgcctc

SEQ ID NO: 6354 - DNA, 20 bp, Homo sapiens
  source 1..20: mol_type = genomic DNA; note = Gene: PPIP5K2; note = Location (start to end; relative to TSS): PPIP5K2_27_57; note = Orientation (relative to transcription): antisense; note = sgRNA Position: 103120334; note = Sequence Name: 56322-704_101_SL_seq_6354
ttccttcagtaacagctata

SEQ ID NO: 6355 - DNA, 20 bp, Homo sapiens
  source 1..20: mol_type = genomic DNA; note = Gene: PPIP5K2; note = Location (start to end; relative to TSS): PPIP5K2_66_96; note = Orientation (relative to transcription): antisense; note = sgRNA Position: 103120373; note = Sequence Name: 56322-704_101_SL_seq_6355
tgtcaagagacttcagttgt

SEQ ID NO: 6356 - DNA, 20 bp, Homo sapiens
  source 1..20: mol_type = genomic DNA; note = Gene: PPIP5K2; note = Location (start to end; relative to TSS): PPIP5K2_17_47; note = Orientation (relative to transcription): antisense; note = sgRNA Position: 103120324; note = Sequence Name: 56322-704_101_SL_seq_6356
aacagctatagggccacata

SEQ ID NO: 6357 - DNA, 20 bp, Homo sapiens
  source 1..20: mol_type = genomic DNA; note = Gene: PPIP5K2; note = Location (start to end; relative to TSS): PPIP5K2_61_91; note = Orientation (relative to transcription): antisense; note = sgRNA Position: 103120368; note = Sequence Name: 56322-704_101_SL_seq_6357
agagacttcagttgtaggcg

SEQ ID NO: 6358 - DNA, 20 bp, Homo sapiens
  source 1..20: mol_type = genomic DNA; note = Gene: PPIP5K2; note = Location (start to end; relative to TSS): PPIP5K2_16_46; note = Orientation (relative to transcription): sense; note = sgRNA Position: 103120343; note = Sequence Name: 56322-704_101_SL_seq_6358
ggccctatagctgttactga

SEQ ID NO: 6359 - DNA, 20 bp, Homo sapiens
  source 1..20: mol_type = genomic DNA; note = Gene: PPIP5K2; note = Location (start to end; relative to TSS): PPIP5K2_54_84; note = Orientation (relative to transcription): antisense; note = sgRNA Position: 103120361; note = Sequence Name: 56322-704_101_SL_seq_6359
tcagttgtaggcgtggacgt

SEQ ID NO: 6360 - DNA, 20 bp, Homo sapiens
  source 1..20: mol_type = genomic DNA; note = Gene: PRAG1; note = Location (start to end; relative to TSS): PRAG1_40_70; note = Orientation (relative to transcription): sense; note = sgRNA Position: 8386375; note = Sequence Name: 56322-704_101_SL_seq_6360
cgaacaatgctccggccggg

SEQ ID NO: 6361 - DNA, 20 bp, Homo sapiens
  source 1..20: mol_type = genomic DNA; note = Gene: PRAG1; note = Location (start to end; relative to TSS): PRAG1_71_101; note = Orientation (relative to transcription): sense; note = sgRNA Position: 8386344; note = Sequence Name: 56322-704_101_SL_seq_6361
tcggagaccgacggaggggc

SEQ ID NO: 6362 - DNA, 20 bp, Homo sapiens
  source 1..20: mol_type = genomic DNA; note = Gene: PRAG1; note = Location (start to end; relative to TSS): PRAG1_37_67; note = Orientation (relative to transcription): sense; note = sgRNA Position: 8386378; note = Sequence Name: 56322-704_101_SL_seq_6362
ctgcgaacaatgctccggcc

SEQ ID NO: 6363 - DNA, 20 bp, Homo sapiens
  source 1..20: mol_type = genomic DNA; note = Gene: PRAG1; note = Location (start to end; relative to TSS): PRAG1_67_97; note = Orientation (relative to transcription): sense; note = sgRNA Position: 8386348; note = Sequence Name: 56322-704_101_SL_seq_6363
cggctcggagaccgacggag

SEQ ID NO: 6364 - DNA, 20 bp, Homo sapiens
  source 1..20: mol_type = genomic DNA; note = Gene: PRAG1; note = Location (start to end; relative to TSS): PRAG1_36_66; note = Orientation (relative to transcription): sense; note = sgRNA Position: 8386379; note = Sequence Name: 56322-704_101_SL_seq_6364
tctgcgaacaatgctccggc

SEQ ID NO: 6365 - DNA, 20 bp, Homo sapiens
  source 1..20: mol_type = genomic DNA; note = Gene: PRAG1; note = Location (start to end; relative to TSS): PRAG1_66_96; note = Orientation (relative to transcription): sense; note = sgRNA Position: 8386349; note = Sequence Name: 56322-704_101_SL_seq_6365
gcggctcggagaccgacgga

SEQ ID NO: 6366 - DNA, 20 bp, Homo sapiens
  source 1..20: mol_type = genomic DNA; note = Gene: PRAG1; note = Location (start to end; relative to TSS): PRAG1_31_61; note = Orientation (relative to transcription): antisense; note = sgRNA Position: 8386404; note = Sequence Name: 56322-704_101_SL_seq_6366
gttcgcagaaggtctgcgcg

SEQ ID NO: 6367 - DNA, 20 bp, Homo sapiens
  source 1..20: mol_type = genomic DNA; note = Gene: PRAG1; note = Location (start to end; relative to TSS): PRAG1_64_94; note = Orientation (relative to transcription): antisense; note = sgRNA Position: 8386371; note = Sequence Name: 56322-704_101_SL_seq_6367
tctccgagccgccagccgcc

SEQ ID NO: 6368 - DNA, 20 bp, Homo sapiens
  source 1..20: mol_type = genomic DNA; note = Gene: PRAG1; note = Location (start to end; relative to TSS): PRAG1_32_62; note = Orientation (relative to transcription): sense; note = sgRNA Position: 8386383; note = Sequence Name: 56322-704_101_SL_seq_6368
accttctgcgaacaatgctc

SEQ ID NO: 6369 - DNA, 20 bp, Homo sapiens
  source 1..20: mol_type = genomic DNA; note = Gene: PRAG1; note = Location (start to end; relative to TSS): PRAG1_62_92; note = Orientation (relative to transcription): sense; note = sgRNA Position: 8386353; note = Sequence Name: 56322-704_101_SL_seq_6369
gctggcggctcggagaccga

SEQ ID NO: 6370 - DNA, 20 bp, Homo sapiens
  source 1..20: mol_type = genomic DNA; note = Gene: PRKAA1; note = Location (start to end; relative to TSS): PRKAA1_34_64; note = Orientation (relative to transcription): sense; note = sgRNA Position: 40798316; note = Sequence Name: 56322-704_101_SL_seq_6370
tgcgcccgacgtaggctgcg

SEQ ID NO: 6371 - DNA, 20 bp, Homo sapiens
  source 1..20: mol_type = genomic DNA; note = Gene: PRKAA1; note = Location (start to end; relative to TSS): PRKAA1_70_100; note = Orientation (relative to transcription): sense; note = sgRNA Position: 40798280; note = Sequence Name: 56322-704_101_SL_seq_6371
cgcagggcggtgactcggct

SEQ ID NO: 6372 - DNA, 20 bp, Homo sapiens
  source 1..20: mol_type = genomic DNA; note = Gene: PRKAA1; note = Location (start to end; relative to TSS): PRKAA1_26_56; note = Orientation (relative to transcription): antisense; note = sgRNA Position: 40798344; note = Sequence Name: 56322-704_101_SL_seq_6372
ggcgcagacgctccccctgg

SEQ ID NO: 6373 - DNA, 20 bp, Homo sapiens
  source 1..20: mol_type = genomic DNA; note = Gene: PRKAA1; note = Location (start to end; relative to TSS): PRKAA1_66_96; note = Orientation (relative to transcription): antisense; note = sgRNA Position: 40798304; note = Sequence Name: 56322-704_101_SL_seq_6373
ccgccctgcgccgccagccc

SEQ ID NO: 6374 - DNA, 20 bp, Homo sapiens
  source 1..20: mol_type = genomic DNA; note = Gene: PRKAA1; note = Location (start to end; relative to TSS): PRKAA1_25_55; note = Orientation (relative to transcription): antisense; note = sgRNA Position: 40798345; note = Sequence Name: 56322-704_101_SL_seq_6374
gcgcagacgctccccctggc

SEQ ID NO: 6375 - DNA, 20 bp, Homo sapiens
  source 1..20: mol_type = genomic DNA; note = Gene: PRKAA1; note = Location (start to end; relative to TSS): PRKAA1_65_95; note = Orientation (relative to transcription): sense; note = sgRNA Position: 40798285; note = Sequence Name: 56322-704_101_SL_seq_6375
ggcggcgcagggcggtgact

SEQ ID NO: 6376 - DNA, 20 bp, Homo sapiens
  source 1..20: mol_type = genomic DNA; note = Gene: PRKAA1; note = Location (start to end; relative to TSS): PRKAA1_21_51; note = Orientation (relative to transcription): antisense; note = sgRNA Position: 40798349; note = Sequence Name: 56322-704_101_SL_seq_6376
agacgctccccctggcgggg

SEQ ID NO: 6377 - DNA, 20 bp, Homo sapiens
  source 1..20: mol_type = genomic DNA; note = Gene: PRKAA1; note = Location (start to end; relative to TSS): PRKAA1_57_87; note = Orientation (relative to transcription): sense; note = sgRNA Position: 40798293; note = Sequence Name: 56322-704_101_SL_seq_6377
cctgggctggcggcgcaggg

SEQ ID NO: 6378 - DNA, 20 bp, Homo sapiens
  source 1..20: mol_type = genomic DNA; note = Gene: PRKAA1; note = Location (start to end; relative to TSS): PRKAA1_24_54; note = Orientation (relative to transcription): antisense; note = sgRNA Position: 40798346; note = Sequence Name: 56322-704_101_SL_seq_6378
cgcagacgctccccctggcg

SEQ ID NO: 6379 - DNA, 20 bp, Homo sapiens
  source 1..20: mol_type = genomic DNA; note = Gene: PRKAA1; note = Location (start to end; relative to TSS): PRKAA1_54_84; note = Orientation (relative to transcription): sense; note = sgRNA Position: 40798296; note = Sequence Name: 56322-704_101_SL_seq_6379
gggcctgggctggcggcgca

SEQ ID NO: 6380 - DNA, 20 bp, Homo sapiens
  source 1..20: mol_type = genomic DNA; note = Gene: PRKAA2; note = Location (start to end; relative to TSS): PRKAA2_46_76; note = Orientation (relative to transcription): sense; note = sgRNA Position: 56645386; note = Sequence Name: 56322-704_101_SL_seq_6380
gaggccgcgcgcgccgaaga

SEQ ID NO: 6381 - DNA, 20 bp, Homo sapiens
  source 1..20: mol_type = genomic DNA; note = Gene: PRKAA2; note = Location (start to end; relative to TSS): PRKAA2_83_113; note = Orientation (relative to transcription): sense; note = sgRNA Position: 56645423; note = Sequence Name: 56322-704_101_SL_seq_6381
cacgacgggcgggtgaagat

SEQ ID NO: 6382 - DNA, 20 bp, Homo sapiens
  source 1..20: mol_type = genomic DNA; note = Gene: PRKAA2; note = Location (start to end; relative to TSS): PRKAA2_27_57; note = Orientation (relative to transcription): sense; note = sgRNA Position: 56645367; note = Sequence Name: 56322-704_101_SL_seq_6382
gagcggcaggcggtggagcg

SEQ ID NO: 6383 - DNA, 20 bp, Homo sapiens
  source 1..20: mol_type = genomic DNA; note = Gene: PRKAA2; note = Location (start to end; relative to TSS): PRKAA2_69_99; note = Orientation (relative to transcription): sense; note = sgRNA Position: 56645409; note = Sequence Name: 56322-704_101_SL_seq_6383
ctgagaagcagaagcacgac

SEQ ID NO: 6384 - DNA, 20 bp, Homo sapiens
  source 1..20: mol_type = genomic DNA; note = Gene: PRKAA2; note = Location (start to end; relative to TSS): PRKAA2_20_50; note = Orientation (relative to transcription): sense; note = sgRNA Position: 56645360; note = Sequence Name: 56322-704_101_SL_seq_6384
ctacgcggagcggcaggcgg

SEQ ID NO: 6385 - DNA, 20 bp, Homo sapiens
  source 1..20: mol_type = genomic DNA; note = Gene: PRKAA2; note = Location (start to end; relative to TSS): PRKAA2_68_98; note = Orientation (relative to transcription): sense; note = sgRNA Position: 56645408; note = Sequence Name: 56322-704_101_SL_seq_6385
gctgagaagcagaagcacga

SEQ ID NO: 6386 - DNA, 20 bp, Homo sapiens
  source 1..20: mol_type = genomic DNA; note = Gene: PRKAA2; note = Location (start to end; relative to TSS): PRKAA2_17_47; note = Orientation (relative to transcription): sense; note = sgRNA Position: 56645357; note = Sequence Name: 56322-704_101_SL_seq_6386
cggctacgcggagcggcagg

SEQ ID NO: 6387 - DNA, 20 bp, Homo sapiens
  source 1..20: mol_type = genomic DNA; note = Gene: PRKAA2; note = Location (start to end; relative to TSS): PRKAA2_59_89; note = Orientation (relative to transcription): antisense; note = sgRNA Position: 56645379; note = Sequence Name: 56322-704_101_SL_seq_6387
tcagccatcttcggcgcgcg

SEQ ID NO: 6388 - DNA, 20 bp, Homo sapiens
  source 1..20: mol_type = genomic DNA; note = Gene: PRKAA2; note = Location (start to end; relative to TSS): PRKAA2_10_40; note = Orientation (relative to transcription): sense; note = sgRNA Position: 56645350; note = Sequence Name: 56322-704_101_SL_seq_6388
gcggcggcggctacgcggag

SEQ ID NO: 6389 - DNA, 20 bp, Homo sapiens
  source 1..20: mol_type = genomic DNA; note = Gene: PRKAA2; note = Location (start to end; relative to TSS): PRKAA2_46_76; note = Orientation (relative to transcription): sense; note = sgRNA Position: 56645386; note = Sequence Name: 56322-704_101_SL_seq_6389
gaggccgcgcgcgccgaaga

SEQ ID NO: 6390 - DNA, 20 bp, Homo sapiens
  source 1..20: mol_type = genomic DNA; note = Gene: PRKACA; note = Location (start to end; relative to TSS): PRKACA_31_61; note = Orientation (relative to transcription): sense; note = sgRNA Position: 14117707; note = Sequence Name: 56322-704_101_SL_seq_6390
gggcgggcgcggagagacgc

SEQ ID NO: 6391 - DNA, 20 bp, Homo sapiens
  source 1..20: mol_type = genomic DNA; note = Gene: PRKACA; note = Location (start to end; relative to TSS): PRKACA_91_121; note = Orientation (relative to transcription): antisense; note = sgRNA Position: 14117667; note = Sequence Name: 56322-704_101_SL_seq_6391
cgggctggctgcgctagctg

SEQ ID NO: 6392 - DNA, 20 bp, Homo sapiens
  source 1..20: mol_type = genomic DNA; note = Gene: PRKACA; note = Location (start to end; relative to TSS): PRKACA_33_63; note = Orientation (relative to transcription): antisense; note = sgRNA Position: 14117725; note = Sequence Name: 56322-704_101_SL_seq_6392
ctctccgcgcccgcccgccc

SEQ ID NO: 6393 - DNA, 20 bp, Homo sapiens
  source 1..20: mol_type = genomic DNA; note = Gene: PRKACA; note = Location (start to end; relative to TSS): PRKACA_86_116; note = Orientation (relative to transcription): sense; note = sgRNA Position: 14117652; note = Sequence Name: 56322-704_101_SL_seq_6393
agctagcgcagccagcccga

SEQ ID NO: 6394 - DNA, 20 bp, Homo sapiens
  source 1..20: mol_type = genomic DNA; note = Gene: PRKACA; note = Location (start to end; relative to TSS): PRKACA_34_64; note = Orientation (relative to transcription): antisense; note = sgRNA Position: 14117724; note = Sequence Name: 56322-704_101_SL_seq_6394
tctctccgcgcccgcccgcc

SEQ ID NO: 6395 - DNA, 20 bp, Homo sapiens
  source 1..20: mol_type = genomic DNA; note = Gene: PRKACA; note = Location (start to end; relative to TSS): PRKACA_85_115; note = Orientation (relative to transcription): sense; note = sgRNA Position: 14117653; note = Sequence Name: 56322-704_101_SL_seq_6395
cagctagcgcagccagcccg

SEQ ID NO: 6396 - DNA, 20 bp, Homo sapiens
  source 1..20: mol_type = genomic DNA; note = Gene: PRKACA; note = Location (start to end; relative to TSS): PRKACA_39_69; note = Orientation (relative to transcription): sense; note = sgRNA Position: 14117699; note = Sequence Name: 56322-704_101_SL_seq_6396
gcggagagacgcgggaagca

SEQ ID NO: 6397 - DNA, 20 bp, Homo sapiens
  source 1..20: mol_type = genomic DNA; note = Gene: PRKACA; note = Location (start to end; relative to TSS): PRKACA_85_115; note = Orientation (relative to transcription): sense; note = sgRNA Position: 14117653; note = Sequence Name: 56322-704_101_SL_seq_6397
cagctagcgcagccagcccg

SEQ ID NO: 6398 - DNA, 20 bp, Homo sapiens
  source 1..20: mol_type = genomic DNA; note = Gene: PRKACA; note = Location (start to end; relative to TSS): PRKACA_20_50; note = Orientation (relative to transcription): sense; note = sgRNA Position: 14117718; note = Sequence Name: 56322-704_101_SL_seq_6398
ggttcccgggcgggcgggcg

SEQ ID NO: 6399 - DNA, 20 bp, Homo sapiens
  source 1..20: mol_type = genomic DNA; note = Gene: PRKACA; note = Location (start to end; relative to TSS): PRKACA_50_80; note = Orientation (relative to transcription): sense; note = sgRNA Position: 14117688; note = Sequence Name: 56322-704_101_SL_seq_6399
cgggaagcaggggctgggcg

SEQ ID NO: 6400 - DNA, 20 bp, Homo sapiens
  source 1..20: mol_type = genomic DNA; note = Gene: PRKACB; note = Location (start to end; relative to TSS): PRKACB_100_130; note = Orientation (relative to transcription): sense; note = sgRNA Position: 84144397; note = Sequence Name: 56322-704_101_SL_seq_6400
ccaccttgtaaccagtatac

SEQ ID NO: 6401 - DNA, 20 bp, Homo sapiens
  source 1..20: mol_type = genomic DNA; note = Gene: PRKACB; note = Location (start to end; relative to TSS): PRKACB_130_160; note = Orientation (relative to transcription): sense; note = sgRNA Position: 84144427; note = Sequence Name: 56322-704_101_SL_seq_6401
acagctcttcagaaattgga

SEQ ID NO: 6402 - DNA, 20 bp, Homo sapiens
  source 1..20: mol_type = genomic DNA; note = Gene: PRKACB; note = Location (start to end; relative to TSS): PRKACB_63_93; note = Orientation (relative to transcription): sense; note = sgRNA Position: 84144360; note = Sequence Name: 56322-704_101_SL_seq_6402
aaagtgtaaatgcacatgaa

SEQ ID NO: 6403 - DNA, 20 bp, Homo sapiens
  source 1..20: mol_type = genomic DNA; note = Gene: PRKACB; note = Location (start to end; relative to TSS): PRKACB_109_139; note = Orientation (relative to transcription): antisense; note = sgRNA Position: 84144386; note = Sequence Name: 56322-704_101_SL_seq_6403
cctgtatactggttacaagg

SEQ ID NO: 6404 - DNA, 20 bp, Homo sapiens
  source 1..20: mol_type = genomic DNA; note = Gene: PRKACB; note = Location (start to end; relative to TSS): PRKACB_17_47; note = Orientation (relative to transcription): sense; note = sgRNA Position: 84144314; note = Sequence Name: 56322-704_101_SL_seq_6404
aagaagttgtgagctccttc

SEQ ID NO: 6405 - DNA, 20 bp, Homo sapiens
  source 1..20: mol_type = genomic DNA; note = Gene: PRKACB; note = Location (start to end; relative to TSS): PRKACB_100_130; note = Orientation (relative to transcription): sense; note = sgRNA Position: 84144397; note = Sequence Name: 56322-704_101_SL_seq_6405
ccaccttgtaaccagtatac

SEQ ID NO: 6406 - DNA, 20 bp, Homo sapiens
  source 1..20: mol_type = genomic DNA; note = Gene: PRKACB; note = Location (start to end; relative to TSS): PRKACB_-22_8; note = Orientation (relative to transcription): antisense; note = sgRNA Position: 84144255; note = Sequence Name: 56322-704_101_SL_seq_6406
tgtcaaacttcctgtttgca

SEQ ID NO: 6407 - DNA, 20 bp, Homo sapiens
  source 1..20: mol_type = genomic DNA; note = Gene: PRKACB; note = Location (start to end; relative to TSS): PRKACB_63_93; note = Orientation (relative to transcription): sense; note = sgRNA Position: 84144360; note = Sequence Name: 56322-704_101_SL_seq_6407
aaagtgtaaatgcacatgaa

SEQ ID NO: 6408 - DNA, 20 bp, Homo sapiens
  source 1..20: mol_type = genomic DNA; note = Gene: PRKACB; note = Location (start to end; relative to TSS): PRKACB_-41_-11; note = Orientation (relative to transcription): sense; note = sgRNA Position: 84144256; note = Sequence Name: 56322-704_101_SL_seq_6408
ggtttgaataccctgcaaac

SEQ ID NO: 6409 - DNA, 20 bp, Homo sapiens
  source 1..20: mol_type = genomic DNA; note = Gene: PRKACB; note = Location (start to end; relative to TSS): PRKACB_17_47; note = Orientation (relative to transcription): sense; note = sgRNA Position: 84144314; note = Sequence Name: 56322-704_101_SL_seq_6409
aagaagttgtgagctccttc

SEQ ID NO: 6410 - DNA, 20 bp, Homo sapiens
  source 1..20: mol_type = genomic DNA; note = Gene: PRKACG; note = Location (start to end; relative to TSS): PRKACG_32_62; note = Orientation (relative to transcription): antisense; note = sgRNA Position: 69014077; note = Sequence Name: 56322-704_101_SL_seq_6410
ctcggtgtccttcttggcgg

SEQ ID NO: 6411 - DNA, 20 bp, Homo sapiens
  source 1..20: mol_type = genomic DNA; note = Gene: PRKACG; note = Location (start to end; relative to TSS): PRKACG_85_115; note = Orientation (relative to transcription): sense; note = sgRNA Position: 69014004; note = Sequence Name: 56322-704_101_SL_seq_6411
ggagatttcctctacagatg

SEQ ID NO: 6412 - DNA, 20 bp, Homo sapiens
  source 1..20: mol_type = genomic DNA; note = Gene: PRKACG; note = Location (start to end; relative to TSS): PRKACG_30_60; note = Orientation (relative to transcription): sense; note = sgRNA Position: 69014059; note = Sequence Name: 56322-704_101_SL_seq_6412
caagaaggacaccgagcagg

SEQ ID NO: 6413 - DNA, 20 bp, Homo sapiens
  source 1..20: mol_type = genomic DNA; note = Gene: PRKACG; note = Location (start to end; relative to TSS): PRKACG_84_114; note = Orientation (relative to transcription): sense; note = sgRNA Position: 69014005; note = Sequence Name: 56322-704_101_SL_seq_6413
aggagatttcctctacagat

SEQ ID NO: 6414 - DNA, 20 bp, Homo sapiens
  source 1..20: mol_type = genomic DNA; note = Gene: PRKACG; note = Location (start to end; relative to TSS): PRKACG_27_57; note = Orientation (relative to transcription): sense; note = sgRNA Position: 69014062; note = Sequence Name: 56322-704_101_SL_seq_6414
cgccaagaaggacaccgagc

SEQ ID NO: 6415 - DNA, 20 bp, Homo sapiens
  source 1..20: mol_type = genomic DNA; note = Gene: PRKACG; note = Location (start to end; relative to TSS): PRKACG_78_108; note = Orientation (relative to transcription): antisense; note = sgRNA Position: 69014031; note = Sequence Name: 56322-704_101_SL_seq_6415
aatctcctctggctttggct

SEQ ID NO: 6416 - DNA, 20 bp, Homo sapiens
  source 1..20: mol_type = genomic DNA; note = Gene: PRKACG; note = Location (start to end; relative to TSS): PRKACG_34_64; note = Orientation (relative to transcription): antisense; note = sgRNA Position: 69014075; note = Sequence Name: 56322-704_101_SL_seq_6416
tgctcggtgtccttcttggc

SEQ ID NO: 6417 - DNA, 20 bp, Homo sapiens
  source 1..20: mol_type = genomic DNA; note = Gene: PRKACG; note = Location (start to end; relative to TSS): PRKACG_64_94; note = Orientation (relative to transcription): sense; note = sgRNA Position: 69014025; note = Sequence Name: 56322-704_101_SL_seq_6417
gagttcctagccaaagccag

SEQ ID NO: 6418 - DNA, 20 bp, Homo sapiens
  source 1..20: mol_type = genomic DNA; note = Gene: PRKACG; note = Location (start to end; relative to TSS): PRKACG_20_50; note = Orientation (relative to transcription): antisense; note = sgRNA Position: 69014089; note = Sequence Name: 56322-704_101_SL_seq_6418
cttggcgggggcgttgccca

SEQ ID NO: 6419 - DNA, 20 bp, Homo sapiens
  source 1..20: mol_type = genomic DNA; note = Gene: PRKACG; note = Location (start to end; relative to TSS): PRKACG_50_80; note = Orientation (relative to transcription): antisense; note = sgRNA Position: 69014059; note = Sequence Name: 56322-704_101_SL_seq_6419
gttcacgctctcctcctgct

SEQ ID NO: 6420 - DNA, 20 bp, Homo sapiens
  source 1..20: mol_type = genomic DNA; note = Gene: PRKCA; note = Location (start to end; relative to TSS): PRKCA_43_73; note = Orientation (relative to transcription): antisense; note = sgRNA Position: 66302662; note = Sequence Name: 56322-704_101_SL_seq_6420
gtgctgcgcggagcgggagc

SEQ ID NO: 6421 - DNA, 20 bp, Homo sapiens
  source 1..20: mol_type = genomic DNA; note = Gene: PRKCA; note = Location (start to end; relative to TSS): PRKCA_96_126; note = Orientation (relative to transcription): antisense; note = sgRNA Position: 66302715; note = Sequence Name: 56322-704_101_SL_seq_6421
gtggccgaggtcgcggcgag

SEQ ID NO: 6422 - DNA, 20 bp, Homo sapiens
  source 1..20: mol_type = genomic DNA; note = Gene: PRKCA; note = Location (start to end; relative to TSS): PRKCA_44_74; note = Orientation (relative to transcription): antisense; note = sgRNA Position: 66302663; note = Sequence Name: 56322-704_101_SL_seq_6422
ggtgctgcgcggagcgggag

SEQ ID NO: 6423 - DNA, 20 bp, Homo sapiens
  source 1..20: mol_type = genomic DNA; note = Gene: PRKCA; note = Location (start to end; relative to TSS): PRKCA_95_125; note = Orientation (relative to transcription): antisense; note = sgRNA Position: 66302714; note = Sequence Name: 56322-704_101_SL_seq_6423
tggccgaggtcgcggcgagg

SEQ ID NO: 6424 - DNA, 20 bp, Homo sapiens
  source 1..20: mol_type = genomic DNA; note = Gene: PRKCA; note = Location (start to end; relative to TSS): PRKCA_49_79; note = Orientation (relative to transcription): antisense; note = sgRNA Position: 66302668; note = Sequence Name: 56322-704_101_SL_seq_6424
gggctggtgctgcgcggagc

SEQ ID NO: 6425 - DNA, 20 bp, Homo sapiens
  source 1..20: mol_type = genomic DNA; note = Gene: PRKCA; note = Location (start to end; relative to TSS): PRKCA_90_120; note = Orientation (relative to transcription): sense; note = sgRNA Position: 66302729; note = Sequence Name: 56322-704_101_SL_seq_6425
ctcgccgcgacctcggccac

SEQ ID NO: 6426 - DNA, 20 bp, Homo sapiens
  source 1..20: mol_type = genomic DNA; note = Gene: PRKCA; note = Location (start to end; relative to TSS): PRKCA_28_58; note = Orientation (relative to transcription): antisense; note = sgRNA Position: 66302647; note = Sequence Name: 56322-704_101_SL_seq_6426
ggagcgggagccggagccgc

SEQ ID NO: 6427 - DNA, 20 bp, Homo sapiens
  source 1..20: mol_type = genomic DNA; note = Gene: PRKCA; note = Location (start to end; relative to TSS): PRKCA_65_95; note = Orientation (relative to transcription): antisense; note = sgRNA Position: 66302684; note = Sequence Name: 56322-704_101_SL_seq_6427
ggggccggggagagtcgggc

SEQ ID NO: 6428 - DNA, 20 bp, Homo sapiens
  source 1..20: mol_type = genomic DNA; note = Gene: PRKCA; note = Location (start to end; relative to TSS): PRKCA_16_46; note = Orientation (relative to transcription): antisense; note = sgRNA Position: 66302635; note = Sequence Name: 56322-704_101_SL_seq_6428
ggagccgctggctcgcccgc

SEQ ID NO: 6429 - DNA, 20 bp, Homo sapiens
  source 1..20: mol_type = genomic DNA; note = Gene: PRKCA; note = Location (start to end; relative to TSS): PRKCA_49_79; note = Orientation (relative to transcription): antisense; note = sgRNA Position: 66302668; note = Sequence Name: 56322-704_101_SL_seq_6429
gggctggtgctgcgcggagc

SEQ ID NO: 6430 - DNA, 20 bp, Homo sapiens
  source 1..20: mol_type = genomic DNA; note = Gene: PRKCB; note = Location (start to end; relative to TSS): PRKCB_52_82; note = Orientation (relative to transcription): antisense; note = sgRNA Position: 23836041; note = Sequence Name: 56322-704_101_SL_seq_6430
ttcccctgcgccggctctgg

SEQ ID NO: 6431 - DNA, 20 bp, Homo sapiens
  source 1..20: mol_type = genomic DNA; note = Gene: PRKCB; note = Location (start to end; relative to TSS): PRKCB_85_115; note = Orientation (relative to transcription): antisense; note = sgRNA Position: 23836074; note = Sequence Name: 56322-704_101_SL_seq_6431
ggcggccgctgctgcacccg

SEQ ID NO: 6432 - DNA, 20 bp, Homo sapiens
  source 1..20: mol_type = genomic DNA; note = Gene: PRKCB; note = Location (start to end; relative to TSS): PRKCB_46_76; note = Orientation (relative to transcription): antisense; note = sgRNA Position: 23836035; note = Sequence Name: 56322-704_101_SL_seq_6432
tgcgccggctctggcggccg

SEQ ID NO: 6433 - DNA, 20 bp, Homo sapiens
  source 1..20: mol_type = genomic DNA; note = Gene: PRKCB; note = Location (start to end; relative to TSS): PRKCB_78_108; note = Orientation (relative to transcription): antisense; note = sgRNA Position: 23836067; note = Sequence Name: 56322-704_101_SL_seq_6433
gctgctgcacccggggccgc

SEQ ID NO: 6434 - DNA, 20 bp, Homo sapiens
  source 1..20: mol_type = genomic DNA; note = Gene: PRKCB; note = Location (start to end; relative to TSS): PRKCB_39_69; note = Orientation (relative to transcription): antisense; note = sgRNA Position: 23836028; note = Sequence Name: 56322-704_101_SL_seq_6434
gctctggcggccgcggcgcg

SEQ ID NO: 6435 - DNA, 20 bp, Homo sapiens
  source 1..20: mol_type = genomic DNA; note = Gene: PRKCB; note = Location (start to end; relative to TSS): PRKCB_71_101; note = Orientation (relative to transcription): sense; note = sgRNA Position: 23836080; note = Sequence Name: 56322-704_101_SL_seq_6435
cgcggccccgggtgcagcag

SEQ ID NO: 6436 - DNA, 20 bp, Homo sapiens
  source 1..20: mol_type = genomic DNA; note = Gene: PRKCB; note = Location (start to end; relative to TSS): PRKCB_31_61; note = Orientation (relative to transcription): antisense; note = sgRNA Position: 23836020; note = Sequence Name: 56322-704_101_SL_seq_6436
ggccgcggcgcgcggagccg

SEQ ID NO: 6437 - DNA, 20 bp, Homo sapiens
  source 1..20: mol_type = genomic DNA; note = Gene: PRKCB; note = Location (start to end; relative to TSS): PRKCB_61_91; note = Orientation (relative to transcription): antisense; note = sgRNA Position: 23836050; note = Sequence Name: 56322-704_101_SL_seq_6437
cgcgggcgcttcccctgcgc

SEQ ID NO: 6438 - DNA, 20 bp, Homo sapiens
  source 1..20: mol_type = genomic DNA; note = Gene: PRKCB; note = Location (start to end; relative to TSS): PRKCB_20_50; note = Orientation (relative to transcription): sense; note = sgRNA Position: 23836029; note = Sequence Name: 56322-704_101_SL_seq_6438
agccccggctccgcgcgccg

SEQ ID NO: 6439 - DNA, 20 bp, Homo sapiens
  source 1..20: mol_type = genomic DNA; note = Gene: PRKCB; note = Location (start to end; relative to TSS): PRKCB_52_82; note = Orientation (relative to transcription): antisense; note = sgRNA Position: 23836041; note = Sequence Name: 56322-704_101_SL_seq_6439
ttcccctgcgccggctctgg

SEQ ID NO: 6440 - DNA, 20 bp, Homo sapiens
  source 1..20: mol_type = genomic DNA; note = Gene: PRKCD; note = Location (start to end; relative to TSS): PRKCD_43_73; note = Orientation (relative to transcription): antisense; note = sgRNA Position: 53161258; note = Sequence Name: 56322-704_101_SL_seq_6440
gggggtcgctcgggagatgt

SEQ ID NO: 6441 - DNA, 20 bp, Homo sapiens
  source 1..20: mol_type = genomic DNA; note = Gene: PRKCD; note = Location (start to end; relative to TSS): PRKCD_78_108; note = Orientation (relative to transcription): antisense; note = sgRNA Position: 53161293; note = Sequence Name: 56322-704_101_SL_seq_6441
gtgtggcccgggcctccgcg

SEQ ID NO: 6442 - DNA, 20 bp, Homo sapiens
  source 1..20: mol_type = genomic DNA; note = Gene: PRKCD; note = Location (start to end; relative to TSS): PRKCD_36_66; note = Orientation (relative to transcription): sense; note = sgRNA Position: 53161271; note = Sequence Name: 56322-704_101_SL_seq_6442
cacatctcccgagcgacccc

SEQ ID NO: 6443 - DNA, 20 bp, Homo sapiens
  source 1..20: mol_type = genomic DNA; note = Gene: PRKCD; note = Location (start to end; relative to TSS): PRKCD_77_107; note = Orientation (relative to transcription): sense; note = sgRNA Position: 53161312; note = Sequence Name: 56322-704_101_SL_seq_6443
aggcccgggccacacctcac

SEQ ID NO: 6444 - DNA, 20 bp, Homo sapiens
  source 1..20: mol_type = genomic DNA; note = Gene: PRKCD; note = Location (start to end; relative to TSS): PRKCD_28_58; note = Orientation (relative to transcription): antisense; note = sgRNA Position: 53161243; note = Sequence Name: 56322-704_101_SL_seq_6444
gatgtgggctacagccgcct

SEQ ID NO: 6445 - DNA, 20 bp, Homo sapiens
  source 1..20: mol_type = genomic DNA; note = Gene: PRKCD; note = Location (start to end; relative to TSS): PRKCD_75_105; note = Orientation (relative to transcription): antisense; note = sgRNA Position: 53161290; note = Sequence Name: 56322-704_101_SL_seq_6445
tggcccgggcctccgcgcgg

SEQ ID NO: 6446 - DNA, 20 bp, Homo sapiens
  source 1..20: mol_type = genomic DNA; note = Gene: PRKCD; note = Location (start to end; relative to TSS): PRKCD_27_57; note = Orientation (relative to transcription): antisense; note = sgRNA Position: 53161242; note = Sequence Name: 56322-704_101_SL_seq_6446
atgtgggctacagccgcctc

SEQ ID NO: 6447 - DNA, 20 bp, Homo sapiens
  source 1..20: mol_type = genomic DNA; note = Gene: PRKCD; note = Location (start to end; relative to TSS): PRKCD_57_87; note = Orientation (relative to transcription): sense; note = sgRNA Position: 53161292; note = Sequence Name: 56322-704_101_SL_seq_6447
ggcgcccgcccgccgcgcgg

SEQ ID NO: 6448 - DNA, 20 bp, Homo sapiens
  source 1..20: mol_type = genomic DNA; note = Gene: PRKCD; note = Location (start to end; relative to TSS): PRKCD_21_51; note = Orientation (relative to transcription): antisense; note = sgRNA Position: 53161236; note = Sequence Name: 56322-704_101_SL_seq_6448
gctacagccgcctcgggctc

SEQ ID NO: 6449 - DNA, 20 bp, Homo sapiens
  source 1..20: mol_type = genomic DNA; note = Gene: PRKCD; note = Location (start to end; relative to TSS): PRKCD_52_82; note = Orientation (relative to transcription): antisense; note = sgRNA Position: 53161267; note = Sequence Name: 56322-704_101_SL_seq_6449
gcgggcgccgggggtcgctc

SEQ ID NO: 6450 - DNA, 20 bp, Homo sapiens
  source 1..20: mol_type = genomic DNA; note = Gene: PRKCE; note = Location (start to end; relative to TSS): PRKCE_52_82; note = Orientation (relative to transcription): antisense; note = sgRNA Position: 45651733; note = Sequence Name: 56322-704_101_SL_seq_6450
gctccggactgcgggaaagc

SEQ ID NO: 6451 - DNA, 20 bp, Homo sapiens
  source 1..20: mol_type = genomic DNA; note = Gene: PRKCE; note = Location (start to end; relative to TSS): PRKCE_82_112; note = Orientation (relative to transcription): antisense; note = sgRNA Position: 45651763; note = Sequence Name: 56322-704_101_SL_seq_6451
gggctgcctcgccgcctcgc

SEQ ID NO: 6452 - DNA, 20 bp, Homo sapiens
  source 1..20: mol_type = genomic DNA; note = Gene: PRKCE; note = Location (start to end; relative to TSS): PRKCE_46_76; note = Orientation (relative to transcription): sense; note = sgRNA Position: 45651747; note = Sequence Name: 56322-704_101_SL_seq_6452
gctttcccgcagtccggagc

SEQ ID NO: 6453 - DNA, 20 bp, Homo sapiens
  source 1..20: mol_type = genomic DNA; note = Gene: PRKCE; note = Location (start to end; relative to TSS): PRKCE_79_109; note = Orientation (relative to transcription): sense; note = sgRNA Position: 45651780; note = Sequence Name: 56322-704_101_SL_seq_6453
aggcggcgaggcagcccccg

SEQ ID NO: 6454 - DNA, 20 bp, Homo sapiens
  source 1..20: mol_type = genomic DNA; note = Gene: PRKCE; note = Location (start to end; relative to TSS): PRKCE_40_70; note = Orientation (relative to transcription): sense; note = sgRNA Position: 45651741; note = Sequence Name: 56322-704_101_SL_seq_6454
gcgcccgctttcccgcagtc

SEQ ID NO: 6455 - DNA, 20 bp, Homo sapiens
  source 1..20: mol_type = genomic DNA; note = Gene: PRKCE; note = Location (start to end; relative to TSS): PRKCE_74_104; note = Orientation (relative to transcription): antisense; note = sgRNA Position: 45651755; note = Sequence Name: 56322-704_101_SL_seq_6455
tcgccgcctcgctggctctc

SEQ ID NO: 6456 - DNA, 20 bp, Homo sapiens
  source 1..20: mol_type = genomic DNA; note = Gene: PRKCE; note = Location (start to end; relative to TSS): PRKCE_18_48; note = Orientation (relative to transcription): sense; note = sgRNA Position: 45651719; note = Sequence Name: 56322-704_101_SL_seq_6456
aggtaggtaagcgccgggcg

SEQ ID NO: 6457 - DNA, 20 bp, Homo sapiens
  source 1..20: mol_type = genomic DNA; note = Gene: PRKCE; note = Location (start to end; relative to TSS): PRKCE_52_82; note = Orientation (relative to transcription): antisense; note = sgRNA Position: 45651733; note = Sequence Name: 56322-704_101_SL_seq_6457
gctccggactgcgggaaagc

SEQ ID NO: 6458 - DNA, 20 bp, Homo sapiens
  source 1..20: mol_type = genomic DNA; note = Gene: PRKCE; note = Location (start to end; relative to TSS): PRKCE_13_43; note = Orientation (relative to transcription): sense; note = sgRNA Position: 45651714; note = Sequence Name: 56322-704_101_SL_seq_6458
cggaaaggtaggtaagcgcc

SEQ ID NO: 6459 - DNA, 20 bp, Homo sapiens
  source 1..20: mol_type = genomic DNA; note = Gene: PRKCE; note = Location (start to end; relative to TSS): PRKCE_46_76; note = Orientation (relative to transcription): sense; note = sgRNA Position: 45651747; note = Sequence Name: 56322-704_101_SL_seq_6459
gctttcccgcagtccggagc

SEQ ID NO: 6460 - DNA, 20 bp, Homo sapiens
  source 1..20: mol_type = genomic DNA; note = Gene: PRKCG; note = Location (start to end; relative to TSS): PRKCG_48_78; note = Orientation (relative to transcription): antisense; note = sgRNA Position: 53882251; note = Sequence Name: 56322-704_101_SL_seq_6460
gcaggggcgccggcagccgg

SEQ ID NO: 6461 - DNA, 20 bp, Homo sapiens
  source 1..20: mol_type = genomic DNA; note = Gene: PRKCG; note = Location (start to end; relative to TSS): PRKCG_79_109; note = Orientation (relative to transcription): sense; note = sgRNA Position: 53882302; note = Sequence Name: 56322-704_101_SL_seq_6461
cactcgcccgctccccctgg

SEQ ID NO: 6462 - DNA, 20 bp, Homo sapiens
  source 1..20: mol_type = genomic DNA; note = Gene: PRKCG; note = Location (start to end; relative to TSS): PRKCG_45_75; note = Orientation (relative to transcription): sense; note = sgRNA Position: 53882268; note = Sequence Name: 56322-704_101_SL_seq_6462
gctgccggcgcccctgcctt

SEQ ID NO: 6463 - DNA, 20 bp, Homo sapiens
  source 1..20: mol_type = genomic DNA; note = Gene: PRKCG; note = Location (start to end; relative to TSS): PRKCG_76_106; note = Orientation (relative to transcription): sense; note = sgRNA Position: 53882299; note = Sequence Name: 56322-704_101_SL_seq_6463
ccccactcgcccgctccccc

SEQ ID NO: 6464 - DNA, 20 bp, Homo sapiens
  source 1..20: mol_type = genomic DNA; note = Gene: PRKCG; note = Location (start to end; relative to TSS): PRKCG_39_69; note = Orientation (relative to transcription): antisense; note = sgRNA Position: 53882242; note = Sequence Name: 56322-704_101_SL_seq_6464
ccggcagccggaggcacggg

SEQ ID NO: 6465 - DNA, 20 bp, Homo sapiens
  source 1..20: mol_type = genomic DNA; note = Gene: PRKCG; note = Location (start to end; relative to TSS): PRKCG_70_100; note = Orientation (relative to transcription): antisense; note = sgRNA Position: 53882273; note = Sequence Name: 56322-704_101_SL_seq_6465
gagtggggaggaagagccaa

SEQ ID NO: 6466 - DNA, 20 bp, Homo sapiens
  source 1..20: mol_type = genomic DNA; note = Gene: PRKCG; note = Location (start to end; relative to TSS): PRKCG_23_53; note = Orientation (relative to transcription): sense; note = sgRNA Position: 53882246; note = Sequence Name: 56322-704_101_SL_seq_6466
accgccgccgcccgtgcctc

SEQ ID NO: 6467 - DNA, 20 bp, Homo sapiens
  source 1..20: mol_type = genomic DNA; note = Gene: PRKCG; note = Location (start to end; relative to TSS): PRKCG_58_88; note = Orientation (relative to transcription): antisense; note = sgRNA Position: 53882261; note = Sequence Name: 56322-704_101_SL_seq_6467
agagccaaaggcaggggcgc

SEQ ID NO: 6468 - DNA, 20 bp, Homo sapiens
  source 1..20: mol_type = genomic DNA; note = Gene: PRKCG; note = Location (start to end; relative to TSS): PRKCG_15_45; note = Orientation (relative to transcription): antisense; note = sgRNA Position: 53882218; note = Sequence Name: 56322-704_101_SL_seq_6468
ggcggtgggagctccagctc

SEQ ID NO: 6469 - DNA, 20 bp, Homo sapiens
  source 1..20: mol_type = genomic DNA; note = Gene: PRKCG; note = Location (start to end; relative to TSS): PRKCG_45_75; note = Orientation (relative to transcription): sense; note = sgRNA Position: 53882268; note = Sequence Name: 56322-704_101_SL_seq_6469
gctgccggcgcccctgcctt

SEQ ID NO: 6470 - DNA, 20 bp, Homo sapiens
  source 1..20: mol_type = genomic DNA; note = Gene: PRKCH; note = Location (start to end; relative to TSS): PRKCH_52_82; note = Orientation (relative to transcription): sense; note = sgRNA Position: 61321657; note = Sequence Name: 56322-704_101_SL_seq_6470
ctggtttgaagctcgccgag

SEQ ID NO: 6471 - DNA, 20 bp, Homo sapiens
  source 1..20: mol_type = genomic DNA; note = Gene: PRKCH; note = Location (start to end; relative to TSS): PRKCH_85_115; note = Orientation (relative to transcription): sense; note = sgRNA Position: 61321690; note = Sequence Name: 56322-704_101_SL_seq_6471
gagccttcggaggcgggggc

SEQ ID NO: 6472 - DNA, 20 bp, Homo sapiens
  source 1..20: mol_type = genomic DNA; note = Gene: PRKCH; note = Location (start to end; relative to TSS): PRKCH_33_63; note = Orientation (relative to transcription): antisense; note = sgRNA Position: 61321618; note = Sequence Name: 56322-704_101_SL_seq_6472
agctgccgccgccgcatccc

SEQ ID NO: 6473 - DNA, 20 bp, Homo sapiens
  source 1..20: mol_type = genomic DNA; note = Gene: PRKCH; note = Location (start to end; relative to TSS): PRKCH_72_102; note = Orientation (relative to transcription): sense; note = sgRNA Position: 61321677; note = Sequence Name: 56322-704_101_SL_seq_6473
tgggggagagcgtgagcctt

SEQ ID NO: 6474 - DNA, 20 bp, Homo sapiens
  source 1..20: mol_type = genomic DNA; note = Gene: PRKCH; note = Location (start to end; relative to TSS): PRKCH_19_49; note = Orientation (relative to transcription): sense; note = sgRNA Position: 61321624; note = Sequence Name: 56322-704_101_SL_seq_6474
tctcgccggggatgcggcgg

SEQ ID NO: 6475 - DNA, 20 bp, Homo sapiens
  source 1..20: mol_type = genomic DNA; note = Gene: PRKCH; note = Location (start to end; relative to TSS): PRKCH_54_84; note = Orientation (relative to transcription): sense; note = sgRNA Position: 61321659; note = Sequence Name: 56322-704_101_SL_seq_6475
ggtttgaagctcgccgagtg

SEQ ID NO: 6476 - DNA, 20 bp, Homo sapiens
  source 1..20: mol_type = genomic DNA; note = Gene: PRKCH; note = Location (start to end; relative to TSS): PRKCH_16_46; note = Orientation (relative to transcription): sense; note = sgRNA Position: 61321621; note = Sequence Name: 56322-704_101_SL_seq_6476
ggttctcgccggggatgcgg

SEQ ID NO: 6477 - DNA, 20 bp, Homo sapiens
  source 1..20: mol_type = genomic DNA; note = Gene: PRKCH; note = Location (start to end; relative to TSS): PRKCH_53_83; note = Orientation (relative to transcription): sense; note = sgRNA Position: 61321658; note = Sequence Name: 56322-704_101_SL_seq_6477
tggtttgaagctcgccgagt

SEQ ID NO: 6478 - DNA, 20 bp, Homo sapiens
  source 1..20: mol_type = genomic DNA; note = Gene: PRKCH; note = Location (start to end; relative to TSS): PRKCH_13_43; note = Orientation (relative to transcription): sense; note = sgRNA Position: 61321618; note = Sequence Name: 56322-704_101_SL_seq_6478
cgaggttctcgccggggatg

SEQ ID NO: 6479 - DNA, 20 bp, Homo sapiens
  source 1..20: mol_type = genomic DNA; note = Gene: PRKCH; note = Location (start to end; relative to TSS): PRKCH_52_82; note = Orientation (relative to transcription): sense; note = sgRNA Position: 61321657; note = Sequence Name: 56322-704_101_SL_seq_6479
ctggtttgaagctcgccgag

SEQ ID NO: 6480 - DNA, 20 bp, Homo sapiens
  source 1..20: mol_type = genomic DNA; note = Gene: PRKCI; note = Location (start to end; relative to TSS): PRKCI_46_76; note = Orientation (relative to transcription): antisense; note = sgRNA Position: 170222476; note = Sequence Name: 56322-704_101_SL_seq_6480
cggctcctcccactgcccgt

SEQ ID NO: 6481 - DNA, 20 bp, Homo sapiens
  source 1..20: mol_type = genomic DNA; note = Gene: PRKCI; note = Location (start to end; relative to TSS): PRKCI_76_106; note = Orientation (relative to transcription): antisense; note = sgRNA Position: 170222506; note = Sequence Name: 56322-704_101_SL_seq_6481
ggtcgcctcgccggagcagc

SEQ ID NO: 6482 - DNA, 20 bp, Homo sapiens
  source 1..20: mol_type = genomic DNA; note = Gene: PRKCI; note = Location (start to end; relative to TSS): PRKCI_42_72; note = Orientation (relative to transcription): sense; note = sgRNA Position: 170222492; note = Sequence Name: 56322-704_101_SL_seq_6482
gggcagtgggaggagccgcg

SEQ ID NO: 6483 - DNA, 20 bp, Homo sapiens
  source 1..20: mol_type = genomic DNA; note = Gene: PRKCI; note = Location (start to end; relative to TSS): PRKCI_72_102; note = Orientation (relative to transcription): sense; note = sgRNA Position: 170222522; note = Sequence Name: 56322-704_101_SL_seq_6483
tgctccggcgaggcgaccct

SEQ ID NO: 6484 - DNA, 20 bp, Homo sapiens
  source 1..20: mol_type = genomic DNA; note = Gene: PRKCI; note = Location (start to end; relative to TSS): PRKCI_29_59; note = Orientation (relative to transcription): sense; note = sgRNA Position: 170222479; note = Sequence Name: 56322-704_101_SL_seq_6484
cggcggcgcctacgggcagt

SEQ ID NO: 6485 - DNA, 20 bp, Homo sapiens
  source 1..20: mol_type = genomic DNA; note = Gene: PRKCI; note = Location (start to end; relative to TSS): PRKCI_66_96; note = Orientation (relative to transcription): antisense; note = sgRNA Position: 170222496; note = Sequence Name: 56322-704_101_SL_seq_6485
ccggagcagccggaaccgcg

SEQ ID NO: 6486 - DNA, 20 bp, Homo sapiens
  source 1..20: mol_type = genomic DNA; note = Gene: PRKCI; note = Location (start to end; relative to TSS): PRKCI_32_62; note = Orientation (relative to transcription): sense; note = sgRNA Position: 170222482; note = Sequence Name: 56322-704_101_SL_seq_6486
cggcgcctacgggcagtggg

SEQ ID NO: 6487 - DNA, 20 bp, Homo sapiens
  source 1..20: mol_type = genomic DNA; note = Gene: PRKCI; note = Location (start to end; relative to TSS): PRKCI_62_92; note = Orientation (relative to transcription): sense; note = sgRNA Position: 170222512; note = Sequence Name: 56322-704_101_SL_seq_6487
cggttccggctgctccggcg

SEQ ID NO: 6488 - DNA, 20 bp, Homo sapiens
  source 1..20: mol_type = genomic DNA; note = Gene: PRKCI; note = Location (start to end; relative to TSS): PRKCI_20_50; note = Orientation (relative to transcription): antisense; note = sgRNA Position: 170222450; note = Sequence Name: 56322-704_101_SL_seq_6488
cgccgcctctacagccgccc

SEQ ID NO: 6489 - DNA, 20 bp, Homo sapiens
  source 1..20: mol_type = genomic DNA; note = Gene: PRKCI; note = Location (start to end; relative to TSS): PRKCI_57_87; note = Orientation (relative to transcription): sense; note = sgRNA Position: 170222507; note = Sequence Name: 56322-704_101_SL_seq_6489
ccgcgcggttccggctgctc

SEQ ID NO: 6490 - DNA, 20 bp, Homo sapiens
  source 1..20: mol_type = genomic DNA; note = Gene: PRKCQ; note = Location (start to end; relative to TSS): PRKCQ_41_71; note = Orientation (relative to transcription): sense; note = sgRNA Position: 6580211; note = Sequence Name: 56322-704_101_SL_seq_6490
cgccgtgctcgctccaggta

SEQ ID NO: 6491 - DNA, 20 bp, Homo sapiens
  source 1..20: mol_type = genomic DNA; note = Gene: PRKCQ; note = Location (start to end; relative to TSS): PRKCQ_80_110; note = Orientation (relative to transcription): antisense; note = sgRNA Position: 6580192; note = Sequence Name: 56322-704_101_SL_seq_6491
tccctcccggcggcggcgcg

SEQ ID NO: 6492 - DNA, 20 bp, Homo sapiens
  source 1..20: mol_type = genomic DNA; note = Gene: PRKCQ; note = Location (start to end; relative to TSS): PRKCQ_40_70; note = Orientation (relative to transcription): sense; note = sgRNA Position: 6580212; note = Sequence Name: 56322-704_101_SL_seq_6492
gcgccgtgctcgctccaggt

SEQ ID NO: 6493 - DNA, 20 bp, Homo sapiens
  source 1..20: mol_type = genomic DNA; note = Gene: PRKCQ; note = Location (start to end; relative to TSS): PRKCQ_70_100; note = Orientation (relative to transcription): sense; note = sgRNA Position: 6580182; note = Sequence Name: 56322-704_101_SL_seq_6493
gccccgcgccgccgccggga

SEQ ID NO: 6494 - DNA, 20 bp, Homo sapiens
  source 1..20: mol_type = genomic DNA; note = Gene: PRKCQ; note = Location (start to end; relative to TSS): PRKCQ_36_66; note = Orientation (relative to transcription): sense; note = sgRNA Position: 6580216; note = Sequence Name: 56322-704_101_SL_seq_6494
agcggcgccgtgctcgctcc

SEQ ID NO: 6495 - DNA, 20 bp, Homo sapiens
  source 1..20: mol_type = genomic DNA; note = Gene: PRKCQ; note = Location (start to end; relative to TSS): PRKCQ_69_99; note = Orientation (relative to transcription): sense; note = sgRNA Position: 6580183; note = Sequence Name: 56322-704_101_SL_seq_6495
cgccccgcgccgccgccggg

SEQ ID NO: 6496 - DNA, 20 bp, Homo sapiens
  source 1..20: mol_type = genomic DNA; note = Gene: PRKCQ; note = Location (start to end; relative to TSS): PRKCQ_33_63; note = Orientation (relative to transcription): antisense; note = sgRNA Position: 6580239; note = Sequence Name: 56322-704_101_SL_seq_6496
acggcgccgctgctgcccgg

SEQ ID NO: 6497 - DNA, 20 bp, Homo sapiens
  source 1..20: mol_type = genomic DNA; note = Gene: PRKCQ; note = Location (start to end; relative to TSS): PRKCQ_63_93; note = Orientation (relative to transcription): antisense; note = sgRNA Position: 6580209; note = Sequence Name: 56322-704_101_SL_seq_6497
gcggggcgcggggccctacc

SEQ ID NO: 6498 - DNA, 20 bp, Homo sapiens
  source 1..20: mol_type = genomic DNA; note = Gene: PRKCQ; note = Location (start to end; relative to TSS): PRKCQ_18_48; note = Orientation (relative to transcription): sense; note = sgRNA Position: 6580234; note = Sequence Name: 56322-704_101_SL_seq_6498
ccagcgccaccgggcagcag

SEQ ID NO: 6499 - DNA, 20 bp, Homo sapiens
  source 1..20: mol_type = genomic DNA; note = Gene: PRKCQ; note = Location (start to end; relative to TSS): PRKCQ_52_82; note = Orientation (relative to transcription): antisense; note = sgRNA Position: 6580220; note = Sequence Name: 56322-704_101_SL_seq_6499
ggccctacctggagcgagca

SEQ ID NO: 6500 - DNA, 20 bp, Homo sapiens
  source 1..20: mol_type = genomic DNA; note = Gene: PRKCZ; note = Location (start to end; relative to TSS): PRKCZ_54_84; note = Orientation (relative to transcription): sense; note = sgRNA Position: 2050491; note = Sequence Name: 56322-704_101_SL_seq_6500
cgcgcgccgccggagttccg

SEQ ID NO: 6501 - DNA, 20 bp, Homo sapiens
  source 1..20: mol_type = genomic DNA; note = Gene: PRKCZ; note = Location (start to end; relative to TSS): PRKCZ_110_140; note = Orientation (relative to transcription): sense; note = sgRNA Position: 2050547; note = Sequence Name: 56322-704_101_SL_seq_6501
ctgccttccgcgttccgccg

SEQ ID NO: 6502 - DNA, 20 bp, Homo sapiens
  source 1..20: mol_type = genomic DNA; note = Gene: PRKCZ; note = Location (start to end; relative to TSS): PRKCZ_57_87; note = Orientation (relative to transcription): antisense; note = sgRNA Position: 2050474; note = Sequence Name: 56322-704_101_SL_seq_6502
aactccggcggcgcgcgggg

SEQ ID NO: 6503 - DNA, 20 bp, Homo sapiens
  source 1..20: mol_type = genomic DNA; note = Gene: PRKCZ; note = Location (start to end; relative to TSS): PRKCZ_103_133; note = Orientation (relative to transcription): antisense; note = sgRNA Position: 2050520; note = Sequence Name: 56322-704_101_SL_seq_6503
aaggcagcgctcaggaccga

SEQ ID NO: 6504 - DNA, 20 bp, Homo sapiens
  source 1..20: mol_type = genomic DNA; note = Gene: PRKCZ; note = Location (start to end; relative to TSS): PRKCZ_60_90; note = Orientation (relative to transcription): antisense; note = sgRNA Position: 2050477; note = Sequence Name: 56322-704_101_SL_seq_6504
cggaactccggcggcgcgcg

SEQ ID NO: 6505 - DNA, 20 bp, Homo sapiens
  source 1..20: mol_type = genomic DNA; note = Gene: PRKCZ; note = Location (start to end; relative to TSS): PRKCZ_92_122; note = Orientation (relative to transcription): antisense; note = sgRNA Position: 2050509; note = Sequence Name: 56322-704_101_SL_seq_6505
caggaccgacggcgccgacc

SEQ ID NO: 6506 - DNA, 20 bp, Homo sapiens
  source 1..20: mol_type = genomic DNA; note = Gene: PRKCZ; note = Location (start to end; relative to TSS): PRKCZ_20_50; note = Orientation (relative to transcription): antisense; note = sgRNA Position: 2050437; note = Sequence Name: 56322-704_101_SL_seq_6506
cggggcgggaccgtccggcg

SEQ ID NO: 6507 - DNA, 20 bp, Homo sapiens
  source 1..20: mol_type = genomic DNA; note = Gene: PRKCZ; note = Location (start to end; relative to TSS): PRKCZ_57_87; note = Orientation (relative to transcription): antisense; note = sgRNA Position: 2050474; note = Sequence Name: 56322-704_101_SL_seq_6507
aactccggcggcgcgcgggg

SEQ ID NO: 6508 - DNA, 20 bp, Homo sapiens
  source 1..20: mol_type = genomic DNA; note = Gene: PRKCZ; note = Location (start to end; relative to TSS): PRKCZ_19_49; note = Orientation (relative to transcription): antisense; note = sgRNA Position: 2050436; note = Sequence Name: 56322-704_101_SL_seq_6508
ggggcgggaccgtccggcgg

SEQ ID NO: 6509 - DNA, 20 bp, Homo sapiens
  source 1..20: mol_type = genomic DNA; note = Gene: PRKCZ; note = Location (start to end; relative to TSS): PRKCZ_54_84; note = Orientation (relative to transcription): sense; note = sgRNA Position: 2050491; note = Sequence Name: 56322-704_101_SL_seq_6509
cgcgcgccgccggagttccg

SEQ ID NO: 6510 - DNA, 20 bp, Homo sapiens
  source 1..20: mol_type = genomic DNA; note = Gene: PRKD1; note = Location (start to end; relative to TSS): PRKD1_37_67; note = Orientation (relative to transcription): sense; note = sgRNA Position: 29927786; note = Sequence Name: 56322-704_101_SL_seq_6510
cggcggcgcctccccagtgc

SEQ ID NO: 6511 - DNA, 20 bp, Homo sapiens
  source 1..20: mol_type = genomic DNA; note = Gene: PRKD1; note = Location (start to end; relative to TSS): PRKD1_79_109; note = Orientation (relative to transcription): antisense; note = sgRNA Position: 29927764; note = Sequence Name: 56322-704_101_SL_seq_6511
gaggcccggaacgcggcagc

SEQ ID NO: 6512 - DNA, 20 bp, Homo sapiens
  source 1..20: mol_type = genomic DNA; note = Gene: PRKD1; note = Location (start to end; relative to TSS): PRKD1_40_70; note = Orientation (relative to transcription): sense; note = sgRNA Position: 29927783; note = Sequence Name: 56322-704_101_SL_seq_6512
cggcgcctccccagtgccgg

SEQ ID NO: 6513 - DNA, 20 bp, Homo sapiens
  source 1..20: mol_type = genomic DNA; note = Gene: PRKD1; note = Location (start to end; relative to TSS): PRKD1_72_102; note = Orientation (relative to transcription): antisense; note = sgRNA Position: 29927771; note = Sequence Name: 56322-704_101_SL_seq_6513
ggaacgcggcagccggctcg

SEQ ID NO: 6514 - DNA, 20 bp, Homo sapiens
  source 1..20: mol_type = genomic DNA; note = Gene: PRKD1; note = Location (start to end; relative to TSS): PRKD1_24_54; note = Orientation (relative to transcription): antisense; note = sgRNA Position: 29927819; note = Sequence Name: 56322-704_101_SL_seq_6514
gccgccaagaatctgccgcc

SEQ ID NO: 6515 - DNA, 20 bp, Homo sapiens
  source 1..20: mol_type = genomic DNA; note = Gene: PRKD1; note = Location (start to end; relative to TSS): PRKD1_57_87; note = Orientation (relative to transcription): antisense; note = sgRNA Position: 29927786; note = Sequence Name: 56322-704_101_SL_seq_6515
gctcggggccgccggcactg

SEQ ID NO: 6516 - DNA, 20 bp, Homo sapiens
  source 1..20: mol_type = genomic DNA; note = Gene: PRKD1; note = Location (start to end; relative to TSS): PRKD1_20_50; note = Orientation (relative to transcription): sense; note = sgRNA Position: 29927803; note = Sequence Name: 56322-704_101_SL_seq_6516
cggcagattcttggcggcgg

SEQ ID NO: 6517 - DNA, 20 bp, Homo sapiens
  source 1..20: mol_type = genomic DNA; note = Gene: PRKD1; note = Location (start to end; relative to TSS): PRKD1_54_84; note = Orientation (relative to transcription): antisense; note = sgRNA Position: 29927789; note = Sequence Name: 56322-704_101_SL_seq_6517
cggggccgccggcactgggg

SEQ ID NO: 6518 - DNA, 20 bp, Homo sapiens
  source 1..20: mol_type = genomic DNA; note = Gene: PRKD1; note = Location (start to end; relative to TSS): PRKD1_17_47; note = Orientation (relative to transcription): sense; note = sgRNA Position: 29927806; note = Sequence Name: 56322-704_101_SL_seq_6518
aggcggcagattcttggcgg

SEQ ID NO: 6519 - DNA, 20 bp, Homo sapiens
  source 1..20: mol_type = genomic DNA; note = Gene: PRKD1; note = Location (start to end; relative to TSS): PRKD1_51_81; note = Orientation (relative to transcription): sense; note = sgRNA Position: 29927772; note = Sequence Name: 56322-704_101_SL_seq_6519
cagtgccggcggccccgagc

SEQ ID NO: 6520 - DNA, 20 bp, Homo sapiens
  source 1..20: mol_type = genomic DNA; note = Gene: PRKD2; note = Location (start to end; relative to TSS): PRKD2_18_48; note = Orientation (relative to transcription): sense; note = sgRNA Position: 46717072; note = Sequence Name: 56322-704_101_SL_seq_6520
gccgccgacttaaactttgg

SEQ ID NO: 6521 - DNA, 20 bp, Homo sapiens
  source 1..20: mol_type = genomic DNA; note = Gene: PRKD2; note = Location (start to end; relative to TSS): PRKD2_87_117; note = Orientation (relative to transcription): antisense; note = sgRNA Position: 46717023; note = Sequence Name: 56322-704_101_SL_seq_6521
ccggagcggggttgggtggg

SEQ ID NO: 6522 - DNA, 20 bp, Homo sapiens
  source 1..20: mol_type = genomic DNA; note = Gene: PRKD2; note = Location (start to end; relative to TSS): PRKD2_19_49; note = Orientation (relative to transcription): sense; note = sgRNA Position: 46717071; note = Sequence Name: 56322-704_101_SL_seq_6522
ccgccgacttaaactttgga

SEQ ID NO: 6523 - DNA, 20 bp, Homo sapiens
  source 1..20: mol_type = genomic DNA; note = Gene: PRKD2; note = Location (start to end; relative to TSS): PRKD2_82_112; note = Orientation (relative to transcription): antisense; note = sgRNA Position: 46717028; note = Sequence Name: 56322-704_101_SL_seq_6523
gcggggttgggtggggggca

SEQ ID NO: 6524 - DNA, 20 bp, Homo sapiens
  source 1..20: mol_type = genomic DNA; note = Gene: PRKD2; note = Location (start to end; relative to TSS): PRKD2_20_50; note = Orientation (relative to transcription): sense; note = sgRNA Position: 46717070; note = Sequence Name: 56322-704_101_SL_seq_6524
cgccgacttaaactttggag

SEQ ID NO: 6525 - DNA, 20 bp, Homo sapiens
  source 1..20: mol_type = genomic DNA; note = Gene: PRKD2; note = Location (start to end; relative to TSS): PRKD2_79_109; note = Orientation (relative to transcription): antisense; note = sgRNA Position: 46717031; note = Sequence Name: 56322-704_101_SL_seq_6525
gggttgggtggggggcaggg

SEQ ID NO: 6526 - DNA, 20 bp, Homo sapiens
  source 1..20: mol_type = genomic DNA; note = Gene: PRKD2; note = Location (start to end; relative to TSS): PRKD2_21_51; note = Orientation (relative to transcription): sense; note = sgRNA Position: 46717069; note = Sequence Name: 56322-704_101_SL_seq_6526
gccgacttaaactttggagg

SEQ ID NO: 6527 - DNA, 20 bp, Homo sapiens
  source 1..20: mol_type = genomic DNA; note = Gene: PRKD2; note = Location (start to end; relative to TSS): PRKD2_78_108; note = Orientation (relative to transcription): antisense; note = sgRNA Position: 46717032; note = Sequence Name: 56322-704_101_SL_seq_6527
ggttgggtggggggcaggga

SEQ ID NO: 6528 - DNA, 20 bp, Homo sapiens
  source 1..20: mol_type = genomic DNA; note = Gene: PRKD2; note = Location (start to end; relative to TSS): PRKD2_22_52; note = Orientation (relative to transcription): antisense; note = sgRNA Position: 46717088; note = Sequence Name: 56322-704_101_SL_seq_6528
aaagtttaagtcggcggcgg

SEQ ID NO: 6529 - DNA, 20 bp, Homo sapiens
  source 1..20: mol_type = genomic DNA; note = Gene: PRKD2; note = Location (start to end; relative to TSS): PRKD2_70_100; note = Orientation (relative to transcription): antisense; note = sgRNA Position: 46717040; note = Sequence Name: 56322-704_101_SL_seq_6529
ggggggcagggagggtcgcc

SEQ ID NO: 6530 - DNA, 20 bp, Homo sapiens
  source 1..20: mol_type = genomic DNA; note = Gene: PRKD3; note = Location (start to end; relative to TSS): PRKD3_47_77; note = Orientation (relative to transcription): antisense; note = sgRNA Position: 37324782; note = Sequence Name: 56322-704_101_SL_seq_6530
cgcaggatcccgcccgcctc

SEQ ID NO: 6531 - DNA, 20 bp, Homo sapiens
  source 1..20: mol_type = genomic DNA; note = Gene: PRKD3; note = Location (start to end; relative to TSS): PRKD3_85_115; note = Orientation (relative to transcription): sense; note = sgRNA Position: 37324724; note = Sequence Name: 56322-704_101_SL_seq_6531
ctcgtccggtactcagacgc

SEQ ID NO: 6532 - DNA, 20 bp, Homo sapiens
  source 1..20: mol_type = genomic DNA; note = Gene: PRKD3; note = Location (start to end; relative to TSS): PRKD3_41_71; note = Orientation (relative to transcription): sense; note = sgRNA Position: 37324768; note = Sequence Name: 56322-704_101_SL_seq_6532
gaggcgggcgggatcctgcg

SEQ ID NO: 6533 - DNA, 20 bp, Homo sapiens
  source 1..20: mol_type = genomic DNA; note = Gene: PRKD3; note = Location (start to end; relative to TSS): PRKD3_82_112; note = Orientation (relative to transcription): antisense; note = sgRNA Position: 37324747; note = Sequence Name: 56322-704_101_SL_seq_6533
taccggacgaggcgccagcg

SEQ ID NO: 6534 - DNA, 20 bp, Homo sapiens
  source 1..20: mol_type = genomic DNA; note = Gene: PRKD3; note = Location (start to end; relative to TSS): PRKD3_30_60; note = Orientation (relative to transcription): sense; note = sgRNA Position: 37324779; note = Sequence Name: 56322-704_101_SL_seq_6534
aaggggcgccggaggcgggc

SEQ ID NO: 6535 - DNA, 20 bp, Homo sapiens
  source 1..20: mol_type = genomic DNA; note = Gene: PRKD3; note = Location (start to end; relative to TSS): PRKD3_71_101; note = Orientation (relative to transcription): sense; note = sgRNA Position: 37324738; note = Sequence Name: 56322-704_101_SL_seq_6535
agcctcgctggcgcctcgtc

SEQ ID NO: 6536 - DNA, 20 bp, Homo sapiens
  source 1..20: mol_type = genomic DNA; note = Gene: PRKD3; note = Location (start to end; relative to TSS): PRKD3_22_52; note = Orientation (relative to transcription): sense; note = sgRNA Position: 37324787; note = Sequence Name: 56322-704_101_SL_seq_6536
gagggaggaaggggcgccgg

SEQ ID NO: 6537 - DNA, 20 bp, Homo sapiens
  source 1..20: mol_type = genomic DNA; note = Gene: PRKD3; note = Location (start to end; relative to TSS): PRKD3_64_94; note = Orientation (relative to transcription): antisense; note = sgRNA Position: 37324765; note = Sequence Name: 56322-704_101_SL_seq_6537
cgaggcttcacgcgcctcgc

SEQ ID NO: 6538 - DNA, 20 bp, Homo sapiens
  source 1..20: mol_type = genomic DNA; note = Gene: PRKD3; note = Location (start to end; relative to TSS): PRKD3_19_49; note = Orientation (relative to transcription): sense; note = sgRNA Position: 37324790; note = Sequence Name: 56322-704_101_SL_seq_6538
agggagggaggaaggggcgc

SEQ ID NO: 6539 - DNA, 20 bp, Homo sapiens
  source 1..20: mol_type = genomic DNA; note = Gene: PRKD3; note = Location (start to end; relative to TSS): PRKD3_59_89; note = Orientation (relative to transcription): sense; note = sgRNA Position: 37324750; note = Sequence Name: 56322-704_101_SL_seq_6539
cgaggcgcgtgaagcctcgc

SEQ ID NO: 6540 - DNA, 20 bp, Homo sapiens
  source 1..20: mol_type = genomic DNA; note = Gene: PRKDC; note = Location (start to end; relative to TSS): PRKDC_42_72; note = Orientation (relative to transcription): antisense; note = sgRNA Position: 47960090; note = Sequence Name: 56322-704_101_SL_seq_6540
ggtctcctgcagccgcagca

SEQ ID NO: 6541 - DNA, 20 bp, Homo sapiens
  source 1..20: mol_type = genomic DNA; note = Gene: PRKDC; note = Location (start to end; relative to TSS): PRKDC_93_123; note = Orientation (relative to transcription): antisense; note = sgRNA Position: 47960039; note = Sequence Name: 56322-704_101_SL_seq_6541
gatcagttgatgaccggcca

SEQ ID NO: 6542 - DNA, 20 bp, Homo sapiens
  source 1..20: mol_type = genomic DNA; note = Gene: PRKDC; note = Location (start to end; relative to TSS): PRKDC_43_73; note = Orientation (relative to transcription): antisense; note = sgRNA Position: 47960089; note = Sequence Name: 56322-704_101_SL_seq_6542
aggtctcctgcagccgcagc

SEQ ID NO: 6543 - DNA, 20 bp, Homo sapiens
  source 1..20: mol_type = genomic DNA; note = Gene: PRKDC; note = Location (start to end; relative to TSS): PRKDC_89_119; note = Orientation (relative to transcription): sense; note = sgRNA Position: 47960023; note = Sequence Name: 56322-704_101_SL_seq_6543
gccggtcatcaactgatccg

SEQ ID NO: 6544 - DNA, 20 bp, Homo sapiens
  source 1..20: mol_type = genomic DNA; note = Gene: PRKDC; note = Location (start to end; relative to TSS): PRKDC_46_76; note = Orientation (relative to transcription): sense; note = sgRNA Position: 47960066; note = Sequence Name: 56322-704_101_SL_seq_6544
gcaggagaccttgtccgctg

SEQ ID NO: 6545 - DNA, 20 bp, Homo sapiens
  source 1..20: mol_type = genomic DNA; note = Gene: PRKDC; note = Location (start to end; relative to TSS): PRKDC_79_109; note = Orientation (relative to transcription): antisense; note = sgRNA Position: 47960053; note = Sequence Name: 56322-704_101_SL_seq_6545
cggccagggcagcaccgcag

SEQ ID NO: 6546 - DNA, 20 bp, Homo sapiens
  source 1..20: mol_type = genomic DNA; note = Gene: PRKDC; note = Location (start to end; relative to TSS): PRKDC_27_57; note = Orientation (relative to transcription): antisense; note = sgRNA Position: 47960105; note = Sequence Name: 56322-704_101_SL_seq_6546
cagcagggagcaacgcacac

SEQ ID NO: 6547 - DNA, 20 bp, Homo sapiens
  source 1..20: mol_type = genomic DNA; note = Gene: PRKDC; note = Location (start to end; relative to TSS): PRKDC_63_93; note = Orientation (relative to transcription): antisense; note = sgRNA Position: 47960069; note = Sequence Name: 56322-704_101_SL_seq_6547
gcagcggtccgcagcggaca

SEQ ID NO: 6548 - DNA, 20 bp, Homo sapiens
  source 1..20: mol_type = genomic DNA; note = Gene: PRKDC; note = Location (start to end; relative to TSS): PRKDC_21_51; note = Orientation (relative to transcription): sense; note = sgRNA Position: 47960091; note = Sequence Name: 56322-704_101_SL_seq_6548
gtgtgcgttgctccctgctg

SEQ ID NO: 6549 - DNA, 20 bp, Homo sapiens
  source 1..20: mol_type = genomic DNA; note = Gene: PRKDC; note = Location (start to end; relative to TSS): PRKDC_56_86; note = Orientation (relative to transcription): sense; note = sgRNA Position: 47960056; note = Sequence Name: 56322-704_101_SL_seq_6549
ttgtccgctgcggaccgctg

SEQ ID NO: 6550 - DNA, 20 bp, Homo sapiens
  source 1..20: mol_type = genomic DNA; note = Gene: PRKG1; note = Location (start to end; relative to TSS): PRKG1_49_79; note = Orientation (relative to transcription): sense; note = sgRNA Position: 51074562; note = Sequence Name: 56322-704_101_SL_seq_6550
gacgcggagcagcggcagga

SEQ ID NO: 6551 - DNA, 20 bp, Homo sapiens
  source 1..20: mol_type = genomic DNA; note = Gene: PRKG1; note = Location (start to end; relative to TSS): PRKG1_83_113; note = Orientation (relative to transcription): antisense; note = sgRNA Position: 51074576; note = Sequence Name: 56322-704_101_SL_seq_6551
atgctcctccgggctgccgg

SEQ ID NO: 6552 - DNA, 20 bp, Homo sapiens
  source 1..20: mol_type = genomic DNA; note = Gene: PRKG1; note = Location (start to end; relative to TSS): PRKG1_41_71; note = Orientation (relative to transcription): sense; note = sgRNA Position: 51074554; note = Sequence Name: 56322-704_101_SL_seq_6552
agcctcaagacgcggagcag

SEQ ID NO: 6553 - DNA, 20 bp, Homo sapiens
  source 1..20: mol_type = genomic DNA; note = Gene: PRKG1; note = Location (start to end; relative to TSS): PRKG1_77_107; note = Orientation (relative to transcription): sense; note = sgRNA Position: 51074590; note = Sequence Name: 56322-704_101_SL_seq_6553
ccggcagcccggaggagcat

SEQ ID NO: 6554 - DNA, 20 bp, Homo sapiens
  source 1..20: mol_type = genomic DNA; note = Gene: PRKG1; note = Location (start to end; relative to TSS): PRKG1_45_75; note = Orientation (relative to transcription): sense; note = sgRNA Position: 51074558; note = Sequence Name: 56322-704_101_SL_seq_6554
tcaagacgcggagcagcggc

SEQ ID NO: 6555 - DNA, 20 bp, Homo sapiens
  source 1..20: mol_type = genomic DNA; note = Gene: PRKG1; note = Location (start to end; relative to TSS): PRKG1_76_106; note = Orientation (relative to transcription): sense; note = sgRNA Position: 51074589; note = Sequence Name: 56322-704_101_SL_seq_6555
cccggcagcccggaggagca

SEQ ID NO: 6556 - DNA, 20 bp, Homo sapiens
  source 1..20: mol_type = genomic DNA; note = Gene: PRKG1; note = Location (start to end; relative to TSS): PRKG1_33_63; note = Orientation (relative to transcription): sense; note = sgRNA Position: 51074546; note = Sequence Name: 56322-704_101_SL_seq_6556
ggggaggaagcctcaagacg

SEQ ID NO: 6557 - DNA, 20 bp, Homo sapiens
  source 1..20: mol_type = genomic DNA; note = Gene: PRKG1; note = Location (start to end; relative to TSS): PRKG1_66_96; note = Orientation (relative to transcription): sense; note = sgRNA Position: 51074579; note = Sequence Name: 56322-704_101_SL_seq_6557
ggaaggagcccccggcagcc

SEQ ID NO: 6558 - DNA, 20 bp, Homo sapiens
  source 1..20: mol_type = genomic DNA; note = Gene: PRKG1; note = Location (start to end; relative to TSS): PRKG1_17_47; note = Orientation (relative to transcription): sense; note = sgRNA Position: 51074530; note = Sequence Name: 56322-704_101_SL_seq_6558
gaaagttgatcggagagggg

SEQ ID NO: 6559 - DNA, 20 bp, Homo sapiens
  source 1..20: mol_type = genomic DNA; note = Gene: PRKG1; note = Location (start to end; relative to TSS): PRKG1_49_79; note = Orientation (relative to transcription): sense; note = sgRNA Position: 51074562; note = Sequence Name: 56322-704_101_SL_seq_6559
gacgcggagcagcggcagga

SEQ ID NO: 6560 - DNA, 20 bp, Homo sapiens
  source 1..20: mol_type = genomic DNA; note = Gene: PRKG2; note = Location (start to end; relative to TSS): PRKG2_44_74; note = Orientation (relative to transcription): antisense; note = sgRNA Position: 81215174; note = Sequence Name: 56322-704_101_SL_seq_6560
cgcgatgcgggcaggagctg

SEQ ID NO: 6561 - DNA, 20 bp, Homo sapiens
  source 1..20: mol_type = genomic DNA; note = Gene: PRKG2; note = Location (start to end; relative to TSS): PRKG2_77_107; note = Orientation (relative to transcription): antisense; note = sgRNA Position: 81215141; note = Sequence Name: 56322-704_101_SL_seq_6561
tccggctacgtgtgagccgg

SEQ ID NO: 6562 - DNA, 20 bp, Homo sapiens
  source 1..20: mol_type = genomic DNA; note = Gene: PRKG2; note = Location (start to end; relative to TSS): PRKG2_41_71; note = Orientation (relative to transcription): antisense; note = sgRNA Position: 81215177; note = Sequence Name: 56322-704_101_SL_seq_6562
gatgcgggcaggagctgcgg

SEQ ID NO: 6563 - DNA, 20 bp, Homo sapiens
  source 1..20: mol_type = genomic DNA; note = Gene: PRKG2; note = Location (start to end; relative to TSS): PRKG2_71_101; note = Orientation (relative to transcription): antisense; note = sgRNA Position: 81215147; note = Sequence Name: 56322-704_101_SL_seq_6563
tacgtgtgagccgggggcgc

SEQ ID NO: 6564 - DNA, 20 bp, Homo sapiens
  source 1..20: mol_type = genomic DNA; note = Gene: PRKG2; note = Location (start to end; relative to TSS): PRKG2_35_65; note = Orientation (relative to transcription): antisense; note = sgRNA Position: 81215183; note = Sequence Name: 56322-704_101_SL_seq_6564
ggcaggagctgcggcggcgt

SEQ ID NO: 6565 - DNA, 20 bp, Homo sapiens
  source 1..20: mol_type = genomic DNA; note = Gene: PRKG2; note = Location (start to end; relative to TSS): PRKG2_67_97; note = Orientation (relative to transcription): sense; note = sgRNA Position: 81215131; note = Sequence Name: 56322-704_101_SL_seq_6565
gcccccggctcacacgtagc

SEQ ID NO: 6566 - DNA, 20 bp, Homo sapiens
  source 1..20: mol_type = genomic DNA; note = Gene: PRKG2; note = Location (start to end; relative to TSS): PRKG2_22_52; note = Orientation (relative to transcription): antisense; note = sgRNA Position: 81215196; note = Sequence Name: 56322-704_101_SL_seq_6566
gcggcgtcggtgctgccgcc

SEQ ID NO: 6567 - DNA, 20 bp, Homo sapiens
  source 1..20: mol_type = genomic DNA; note = Gene: PRKG2; note = Location (start to end; relative to TSS): PRKG2_52_82; note = Orientation (relative to transcription): sense; note = sgRNA Position: 81215146; note = Sequence Name: 56322-704_101_SL_seq_6567
atcgcgctaacccgcgcccc

SEQ ID NO: 6568 - DNA, 20 bp, Homo sapiens
  source 1..20: mol_type = genomic DNA; note = Gene: PRKG2; note = Location (start to end; relative to TSS): PRKG2_14_44; note = Orientation (relative to transcription): antisense; note = sgRNA Position: 81215204; note = Sequence Name: 56322-704_101_SL_seq_6568
ggtgctgccgcctggctccg

SEQ ID NO: 6569 - DNA, 20 bp, Homo sapiens
  source 1..20: mol_type = genomic DNA; note = Gene: PRKG2; note = Location (start to end; relative to TSS): PRKG2_44_74; note = Orientation (relative to transcription): antisense; note = sgRNA Position: 81215174; note = Sequence Name: 56322-704_101_SL_seq_6569
cgcgatgcgggcaggagctg

SEQ ID NO: 6570 - DNA, 20 bp, Homo sapiens
  source 1..20: mol_type = genomic DNA; note = Gene: PRKX; note = Location (start to end; relative to TSS): PRKX_29_59; note = Orientation (relative to transcription): sense; note = sgRNA Position: 3713596; note = Sequence Name: 56322-704_101_SL_seq_6570
taccgagctggaggaggcgg

SEQ ID NO: 6571 - DNA, 20 bp, Homo sapiens
  source 1..20: mol_type = genomic DNA; note = Gene: PRKX; note = Location (start to end; relative to TSS): PRKX_86_116; note = Orientation (relative to transcription): sense; note = sgRNA Position: 3713539; note = Sequence Name: 56322-704_101_SL_seq_6571
gccccccccagcccgggccg

SEQ ID NO: 6572 - DNA, 20 bp, Homo sapiens
  source 1..20: mol_type = genomic DNA; note = Gene: PRKX; note = Location (start to end; relative to TSS): PRKX_26_56; note = Orientation (relative to transcription): sense; note = sgRNA Position: 3713599; note = Sequence Name: 56322-704_101_SL_seq_6572
ggctaccgagctggaggagg

SEQ ID NO: 6573 - DNA, 20 bp, Homo sapiens
  source 1..20: mol_type = genomic DNA; note = Gene: PRKX; note = Location (start to end; relative to TSS): PRKX_80_110; note = Orientation (relative to transcription): sense; note = sgRNA Position: 3713545; note = Sequence Name: 56322-704_101_SL_seq_6573
cgcctcgccccccccagccc

SEQ ID NO: 6574 - DNA, 20 bp, Homo sapiens
  source 1..20: mol_type = genomic DNA; note = Gene: PRKX; note = Location (start to end; relative to TSS): PRKX_23_53; note = Orientation (relative to transcription): sense; note = sgRNA Position: 3713602; note = Sequence Name: 56322-704_101_SL_seq_6574
cgcggctaccgagctggagg

SEQ ID NO: 6575 - DNA, 20 bp, Homo sapiens
  source 1..20: mol_type = genomic DNA; note = Gene: PRKX; note = Location (start to end; relative to TSS): PRKX_69_99; note = Orientation (relative to transcription): antisense; note = sgRNA Position: 3713576; note = Sequence Name: 56322-704_101_SL_seq_6575
gcgggggccctgcgcattcc

SEQ ID NO: 6576 - DNA, 20 bp, Homo sapiens
  source 1..20: mol_type = genomic DNA; note = Gene: PRKX; note = Location (start to end; relative to TSS): PRKX_20_50; note = Orientation (relative to transcription): sense; note = sgRNA Position: 3713605; note = Sequence Name: 56322-704_101_SL_seq_6576
gcacgcggctaccgagctgg

SEQ ID NO: 6577 - DNA, 20 bp, Homo sapiens
  source 1..20: mol_type = genomic DNA; note = Gene: PRKX; note = Location (start to end; relative to TSS): PRKX_53_83; note = Orientation (relative to transcription): sense; note = sgRNA Position: 3713572; note = Sequence Name: 56322-704_101_SL_seq_6577
cgcgagacccggaatgcgca

SEQ ID NO: 6578 - DNA, 20 bp, Homo sapiens
  source 1..20: mol_type = genomic DNA; note = Gene: PRKX; note = Location (start to end; relative to TSS): PRKX_19_49; note = Orientation (relative to transcription): antisense; note = sgRNA Position: 3713626; note = Sequence Name: 56322-704_101_SL_seq_6578
ggtagccgcgtgcgcgctgt

SEQ ID NO: 6579 - DNA, 20 bp, Homo sapiens
  source 1..20: mol_type = genomic DNA; note = Gene: PRKX; note = Location (start to end; relative to TSS): PRKX_52_82; note = Orientation (relative to transcription): sense; note = sgRNA Position: 3713573; note = Sequence Name: 56322-704_101_SL_seq_6579
gcgcgagacccggaatgcgc

SEQ ID NO: 6580 - DNA, 20 bp, Homo sapiens
  source 1..20: mol_type = genomic DNA; note = Gene: PRKY; note = Location (start to end; relative to TSS): PRKY_34_64; note = Orientation (relative to transcription): antisense; note = sgRNA Position: 7274095; note = Sequence Name: 56322-704_101_SL_seq_6580
tagcagcaatagccccggga

SEQ ID NO: 6581 - DNA, 20 bp, Homo sapiens
  source 1..20: mol_type = genomic DNA; note = Gene: PRKY; note = Location (start to end; relative to TSS): PRKY_111_141; note = Orientation (relative to transcription): antisense; note = sgRNA Position: 7274172; note = Sequence Name: 56322-704_101_SL_seq_6581
cgccctcgcctctgggtgcg

SEQ ID NO: 6582 - DNA, 20 bp, Homo sapiens
  source 1..20: mol_type = genomic DNA; note = Gene: PRKY; note = Location (start to end; relative to TSS): PRKY_35_65; note = Orientation (relative to transcription): antisense; note = sgRNA Position: 7274096; note = Sequence Name: 56322-704_101_SL_seq_6582
ctagcagcaatagccccggg

SEQ ID NO: 6583 - DNA, 20 bp, Homo sapiens
  source 1..20: mol_type = genomic DNA; note = Gene: PRKY; note = Location (start to end; relative to TSS): PRKY_106_136; note = Orientation (relative to transcription): antisense; note = sgRNA Position: 7274167; note = Sequence Name: 56322-704_101_SL_seq_6583
tcgcctctgggtgcgcggct

SEQ ID NO: 6584 - DNA, 20 bp, Homo sapiens
  source 1..20: mol_type = genomic DNA; note = Gene: PRKY; note = Location (start to end; relative to TSS): PRKY_38_68; note = Orientation (relative to transcription): antisense; note = sgRNA Position: 7274099; note = Sequence Name: 56322-704_101_SL_seq_6584
gcactagcagcaatagcccc

SEQ ID NO: 6585 - DNA, 20 bp, Homo sapiens
  source 1..20: mol_type = genomic DNA; note = Gene: PRKY; note = Location (start to end; relative to TSS): PRKY_101_131; note = Orientation (relative to transcription): antisense; note = sgRNA Position: 7274162; note = Sequence Name: 56322-704_101_SL_seq_6585
tctgggtgcgcggctcggca

SEQ ID NO: 6586 - DNA, 20 bp, Homo sapiens
  source 1..20: mol_type = genomic DNA; note = Gene: PRKY; note = Location (start to end; relative to TSS): PRKY_39_69; note = Orientation (relative to transcription): antisense; note = sgRNA Position: 7274100; note = Sequence Name: 56322-704_101_SL_seq_6586
ggcactagcagcaatagccc

SEQ ID NO: 6587 - DNA, 20 bp, Homo sapiens
  source 1..20: mol_type = genomic DNA; note = Gene: PRKY; note = Location (start to end; relative to TSS): PRKY_94_124; note = Orientation (relative to transcription): sense; note = sgRNA Position: 7274175; note = Sequence Name: 56322-704_101_SL_seq_6587
gtgccgagccgcgcacccag

SEQ ID NO: 6588 - DNA, 20 bp, Homo sapiens
  source 1..20: mol_type = genomic DNA; note = Gene: PRKY; note = Location (start to end; relative to TSS): PRKY_22_52; note = Orientation (relative to transcription): antisense; note = sgRNA Position: 7274083; note = Sequence Name: 56322-704_101_SL_seq_6588
ccccgggagggagcagccgc

SEQ ID NO: 6589 - DNA, 20 bp, Homo sapiens
  source 1..20: mol_type = genomic DNA; note = Gene: PRKY; note = Location (start to end; relative to TSS): PRKY_60_90; note = Orientation (relative to transcription): antisense; note = sgRNA Position: 7274121; note = Sequence Name: 56322-704_101_SL_seq_6589
caatggctgggcggtgctca

SEQ ID NO: 6590 - DNA, 20 bp, Homo sapiens
  source 1..20: mol_type = genomic DNA; note = Gene: PRPF4B; note = Location (start to end; relative to TSS): PRPF4B_49_79; note = Orientation (relative to transcription): antisense; note = sgRNA Position: 4021355; note = Sequence Name: 56322-704_101_SL_seq_6590
gtaggggaagtggaggaaga

SEQ ID NO: 6591 - DNA, 20 bp, Homo sapiens
  source 1..20: mol_type = genomic DNA; note = Gene: PRPF4B; note = Location (start to end; relative to TSS): PRPF4B_92_122; note = Orientation (relative to transcription): antisense; note = sgRNA Position: 4021398; note = Sequence Name: 56322-704_101_SL_seq_6591
tgactcctcggcggcggtgg

SEQ ID NO: 6592 - DNA, 20 bp, Homo sapiens
  source 1..20: mol_type = genomic DNA; note = Gene: PRPF4B; note = Location (start to end; relative to TSS): PRPF4B_54_84; note = Orientation (relative to transcription): sense; note = sgRNA Position: 4021380; note = Sequence Name: 56322-704_101_SL_seq_6592
ttcccctaccctccaccgtc

SEQ ID NO: 6593 - DNA, 20 bp, Homo sapiens
  source 1..20: mol_type = genomic DNA; note = Gene: PRPF4B; note = Location (start to end; relative to TSS): PRPF4B_89_119; note = Orientation (relative to transcription): antisense; note = sgRNA Position: 4021395; note = Sequence Name: 56322-704_101_SL_seq_6593
ctcctcggcggcggtggcgg

SEQ ID NO: 6594 - DNA, 20 bp, Homo sapiens
  source 1..20: mol_type = genomic DNA; note = Gene: PRPF4B; note = Location (start to end; relative to TSS): PRPF4B_55_85; note = Orientation (relative to transcription): sense; note = sgRNA Position: 4021381; note = Sequence Name: 56322-704_101_SL_seq_6594
tcccctaccctccaccgtcc

SEQ ID NO: 6595 - DNA, 20 bp, Homo sapiens
  source 1..20: mol_type = genomic DNA; note = Gene: PRPF4B; note = Location (start to end; relative to TSS): PRPF4B_85_115; note = Orientation (relative to transcription): sense; note = sgRNA Position: 4021411; note = Sequence Name: 56322-704_101_SL_seq_6595
gccaccgccgccgaggagtc

SEQ ID NO: 6596 - DNA, 20 bp, Homo sapiens
  source 1..20: mol_type = genomic DNA; note = Gene: PRPF4B; note = Location (start to end; relative to TSS): PRPF4B_15_45; note = Orientation (relative to transcription): antisense; note = sgRNA Position: 4021321; note = Sequence Name: 56322-704_101_SL_seq_6596
cgcgcatgtgccgaccgtgt

SEQ ID NO: 6597 - DNA, 20 bp, Homo sapiens
  source 1..20: mol_type = genomic DNA; note = Gene: PRPF4B; note = Location (start to end; relative to TSS): PRPF4B_54_84; note = Orientation (relative to transcription): sense; note = sgRNA Position: 4021380; note = Sequence Name: 56322-704_101_SL_seq_6597
ttcccctaccctccaccgtc

SEQ ID NO: 6598 - DNA, 20 bp, Homo sapiens
  source 1..20: mol_type = genomic DNA; note = Gene: PRPF4B; note = Location (start to end; relative to TSS): PRPF4B_14_44; note = Orientation (relative to transcription): antisense; note = sgRNA Position: 4021320; note = Sequence Name: 56322-704_101_SL_seq_6598
gcgcatgtgccgaccgtgta

SEQ ID NO: 6599 - DNA, 20 bp, Homo sapiens
  source 1..20: mol_type = genomic DNA; note = Gene: PRPF4B; note = Location (start to end; relative to TSS): PRPF4B_49_79; note = Orientation (relative to transcription): antisense; note = sgRNA Position: 4021355; note = Sequence Name: 56322-704_101_SL_seq_6599
gtaggggaagtggaggaaga

SEQ ID NO: 6600 - DNA, 20 bp, Homo sapiens
  source 1..20: mol_type = genomic DNA; note = Gene: PSKH1; note = Location (start to end; relative to TSS): PSKH1_56_86; note = Orientation (relative to transcription): antisense; note = sgRNA Position: 67893316; note = Sequence Name: 56322-704_101_SL_seq_6600
tgccggccatctccgggcaa

SEQ ID NO: 6601 - DNA, 20 bp, Homo sapiens
  source 1..20: mol_type = genomic DNA; note = Gene: PSKH1; note = Location (start to end; relative to TSS): PSKH1_92_122; note = Orientation (relative to transcription): sense; note = sgRNA Position: 67893372; note = Sequence Name: 56322-704_101_SL_seq_6601
cccgccgcccgcgcgaggtg

SEQ ID NO: 6602 - DNA, 20 bp, Homo sapiens
  source 1..20: mol_type = genomic DNA; note = Gene: PSKH1; note = Location (start to end; relative to TSS): PSKH1_45_75; note = Orientation (relative to transcription): sense; note = sgRNA Position: 67893325; note = Sequence Name: 56322-704_101_SL_seq_6602
tgccattgcccggagatggc

SEQ ID NO: 6603 - DNA, 20 bp, Homo sapiens
  source 1..20: mol_type = genomic DNA; note = Gene: PSKH1; note = Location (start to end; relative to TSS): PSKH1_87_117; note = Orientation (relative to transcription): sense; note = sgRNA Position: 67893367; note = Sequence Name: 56322-704_101_SL_seq_6603
aagagcccgccgcccgcgcg

SEQ ID NO: 6604 - DNA, 20 bp, Homo sapiens
  source 1..20: mol_type = genomic DNA; note = Gene: PSKH1; note = Location (start to end; relative to TSS): PSKH1_50_80; note = Orientation (relative to transcription): antisense; note = sgRNA Position: 67893310; note = Sequence Name: 56322-704_101_SL_seq_6604
ccatctccgggcaatggcag

SEQ ID NO: 6605 - DNA, 20 bp, Homo sapiens
  source 1..20: mol_type = genomic DNA; note = Gene: PSKH1; note = Location (start to end; relative to TSS): PSKH1_85_115; note = Orientation (relative to transcription): antisense; note = sgRNA Position: 67893345; note = Sequence Name: 56322-704_101_SL_seq_6605
cggcgggctcttcggcgtct

SEQ ID NO: 6606 - DNA, 20 bp, Homo sapiens
  source 1..20: mol_type = genomic DNA; note = Gene: PSKH1; note = Location (start to end; relative to TSS): PSKH1_35_65; note = Orientation (relative to transcription): sense; note = sgRNA Position: 67893315; note = Sequence Name: 56322-704_101_SL_seq_6606
cggcggccgctgccattgcc

SEQ ID NO: 6607 - DNA, 20 bp, Homo sapiens
  source 1..20: mol_type = genomic DNA; note = Gene: PSKH1; note = Location (start to end; relative to TSS): PSKH1_82_112; note = Orientation (relative to transcription): antisense; note = sgRNA Position: 67893342; note = Sequence Name: 56322-704_101_SL_seq_6607
cgggctcttcggcgtctcgg

SEQ ID NO: 6608 - DNA, 20 bp, Homo sapiens
  source 1..20: mol_type = genomic DNA; note = Gene: PSKH1; note = Location (start to end; relative to TSS): PSKH1_41_71; note = Orientation (relative to transcription): sense; note = sgRNA Position: 67893321; note = Sequence Name: 56322-704_101_SL_seq_6608
ccgctgccattgcccggaga

SEQ ID NO: 6609 - DNA, 20 bp, Homo sapiens
  source 1..20: mol_type = genomic DNA; note = Gene: PSKH1; note = Location (start to end; relative to TSS): PSKH1_73_103; note = Orientation (relative to transcription): antisense; note = sgRNA Position: 67893333; note = Sequence Name: 56322-704_101_SL_seq_6609
cggcgtctcggcggctctgc

SEQ ID NO: 6610 - DNA, 20 bp, Homo sapiens
  source 1..20: mol_type = genomic DNA; note = Gene: PSKH2; note = Location (start to end; relative to TSS): PSKH2_40_70; note = Orientation (relative to transcription): sense; note = sgRNA Position: 86069604; note = Sequence Name: 56322-704_101_SL_seq_6610
ggggtgcggcgccagcagga

SEQ ID NO: 6611 - DNA, 20 bp, Homo sapiens
  source 1..20: mol_type = genomic DNA; note = Gene: PSKH2; note = Location (start to end; relative to TSS): PSKH2_76_106; note = Orientation (relative to transcription): antisense; note = sgRNA Position: 86069588; note = Sequence Name: 56322-704_101_SL_seq_6611
aagccagcgctggtggcccc

SEQ ID NO: 6612 - DNA, 20 bp, Homo sapiens
  source 1..20: mol_type = genomic DNA; note = Gene: PSKH2; note = Location (start to end; relative to TSS): PSKH2_36_66; note = Orientation (relative to transcription): sense; note = sgRNA Position: 86069608; note = Sequence Name: 56322-704_101_SL_seq_6612
gtatggggtgcggcgccagc

SEQ ID NO: 6613 - DNA, 20 bp, Homo sapiens
  source 1..20: mol_type = genomic DNA; note = Gene: PSKH2; note = Location (start to end; relative to TSS): PSKH2_70_100; note = Orientation (relative to transcription): sense; note = sgRNA Position: 86069574; note = Sequence Name: 56322-704_101_SL_seq_6613
ggggccaccagcgctggctt

SEQ ID NO: 6614 - DNA, 20 bp, Homo sapiens
  source 1..20: mol_type = genomic DNA; note = Gene: PSKH2; note = Location (start to end; relative to TSS): PSKH2_26_56; note = Orientation (relative to transcription): sense; note = sgRNA Position: 86069618; note = Sequence Name: 56322-704_101_SL_seq_6614
cgtgttgcgggtatggggtg

SEQ ID NO: 6615 - DNA, 20 bp, Homo sapiens
  source 1..20: mol_type = genomic DNA; note = Gene: PSKH2; note = Location (start to end; relative to TSS): PSKH2_60_90; note = Orientation (relative to transcription): antisense; note = sgRNA Position: 86069604; note = Sequence Name: 56322-704_101_SL_seq_6615
ccccgggaccaccttcctgc

SEQ ID NO: 6616 - DNA, 20 bp, Homo sapiens
  source 1..20: mol_type = genomic DNA; note = Gene: PSKH2; note = Location (start to end; relative to TSS): PSKH2_21_51; note = Orientation (relative to transcription): sense; note = sgRNA Position: 86069623; note = Sequence Name: 56322-704_101_SL_seq_6616
gcgggcgtgttgcgggtatg

SEQ ID NO: 6617 - DNA, 20 bp, Homo sapiens
  source 1..20: mol_type = genomic DNA; note = Gene: PSKH2; note = Location (start to end; relative to TSS): PSKH2_51_81; note = Orientation (relative to transcription): sense; note = sgRNA Position: 86069593; note = Sequence Name: 56322-704_101_SL_seq_6617
ccagcaggaaggtggtcccg

SEQ ID NO: 6618 - DNA, 20 bp, Homo sapiens
  source 1..20: mol_type = genomic DNA; note = Gene: PSKH2; note = Location (start to end; relative to TSS): PSKH2_20_50; note = Orientation (relative to transcription): antisense; note = sgRNA Position: 86069644; note = Sequence Name: 56322-704_101_SL_seq_6618
gcaacacgcccgccgctcgc

SEQ ID NO: 6619 - DNA, 20 bp, Homo sapiens
  source 1..20: mol_type = genomic DNA; note = Gene: PSKH2; note = Location (start to end; relative to TSS): PSKH2_50_80; note = Orientation (relative to transcription): sense; note = sgRNA Position: 86069594; note = Sequence Name: 56322-704_101_SL_seq_6619
gccagcaggaaggtggtccc

SEQ ID NO: 6620 - DNA, 20 bp, Homo sapiens
  source 1..20: mol_type = genomic DNA; note = Gene: PSTK; note = Location (start to end; relative to TSS): PSTK_50_80; note = Orientation (relative to transcription): antisense; note = sgRNA Position: 122980457; note = Sequence Name: 56322-704_101_SL_seq_6620
cggggagaccggaggagtct

SEQ ID NO: 6621 - DNA, 20 bp, Homo sapiens
  source 1..20: mol_type = genomic DNA; note = Gene: PSTK; note = Location (start to end; relative to TSS): PSTK_103_133; note = Orientation (relative to transcription): sense; note = sgRNA Position: 122980530; note = Sequence Name: 56322-704_101_SL_seq_6621
agcgacgggccgcggaaacg

SEQ ID NO: 6622 - DNA, 20 bp, Homo sapiens
  source 1..20: mol_type = genomic DNA; note = Gene: PSTK; note = Location (start to end; relative to TSS): PSTK_33_63; note = Orientation (relative to transcription): sense; note = sgRNA Position: 122980460; note = Sequence Name: 56322-704_101_SL_seq_6622
acgacgctcccagactcctc

SEQ ID NO: 6623 - DNA, 20 bp, Homo sapiens
  source 1..20: mol_type = genomic DNA; note = Gene: PSTK; note = Location (start to end; relative to TSS): PSTK_95_125; note = Orientation (relative to transcription): sense; note = sgRNA Position: 122980522; note = Sequence Name: 56322-704_101_SL_seq_6623
gaaccggcagcgacgggccg

SEQ ID NO: 6624 - DNA, 20 bp, Homo sapiens
  source 1..20: mol_type = genomic DNA; note = Gene: PSTK; note = Location (start to end; relative to TSS): PSTK_42_72; note = Orientation (relative to transcription): sense; note = sgRNA Position: 122980469; note = Sequence Name: 56322-704_101_SL_seq_6624
ccagactcctccggtctccc

SEQ ID NO: 6625 - DNA, 20 bp, Homo sapiens
  source 1..20: mol_type = genomic DNA; note = Gene: PSTK; note = Location (start to end; relative to TSS): PSTK_86_116; note = Orientation (relative to transcription): antisense; note = sgRNA Position: 122980493; note = Sequence Name: 56322-704_101_SL_seq_6625
ggttcctctgatgttctcgg

SEQ ID NO: 6626 - DNA, 20 bp, Homo sapiens
  source 1..20: mol_type = genomic DNA; note = Gene: PSTK; note = Location (start to end; relative to TSS): PSTK_43_73; note = Orientation (relative to transcription): sense; note = sgRNA Position: 122980470; note = Sequence Name: 56322-704_101_SL_seq_6626
cagactcctccggtctcccc

SEQ ID NO: 6627 - DNA, 20 bp, Homo sapiens
  source 1..20: mol_type = genomic DNA; note = Gene: PSTK; note = Location (start to end; relative to TSS): PSTK_73_103; note = Orientation (relative to transcription): sense; note = sgRNA Position: 122980500; note = Sequence Name: 56322-704_101_SL_seq_6627
aagaccgccgagaacatcag

SEQ ID NO: 6628 - DNA, 20 bp, Homo sapiens
  source 1..20: mol_type = genomic DNA; note = Gene: PSTK; note = Location (start to end; relative to TSS): PSTK_8_38; note = Orientation (relative to transcription): sense; note = sgRNA Position: 122980435; note = Sequence Name: 56322-704_101_SL_seq_6628
gcgcagggcagacggtagag

SEQ ID NO: 6629 - DNA, 20 bp, Homo sapiens
  source 1..20: mol_type = genomic DNA; note = Gene: PSTK; note = Location (start to end; relative to TSS): PSTK_42_72; note = Orientation (relative to transcription): sense; note = sgRNA Position: 122980469; note = Sequence Name: 56322-704_101_SL_seq_6629
ccagactcctccggtctccc

SEQ ID NO: 6630 - DNA, 20 bp, Homo sapiens
  source 1..20: mol_type = genomic DNA; note = Gene: PTK2; note = Location (start to end; relative to TSS): PTK2_41_71; note = Orientation (relative to transcription): antisense; note = sgRNA Position: 141001237; note = Sequence Name: 56322-704_101_SL_seq_6630
ggctcacagtggtccgggac

SEQ ID NO: 6631 - DNA, 20 bp, Homo sapiens
  source 1..20: mol_type = genomic DNA; note = Gene: PTK2; note = Location (start to end; relative to TSS): PTK2_113_143; note = Orientation (relative to transcription): antisense; note = sgRNA Position: 141001165; note = Sequence Name: 56322-704_101_SL_seq_6631
aagcgaaggcagacgacgac

SEQ ID NO: 6632 - DNA, 20 bp, Homo sapiens
  source 1..20: mol_type = genomic DNA; note = Gene: PTK2; note = Location (start to end; relative to TSS): PTK2_38_68; note = Orientation (relative to transcription): antisense; note = sgRNA Position: 141001240; note = Sequence Name: 56322-704_101_SL_seq_6632
tcacagtggtccgggaccgg

SEQ ID NO: 6633 - DNA, 20 bp, Homo sapiens
  source 1..20: mol_type = genomic DNA; note = Gene: PTK2; note = Location (start to end; relative to TSS): PTK2_112_142; note = Orientation (relative to transcription): antisense; note = sgRNA Position: 141001166; note = Sequence Name: 56322-704_101_SL_seq_6633
agcgaaggcagacgacgacg

SEQ ID NO: 6634 - DNA, 20 bp, Homo sapiens
  source 1..20: mol_type = genomic DNA; note = Gene: PTK2; note = Location (start to end; relative to TSS): PTK2_37_67; note = Orientation (relative to transcription): sense; note = sgRNA Position: 141001221; note = Sequence Name: 56322-704_101_SL_seq_6634
cccggaccactgtgagcccg

SEQ ID NO: 6635 - DNA, 20 bp, Homo sapiens
  source 1..20: mol_type = genomic DNA; note = Gene: PTK2; note = Location (start to end; relative to TSS): PTK2_109_139; note = Orientation (relative to transcription): antisense; note = sgRNA Position: 141001169; note = Sequence Name: 56322-704_101_SL_seq_6635
gaaggcagacgacgacgggg

SEQ ID NO: 6636 - DNA, 20 bp, Homo sapiens
  source 1..20: mol_type = genomic DNA; note = Gene: PTK2; note = Location (start to end; relative to TSS): PTK2_35_65; note = Orientation (relative to transcription): antisense; note = sgRNA Position: 141001243; note = Sequence Name: 56322-704_101_SL_seq_6636
cagtggtccgggaccggcgg

SEQ ID NO: 6637 - DNA, 20 bp, Homo sapiens
  source 1..20: mol_type = genomic DNA; note = Gene: PTK2; note = Location (start to end; relative to TSS): PTK2_102_132; note = Orientation (relative to transcription): antisense; note = sgRNA Position: 141001176; note = Sequence Name: 56322-704_101_SL_seq_6637
gacgacgacggggcggcgct

SEQ ID NO: 6638 - DNA, 20 bp, Homo sapiens
  source 1..20: mol_type = genomic DNA; note = Gene: PTK2; note = Location (start to end; relative to TSS): PTK2_29_59; note = Orientation (relative to transcription): antisense; note = sgRNA Position: 141001249; note = Sequence Name: 56322-704_101_SL_seq_6638
tccgggaccggcggcggcgg

SEQ ID NO: 6639 - DNA, 20 bp, Homo sapiens
  source 1..20: mol_type = genomic DNA; note = Gene: PTK2; note = Location (start to end; relative to TSS): PTK2_61_91; note = Orientation (relative to transcription): sense; note = sgRNA Position: 141001197; note = Sequence Name: 56322-704_101_SL_seq_6639
gtgaggcgtgggaggaagcg

SEQ ID NO: 6640 - DNA, 20 bp, Homo sapiens
  source 1..20: mol_type = genomic DNA; note = Gene: PTK2B; note = Location (start to end; relative to TSS): PTK2B_41_71; note = Orientation (relative to transcription): antisense; note = sgRNA Position: 27325599; note = Sequence Name: 56322-704_101_SL_seq_6640
tacaggtaagtcggccgggc

SEQ ID NO: 6641 - DNA, 20 bp, Homo sapiens
  source 1..20: mol_type = genomic DNA; note = Gene: PTK2B; note = Location (start to end; relative to TSS): PTK2B_71_101; note = Orientation (relative to transcription): antisense; note = sgRNA Position: 27325629; note = Sequence Name: 56322-704_101_SL_seq_6641
caccgccaggtgagccggga

SEQ ID NO: 6642 - DNA, 20 bp, Homo sapiens
  source 1..20: mol_type = genomic DNA; note = Gene: PTK2B; note = Location (start to end; relative to TSS): PTK2B_37_67; note = Orientation (relative to transcription): antisense; note = sgRNA Position: 27325595; note = Sequence Name: 56322-704_101_SL_seq_6642
ggtaagtcggccgggcaggt

SEQ ID NO: 6643 - DNA, 20 bp, Homo sapiens
  source 1..20: mol_type = genomic DNA; note = Gene: PTK2B; note = Location (start to end; relative to TSS): PTK2B_68_98; note = Orientation (relative to transcription): antisense; note = sgRNA Position: 27325626; note = Sequence Name: 56322-704_101_SL_seq_6643
cgccaggtgagccgggacgg

SEQ ID NO: 6644 - DNA, 20 bp, Homo sapiens
  source 1..20: mol_type = genomic DNA; note = Gene: PTK2B; note = Location (start to end; relative to TSS): PTK2B_21_51; note = Orientation (relative to transcription): antisense; note = sgRNA Position: 27325579; note = Sequence Name: 56322-704_101_SL_seq_6644
aggtaggtgtgcaacggctc

SEQ ID NO: 6645 - DNA, 20 bp, Homo sapiens
  source 1..20: mol_type = genomic DNA; note = Gene: PTK2B; note = Location (start to end; relative to TSS): PTK2B_58_88; note = Orientation (relative to transcription): antisense; note = sgRNA Position: 27325616; note = Sequence Name: 56322-704_101_SL_seq_6645
gccgggacggcggcaagtac

SEQ ID NO: 6646 - DNA, 20 bp, Homo sapiens
  source 1..20: mol_type = genomic DNA; note = Gene: PTK2B; note = Location (start to end; relative to TSS): PTK2B_27_57; note = Orientation (relative to transcription): antisense; note = sgRNA Position: 27325585; note = Sequence Name: 56322-704_101_SL_seq_6646
ccgggcaggtaggtgtgcaa

SEQ ID NO: 6647 - DNA, 20 bp, Homo sapiens
  source 1..20: mol_type = genomic DNA; note = Gene: PTK2B; note = Location (start to end; relative to TSS): PTK2B_57_87; note = Orientation (relative to transcription): sense; note = sgRNA Position: 27325635; note = Sequence Name: 56322-704_101_SL_seq_6647
tgccgccgtcccggctcacc

SEQ ID NO: 6648 - DNA, 20 bp, Homo sapiens
  source 1..20: mol_type = genomic DNA; note = Gene: PTK2B; note = Location (start to end; relative to TSS): PTK2B_18_48; note = Orientation (relative to transcription): sense; note = sgRNA Position: 27325596; note = Sequence Name: 56322-704_101_SL_seq_6648
ccgttgcacacctacctgcc

SEQ ID NO: 6649 - DNA, 20 bp, Homo sapiens
  source 1..20: mol_type = genomic DNA; note = Gene: PTK2B; note = Location (start to end; relative to TSS): PTK2B_48_78; note = Orientation (relative to transcription): sense; note = sgRNA Position: 27325626; note = Sequence Name: 56322-704_101_SL_seq_6649
acctgtacttgccgccgtcc

SEQ ID NO: 6650 - DNA, 20 bp, Homo sapiens
  source 1..20: mol_type = genomic DNA; note = Gene: PTK6; note = Location (start to end; relative to TSS): PTK6_43_73; note = Orientation (relative to transcription): sense; note = sgRNA Position: 63537309; note = Sequence Name: 56322-704_101_SL_seq_6650
gcccgcccgccatggtgtcc

SEQ ID NO: 6651 - DNA, 20 bp, Homo sapiens
  source 1..20: mol_type = genomic DNA; note = Gene: PTK6; note = Location (start to end; relative to TSS): PTK6_75_105; note = Orientation (relative to transcription): sense; note = sgRNA Position: 63537277; note = Sequence Name: 56322-704_101_SL_seq_6651
cacctgggccccaagtatgt

SEQ ID NO: 6652 - DNA, 20 bp, Homo sapiens
  source 1..20: mol_type = genomic DNA; note = Gene: PTK6; note = Location (start to end; relative to TSS): PTK6_44_74; note = Orientation (relative to transcription): sense; note = sgRNA Position: 63537308; note = Sequence Name: 56322-704_101_SL_seq_6652
cccgcccgccatggtgtccc

SEQ ID NO: 6653 - DNA, 20 bp, Homo sapiens
  source 1..20: mol_type = genomic DNA; note = Gene: PTK6; note = Location (start to end; relative to TSS): PTK6_74_104; note = Orientation (relative to transcription): sense; note = sgRNA Position: 63537278; note = Sequence Name: 56322-704_101_SL_seq_6653
tcacctgggccccaagtatg

SEQ ID NO: 6654 - DNA, 20 bp, Homo sapiens
  source 1..20: mol_type = genomic DNA; note = Gene: PTK6; note = Location (start to end; relative to TSS): PTK6_35_65; note = Orientation (relative to transcription): sense; note = sgRNA Position: 63537317; note = Sequence Name: 56322-704_101_SL_seq_6654
gccgctgcgcccgcccgcca

SEQ ID NO: 6655 - DNA, 20 bp, Homo sapiens
  source 1..20: mol_type = genomic DNA; note = Gene: PTK6; note = Location (start to end; relative to TSS): PTK6_70_100; note = Orientation (relative to transcription): antisense; note = sgRNA Position: 63537302; note = Sequence Name: 56322-704_101_SL_seq_6655
gcccaggtgagcctggtccc

SEQ ID NO: 6656 - DNA, 20 bp, Homo sapiens
  source 1..20: mol_type = genomic DNA; note = Gene: PTK6; note = Location (start to end; relative to TSS): PTK6_29_59; note = Orientation (relative to transcription): antisense; note = sgRNA Position: 63537343; note = Sequence Name: 56322-704_101_SL_seq_6656
gcagcggcaggaccaggctg

SEQ ID NO: 6657 - DNA, 20 bp, Homo sapiens
  source 1..20: mol_type = genomic DNA; note = Gene: PTK6; note = Location (start to end; relative to TSS): PTK6_60_90; note = Orientation (relative to transcription): sense; note = sgRNA Position: 63537292; note = Sequence Name: 56322-704_101_SL_seq_6657
tcccgggaccaggctcacct

SEQ ID NO: 6658 - DNA, 20 bp, Homo sapiens
  source 1..20: mol_type = genomic DNA; note = Gene: PTK6; note = Location (start to end; relative to TSS): PTK6_20_50; note = Orientation (relative to transcription): antisense; note = sgRNA Position: 63537352; note = Sequence Name: 56322-704_101_SL_seq_6658
ggaccaggctgtggcccagc

SEQ ID NO: 6659 - DNA, 20 bp, Homo sapiens
  source 1..20: mol_type = genomic DNA; note = Gene: PTK6; note = Location (start to end; relative to TSS): PTK6_50_80; note = Orientation (relative to transcription): sense; note = sgRNA Position: 63537302; note = Sequence Name: 56322-704_101_SL_seq_6659
cgccatggtgtcccgggacc

SEQ ID NO: 6660 - DNA, 20 bp, Homo sapiens
  source 1..20: mol_type = genomic DNA; note = Gene: PTK7; note = Location (start to end; relative to TSS): PTK7_33_63; note = Orientation (relative to transcription): sense; note = sgRNA Position: 43076373; note = Sequence Name: 56322-704_101_SL_seq_6660
tcggggtcgggctccggctg

SEQ ID NO: 6661 - DNA, 20 bp, Homo sapiens
  source 1..20: mol_type = genomic DNA; note = Gene: PTK7; note = Location (start to end; relative to TSS): PTK7_87_117; note = Orientation (relative to transcription): sense; note = sgRNA Position: 43076427; note = Sequence Name: 56322-704_101_SL_seq_6661
tccgcctcctgtgcccgccg

SEQ ID NO: 6662 - DNA, 20 bp, Homo sapiens
  source 1..20: mol_type = genomic DNA; note = Gene: PTK7; note = Location (start to end; relative to TSS): PTK7_30_60; note = Orientation (relative to transcription): antisense; note = sgRNA Position: 43076350; note = Sequence Name: 56322-704_101_SL_seq_6662
cccgaccccgaggcgtcccg

SEQ ID NO: 6663 - DNA, 20 bp, Homo sapiens
  source 1..20: mol_type = genomic DNA; note = Gene: PTK7; note = Location (start to end; relative to TSS): PTK7_80_110; note = Orientation (relative to transcription): antisense; note = sgRNA Position: 43076400; note = Sequence Name: 56322-704_101_SL_seq_6663
aggcggagcgcaccggagcg

SEQ ID NO: 6664 - DNA, 20 bp, Homo sapiens
  source 1..20: mol_type = genomic DNA; note = Gene: PTK7; note = Location (start to end; relative to TSS): PTK7_27_57; note = Orientation (relative to transcription): sense; note = sgRNA Position: 43076367; note = Sequence Name: 56322-704_101_SL_seq_6664
gacgcctcggggtcgggctc

SEQ ID NO: 6665 - DNA, 20 bp, Homo sapiens
  source 1..20: mol_type = genomic DNA; note = Gene: PTK7; note = Location (start to end; relative to TSS): PTK7_79_109; note = Orientation (relative to transcription): antisense; note = sgRNA Position: 43076399; note = Sequence Name: 56322-704_101_SL_seq_6665
ggcggagcgcaccggagcgc

SEQ ID NO: 6666 - DNA, 20 bp, Homo sapiens
  source 1..20: mol_type = genomic DNA; note = Gene: PTK7; note = Location (start to end; relative to TSS): PTK7_20_50; note = Orientation (relative to transcription): sense; note = sgRNA Position: 43076360; note = Sequence Name: 56322-704_101_SL_seq_6666
gcctcgggacgcctcggggt

SEQ ID NO: 6667 - DNA, 20 bp, Homo sapiens
  source 1..20: mol_type = genomic DNA; note = Gene: PTK7; note = Location (start to end; relative to TSS): PTK7_59_89; note = Orientation (relative to transcription): sense; note = sgRNA Position: 43076399; note = Sequence Name: 56322-704_101_SL_seq_6667
ctgctgcggcgcccgcgctc

SEQ ID NO: 6668 - DNA, 20 bp, Homo sapiens
  source 1..20: mol_type = genomic DNA; note = Gene: PTK7; note = Location (start to end; relative to TSS): PTK7_21_51; note = Orientation (relative to transcription): sense; note = sgRNA Position: 43076361; note = Sequence Name: 56322-704_101_SL_seq_6668
cctcgggacgcctcggggtc

SEQ ID NO: 6669 - DNA, 20 bp, Homo sapiens
  source 1..20: mol_type = genomic DNA; note = Gene: PTK7; note = Location (start to end; relative to TSS): PTK7_55_85; note = Orientation (relative to transcription): antisense; note = sgRNA Position: 43076375; note = Sequence Name: 56322-704_101_SL_seq_6669
gccgcagcagcagccgcagc

SEQ ID NO: 6670 - DNA, 20 bp, Homo sapiens
  source 1..20: mol_type = genomic DNA; note = Gene: PXK; note = Location (start to end; relative to TSS): PXK_45_75; note = Orientation (relative to transcription): sense; note = sgRNA Position: 58332963; note = Sequence Name: 56322-704_101_SL_seq_6670
tcctacctcgcgtccctagg

SEQ ID NO: 6671 - DNA, 20 bp, Homo sapiens
  source 1..20: mol_type = genomic DNA; note = Gene: PXK; note = Location (start to end; relative to TSS): PXK_83_113; note = Orientation (relative to transcription): antisense; note = sgRNA Position: 58332981; note = Sequence Name: 56322-704_101_SL_seq_6671
gaaggccatcccgggacgcc

SEQ ID NO: 6672 - DNA, 20 bp, Homo sapiens
  source 1..20: mol_type = genomic DNA; note = Gene: PXK; note = Location (start to end; relative to TSS): PXK_42_72; note = Orientation (relative to transcription): sense; note = sgRNA Position: 58332960; note = Sequence Name: 56322-704_101_SL_seq_6672
ggttcctacctcgcgtccct

SEQ ID NO: 6673 - DNA, 20 bp, Homo sapiens
  source 1..20: mol_type = genomic DNA; note = Gene: PXK; note = Location (start to end; relative to TSS): PXK_78_108; note = Orientation (relative to transcription): sense; note = sgRNA Position: 58332996; note = Sequence Name: 56322-704_101_SL_seq_6673
gcgtcccgggatggccttca

SEQ ID NO: 6674 - DNA, 20 bp, Homo sapiens
  source 1..20: mol_type = genomic DNA; note = Gene: PXK; note = Location (start to end; relative to TSS): PXK_22_52; note = Orientation (relative to transcription): antisense; note = sgRNA Position: 58332920; note = Sequence Name: 56322-704_101_SL_seq_6674
gccgactcccgccgcccgcc

SEQ ID NO: 6675 - DNA, 20 bp, Homo sapiens
  source 1..20: mol_type = genomic DNA; note = Gene: PXK; note = Location (start to end; relative to TSS): PXK_56_86; note = Orientation (relative to transcription): sense; note = sgRNA Position: 58332974; note = Sequence Name: 56322-704_101_SL_seq_6675
gtccctaggcggcggcggcc

SEQ ID NO: 6676 - DNA, 20 bp, Homo sapiens
  source 1..20: mol_type = genomic DNA; note = Gene: PXK; note = Location (start to end; relative to TSS): PXK_21_51; note = Orientation (relative to transcription): sense; note = sgRNA Position: 58332939; note = Sequence Name: 56322-704_101_SL_seq_6676
gcggcgggagtcggcgcctc

SEQ ID NO: 6677 - DNA, 20 bp, Homo sapiens
  source 1..20: mol_type = genomic DNA; note = Gene: PXK; note = Location (start to end; relative to TSS): PXK_55_85; note = Orientation (relative to transcription): antisense; note = sgRNA Position: 58332953; note = Sequence Name: 56322-704_101_SL_seq_6677
gccgcctagggacgcgaggt

SEQ ID NO: 6678 - DNA, 20 bp, Homo sapiens
  source 1..20: mol_type = genomic DNA; note = Gene: PXK; note = Location (start to end; relative to TSS): PXK_20_50; note = Orientation (relative to transcription): sense; note = sgRNA Position: 58332938; note = Sequence Name: 56322-704_101_SL_seq_6678
ggcggcgggagtcggcgcct

SEQ ID NO: 6679 - DNA, 20 bp, Homo sapiens
  source 1..20: mol_type = genomic DNA; note = Gene: PXK; note = Location (start to end; relative to TSS): PXK_51_81; note = Orientation (relative to transcription): sense; note = sgRNA Position: 58332969; note = Sequence Name: 56322-704_101_SL_seq_6679
ctcgcgtccctaggcggcgg

SEQ ID NO: 6680 - DNA, 20 bp, Homo sapiens
  source 1..20: mol_type = genomic DNA; note = Gene: RAF1; note = Location (start to end; relative to TSS): RAF1_34_64; note = Orientation (relative to transcription): sense; note = sgRNA Position: 12664059; note = Sequence Name: 56322-704_101_SL_seq_6680
gaggaaaacgattgtgaggc

SEQ ID NO: 6681 - DNA, 20 bp, Homo sapiens
  source 1..20: mol_type = genomic DNA; note = Gene: RAF1; note = Location (start to end; relative to TSS): RAF1_84_114; note = Orientation (relative to transcription): sense; note = sgRNA Position: 12664009; note = Sequence Name: 56322-704_101_SL_seq_6681
cccgaaaagggtcagctggc

SEQ ID NO: 6682 - DNA, 20 bp, Homo sapiens
  source 1..20: mol_type = genomic DNA; note = Gene: RAF1; note = Location (start to end; relative to TSS): RAF1_30_60; note = Orientation (relative to transcription): sense; note = sgRNA Position: 12664063; note = Sequence Name: 56322-704_101_SL_seq_6682
gtaagaggaaaacgattgtg

SEQ ID NO: 6683 - DNA, 20 bp, Homo sapiens
  source 1..20: mol_type = genomic DNA; note = Gene: RAF1; note = Location (start to end; relative to TSS): RAF1_81_111; note = Orientation (relative to transcription): antisense; note = sgRNA Position: 12664032; note = Sequence Name: 56322-704_101_SL_seq_6683
cccttttcggggcccaaaaa

SEQ ID NO: 6684 - DNA, 20 bp, Homo sapiens
  source 1..20: mol_type = genomic DNA; note = Gene: RAF1; note = Location (start to end; relative to TSS): RAF1_21_51; note = Orientation (relative to transcription): antisense; note = sgRNA Position: 12664092; note = Sequence Name: 56322-704_101_SL_seq_6684
cttactcccgccatctaaga

SEQ ID NO: 6685 - DNA, 20 bp, Homo sapiens
  source 1..20: mol_type = genomic DNA; note = Gene: RAF1; note = Location (start to end; relative to TSS): RAF1_80_110; note = Orientation (relative to transcription): sense; note = sgRNA Position: 12664013; note = Sequence Name: 56322-704_101_SL_seq_6685
gggccccgaaaagggtcagc

SEQ ID NO: 6686 - DNA, 20 bp, Homo sapiens
  source 1..20: mol_type = genomic DNA; note = Gene: RAF1; note = Location (start to end; relative to TSS): RAF1_18_48; note = Orientation (relative to transcription): antisense; note = sgRNA Position: 12664095; note = Sequence Name: 56322-704_101_SL_seq_6686
actcccgccatctaagatgg

SEQ ID NO: 6687 - DNA, 20 bp, Homo sapiens
  source 1..20: mol_type = genomic DNA; note = Gene: RAF1; note = Location (start to end; relative to TSS): RAF1_72_102; note = Orientation (relative to transcription): sense; note = sgRNA Position: 12664021; note = Sequence Name: 56322-704_101_SL_seq_6687
ccttttttgggccccgaaaa

SEQ ID NO: 6688 - DNA, 20 bp, Homo sapiens
  source 1..20: mol_type = genomic DNA; note = Gene: RAF1; note = Location (start to end; relative to TSS): RAF1_33_63; note = Orientation (relative to transcription): sense; note = sgRNA Position: 12664060; note = Sequence Name: 56322-704_101_SL_seq_6688
agaggaaaacgattgtgagg

SEQ ID NO: 6689 - DNA, 20 bp, Homo sapiens
  source 1..20: mol_type = genomic DNA; note = Gene: RAF1; note = Location (start to end; relative to TSS): RAF1_71_101; note = Orientation (relative to transcription): sense; note = sgRNA Position: 12664022; note = Sequence Name: 56322-704_101_SL_seq_6689
gccttttttgggccccgaaa

SEQ ID NO: 6690 - DNA, 20 bp, Homo sapiens
  source 1..20: mol_type = genomic DNA; note = Gene: RET; note = Location (start to end; relative to TSS): RET_59_89; note = Orientation (relative to transcription): antisense; note = sgRNA Position: 43077134; note = Sequence Name: 56322-704_101_SL_seq_6690
gcggacgcgacggacactgg

SEQ ID NO: 6691 - DNA, 20 bp, Homo sapiens
  source 1..20: mol_type = genomic DNA; note = Gene: RET; note = Location (start to end; relative to TSS): RET_113_143; note = Orientation (relative to transcription): sense; note = sgRNA Position: 43077208; note = Sequence Name: 56322-704_101_SL_seq_6691
cacccgccatccagacccgc

SEQ ID NO: 6692 - DNA, 20 bp, Homo sapiens
  source 1..20: mol_type = genomic DNA; note = Gene: RET; note = Location (start to end; relative to TSS): RET_60_90; note = Orientation (relative to transcription): antisense; note = sgRNA Position: 43077135; note = Sequence Name: 56322-704_101_SL_seq_6692
ggcggacgcgacggacactg

SEQ ID NO: 6693 - DNA, 20 bp, Homo sapiens
  source 1..20: mol_type = genomic DNA; note = Gene: RET; note = Location (start to end; relative to TSS): RET_107_137; note = Orientation (relative to transcription): antisense; note = sgRNA Position: 43077182; note = Sequence Name: 56322-704_101_SL_seq_6693
ggcgggtgcggcgctcagtc

SEQ ID NO: 6694 - DNA, 20 bp, Homo sapiens
  source 1..20: mol_type = genomic DNA; note = Gene: RET; note = Location (start to end; relative to TSS): RET_40_70; note = Orientation (relative to transcription): antisense; note = sgRNA Position: 43077115; note = Sequence Name: 56322-704_101_SL_seq_6694
ggggcgcgacgcacgttccg

SEQ ID NO: 6695 - DNA, 20 bp, Homo sapiens
  source 1..20: mol_type = genomic DNA; note = Gene: RET; note = Location (start to end; relative to TSS): RET_86_116; note = Orientation (relative to transcription): antisense; note = sgRNA Position: 43077161; note = Sequence Name: 56322-704_101_SL_seq_6695
ggccgccccatccccgcccg

SEQ ID NO: 6696 - DNA, 20 bp, Homo sapiens
  source 1..20: mol_type = genomic DNA; note = Gene: RET; note = Location (start to end; relative to TSS): RET_41_71; note = Orientation (relative to transcription): antisense; note = sgRNA Position: 43077116; note = Sequence Name: 56322-704_101_SL_seq_6696
gggggcgcgacgcacgttcc

SEQ ID NO: 6697 - DNA, 20 bp, Homo sapiens
  source 1..20: mol_type = genomic DNA; note = Gene: RET; note = Location (start to end; relative to TSS): RET_78_108; note = Orientation (relative to transcription): antisense; note = sgRNA Position: 43077153; note = Sequence Name: 56322-704_101_SL_seq_6697
catccccgcccggggcgcgg

SEQ ID NO: 6698 - DNA, 20 bp, Homo sapiens
  source 1..20: mol_type = genomic DNA; note = Gene: RET; note = Location (start to end; relative to TSS): RET_14_44; note = Orientation (relative to transcription): sense; note = sgRNA Position: 43077109; note = Sequence Name: 56322-704_101_SL_seq_6698
cgcagcagcgctgagtgccc

SEQ ID NO: 6699 - DNA, 20 bp, Homo sapiens
  source 1..20: mol_type = genomic DNA; note = Gene: RET; note = Location (start to end; relative to TSS): RET_59_89; note = Orientation (relative to transcription): antisense; note = sgRNA Position: 43077134; note = Sequence Name: 56322-704_101_SL_seq_6699
gcggacgcgacggacactgg

SEQ ID NO: 6700 - DNA, 20 bp, Homo sapiens
  source 1..20: mol_type = genomic DNA; note = Gene: RFK; note = Location (start to end; relative to TSS): RFK_45_75; note = Orientation (relative to transcription): antisense; note = sgRNA Position: 76394377; note = Sequence Name: 56322-704_101_SL_seq_6700
caaataccgccgggcgcctg

SEQ ID NO: 6701 - DNA, 20 bp, Homo sapiens
  source 1..20: mol_type = genomic DNA; note = Gene: RFK; note = Location (start to end; relative to TSS): RFK_78_108; note = Orientation (relative to transcription): sense; note = sgRNA Position: 76394324; note = Sequence Name: 56322-704_101_SL_seq_6701
gattcgcagtggcctgtggt

SEQ ID NO: 6702 - DNA, 20 bp, Homo sapiens
  source 1..20: mol_type = genomic DNA; note = Gene: RFK; note = Location (start to end; relative to TSS): RFK_41_71; note = Orientation (relative to transcription): sense; note = sgRNA Position: 76394361; note = Sequence Name: 56322-704_101_SL_seq_6702
ggcgcccggcggtatttgtt

SEQ ID NO: 6703 - DNA, 20 bp, Homo sapiens
  source 1..20: mol_type = genomic DNA; note = Gene: RFK; note = Location (start to end; relative to TSS): RFK_74_104; note = Orientation (relative to transcription): sense; note = sgRNA Position: 76394328; note = Sequence Name: 56322-704_101_SL_seq_6703
cagggattcgcagtggcctg

SEQ ID NO: 6704 - DNA, 20 bp, Homo sapiens
  source 1..20: mol_type = genomic DNA; note = Gene: RFK; note = Location (start to end; relative to TSS): RFK_24_54; note = Orientation (relative to transcription): antisense; note = sgRNA Position: 76394398; note = Sequence Name: 56322-704_101_SL_seq_6704
ggagctgcgtctccgctgga

SEQ ID NO: 6705 - DNA, 20 bp, Homo sapiens
  source 1..20: mol_type = genomic DNA; note = Gene: RFK; note = Location (start to end; relative to TSS): RFK_55_85; note = Orientation (relative to transcription): antisense; note = sgRNA Position: 76394367; note = Sequence Name: 56322-704_101_SL_seq_6705
gccgacccaacaaataccgc

SEQ ID NO: 6706 - DNA, 20 bp, Homo sapiens
  source 1..20: mol_type = genomic DNA; note = Gene: RFK; note = Location (start to end; relative to TSS): RFK_20_50; note = Orientation (relative to transcription): sense; note = sgRNA Position: 76394382; note = Sequence Name: 56322-704_101_SL_seq_6706
cagcggagacgcagctcctc

SEQ ID NO: 6707 - DNA, 20 bp, Homo sapiens
  source 1..20: mol_type = genomic DNA; note = Gene: RFK; note = Location (start to end; relative to TSS): RFK_54_84; note = Orientation (relative to transcription): antisense; note = sgRNA Position: 76394368; note = Sequence Name: 56322-704_101_SL_seq_6707
ccgacccaacaaataccgcc

SEQ ID NO: 6708 - DNA, 20 bp, Homo sapiens
  source 1..20: mol_type = genomic DNA; note = Gene: RFK; note = Location (start to end; relative to TSS): RFK_18_48; note = Orientation (relative to transcription): antisense; note = sgRNA Position: 76394404; note = Sequence Name: 56322-704_101_SL_seq_6708
gcgtctccgctggagggcag

SEQ ID NO: 6709 - DNA, 20 bp, Homo sapiens
  source 1..20: mol_type = genomic DNA; note = Gene: RFK; note = Location (start to end; relative to TSS): RFK_48_78; note = Orientation (relative to transcription): sense; note = sgRNA Position: 76394354; note = Sequence Name: 56322-704_101_SL_seq_6709
ggcggtatttgttgggtcgg

SEQ ID NO: 6710 - DNA, 20 bp, Homo sapiens
  source 1..20: mol_type = genomic DNA; note = Gene: RIOK1; note = Location (start to end; relative to TSS): RIOK1_40_70; note = Orientation (relative to transcription): antisense; note = sgRNA Position: 7389854; note = Sequence Name: 56322-704_101_SL_seq_6710
accacgtgcgacgggaaaac

SEQ ID NO: 6711 - DNA, 20 bp, Homo sapiens
  source 1..20: mol_type = genomic DNA; note = Gene: RIOK1; note = Location (start to end; relative to TSS): RIOK1_93_123; note = Orientation (relative to transcription): sense; note = sgRNA Position: 7389927; note = Sequence Name: 56322-704_101_SL_seq_6711
ccacgccaaggcctttggat

SEQ ID NO: 6712 - DNA, 20 bp, Homo sapiens
  source 1..20: mol_type = genomic DNA; note = Gene: RIOK1; note = Location (start to end; relative to TSS): RIOK1_43_73; note = Orientation (relative to transcription): sense; note = sgRNA Position: 7389877; note = Sequence Name: 56322-704_101_SL_seq_6712
tcgcacgtggtggccactgt

SEQ ID NO: 6713 - DNA, 20 bp, Homo sapiens
  source 1..20: mol_type = genomic DNA; note = Gene: RIOK1; note = Location (start to end; relative to TSS): RIOK1_88_118; note = Orientation (relative to transcription): sense; note = sgRNA Position: 7389922; note = Sequence Name: 56322-704_101_SL_seq_6713
gatatccacgccaaggcctt

SEQ ID NO: 6714 - DNA, 20 bp, Homo sapiens
  source 1..20: mol_type = genomic DNA; note = Gene: RIOK1; note = Location (start to end; relative to TSS): RIOK1_48_78; note = Orientation (relative to transcription): antisense; note = sgRNA Position: 7389862; note = Sequence Name: 56322-704_101_SL_seq_6714
cagtggccaccacgtgcgac

SEQ ID NO: 6715 - DNA, 20 bp, Homo sapiens
  source 1..20: mol_type = genomic DNA; note = Gene: RIOK1; note = Location (start to end; relative to TSS): RIOK1_81_111; note = Orientation (relative to transcription): sense; note = sgRNA Position: 7389915; note = Sequence Name: 56322-704_101_SL_seq_6715
caaggcggatatccacgcca

SEQ ID NO: 6716 - DNA, 20 bp, Homo sapiens
  source 1..20: mol_type = genomic DNA; note = Gene: RIOK1; note = Location (start to end; relative to TSS): RIOK1_33_63; note = Orientation (relative to transcription): sense; note = sgRNA Position: 7389867; note = Sequence Name: 56322-704_101_SL_seq_6716
cgttttcccgtcgcacgtgg

SEQ ID NO: 6717 - DNA, 20 bp, Homo sapiens
  source 1..20: mol_type = genomic DNA; note = Gene: RIOK1; note = Location (start to end; relative to TSS): RIOK1_65_95; note = Orientation (relative to transcription): antisense; note = sgRNA Position: 7389879; note = Sequence Name: 56322-704_101_SL_seq_6717
aaccattcagaagccaacag

SEQ ID NO: 6718 - DNA, 20 bp, Homo sapiens
  source 1..20: mol_type = genomic DNA; note = Gene: RIOK1; note = Location (start to end; relative to TSS): RIOK1_30_60; note = Orientation (relative to transcription): sense; note = sgRNA Position: 7389864; note = Sequence Name: 56322-704_101_SL_seq_6718
tcccgttttcccgtcgcacg

SEQ ID NO: 6719 - DNA, 20 bp, Homo sapiens
  source 1..20: mol_type = genomic DNA; note = Gene: RIOK1; note = Location (start to end; relative to TSS): RIOK1_63_93; note = Orientation (relative to transcription): sense; note = sgRNA Position: 7389897; note = Sequence Name: 56322-704_101_SL_seq_6719
tggcttctgaatggtttgca

SEQ ID NO: 6720 - DNA, 20 bp, Homo sapiens
  source 1..20: mol_type = genomic DNA; note = Gene: RIOK2; note = Location (start to end; relative to TSS): RIOK2_29_59; note = Orientation (relative to transcription): sense; note = sgRNA Position: 97183194; note = Sequence Name: 56322-704_101_SL_seq_6720
ggttcggactggggccgcca

SEQ ID NO: 6721 - DNA, 20 bp, Homo sapiens
  source 1..20: mol_type = genomic DNA; note = Gene: RIOK2; note = Location (start to end; relative to TSS): RIOK2_80_110; note = Orientation (relative to transcription): sense; note = sgRNA Position: 97183143; note = Sequence Name: 56322-704_101_SL_seq_6721
catgagccgagatgacttca

SEQ ID NO: 6722 - DNA, 20 bp, Homo sapiens
  source 1..20: mol_type = genomic DNA; note = Gene: RIOK2; note = Location (start to end; relative to TSS): RIOK2_31_61; note = Orientation (relative to transcription): sense; note = sgRNA Position: 97183192; note = Sequence Name: 56322-704_101_SL_seq_6722
ttcggactggggccgccatg

SEQ ID NO: 6723 - DNA, 20 bp, Homo sapiens
  source 1..20: mol_type = genomic DNA; note = Gene: RIOK2; note = Location (start to end; relative to TSS): RIOK2_79_109; note = Orientation (relative to transcription): sense; note = sgRNA Position: 97183144; note = Sequence Name: 56322-704_101_SL_seq_6723
acatgagccgagatgacttc

SEQ ID NO: 6724 - DNA, 20 bp, Homo sapiens
  source 1..20: mol_type = genomic DNA; note = Gene: RIOK2; note = Location (start to end; relative to TSS): RIOK2_30_60; note = Orientation (relative to transcription): sense; note = sgRNA Position: 97183193; note = Sequence Name: 56322-704_101_SL_seq_6724
gttcggactggggccgccat

SEQ ID NO: 6725 - DNA, 20 bp, Homo sapiens
  source 1..20: mol_type = genomic DNA; note = Gene: RIOK2; note = Location (start to end; relative to TSS): RIOK2_76_106; note = Orientation (relative to transcription): antisense; note = sgRNA Position: 97183167; note = Sequence Name: 56322-704_101_SL_seq_6725
tcggctcatgtaacgcaact

SEQ ID NO: 6726 - DNA, 20 bp, Homo sapiens
  source 1..20: mol_type = genomic DNA; note = Gene: RIOK2; note = Location (start to end; relative to TSS): RIOK2_18_48; note = Orientation (relative to transcription): sense; note = sgRNA Position: 97183205; note = Sequence Name: 56322-704_101_SL_seq_6726
agaggcatctgggttcggac

SEQ ID NO: 6727 - DNA, 20 bp, Homo sapiens
  source 1..20: mol_type = genomic DNA; note = Gene: RIOK2; note = Location (start to end; relative to TSS): RIOK2_55_85; note = Orientation (relative to transcription): antisense; note = sgRNA Position: 97183188; note = Sequence Name: 56322-704_101_SL_seq_6727
ggccacattcactttcccca

SEQ ID NO: 6728 - DNA, 20 bp, Homo sapiens
  source 1..20: mol_type = genomic DNA; note = Gene: RIOK2; note = Location (start to end; relative to TSS): RIOK2_20_50; note = Orientation (relative to transcription): sense; note = sgRNA Position: 97183203; note = Sequence Name: 56322-704_101_SL_seq_6728
aggcatctgggttcggactg

SEQ ID NO: 6729 - DNA, 20 bp, Homo sapiens
  source 1..20: mol_type = genomic DNA; note = Gene: RIOK2; note = Location (start to end; relative to TSS): RIOK2_52_82; note = Orientation (relative to transcription): antisense; note = sgRNA Position: 97183191; note = Sequence Name: 56322-704_101_SL_seq_6729
cacattcactttccccatgg

SEQ ID NO: 6730 - DNA, 20 bp, Homo sapiens
  source 1..20: mol_type = genomic DNA; note = Gene: RIOK3; note = Location (start to end; relative to TSS): RIOK3_42_72; note = Orientation (relative to transcription): antisense; note = sgRNA Position: 23453335; note = Sequence Name: 56322-704_101_SL_seq_6730
actggctgctgatgccggag

SEQ ID NO: 6731 - DNA, 20 bp, Homo sapiens
  source 1..20: mol_type = genomic DNA; note = Gene: RIOK3; note = Location (start to end; relative to TSS): RIOK3_75_105; note = Orientation (relative to transcription): antisense; note = sgRNA Position: 23453368; note = Sequence Name: 56322-704_101_SL_seq_6731
ggctccgccgaggagacagg

SEQ ID NO: 6732 - DNA, 20 bp, Homo sapiens
  source 1..20: mol_type = genomic DNA; note = Gene: RIOK3; note = Location (start to end; relative to TSS): RIOK3_39_69; note = Orientation (relative to transcription): antisense; note = sgRNA Position: 23453332; note = Sequence Name: 56322-704_101_SL_seq_6732
ggctgctgatgccggagtgg

SEQ ID NO: 6733 - DNA, 20 bp, Homo sapiens
  source 1..20: mol_type = genomic DNA; note = Gene: RIOK3; note = Location (start to end; relative to TSS): RIOK3_74_104; note = Orientation (relative to transcription): antisense; note = sgRNA Position: 23453367; note = Sequence Name: 56322-704_101_SL_seq_6733
gctccgccgaggagacaggc

SEQ ID NO: 6734 - DNA, 20 bp, Homo sapiens
  source 1..20: mol_type = genomic DNA; note = Gene: RIOK3; note = Location (start to end; relative to TSS): RIOK3_26_56; note = Orientation (relative to transcription): antisense; note = sgRNA Position: 23453319; note = Sequence Name: 56322-704_101_SL_seq_6734
ggagtggaggtgacagatgg

SEQ ID NO: 6735 - DNA, 20 bp, Homo sapiens
  source 1..20: mol_type = genomic DNA; note = Gene: RIOK3; note = Location (start to end; relative to TSS): RIOK3_62_92; note = Orientation (relative to transcription): sense; note = sgRNA Position: 23453375; note = Sequence Name: 56322-704_101_SL_seq_6735
tgtcccgcctgtctcctcgg

SEQ ID NO: 6736 - DNA, 20 bp, Homo sapiens
  source 1..20: mol_type = genomic DNA; note = Gene: RIOK3; note = Location (start to end; relative to TSS): RIOK3_20_50; note = Orientation (relative to transcription): antisense; note = sgRNA Position: 23453313; note = Sequence Name: 56322-704_101_SL_seq_6736
gaggtgacagatggcggcga

SEQ ID NO: 6737 - DNA, 20 bp, Homo sapiens
  source 1..20: mol_type = genomic DNA; note = Gene: RIOK3; note = Location (start to end; relative to TSS): RIOK3_60_90; note = Orientation (relative to transcription): antisense; note = sgRNA Position: 23453353; note = Sequence Name: 56322-704_101_SL_seq_6737
acaggcgggacacgggcgac

SEQ ID NO: 6738 - DNA, 20 bp, Homo sapiens
  source 1..20: mol_type = genomic DNA; note = Gene: RIOK3; note = Location (start to end; relative to TSS): RIOK3_19_49; note = Orientation (relative to transcription): sense; note = sgRNA Position: 23453332; note = Sequence Name: 56322-704_101_SL_seq_6738
gccatctgtcacctccactc

SEQ ID NO: 6739 - DNA, 20 bp, Homo sapiens
  source 1..20: mol_type = genomic DNA; note = Gene: RIOK3; note = Location (start to end; relative to TSS): RIOK3_59_89; note = Orientation (relative to transcription): sense; note = sgRNA Position: 23453372; note = Sequence Name: 56322-704_101_SL_seq_6739
ccgtgtcccgcctgtctcct

SEQ ID NO: 6740 - DNA, 20 bp, Homo sapiens
  source 1..20: mol_type = genomic DNA; note = Gene: RIPK1; note = Location (start to end; relative to TSS): RIPK1_39_69; note = Orientation (relative to transcription): sense; note = sgRNA Position: 3068559; note = Sequence Name: 56322-704_101_SL_seq_6740
tgccggagcgcggcgactcc

SEQ ID NO: 6741 - DNA, 20 bp, Homo sapiens
  source 1..20: mol_type = genomic DNA; note = Gene: RIPK1; note = Location (start to end; relative to TSS): RIPK1_89_119; note = Orientation (relative to transcription): antisense; note = sgRNA Position: 3068589; note = Sequence Name: 56322-704_101_SL_seq_6741
ccgcccggatggccgcgctc

SEQ ID NO: 6742 - DNA, 20 bp, Homo sapiens
  source 1..20: mol_type = genomic DNA; note = Gene: RIPK1; note = Location (start to end; relative to TSS): RIPK1_40_70; note = Orientation (relative to transcription): sense; note = sgRNA Position: 3068560; note = Sequence Name: 56322-704_101_SL_seq_6742
gccggagcgcggcgactcca

SEQ ID NO: 6743 - DNA, 20 bp, Homo sapiens
  source 1..20: mol_type = genomic DNA; note = Gene: RIPK1; note = Location (start to end; relative to TSS): RIPK1_82_112; note = Orientation (relative to transcription): sense; note = sgRNA Position: 3068602; note = Sequence Name: 56322-704_101_SL_seq_6743
agagcgcggccatccgggcg

SEQ ID NO: 6744 - DNA, 20 bp, Homo sapiens
  source 1..20: mol_type = genomic DNA; note = Gene: RIPK1; note = Location (start to end; relative to TSS): RIPK1_41_71; note = Orientation (relative to transcription): sense; note = sgRNA Position: 3068561; note = Sequence Name: 56322-704_101_SL_seq_6744
ccggagcgcggcgactccag

SEQ ID NO: 6745 - DNA, 20 bp, Homo sapiens
  source 1..20: mol_type = genomic DNA; note = Gene: RIPK1; note = Location (start to end; relative to TSS): RIPK1_75_105; note = Orientation (relative to transcription): antisense; note = sgRNA Position: 3068575; note = Sequence Name: 56322-704_101_SL_seq_6745
gcgctctggcgccccagctg

SEQ ID NO: 6746 - DNA, 20 bp, Homo sapiens
  source 1..20: mol_type = genomic DNA; note = Gene: RIPK1; note = Location (start to end; relative to TSS): RIPK1_43_73; note = Orientation (relative to transcription): antisense; note = sgRNA Position: 3068543; note = Sequence Name: 56322-704_101_SL_seq_6746
agtcgccgcgctccggcagc

SEQ ID NO: 6747 - DNA, 20 bp, Homo sapiens
  source 1..20: mol_type = genomic DNA; note = Gene: RIPK1; note = Location (start to end; relative to TSS): RIPK1_74_104; note = Orientation (relative to transcription): antisense; note = sgRNA Position: 3068574; note = Sequence Name: 56322-704_101_SL_seq_6747
cgctctggcgccccagctgt

SEQ ID NO: 6748 - DNA, 20 bp, Homo sapiens
  source 1..20: mol_type = genomic DNA; note = Gene: RIPK1; note = Location (start to end; relative to TSS): RIPK1_29_59; note = Orientation (relative to transcription): sense; note = sgRNA Position: 3068549; note = Sequence Name: 56322-704_101_SL_seq_6748
gcgggccagctgccggagcg

SEQ ID NO: 6749 - DNA, 20 bp, Homo sapiens
  source 1..20: mol_type = genomic DNA; note = Gene: RIPK1; note = Location (start to end; relative to TSS): RIPK1_66_96; note = Orientation (relative to transcription): antisense; note = sgRNA Position: 3068566; note = Sequence Name: 56322-704_101_SL_seq_6749
cgccccagctgtgggtcccc

SEQ ID NO: 6750 - DNA, 20 bp, Homo sapiens
  source 1..20: mol_type = genomic DNA; note = Gene: RIPK2; note = Location (start to end; relative to TSS): RIPK2_38_68; note = Orientation (relative to transcription): sense; note = sgRNA Position: 89757880; note = Sequence Name: 56322-704_101_SL_seq_6750
gctctggttcggagaagcag

SEQ ID NO: 6751 - DNA, 20 bp, Homo sapiens
  source 1..20: mol_type = genomic DNA; note = Gene: RIPK2; note = Location (start to end; relative to TSS): RIPK2_84_114; note = Orientation (relative to transcription): antisense; note = sgRNA Position: 89757906; note = Sequence Name: 56322-704_101_SL_seq_6751
tcacgagggcgcccattccc

SEQ ID NO: 6752 - DNA, 20 bp, Homo sapiens
  source 1..20: mol_type = genomic DNA; note = Gene: RIPK2; note = Location (start to end; relative to TSS): RIPK2_42_72; note = Orientation (relative to transcription): sense; note = sgRNA Position: 89757884; note = Sequence Name: 56322-704_101_SL_seq_6752
tggttcggagaagcagcggc

SEQ ID NO: 6753 - DNA, 20 bp, Homo sapiens
  source 1..20: mol_type = genomic DNA; note = Gene: RIPK2; note = Location (start to end; relative to TSS): RIPK2_80_110; note = Orientation (relative to transcription): antisense; note = sgRNA Position: 89757902; note = Sequence Name: 56322-704_101_SL_seq_6753
gagggcgcccattccccgga

SEQ ID NO: 6754 - DNA, 20 bp, Homo sapiens
  source 1..20: mol_type = genomic DNA; note = Gene: RIPK2; note = Location (start to end; relative to TSS): RIPK2_22_52; note = Orientation (relative to transcription): sense; note = sgRNA Position: 89757864; note = Sequence Name: 56322-704_101_SL_seq_6754
tctagaaaagaagtcagctc

SEQ ID NO: 6755 - DNA, 20 bp, Homo sapiens
  source 1..20: mol_type = genomic DNA; note = Gene: RIPK2; note = Location (start to end; relative to TSS): RIPK2_63_93; note = Orientation (relative to transcription): sense; note = sgRNA Position: 89757905; note = Sequence Name: 56322-704_101_SL_seq_6755
ggcgtgggccatccggggaa

SEQ ID NO: 6756 - DNA, 20 bp, Homo sapiens
  source 1..20: mol_type = genomic DNA; note = Gene: RIPK2; note = Location (start to end; relative to TSS): RIPK2_25_55; note = Orientation (relative to transcription): antisense; note = sgRNA Position: 89757847; note = Sequence Name: 56322-704_101_SL_seq_6756
ctgacttcttttctagagac

SEQ ID NO: 6757 - DNA, 20 bp, Homo sapiens
  source 1..20: mol_type = genomic DNA; note = Gene: RIPK2; note = Location (start to end; relative to TSS): RIPK2_58_88; note = Orientation (relative to transcription): sense; note = sgRNA Position: 89757900; note = Sequence Name: 56322-704_101_SL_seq_6757
cggctggcgtgggccatccg

SEQ ID NO: 6758 - DNA, 20 bp, Homo sapiens
  source 1..20: mol_type = genomic DNA; note = Gene: RIPK2; note = Location (start to end; relative to TSS): RIPK2_27_57; note = Orientation (relative to transcription): sense; note = sgRNA Position: 89757869; note = Sequence Name: 56322-704_101_SL_seq_6758
aaaagaagtcagctctggtt

SEQ ID NO: 6759 - DNA, 20 bp, Homo sapiens
  source 1..20: mol_type = genomic DNA; note = Gene: RIPK2; note = Location (start to end; relative to TSS): RIPK2_57_87; note = Orientation (relative to transcription): sense; note = sgRNA Position: 89757899; note = Sequence Name: 56322-704_101_SL_seq_6759
gcggctggcgtgggccatcc

SEQ ID NO: 6760 - DNA, 20 bp, Homo sapiens
  source 1..20: mol_type = genomic DNA; note = Gene: RIPK3; note = Location (start to end; relative to TSS): RIPK3_34_64; note = Orientation (relative to transcription): antisense; note = sgRNA Position: 24339953; note = Sequence Name: 56322-704_101_SL_seq_6760
ggtcagtctctagaccaaga

SEQ ID NO: 6761 - DNA, 20 bp, Homo sapiens
  source 1..20: mol_type = genomic DNA; note = Gene: RIPK3; note = Location (start to end; relative to TSS): RIPK3_100_130; note = Orientation (relative to transcription): antisense; note = sgRNA Position: 24339887; note = Sequence Name: 56322-704_101_SL_seq_6761
aggagatggagtgacttctg

SEQ ID NO: 6762 - DNA, 20 bp, Homo sapiens
  source 1..20: mol_type = genomic DNA; note = Gene: RIPK3; note = Location (start to end; relative to TSS): RIPK3_55_85; note = Orientation (relative to transcription): antisense; note = sgRNA Position: 24339932; note = Sequence Name: 56322-704_101_SL_seq_6762
gaaggggtctgtctgtgcag

SEQ ID NO: 6763 - DNA, 20 bp, Homo sapiens
  source 1..20: mol_type = genomic DNA; note = Gene: RIPK3; note = Location (start to end; relative to TSS): RIPK3_95_125; note = Orientation (relative to transcription): sense; note = sgRNA Position: 24339872; note = Sequence Name: 56322-704_101_SL_seq_6763
agaagtcactccatctccta

SEQ ID NO: 6764 - DNA, 20 bp, Homo sapiens
  source 1..20: mol_type = genomic DNA; note = Gene: RIPK3; note = Location (start to end; relative to TSS): RIPK3_18_48; note = Orientation (relative to transcription): antisense; note = sgRNA Position: 24339969; note = Sequence Name: 56322-704_101_SL_seq_6764
aagacggtgagtctactttc

SEQ ID NO: 6765 - DNA, 20 bp, Homo sapiens
  source 1..20: mol_type = genomic DNA; note = Gene: RIPK3; note = Location (start to end; relative to TSS): RIPK3_57_87; note = Orientation (relative to transcription): antisense; note = sgRNA Position: 24339930; note = Sequence Name: 56322-704_101_SL_seq_6765
gggaaggggtctgtctgtgc

SEQ ID NO: 6766 - DNA, 20 bp, Homo sapiens
  source 1..20: mol_type = genomic DNA; note = Gene: RIPK3; note = Location (start to end; relative to TSS): RIPK3_17_47; note = Orientation (relative to transcription): antisense; note = sgRNA Position: 24339970; note = Sequence Name: 56322-704_101_SL_seq_6766
agacggtgagtctactttcc

SEQ ID NO: 6767 - DNA, 20 bp, Homo sapiens
  source 1..20: mol_type = genomic DNA; note = Gene: RIPK3; note = Location (start to end; relative to TSS): RIPK3_56_86; note = Orientation (relative to transcription): antisense; note = sgRNA Position: 24339931; note = Sequence Name: 56322-704_101_SL_seq_6767
ggaaggggtctgtctgtgca

SEQ ID NO: 6768 - DNA, 20 bp, Homo sapiens
  source 1..20: mol_type = genomic DNA; note = Gene: RIPK3; note = Location (start to end; relative to TSS): RIPK3_11_41; note = Orientation (relative to transcription): sense; note = sgRNA Position: 24339956; note = Sequence Name: 56322-704_101_SL_seq_6768
ggaaagtagactcaccgtct

SEQ ID NO: 6769 - DNA, 20 bp, Homo sapiens
  source 1..20: mol_type = genomic DNA; note = Gene: RIPK3; note = Location (start to end; relative to TSS): RIPK3_55_85; note = Orientation (relative to transcription): antisense; note = sgRNA Position: 24339932; note = Sequence Name: 56322-704_101_SL_seq_6769
gaaggggtctgtctgtgcag

SEQ ID NO: 6770 - DNA, 20 bp, Homo sapiens
  source 1..20: mol_type = genomic DNA; note = Gene: RIPK4; note = Location (start to end; relative to TSS): RIPK4_39_69; note = Orientation (relative to transcription): sense; note = sgRNA Position: 41766989; note = Sequence Name: 56322-704_101_SL_seq_6770
ctgctgcgcaccttcgacgc

SEQ ID NO: 6771 - DNA, 20 bp, Homo sapiens
  source 1..20: mol_type = genomic DNA; note = Gene: RIPK4; note = Location (start to end; relative to TSS): RIPK4_75_105; note = Orientation (relative to transcription): sense; note = sgRNA Position: 41766953; note = Sequence Name: 56322-704_101_SL_seq_6771
tgggagaaggtgggctcggg

SEQ ID NO: 6772 - DNA, 20 bp, Homo sapiens
  source 1..20: mol_type = genomic DNA; note = Gene: RIPK4; note = Location (start to end; relative to TSS): RIPK4_40_70; note = Orientation (relative to transcription): antisense; note = sgRNA Position: 41767008; note = Sequence Name: 56322-704_101_SL_seq_6772
gaaggtgcgcagcagcgcca

SEQ ID NO: 6773 - DNA, 20 bp, Homo sapiens
  source 1..20: mol_type = genomic DNA; note = Gene: RIPK4; note = Location (start to end; relative to TSS): RIPK4_72_102; note = Orientation (relative to transcription): sense; note = sgRNA Position: 41766956; note = Sequence Name: 56322-704_101_SL_seq_6773
ggctgggagaaggtgggctc

SEQ ID NO: 6774 - DNA, 20 bp, Homo sapiens
  source 1..20: mol_type = genomic DNA; note = Gene: RIPK4; note = Location (start to end; relative to TSS): RIPK4_41_71; note = Orientation (relative to transcription): antisense; note = sgRNA Position: 41767007; note = Sequence Name: 56322-704_101_SL_seq_6774
cgaaggtgcgcagcagcgcc

SEQ ID NO: 6775 - DNA, 20 bp, Homo sapiens
  source 1..20: mol_type = genomic DNA; note = Gene: RIPK4; note = Location (start to end; relative to TSS): RIPK4_71_101; note = Orientation (relative to transcription): sense; note = sgRNA Position: 41766957; note = Sequence Name: 56322-704_101_SL_seq_6775
gggctgggagaaggtgggct

SEQ ID NO: 6776 - DNA, 20 bp, Homo sapiens
  source 1..20: mol_type = genomic DNA; note = Gene: RIPK4; note = Location (start to end; relative to TSS): RIPK4_32_62; note = Orientation (relative to transcription): antisense; note = sgRNA Position: 41767016; note = Sequence Name: 56322-704_101_SL_seq_6776
gcagcagcgccagggcccat

SEQ ID NO: 6777 - DNA, 20 bp, Homo sapiens
  source 1..20: mol_type = genomic DNA; note = Gene: RIPK4; note = Location (start to end; relative to TSS): RIPK4_65_95; note = Orientation (relative to transcription): sense; note = sgRNA Position: 41766963; note = Sequence Name: 56322-704_101_SL_seq_6777
gttcacgggctgggagaagg

SEQ ID NO: 6778 - DNA, 20 bp, Homo sapiens
  source 1..20: mol_type = genomic DNA; note = Gene: RIPK4; note = Location (start to end; relative to TSS): RIPK4_31_61; note = Orientation (relative to transcription): antisense; note = sgRNA Position: 41767017; note = Sequence Name: 56322-704_101_SL_seq_6778
cagcagcgccagggcccatg

SEQ ID NO: 6779 - DNA, 20 bp, Homo sapiens
  source 1..20: mol_type = genomic DNA; note = Gene: RIPK4; note = Location (start to end; relative to TSS): RIPK4_62_92; note = Orientation (relative to transcription): sense; note = sgRNA Position: 41766966; note = Sequence Name: 56322-704_101_SL_seq_6779
cgagttcacgggctgggaga

SEQ ID NO: 6780 - DNA, 20 bp, Homo sapiens
  source 1..20: mol_type = genomic DNA; note = Gene: RNASEL; note = Location (start to end; relative to TSS): RNASEL_57_87; note = Orientation (relative to transcription): antisense; note = sgRNA Position: 182589195; note = Sequence Name: 56322-704_101_SL_seq_6780
agacgtctcaattattcctt

SEQ ID NO: 6781 - DNA, 20 bp, Homo sapiens
  source 1..20: mol_type = genomic DNA; note = Gene: RNASEL; note = Location (start to end; relative to TSS): RNASEL_136_166; note = Orientation (relative to transcription): sense; note = sgRNA Position: 182589096; note = Sequence Name: 56322-704_101_SL_seq_6781
aattcttgggctttggagac

SEQ ID NO: 6782 - DNA, 20 bp, Homo sapiens
  source 1..20: mol_type = genomic DNA; note = Gene: RNASEL; note = Location (start to end; relative to TSS): RNASEL_60_90; note = Orientation (relative to transcription): sense; note = sgRNA Position: 182589172; note = Sequence Name: 56322-704_101_SL_seq_6782
ttgagacgtctgagttgagc

SEQ ID NO: 6783 - DNA, 20 bp, Homo sapiens
  source 1..20: mol_type = genomic DNA; note = Gene: RNASEL; note = Location (start to end; relative to TSS): RNASEL_123_153; note = Orientation (relative to transcription): antisense; note = sgRNA Position: 182589129; note = Sequence Name: 56322-704_101_SL_seq_6783
tcttcaggatcgacttatcg

SEQ ID NO: 6784 - DNA, 20 bp, Homo sapiens
  source 1..20: mol_type = genomic DNA; note = Gene: RNASEL; note = Location (start to end; relative to TSS): RNASEL_65_95; note = Orientation (relative to transcription): sense; note = sgRNA Position: 182589167; note = Sequence Name: 56322-704_101_SL_seq_6784
acgtctgagttgagcaggta

SEQ ID NO: 6785 - DNA, 20 bp, Homo sapiens
  source 1..20: mol_type = genomic DNA; note = Gene: RNASEL; note = Location (start to end; relative to TSS): RNASEL_122_152; note = Orientation (relative to transcription): sense; note = sgRNA Position: 182589110; note = Sequence Name: 56322-704_101_SL_seq_6785
agtcgatcctgaagaattct

SEQ ID NO: 6786 - DNA, 20 bp, Homo sapiens
  source 1..20: mol_type = genomic DNA; note = Gene: RNASEL; note = Location (start to end; relative to TSS): RNASEL_41_71; note = Orientation (relative to transcription): antisense; note = sgRNA Position: 182589211; note = Sequence Name: 56322-704_101_SL_seq_6786
cctttggcagccgcaaagcc

SEQ ID NO: 6787 - DNA, 20 bp, Homo sapiens
  source 1..20: mol_type = genomic DNA; note = Gene: RNASEL; note = Location (start to end; relative to TSS): RNASEL_79_109; note = Orientation (relative to transcription): sense; note = sgRNA Position: 182589153; note = Sequence Name: 56322-704_101_SL_seq_6787
caggtaaggcaggcagaagg

SEQ ID NO: 6788 - DNA, 20 bp, Homo sapiens
  source 1..20: mol_type = genomic DNA; note = Gene: RNASEL; note = Location (start to end; relative to TSS): RNASEL_32_62; note = Orientation (relative to transcription): sense; note = sgRNA Position: 182589200; note = Sequence Name: 56322-704_101_SL_seq_6788
ccaggctttgcggctgccaa

SEQ ID NO: 6789 - DNA, 20 bp, Homo sapiens
  source 1..20: mol_type = genomic DNA; note = Gene: RNASEL; note = Location (start to end; relative to TSS): RNASEL_65_95; note = Orientation (relative to transcription): sense; note = sgRNA Position: 182589167; note = Sequence Name: 56322-704_101_SL_seq_6789
acgtctgagttgagcaggta

SEQ ID NO: 6790 - DNA, 20 bp, Homo sapiens
  source 1..20: mol_type = genomic DNA; note = Gene: ROCK1; note = Location (start to end; relative to TSS): ROCK1_53_83; note = Orientation (relative to transcription): antisense; note = sgRNA Position: 21111756; note = Sequence Name: 56322-704_101_SL_seq_6790
tggggcgaggggggctgaga

SEQ ID NO: 6791 - DNA, 20 bp, Homo sapiens
  source 1..20: mol_type = genomic DNA; note = Gene: ROCK1; note = Location (start to end; relative to TSS): ROCK1_88_118; note = Orientation (relative to transcription): sense; note = sgRNA Position: 21111701; note = Sequence Name: 56322-704_101_SL_seq_6791
cgactcgccctttccccggc

SEQ ID NO: 6792 - DNA, 20 bp, Homo sapiens
  source 1..20: mol_type = genomic DNA; note = Gene: ROCK1; note = Location (start to end; relative to TSS): ROCK1_54_84; note = Orientation (relative to transcription): antisense; note = sgRNA Position: 21111755; note = Sequence Name: 56322-704_101_SL_seq_6792
gtggggcgaggggggctgag

SEQ ID NO: 6793 - DNA, 20 bp, Homo sapiens
  source 1..20: mol_type = genomic DNA; note = Gene: ROCK1; note = Location (start to end; relative to TSS): ROCK1_84_114; note = Orientation (relative to transcription): sense; note = sgRNA Position: 21111705; note = Sequence Name: 56322-704_101_SL_seq_6793
gccgcgactcgccctttccc

SEQ ID NO: 6794 - DNA, 20 bp, Homo sapiens
  source 1..20: mol_type = genomic DNA; note = Gene: ROCK1; note = Location (start to end; relative to TSS): ROCK1_19_49; note = Orientation (relative to transcription): antisense; note = sgRNA Position: 21111790; note = Sequence Name: 56322-704_101_SL_seq_6794
cgccttcctgttcaaacaaa

SEQ ID NO: 6795 - DNA, 20 bp, Homo sapiens
  source 1..20: mol_type = genomic DNA; note = Gene: ROCK1; note = Location (start to end; relative to TSS): ROCK1_62_92; note = Orientation (relative to transcription): antisense; note = sgRNA Position: 21111747; note = Sequence Name: 56322-704_101_SL_seq_6795
cctggggggtggggcgaggg

SEQ ID NO: 6796 - DNA, 20 bp, Homo sapiens
  source 1..20: mol_type = genomic DNA; note = Gene: ROCK1; note = Location (start to end; relative to TSS): ROCK1_11_41; note = Orientation (relative to transcription): sense; note = sgRNA Position: 21111778; note = Sequence Name: 56322-704_101_SL_seq_6796
cgtttgtttgaacaggaagg

SEQ ID NO: 6797 - DNA, 20 bp, Homo sapiens
  source 1..20: mol_type = genomic DNA; note = Gene: ROCK1; note = Location (start to end; relative to TSS): ROCK1_54_84; note = Orientation (relative to transcription): antisense; note = sgRNA Position: 21111755; note = Sequence Name: 56322-704_101_SL_seq_6797
gtggggcgaggggggctgag

SEQ ID NO: 6798 - DNA, 20 bp, Homo sapiens
  source 1..20: mol_type = genomic DNA; note = Gene: ROCK1; note = Location (start to end; relative to TSS): ROCK1_9_39; note = Orientation (relative to transcription): antisense; note = sgRNA Position: 21111800; note = Sequence Name: 56322-704_101_SL_seq_6798
ttcaaacaaacggagaccgc

SEQ ID NO: 6799 - DNA, 20 bp, Homo sapiens
  source 1..20: mol_type = genomic DNA; note = Gene: ROCK1; note = Location (start to end; relative to TSS): ROCK1_53_83; note = Orientation (relative to transcription): antisense; note = sgRNA Position: 21111756; note = Sequence Name: 56322-704_101_SL_seq_6799
tggggcgaggggggctgaga

SEQ ID NO: 6800 - DNA, 20 bp, Homo sapiens
  source 1..20: mol_type = genomic DNA; note = Gene: ROCK2; note = Location (start to end; relative to TSS): ROCK2_35_65; note = Orientation (relative to transcription): sense; note = sgRNA Position: 11344577; note = Sequence Name: 56322-704_101_SL_seq_6800
agggactgcaaggcggccgg

SEQ ID NO: 6801 - DNA, 20 bp, Homo sapiens
  source 1..20: mol_type = genomic DNA; note = Gene: ROCK2; note = Location (start to end; relative to TSS): ROCK2_76_106; note = Orientation (relative to transcription): sense; note = sgRNA Position: 11344536; note = Sequence Name: 56322-704_101_SL_seq_6801
ggcggcggccgtagtggccc

SEQ ID NO: 6802 - DNA, 20 bp, Homo sapiens
  source 1..20: mol_type = genomic DNA; note = Gene: ROCK2; note = Location (start to end; relative to TSS): ROCK2_32_62; note = Orientation (relative to transcription): sense; note = sgRNA Position: 11344580; note = Sequence Name: 56322-704_101_SL_seq_6802
ctgagggactgcaaggcggc

SEQ ID NO: 6803 - DNA, 20 bp, Homo sapiens
  source 1..20: mol_type = genomic DNA; note = Gene: ROCK2; note = Location (start to end; relative to TSS): ROCK2_70_100; note = Orientation (relative to transcription): sense; note = sgRNA Position: 11344542; note = Sequence Name: 56322-704_101_SL_seq_6803
cgggccggcggcggccgtag

SEQ ID NO: 6804 - DNA, 20 bp, Homo sapiens
  source 1..20: mol_type = genomic DNA; note = Gene: ROCK2; note = Location (start to end; relative to TSS): ROCK2_30_60; note = Orientation (relative to transcription): antisense; note = sgRNA Position: 11344602; note = Sequence Name: 56322-704_101_SL_seq_6804
gcagtccctcagccagctcc

SEQ ID NO: 6805 - DNA, 20 bp, Homo sapiens
  source 1..20: mol_type = genomic DNA; note = Gene: ROCK2; note = Location (start to end; relative to TSS): ROCK2_60_90; note = Orientation (relative to transcription): antisense; note = sgRNA Position: 11344572; note = Sequence Name: 56322-704_101_SL_seq_6805
cccgctgccatggtcgccgc

SEQ ID NO: 6806 - DNA, 20 bp, Homo sapiens
  source 1..20: mol_type = genomic DNA; note = Gene: ROCK2; note = Location (start to end; relative to TSS): ROCK2_28_58; note = Orientation (relative to transcription): sense; note = sgRNA Position: 11344584; note = Sequence Name: 56322-704_101_SL_seq_6806
ctggctgagggactgcaagg

SEQ ID NO: 6807 - DNA, 20 bp, Homo sapiens
  source 1..20: mol_type = genomic DNA; note = Gene: ROCK2; note = Location (start to end; relative to TSS): ROCK2_58_88; note = Orientation (relative to transcription): sense; note = sgRNA Position: 11344554; note = Sequence Name: 56322-704_101_SL_seq_6807
cgaccatggcagcgggccgg

SEQ ID NO: 6808 - DNA, 20 bp, Homo sapiens
  source 1..20: mol_type = genomic DNA; note = Gene: ROCK2; note = Location (start to end; relative to TSS): ROCK2_25_55; note = Orientation (relative to transcription): sense; note = sgRNA Position: 11344587; note = Sequence Name: 56322-704_101_SL_seq_6808
gagctggctgagggactgca

SEQ ID NO: 6809 - DNA, 20 bp, Homo sapiens
  source 1..20: mol_type = genomic DNA; note = Gene: ROCK2; note = Location (start to end; relative to TSS): ROCK2_55_85; note = Orientation (relative to transcription): sense; note = sgRNA Position: 11344557; note = Sequence Name: 56322-704_101_SL_seq_6809
cggcgaccatggcagcgggc

SEQ ID NO: 6810 - DNA, 20 bp, Homo sapiens
  source 1..20: mol_type = genomic DNA; note = Gene: ROR1; note = Location (start to end; relative to TSS): ROR1_47_77; note = Orientation (relative to transcription): antisense; note = sgRNA Position: 63774070; note = Sequence Name: 56322-704_101_SL_seq_6810
tcccggggctccctcggcgg

SEQ ID NO: 6811 - DNA, 20 bp, Homo sapiens
  source 1..20: mol_type = genomic DNA; note = Gene: ROR1; note = Location (start to end; relative to TSS): ROR1_77_107; note = Orientation (relative to transcription): antisense; note = sgRNA Position: 63774100; note = Sequence Name: 56322-704_101_SL_seq_6811
aacagcgcaccctgcgccca

SEQ ID NO: 6812 - DNA, 20 bp, Homo sapiens
  source 1..20: mol_type = genomic DNA; note = Gene: ROR1; note = Location (start to end; relative to TSS): ROR1_44_74; note = Orientation (relative to transcription): antisense; note = sgRNA Position: 63774067; note = Sequence Name: 56322-704_101_SL_seq_6812
cggggctccctcggcggcgg

SEQ ID NO: 6813 - DNA, 20 bp, Homo sapiens
  source 1..20: mol_type = genomic DNA; note = Gene: ROR1; note = Location (start to end; relative to TSS): ROR1_76_106; note = Orientation (relative to transcription): antisense; note = sgRNA Position: 63774099; note = Sequence Name: 56322-704_101_SL_seq_6813
acagcgcaccctgcgcccag

SEQ ID NO: 6814 - DNA, 20 bp, Homo sapiens
  source 1..20: mol_type = genomic DNA; note = Gene: ROR1; note = Location (start to end; relative to TSS): ROR1_41_71; note = Orientation (relative to transcription): sense; note = sgRNA Position: 63774084; note = Sequence Name: 56322-704_101_SL_seq_6814
ccgccgagggagccccggga

SEQ ID NO: 6815 - DNA, 20 bp, Homo sapiens
  source 1..20: mol_type = genomic DNA; note = Gene: ROR1; note = Location (start to end; relative to TSS): ROR1_73_103; note = Orientation (relative to transcription): sense; note = sgRNA Position: 63774116; note = Sequence Name: 56322-704_101_SL_seq_6815
ggcgcagggtgcgctgttct

SEQ ID NO: 6816 - DNA, 20 bp, Homo sapiens
  source 1..20: mol_type = genomic DNA; note = Gene: ROR1; note = Location (start to end; relative to TSS): ROR1_28_58; note = Orientation (relative to transcription): sense; note = sgRNA Position: 63774071; note = Sequence Name: 56322-704_101_SL_seq_6816
gccgccaccgccgccgccga

SEQ ID NO: 6817 - DNA, 20 bp, Homo sapiens
  source 1..20: mol_type = genomic DNA; note = Gene: ROR1; note = Location (start to end; relative to TSS): ROR1_59_89; note = Orientation (relative to transcription): sense; note = sgRNA Position: 63774102; note = Sequence Name: 56322-704_101_SL_seq_6817
gacggcagcccctgggcgca

SEQ ID NO: 6818 - DNA, 20 bp, Homo sapiens
  source 1..20: mol_type = genomic DNA; note = Gene: ROR1; note = Location (start to end; relative to TSS): ROR1_27_57; note = Orientation (relative to transcription): sense; note = sgRNA Position: 63774070; note = Sequence Name: 56322-704_101_SL_seq_6818
agccgccaccgccgccgccg

SEQ ID NO: 6819 - DNA, 20 bp, Homo sapiens
  source 1..20: mol_type = genomic DNA; note = Gene: ROR1; note = Location (start to end; relative to TSS): ROR1_58_88; note = Orientation (relative to transcription): sense; note = sgRNA Position: 63774101; note = Sequence Name: 56322-704_101_SL_seq_6819
ggacggcagcccctgggcgc

SEQ ID NO: 6820 - DNA, 20 bp, Homo sapiens
  source 1..20: mol_type = genomic DNA; note = Gene: ROR2; note = Location (start to end; relative to TSS): ROR2_47_77; note = Orientation (relative to transcription): antisense; note = sgRNA Position: 91950177; note = Sequence Name: 56322-704_101_SL_seq_6820
gctggggaggttccttggcg

SEQ ID NO: 6821 - DNA, 20 bp, Homo sapiens
  source 1..20: mol_type = genomic DNA; note = Gene: ROR2; note = Location (start to end; relative to TSS): ROR2_79_109; note = Orientation (relative to transcription): antisense; note = sgRNA Position: 91950145; note = Sequence Name: 56322-704_101_SL_seq_6821
gcgccgctcggctccggcca

SEQ ID NO: 6822 - DNA, 20 bp, Homo sapiens
  source 1..20: mol_type = genomic DNA; note = Gene: ROR2; note = Location (start to end; relative to TSS): ROR2_46_76; note = Orientation (relative to transcription): antisense; note = sgRNA Position: 91950178; note = Sequence Name: 56322-704_101_SL_seq_6822
ctggggaggttccttggcgc

SEQ ID NO: 6823 - DNA, 20 bp, Homo sapiens
  source 1..20: mol_type = genomic DNA; note = Gene: ROR2; note = Location (start to end; relative to TSS): ROR2_77_107; note = Orientation (relative to transcription): sense; note = sgRNA Position: 91950127; note = Sequence Name: 56322-704_101_SL_seq_6823
cggagccgagcggcgcatcc

SEQ ID NO: 6824 - DNA, 20 bp, Homo sapiens
  source 1..20: mol_type = genomic DNA; note = Gene: ROR2; note = Location (start to end; relative to TSS): ROR2_40_70; note = Orientation (relative to transcription): antisense; note = sgRNA Position: 91950184; note = Sequence Name: 56322-704_101_SL_seq_6824
aggttccttggcgcgggctg

SEQ ID NO: 6825 - DNA, 20 bp, Homo sapiens
  source 1..20: mol_type = genomic DNA; note = Gene: ROR2; note = Location (start to end; relative to TSS): ROR2_73_103; note = Orientation (relative to transcription): antisense; note = sgRNA Position: 91950151; note = Sequence Name: 56322-704_101_SL_seq_6825
ctcggctccggccacggcaa

SEQ ID NO: 6826 - DNA, 20 bp, Homo sapiens
  source 1..20: mol_type = genomic DNA; note = Gene: ROR2; note = Location (start to end; relative to TSS): ROR2_26_56; note = Orientation (relative to transcription): sense; note = sgRNA Position: 91950178; note = Sequence Name: 56322-704_101_SL_seq_6826
ggacgccccagcccgcgcca

SEQ ID NO: 6827 - DNA, 20 bp, Homo sapiens
  source 1..20: mol_type = genomic DNA; note = Gene: ROR2; note = Location (start to end; relative to TSS): ROR2_57_87; note = Orientation (relative to transcription): sense; note = sgRNA Position: 91950147; note = Sequence Name: 56322-704_101_SL_seq_6827
cagccagcccttgccgtggc

SEQ ID NO: 6828 - DNA, 20 bp, Homo sapiens
  source 1..20: mol_type = genomic DNA; note = Gene: ROR2; note = Location (start to end; relative to TSS): ROR2_21_51; note = Orientation (relative to transcription): antisense; note = sgRNA Position: 91950203; note = Sequence Name: 56322-704_101_SL_seq_6828
ggggcgtcccgccggccgcc

SEQ ID NO: 6829 - DNA, 20 bp, Homo sapiens
  source 1..20: mol_type = genomic DNA; note = Gene: ROR2; note = Location (start to end; relative to TSS): ROR2_53_83; note = Orientation (relative to transcription): sense; note = sgRNA Position: 91950151; note = Sequence Name: 56322-704_101_SL_seq_6829
tccccagccagcccttgccg

SEQ ID NO: 6830 - DNA, 20 bp, Homo sapiens
  source 1..20: mol_type = genomic DNA; note = Gene: ROS1; note = Location (start to end; relative to TSS): ROS1_22_52; note = Orientation (relative to transcription): sense; note = sgRNA Position: 117425896; note = Sequence Name: 56322-704_101_SL_seq_6830
ggtgactttatgggagtaaa

SEQ ID NO: 6831 - DNA, 20 bp, Homo sapiens
  source 1..20: mol_type = genomic DNA; note = Gene: ROS1; note = Location (start to end; relative to TSS): ROS1_154_184; note = Orientation (relative to transcription): antisense; note = sgRNA Position: 117425784; note = Sequence Name: 56322-704_101_SL_seq_6831
tttgtttgttttgctatatt

SEQ ID NO: 6832 - DNA, 20 bp, Homo sapiens
  source 1..20: mol_type = genomic DNA; note = Gene: ROS1; note = Location (start to end; relative to TSS): ROS1_18_48; note = Orientation (relative to transcription): antisense; note = sgRNA Position: 117425920; note = Sequence Name: 56322-704_101_SL_seq_6832
taaagtcacccagtgactaa

SEQ ID NO: 6833 - DNA, 20 bp, Homo sapiens
  source 1..20: mol_type = genomic DNA; note = Gene: ROS1; note = Location (start to end; relative to TSS): ROS1_113_143; note = Orientation (relative to transcription): sense; note = sgRNA Position: 117425805; note = Sequence Name: 56322-704_101_SL_seq_6833
aggctaagtattatttcaaa

SEQ ID NO: 6834 - DNA, 20 bp, Homo sapiens
  source 1..20: mol_type = genomic DNA; note = Gene: ROS1; note = Location (start to end; relative to TSS): ROS1_1_31; note = Orientation (relative to transcription): sense; note = sgRNA Position: 117425917; note = Sequence Name: 56322-704_101_SL_seq_6834
agaactaacctttagtcact

SEQ ID NO: 6835 - DNA, 20 bp, Homo sapiens
  source 1..20: mol_type = genomic DNA; note = Gene: ROS1; note = Location (start to end; relative to TSS): ROS1_93_123; note = Orientation (relative to transcription): sense; note = sgRNA Position: 117425825; note = Sequence Name: 56322-704_101_SL_seq_6835
ttcaaaggtctaaatgaaaa

SEQ ID NO: 6836 - DNA, 20 bp, Homo sapiens
  source 1..20: mol_type = genomic DNA; note = Gene: ROS1; note = Location (start to end; relative to TSS): ROS1_0_30; note = Orientation (relative to transcription): sense; note = sgRNA Position: 117425918; note = Sequence Name: 56322-704_101_SL_seq_6836
aagaactaacctttagtcac

SEQ ID NO: 6837 - DNA, 20 bp, Homo sapiens
  source 1..20: mol_type = genomic DNA; note = Gene: ROS1; note = Location (start to end; relative to TSS): ROS1_78_108; note = Orientation (relative to transcription): sense; note = sgRNA Position: 117425840; note = Sequence Name: 56322-704_101_SL_seq_6837
acaagctttcaagcattcaa

SEQ ID NO: 6838 - DNA, 20 bp, Homo sapiens
  source 1..20: mol_type = genomic DNA; note = Gene: ROS1; note = Location (start to end; relative to TSS): ROS1_-10_20; note = Orientation (relative to transcription): antisense; note = sgRNA Position: 117425948; note = Sequence Name: 56322-704_101_SL_seq_6838
tcttagaagtgcacttcaca

SEQ ID NO: 6839 - DNA, 20 bp, Homo sapiens
  source 1..20: mol_type = genomic DNA; note = Gene: ROS1; note = Location (start to end; relative to TSS): ROS1_22_52; note = Orientation (relative to transcription): sense; note = sgRNA Position: 117425896; note = Sequence Name: 56322-704_101_SL_seq_6839
ggtgactttatgggagtaaa

SEQ ID NO: 6840 - DNA, 20 bp, Homo sapiens
  source 1..20: mol_type = genomic DNA; note = Gene: RPS6KA1; note = Location (start to end; relative to TSS): RPS6KA1_20_50; note = Orientation (relative to transcription): sense; note = sgRNA Position: 26529807; note = Sequence Name: 56322-704_101_SL_seq_6840
gacggcccagccggagcgcg

SEQ ID NO: 6841 - DNA, 20 bp, Homo sapiens
  source 1..20: mol_type = genomic DNA; note = Gene: RPS6KA1; note = Location (start to end; relative to TSS): RPS6KA1_86_116; note = Orientation (relative to transcription): antisense; note = sgRNA Position: 26529853; note = Sequence Name: 56322-704_101_SL_seq_6841
ctcccgggtcctggggtccc

SEQ ID NO: 6842 - DNA, 20 bp, Homo sapiens
  source 1..20: mol_type = genomic DNA; note = Gene: RPS6KA1; note = Location (start to end; relative to TSS): RPS6KA1_21_51; note = Orientation (relative to transcription): sense; note = sgRNA Position: 26529808; note = Sequence Name: 56322-704_101_SL_seq_6842
acggcccagccggagcgcga

SEQ ID NO: 6843 - DNA, 20 bp, Homo sapiens
  source 1..20: mol_type = genomic DNA; note = Gene: RPS6KA1; note = Location (start to end; relative to TSS): RPS6KA1_81_111; note = Orientation (relative to transcription): sense; note = sgRNA Position: 26529868; note = Sequence Name: 56322-704_101_SL_seq_6843
ggaccccaggacccgggagg

SEQ ID NO: 6844 - DNA, 20 bp, Homo sapiens
  source 1..20: mol_type = genomic DNA; note = Gene: RPS6KA1; note = Location (start to end; relative to TSS): RPS6KA1_29_59; note = Orientation (relative to transcription): sense; note = sgRNA Position: 26529816; note = Sequence Name: 56322-704_101_SL_seq_6844
gccggagcgcgaggggctcg

SEQ ID NO: 6845 - DNA, 20 bp, Homo sapiens
  source 1..20: mol_type = genomic DNA; note = Gene: RPS6KA1; note = Location (start to end; relative to TSS): RPS6KA1_78_108; note = Orientation (relative to transcription): sense; note = sgRNA Position: 26529865; note = Sequence Name: 56322-704_101_SL_seq_6845
cagggaccccaggacccggg

SEQ ID NO: 6846 - DNA, 20 bp, Homo sapiens
  source 1..20: mol_type = genomic DNA; note = Gene: RPS6KA1; note = Location (start to end; relative to TSS): RPS6KA1_22_52; note = Orientation (relative to transcription): sense; note = sgRNA Position: 26529809; note = Sequence Name: 56322-704_101_SL_seq_6846
cggcccagccggagcgcgag

SEQ ID NO: 6847 - DNA, 20 bp, Homo sapiens
  source 1..20: mol_type = genomic DNA; note = Gene: RPS6KA1; note = Location (start to end; relative to TSS): RPS6KA1_75_105; note = Orientation (relative to transcription): sense; note = sgRNA Position: 26529862; note = Sequence Name: 56322-704_101_SL_seq_6847
agccagggaccccaggaccc

SEQ ID NO: 6848 - DNA, 20 bp, Homo sapiens
  source 1..20: mol_type = genomic DNA; note = Gene: RPS6KA1; note = Location (start to end; relative to TSS): RPS6KA1_34_64; note = Orientation (relative to transcription): antisense; note = sgRNA Position: 26529801; note = Sequence Name: 56322-704_101_SL_seq_6848
gagcccctcgcgctccggct

SEQ ID NO: 6849 - DNA, 20 bp, Homo sapiens
  source 1..20: mol_type = genomic DNA; note = Gene: RPS6KA1; note = Location (start to end; relative to TSS): RPS6KA1_74_104; note = Orientation (relative to transcription): sense; note = sgRNA Position: 26529861; note = Sequence Name: 56322-704_101_SL_seq_6849
gagccagggaccccaggacc

SEQ ID NO: 6850 - DNA, 20 bp, Homo sapiens
  source 1..20: mol_type = genomic DNA; note = Gene: RPS6KA2; note = Location (start to end; relative to TSS): RPS6KA2_51_81; note = Orientation (relative to transcription): antisense; note = sgRNA Position: 166627196; note = Sequence Name: 56322-704_101_SL_seq_6850
gcaggccgcgccggccaccg

SEQ ID NO: 6851 - DNA, 20 bp, Homo sapiens
  source 1..20: mol_type = genomic DNA; note = Gene: RPS6KA2; note = Location (start to end; relative to TSS): RPS6KA2_83_113; note = Orientation (relative to transcription): antisense; note = sgRNA Position: 166627164; note = Sequence Name: 56322-704_101_SL_seq_6851
ggggcgtggggcgcgagctg

SEQ ID NO: 6852 - DNA, 20 bp, Homo sapiens
  source 1..20: mol_type = genomic DNA; note = Gene: RPS6KA2; note = Location (start to end; relative to TSS): RPS6KA2_37_67; note = Orientation (relative to transcription): sense; note = sgRNA Position: 166627190; note = Sequence Name: 56322-704_101_SL_seq_6852
cccggccgcggtggccggcg

SEQ ID NO: 6853 - DNA, 20 bp, Homo sapiens
  source 1..20: mol_type = genomic DNA; note = Gene: RPS6KA2; note = Location (start to end; relative to TSS): RPS6KA2_73_103; note = Orientation (relative to transcription): antisense; note = sgRNA Position: 166627174; note = Sequence Name: 56322-704_101_SL_seq_6853
gcgcgagctgcggtcacaaa

SEQ ID NO: 6854 - DNA, 20 bp, Homo sapiens
  source 1..20: mol_type = genomic DNA; note = Gene: RPS6KA2; note = Location (start to end; relative to TSS): RPS6KA2_25_55; note = Orientation (relative to transcription): sense; note = sgRNA Position: 166627202; note = Sequence Name: 56322-704_101_SL_seq_6854
agcgattgtggccccggccg

SEQ ID NO: 6855 - DNA, 20 bp, Homo sapiens
  source 1..20: mol_type = genomic DNA; note = Gene: RPS6KA2; note = Location (start to end; relative to TSS): RPS6KA2_69_99; note = Orientation (relative to transcription): antisense; note = sgRNA Position: 166627178; note = Sequence Name: 56322-704_101_SL_seq_6855
gagctgcggtcacaaagggc

SEQ ID NO: 6856 - DNA, 20 bp, Homo sapiens
  source 1..20: mol_type = genomic DNA; note = Gene: RPS6KA2; note = Location (start to end; relative to TSS): RPS6KA2_28_58; note = Orientation (relative to transcription): sense; note = sgRNA Position: 166627199; note = Sequence Name: 56322-704_101_SL_seq_6856
gattgtggccccggccgcgg

SEQ ID NO: 6857 - DNA, 20 bp, Homo sapiens
  source 1..20: mol_type = genomic DNA; note = Gene: RPS6KA2; note = Location (start to end; relative to TSS): RPS6KA2_60_90; note = Orientation (relative to transcription): antisense; note = sgRNA Position: 166627187; note = Sequence Name: 56322-704_101_SL_seq_6857
tcacaaagggcaggccgcgc

SEQ ID NO: 6858 - DNA, 20 bp, Homo sapiens
  source 1..20: mol_type = genomic DNA; note = Gene: RPS6KA2; note = Location (start to end; relative to TSS): RPS6KA2_19_49; note = Orientation (relative to transcription): sense; note = sgRNA Position: 166627208; note = Sequence Name: 56322-704_101_SL_seq_6858
ggagggagcgattgtggccc

SEQ ID NO: 6859 - DNA, 20 bp, Homo sapiens
  source 1..20: mol_type = genomic DNA; note = Gene: RPS6KA2; note = Location (start to end; relative to TSS): RPS6KA2_51_81; note = Orientation (relative to transcription): antisense; note = sgRNA Position: 166627196; note = Sequence Name: 56322-704_101_SL_seq_6859
gcaggccgcgccggccaccg

SEQ ID NO: 6860 - DNA, 20 bp, Homo sapiens
  source 1..20: mol_type = genomic DNA; note = Gene: RPS6KA3; note = Location (start to end; relative to TSS): RPS6KA3_41_71; note = Orientation (relative to transcription): sense; note = sgRNA Position: 20266844; note = Sequence Name: 56322-704_101_SL_seq_6860
gcgcgcgggcgtctctggcc

SEQ ID NO: 6861 - DNA, 20 bp, Homo sapiens
  source 1..20: mol_type = genomic DNA; note = Gene: RPS6KA3; note = Location (start to end; relative to TSS): RPS6KA3_88_118; note = Orientation (relative to transcription): sense; note = sgRNA Position: 20266797; note = Sequence Name: 56322-704_101_SL_seq_6861
tcggcgtcgagccctctctg

SEQ ID NO: 6862 - DNA, 20 bp, Homo sapiens
  source 1..20: mol_type = genomic DNA; note = Gene: RPS6KA3; note = Location (start to end; relative to TSS): RPS6KA3_36_66; note = Orientation (relative to transcription): sense; note = sgRNA Position: 20266849; note = Sequence Name: 56322-704_101_SL_seq_6862
gctcagcgcgcgggcgtctc

SEQ ID NO: 6863 - DNA, 20 bp, Homo sapiens
  source 1..20: mol_type = genomic DNA; note = Gene: RPS6KA3; note = Location (start to end; relative to TSS): RPS6KA3_87_117; note = Orientation (relative to transcription): sense; note = sgRNA Position: 20266798; note = Sequence Name: 56322-704_101_SL_seq_6863
gtcggcgtcgagccctctct

SEQ ID NO: 6864 - DNA, 20 bp, Homo sapiens
  source 1..20: mol_type = genomic DNA; note = Gene: RPS6KA3; note = Location (start to end; relative to TSS): RPS6KA3_22_52; note = Orientation (relative to transcription): antisense; note = sgRNA Position: 20266883; note = Sequence Name: 56322-704_101_SL_seq_6864
gagagcctcgcgcctccgct

SEQ ID NO: 6865 - DNA, 20 bp, Homo sapiens
  source 1..20: mol_type = genomic DNA; note = Gene: RPS6KA3; note = Location (start to end; relative to TSS): RPS6KA3_68_98; note = Orientation (relative to transcription): antisense; note = sgRNA Position: 20266837; note = Sequence Name: 56322-704_101_SL_seq_6865
ccgcccgaaagccgcgcgcc

SEQ ID NO: 6866 - DNA, 20 bp, Homo sapiens
  source 1..20: mol_type = genomic DNA; note = Gene: RPS6KA3; note = Location (start to end; relative to TSS): RPS6KA3_26_56; note = Orientation (relative to transcription): sense; note = sgRNA Position: 20266859; note = Sequence Name: 56322-704_101_SL_seq_6866
cgaggctctcgctcagcgcg

SEQ ID NO: 6867 - DNA, 20 bp, Homo sapiens
  source 1..20: mol_type = genomic DNA; note = Gene: RPS6KA3; note = Location (start to end; relative to TSS): RPS6KA3_63_93; note = Orientation (relative to transcription): sense; note = sgRNA Position: 20266822; note = Sequence Name: 56322-704_101_SL_seq_6867
gcgcgcggctttcgggcggt

SEQ ID NO: 6868 - DNA, 20 bp, Homo sapiens
  source 1..20: mol_type = genomic DNA; note = Gene: RPS6KA3; note = Location (start to end; relative to TSS): RPS6KA3_27_57; note = Orientation (relative to transcription): sense; note = sgRNA Position: 20266858; note = Sequence Name: 56322-704_101_SL_seq_6868
gaggctctcgctcagcgcgc

SEQ ID NO: 6869 - DNA, 20 bp, Homo sapiens
  source 1..20: mol_type = genomic DNA; note = Gene: RPS6KA3; note = Location (start to end; relative to TSS): RPS6KA3_59_89; note = Orientation (relative to transcription): sense; note = sgRNA Position: 20266826; note = Sequence Name: 56322-704_101_SL_seq_6869
ccaggcgcgcggctttcggg

SEQ ID NO: 6870 - DNA, 20 bp, Homo sapiens
  source 1..20: mol_type = genomic DNA; note = Gene: RPS6KA4; note = Location (start to end; relative to TSS): RPS6KA4_46_76; note = Orientation (relative to transcription): antisense; note = sgRNA Position: 64359214; note = Sequence Name: 56322-704_101_SL_seq_6870
gcgggtcgctggggcccgcg

SEQ ID NO: 6871 - DNA, 20 bp, Homo sapiens
  source 1..20: mol_type = genomic DNA; note = Gene: RPS6KA4; note = Location (start to end; relative to TSS): RPS6KA4_87_117; note = Orientation (relative to transcription): sense; note = sgRNA Position: 64359275; note = Sequence Name: 56322-704_101_SL_seq_6871
agagctgcgccgtggagctg

SEQ ID NO: 6872 - DNA, 20 bp, Homo sapiens
  source 1..20: mol_type = genomic DNA; note = Gene: RPS6KA4; note = Location (start to end; relative to TSS): RPS6KA4_47_77; note = Orientation (relative to transcription): sense; note = sgRNA Position: 64359235; note = Sequence Name: 56322-704_101_SL_seq_6872
cccagcgacccgcccgccat

SEQ ID NO: 6873 - DNA, 20 bp, Homo sapiens
  source 1..20: mol_type = genomic DNA; note = Gene: RPS6KA4; note = Location (start to end; relative to TSS): RPS6KA4_79_109; note = Orientation (relative to transcription): sense; note = sgRNA Position: 64359267; note = Sequence Name: 56322-704_101_SL_seq_6873
cgacgatgagagctgcgccg

SEQ ID NO: 6874 - DNA, 20 bp, Homo sapiens
  source 1..20: mol_type = genomic DNA; note = Gene: RPS6KA4; note = Location (start to end; relative to TSS): RPS6KA4_30_60; note = Orientation (relative to transcription): antisense; note = sgRNA Position: 64359198; note = Sequence Name: 56322-704_101_SL_seq_6874
cgcgcggctcgggctccggg

SEQ ID NO: 6875 - DNA, 20 bp, Homo sapiens
  source 1..20: mol_type = genomic DNA; note = Gene: RPS6KA4; note = Location (start to end; relative to TSS): RPS6KA4_65_95; note = Orientation (relative to transcription): antisense; note = sgRNA Position: 64359233; note = Sequence Name: 56322-704_101_SL_seq_6875
tcctcgtcccccatggcggg

SEQ ID NO: 6876 - DNA, 20 bp, Homo sapiens
  source 1..20: mol_type = genomic DNA; note = Gene: RPS6KA4; note = Location (start to end; relative to TSS): RPS6KA4_22_52; note = Orientation (relative to transcription): sense; note = sgRNA Position: 64359210; note = Sequence Name: 56322-704_101_SL_seq_6876
cgcccggagcccgagccgcg

SEQ ID NO: 6877 - DNA, 20 bp, Homo sapiens
  source 1..20: mol_type = genomic DNA; note = Gene: RPS6KA4; note = Location (start to end; relative to TSS): RPS6KA4_64_94; note = Orientation (relative to transcription): antisense; note = sgRNA Position: 64359232; note = Sequence Name: 56322-704_101_SL_seq_6877
cctcgtcccccatggcgggc

SEQ ID NO: 6878 - DNA, 20 bp, Homo sapiens
  source 1..20: mol_type = genomic DNA; note = Gene: RPS6KA4; note = Location (start to end; relative to TSS): RPS6KA4_23_53; note = Orientation (relative to transcription): sense; note = sgRNA Position: 64359211; note = Sequence Name: 56322-704_101_SL_seq_6878
gcccggagcccgagccgcgc

SEQ ID NO: 6879 - DNA, 20 bp, Homo sapiens
  source 1..20: mol_type = genomic DNA; note = Gene: RPS6KA4; note = Location (start to end; relative to TSS): RPS6KA4_55_85; note = Orientation (relative to transcription): antisense; note = sgRNA Position: 64359223; note = Sequence Name: 56322-704_101_SL_seq_6879
ccatggcgggcgggtcgctg

SEQ ID NO: 6880 - DNA, 20 bp, Homo sapiens
  source 1..20: mol_type = genomic DNA; note = Gene: RPS6KA5; note = Location (start to end; relative to TSS): RPS6KA5_47_77; note = Orientation (relative to transcription): antisense; note = sgRNA Position: 91060590; note = Sequence Name: 56322-704_101_SL_seq_6880
tctttcccgctctggccgca

SEQ ID NO: 6881 - DNA, 20 bp, Homo sapiens
  source 1..20: mol_type = genomic DNA; note = Gene: RPS6KA5; note = Location (start to end; relative to TSS): RPS6KA5_89_119; note = Orientation (relative to transcription): sense; note = sgRNA Position: 91060528; note = Sequence Name: 56322-704_101_SL_seq_6881
ccgccgcaccccgactcctg

SEQ ID NO: 6882 - DNA, 20 bp, Homo sapiens
  source 1..20: mol_type = genomic DNA; note = Gene: RPS6KA5; note = Location (start to end; relative to TSS): RPS6KA5_23_53; note = Orientation (relative to transcription): sense; note = sgRNA Position: 91060594; note = Sequence Name: 56322-704_101_SL_seq_6882
gaggcgaggagcgagccgtg

SEQ ID NO: 6883 - DNA, 20 bp, Homo sapiens
  source 1..20: mol_type = genomic DNA; note = Gene: RPS6KA5; note = Location (start to end; relative to TSS): RPS6KA5_88_118; note = Orientation (relative to transcription): sense; note = sgRNA Position: 91060529; note = Sequence Name: 56322-704_101_SL_seq_6883
gccgccgcaccccgactcct

SEQ ID NO: 6884 - DNA, 20 bp, Homo sapiens
  source 1..20: mol_type = genomic DNA; note = Gene: RPS6KA5; note = Location (start to end; relative to TSS): RPS6KA5_20_50; note = Orientation (relative to transcription): antisense; note = sgRNA Position: 91060617; note = Sequence Name: 56322-704_101_SL_seq_6884
ctcctcgcctcctccccctt

SEQ ID NO: 6885 - DNA, 20 bp, Homo sapiens
  source 1..20: mol_type = genomic DNA; note = Gene: RPS6KA5; note = Location (start to end; relative to TSS): RPS6KA5_85_115; note = Orientation (relative to transcription): antisense; note = sgRNA Position: 91060552; note = Sequence Name: 56322-704_101_SL_seq_6885
ggtgcggcggctccagaact

SEQ ID NO: 6886 - DNA, 20 bp, Homo sapiens
  source 1..20: mol_type = genomic DNA; note = Gene: RPS6KA5; note = Location (start to end; relative to TSS): RPS6KA5_17_47; note = Orientation (relative to transcription): antisense; note = sgRNA Position: 91060620; note = Sequence Name: 56322-704_101_SL_seq_6886
ctcgcctcctcccccttcgg

SEQ ID NO: 6887 - DNA, 20 bp, Homo sapiens
  source 1..20: mol_type = genomic DNA; note = Gene: RPS6KA5; note = Location (start to end; relative to TSS): RPS6KA5_55_85; note = Orientation (relative to transcription): antisense; note = sgRNA Position: 91060582; note = Sequence Name: 56322-704_101_SL_seq_6887
gacgagtctctttcccgctc

SEQ ID NO: 6888 - DNA, 20 bp, Homo sapiens
  source 1..20: mol_type = genomic DNA; note = Gene: RPS6KA5; note = Location (start to end; relative to TSS): RPS6KA5_16_46; note = Orientation (relative to transcription): antisense; note = sgRNA Position: 91060621; note = Sequence Name: 56322-704_101_SL_seq_6888
tcgcctcctcccccttcggc

SEQ ID NO: 6889 - DNA, 20 bp, Homo sapiens
  source 1..20: mol_type = genomic DNA; note = Gene: RPS6KA5; note = Location (start to end; relative to TSS): RPS6KA5_47_77; note = Orientation (relative to transcription): antisense; note = sgRNA Position: 91060590; note = Sequence Name: 56322-704_101_SL_seq_6889
tctttcccgctctggccgca

SEQ ID NO: 6890 - DNA, 20 bp, Homo sapiens
  source 1..20: mol_type = genomic DNA; note = Gene: RPS6KA6; note = Location (start to end; relative to TSS): RPS6KA6_48_78; note = Orientation (relative to transcription): antisense; note = sgRNA Position: 84188147; note = Sequence Name: 56322-704_101_SL_seq_6890
cctctccaagagctgccgct

SEQ ID NO: 6891 - DNA, 20 bp, Homo sapiens
  source 1..20: mol_type = genomic DNA; note = Gene: RPS6KA6; note = Location (start to end; relative to TSS): RPS6KA6_84_114; note = Orientation (relative to transcription): sense; note = sgRNA Position: 84188091; note = Sequence Name: 56322-704_101_SL_seq_6891
tgggaatcaccgggcggcgg

SEQ ID NO: 6892 - DNA, 20 bp, Homo sapiens
  source 1..20: mol_type = genomic DNA; note = Gene: RPS6KA6; note = Location (start to end; relative to TSS): RPS6KA6_24_54; note = Orientation (relative to transcription): sense; note = sgRNA Position: 84188151; note = Sequence Name: 56322-704_101_SL_seq_6892
agtggtgagcgcgagccgag

SEQ ID NO: 6893 - DNA, 20 bp, Homo sapiens
  source 1..20: mol_type = genomic DNA; note = Gene: RPS6KA6; note = Location (start to end; relative to TSS): RPS6KA6_81_111; note = Orientation (relative to transcription): sense; note = sgRNA Position: 84188094; note = Sequence Name: 56322-704_101_SL_seq_6893
ctatgggaatcaccgggcgg

SEQ ID NO: 6894 - DNA, 20 bp, Homo sapiens
  source 1..20: mol_type = genomic DNA; note = Gene: RPS6KA6; note = Location (start to end; relative to TSS): RPS6KA6_34_64; note = Orientation (relative to transcription): sense; note = sgRNA Position: 84188141; note = Sequence Name: 56322-704_101_SL_seq_6894
gcgagccgagcggcagctct

SEQ ID NO: 6895 - DNA, 20 bp, Homo sapiens
  source 1..20: mol_type = genomic DNA; note = Gene: RPS6KA6; note = Location (start to end; relative to TSS): RPS6KA6_78_108; note = Orientation (relative to transcription): sense; note = sgRNA Position: 84188097; note = Sequence Name: 56322-704_101_SL_seq_6895
tctctatgggaatcaccggg

SEQ ID NO: 6896 - DNA, 20 bp, Homo sapiens
  source 1..20: mol_type = genomic DNA; note = Gene: RPS6KA6; note = Location (start to end; relative to TSS): RPS6KA6_39_69; note = Orientation (relative to transcription): sense; note = sgRNA Position: 84188136; note = Sequence Name: 56322-704_101_SL_seq_6896
ccgagcggcagctcttggag

SEQ ID NO: 6897 - DNA, 20 bp, Homo sapiens
  source 1..20: mol_type = genomic DNA; note = Gene: RPS6KA6; note = Location (start to end; relative to TSS): RPS6KA6_75_105; note = Orientation (relative to transcription): sense; note = sgRNA Position: 84188100; note = Sequence Name: 56322-704_101_SL_seq_6897
tcttctctatgggaatcacc

SEQ ID NO: 6898 - DNA, 20 bp, Homo sapiens
  source 1..20: mol_type = genomic DNA; note = Gene: RPS6KA6; note = Location (start to end; relative to TSS): RPS6KA6_9_39; note = Orientation (relative to transcription): antisense; note = sgRNA Position: 84188186; note = Sequence Name: 56322-704_101_SL_seq_6898
ccaccacaacgacagccgct

SEQ ID NO: 6899 - DNA, 20 bp, Homo sapiens
  source 1..20: mol_type = genomic DNA; note = Gene: RPS6KA6; note = Location (start to end; relative to TSS): RPS6KA6_39_69; note = Orientation (relative to transcription): sense; note = sgRNA Position: 84188136; note = Sequence Name: 56322-704_101_SL_seq_6899
ccgagcggcagctcttggag

SEQ ID NO: 6900 - DNA, 20 bp, Homo sapiens
  source 1..20: mol_type = genomic DNA; note = Gene: RPS6KB1; note = Location (start to end; relative to TSS): RPS6KB1_38_68; note = Orientation (relative to transcription): sense; note = sgRNA Position: 59893185; note = Sequence Name: 56322-704_101_SL_seq_6900
gcggcgggtccgggcccatg

SEQ ID NO: 6901 - DNA, 20 bp, Homo sapiens
  source 1..20: mol_type = genomic DNA; note = Gene: RPS6KB1; note = Location (start to end; relative to TSS): RPS6KB1_75_105; note = Orientation (relative to transcription): sense; note = sgRNA Position: 59893222; note = Sequence Name: 56322-704_101_SL_seq_6901
ggacggcttttacccagccc

SEQ ID NO: 6902 - DNA, 20 bp, Homo sapiens
  source 1..20: mol_type = genomic DNA; note = Gene: RPS6KB1; note = Location (start to end; relative to TSS): RPS6KB1_29_59; note = Orientation (relative to transcription): sense; note = sgRNA Position: 59893176; note = Sequence Name: 56322-704_101_SL_seq_6902
gtggtggctgcggcgggtcc

SEQ ID NO: 6903 - DNA, 20 bp, Homo sapiens
  source 1..20: mol_type = genomic DNA; note = Gene: RPS6KB1; note = Location (start to end; relative to TSS): RPS6KB1_61_91; note = Orientation (relative to transcription): antisense; note = sgRNA Position: 59893188; note = Sequence Name: 56322-704_101_SL_seq_6903
cgcctccttcgtcgcctcat

SEQ ID NO: 6904 - DNA, 20 bp, Homo sapiens
  source 1..20: mol_type = genomic DNA; note = Gene: RPS6KB1; note = Location (start to end; relative to TSS): RPS6KB1_23_53; note = Orientation (relative to transcription): sense; note = sgRNA Position: 59893170; note = Sequence Name: 56322-704_101_SL_seq_6904
gcggctgtggtggctgcggc

SEQ ID NO: 6905 - DNA, 20 bp, Homo sapiens
  source 1..20: mol_type = genomic DNA; note = Gene: RPS6KB1; note = Location (start to end; relative to TSS): RPS6KB1_54_84; note = Orientation (relative to transcription): sense; note = sgRNA Position: 59893201; note = Sequence Name: 56322-704_101_SL_seq_6905
catgaggcgacgaaggaggc

SEQ ID NO: 6906 - DNA, 20 bp, Homo sapiens
  source 1..20: mol_type = genomic DNA; note = Gene: RPS6KB1; note = Location (start to end; relative to TSS): RPS6KB1_22_52; note = Orientation (relative to transcription): sense; note = sgRNA Position: 59893169; note = Sequence Name: 56322-704_101_SL_seq_6906
agcggctgtggtggctgcgg

SEQ ID NO: 6907 - DNA, 20 bp, Homo sapiens
  source 1..20: mol_type = genomic DNA; note = Gene: RPS6KB1; note = Location (start to end; relative to TSS): RPS6KB1_53_83; note = Orientation (relative to transcription): sense; note = sgRNA Position: 59893200; note = Sequence Name: 56322-704_101_SL_seq_6907
ccatgaggcgacgaaggagg

SEQ ID NO: 6908 - DNA, 20 bp, Homo sapiens
  source 1..20: mol_type = genomic DNA; note = Gene: RPS6KB1; note = Location (start to end; relative to TSS): RPS6KB1_19_49; note = Orientation (relative to transcription): sense; note = sgRNA Position: 59893166; note = Sequence Name: 56322-704_101_SL_seq_6908
ggcagcggctgtggtggctg

SEQ ID NO: 6909 - DNA, 20 bp, Homo sapiens
  source 1..20: mol_type = genomic DNA; note = Gene: RPS6KB1; note = Location (start to end; relative to TSS): RPS6KB1_50_80; note = Orientation (relative to transcription): sense; note = sgRNA Position: 59893197; note = Sequence Name: 56322-704_101_SL_seq_6909
ggcccatgaggcgacgaagg

SEQ ID NO: 6910 - DNA, 20 bp, Homo sapiens
  source 1..20: mol_type = genomic DNA; note = Gene: RPS6KB2; note = Location (start to end; relative to TSS): RPS6KB2_42_72; note = Orientation (relative to transcription): sense; note = sgRNA Position: 67428562; note = Sequence Name: 56322-704_101_SL_seq_6910
catggcggccgtgtttgatt

SEQ ID NO: 6911 - DNA, 20 bp, Homo sapiens
  source 1..20: mol_type = genomic DNA; note = Gene: RPS6KB2; note = Location (start to end; relative to TSS): RPS6KB2_75_105; note = Orientation (relative to transcription): sense; note = sgRNA Position: 67428595; note = Sequence Name: 56322-704_101_SL_seq_6911
ggaggaaggcagcgagggcg

SEQ ID NO: 6912 - DNA, 20 bp, Homo sapiens
  source 1..20: mol_type = genomic DNA; note = Gene: RPS6KB2; note = Location (start to end; relative to TSS): RPS6KB2_33_63; note = Orientation (relative to transcription): antisense; note = sgRNA Position: 67428533; note = Sequence Name: 56322-704_101_SL_seq_6912
ccatggcggcgccggccccg

SEQ ID NO: 6913 - DNA, 20 bp, Homo sapiens
  source 1..20: mol_type = genomic DNA; note = Gene: RPS6KB2; note = Location (start to end; relative to TSS): RPS6KB2_69_99; note = Orientation (relative to transcription): sense; note = sgRNA Position: 67428589; note = Sequence Name: 56322-704_101_SL_seq_6913
ggagacggaggaaggcagcg

SEQ ID NO: 6914 - DNA, 20 bp, Homo sapiens
  source 1..20: mol_type = genomic DNA; note = Gene: RPS6KB2; note = Location (start to end; relative to TSS): RPS6KB2_27_57; note = Orientation (relative to transcription): sense; note = sgRNA Position: 67428547; note = Sequence Name: 56322-704_101_SL_seq_6914
cggggccggcgccgccatgg

SEQ ID NO: 6915 - DNA, 20 bp, Homo sapiens
  source 1..20: mol_type = genomic DNA; note = Gene: RPS6KB2; note = Location (start to end; relative to TSS): RPS6KB2_57_87; note = Orientation (relative to transcription): sense; note = sgRNA Position: 67428577; note = Sequence Name: 56322-704_101_SL_seq_6915
tgatttggatttggagacgg

SEQ ID NO: 6916 - DNA, 20 bp, Homo sapiens
  source 1..20: mol_type = genomic DNA; note = Gene: RPS6KB2; note = Location (start to end; relative to TSS): RPS6KB2_24_54; note = Orientation (relative to transcription): antisense; note = sgRNA Position: 67428524; note = Sequence Name: 56322-704_101_SL_seq_6916
cgccggccccgcgggcccgt

SEQ ID NO: 6917 - DNA, 20 bp, Homo sapiens
  source 1..20: mol_type = genomic DNA; note = Gene: RPS6KB2; note = Location (start to end; relative to TSS): RPS6KB2_54_84; note = Orientation (relative to transcription): sense; note = sgRNA Position: 67428574; note = Sequence Name: 56322-704_101_SL_seq_6917
gtttgatttggatttggaga

SEQ ID NO: 6918 - DNA, 20 bp, Homo sapiens
  source 1..20: mol_type = genomic DNA; note = Gene: RPS6KB2; note = Location (start to end; relative to TSS): RPS6KB2_13_43; note = Orientation (relative to transcription): antisense; note = sgRNA Position: 67428513; note = Sequence Name: 56322-704_101_SL_seq_6918
cgggcccgtcggcccgtacc

SEQ ID NO: 6919 - DNA, 20 bp, Homo sapiens
  source 1..20: mol_type = genomic DNA; note = Gene: RPS6KB2; note = Location (start to end; relative to TSS): RPS6KB2_47_77; note = Orientation (relative to transcription): antisense; note = sgRNA Position: 67428547; note = Sequence Name: 56322-704_101_SL_seq_6919
atcaaacacggccgccatgg

SEQ ID NO: 6920 - DNA, 20 bp, Homo sapiens
  source 1..20: mol_type = genomic DNA; note = Gene: RPS6KC1; note = Location (start to end; relative to TSS): RPS6KC1_45_75; note = Orientation (relative to transcription): antisense; note = sgRNA Position: 213051292; note = Sequence Name: 56322-704_101_SL_seq_6920
gcgagggggcggtggctcca

SEQ ID NO: 6921 - DNA, 20 bp, Homo sapiens
  source 1..20: mol_type = genomic DNA; note = Gene: RPS6KC1; note = Location (start to end; relative to TSS): RPS6KC1_75_105; note = Orientation (relative to transcription): antisense; note = sgRNA Position: 213051322; note = Sequence Name: 56322-704_101_SL_seq_6921
gtccaggttccccaacgcag

SEQ ID NO: 6922 - DNA, 20 bp, Homo sapiens
  source 1..20: mol_type = genomic DNA; note = Gene: RPS6KC1; note = Location (start to end; relative to TSS): RPS6KC1_42_72; note = Orientation (relative to transcription): antisense; note = sgRNA Position: 213051289; note = Sequence Name: 56322-704_101_SL_seq_6922
agggggcggtggctccaagg

SEQ ID NO: 6923 - DNA, 20 bp, Homo sapiens
  source 1..20: mol_type = genomic DNA; note = Gene: RPS6KC1; note = Location (start to end; relative to TSS): RPS6KC1_74_104; note = Orientation (relative to transcription): sense; note = sgRNA Position: 213051341; note = Sequence Name: 56322-704_101_SL_seq_6923
ttggggaacctggaccgcgg

SEQ ID NO: 6924 - DNA, 20 bp, Homo sapiens
  source 1..20: mol_type = genomic DNA; note = Gene: RPS6KC1; note = Location (start to end; relative to TSS): RPS6KC1_34_64; note = Orientation (relative to transcription): antisense; note = sgRNA Position: 213051281; note = Sequence Name: 56322-704_101_SL_seq_6924
gtggctccaaggcggctcca

SEQ ID NO: 6925 - DNA, 20 bp, Homo sapiens
  source 1..20: mol_type = genomic DNA; note = Gene: RPS6KC1; note = Location (start to end; relative to TSS): RPS6KC1_64_94; note = Orientation (relative to transcription): sense; note = sgRNA Position: 213051331; note = Sequence Name: 56322-704_101_SL_seq_6925
cgccgctgcgttggggaacc

SEQ ID NO: 6926 - DNA, 20 bp, Homo sapiens
  source 1..20: mol_type = genomic DNA; note = Gene: RPS6KC1; note = Location (start to end; relative to TSS): RPS6KC1_31_61; note = Orientation (relative to transcription): antisense; note = sgRNA Position: 213051278; note = Sequence Name: 56322-704_101_SL_seq_6926
gctccaaggcggctccacgg

SEQ ID NO: 6927 - DNA, 20 bp, Homo sapiens
  source 1..20: mol_type = genomic DNA; note = Gene: RPS6KC1; note = Location (start to end; relative to TSS): RPS6KC1_61_91; note = Orientation (relative to transcription): antisense; note = sgRNA Position: 213051308; note = Sequence Name: 56322-704_101_SL_seq_6927
acgcagcggcgaagcggcga

SEQ ID NO: 6928 - DNA, 20 bp, Homo sapiens
  source 1..20: mol_type = genomic DNA; note = Gene: RPS6KC1; note = Location (start to end; relative to TSS): RPS6KC1_19_49; note = Orientation (relative to transcription): sense; note = sgRNA Position: 213051286; note = Sequence Name: 56322-704_101_SL_seq_6928
gcgccgccgtggagccgcct

SEQ ID NO: 6929 - DNA, 20 bp, Homo sapiens
  source 1..20: mol_type = genomic DNA; note = Gene: RPS6KC1; note = Location (start to end; relative to TSS): RPS6KC1_53_83; note = Orientation (relative to transcription): antisense; note = sgRNA Position: 213051300; note = Sequence Name: 56322-704_101_SL_seq_6929
gcgaagcggcgagggggcgg

SEQ ID NO: 6930 - DNA, 20 bp, Homo sapiens
  source 1..20: mol_type = genomic DNA; note = Gene: RPS6KL1; note = Location (start to end; relative to TSS): RPS6KL1_46_76; note = Orientation (relative to transcription): sense; note = sgRNA Position: 74923190; note = Sequence Name: 56322-704_101_SL_seq_6930
cgcggacccggctcccagct

SEQ ID NO: 6931 - DNA, 20 bp, Homo sapiens
  source 1..20: mol_type = genomic DNA; note = Gene: RPS6KL1; note = Location (start to end; relative to TSS): RPS6KL1_89_119; note = Orientation (relative to transcription): sense; note = sgRNA Position: 74923147; note = Sequence Name: 56322-704_101_SL_seq_6931
ggtcccttctccaccctccc

SEQ ID NO: 6932 - DNA, 20 bp, Homo sapiens
  source 1..20: mol_type = genomic DNA; note = Gene: RPS6KL1; note = Location (start to end; relative to TSS): RPS6KL1_34_64; note = Orientation (relative to transcription): sense; note = sgRNA Position: 74923202; note = Sequence Name: 56322-704_101_SL_seq_6932
ggaggcctggcccgcggacc

SEQ ID NO: 6933 - DNA, 20 bp, Homo sapiens
  source 1..20: mol_type = genomic DNA; note = Gene: RPS6KL1; note = Location (start to end; relative to TSS): RPS6KL1_68_98; note = Orientation (relative to transcription): antisense; note = sgRNA Position: 74923188; note = Sequence Name: 56322-704_101_SL_seq_6933
acaccgtacctgcccgagct

SEQ ID NO: 6934 - DNA, 20 bp, Homo sapiens
  source 1..20: mol_type = genomic DNA; note = Gene: RPS6KL1; note = Location (start to end; relative to TSS): RPS6KL1_28_58; note = Orientation (relative to transcription): sense; note = sgRNA Position: 74923208; note = Sequence Name: 56322-704_101_SL_seq_6934
tgagggggaggcctggcccg

SEQ ID NO: 6935 - DNA, 20 bp, Homo sapiens
  source 1..20: mol_type = genomic DNA; note = Gene: RPS6KL1; note = Location (start to end; relative to TSS): RPS6KL1_62_92; note = Orientation (relative to transcription): antisense; note = sgRNA Position: 74923194; note = Sequence Name: 56322-704_101_SL_seq_6935
tacctgcccgagctgggagc

SEQ ID NO: 6936 - DNA, 20 bp, Homo sapiens
  source 1..20: mol_type = genomic DNA; note = Gene: RPS6KL1; note = Location (start to end; relative to TSS): RPS6KL1_29_59; note = Orientation (relative to transcription): antisense; note = sgRNA Position: 74923227; note = Sequence Name: 56322-704_101_SL_seq_6936
caggcctccccctcacgtac

SEQ ID NO: 6937 - DNA, 20 bp, Homo sapiens
  source 1..20: mol_type = genomic DNA; note = Gene: RPS6KL1; note = Location (start to end; relative to TSS): RPS6KL1_61_91; note = Orientation (relative to transcription): antisense; note = sgRNA Position: 74923195; note = Sequence Name: 56322-704_101_SL_seq_6937
acctgcccgagctgggagcc

SEQ ID NO: 6938 - DNA, 20 bp, Homo sapiens
  source 1..20: mol_type = genomic DNA; note = Gene: RPS6KL1; note = Location (start to end; relative to TSS): RPS6KL1_21_51; note = Orientation (relative to transcription): sense; note = sgRNA Position: 74923215; note = Sequence Name: 56322-704_101_SL_seq_6938
cggtacgtgagggggaggcc

SEQ ID NO: 6939 - DNA, 20 bp, Homo sapiens
  source 1..20: mol_type = genomic DNA; note = Gene: RPS6KL1; note = Location (start to end; relative to TSS): RPS6KL1_51_81; note = Orientation (relative to transcription): sense; note = sgRNA Position: 74923185; note = Sequence Name: 56322-704_101_SL_seq_6939
acccggctcccagctcgggc

SEQ ID NO: 6940 - DNA, 20 bp, Homo sapiens
  source 1..20: mol_type = genomic DNA; note = Gene: RSKR; note = Location (start to end; relative to TSS): RSKR_36_66; note = Orientation (relative to transcription): sense; note = sgRNA Position: 28614125; note = Sequence Name: 56322-704_101_SL_seq_6940
gcaggggcagcacacccagc

SEQ ID NO: 6941 - DNA, 20 bp, Homo sapiens
  source 1..20: mol_type = genomic DNA; note = Gene: RSKR; note = Location (start to end; relative to TSS): RSKR_73_103; note = Orientation (relative to transcription): sense; note = sgRNA Position: 28614088; note = Sequence Name: 56322-704_101_SL_seq_6941
gtggctgtccctcacaaggt

SEQ ID NO: 6942 - DNA, 20 bp, Homo sapiens
  source 1..20: mol_type = genomic DNA; note = Gene: RSKR; note = Location (start to end; relative to TSS): RSKR_37_67; note = Orientation (relative to transcription): sense; note = sgRNA Position: 28614124; note = Sequence Name: 56322-704_101_SL_seq_6942
caggggcagcacacccagca

SEQ ID NO: 6943 - DNA, 20 bp, Homo sapiens
  source 1..20: mol_type = genomic DNA; note = Gene: RSKR; note = Location (start to end; relative to TSS): RSKR_69_99; note = Orientation (relative to transcription): sense; note = sgRNA Position: 28614092; note = Sequence Name: 56322-704_101_SL_seq_6943
ccgggtggctgtccctcaca

SEQ ID NO: 6944 - DNA, 20 bp, Homo sapiens
  source 1..20: mol_type = genomic DNA; note = Gene: RSKR; note = Location (start to end; relative to TSS): RSKR_18_48; note = Orientation (relative to transcription): sense; note = sgRNA Position: 28614143; note = Sequence Name: 56322-704_101_SL_seq_6944
gggagcagtaagctgtcggc

SEQ ID NO: 6945 - DNA, 20 bp, Homo sapiens
  source 1..20: mol_type = genomic DNA; note = Gene: RSKR; note = Location (start to end; relative to TSS): RSKR_54_84; note = Orientation (relative to transcription): sense; note = sgRNA Position: 28614107; note = Sequence Name: 56322-704_101_SL_seq_6945
gcagggggaacacacccggg

SEQ ID NO: 6946 - DNA, 20 bp, Homo sapiens
  source 1..20: mol_type = genomic DNA; note = Gene: RSKR; note = Location (start to end; relative to TSS): RSKR_19_49; note = Orientation (relative to transcription): sense; note = sgRNA Position: 28614142; note = Sequence Name: 56322-704_101_SL_seq_6946
ggagcagtaagctgtcggca

SEQ ID NO: 6947 - DNA, 20 bp, Homo sapiens
  source 1..20: mol_type = genomic DNA; note = Gene: RSKR; note = Location (start to end; relative to TSS): RSKR_51_81; note = Orientation (relative to transcription): sense; note = sgRNA Position: 28614110; note = Sequence Name: 56322-704_101_SL_seq_6947
ccagcagggggaacacaccc

SEQ ID NO: 6948 - DNA, 20 bp, Homo sapiens
  source 1..20: mol_type = genomic DNA; note = Gene: RSKR; note = Location (start to end; relative to TSS): RSKR_20_50; note = Orientation (relative to transcription): sense; note = sgRNA Position: 28614141; note = Sequence Name: 56322-704_101_SL_seq_6948
gagcagtaagctgtcggcag

SEQ ID NO: 6949 - DNA, 20 bp, Homo sapiens
  source 1..20: mol_type = genomic DNA; note = Gene: RSKR; note = Location (start to end; relative to TSS): RSKR_50_80; note = Orientation (relative to transcription): sense; note = sgRNA Position: 28614111; note = Sequence Name: 56322-704_101_SL_seq_6949
cccagcagggggaacacacc

SEQ ID NO: 6950 - DNA, 20 bp, Homo sapiens
  source 1..20: mol_type = genomic DNA; note = Gene: RYK; note = Location (start to end; relative to TSS): RYK_51_81; note = Orientation (relative to transcription): antisense; note = sgRNA Position: 134250804; note = Sequence Name: 56322-704_101_SL_seq_6950
cagcagtggcttcagacctc

SEQ ID NO: 6951 - DNA, 20 bp, Homo sapiens
  source 1..20: mol_type = genomic DNA; note = Gene: RYK; note = Location (start to end; relative to TSS): RYK_94_124; note = Orientation (relative to transcription): sense; note = sgRNA Position: 134250741; note = Sequence Name: 56322-704_101_SL_seq_6951
gggcagccgcccccggctcg

SEQ ID NO: 6952 - DNA, 20 bp, Homo sapiens
  source 1..20: mol_type = genomic DNA; note = Gene: RYK; note = Location (start to end; relative to TSS): RYK_52_82; note = Orientation (relative to transcription): sense; note = sgRNA Position: 134250783; note = Sequence Name: 56322-704_101_SL_seq_6952
gaagccactgctggctgcca

SEQ ID NO: 6953 - DNA, 20 bp, Homo sapiens
  source 1..20: mol_type = genomic DNA; note = Gene: RYK; note = Location (start to end; relative to TSS): RYK_87_117; note = Orientation (relative to transcription): sense; note = sgRNA Position: 134250748; note = Sequence Name: 56322-704_101_SL_seq_6953
atgagctgggcagccgcccc

SEQ ID NO: 6954 - DNA, 20 bp, Homo sapiens
  source 1..20: mol_type = genomic DNA; note = Gene: RYK; note = Location (start to end; relative to TSS): RYK_53_83; note = Orientation (relative to transcription): sense; note = sgRNA Position: 134250782; note = Sequence Name: 56322-704_101_SL_seq_6954
aagccactgctggctgccac

SEQ ID NO: 6955 - DNA, 20 bp, Homo sapiens
  source 1..20: mol_type = genomic DNA; note = Gene: RYK; note = Location (start to end; relative to TSS): RYK_85_115; note = Orientation (relative to transcription): antisense; note = sgRNA Position: 134250770; note = Sequence Name: 56322-704_101_SL_seq_6955
tgcccagctcatcgcaccgc

SEQ ID NO: 6956 - DNA, 20 bp, Homo sapiens
  source 1..20: mol_type = genomic DNA; note = Gene: RYK; note = Location (start to end; relative to TSS): RYK_26_56; note = Orientation (relative to transcription): sense; note = sgRNA Position: 134250809; note = Sequence Name: 56322-704_101_SL_seq_6956
gcggcggcggcgcgctccgg

SEQ ID NO: 6957 - DNA, 20 bp, Homo sapiens
  source 1..20: mol_type = genomic DNA; note = Gene: RYK; note = Location (start to end; relative to TSS): RYK_57_87; note = Orientation (relative to transcription): sense; note = sgRNA Position: 134250778; note = Sequence Name: 56322-704_101_SL_seq_6957
cactgctggctgccacgggc

SEQ ID NO: 6958 - DNA, 20 bp, Homo sapiens
  source 1..20: mol_type = genomic DNA; note = Gene: RYK; note = Location (start to end; relative to TSS): RYK_12_42; note = Orientation (relative to transcription): antisense; note = sgRNA Position: 134250843; note = Sequence Name: 56322-704_101_SL_seq_6958
cgcctcctcgctgcatcgtc

SEQ ID NO: 6959 - DNA, 20 bp, Homo sapiens
  source 1..20: mol_type = genomic DNA; note = Gene: RYK; note = Location (start to end; relative to TSS): RYK_43_73; note = Orientation (relative to transcription): sense; note = sgRNA Position: 134250792; note = Sequence Name: 56322-704_101_SL_seq_6959
cggaggtctgaagccactgc

SEQ ID NO: 6960 - DNA, 20 bp, Homo sapiens
  source 1..20: mol_type = genomic DNA; note = Gene: SBK1; note = Location (start to end; relative to TSS): SBK1_52_82; note = Orientation (relative to transcription): sense; note = sgRNA Position: 28292603; note = Sequence Name: 56322-704_101_SL_seq_6960
gcgcgagctggagccgcagc

SEQ ID NO: 6961 - DNA, 20 bp, Homo sapiens
  source 1..20: mol_type = genomic DNA; note = Gene: SBK1; note = Location (start to end; relative to TSS): SBK1_86_116; note = Orientation (relative to transcription): sense; note = sgRNA Position: 28292637; note = Sequence Name: 56322-704_101_SL_seq_6961
ggccgggggccgggagcgca

SEQ ID NO: 6962 - DNA, 20 bp, Homo sapiens
  source 1..20: mol_type = genomic DNA; note = Gene: SBK1; note = Location (start to end; relative to TSS): SBK1_44_74; note = Orientation (relative to transcription): antisense; note = sgRNA Position: 28292575; note = Sequence Name: 56322-704_101_SL_seq_6962
tcgcgctccgcctggcgctc

SEQ ID NO: 6963 - DNA, 20 bp, Homo sapiens
  source 1..20: mol_type = genomic DNA; note = Gene: SBK1; note = Location (start to end; relative to TSS): SBK1_80_110; note = Orientation (relative to transcription): antisense; note = sgRNA Position: 28292611; note = Sequence Name: 56322-704_101_SL_seq_6963
ccccggcctggcccgggctc

SEQ ID NO: 6964 - DNA, 20 bp, Homo sapiens
  source 1..20: mol_type = genomic DNA; note = Gene: SBK1; note = Location (start to end; relative to TSS): SBK1_40_70; note = Orientation (relative to transcription): sense; note = sgRNA Position: 28292591; note = Sequence Name: 56322-704_101_SL_seq_6964
gcgccaggcggagcgcgagc

SEQ ID NO: 6965 - DNA, 20 bp, Homo sapiens
  source 1..20: mol_type = genomic DNA; note = Gene: SBK1; note = Location (start to end; relative to TSS): SBK1_74_104; note = Orientation (relative to transcription): antisense; note = sgRNA Position: 28292605; note = Sequence Name: 56322-704_101_SL_seq_6965
cctggcccgggctccggctg

SEQ ID NO: 6966 - DNA, 20 bp, Homo sapiens
  source 1..20: mol_type = genomic DNA; note = Gene: SBK1; note = Location (start to end; relative to TSS): SBK1_38_68; note = Orientation (relative to transcription): antisense; note = sgRNA Position: 28292569; note = Sequence Name: 56322-704_101_SL_seq_6966
tccgcctggcgctcgggccc

SEQ ID NO: 6967 - DNA, 20 bp, Homo sapiens
  source 1..20: mol_type = genomic DNA; note = Gene: SBK1; note = Location (start to end; relative to TSS): SBK1_72_102; note = Orientation (relative to transcription): sense; note = sgRNA Position: 28292623; note = Sequence Name: 56322-704_101_SL_seq_6967
cggagcccgggccaggccgg

SEQ ID NO: 6968 - DNA, 20 bp, Homo sapiens
  source 1..20: mol_type = genomic DNA; note = Gene: SBK1; note = Location (start to end; relative to TSS): SBK1_28_58; note = Orientation (relative to transcription): sense; note = sgRNA Position: 28292579; note = Sequence Name: 56322-704_101_SL_seq_6968
gccggggcccgagcgccagg

SEQ ID NO: 6969 - DNA, 20 bp, Homo sapiens
  source 1..20: mol_type = genomic DNA; note = Gene: SBK1; note = Location (start to end; relative to TSS): SBK1_60_90; note = Orientation (relative to transcription): sense; note = sgRNA Position: 28292611; note = Sequence Name: 56322-704_101_SL_seq_6969
tggagccgcagccggagccc

SEQ ID NO: 6970 - DNA, 20 bp, Homo sapiens
  source 1..20: mol_type = genomic DNA; note = Gene: SBK2; note = Location (start to end; relative to TSS): SBK2_28_58; note = Orientation (relative to transcription): sense; note = sgRNA Position: 55537081; note = Sequence Name: 56322-704_101_SL_seq_6970
tgaccacagccggcggccgg

SEQ ID NO: 6971 - DNA, 20 bp, Homo sapiens
  source 1..20: mol_type = genomic DNA; note = Gene: SBK2; note = Location (start to end; relative to TSS): SBK2_63_93; note = Orientation (relative to transcription): sense; note = sgRNA Position: 55537046; note = Sequence Name: 56322-704_101_SL_seq_6971
ttggaggaggtgaggtctgg

SEQ ID NO: 6972 - DNA, 20 bp, Homo sapiens
  source 1..20: mol_type = genomic DNA; note = Gene: SBK2; note = Location (start to end; relative to TSS): SBK2_25_55; note = Orientation (relative to transcription): sense; note = sgRNA Position: 55537084; note = Sequence Name: 56322-704_101_SL_seq_6972
cactgaccacagccggcggc

SEQ ID NO: 6973 - DNA, 20 bp, Homo sapiens
  source 1..20: mol_type = genomic DNA; note = Gene: SBK2; note = Location (start to end; relative to TSS): SBK2_60_90; note = Orientation (relative to transcription): sense; note = sgRNA Position: 55537049; note = Sequence Name: 56322-704_101_SL_seq_6973
gccttggaggaggtgaggtc

SEQ ID NO: 6974 - DNA, 20 bp, Homo sapiens
  source 1..20: mol_type = genomic DNA; note = Gene: SBK2; note = Location (start to end; relative to TSS): SBK2_21_51; note = Orientation (relative to transcription): sense; note = sgRNA Position: 55537088; note = Sequence Name: 56322-704_101_SL_seq_6974
cgggcactgaccacagccgg

SEQ ID NO: 6975 - DNA, 20 bp, Homo sapiens
  source 1..20: mol_type = genomic DNA; note = Gene: SBK2; note = Location (start to end; relative to TSS): SBK2_55_85; note = Orientation (relative to transcription): sense; note = sgRNA Position: 55537054; note = Sequence Name: 56322-704_101_SL_seq_6975
ggagggccttggaggaggtg

SEQ ID NO: 6976 - DNA, 20 bp, Homo sapiens
  source 1..20: mol_type = genomic DNA; note = Gene: SBK2; note = Location (start to end; relative to TSS): SBK2_20_50; note = Orientation (relative to transcription): antisense; note = sgRNA Position: 55537109; note = Sequence Name: 56322-704_101_SL_seq_6976
tggtcagtgcccggcactta

SEQ ID NO: 6977 - DNA, 20 bp, Homo sapiens
  source 1..20: mol_type = genomic DNA; note = Gene: SBK2; note = Location (start to end; relative to TSS): SBK2_53_83; note = Orientation (relative to transcription): antisense; note = sgRNA Position: 55537076; note = Sequence Name: 56322-704_101_SL_seq_6977
ccaaggccctcctgaccctc

SEQ ID NO: 6978 - DNA, 20 bp, Homo sapiens
  source 1..20: mol_type = genomic DNA; note = Gene: SBK2; note = Location (start to end; relative to TSS): SBK2_18_48; note = Orientation (relative to transcription): sense; note = sgRNA Position: 55537091; note = Sequence Name: 56322-704_101_SL_seq_6978
tgccgggcactgaccacagc

SEQ ID NO: 6979 - DNA, 20 bp, Homo sapiens
  source 1..20: mol_type = genomic DNA; note = Gene: SBK2; note = Location (start to end; relative to TSS): SBK2_50_80; note = Orientation (relative to transcription): sense; note = sgRNA Position: 55537059; note = Sequence Name: 56322-704_101_SL_seq_6979
ggtcaggagggccttggagg

SEQ ID NO: 6980 - DNA, 20 bp, Homo sapiens
  source 1..20: mol_type = genomic DNA; note = Gene: SBK3; note = Location (start to end; relative to TSS): SBK3_35_65; note = Orientation (relative to transcription): sense; note = sgRNA Position: 55545484; note = Sequence Name: 56322-704_101_SL_seq_6980
aggtgagagacgggagccag

SEQ ID NO: 6981 - DNA, 20 bp, Homo sapiens
  source 1..20: mol_type = genomic DNA; note = Gene: SBK3; note = Location (start to end; relative to TSS): SBK3_85_115; note = Orientation (relative to transcription): sense; note = sgRNA Position: 55545434; note = Sequence Name: 56322-704_101_SL_seq_6981
agagaggcaggaggcaacac

SEQ ID NO: 6982 - DNA, 20 bp, Homo sapiens
  source 1..20: mol_type = genomic DNA; note = Gene: SBK3; note = Location (start to end; relative to TSS): SBK3_33_63; note = Orientation (relative to transcription): sense; note = sgRNA Position: 55545486; note = Sequence Name: 56322-704_101_SL_seq_6982
agaggtgagagacgggagcc

SEQ ID NO: 6983 - DNA, 20 bp, Homo sapiens
  source 1..20: mol_type = genomic DNA; note = Gene: SBK3; note = Location (start to end; relative to TSS): SBK3_84_114; note = Orientation (relative to transcription): sense; note = sgRNA Position: 55545435; note = Sequence Name: 56322-704_101_SL_seq_6983
gagagaggcaggaggcaaca

SEQ ID NO: 6984 - DNA, 20 bp, Homo sapiens
  source 1..20: mol_type = genomic DNA; note = Gene: SBK3; note = Location (start to end; relative to TSS): SBK3_24_54; note = Orientation (relative to transcription): antisense; note = sgRNA Position: 55545515; note = Sequence Name: 56322-704_101_SL_seq_6984
cctctgggtccccatcctca

SEQ ID NO: 6985 - DNA, 20 bp, Homo sapiens
  source 1..20: mol_type = genomic DNA; note = Gene: SBK3; note = Location (start to end; relative to TSS): SBK3_76_106; note = Orientation (relative to transcription): sense; note = sgRNA Position: 55545443; note = Sequence Name: 56322-704_101_SL_seq_6985
aagaaggagagagaggcagg

SEQ ID NO: 6986 - DNA, 20 bp, Homo sapiens
  source 1..20: mol_type = genomic DNA; note = Gene: SBK3; note = Location (start to end; relative to TSS): SBK3_23_53; note = Orientation (relative to transcription): antisense; note = sgRNA Position: 55545516; note = Sequence Name: 56322-704_101_SL_seq_6986
ctctgggtccccatcctcag

SEQ ID NO: 6987 - DNA, 20 bp, Homo sapiens
  source 1..20: mol_type = genomic DNA; note = Gene: SBK3; note = Location (start to end; relative to TSS): SBK3_73_103; note = Orientation (relative to transcription): sense; note = sgRNA Position: 55545446; note = Sequence Name: 56322-704_101_SL_seq_6987
gaaaagaaggagagagaggc

SEQ ID NO: 6988 - DNA, 20 bp, Homo sapiens
  source 1..20: mol_type = genomic DNA; note = Gene: SBK3; note = Location (start to end; relative to TSS): SBK3_34_64; note = Orientation (relative to transcription): sense; note = sgRNA Position: 55545485; note = Sequence Name: 56322-704_101_SL_seq_6988
gaggtgagagacgggagcca

SEQ ID NO: 6989 - DNA, 20 bp, Homo sapiens
  source 1..20: mol_type = genomic DNA; note = Gene: SBK3; note = Location (start to end; relative to TSS): SBK3_69_99; note = Orientation (relative to transcription): sense; note = sgRNA Position: 55545450; note = Sequence Name: 56322-704_101_SL_seq_6989
gagagaaaagaaggagagag

SEQ ID NO: 6990 - DNA, 20 bp, Homo sapiens
  source 1..20: mol_type = genomic DNA; note = Gene: SCYL1; note = Location (start to end; relative to TSS): SCYL1_29_59; note = Orientation (relative to transcription): antisense; note = sgRNA Position: 65525118; note = Sequence Name: 56322-704_101_SL_seq_6990
ggttcgggcgccttagctcc

SEQ ID NO: 6991 - DNA, 20 bp, Homo sapiens
  source 1..20: mol_type = genomic DNA; note = Gene: SCYL1; note = Location (start to end; relative to TSS): SCYL1_69_99; note = Orientation (relative to transcription): sense; note = sgRNA Position: 65525178; note = Sequence Name: 56322-704_101_SL_seq_6991
tctttgcccgggacccggtc

SEQ ID NO: 6992 - DNA, 20 bp, Homo sapiens
  source 1..20: mol_type = genomic DNA; note = Gene: SCYL1; note = Location (start to end; relative to TSS): SCYL1_30_60; note = Orientation (relative to transcription): antisense; note = sgRNA Position: 65525119; note = Sequence Name: 56322-704_101_SL_seq_6992
gggttcgggcgccttagctc

SEQ ID NO: 6993 - DNA, 20 bp, Homo sapiens
  source 1..20: mol_type = genomic DNA; note = Gene: SCYL1; note = Location (start to end; relative to TSS): SCYL1_64_94; note = Orientation (relative to transcription): sense; note = sgRNA Position: 65525173; note = Sequence Name: 56322-704_101_SL_seq_6993
gtggttctttgcccgggacc

SEQ ID NO: 6994 - DNA, 20 bp, Homo sapiens
  source 1..20: mol_type = genomic DNA; note = Gene: SCYL1; note = Location (start to end; relative to TSS): SCYL1_28_58; note = Orientation (relative to transcription): sense; note = sgRNA Position: 65525137; note = Sequence Name: 56322-704_101_SL_seq_6994
taaggcgcccgaacccgcgg

SEQ ID NO: 6995 - DNA, 20 bp, Homo sapiens
  source 1..20: mol_type = genomic DNA; note = Gene: SCYL1; note = Location (start to end; relative to TSS): SCYL1_58_88; note = Orientation (relative to transcription): sense; note = sgRNA Position: 65525167; note = Sequence Name: 56322-704_101_SL_seq_6995
gacgatgtggttctttgccc

SEQ ID NO: 6996 - DNA, 20 bp, Homo sapiens
  source 1..20: mol_type = genomic DNA; note = Gene: SCYL1; note = Location (start to end; relative to TSS): SCYL1_25_55; note = Orientation (relative to transcription): sense; note = sgRNA Position: 65525134; note = Sequence Name: 56322-704_101_SL_seq_6996
agctaaggcgcccgaacccg

SEQ ID NO: 6997 - DNA, 20 bp, Homo sapiens
  source 1..20: mol_type = genomic DNA; note = Gene: SCYL1; note = Location (start to end; relative to TSS): SCYL1_57_87; note = Orientation (relative to transcription): sense; note = sgRNA Position: 65525166; note = Sequence Name: 56322-704_101_SL_seq_6997
ggacgatgtggttctttgcc

SEQ ID NO: 6998 - DNA, 20 bp, Homo sapiens
  source 1..20: mol_type = genomic DNA; note = Gene: SCYL1; note = Location (start to end; relative to TSS): SCYL1_21_51; note = Orientation (relative to transcription): antisense; note = sgRNA Position: 65525110; note = Sequence Name: 56322-704_101_SL_seq_6998
cgccttagctccgggtcctc

SEQ ID NO: 6999 - DNA, 20 bp, Homo sapiens
  source 1..20: mol_type = genomic DNA; note = Gene: SCYL1; note = Location (start to end; relative to TSS): SCYL1_51_81; note = Orientation (relative to transcription): antisense; note = sgRNA Position: 65525140; note = Sequence Name: 56322-704_101_SL_seq_6999
catcgtccccaccgccgccg

SEQ ID NO: 7000 - DNA, 20 bp, Homo sapiens
  source 1..20: mol_type = genomic DNA; note = Gene: SCYL2; note = Location (start to end; relative to TSS): SCYL2_37_67; note = Orientation (relative to transcription): antisense; note = sgRNA Position: 100267220; note = Sequence Name: 56322-704_101_SL_seq_7000
aggaaaggggtggggagggg

SEQ ID NO: 7001 - DNA, 20 bp, Homo sapiens
  source 1..20: mol_type = genomic DNA; note = Gene: SCYL2; note = Location (start to end; relative to TSS): SCYL2_67_97; note = Orientation (relative to transcription): antisense; note = sgRNA Position: 100267250; note = Sequence Name: 56322-704_101_SL_seq_7001
gcccccgcggccgcaaacgt

SEQ ID NO: 7002 - DNA, 20 bp, Homo sapiens
  source 1..20: mol_type = genomic DNA; note = Gene: SCYL2; note = Location (start to end; relative to TSS): SCYL2_36_66; note = Orientation (relative to transcription): antisense; note = sgRNA Position: 100267219; note = Sequence Name: 56322-704_101_SL_seq_7002
ggaaaggggtggggagggga

SEQ ID NO: 7003 - DNA, 20 bp, Homo sapiens
  source 1..20: mol_type = genomic DNA; note = Gene: SCYL2; note = Location (start to end; relative to TSS): SCYL2_66_96; note = Orientation (relative to transcription): sense; note = sgRNA Position: 100267269; note = Sequence Name: 56322-704_101_SL_seq_7003
tgcggccgcgggggcggcgg

SEQ ID NO: 7004 - DNA, 20 bp, Homo sapiens
  source 1..20: mol_type = genomic DNA; note = Gene: SCYL2; note = Location (start to end; relative to TSS): SCYL2_31_61; note = Orientation (relative to transcription): antisense; note = sgRNA Position: 100267214; note = Sequence Name: 56322-704_101_SL_seq_7004
ggggtggggaggggagggac

SEQ ID NO: 7005 - DNA, 20 bp, Homo sapiens
  source 1..20: mol_type = genomic DNA; note = Gene: SCYL2; note = Location (start to end; relative to TSS): SCYL2_63_93; note = Orientation (relative to transcription): sense; note = sgRNA Position: 100267266; note = Sequence Name: 56322-704_101_SL_seq_7005
gtttgcggccgcgggggcgg

SEQ ID NO: 7006 - DNA, 20 bp, Homo sapiens
  source 1..20: mol_type = genomic DNA; note = Gene: SCYL2; note = Location (start to end; relative to TSS): SCYL2_30_60; note = Orientation (relative to transcription): antisense; note = sgRNA Position: 100267213; note = Sequence Name: 56322-704_101_SL_seq_7006
gggtggggaggggagggacc

SEQ ID NO: 7007 - DNA, 20 bp, Homo sapiens
  source 1..20: mol_type = genomic DNA; note = Gene: SCYL2; note = Location (start to end; relative to TSS): SCYL2_60_90; note = Orientation (relative to transcription): sense; note = sgRNA Position: 100267263; note = Sequence Name: 56322-704_101_SL_seq_7007
gacgtttgcggccgcggggg

SEQ ID NO: 7008 - DNA, 20 bp, Homo sapiens
  source 1..20: mol_type = genomic DNA; note = Gene: SCYL2; note = Location (start to end; relative to TSS): SCYL2_29_59; note = Orientation (relative to transcription): antisense; note = sgRNA Position: 100267212; note = Sequence Name: 56322-704_101_SL_seq_7008
ggtggggaggggagggaccg

SEQ ID NO: 7009 - DNA, 20 bp, Homo sapiens
  source 1..20: mol_type = genomic DNA; note = Gene: SCYL2; note = Location (start to end; relative to TSS): SCYL2_60_90; note = Orientation (relative to transcription): sense; note = sgRNA Position: 100267263; note = Sequence Name: 56322-704_101_SL_seq_7009
gacgtttgcggccgcggggg

SEQ ID NO: 7010 - DNA, 20 bp, Homo sapiens
  source 1..20: mol_type = genomic DNA; note = Gene: SCYL3; note = Location (start to end; relative to TSS): SCYL3_18_48; note = Orientation (relative to transcription): sense; note = sgRNA Position: 169893854; note = Sequence Name: 56322-704_101_SL_seq_7010
caggggtggttggtgtcaac

SEQ ID NO: 7011 - DNA, 20 bp, Homo sapiens
  source 1..20: mol_type = genomic DNA; note = Gene: SCYL3; note = Location (start to end; relative to TSS): SCYL3_86_116; note = Orientation (relative to transcription): sense; note = sgRNA Position: 169893786; note = Sequence Name: 56322-704_101_SL_seq_7011
gccgccttcctgcaggtaac

SEQ ID NO: 7012 - DNA, 20 bp, Homo sapiens
  source 1..20: mol_type = genomic DNA; note = Gene: SCYL3; note = Location (start to end; relative to TSS): SCYL3_19_49; note = Orientation (relative to transcription): sense; note = sgRNA Position: 169893853; note = Sequence Name: 56322-704_101_SL_seq_7012
aggggtggttggtgtcaaca

SEQ ID NO: 7013 - DNA, 20 bp, Homo sapiens
  source 1..20: mol_type = genomic DNA; note = Gene: SCYL3; note = Location (start to end; relative to TSS): SCYL3_79_109; note = Orientation (relative to transcription): sense; note = sgRNA Position: 169893793; note = Sequence Name: 56322-704_101_SL_seq_7013
ctcccccgccgccttcctgc

SEQ ID NO: 7014 - DNA, 20 bp, Homo sapiens
  source 1..20: mol_type = genomic DNA; note = Gene: SCYL3; note = Location (start to end; relative to TSS): SCYL3_20_50; note = Orientation (relative to transcription): sense; note = sgRNA Position: 169893852; note = Sequence Name: 56322-704_101_SL_seq_7014
ggggtggttggtgtcaacag

SEQ ID NO: 7015 - DNA, 20 bp, Homo sapiens
  source 1..20: mol_type = genomic DNA; note = Gene: SCYL3; note = Location (start to end; relative to TSS): SCYL3_77_107; note = Orientation (relative to transcription): antisense; note = sgRNA Position: 169893815; note = Sequence Name: 56322-704_101_SL_seq_7015
gcggcgggggaggaggccga

SEQ ID NO: 7016 - DNA, 20 bp, Homo sapiens
  source 1..20: mol_type = genomic DNA; note = Gene: SCYL3; note = Location (start to end; relative to TSS): SCYL3_21_51; note = Orientation (relative to transcription): sense; note = sgRNA Position: 169893851; note = Sequence Name: 56322-704_101_SL_seq_7016
gggtggttggtgtcaacagg

SEQ ID NO: 7017 - DNA, 20 bp, Homo sapiens
  source 1..20: mol_type = genomic DNA; note = Gene: SCYL3; note = Location (start to end; relative to TSS): SCYL3_65_95; note = Orientation (relative to transcription): antisense; note = sgRNA Position: 169893827; note = Sequence Name: 56322-704_101_SL_seq_7017
gaggccgagggtcttggctc

SEQ ID NO: 7018 - DNA, 20 bp, Homo sapiens
  source 1..20: mol_type = genomic DNA; note = Gene: SCYL3; note = Location (start to end; relative to TSS): SCYL3_22_52; note = Orientation (relative to transcription): sense; note = sgRNA Position: 169893850; note = Sequence Name: 56322-704_101_SL_seq_7018
ggtggttggtgtcaacaggg

SEQ ID NO: 7019 - DNA, 20 bp, Homo sapiens
  source 1..20: mol_type = genomic DNA; note = Gene: SCYL3; note = Location (start to end; relative to TSS): SCYL3_54_84; note = Orientation (relative to transcription): antisense; note = sgRNA Position: 169893838; note = Sequence Name: 56322-704_101_SL_seq_7019
tcttggctctggtaccctgt

SEQ ID NO: 7020 - DNA, 20 bp, Homo sapiens
  source 1..20: mol_type = genomic DNA; note = Gene: SGK1; note = Location (start to end; relative to TSS): SGK1_42_72; note = Orientation (relative to transcription): antisense; note = sgRNA Position: 134318066; note = Sequence Name: 56322-704_101_SL_seq_7020
atgaatatctgagcagcgga

SEQ ID NO: 7021 - DNA, 20 bp, Homo sapiens
  source 1..20: mol_type = genomic DNA; note = Gene: SGK1; note = Location (start to end; relative to TSS): SGK1_108_138; note = Orientation (relative to transcription): sense; note = sgRNA Position: 134317980; note = Sequence Name: 56322-704_101_SL_seq_7021
ctgttctccctccctccctc

SEQ ID NO: 7022 - DNA, 20 bp, Homo sapiens
  source 1..20: mol_type = genomic DNA; note = Gene: SGK1; note = Location (start to end; relative to TSS): SGK1_19_49; note = Orientation (relative to transcription): antisense; note = sgRNA Position: 134318089; note = Sequence Name: 56322-704_101_SL_seq_7022
agagaaggcacagccggctc

SEQ ID NO: 7023 - DNA, 20 bp, Homo sapiens
  source 1..20: mol_type = genomic DNA; note = Gene: SGK1; note = Location (start to end; relative to TSS): SGK1_106_136; note = Orientation (relative to transcription): antisense; note = sgRNA Position: 134318002; note = Sequence Name: 56322-704_101_SL_seq_7023
gagggagaacagcgccagaa

SEQ ID NO: 7024 - DNA, 20 bp, Homo sapiens
  source 1..20: mol_type = genomic DNA; note = Gene: SGK1; note = Location (start to end; relative to TSS): SGK1_25_55; note = Orientation (relative to transcription): antisense; note = sgRNA Position: 134318083; note = Sequence Name: 56322-704_101_SL_seq_7024
ggatggagagaaggcacagc

SEQ ID NO: 7025 - DNA, 20 bp, Homo sapiens
  source 1..20: mol_type = genomic DNA; note = Gene: SGK1; note = Location (start to end; relative to TSS): SGK1_100_130; note = Orientation (relative to transcription): antisense; note = sgRNA Position: 134318008; note = Sequence Name: 56322-704_101_SL_seq_7025
gaacagcgccagaaaggcag

SEQ ID NO: 7026 - DNA, 20 bp, Homo sapiens
  source 1..20: mol_type = genomic DNA; note = Gene: SGK1; note = Location (start to end; relative to TSS): SGK1_34_64; note = Orientation (relative to transcription): antisense; note = sgRNA Position: 134318074; note = Sequence Name: 56322-704_101_SL_seq_7026
ctgagcagcggatggagaga

SEQ ID NO: 7027 - DNA, 20 bp, Homo sapiens
  source 1..20: mol_type = genomic DNA; note = Gene: SGK1; note = Location (start to end; relative to TSS): SGK1_80_110; note = Orientation (relative to transcription): antisense; note = sgRNA Position: 134318028; note = Sequence Name: 56322-704_101_SL_seq_7027
agggagcgagaaggcgaggc

SEQ ID NO: 7028 - DNA, 20 bp, Homo sapiens
  source 1..20: mol_type = genomic DNA; note = Gene: SGK1; note = Location (start to end; relative to TSS): SGK1_18_48; note = Orientation (relative to transcription): antisense; note = sgRNA Position: 134318090; note = Sequence Name: 56322-704_101_SL_seq_7028
gagaaggcacagccggctca

SEQ ID NO: 7029 - DNA, 20 bp, Homo sapiens
  source 1..20: mol_type = genomic DNA; note = Gene: SGK1; note = Location (start to end; relative to TSS): SGK1_68_98; note = Orientation (relative to transcription): antisense; note = sgRNA Position: 134318040; note = Sequence Name: 56322-704_101_SL_seq_7029
ggcgaggctggaagaagcaa

SEQ ID NO: 7030 - DNA, 20 bp, Homo sapiens
  source 1..20: mol_type = genomic DNA; note = Gene: SGK2; note = Location (start to end; relative to TSS): SGK2_56_86; note = Orientation (relative to transcription): antisense; note = sgRNA Position: 43559089; note = Sequence Name: 56322-704_101_SL_seq_7030
tgccctcttctctctcttca

SEQ ID NO: 7031 - DNA, 20 bp, Homo sapiens
  source 1..20: mol_type = genomic DNA; note = Gene: SGK2; note = Location (start to end; relative to TSS): SGK2_99_129; note = Orientation (relative to transcription): antisense; note = sgRNA Position: 43559132; note = Sequence Name: 56322-704_101_SL_seq_7031
aggttcctgctcaggtcctg

SEQ ID NO: 7032 - DNA, 20 bp, Homo sapiens
  source 1..20: mol_type = genomic DNA; note = Gene: SGK2; note = Location (start to end; relative to TSS): SGK2_45_75; note = Orientation (relative to transcription): sense; note = sgRNA Position: 43559098; note = Sequence Name: 56322-704_101_SL_seq_7032
gaccatgaagagagagaaga

SEQ ID NO: 7033 - DNA, 20 bp, Homo sapiens
  source 1..20: mol_type = genomic DNA; note = Gene: SGK2; note = Location (start to end; relative to TSS): SGK2_92_122; note = Orientation (relative to transcription): sense; note = sgRNA Position: 43559145; note = Sequence Name: 56322-704_101_SL_seq_7033
ccaggacctgagcaggaacc

SEQ ID NO: 7034 - DNA, 20 bp, Homo sapiens
  source 1..20: mol_type = genomic DNA; note = Gene: SGK2; note = Location (start to end; relative to TSS): SGK2_40_70; note = Orientation (relative to transcription): antisense; note = sgRNA Position: 43559073; note = Sequence Name: 56322-704_101_SL_seq_7034
ttcatggtccttctgactgg

SEQ ID NO: 7035 - DNA, 20 bp, Homo sapiens
  source 1..20: mol_type = genomic DNA; note = Gene: SGK2; note = Location (start to end; relative to TSS): SGK2_85_115; note = Orientation (relative to transcription): sense; note = sgRNA Position: 43559138; note = Sequence Name: 56322-704_101_SL_seq_7035
ctgctccccaggacctgagc

SEQ ID NO: 7036 - DNA, 20 bp, Homo sapiens
  source 1..20: mol_type = genomic DNA; note = Gene: SGK2; note = Location (start to end; relative to TSS): SGK2_43_73; note = Orientation (relative to transcription): antisense; note = sgRNA Position: 43559076; note = Sequence Name: 56322-704_101_SL_seq_7036
ctcttcatggtccttctgac

SEQ ID NO: 7037 - DNA, 20 bp, Homo sapiens
  source 1..20: mol_type = genomic DNA; note = Gene: SGK2; note = Location (start to end; relative to TSS): SGK2_82_112; note = Orientation (relative to transcription): antisense; note = sgRNA Position: 43559115; note = Sequence Name: 56322-704_101_SL_seq_7037
ctggggagcagccccatgca

SEQ ID NO: 7038 - DNA, 20 bp, Homo sapiens
  source 1..20: mol_type = genomic DNA; note = Gene: SGK2; note = Location (start to end; relative to TSS): SGK2_44_74; note = Orientation (relative to transcription): sense; note = sgRNA Position: 43559097; note = Sequence Name: 56322-704_101_SL_seq_7038
ggaccatgaagagagagaag

SEQ ID NO: 7039 - DNA, 20 bp, Homo sapiens
  source 1..20: mol_type = genomic DNA; note = Gene: SGK2; note = Location (start to end; relative to TSS): SGK2_74_104; note = Orientation (relative to transcription): sense; note = sgRNA Position: 43559127; note = Sequence Name: 56322-704_101_SL_seq_7039
cgtgcatggggctgctcccc

SEQ ID NO: 7040 - DNA, 20 bp, Homo sapiens
  source 1..20: mol_type = genomic DNA; note = Gene: SGK3; note = Location (start to end; relative to TSS): SGK3_20_50; note = Orientation (relative to transcription): antisense; note = sgRNA Position: 66712807; note = Sequence Name: 56322-704_101_SL_seq_7040
ggtgctgctcccggcgcggc

SEQ ID NO: 7041 - DNA, 20 bp, Homo sapiens
  source 1..20: mol_type = genomic DNA; note = Gene: SGK3; note = Location (start to end; relative to TSS): SGK3_78_108; note = Orientation (relative to transcription): antisense; note = sgRNA Position: 66712865; note = Sequence Name: 56322-704_101_SL_seq_7041
ccgtcggagtcccgggcgcg

SEQ ID NO: 7042 - DNA, 20 bp, Homo sapiens
  source 1..20: mol_type = genomic DNA; note = Gene: SGK3; note = Location (start to end; relative to TSS): SGK3_21_51; note = Orientation (relative to transcription): antisense; note = sgRNA Position: 66712808; note = Sequence Name: 56322-704_101_SL_seq_7042
cggtgctgctcccggcgcgg

SEQ ID NO: 7043 - DNA, 20 bp, Homo sapiens
  source 1..20: mol_type = genomic DNA; note = Gene: SGK3; note = Location (start to end; relative to TSS): SGK3_72_102; note = Orientation (relative to transcription): sense; note = sgRNA Position: 66712879; note = Sequence Name: 56322-704_101_SL_seq_7043
cgcgcccgggactccgacgg

SEQ ID NO: 7044 - DNA, 20 bp, Homo sapiens
  source 1..20: mol_type = genomic DNA; note = Gene: SGK3; note = Location (start to end; relative to TSS): SGK3_22_52; note = Orientation (relative to transcription): sense; note = sgRNA Position: 66712829; note = Sequence Name: 56322-704_101_SL_seq_7044
gggagcagcaccgcggggcc

SEQ ID NO: 7045 - DNA, 20 bp, Homo sapiens
  source 1..20: mol_type = genomic DNA; note = Gene: SGK3; note = Location (start to end; relative to TSS): SGK3_69_99; note = Orientation (relative to transcription): sense; note = sgRNA Position: 66712876; note = Sequence Name: 56322-704_101_SL_seq_7045
ccgcgcgcccgggactccga

SEQ ID NO: 7046 - DNA, 20 bp, Homo sapiens
  source 1..20: mol_type = genomic DNA; note = Gene: SGK3; note = Location (start to end; relative to TSS): SGK3_24_54; note = Orientation (relative to transcription): antisense; note = sgRNA Position: 66712811; note = Sequence Name: 56322-704_101_SL_seq_7046
ccgcggtgctgctcccggcg

SEQ ID NO: 7047 - DNA, 20 bp, Homo sapiens
  source 1..20: mol_type = genomic DNA; note = Gene: SGK3; note = Location (start to end; relative to TSS): SGK3_65_95; note = Orientation (relative to transcription): antisense; note = sgRNA Position: 66712852; note = Sequence Name: 56322-704_101_SL_seq_7047
gggcgcgcggaccctcccgc

SEQ ID NO: 7048 - DNA, 20 bp, Homo sapiens
  source 1..20: mol_type = genomic DNA; note = Gene: SGK3; note = Location (start to end; relative to TSS): SGK3_26_56; note = Orientation (relative to transcription): sense; note = sgRNA Position: 66712833; note = Sequence Name: 56322-704_101_SL_seq_7048
gcagcaccgcggggccaggt

SEQ ID NO: 7049 - DNA, 20 bp, Homo sapiens
  source 1..20: mol_type = genomic DNA; note = Gene: SGK3; note = Location (start to end; relative to TSS): SGK3_59_89; note = Orientation (relative to transcription): sense; note = sgRNA Position: 66712866; note = Sequence Name: 56322-704_101_SL_seq_7049
gcgggagggtccgcgcgccc

SEQ ID NO: 7050 - DNA, 20 bp, Homo sapiens
  source 1..20: mol_type = genomic DNA; note = Gene: SIK1; note = Location (start to end; relative to TSS): SIK1_54_84; note = Orientation (relative to transcription): sense; note = sgRNA Position: 43427053; note = Sequence Name: 56322-704_101_SL_seq_7050
gagcagcgccagcggccgag

SEQ ID NO: 7051 - DNA, 20 bp, Homo sapiens
  source 1..20: mol_type = genomic DNA; note = Gene: SIK1; note = Location (start to end; relative to TSS): SIK1_86_116; note = Orientation (relative to transcription): sense; note = sgRNA Position: 43427021; note = Sequence Name: 56322-704_101_SL_seq_7051
tggcctgggcgctccggtgg

SEQ ID NO: 7052 - DNA, 20 bp, Homo sapiens
  source 1..20: mol_type = genomic DNA; note = Gene: SIK1; note = Location (start to end; relative to TSS): SIK1_46_76; note = Orientation (relative to transcription): sense; note = sgRNA Position: 43427061; note = Sequence Name: 56322-704_101_SL_seq_7052
aggcacccgagcagcgccag

SEQ ID NO: 7053 - DNA, 20 bp, Homo sapiens
  source 1..20: mol_type = genomic DNA; note = Gene: SIK1; note = Location (start to end; relative to TSS): SIK1_80_110; note = Orientation (relative to transcription): sense; note = sgRNA Position: 43427027; note = Sequence Name: 56322-704_101_SL_seq_7053
gcttcctggcctgggcgctc

SEQ ID NO: 7054 - DNA, 20 bp, Homo sapiens
  source 1..20: mol_type = genomic DNA; note = Gene: SIK1; note = Location (start to end; relative to TSS): SIK1_45_75; note = Orientation (relative to transcription): antisense; note = sgRNA Position: 43427082; note = Sequence Name: 56322-704_101_SL_seq_7054
tgctcgggtgcctactgctc

SEQ ID NO: 7055 - DNA, 20 bp, Homo sapiens
  source 1..20: mol_type = genomic DNA; note = Gene: SIK1; note = Location (start to end; relative to TSS): SIK1_78_108; note = Orientation (relative to transcription): antisense; note = sgRNA Position: 43427049; note = Sequence Name: 56322-704_101_SL_seq_7055
aggccaggaagccgcccgct

SEQ ID NO: 7056 - DNA, 20 bp, Homo sapiens
  source 1..20: mol_type = genomic DNA; note = Gene: SIK1; note = Location (start to end; relative to TSS): SIK1_26_56; note = Orientation (relative to transcription): sense; note = sgRNA Position: 43427081; note = Sequence Name: 56322-704_101_SL_seq_7056
gcggcggcagccggagcagt

SEQ ID NO: 7057 - DNA, 20 bp, Homo sapiens
  source 1..20: mol_type = genomic DNA; note = Gene: SIK1; note = Location (start to end; relative to TSS): SIK1_58_88; note = Orientation (relative to transcription): sense; note = sgRNA Position: 43427049; note = Sequence Name: 56322-704_101_SL_seq_7057
agcgccagcggccgagcggg

SEQ ID NO: 7058 - DNA, 20 bp, Homo sapiens
  source 1..20: mol_type = genomic DNA; note = Gene: SIK1; note = Location (start to end; relative to TSS): SIK1_15_45; note = Orientation (relative to transcription): antisense; note = sgRNA Position: 43427112; note = Sequence Name: 56322-704_101_SL_seq_7058
cgccgctgctgctgcctccg

SEQ ID NO: 7059 - DNA, 20 bp, Homo sapiens
  source 1..20: mol_type = genomic DNA; note = Gene: SIK1; note = Location (start to end; relative to TSS): SIK1_46_76; note = Orientation (relative to transcription): sense; note = sgRNA Position: 43427061; note = Sequence Name: 56322-704_101_SL_seq_7059
aggcacccgagcagcgccag

SEQ ID NO: 7060 - DNA, 20 bp, Homo sapiens
  source 1..20: mol_type = genomic DNA; note = Gene: SIK2; note = Location (start to end; relative to TSS): SIK2_59_89; note = Orientation (relative to transcription): antisense; note = sgRNA Position: 111602514; note = Sequence Name: 56322-704_101_SL_seq_7060
gcgcgggcgggcgggagggt

SEQ ID NO: 7061 - DNA, 20 bp, Homo sapiens
  source 1..20: mol_type = genomic DNA; note = Gene: SIK2; note = Location (start to end; relative to TSS): SIK2_91_121; note = Orientation (relative to transcription): antisense; note = sgRNA Position: 111602546; note = Sequence Name: 56322-704_101_SL_seq_7061
ctgggccccgctgctagaca

SEQ ID NO: 7062 - DNA, 20 bp, Homo sapiens
  source 1..20: mol_type = genomic DNA; note = Gene: SIK2; note = Location (start to end; relative to TSS): SIK2_51_81; note = Orientation (relative to transcription): antisense; note = sgRNA Position: 111602506; note = Sequence Name: 56322-704_101_SL_seq_7062
gggcgggagggttggcagcg

SEQ ID NO: 7063 - DNA, 20 bp, Homo sapiens
  source 1..20: mol_type = genomic DNA; note = Gene: SIK2; note = Location (start to end; relative to TSS): SIK2_83_113; note = Orientation (relative to transcription): antisense; note = sgRNA Position: 111602538; note = Sequence Name: 56322-704_101_SL_seq_7063
cgctgctagacacggcggac

SEQ ID NO: 7064 - DNA, 20 bp, Homo sapiens
  source 1..20: mol_type = genomic DNA; note = Gene: SIK2; note = Location (start to end; relative to TSS): SIK2_46_76; note = Orientation (relative to transcription): antisense; note = sgRNA Position: 111602501; note = Sequence Name: 56322-704_101_SL_seq_7064
ggagggttggcagcgcggct

SEQ ID NO: 7065 - DNA, 20 bp, Homo sapiens
  source 1..20: mol_type = genomic DNA; note = Gene: SIK2; note = Location (start to end; relative to TSS): SIK2_76_106; note = Orientation (relative to transcription): antisense; note = sgRNA Position: 111602531; note = Sequence Name: 56322-704_101_SL_seq_7065
agacacggcggacaggagcg

SEQ ID NO: 7066 - DNA, 20 bp, Homo sapiens
  source 1..20: mol_type = genomic DNA; note = Gene: SIK2; note = Location (start to end; relative to TSS): SIK2_40_70; note = Orientation (relative to transcription): antisense; note = sgRNA Position: 111602495; note = Sequence Name: 56322-704_101_SL_seq_7066
ttggcagcgcggcttggctt

SEQ ID NO: 7067 - DNA, 20 bp, Homo sapiens
  source 1..20: mol_type = genomic DNA; note = Gene: SIK2; note = Location (start to end; relative to TSS): SIK2_71_101; note = Orientation (relative to transcription): antisense; note = sgRNA Position: 111602526; note = Sequence Name: 56322-704_101_SL_seq_7067
cggcggacaggagcgcgggc

SEQ ID NO: 7068 - DNA, 20 bp, Homo sapiens
  source 1..20: mol_type = genomic DNA; note = Gene: SIK2; note = Location (start to end; relative to TSS): SIK2_34_64; note = Orientation (relative to transcription): antisense; note = sgRNA Position: 111602489; note = Sequence Name: 56322-704_101_SL_seq_7068
gcgcggcttggcttgggcga

SEQ ID NO: 7069 - DNA, 20 bp, Homo sapiens
  source 1..20: mol_type = genomic DNA; note = Gene: SIK2; note = Location (start to end; relative to TSS): SIK2_67_97; note = Orientation (relative to transcription): antisense; note = sgRNA Position: 111602522; note = Sequence Name: 56322-704_101_SL_seq_7069
ggacaggagcgcgggcgggc

SEQ ID NO: 7070 - DNA, 20 bp, Homo sapiens
  source 1..20: mol_type = genomic DNA; note = Gene: SIK3; note = Location (start to end; relative to TSS): SIK3_51_81; note = Orientation (relative to transcription): antisense; note = sgRNA Position: 117098373; note = Sequence Name: 56322-704_101_SL_seq_7070
ggctcccccagtcccggccc

SEQ ID NO: 7071 - DNA, 20 bp, Homo sapiens
  source 1..20: mol_type = genomic DNA; note = Gene: SIK3; note = Location (start to end; relative to TSS): SIK3_85_115; note = Orientation (relative to transcription): antisense; note = sgRNA Position: 117098339; note = Sequence Name: 56322-704_101_SL_seq_7071
gcgcgggcggaggcagcagg

SEQ ID NO: 7072 - DNA, 20 bp, Homo sapiens
  source 1..20: mol_type = genomic DNA; note = Gene: SIK3; note = Location (start to end; relative to TSS): SIK3_45_75; note = Orientation (relative to transcription): sense; note = sgRNA Position: 117098359; note = Sequence Name: 56322-704_101_SL_seq_7072
gggccgggactgggggagcc

SEQ ID NO: 7073 - DNA, 20 bp, Homo sapiens
  source 1..20: mol_type = genomic DNA; note = Gene: SIK3; note = Location (start to end; relative to TSS): SIK3_81_111; note = Orientation (relative to transcription): sense; note = sgRNA Position: 117098323; note = Sequence Name: 56322-704_101_SL_seq_7073
tgctgcctccgcccgcgccg

SEQ ID NO: 7074 - DNA, 20 bp, Homo sapiens
  source 1..20: mol_type = genomic DNA; note = Gene: SIK3; note = Location (start to end; relative to TSS): SIK3_38_68; note = Orientation (relative to transcription): sense; note = sgRNA Position: 117098366; note = Sequence Name: 56322-704_101_SL_seq_7074
gctgccggggccgggactgg

SEQ ID NO: 7075 - DNA, 20 bp, Homo sapiens
  source 1..20: mol_type = genomic DNA; note = Gene: SIK3; note = Location (start to end; relative to TSS): SIK3_78_108; note = Orientation (relative to transcription): antisense; note = sgRNA Position: 117098346; note = Sequence Name: 56322-704_101_SL_seq_7075
cggaggcagcaggcggcccg

SEQ ID NO: 7076 - DNA, 20 bp, Homo sapiens
  source 1..20: mol_type = genomic DNA; note = Gene: SIK3; note = Location (start to end; relative to TSS): SIK3_25_55; note = Orientation (relative to transcription): sense; note = sgRNA Position: 117098379; note = Sequence Name: 56322-704_101_SL_seq_7076
cggagctggcggggctgccg

SEQ ID NO: 7077 - DNA, 20 bp, Homo sapiens
  source 1..20: mol_type = genomic DNA; note = Gene: SIK3; note = Location (start to end; relative to TSS): SIK3_57_87; note = Orientation (relative to transcription): antisense; note = sgRNA Position: 117098367; note = Sequence Name: 56322-704_101_SL_seq_7077
gggcccggctcccccagtcc

SEQ ID NO: 7078 - DNA, 20 bp, Homo sapiens
  source 1..20: mol_type = genomic DNA; note = Gene: SIK3; note = Location (start to end; relative to TSS): SIK3_16_46; note = Orientation (relative to transcription): sense; note = sgRNA Position: 117098388; note = Sequence Name: 56322-704_101_SL_seq_7078
ggcggcgagcggagctggcg

SEQ ID NO: 7079 - DNA, 20 bp, Homo sapiens
  source 1..20: mol_type = genomic DNA; note = Gene: SIK3; note = Location (start to end; relative to TSS): SIK3_51_81; note = Orientation (relative to transcription): antisense; note = sgRNA Position: 117098373; note = Sequence Name: 56322-704_101_SL_seq_7079
ggctcccccagtcccggccc

SEQ ID NO: 7080 - DNA, 20 bp, Homo sapiens
  source 1..20: mol_type = genomic DNA; note = Gene: SLK; note = Location (start to end; relative to TSS): SLK_36_66; note = Orientation (relative to transcription): sense; note = sgRNA Position: 103967202; note = Sequence Name: 56322-704_101_SL_seq_7080
gggagggagacaggcggcgg

SEQ ID NO: 7081 - DNA, 20 bp, Homo sapiens
  source 1..20: mol_type = genomic DNA; note = Gene: SLK; note = Location (start to end; relative to TSS): SLK_66_96; note = Orientation (relative to transcription): sense; note = sgRNA Position: 103967232; note = Sequence Name: 56322-704_101_SL_seq_7081
ccagacccgaggggacgcgc

SEQ ID NO: 7082 - DNA, 20 bp, Homo sapiens
  source 1..20: mol_type = genomic DNA; note = Gene: SLK; note = Location (start to end; relative to TSS): SLK_27_57; note = Orientation (relative to transcription): antisense; note = sgRNA Position: 103967173; note = Sequence Name: 56322-704_101_SL_seq_7082
ctccccagcccacacagcct

SEQ ID NO: 7083 - DNA, 20 bp, Homo sapiens
  source 1..20: mol_type = genomic DNA; note = Gene: SLK; note = Location (start to end; relative to TSS): SLK_65_95; note = Orientation (relative to transcription): sense; note = sgRNA Position: 103967231; note = Sequence Name: 56322-704_101_SL_seq_7083
cccagacccgaggggacgcg

SEQ ID NO: 7084 - DNA, 20 bp, Homo sapiens
  source 1..20: mol_type = genomic DNA; note = Gene: SLK; note = Location (start to end; relative to TSS): SLK_19_49; note = Orientation (relative to transcription): sense; note = sgRNA Position: 103967185; note = Sequence Name: 56322-704_101_SL_seq_7084
cgaggctgtgtgggctgggg

SEQ ID NO: 7085 - DNA, 20 bp, Homo sapiens
  source 1..20: mol_type = genomic DNA; note = Gene: SLK; note = Location (start to end; relative to TSS): SLK_57_87; note = Orientation (relative to transcription): sense; note = sgRNA Position: 103967223; note = Sequence Name: 56322-704_101_SL_seq_7085
ggcggcgccccagacccgag

SEQ ID NO: 7086 - DNA, 20 bp, Homo sapiens
  source 1..20: mol_type = genomic DNA; note = Gene: SLK; note = Location (start to end; relative to TSS): SLK_22_52; note = Orientation (relative to transcription): antisense; note = sgRNA Position: 103967168; note = Sequence Name: 56322-704_101_SL_seq_7086
cagcccacacagcctcggcc

SEQ ID NO: 7087 - DNA, 20 bp, Homo sapiens
  source 1..20: mol_type = genomic DNA; note = Gene: SLK; note = Location (start to end; relative to TSS): SLK_56_86; note = Orientation (relative to transcription): sense; note = sgRNA Position: 103967222; note = Sequence Name: 56322-704_101_SL_seq_7087
cggcggcgccccagacccga

SEQ ID NO: 7088 - DNA, 20 bp, Homo sapiens
  source 1..20: mol_type = genomic DNA; note = Gene: SLK; note = Location (start to end; relative to TSS): SLK_20_50; note = Orientation (relative to transcription): sense; note = sgRNA Position: 103967186; note = Sequence Name: 56322-704_101_SL_seq_7088
gaggctgtgtgggctgggga

SEQ ID NO: 7089 - DNA, 20 bp, Homo sapiens
  source 1..20: mol_type = genomic DNA; note = Gene: SLK; note = Location (start to end; relative to TSS): SLK_55_85; note = Orientation (relative to transcription): sense; note = sgRNA Position: 103967221; note = Sequence Name: 56322-704_101_SL_seq_7089
gcggcggcgccccagacccg

SEQ ID NO: 7090 - DNA, 20 bp, Homo sapiens
  source 1..20: mol_type = genomic DNA; note = Gene: SMG1; note = Location (start to end; relative to TSS): SMG1_32_62; note = Orientation (relative to transcription): sense; note = sgRNA Position: 18926352; note = Sequence Name: 56322-704_101_SL_seq_7090
tcctcgtcgtcctcgtcctc

SEQ ID NO: 7091 - DNA, 20 bp, Homo sapiens
  source 1..20: mol_type = genomic DNA; note = Gene: SMG1; note = Location (start to end; relative to TSS): SMG1_81_111; note = Orientation (relative to transcription): antisense; note = sgRNA Position: 18926323; note = Sequence Name: 56322-704_101_SL_seq_7091
gtcttttccagggccgtgcg

SEQ ID NO: 7092 - DNA, 20 bp, Homo sapiens
  source 1..20: mol_type = genomic DNA; note = Gene: SMG1; note = Location (start to end; relative to TSS): SMG1_33_63; note = Orientation (relative to transcription): antisense; note = sgRNA Position: 18926371; note = Sequence Name: 56322-704_101_SL_seq_7092
cgaggacgacgaggagcagg

SEQ ID NO: 7093 - DNA, 20 bp, Homo sapiens
  source 1..20: mol_type = genomic DNA; note = Gene: SMG1; note = Location (start to end; relative to TSS): SMG1_66_96; note = Orientation (relative to transcription): antisense; note = sgRNA Position: 18926338; note = Sequence Name: 56322-704_101_SL_seq_7093
gtgcgcggcccacgtcgccg

SEQ ID NO: 7094 - DNA, 20 bp, Homo sapiens
  source 1..20: mol_type = genomic DNA; note = Gene: SMG1; note = Location (start to end; relative to TSS): SMG1_34_64; note = Orientation (relative to transcription): sense; note = sgRNA Position: 18926350; note = Sequence Name: 56322-704_101_SL_seq_7094
ctcgtcgtcctcgtcctccg

SEQ ID NO: 7095 - DNA, 20 bp, Homo sapiens
  source 1..20: mol_type = genomic DNA; note = Gene: SMG1; note = Location (start to end; relative to TSS): SMG1_65_95; note = Orientation (relative to transcription): sense; note = sgRNA Position: 18926319; note = Sequence Name: 56322-704_101_SL_seq_7095
acgtgggccgcgcacggccc

SEQ ID NO: 7096 - DNA, 20 bp, Homo sapiens
  source 1..20: mol_type = genomic DNA; note = Gene: SMG1; note = Location (start to end; relative to TSS): SMG1_30_60; note = Orientation (relative to transcription): antisense; note = sgRNA Position: 18926374; note = Sequence Name: 56322-704_101_SL_seq_7096
ggacgacgaggagcaggcgg

SEQ ID NO: 7097 - DNA, 20 bp, Homo sapiens
  source 1..20: mol_type = genomic DNA; note = Gene: SMG1; note = Location (start to end; relative to TSS): SMG1_60_90; note = Orientation (relative to transcription): antisense; note = sgRNA Position: 18926344; note = Sequence Name: 56322-704_101_SL_seq_7097
ggcccacgtcgccggggccc

SEQ ID NO: 7098 - DNA, 20 bp, Homo sapiens
  source 1..20: mol_type = genomic DNA; note = Gene: SMG1; note = Location (start to end; relative to TSS): SMG1_27_57; note = Orientation (relative to transcription): antisense; note = sgRNA Position: 18926377; note = Sequence Name: 56322-704_101_SL_seq_7098
cgacgaggagcaggcggtgg

SEQ ID NO: 7099 - DNA, 20 bp, Homo sapiens
  source 1..20: mol_type = genomic DNA; note = Gene: SMG1; note = Location (start to end; relative to TSS): SMG1_57_87; note = Orientation (relative to transcription): antisense; note = sgRNA Position: 18926347; note = Sequence Name: 56322-704_101_SL_seq_7099
ccacgtcgccggggccccgg

SEQ ID NO: 7100 - DNA, 20 bp, Homo sapiens
  source 1..20: mol_type = genomic DNA; note = Gene: SNRK; note = Location (start to end; relative to TSS): SNRK_28_58; note = Orientation (relative to transcription): sense; note = sgRNA Position: 43286594; note = Sequence Name: 56322-704_101_SL_seq_7100
ctcggtattatgattagcgc

SEQ ID NO: 7101 - DNA, 20 bp, Homo sapiens
  source 1..20: mol_type = genomic DNA; note = Gene: SNRK; note = Location (start to end; relative to TSS): SNRK_77_107; note = Orientation (relative to transcription): antisense; note = sgRNA Position: 43286623; note = Sequence Name: 56322-704_101_SL_seq_7101
cggcgccgacaactccctcc

SEQ ID NO: 7102 - DNA, 20 bp, Homo sapiens
  source 1..20: mol_type = genomic DNA; note = Gene: SNRK; note = Location (start to end; relative to TSS): SNRK_26_56; note = Orientation (relative to transcription): antisense; note = sgRNA Position: 43286572; note = Sequence Name: 56322-704_101_SL_seq_7102
cataataccgagcgggctgc

SEQ ID NO: 7103 - DNA, 20 bp, Homo sapiens
  source 1..20: mol_type = genomic DNA; note = Gene: SNRK; note = Location (start to end; relative to TSS): SNRK_71_101; note = Orientation (relative to transcription): sense; note = sgRNA Position: 43286637; note = Sequence Name: 56322-704_101_SL_seq_7103
ggagggagttgtcggcgccg

SEQ ID NO: 7104 - DNA, 20 bp, Homo sapiens
  source 1..20: mol_type = genomic DNA; note = Gene: SNRK; note = Location (start to end; relative to TSS): SNRK_29_59; note = Orientation (relative to transcription): sense; note = sgRNA Position: 43286595; note = Sequence Name: 56322-704_101_SL_seq_7104
tcggtattatgattagcgct

SEQ ID NO: 7105 - DNA, 20 bp, Homo sapiens
  source 1..20: mol_type = genomic DNA; note = Gene: SNRK; note = Location (start to end; relative to TSS): SNRK_63_93; note = Orientation (relative to transcription): sense; note = sgRNA Position: 43286629; note = Sequence Name: 56322-704_101_SL_seq_7105
ggcggccgggagggagttgt

SEQ ID NO: 7106 - DNA, 20 bp, Homo sapiens
  source 1..20: mol_type = genomic DNA; note = Gene: SNRK; note = Location (start to end; relative to TSS): SNRK_19_49; note = Orientation (relative to transcription): antisense; note = sgRNA Position: 43286565; note = Sequence Name: 56322-704_101_SL_seq_7106
ccgagcgggctgccggccgc

SEQ ID NO: 7107 - DNA, 20 bp, Homo sapiens
  source 1..20: mol_type = genomic DNA; note = Gene: SNRK; note = Location (start to end; relative to TSS): SNRK_53_83; note = Orientation (relative to transcription): sense; note = sgRNA Position: 43286619; note = Sequence Name: 56322-704_101_SL_seq_7107
gcggggtttcggcggccggg

SEQ ID NO: 7108 - DNA, 20 bp, Homo sapiens
  source 1..20: mol_type = genomic DNA; note = Gene: SNRK; note = Location (start to end; relative to TSS): SNRK_18_48; note = Orientation (relative to transcription): antisense; note = sgRNA Position: 43286564; note = Sequence Name: 56322-704_101_SL_seq_7108
cgagcgggctgccggccgcg

SEQ ID NO: 7109 - DNA, 20 bp, Homo sapiens
  source 1..20: mol_type = genomic DNA; note = Gene: SNRK; note = Location (start to end; relative to TSS): SNRK_50_80; note = Orientation (relative to transcription): sense; note = sgRNA Position: 43286616; note = Sequence Name: 56322-704_101_SL_seq_7109
ggtgcggggtttcggcggcc

SEQ ID NO: 7110 - DNA, 20 bp, Homo sapiens
  source 1..20: mol_type = genomic DNA; note = Gene: SPEG; note = Location (start to end; relative to TSS): SPEG_45_75; note = Orientation (relative to transcription): antisense; note = sgRNA Position: 219434894; note = Sequence Name: 56322-704_101_SL_seq_7110
ccctaggagacaagtctggg

SEQ ID NO: 7111 - DNA, 20 bp, Homo sapiens
  source 1..20: mol_type = genomic DNA; note = Gene: SPEG; note = Location (start to end; relative to TSS): SPEG_85_115; note = Orientation (relative to transcription): antisense; note = sgRNA Position: 219434934; note = Sequence Name: 56322-704_101_SL_seq_7111
gccggaactgggcggccacg

SEQ ID NO: 7112 - DNA, 20 bp, Homo sapiens
  source 1..20: mol_type = genomic DNA; note = Gene: SPEG; note = Location (start to end; relative to TSS): SPEG_41_71; note = Orientation (relative to transcription): antisense; note = sgRNA Position: 219434890; note = Sequence Name: 56322-704_101_SL_seq_7112
aggagacaagtctggggggc

SEQ ID NO: 7113 - DNA, 20 bp, Homo sapiens
  source 1..20: mol_type = genomic DNA; note = Gene: SPEG; note = Location (start to end; relative to TSS): SPEG_84_114; note = Orientation (relative to transcription): antisense; note = sgRNA Position: 219434933; note = Sequence Name: 56322-704_101_SL_seq_7113
ccggaactgggcggccacgg

SEQ ID NO: 7114 - DNA, 20 bp, Homo sapiens
  source 1..20: mol_type = genomic DNA; note = Gene: SPEG; note = Location (start to end; relative to TSS): SPEG_35_65; note = Orientation (relative to transcription): sense; note = sgRNA Position: 219434904; note = Sequence Name: 56322-704_101_SL_seq_7114
gccccccagacttgtctcct

SEQ ID NO: 7115 - DNA, 20 bp, Homo sapiens
  source 1..20: mol_type = genomic DNA; note = Gene: SPEG; note = Location (start to end; relative to TSS): SPEG_75_105; note = Orientation (relative to transcription): antisense; note = sgRNA Position: 219434924; note = Sequence Name: 56322-704_101_SL_seq_7115
ggcggccacgggggcacccg

SEQ ID NO: 7116 - DNA, 20 bp, Homo sapiens
  source 1..20: mol_type = genomic DNA; note = Gene: SPEG; note = Location (start to end; relative to TSS): SPEG_36_66; note = Orientation (relative to transcription): sense; note = sgRNA Position: 219434905; note = Sequence Name: 56322-704_101_SL_seq_7116
ccccccagacttgtctccta

SEQ ID NO: 7117 - DNA, 20 bp, Homo sapiens
  source 1..20: mol_type = genomic DNA; note = Gene: SPEG; note = Location (start to end; relative to TSS): SPEG_74_104; note = Orientation (relative to transcription): antisense; note = sgRNA Position: 219434923; note = Sequence Name: 56322-704_101_SL_seq_7117
gcggccacgggggcacccgc

SEQ ID NO: 7118 - DNA, 20 bp, Homo sapiens
  source 1..20: mol_type = genomic DNA; note = Gene: SPEG; note = Location (start to end; relative to TSS): SPEG_38_68; note = Orientation (relative to transcription): antisense; note = sgRNA Position: 219434887; note = Sequence Name: 56322-704_101_SL_seq_7118
agacaagtctggggggccgg

SEQ ID NO: 7119 - DNA, 20 bp, Homo sapiens
  source 1..20: mol_type = genomic DNA; note = Gene: SPEG; note = Location (start to end; relative to TSS): SPEG_70_100; note = Orientation (relative to transcription): antisense; note = sgRNA Position: 219434919; note = Sequence Name: 56322-704_101_SL_seq_7119
ccacgggggcacccgcggga

SEQ ID NO: 7120 - DNA, 20 bp, Homo sapiens
  source 1..20: mol_type = genomic DNA; note = Gene: SPHK1; note = Location (start to end; relative to TSS): SPHK1_30_60; note = Orientation (relative to transcription): sense; note = sgRNA Position: 76384665; note = Sequence Name: 56322-704_101_SL_seq_7120
gcgaaaagtttgaggccgga

SEQ ID NO: 7121 - DNA, 20 bp, Homo sapiens
  source 1..20: mol_type = genomic DNA; note = Gene: SPHK1; note = Location (start to end; relative to TSS): SPHK1_69_99; note = Orientation (relative to transcription): antisense; note = sgRNA Position: 76384684; note = Sequence Name: 56322-704_101_SL_seq_7121
ccccgctggagcggactccc

SEQ ID NO: 7122 - DNA, 20 bp, Homo sapiens
  source 1..20: mol_type = genomic DNA; note = Gene: SPHK1; note = Location (start to end; relative to TSS): SPHK1_29_59; note = Orientation (relative to transcription): sense; note = sgRNA Position: 76384664; note = Sequence Name: 56322-704_101_SL_seq_7122
agcgaaaagtttgaggccgg

SEQ ID NO: 7123 - DNA, 20 bp, Homo sapiens
  source 1..20: mol_type = genomic DNA; note = Gene: SPHK1; note = Location (start to end; relative to TSS): SPHK1_60_90; note = Orientation (relative to transcription): sense; note = sgRNA Position: 76384695; note = Sequence Name: 56322-704_101_SL_seq_7123
ccggggagtccgctccagcg

SEQ ID NO: 7124 - DNA, 20 bp, Homo sapiens
  source 1..20: mol_type = genomic DNA; note = Gene: SPHK1; note = Location (start to end; relative to TSS): SPHK1_26_56; note = Orientation (relative to transcription): sense; note = sgRNA Position: 76384661; note = Sequence Name: 56322-704_101_SL_seq_7124
ttgagcgaaaagtttgaggc

SEQ ID NO: 7125 - DNA, 20 bp, Homo sapiens
  source 1..20: mol_type = genomic DNA; note = Gene: SPHK1; note = Location (start to end; relative to TSS): SPHK1_59_89; note = Orientation (relative to transcription): sense; note = sgRNA Position: 76384694; note = Sequence Name: 56322-704_101_SL_seq_7125
gccggggagtccgctccagc

SEQ ID NO: 7126 - DNA, 20 bp, Homo sapiens
  source 1..20: mol_type = genomic DNA; note = Gene: SPHK1; note = Location (start to end; relative to TSS): SPHK1_23_53; note = Orientation (relative to transcription): antisense; note = sgRNA Position: 76384638; note = Sequence Name: 56322-704_101_SL_seq_7126
ttttcgctcaacttcgcagc

SEQ ID NO: 7127 - DNA, 20 bp, Homo sapiens
  source 1..20: mol_type = genomic DNA; note = Gene: SPHK1; note = Location (start to end; relative to TSS): SPHK1_58_88; note = Orientation (relative to transcription): sense; note = sgRNA Position: 76384693; note = Sequence Name: 56322-704_101_SL_seq_7127
ggccggggagtccgctccag

SEQ ID NO: 7128 - DNA, 20 bp, Homo sapiens
  source 1..20: mol_type = genomic DNA; note = Gene: SPHK1; note = Location (start to end; relative to TSS): SPHK1_22_52; note = Orientation (relative to transcription): sense; note = sgRNA Position: 76384657; note = Sequence Name: 56322-704_101_SL_seq_7128
gaagttgagcgaaaagtttg

SEQ ID NO: 7129 - DNA, 20 bp, Homo sapiens
  source 1..20: mol_type = genomic DNA; note = Gene: SPHK1; note = Location (start to end; relative to TSS): SPHK1_54_84; note = Orientation (relative to transcription): antisense; note = sgRNA Position: 76384669; note = Sequence Name: 56322-704_101_SL_seq_7129
ctccccggcctcgctccctc

SEQ ID NO: 7130 - DNA, 20 bp, Homo sapiens
  source 1..20: mol_type = genomic DNA; note = Gene: SPHK2; note = Location (start to end; relative to TSS): SPHK2_25_55; note = Orientation (relative to transcription): antisense; note = sgRNA Position: 48619537; note = Sequence Name: 56322-704_101_SL_seq_7130
gcctcctcacctccaacact

SEQ ID NO: 7131 - DNA, 20 bp, Homo sapiens
  source 1..20: mol_type = genomic DNA; note = Gene: SPHK2; note = Location (start to end; relative to TSS): SPHK2_88_118; note = Orientation (relative to transcription): antisense; note = sgRNA Position: 48619600; note = Sequence Name: 56322-704_101_SL_seq_7131
aaggaaacgcccgaagcgtg

SEQ ID NO: 7132 - DNA, 20 bp, Homo sapiens
  source 1..20: mol_type = genomic DNA; note = Gene: SPHK2; note = Location (start to end; relative to TSS): SPHK2_20_50; note = Orientation (relative to transcription): sense; note = sgRNA Position: 48619552; note = Sequence Name: 56322-704_101_SL_seq_7132
gtgttggaggtgaggaggcg

SEQ ID NO: 7133 - DNA, 20 bp, Homo sapiens
  source 1..20: mol_type = genomic DNA; note = Gene: SPHK2; note = Location (start to end; relative to TSS): SPHK2_85_115; note = Orientation (relative to transcription): sense; note = sgRNA Position: 48619617; note = Sequence Name: 56322-704_101_SL_seq_7133
gcttcgggcgtttccttatc

SEQ ID NO: 7134 - DNA, 20 bp, Homo sapiens
  source 1..20: mol_type = genomic DNA; note = Gene: SPHK2; note = Location (start to end; relative to TSS): SPHK2_19_49; note = Orientation (relative to transcription): sense; note = sgRNA Position: 48619551; note = Sequence Name: 56322-704_101_SL_seq_7134
agtgttggaggtgaggaggc

SEQ ID NO: 7135 - DNA, 20 bp, Homo sapiens
  source 1..20: mol_type = genomic DNA; note = Gene: SPHK2; note = Location (start to end; relative to TSS): SPHK2_84_114; note = Orientation (relative to transcription): antisense; note = sgRNA Position: 48619596; note = Sequence Name: 56322-704_101_SL_seq_7135
aaacgcccgaagcgtggggt

SEQ ID NO: 7136 - DNA, 20 bp, Homo sapiens
  source 1..20: mol_type = genomic DNA; note = Gene: SPHK2; note = Location (start to end; relative to TSS): SPHK2_18_48; note = Orientation (relative to transcription): sense; note = sgRNA Position: 48619550; note = Sequence Name: 56322-704_101_SL_seq_7136
cagtgttggaggtgaggagg

SEQ ID NO: 7137 - DNA, 20 bp, Homo sapiens
  source 1..20: mol_type = genomic DNA; note = Gene: SPHK2; note = Location (start to end; relative to TSS): SPHK2_70_100; note = Orientation (relative to transcription): sense; note = sgRNA Position: 48619602; note = Sequence Name: 56322-704_101_SL_seq_7137
aatttccgaccccacgcttc

SEQ ID NO: 7138 - DNA, 20 bp, Homo sapiens
  source 1..20: mol_type = genomic DNA; note = Gene: SPHK2; note = Location (start to end; relative to TSS): SPHK2_24_54; note = Orientation (relative to transcription): sense; note = sgRNA Position: 48619556; note = Sequence Name: 56322-704_101_SL_seq_7138
tggaggtgaggaggcggggc

SEQ ID NO: 7139 - DNA, 20 bp, Homo sapiens
  source 1..20: mol_type = genomic DNA; note = Gene: SPHK2; note = Location (start to end; relative to TSS): SPHK2_69_99; note = Orientation (relative to transcription): sense; note = sgRNA Position: 48619601; note = Sequence Name: 56322-704_101_SL_seq_7139
aaatttccgaccccacgctt

SEQ ID NO: 7140 - DNA, 20 bp, Homo sapiens
  source 1..20: mol_type = genomic DNA; note = Gene: SRC; note = Location (start to end; relative to TSS): SRC_39_69; note = Orientation (relative to transcription): antisense; note = sgRNA Position: 37346185; note = Sequence Name: 56322-704_101_SL_seq_7140
cgcgggacgtccagcgggac

SEQ ID NO: 7141 - DNA, 20 bp, Homo sapiens
  source 1..20: mol_type = genomic DNA; note = Gene: SRC; note = Location (start to end; relative to TSS): SRC_71_101; note = Orientation (relative to transcription): antisense; note = sgRNA Position: 37346217; note = Sequence Name: 56322-704_101_SL_seq_7141
tcaccggcagacggacgcac

SEQ ID NO: 7142 - DNA, 20 bp, Homo sapiens
  source 1..20: mol_type = genomic DNA; note = Gene: SRC; note = Location (start to end; relative to TSS): SRC_31_61; note = Orientation (relative to transcription): sense; note = sgRNA Position: 37346197; note = Sequence Name: 56322-704_101_SL_seq_7142
ccgtcccgctggacgtcccg

SEQ ID NO: 7143 - DNA, 20 bp, Homo sapiens
  source 1..20: mol_type = genomic DNA; note = Gene: SRC; note = Location (start to end; relative to TSS): SRC_64_94; note = Orientation (relative to transcription): antisense; note = sgRNA Position: 37346210; note = Sequence Name: 56322-704_101_SL_seq_7143
cagacggacgcacgggaggg

SEQ ID NO: 7144 - DNA, 20 bp, Homo sapiens
  source 1..20: mol_type = genomic DNA; note = Gene: SRC; note = Location (start to end; relative to TSS): SRC_29_59; note = Orientation (relative to transcription): antisense; note = sgRNA Position: 37346175; note = Sequence Name: 56322-704_101_SL_seq_7144
ccagcgggacgggcagacgg

SEQ ID NO: 7145 - DNA, 20 bp, Homo sapiens
  source 1..20: mol_type = genomic DNA; note = Gene: SRC; note = Location (start to end; relative to TSS): SRC_59_89; note = Orientation (relative to transcription): sense; note = sgRNA Position: 37346225; note = Sequence Name: 56322-704_101_SL_seq_7145
cctcccgtgcgtccgtctgc

SEQ ID NO: 7146 - DNA, 20 bp, Homo sapiens
  source 1..20: mol_type = genomic DNA; note = Gene: SRC; note = Location (start to end; relative to TSS): SRC_20_50; note = Orientation (relative to transcription): sense; note = sgRNA Position: 37346186; note = Sequence Name: 56322-704_101_SL_seq_7146
ccgccgtctgcccgtcccgc

SEQ ID NO: 7147 - DNA, 20 bp, Homo sapiens
  source 1..20: mol_type = genomic DNA; note = Gene: SRC; note = Location (start to end; relative to TSS): SRC_57_87; note = Orientation (relative to transcription): antisense; note = sgRNA Position: 37346203; note = Sequence Name: 56322-704_101_SL_seq_7147
acgcacgggagggcggaccg

SEQ ID NO: 7148 - DNA, 20 bp, Homo sapiens
  source 1..20: mol_type = genomic DNA; note = Gene: SRC; note = Location (start to end; relative to TSS): SRC_24_54; note = Orientation (relative to transcription): antisense; note = sgRNA Position: 37346170; note = Sequence Name: 56322-704_101_SL_seq_7148
gggacgggcagacggcggcc

SEQ ID NO: 7149 - DNA, 20 bp, Homo sapiens
  source 1..20: mol_type = genomic DNA; note = Gene: SRC; note = Location (start to end; relative to TSS): SRC_56_86; note = Orientation (relative to transcription): antisense; note = sgRNA Position: 37346202; note = Sequence Name: 56322-704_101_SL_seq_7149
cgcacgggagggcggaccgc

SEQ ID NO: 7150 - DNA, 20 bp, Homo sapiens
  source 1..20: mol_type = genomic DNA; note = Gene: SRMS; note = Location (start to end; relative to TSS): SRMS_24_54; note = Orientation (relative to transcription): sense; note = sgRNA Position: 63547701; note = Sequence Name: 56322-704_101_SL_seq_7150
aggtgctgtcggtgtgcctg

SEQ ID NO: 7151 - DNA, 20 bp, Homo sapiens
  source 1..20: mol_type = genomic DNA; note = Gene: SRMS; note = Location (start to end; relative to TSS): SRMS_75_105; note = Orientation (relative to transcription): antisense; note = sgRNA Position: 63547670; note = Sequence Name: 56322-704_101_SL_seq_7151
ggctggcgttggggctgggt

SEQ ID NO: 7152 - DNA, 20 bp, Homo sapiens
  source 1..20: mol_type = genomic DNA; note = Gene: SRMS; note = Location (start to end; relative to TSS): SRMS_28_58; note = Orientation (relative to transcription): sense; note = sgRNA Position: 63547697; note = Sequence Name: 56322-704_101_SL_seq_7152
gctgtcggtgtgcctgaggc

SEQ ID NO: 7153 - DNA, 20 bp, Homo sapiens
  source 1..20: mol_type = genomic DNA; note = Gene: SRMS; note = Location (start to end; relative to TSS): SRMS_74_104; note = Orientation (relative to transcription): antisense; note = sgRNA Position: 63547671; note = Sequence Name: 56322-704_101_SL_seq_7153
gctggcgttggggctgggtg

SEQ ID NO: 7154 - DNA, 20 bp, Homo sapiens
  source 1..20: mol_type = genomic DNA; note = Gene: SRMS; note = Location (start to end; relative to TSS): SRMS_31_61; note = Orientation (relative to transcription): sense; note = sgRNA Position: 63547694; note = Sequence Name: 56322-704_101_SL_seq_7154
gtcggtgtgcctgaggcagg

SEQ ID NO: 7155 - DNA, 20 bp, Homo sapiens
  source 1..20: mol_type = genomic DNA; note = Gene: SRMS; note = Location (start to end; relative to TSS): SRMS_69_99; note = Orientation (relative to transcription): sense; note = sgRNA Position: 63547656; note = Sequence Name: 56322-704_101_SL_seq_7155
acccagccccaacgccagcc

SEQ ID NO: 7156 - DNA, 20 bp, Homo sapiens
  source 1..20: mol_type = genomic DNA; note = Gene: SRMS; note = Location (start to end; relative to TSS): SRMS_30_60; note = Orientation (relative to transcription): sense; note = sgRNA Position: 63547695; note = Sequence Name: 56322-704_101_SL_seq_7156
tgtcggtgtgcctgaggcag

SEQ ID NO: 7157 - DNA, 20 bp, Homo sapiens
  source 1..20: mol_type = genomic DNA; note = Gene: SRMS; note = Location (start to end; relative to TSS): SRMS_67_97; note = Orientation (relative to transcription): antisense; note = sgRNA Position: 63547678; note = Sequence Name: 56322-704_101_SL_seq_7157
ttggggctgggtggggcgca

SEQ ID NO: 7158 - DNA, 20 bp, Homo sapiens
  source 1..20: mol_type = genomic DNA; note = Gene: SRMS; note = Location (start to end; relative to TSS): SRMS_29_59; note = Orientation (relative to transcription): sense; note = sgRNA Position: 63547696; note = Sequence Name: 56322-704_101_SL_seq_7158
ctgtcggtgtgcctgaggca

SEQ ID NO: 7159 - DNA, 20 bp, Homo sapiens
  source 1..20: mol_type = genomic DNA; note = Gene: SRMS; note = Location (start to end; relative to TSS): SRMS_64_94; note = Orientation (relative to transcription): antisense; note = sgRNA Position: 63547681; note = Sequence Name: 56322-704_101_SL_seq_7159
gggctgggtggggcgcaggg

SEQ ID NO: 7160 - DNA, 20 bp, Homo sapiens
  source 1..20: mol_type = genomic DNA; note = Gene: SRPK1; note = Location (start to end; relative to TSS): SRPK1_35_65; note = Orientation (relative to transcription): sense; note = sgRNA Position: 35921039; note = Sequence Name: 56322-704_101_SL_seq_7160
tggagcggaaaggtgagcgg

SEQ ID NO: 7161 - DNA, 20 bp, Homo sapiens
  source 1..20: mol_type = genomic DNA; note = Gene: SRPK1; note = Location (start to end; relative to TSS): SRPK1_69_99; note = Orientation (relative to transcription): sense; note = sgRNA Position: 35921005; note = Sequence Name: 56322-704_101_SL_seq_7161
ccacgaggggcaatggtcgc

SEQ ID NO: 7162 - DNA, 20 bp, Homo sapiens
  source 1..20: mol_type = genomic DNA; note = Gene: SRPK1; note = Location (start to end; relative to TSS): SRPK1_32_62; note = Orientation (relative to transcription): sense; note = sgRNA Position: 35921042; note = Sequence Name: 56322-704_101_SL_seq_7162
ccatggagcggaaaggtgag

SEQ ID NO: 7163 - DNA, 20 bp, Homo sapiens
  source 1..20: mol_type = genomic DNA; note = Gene: SRPK1; note = Location (start to end; relative to TSS): SRPK1_62_92; note = Orientation (relative to transcription): sense; note = sgRNA Position: 35921012; note = Sequence Name: 56322-704_101_SL_seq_7163
gcctccgccacgaggggcaa

SEQ ID NO: 7164 - DNA, 20 bp, Homo sapiens
  source 1..20: mol_type = genomic DNA; note = Gene: SRPK1; note = Location (start to end; relative to TSS): SRPK1_25_55; note = Orientation (relative to transcription): sense; note = sgRNA Position: 35921049; note = Sequence Name: 56322-704_101_SL_seq_7164
ggtctcaccatggagcggaa

SEQ ID NO: 7165 - DNA, 20 bp, Homo sapiens
  source 1..20: mol_type = genomic DNA; note = Gene: SRPK1; note = Location (start to end; relative to TSS): SRPK1_56_86; note = Orientation (relative to transcription): sense; note = sgRNA Position: 35921018; note = Sequence Name: 56322-704_101_SL_seq_7165
ggagcggcctccgccacgag

SEQ ID NO: 7166 - DNA, 20 bp, Homo sapiens
  source 1..20: mol_type = genomic DNA; note = Gene: SRPK1; note = Location (start to end; relative to TSS): SRPK1_21_51; note = Orientation (relative to transcription): antisense; note = sgRNA Position: 35921073; note = Sequence Name: 56322-704_101_SL_seq_7166
tggtgagaccggtaatcgcc

SEQ ID NO: 7167 - DNA, 20 bp, Homo sapiens
  source 1..20: mol_type = genomic DNA; note = Gene: SRPK1; note = Location (start to end; relative to TSS): SRPK1_55_85; note = Orientation (relative to transcription): sense; note = sgRNA Position: 35921019; note = Sequence Name: 56322-704_101_SL_seq_7167
tggagcggcctccgccacga

SEQ ID NO: 7168 - DNA, 20 bp, Homo sapiens
  source 1..20: mol_type = genomic DNA; note = Gene: SRPK1; note = Location (start to end; relative to TSS): SRPK1_20_50; note = Orientation (relative to transcription): sense; note = sgRNA Position: 35921054; note = Sequence Name: 56322-704_101_SL_seq_7168
ttaccggtctcaccatggag

SEQ ID NO: 7169 - DNA, 20 bp, Homo sapiens
  source 1..20: mol_type = genomic DNA; note = Gene: SRPK1; note = Location (start to end; relative to TSS): SRPK1_54_84; note = Orientation (relative to transcription): sense; note = sgRNA Position: 35921020; note = Sequence Name: 56322-704_101_SL_seq_7169
gtggagcggcctccgccacg

SEQ ID NO: 7170 - DNA, 20 bp, Homo sapiens
  source 1..20: mol_type = genomic DNA; note = Gene: SRPK2; note = Location (start to end; relative to TSS): SRPK2_22_52; note = Orientation (relative to transcription): antisense; note = sgRNA Position: 105388895; note = Sequence Name: 56322-704_101_SL_seq_7170
cctccactcgctccgccggc

SEQ ID NO: 7171 - DNA, 20 bp, Homo sapiens
  source 1..20: mol_type = genomic DNA; note = Gene: SRPK2; note = Location (start to end; relative to TSS): SRPK2_83_113; note = Orientation (relative to transcription): sense; note = sgRNA Position: 105388814; note = Sequence Name: 56322-704_101_SL_seq_7171
ccgccccgcttccgccgcgt

SEQ ID NO: 7172 - DNA, 20 bp, Homo sapiens
  source 1..20: mol_type = genomic DNA; note = Gene: SRPK2; note = Location (start to end; relative to TSS): SRPK2_26_56; note = Orientation (relative to transcription): antisense; note = sgRNA Position: 105388891; note = Sequence Name: 56322-704_101_SL_seq_7172
gcagcctccactcgctccgc

SEQ ID NO: 7173 - DNA, 20 bp, Homo sapiens
  source 1..20: mol_type = genomic DNA; note = Gene: SRPK2; note = Location (start to end; relative to TSS): SRPK2_77_107; note = Orientation (relative to transcription): antisense; note = sgRNA Position: 105388840; note = Sequence Name: 56322-704_101_SL_seq_7173
cggggcggggggcttcgcga

SEQ ID NO: 7174 - DNA, 20 bp, Homo sapiens
  source 1..20: mol_type = genomic DNA; note = Gene: SRPK2; note = Location (start to end; relative to TSS): SRPK2_34_64; note = Orientation (relative to transcription): sense; note = sgRNA Position: 105388863; note = Sequence Name: 56322-704_101_SL_seq_7174
ggctgcagcccagctcgtct

SEQ ID NO: 7175 - DNA, 20 bp, Homo sapiens
  source 1..20: mol_type = genomic DNA; note = Gene: SRPK2; note = Location (start to end; relative to TSS): SRPK2_69_99; note = Orientation (relative to transcription): antisense; note = sgRNA Position: 105388848; note = Sequence Name: 56322-704_101_SL_seq_7175
ggggcttcgcgacggcgacg

SEQ ID NO: 7176 - DNA, 20 bp, Homo sapiens
  source 1..20: mol_type = genomic DNA; note = Gene: SRPK2; note = Location (start to end; relative to TSS): SRPK2_18_48; note = Orientation (relative to transcription): antisense; note = sgRNA Position: 105388899; note = Sequence Name: 56322-704_101_SL_seq_7176
cactcgctccgccggccggg

SEQ ID NO: 7177 - DNA, 20 bp, Homo sapiens
  source 1..20: mol_type = genomic DNA; note = Gene: SRPK2; note = Location (start to end; relative to TSS): SRPK2_68_98; note = Orientation (relative to transcription): antisense; note = sgRNA Position: 105388849; note = Sequence Name: 56322-704_101_SL_seq_7177
gggcttcgcgacggcgacgc

SEQ ID NO: 7178 - DNA, 20 bp, Homo sapiens
  source 1..20: mol_type = genomic DNA; note = Gene: SRPK2; note = Location (start to end; relative to TSS): SRPK2_21_51; note = Orientation (relative to transcription): antisense; note = sgRNA Position: 105388896; note = Sequence Name: 56322-704_101_SL_seq_7178
ctccactcgctccgccggcc

SEQ ID NO: 7179 - DNA, 20 bp, Homo sapiens
  source 1..20: mol_type = genomic DNA; note = Gene: SRPK2; note = Location (start to end; relative to TSS): SRPK2_51_81; note = Orientation (relative to transcription): antisense; note = sgRNA Position: 105388866; note = Sequence Name: 56322-704_101_SL_seq_7179
cgcgggcgccgagacgagct

SEQ ID NO: 7180 - DNA, 20 bp, Homo sapiens
  source 1..20: mol_type = genomic DNA; note = Gene: SRPK3; note = Location (start to end; relative to TSS): SRPK3_34_64; note = Orientation (relative to transcription): sense; note = sgRNA Position: 153781101; note = Sequence Name: 56322-704_101_SL_seq_7180
gggatgagcgccagcacggg

SEQ ID NO: 7181 - DNA, 20 bp, Homo sapiens
  source 1..20: mol_type = genomic DNA; note = Gene: SRPK3; note = Location (start to end; relative to TSS): SRPK3_79_109; note = Orientation (relative to transcription): sense; note = sgRNA Position: 153781146; note = Sequence Name: 56322-704_101_SL_seq_7181
ggcggcagtagcagcaggta

SEQ ID NO: 7182 - DNA, 20 bp, Homo sapiens
  source 1..20: mol_type = genomic DNA; note = Gene: SRPK3; note = Location (start to end; relative to TSS): SRPK3_40_70; note = Orientation (relative to transcription): sense; note = sgRNA Position: 153781107; note = Sequence Name: 56322-704_101_SL_seq_7182
agcgccagcacgggcggtgg

SEQ ID NO: 7183 - DNA, 20 bp, Homo sapiens
  source 1..20: mol_type = genomic DNA; note = Gene: SRPK3; note = Location (start to end; relative to TSS): SRPK3_78_108; note = Orientation (relative to transcription): sense; note = sgRNA Position: 153781145; note = Sequence Name: 56322-704_101_SL_seq_7183
cggcggcagtagcagcaggt

SEQ ID NO: 7184 - DNA, 20 bp, Homo sapiens
  source 1..20: mol_type = genomic DNA; note = Gene: SRPK3; note = Location (start to end; relative to TSS): SRPK3_31_61; note = Orientation (relative to transcription): sense; note = sgRNA Position: 153781098; note = Sequence Name: 56322-704_101_SL_seq_7184
gccgggatgagcgccagcac

SEQ ID NO: 7185 - DNA, 20 bp, Homo sapiens
  source 1..20: mol_type = genomic DNA; note = Gene: SRPK3; note = Location (start to end; relative to TSS): SRPK3_74_104; note = Orientation (relative to transcription): sense; note = sgRNA Position: 153781141; note = Sequence Name: 56322-704_101_SL_seq_7185
gcagcggcggcagtagcagc

SEQ ID NO: 7186 - DNA, 20 bp, Homo sapiens
  source 1..20: mol_type = genomic DNA; note = Gene: SRPK3; note = Location (start to end; relative to TSS): SRPK3_30_60; note = Orientation (relative to transcription): sense; note = sgRNA Position: 153781097; note = Sequence Name: 56322-704_101_SL_seq_7186
ggccgggatgagcgccagca

SEQ ID NO: 7187 - DNA, 20 bp, Homo sapiens
  source 1..20: mol_type = genomic DNA; note = Gene: SRPK3; note = Location (start to end; relative to TSS): SRPK3_61_91; note = Orientation (relative to transcription): sense; note = sgRNA Position: 153781128; note = Sequence Name: 56322-704_101_SL_seq_7187
ggggacagcggcggcagcgg

SEQ ID NO: 7188 - DNA, 20 bp, Homo sapiens
  source 1..20: mol_type = genomic DNA; note = Gene: SRPK3; note = Location (start to end; relative to TSS): SRPK3_20_50; note = Orientation (relative to transcription): antisense; note = sgRNA Position: 153781067; note = Sequence Name: 56322-704_101_SL_seq_7188
ggccacgcagcccgcagctc

SEQ ID NO: 7189 - DNA, 20 bp, Homo sapiens
  source 1..20: mol_type = genomic DNA; note = Gene: SRPK3; note = Location (start to end; relative to TSS): SRPK3_52_82; note = Orientation (relative to transcription): sense; note = sgRNA Position: 153781119; note = Sequence Name: 56322-704_101_SL_seq_7189
ggcggtggtggggacagcgg

SEQ ID NO: 7190 - DNA, 20 bp, Homo sapiens
  source 1..20: mol_type = genomic DNA; note = Gene: STK10; note = Location (start to end; relative to TSS): STK10_30_60; note = Orientation (relative to transcription): sense; note = sgRNA Position: 172188170; note = Sequence Name: 56322-704_101_SL_seq_7190
ggtcgggctgcggggaaagg

SEQ ID NO: 7191 - DNA, 20 bp, Homo sapiens
  source 1..20: mol_type = genomic DNA; note = Gene: STK10; note = Location (start to end; relative to TSS): STK10_89_119; note = Orientation (relative to transcription): sense; note = sgRNA Position: 172188111; note = Sequence Name: 56322-704_101_SL_seq_7191
actcctcctccttctcctcg

SEQ ID NO: 7192 - DNA, 20 bp, Homo sapiens
  source 1..20: mol_type = genomic DNA; note = Gene: STK10; note = Location (start to end; relative to TSS): STK10_22_52; note = Orientation (relative to transcription): sense; note = sgRNA Position: 172188178; note = Sequence Name: 56322-704_101_SL_seq_7192
ttgaccgaggtcgggctgcg

SEQ ID NO: 7193 - DNA, 20 bp, Homo sapiens
  source 1..20: mol_type = genomic DNA; note = Gene: STK10; note = Location (start to end; relative to TSS): STK10_76_106; note = Orientation (relative to transcription): antisense; note = sgRNA Position: 172188144; note = Sequence Name: 56322-704_101_SL_seq_7193
ttggaggacgccgcgtctct

SEQ ID NO: 7194 - DNA, 20 bp, Homo sapiens
  source 1..20: mol_type = genomic DNA; note = Gene: STK10; note = Location (start to end; relative to TSS): STK10_21_51; note = Orientation (relative to transcription): sense; note = sgRNA Position: 172188179; note = Sequence Name: 56322-704_101_SL_seq_7194
cttgaccgaggtcgggctgc

SEQ ID NO: 7195 - DNA, 20 bp, Homo sapiens
  source 1..20: mol_type = genomic DNA; note = Gene: STK10; note = Location (start to end; relative to TSS): STK10_75_105; note = Orientation (relative to transcription): antisense; note = sgRNA Position: 172188145; note = Sequence Name: 56322-704_101_SL_seq_7195
tggaggacgccgcgtctctc

SEQ ID NO: 7196 - DNA, 20 bp, Homo sapiens
  source 1..20: mol_type = genomic DNA; note = Gene: STK10; note = Location (start to end; relative to TSS): STK10_20_50; note = Orientation (relative to transcription): sense; note = sgRNA Position: 172188180; note = Sequence Name: 56322-704_101_SL_seq_7196
acttgaccgaggtcgggctg

SEQ ID NO: 7197 - DNA, 20 bp, Homo sapiens
  source 1..20: mol_type = genomic DNA; note = Gene: STK10; note = Location (start to end; relative to TSS): STK10_74_104; note = Orientation (relative to transcription): antisense; note = sgRNA Position: 172188146; note = Sequence Name: 56322-704_101_SL_seq_7197
ggaggacgccgcgtctctcg

SEQ ID NO: 7198 - DNA, 20 bp, Homo sapiens
  source 1..20: mol_type = genomic DNA; note = Gene: STK10; note = Location (start to end; relative to TSS): STK10_19_49; note = Orientation (relative to transcription): antisense; note = sgRNA Position: 172188201; note = Sequence Name: 56322-704_101_SL_seq_7198
acctcggtcaagtgtgccct

SEQ ID NO: 7199 - DNA, 20 bp, Homo sapiens
  source 1..20: mol_type = genomic DNA; note = Gene: STK10; note = Location (start to end; relative to TSS): STK10_57_87; note = Orientation (relative to transcription): sense; note = sgRNA Position: 172188143; note = Sequence Name: 56322-704_101_SL_seq_7199
ggggagaaccccgagagacg

SEQ ID NO: 7200 - DNA, 20 bp, Homo sapiens
  source 1..20: mol_type = genomic DNA; note = Gene: STK11; note = Location (start to end; relative to TSS): STK11_39_69; note = Orientation (relative to transcription): sense; note = sgRNA Position: 1205843; note = Sequence Name: 56322-704_101_SL_seq_7200
gcccggggcgcccgcgagtg

SEQ ID NO: 7201 - DNA, 20 bp, Homo sapiens
  source 1..20: mol_type = genomic DNA; note = Gene: STK11; note = Location (start to end; relative to TSS): STK11_111_141; note = Orientation (relative to transcription): antisense; note = sgRNA Position: 1205895; note = Sequence Name: 56322-704_101_SL_seq_7201
gcccagcccatccaaggccg

SEQ ID NO: 7202 - DNA, 20 bp, Homo sapiens
  source 1..20: mol_type = genomic DNA; note = Gene: STK11; note = Location (start to end; relative to TSS): STK11_44_74; note = Orientation (relative to transcription): sense; note = sgRNA Position: 1205848; note = Sequence Name: 56322-704_101_SL_seq_7202
gggcgcccgcgagtgaggcg

SEQ ID NO: 7203 - DNA, 20 bp, Homo sapiens
  source 1..20: mol_type = genomic DNA; note = Gene: STK11; note = Location (start to end; relative to TSS): STK11_101_131; note = Orientation (relative to transcription): sense; note = sgRNA Position: 1205905; note = Sequence Name: 56322-704_101_SL_seq_7203
gccgcggccttggatgggct

SEQ ID NO: 7204 - DNA, 20 bp, Homo sapiens
  source 1..20: mol_type = genomic DNA; note = Gene: STK11; note = Location (start to end; relative to TSS): STK11_46_76; note = Orientation (relative to transcription): sense; note = sgRNA Position: 1205850; note = Sequence Name: 56322-704_101_SL_seq_7204
gcgcccgcgagtgaggcgcg

SEQ ID NO: 7205 - DNA, 20 bp, Homo sapiens
  source 1..20: mol_type = genomic DNA; note = Gene: STK11; note = Location (start to end; relative to TSS): STK11_85_115; note = Orientation (relative to transcription): sense; note = sgRNA Position: 1205889; note = Sequence Name: 56322-704_101_SL_seq_7205
ggtggcggcacttgctgccg

SEQ ID NO: 7206 - DNA, 20 bp, Homo sapiens
  source 1..20: mol_type = genomic DNA; note = Gene: STK11; note = Location (start to end; relative to TSS): STK11_49_79; note = Orientation (relative to transcription): sense; note = sgRNA Position: 1205853; note = Sequence Name: 56322-704_101_SL_seq_7206
cccgcgagtgaggcgcgggg

SEQ ID NO: 7207 - DNA, 20 bp, Homo sapiens
  source 1..20: mol_type = genomic DNA; note = Gene: STK11; note = Location (start to end; relative to TSS): STK11_85_115; note = Orientation (relative to transcription): sense; note = sgRNA Position: 1205889; note = Sequence Name: 56322-704_101_SL_seq_7207
ggtggcggcacttgctgccg

SEQ ID NO: 7208 - DNA, 20 bp, Homo sapiens
  source 1..20: mol_type = genomic DNA; note = Gene: STK11; note = Location (start to end; relative to TSS): STK11_17_47; note = Orientation (relative to transcription): sense; note = sgRNA Position: 1205821; note = Sequence Name: 56322-704_101_SL_seq_7208
tcgggcgcggaagggggagg

SEQ ID NO: 7209 - DNA, 20 bp, Homo sapiens
  source 1..20: mol_type = genomic DNA; note = Gene: STK11; note = Location (start to end; relative to TSS): STK11_49_79; note = Orientation (relative to transcription): sense; note = sgRNA Position: 1205853; note = Sequence Name: 56322-704_101_SL_seq_7209
cccgcgagtgaggcgcgggg

SEQ ID NO: 7210 - DNA, 20 bp, Homo sapiens
  source 1..20: mol_type = genomic DNA; note = Gene: STK16; note = Location (start to end; relative to TSS): STK16_45_75; note = Orientation (relative to transcription): sense; note = sgRNA Position: 219245550; note = Sequence Name: 56322-704_101_SL_seq_7210
cagtgcagatggcccatccc

SEQ ID NO: 7211 - DNA, 20 bp, Homo sapiens
  source 1..20: mol_type = genomic DNA; note = Gene: STK16; note = Location (start to end; relative to TSS): STK16_85_115; note = Orientation (relative to transcription): sense; note = sgRNA Position: 219245590; note = Sequence Name: 56322-704_101_SL_seq_7211
ggggtgggccctgccaggag

SEQ ID NO: 7212 - DNA, 20 bp, Homo sapiens
  source 1..20: mol_type = genomic DNA; note = Gene: STK16; note = Location (start to end; relative to TSS): STK16_44_74; note = Orientation (relative to transcription): sense; note = sgRNA Position: 219245549; note = Sequence Name: 56322-704_101_SL_seq_7212
gcagtgcagatggcccatcc

SEQ ID NO: 7213 - DNA, 20 bp, Homo sapiens
  source 1..20: mol_type = genomic DNA; note = Gene: STK16; note = Location (start to end; relative to TSS): STK16_80_110; note = Orientation (relative to transcription): sense; note = sgRNA Position: 219245585; note = Sequence Name: 56322-704_101_SL_seq_7213
agaccggggtgggccctgcc

SEQ ID NO: 7214 - DNA, 20 bp, Homo sapiens
  source 1..20: mol_type = genomic DNA; note = Gene: STK16; note = Location (start to end; relative to TSS): STK16_40_70; note = Orientation (relative to transcription): antisense; note = sgRNA Position: 219245525; note = Sequence Name: 56322-704_101_SL_seq_7214
tctgcactgccggactgacc

SEQ ID NO: 7215 - DNA, 20 bp, Homo sapiens
  source 1..20: mol_type = genomic DNA; note = Gene: STK16; note = Location (start to end; relative to TSS): STK16_70_100; note = Orientation (relative to transcription): sense; note = sgRNA Position: 219245575; note = Sequence Name: 56322-704_101_SL_seq_7215
ctgggctcctagaccggggt

SEQ ID NO: 7216 - DNA, 20 bp, Homo sapiens
  source 1..20: mol_type = genomic DNA; note = Gene: STK16; note = Location (start to end; relative to TSS): STK16_35_65; note = Orientation (relative to transcription): antisense; note = sgRNA Position: 219245520; note = Sequence Name: 56322-704_101_SL_seq_7216
actgccggactgacctggct

SEQ ID NO: 7217 - DNA, 20 bp, Homo sapiens
  source 1..20: mol_type = genomic DNA; note = Gene: STK16; note = Location (start to end; relative to TSS): STK16_65_95; note = Orientation (relative to transcription): sense; note = sgRNA Position: 219245570; note = Sequence Name: 56322-704_101_SL_seq_7217
gggctctgggctcctagacc

SEQ ID NO: 7218 - DNA, 20 bp, Homo sapiens
  source 1..20: mol_type = genomic DNA; note = Gene: STK16; note = Location (start to end; relative to TSS): STK16_22_52; note = Orientation (relative to transcription): sense; note = sgRNA Position: 219245527; note = Sequence Name: 56322-704_101_SL_seq_7218
tggcccgagccaggtcagtc

SEQ ID NO: 7219 - DNA, 20 bp, Homo sapiens
  source 1..20: mol_type = genomic DNA; note = Gene: STK16; note = Location (start to end; relative to TSS): STK16_52_82; note = Orientation (relative to transcription): sense; note = sgRNA Position: 219245557; note = Sequence Name: 56322-704_101_SL_seq_7219
gatggcccatcccgggctct

SEQ ID NO: 7220 - DNA, 20 bp, Homo sapiens
  source 1..20: mol_type = genomic DNA; note = Gene: STK17A; note = Location (start to end; relative to TSS): STK17A_37_67; note = Orientation (relative to transcription): sense; note = sgRNA Position: 43583171; note = Sequence Name: 56322-704_101_SL_seq_7220
cggaccggcactaggagccg

SEQ ID NO: 7221 - DNA, 20 bp, Homo sapiens
  source 1..20: mol_type = genomic DNA; note = Gene: STK17A; note = Location (start to end; relative to TSS): STK17A_78_108; note = Orientation (relative to transcription): sense; note = sgRNA Position: 43583212; note = Sequence Name: 56322-704_101_SL_seq_7221
ggctgctcggagtgaacagg

SEQ ID NO: 7222 - DNA, 20 bp, Homo sapiens
  source 1..20: mol_type = genomic DNA; note = Gene: STK17A; note = Location (start to end; relative to TSS): STK17A_36_66; note = Orientation (relative to transcription): sense; note = sgRNA Position: 43583170; note = Sequence Name: 56322-704_101_SL_seq_7222
gcggaccggcactaggagcc

SEQ ID NO: 7223 - DNA, 20 bp, Homo sapiens
  source 1..20: mol_type = genomic DNA; note = Gene: STK17A; note = Location (start to end; relative to TSS): STK17A_75_105; note = Orientation (relative to transcription): antisense; note = sgRNA Position: 43583189; note = Sequence Name: 56322-704_101_SL_seq_7223
tccgagcagccggagggtca

SEQ ID NO: 7224 - DNA, 20 bp, Homo sapiens
  source 1..20: mol_type = genomic DNA; note = Gene: STK17A; note = Location (start to end; relative to TSS): STK17A_35_65; note = Orientation (relative to transcription): sense; note = sgRNA Position: 43583169; note = Sequence Name: 56322-704_101_SL_seq_7224
cgcggaccggcactaggagc

SEQ ID NO: 7225 - DNA, 20 bp, Homo sapiens
  source 1..20: mol_type = genomic DNA; note = Gene: STK17A; note = Location (start to end; relative to TSS): STK17A_65_95; note = Orientation (relative to transcription): sense; note = sgRNA Position: 43583199; note = Sequence Name: 56322-704_101_SL_seq_7225
tccgtgaccctccggctgct

SEQ ID NO: 7226 - DNA, 20 bp, Homo sapiens
  source 1..20: mol_type = genomic DNA; note = Gene: STK17A; note = Location (start to end; relative to TSS): STK17A_29_59; note = Orientation (relative to transcription): sense; note = sgRNA Position: 43583163; note = Sequence Name: 56322-704_101_SL_seq_7226
aggctccgcggaccggcact

SEQ ID NO: 7227 - DNA, 20 bp, Homo sapiens
  source 1..20: mol_type = genomic DNA; note = Gene: STK17A; note = Location (start to end; relative to TSS): STK17A_63_93; note = Orientation (relative to transcription): antisense; note = sgRNA Position: 43583177; note = Sequence Name: 56322-704_101_SL_seq_7227
gagggtcacggacccgcccc

SEQ ID NO: 7228 - DNA, 20 bp, Homo sapiens
  source 1..20: mol_type = genomic DNA; note = Gene: STK17A; note = Location (start to end; relative to TSS): STK17A_22_52; note = Orientation (relative to transcription): sense; note = sgRNA Position: 43583156; note = Sequence Name: 56322-704_101_SL_seq_7228
tgtttgaaggctccgcggac

SEQ ID NO: 7229 - DNA, 20 bp, Homo sapiens
  source 1..20: mol_type = genomic DNA; note = Gene: STK17A; note = Location (start to end; relative to TSS): STK17A_57_87; note = Orientation (relative to transcription): sense; note = sgRNA Position: 43583191; note = Sequence Name: 56322-704_101_SL_seq_7229
ggggcgggtccgtgaccctc

SEQ ID NO: 7230 - DNA, 20 bp, Homo sapiens
  source 1..20: mol_type = genomic DNA; note = Gene: STK17B; note = Location (start to end; relative to TSS): STK17B_39_69; note = Orientation (relative to transcription): sense; note = sgRNA Position: 196171515; note = Sequence Name: 56322-704_101_SL_seq_7230
gagtcacttcacgagaagcc

SEQ ID NO: 7231 - DNA, 20 bp, Homo sapiens
  source 1..20: mol_type = genomic DNA; note = Gene: STK17B; note = Location (start to end; relative to TSS): STK17B_84_114; note = Orientation (relative to transcription): antisense; note = sgRNA Position: 196171490; note = Sequence Name: 56322-704_101_SL_seq_7231
acttttacttttccagacaa

SEQ ID NO: 7232 - DNA, 20 bp, Homo sapiens
  source 1..20: mol_type = genomic DNA; note = Gene: STK17B; note = Location (start to end; relative to TSS): STK17B_44_74; note = Orientation (relative to transcription): antisense; note = sgRNA Position: 196171530; note = Sequence Name: 56322-704_101_SL_seq_7232
gcttctcgtgaagtgactcc

SEQ ID NO: 7233 - DNA, 20 bp, Homo sapiens
  source 1..20: mol_type = genomic DNA; note = Gene: STK17B; note = Location (start to end; relative to TSS): STK17B_77_107; note = Orientation (relative to transcription): antisense; note = sgRNA Position: 196171497; note = Sequence Name: 56322-704_101_SL_seq_7233
cttttccagacaagggccga

SEQ ID NO: 7234 - DNA, 20 bp, Homo sapiens
  source 1..20: mol_type = genomic DNA; note = Gene: STK17B; note = Location (start to end; relative to TSS): STK17B_27_57; note = Orientation (relative to transcription): antisense; note = sgRNA Position: 196171547; note = Sequence Name: 56322-704_101_SL_seq_7234
tcctggcgacagcagcggag

SEQ ID NO: 7235 - DNA, 20 bp, Homo sapiens
  source 1..20: mol_type = genomic DNA; note = Gene: STK17B; note = Location (start to end; relative to TSS): STK17B_66_96; note = Orientation (relative to transcription): antisense; note = sgRNA Position: 196171508; note = Sequence Name: 56322-704_101_SL_seq_7235
aagggccgacggttgtgacc

SEQ ID NO: 7236 - DNA, 20 bp, Homo sapiens
  source 1..20: mol_type = genomic DNA; note = Gene: STK17B; note = Location (start to end; relative to TSS): STK17B_32_62; note = Orientation (relative to transcription): antisense; note = sgRNA Position: 196171542; note = Sequence Name: 56322-704_101_SL_seq_7236
gtgactcctggcgacagcag

SEQ ID NO: 7237 - DNA, 20 bp, Homo sapiens
  source 1..20: mol_type = genomic DNA; note = Gene: STK17B; note = Location (start to end; relative to TSS): STK17B_63_93; note = Orientation (relative to transcription): sense; note = sgRNA Position: 196171491; note = Sequence Name: 56322-704_101_SL_seq_7237
cacaaccgtcggcccttgtc

SEQ ID NO: 7238 - DNA, 20 bp, Homo sapiens
  source 1..20: mol_type = genomic DNA; note = Gene: STK17B; note = Location (start to end; relative to TSS): STK17B_17_47; note = Orientation (relative to transcription): sense; note = sgRNA Position: 196171537; note = Sequence Name: 56322-704_101_SL_seq_7238
tcctctccgctgctgtcgcc

SEQ ID NO: 7239 - DNA, 20 bp, Homo sapiens
  source 1..20: mol_type = genomic DNA; note = Gene: STK17B; note = Location (start to end; relative to TSS): STK17B_52_82; note = Orientation (relative to transcription): sense; note = sgRNA Position: 196171502; note = Sequence Name: 56322-704_101_SL_seq_7239
agaagccaggtcacaaccgt

SEQ ID NO: 7240 - DNA, 20 bp, Homo sapiens
  source 1..20: mol_type = genomic DNA; note = Gene: STK19; note = Location (start to end; relative to TSS): STK19_19_49; note = Orientation (relative to transcription): antisense; note = sgRNA Position: 31972388; note = Sequence Name: 56322-704_101_SL_seq_7240
gattttatggtaccggggaa

SEQ ID NO: 7241 - DNA, 20 bp, Homo sapiens
  source 1..20: mol_type = genomic DNA; note = Gene: STK19; note = Location (start to end; relative to TSS): STK19_71_101; note = Orientation (relative to transcription): sense; note = sgRNA Position: 31972460; note = Sequence Name: 56322-704_101_SL_seq_7241
agacctttggagttaagagg

SEQ ID NO: 7242 - DNA, 20 bp, Homo sapiens
  source 1..20: mol_type = genomic DNA; note = Gene: STK19; note = Location (start to end; relative to TSS): STK19_20_50; note = Orientation (relative to transcription): antisense; note = sgRNA Position: 31972389; note = Sequence Name: 56322-704_101_SL_seq_7242
ggattttatggtaccgggga

SEQ ID NO: 7243 - DNA, 20 bp, Homo sapiens
  source 1..20: mol_type = genomic DNA; note = Gene: STK19; note = Location (start to end; relative to TSS): STK19_69_99; note = Orientation (relative to transcription): antisense; note = sgRNA Position: 31972438; note = Sequence Name: 56322-704_101_SL_seq_7243
ctccaaaggtctccgggatc

SEQ ID NO: 7244 - DNA, 20 bp, Homo sapiens
  source 1..20: mol_type = genomic DNA; note = Gene: STK19; note = Location (start to end; relative to TSS): STK19_25_55; note = Orientation (relative to transcription): antisense; note = sgRNA Position: 31972394; note = Sequence Name: 56322-704_101_SL_seq_7244
tcccgggattttatggtacc

SEQ ID NO: 7245 - DNA, 20 bp, Homo sapiens
  source 1..20: mol_type = genomic DNA; note = Gene: STK19; note = Location (start to end; relative to TSS): STK19_68_98; note = Orientation (relative to transcription): sense; note = sgRNA Position: 31972457; note = Sequence Name: 56322-704_101_SL_seq_7245
cggagacctttggagttaag

SEQ ID NO: 7246 - DNA, 20 bp, Homo sapiens
  source 1..20: mol_type = genomic DNA; note = Gene: STK19; note = Location (start to end; relative to TSS): STK19_24_54; note = Orientation (relative to transcription): antisense; note = sgRNA Position: 31972393; note = Sequence Name: 56322-704_101_SL_seq_7246
cccgggattttatggtaccg

SEQ ID NO: 7247 - DNA, 20 bp, Homo sapiens
  source 1..20: mol_type = genomic DNA; note = Gene: STK19; note = Location (start to end; relative to TSS): STK19_58_88; note = Orientation (relative to transcription): sense; note = sgRNA Position: 31972447; note = Sequence Name: 56322-704_101_SL_seq_7247
cacctgatcccggagacctt

SEQ ID NO: 7248 - DNA, 20 bp, Homo sapiens
  source 1..20: mol_type = genomic DNA; note = Gene: STK19; note = Location (start to end; relative to TSS): STK19_18_48; note = Orientation (relative to transcription): antisense; note = sgRNA Position: 31972387; note = Sequence Name: 56322-704_101_SL_seq_7248
attttatggtaccggggaag

SEQ ID NO: 7249 - DNA, 20 bp, Homo sapiens
  source 1..20: mol_type = genomic DNA; note = Gene: STK19; note = Location (start to end; relative to TSS): STK19_48_78; note = Orientation (relative to transcription): sense; note = sgRNA Position: 31972437; note = Sequence Name: 56322-704_101_SL_seq_7249
gaagaggcatcacctgatcc

SEQ ID NO: 7250 - DNA, 20 bp, Homo sapiens
  source 1..20: mol_type = genomic DNA; note = Gene: STK24; note = Location (start to end; relative to TSS): STK24_37_67; note = Orientation (relative to transcription): antisense; note = sgRNA Position: 98577066; note = Sequence Name: 56322-704_101_SL_seq_7250
actgctgggctggagccggg

SEQ ID NO: 7251 - DNA, 20 bp, Homo sapiens
  source 1..20: mol_type = genomic DNA; note = Gene: STK24; note = Location (start to end; relative to TSS): STK24_105_135; note = Orientation (relative to transcription): antisense; note = sgRNA Position: 98576998; note = Sequence Name: 56322-704_101_SL_seq_7251
gcgccagggaggagctgctg

SEQ ID NO: 7252 - DNA, 20 bp, Homo sapiens
  source 1..20: mol_type = genomic DNA; note = Gene: STK24; note = Location (start to end; relative to TSS): STK24_42_72; note = Orientation (relative to transcription): sense; note = sgRNA Position: 98577041; note = Sequence Name: 56322-704_101_SL_seq_7252
cccagcagtagcggcagcag

SEQ ID NO: 7253 - DNA, 20 bp, Homo sapiens
  source 1..20: mol_type = genomic DNA; note = Gene: STK24; note = Location (start to end; relative to TSS): STK24_104_134; note = Orientation (relative to transcription): antisense; note = sgRNA Position: 98576999; note = Sequence Name: 56322-704_101_SL_seq_7253
cgccagggaggagctgctgg

SEQ ID NO: 7254 - DNA, 20 bp, Homo sapiens
  source 1..20: mol_type = genomic DNA; note = Gene: STK24; note = Location (start to end; relative to TSS): STK24_45_75; note = Orientation (relative to transcription): sense; note = sgRNA Position: 98577038; note = Sequence Name: 56322-704_101_SL_seq_7254
agcagtagcggcagcagcgg

SEQ ID NO: 7255 - DNA, 20 bp, Homo sapiens
  source 1..20: mol_type = genomic DNA; note = Gene: STK24; note = Location (start to end; relative to TSS): STK24_97_127; note = Orientation (relative to transcription): antisense; note = sgRNA Position: 98577006; note = Sequence Name: 56322-704_101_SL_seq_7255
gaggagctgctgggggcgca

SEQ ID NO: 7256 - DNA, 20 bp, Homo sapiens
  source 1..20: mol_type = genomic DNA; note = Gene: STK24; note = Location (start to end; relative to TSS): STK24_47_77; note = Orientation (relative to transcription): antisense; note = sgRNA Position: 98577056; note = Sequence Name: 56322-704_101_SL_seq_7256
tgctgccgctactgctgggc

SEQ ID NO: 7257 - DNA, 20 bp, Homo sapiens
  source 1..20: mol_type = genomic DNA; note = Gene: STK24; note = Location (start to end; relative to TSS): STK24_93_123; note = Orientation (relative to transcription): sense; note = sgRNA Position: 98576990; note = Sequence Name: 56322-704_101_SL_seq_7257
cgcccccagcagctcctccc

SEQ ID NO: 7258 - DNA, 20 bp, Homo sapiens
  source 1..20: mol_type = genomic DNA; note = Gene: STK24; note = Location (start to end; relative to TSS): STK24_33_63; note = Orientation (relative to transcription): sense; note = sgRNA Position: 98577050; note = Sequence Name: 56322-704_101_SL_seq_7258
cggctccagcccagcagtag

SEQ ID NO: 7259 - DNA, 20 bp, Homo sapiens
  source 1..20: mol_type = genomic DNA; note = Gene: STK24; note = Location (start to end; relative to TSS): STK24_65_95; note = Orientation (relative to transcription): sense; note = sgRNA Position: 98577018; note = Sequence Name: 56322-704_101_SL_seq_7259
cggcggcggcagtgcgcgcg

SEQ ID NO: 7260 - DNA, 20 bp, Homo sapiens
  source 1..20: mol_type = genomic DNA; note = Gene: STK25; note = Location (start to end; relative to TSS): STK25_25_55; note = Orientation (relative to transcription): sense; note = sgRNA Position: 241508535; note = Sequence Name: 56322-704_101_SL_seq_7260
ttcgcgggctgggaggcccg

SEQ ID NO: 7261 - DNA, 20 bp, Homo sapiens
  source 1..20: mol_type = genomic DNA; note = Gene: STK25; note = Location (start to end; relative to TSS): STK25_65_95; note = Orientation (relative to transcription): sense; note = sgRNA Position: 241508495; note = Sequence Name: 56322-704_101_SL_seq_7261
gctgcgggtgggagccttcg

SEQ ID NO: 7262 - DNA, 20 bp, Homo sapiens
  source 1..20: mol_type = genomic DNA; note = Gene: STK25; note = Location (start to end; relative to TSS): STK25_24_54; note = Orientation (relative to transcription): antisense; note = sgRNA Position: 241508556; note = Sequence Name: 56322-704_101_SL_seq_7262
cccagcccgcgaagcaacgg

SEQ ID NO: 7263 - DNA, 20 bp, Homo sapiens
  source 1..20: mol_type = genomic DNA; note = Gene: STK25; note = Location (start to end; relative to TSS): STK25_60_90; note = Orientation (relative to transcription): antisense; note = sgRNA Position: 241508520; note = Sequence Name: 56322-704_101_SL_seq_7263
acccgcagcctctgttcgcc

SEQ ID NO: 7264 - DNA, 20 bp, Homo sapiens
  source 1..20: mol_type = genomic DNA; note = Gene: STK25; note = Location (start to end; relative to TSS): STK25_23_53; note = Orientation (relative to transcription): sense; note = sgRNA Position: 241508537; note = Sequence Name: 56322-704_101_SL_seq_7264
gcttcgcgggctgggaggcc

SEQ ID NO: 7265 - DNA, 20 bp, Homo sapiens
  source 1..20: mol_type = genomic DNA; note = Gene: STK25; note = Location (start to end; relative to TSS): STK25_59_89; note = Orientation (relative to transcription): antisense; note = sgRNA Position: 241508521; note = Sequence Name: 56322-704_101_SL_seq_7265
cccgcagcctctgttcgccc

SEQ ID NO: 7266 - DNA, 20 bp, Homo sapiens
  source 1..20: mol_type = genomic DNA; note = Gene: STK25; note = Location (start to end; relative to TSS): STK25_18_48; note = Orientation (relative to transcription): sense; note = sgRNA Position: 241508542; note = Sequence Name: 56322-704_101_SL_seq_7266
ccgttgcttcgcgggctggg

SEQ ID NO: 7267 - DNA, 20 bp, Homo sapiens
  source 1..20: mol_type = genomic DNA; note = Gene: STK25; note = Location (start to end; relative to TSS): STK25_58_88; note = Orientation (relative to transcription): antisense; note = sgRNA Position: 241508522; note = Sequence Name: 56322-704_101_SL_seq_7267
ccgcagcctctgttcgcccg

SEQ ID NO: 7268 - DNA, 20 bp, Homo sapiens
  source 1..20: mol_type = genomic DNA; note = Gene: STK25; note = Location (start to end; relative to TSS): STK25_21_51; note = Orientation (relative to transcription): antisense; note = sgRNA Position: 241508559; note = Sequence Name: 56322-704_101_SL_seq_7268
agcccgcgaagcaacggtgg

SEQ ID NO: 7269 - DNA, 20 bp, Homo sapiens
  source 1..20: mol_type = genomic DNA; note = Gene: STK25; note = Location (start to end; relative to TSS): STK25_51_81; note = Orientation (relative to transcription): antisense; note = sgRNA Position: 241508529; note = Sequence Name: 56322-704_101_SL_seq_7269
ctctgttcgcccggggaccc

SEQ ID NO: 7270 - DNA, 20 bp, Homo sapiens
  source 1..20: mol_type = genomic DNA; note = Gene: STK26; note = Location (start to end; relative to TSS): STK26_44_74; note = Orientation (relative to transcription): sense; note = sgRNA Position: 132023372; note = Sequence Name: 56322-704_101_SL_seq_7270
aagaggagcagcagcggagg

SEQ ID NO: 7271 - DNA, 20 bp, Homo sapiens
  source 1..20: mol_type = genomic DNA; note = Gene: STK26; note = Location (start to end; relative to TSS): STK26_92_122; note = Orientation (relative to transcription): sense; note = sgRNA Position: 132023420; note = Sequence Name: 56322-704_101_SL_seq_7271
gaaaggtagactgagtccca

SEQ ID NO: 7272 - DNA, 20 bp, Homo sapiens
  source 1..20: mol_type = genomic DNA; note = Gene: STK26; note = Location (start to end; relative to TSS): STK26_41_71; note = Orientation (relative to transcription): sense; note = sgRNA Position: 132023369; note = Sequence Name: 56322-704_101_SL_seq_7272
aggaagaggagcagcagcgg

SEQ ID NO: 7273 - DNA, 20 bp, Homo sapiens
  source 1..20: mol_type = genomic DNA; note = Gene: STK26; note = Location (start to end; relative to TSS): STK26_91_121; note = Orientation (relative to transcription): sense; note = sgRNA Position: 132023419; note = Sequence Name: 56322-704_101_SL_seq_7273
agaaaggtagactgagtccc

SEQ ID NO: 7274 - DNA, 20 bp, Homo sapiens
  source 1..20: mol_type = genomic DNA; note = Gene: STK26; note = Location (start to end; relative to TSS): STK26_38_68; note = Orientation (relative to transcription): sense; note = sgRNA Position: 132023366; note = Sequence Name: 56322-704_101_SL_seq_7274
ttcaggaagaggagcagcag

SEQ ID NO: 7275 - DNA, 20 bp, Homo sapiens
  source 1..20: mol_type = genomic DNA; note = Gene: STK26; note = Location (start to end; relative to TSS): STK26_75_105; note = Orientation (relative to transcription): sense; note = sgRNA Position: 132023403; note = Sequence Name: 56322-704_101_SL_seq_7275
gcggcgggcgggcgccagaa

SEQ ID NO: 7276 - DNA, 20 bp, Homo sapiens
  source 1..20: mol_type = genomic DNA; note = Gene: STK26; note = Location (start to end; relative to TSS): STK26_28_58; note = Orientation (relative to transcription): antisense; note = sgRNA Position: 132023336; note = Sequence Name: 56322-704_101_SL_seq_7276
tgaacgccgagcgctgtgag

SEQ ID NO: 7277 - DNA, 20 bp, Homo sapiens
  source 1..20: mol_type = genomic DNA; note = Gene: STK26; note = Location (start to end; relative to TSS): STK26_59_89; note = Orientation (relative to transcription): sense; note = sgRNA Position: 132023387; note = Sequence Name: 56322-704_101_SL_seq_7277
ggaggcggctgcttcagcgg

SEQ ID NO: 7278 - DNA, 20 bp, Homo sapiens
  source 1..20: mol_type = genomic DNA; note = Gene: STK26; note = Location (start to end; relative to TSS): STK26_18_48; note = Orientation (relative to transcription): antisense; note = sgRNA Position: 132023326; note = Sequence Name: 56322-704_101_SL_seq_7278
gcgctgtgagtggtggtggc

SEQ ID NO: 7279 - DNA, 20 bp, Homo sapiens
  source 1..20: mol_type = genomic DNA; note = Gene: STK26; note = Location (start to end; relative to TSS): STK26_56_86; note = Orientation (relative to transcription): sense; note = sgRNA Position: 132023384; note = Sequence Name: 56322-704_101_SL_seq_7279
agcggaggcggctgcttcag

SEQ ID NO: 7280 - DNA, 20 bp, Homo sapiens
  source 1..20: mol_type = genomic DNA; note = Gene: STK3; note = Location (start to end; relative to TSS): STK3_50_80; note = Orientation (relative to transcription): antisense; note = sgRNA Position: 98825634; note = Sequence Name: 56322-704_101_SL_seq_7280
ccgagcctagggcaccacag

SEQ ID NO: 7281 - DNA, 20 bp, Homo sapiens
  source 1..20: mol_type = genomic DNA; note = Gene: STK3; note = Location (start to end; relative to TSS): STK3_85_115; note = Orientation (relative to transcription): antisense; note = sgRNA Position: 98825599; note = Sequence Name: 56322-704_101_SL_seq_7281
gccgaaaggaggaaaggagc

SEQ ID NO: 7282 - DNA, 20 bp, Homo sapiens
  source 1..20: mol_type = genomic DNA; note = Gene: STK3; note = Location (start to end; relative to TSS): STK3_45_75; note = Orientation (relative to transcription): sense; note = sgRNA Position: 98825619; note = Sequence Name: 56322-704_101_SL_seq_7282
tgtggtgccctaggctcggc

SEQ ID NO: 7283 - DNA, 20 bp, Homo sapiens
  source 1..20: mol_type = genomic DNA; note = Gene: STK3; note = Location (start to end; relative to TSS): STK3_84_114; note = Orientation (relative to transcription): antisense; note = sgRNA Position: 98825600; note = Sequence Name: 56322-704_101_SL_seq_7283
ccgaaaggaggaaaggagcc

SEQ ID NO: 7284 - DNA, 20 bp, Homo sapiens
  source 1..20: mol_type = genomic DNA; note = Gene: STK3; note = Location (start to end; relative to TSS): STK3_41_71; note = Orientation (relative to transcription): sense; note = sgRNA Position: 98825623; note = Sequence Name: 56322-704_101_SL_seq_7284
cctctgtggtgccctaggct

SEQ ID NO: 7285 - DNA, 20 bp, Homo sapiens
  source 1..20: mol_type = genomic DNA; note = Gene: STK3; note = Location (start to end; relative to TSS): STK3_83_113; note = Orientation (relative to transcription): antisense; note = sgRNA Position: 98825601; note = Sequence Name: 56322-704_101_SL_seq_7285
cgaaaggaggaaaggagccg

SEQ ID NO: 7286 - DNA, 20 bp, Homo sapiens
  source 1..20: mol_type = genomic DNA; note = Gene: STK3; note = Location (start to end; relative to TSS): STK3_36_66; note = Orientation (relative to transcription): sense; note = sgRNA Position: 98825628; note = Sequence Name: 56322-704_101_SL_seq_7286
gtttccctctgtggtgccct

SEQ ID NO: 7287 - DNA, 20 bp, Homo sapiens
  source 1..20: mol_type = genomic DNA; note = Gene: STK3; note = Location (start to end; relative to TSS): STK3_77_107; note = Orientation (relative to transcription): antisense; note = sgRNA Position: 98825607; note = Sequence Name: 56322-704_101_SL_seq_7287
gaggaaaggagccggggcac

SEQ ID NO: 7288 - DNA, 20 bp, Homo sapiens
  source 1..20: mol_type = genomic DNA; note = Gene: STK3; note = Location (start to end; relative to TSS): STK3_32_62; note = Orientation (relative to transcription): antisense; note = sgRNA Position: 98825652; note = Sequence Name: 56322-704_101_SL_seq_7288
agagggaaactctgggaact

SEQ ID NO: 7289 - DNA, 20 bp, Homo sapiens
  source 1..20: mol_type = genomic DNA; note = Gene: STK3; note = Location (start to end; relative to TSS): STK3_73_103; note = Orientation (relative to transcription): antisense; note = sgRNA Position: 98825611; note = Sequence Name: 56322-704_101_SL_seq_7289
aaaggagccggggcaccggc

SEQ ID NO: 7290 - DNA, 20 bp, Homo sapiens
  source 1..20: mol_type = genomic DNA; note = Gene: STK31; note = Location (start to end; relative to TSS): STK31_42_72; note = Orientation (relative to transcription): sense; note = sgRNA Position: 23710287; note = Sequence Name: 56322-704_101_SL_seq_7290
gggccgaaagtccagtatgt

SEQ ID NO: 7291 - DNA, 20 bp, Homo sapiens
  source 1..20: mol_type = genomic DNA; note = Gene: STK31; note = Location (start to end; relative to TSS): STK31_86_116; note = Orientation (relative to transcription): sense; note = sgRNA Position: 23710331; note = Sequence Name: 56322-704_101_SL_seq_7291
cttccgcaacggaaagtgtg

SEQ ID NO: 7292 - DNA, 20 bp, Homo sapiens
  source 1..20: mol_type = genomic DNA; note = Gene: STK31; note = Location (start to end; relative to TSS): STK31_23_53; note = Orientation (relative to transcription): antisense; note = sgRNA Position: 23710248; note = Sequence Name: 56322-704_101_SL_seq_7292
ccgccgtagcacacgtgcag

SEQ ID NO: 7293 - DNA, 20 bp, Homo sapiens
  source 1..20: mol_type = genomic DNA; note = Gene: STK31; note = Location (start to end; relative to TSS): STK31_75_105; note = Orientation (relative to transcription): sense; note = sgRNA Position: 23710320; note = Sequence Name: 56322-704_101_SL_seq_7293
ctcttctagagcttccgcaa

SEQ ID NO: 7294 - DNA, 20 bp, Homo sapiens
  source 1..20: mol_type = genomic DNA; note = Gene: STK31; note = Location (start to end; relative to TSS): STK31_22_52; note = Orientation (relative to transcription): sense; note = sgRNA Position: 23710267; note = Sequence Name: 56322-704_101_SL_seq_7294
cgtgtgctacggcgggcgga

SEQ ID NO: 7295 - DNA, 20 bp, Homo sapiens
  source 1..20: mol_type = genomic DNA; note = Gene: STK31; note = Location (start to end; relative to TSS): STK31_62_92; note = Orientation (relative to transcription): antisense; note = sgRNA Position: 23710287; note = Sequence Name: 56322-704_101_SL_seq_7295
gtgaccctggacccacatac

SEQ ID NO: 7296 - DNA, 20 bp, Homo sapiens
  source 1..20: mol_type = genomic DNA; note = Gene: STK31; note = Location (start to end; relative to TSS): STK31_21_51; note = Orientation (relative to transcription): sense; note = sgRNA Position: 23710266; note = Sequence Name: 56322-704_101_SL_seq_7296
acgtgtgctacggcgggcgg

SEQ ID NO: 7297 - DNA, 20 bp, Homo sapiens
  source 1..20: mol_type = genomic DNA; note = Gene: STK31; note = Location (start to end; relative to TSS): STK31_54_84; note = Orientation (relative to transcription): antisense; note = sgRNA Position: 23710279; note = Sequence Name: 56322-704_101_SL_seq_7297
ggacccacatactggacttt

SEQ ID NO: 7298 - DNA, 20 bp, Homo sapiens
  source 1..20: mol_type = genomic DNA; note = Gene: STK31; note = Location (start to end; relative to TSS): STK31_18_48; note = Orientation (relative to transcription): sense; note = sgRNA Position: 23710263; note = Sequence Name: 56322-704_101_SL_seq_7298
tgcacgtgtgctacggcggg

SEQ ID NO: 7299 - DNA, 20 bp, Homo sapiens
  source 1..20: mol_type = genomic DNA; note = Gene: STK31; note = Location (start to end; relative to TSS): STK31_48_78; note = Orientation (relative to transcription): sense; note = sgRNA Position: 23710293; note = Sequence Name: 56322-704_101_SL_seq_7299
aaagtccagtatgtgggtcc

SEQ ID NO: 7300 - DNA, 20 bp, Homo sapiens
  source 1..20: mol_type = genomic DNA; note = Gene: STK32A; note = Location (start to end; relative to TSS): STK32A_44_74; note = Orientation (relative to transcription): antisense; note = sgRNA Position: 147235076; note = Sequence Name: 56322-704_101_SL_seq_7300
acctatctgcccggaagcgg

SEQ ID NO: 7301 - DNA, 20 bp, Homo sapiens
  source 1..20: mol_type = genomic DNA; note = Gene: STK32A; note = Location (start to end; relative to TSS): STK32A_107_137; note = Orientation (relative to transcription): antisense; note = sgRNA Position: 147235139; note = Sequence Name: 56322-704_101_SL_seq_7301
atgctttcatccagggaaca

SEQ ID NO: 7302 - DNA, 20 bp, Homo sapiens
  source 1..20: mol_type = genomic DNA; note = Gene: STK32A; note = Location (start to end; relative to TSS): STK32A_41_71; note = Orientation (relative to transcription): antisense; note = sgRNA Position: 147235073; note = Sequence Name: 56322-704_101_SL_seq_7302
tatctgcccggaagcggcgg

SEQ ID NO: 7303 - DNA, 20 bp, Homo sapiens
  source 1..20: mol_type = genomic DNA; note = Gene: STK32A; note = Location (start to end; relative to TSS): STK32A_88_118; note = Orientation (relative to transcription): sense; note = sgRNA Position: 147235140; note = Sequence Name: 56322-704_101_SL_seq_7303
ttctcttagtccctgttccc

SEQ ID NO: 7304 - DNA, 20 bp, Homo sapiens
  source 1..20: mol_type = genomic DNA; note = Gene: STK32A; note = Location (start to end; relative to TSS): STK32A_47_77; note = Orientation (relative to transcription): antisense; note = sgRNA Position: 147235079; note = Sequence Name: 56322-704_101_SL_seq_7304
ggcacctatctgcccggaag

SEQ ID NO: 7305 - DNA, 20 bp, Homo sapiens
  source 1..20: mol_type = genomic DNA; note = Gene: STK32A; note = Location (start to end; relative to TSS): STK32A_80_110; note = Orientation (relative to transcription): antisense; note = sgRNA Position: 147235112; note = Sequence Name: 56322-704_101_SL_seq_7305
agagaagaactccaagagca

SEQ ID NO: 7306 - DNA, 20 bp, Homo sapiens
  source 1..20: mol_type = genomic DNA; note = Gene: STK32A; note = Location (start to end; relative to TSS): STK32A_34_64; note = Orientation (relative to transcription): sense; note = sgRNA Position: 147235086; note = Sequence Name: 56322-704_101_SL_seq_7306
tccgccgcttccgggcagat

SEQ ID NO: 7307 - DNA, 20 bp, Homo sapiens
  source 1..20: mol_type = genomic DNA; note = Gene: STK32A; note = Location (start to end; relative to TSS): STK32A_68_98; note = Orientation (relative to transcription): antisense; note = sgRNA Position: 147235100; note = Sequence Name: 56322-704_101_SL_seq_7307
caagagcaaggagcaagaaa

SEQ ID NO: 7308 - DNA, 20 bp, Homo sapiens
  source 1..20: mol_type = genomic DNA; note = Gene: STK32A; note = Location (start to end; relative to TSS): STK32A_26_56; note = Orientation (relative to transcription): sense; note = sgRNA Position: 147235078; note = Sequence Name: 56322-704_101_SL_seq_7308
tcgcagcctccgccgcttcc

SEQ ID NO: 7309 - DNA, 20 bp, Homo sapiens
  source 1..20: mol_type = genomic DNA; note = Gene: STK32A; note = Location (start to end; relative to TSS): STK32A_60_90; note = Orientation (relative to transcription): sense; note = sgRNA Position: 147235112; note = Sequence Name: 56322-704_101_SL_seq_7309
cttttcttgctccttgctct

SEQ ID NO: 7310 - DNA, 20 bp, Homo sapiens
  source 1..20: mol_type = genomic DNA; note = Gene: STK32B; note = Location (start to end; relative to TSS): STK32B_45_75; note = Orientation (relative to transcription): sense; note = sgRNA Position: 5051551; note = Sequence Name: 56322-704_101_SL_seq_7310
cggcgaggagcgccgcacgt

SEQ ID NO: 7311 - DNA, 20 bp, Homo sapiens
  source 1..20: mol_type = genomic DNA; note = Gene: STK32B; note = Location (start to end; relative to TSS): STK32B_75_105; note = Orientation (relative to transcription): sense; note = sgRNA Position: 5051581; note = Sequence Name: 56322-704_101_SL_seq_7311
gcgaggagctcccgggttcc

SEQ ID NO: 7312 - DNA, 20 bp, Homo sapiens
  source 1..20: mol_type = genomic DNA; note = Gene: STK32B; note = Location (start to end; relative to TSS): STK32B_29_59; note = Orientation (relative to transcription): antisense; note = sgRNA Position: 5051515; note = Sequence Name: 56322-704_101_SL_seq_7312
tacagcgggcgggagacgcg

SEQ ID NO: 7313 - DNA, 20 bp, Homo sapiens
  source 1..20: mol_type = genomic DNA; note = Gene: STK32B; note = Location (start to end; relative to TSS): STK32B_67_97; note = Orientation (relative to transcription): sense; note = sgRNA Position: 5051573; note = Sequence Name: 56322-704_101_SL_seq_7313
gccccggcgcgaggagctcc

SEQ ID NO: 7314 - DNA, 20 bp, Homo sapiens
  source 1..20: mol_type = genomic DNA; note = Gene: STK32B; note = Location (start to end; relative to TSS): STK32B_26_56; note = Orientation (relative to transcription): antisense; note = sgRNA Position: 5051512; note = Sequence Name: 56322-704_101_SL_seq_7314
agcgggcgggagacgcgagg

SEQ ID NO: 7315 - DNA, 20 bp, Homo sapiens
  source 1..20: mol_type = genomic DNA; note = Gene: STK32B; note = Location (start to end; relative to TSS): STK32B_66_96; note = Orientation (relative to transcription): antisense; note = sgRNA Position: 5051552; note = Sequence Name: 56322-704_101_SL_seq_7315
ctcgcgccggggccaacgtg

SEQ ID NO: 7316 - DNA, 20 bp, Homo sapiens
  source 1..20: mol_type = genomic DNA; note = Gene: STK32B; note = Location (start to end; relative to TSS): STK32B_25_55; note = Orientation (relative to transcription): sense; note = sgRNA Position: 5051531; note = Sequence Name: 56322-704_101_SL_seq_7316
cgtctcccgcccgctgtagc

SEQ ID NO: 7317 - DNA, 20 bp, Homo sapiens
  source 1..20: mol_type = genomic DNA; note = Gene: STK32B; note = Location (start to end; relative to TSS): STK32B_58_88; note = Orientation (relative to transcription): sense; note = sgRNA Position: 5051564; note = Sequence Name: 56322-704_101_SL_seq_7317
cgcacgttggccccggcgcg

SEQ ID NO: 7318 - DNA, 20 bp, Homo sapiens
  source 1..20: mol_type = genomic DNA; note = Gene: STK32B; note = Location (start to end; relative to TSS): STK32B_21_51; note = Orientation (relative to transcription): antisense; note = sgRNA Position: 5051507; note = Sequence Name: 56322-704_101_SL_seq_7318
gcgggagacgcgaggcggcg

SEQ ID NO: 7319 - DNA, 20 bp, Homo sapiens
  source 1..20: mol_type = genomic DNA; note = Gene: STK32B; note = Location (start to end; relative to TSS): STK32B_51_81; note = Orientation (relative to transcription): sense; note = sgRNA Position: 5051557; note = Sequence Name: 56322-704_101_SL_seq_7319
ggagcgccgcacgttggccc

SEQ ID NO: 7320 - DNA, 20 bp, Homo sapiens
  source 1..20: mol_type = genomic DNA; note = Gene: STK32C; note = Location (start to end; relative to TSS): STK32C_39_69; note = Orientation (relative to transcription): sense; note = sgRNA Position: 132307887; note = Sequence Name: 56322-704_101_SL_seq_7320
actgccgctcccggccctgc

SEQ ID NO: 7321 - DNA, 20 bp, Homo sapiens
  source 1..20: mol_type = genomic DNA; note = Gene: STK32C; note = Location (start to end; relative to TSS): STK32C_75_105; note = Orientation (relative to transcription): antisense; note = sgRNA Position: 132307871; note = Sequence Name: 56322-704_101_SL_seq_7321
ggcagccggaactcggggca

SEQ ID NO: 7322 - DNA, 20 bp, Homo sapiens
  source 1..20: mol_type = genomic DNA; note = Gene: STK32C; note = Location (start to end; relative to TSS): STK32C_40_70; note = Orientation (relative to transcription): antisense; note = sgRNA Position: 132307906; note = Sequence Name: 56322-704_101_SL_seq_7322
gccgggagcggcagtggtag

SEQ ID NO: 7323 - DNA, 20 bp, Homo sapiens
  source 1..20: mol_type = genomic DNA; note = Gene: STK32C; note = Location (start to end; relative to TSS): STK32C_71_101; note = Orientation (relative to transcription): antisense; note = sgRNA Position: 132307875; note = Sequence Name: 56322-704_101_SL_seq_7323
gccggaactcggggcatggc

SEQ ID NO: 7324 - DNA, 20 bp, Homo sapiens
  source 1..20: mol_type = genomic DNA; note = Gene: STK32C; note = Location (start to end; relative to TSS): STK32C_24_54; note = Orientation (relative to transcription): antisense; note = sgRNA Position: 132307922; note = Sequence Name: 56322-704_101_SL_seq_7324
gtagcgggagcgctcggggc

SEQ ID NO: 7325 - DNA, 20 bp, Homo sapiens
  source 1..20: mol_type = genomic DNA; note = Gene: STK32C; note = Location (start to end; relative to TSS): STK32C_67_97; note = Orientation (relative to transcription): antisense; note = sgRNA Position: 132307879; note = Sequence Name: 56322-704_101_SL_seq_7325
gaactcggggcatggccggc

SEQ ID NO: 7326 - DNA, 20 bp, Homo sapiens
  source 1..20: mol_type = genomic DNA; note = Gene: STK32C; note = Location (start to end; relative to TSS): STK32C_28_58; note = Orientation (relative to transcription): antisense; note = sgRNA Position: 132307918; note = Sequence Name: 56322-704_101_SL_seq_7326
agtggtagcgggagcgctcg

SEQ ID NO: 7327 - DNA, 20 bp, Homo sapiens
  source 1..20: mol_type = genomic DNA; note = Gene: STK32C; note = Location (start to end; relative to TSS): STK32C_62_92; note = Orientation (relative to transcription): antisense; note = sgRNA Position: 132307884; note = Sequence Name: 56322-704_101_SL_seq_7327
cggggcatggccggccggca

SEQ ID NO: 7328 - DNA, 20 bp, Homo sapiens
  source 1..20: mol_type = genomic DNA; note = Gene: STK32C; note = Location (start to end; relative to TSS): STK32C_29_59; note = Orientation (relative to transcription): antisense; note = sgRNA Position: 132307917; note = Sequence Name: 56322-704_101_SL_seq_7328
cagtggtagcgggagcgctc

SEQ ID NO: 7329 - DNA, 20 bp, Homo sapiens
  source 1..20: mol_type = genomic DNA; note = Gene: STK32C; note = Location (start to end; relative to TSS): STK32C_61_91; note = Orientation (relative to transcription): sense; note = sgRNA Position: 132307865; note = Sequence Name: 56322-704_101_SL_seq_7329
gccggccatgccccgagttc

SEQ ID NO: 7330 - DNA, 20 bp, Homo sapiens
  source 1..20: mol_type = genomic DNA; note = Gene: STK33; note = Location (start to end; relative to TSS): STK33_39_69; note = Orientation (relative to transcription): sense; note = sgRNA Position: 8594165; note = Sequence Name: 56322-704_101_SL_seq_7330
gcgggctgaaaagtttctcc

SEQ ID NO: 7331 - DNA, 20 bp, Homo sapiens
  source 1..20: mol_type = genomic DNA; note = Gene: STK33; note = Location (start to end; relative to TSS): STK33_91_121; note = Orientation (relative to transcription): sense; note = sgRNA Position: 8594113; note = Sequence Name: 56322-704_101_SL_seq_7331
cgccgagtgtgcgcacctgt

SEQ ID NO: 7332 - DNA, 20 bp, Homo sapiens
  source 1..20: mol_type = genomic DNA; note = Gene: STK33; note = Location (start to end; relative to TSS): STK33_22_52; note = Orientation (relative to transcription): antisense; note = sgRNA Position: 8594202; note = Sequence Name: 56322-704_101_SL_seq_7332
gcaaccgcagggcagtggac

SEQ ID NO: 7333 - DNA, 20 bp, Homo sapiens
  source 1..20: mol_type = genomic DNA; note = Gene: STK33; note = Location (start to end; relative to TSS): STK33_80_110; note = Orientation (relative to transcription): antisense; note = sgRNA Position: 8594144; note = Sequence Name: 56322-704_101_SL_seq_7333
gcgcaggctgtcgctgagcc

SEQ ID NO: 7334 - DNA, 20 bp, Homo sapiens
  source 1..20: mol_type = genomic DNA; note = Gene: STK33; note = Location (start to end; relative to TSS): STK33_21_51; note = Orientation (relative to transcription): antisense; note = sgRNA Position: 8594203; note = Sequence Name: 56322-704_101_SL_seq_7334
caaccgcagggcagtggacg

SEQ ID NO: 7335 - DNA, 20 bp, Homo sapiens
  source 1..20: mol_type = genomic DNA; note = Gene: STK33; note = Location (start to end; relative to TSS): STK33_67_97; note = Orientation (relative to transcription): antisense; note = sgRNA Position: 8594157; note = Sequence Name: 56322-704_101_SL_seq_7335
ctgagcccggaattctgcac

SEQ ID NO: 7336 - DNA, 20 bp, Homo sapiens
  source 1..20: mol_type = genomic DNA; note = Gene: STK33; note = Location (start to end; relative to TSS): STK33_20_50; note = Orientation (relative to transcription): sense; note = sgRNA Position: 8594184; note = Sequence Name: 56322-704_101_SL_seq_7336
actgccctgcggttgctctg

SEQ ID NO: 7337 - DNA, 20 bp, Homo sapiens
  source 1..20: mol_type = genomic DNA; note = Gene: STK33; note = Location (start to end; relative to TSS): STK33_66_96; note = Orientation (relative to transcription): antisense; note = sgRNA Position: 8594158; note = Sequence Name: 56322-704_101_SL_seq_7337
tgagcccggaattctgcacc

SEQ ID NO: 7338 - DNA, 20 bp, Homo sapiens
  source 1..20: mol_type = genomic DNA; note = Gene: STK33; note = Location (start to end; relative to TSS): STK33_23_53; note = Orientation (relative to transcription): antisense; note = sgRNA Position: 8594201; note = Sequence Name: 56322-704_101_SL_seq_7338
agcaaccgcagggcagtgga

SEQ ID NO: 7339 - DNA, 20 bp, Homo sapiens
  source 1..20: mol_type = genomic DNA; note = Gene: STK33; note = Location (start to end; relative to TSS): STK33_53_83; note = Orientation (relative to transcription): sense; note = sgRNA Position: 8594151; note = Sequence Name: 56322-704_101_SL_seq_7339
ttctcccggtgcagaattcc

SEQ ID NO: 7340 - DNA, 20 bp, Homo sapiens
  source 1..20: mol_type = genomic DNA; note = Gene: STK35; note = Location (start to end; relative to TSS): STK35_36_66; note = Orientation (relative to transcription): sense; note = sgRNA Position: 2101889; note = Sequence Name: 56322-704_101_SL_seq_7340
gtcccgggggatgggccacc

SEQ ID NO: 7341 - DNA, 20 bp, Homo sapiens
  source 1..20: mol_type = genomic DNA; note = Gene: STK35; note = Location (start to end; relative to TSS): STK35_67_97; note = Orientation (relative to transcription): sense; note = sgRNA Position: 2101920; note = Sequence Name: 56322-704_101_SL_seq_7341
ctggcccgggcgccggcggg

SEQ ID NO: 7342 - DNA, 20 bp, Homo sapiens
  source 1..20: mol_type = genomic DNA; note = Gene: STK35; note = Location (start to end; relative to TSS): STK35_28_58; note = Orientation (relative to transcription): sense; note = sgRNA Position: 2101881; note = Sequence Name: 56322-704_101_SL_seq_7342
cggctggcgtcccgggggat

SEQ ID NO: 7343 - DNA, 20 bp, Homo sapiens
  source 1..20: mol_type = genomic DNA; note = Gene: STK35; note = Location (start to end; relative to TSS): STK35_63_93; note = Orientation (relative to transcription): antisense; note = sgRNA Position: 2101896; note = Sequence Name: 56322-704_101_SL_seq_7343
cccgggccagcggagactcc

SEQ ID NO: 7344 - DNA, 20 bp, Homo sapiens
  source 1..20: mol_type = genomic DNA; note = Gene: STK35; note = Location (start to end; relative to TSS): STK35_23_53; note = Orientation (relative to transcription): sense; note = sgRNA Position: 2101876; note = Sequence Name: 56322-704_101_SL_seq_7344
tcactcggctggcgtcccgg

SEQ ID NO: 7345 - DNA, 20 bp, Homo sapiens
  source 1..20: mol_type = genomic DNA; note = Gene: STK35; note = Location (start to end; relative to TSS): STK35_60_90; note = Orientation (relative to transcription): antisense; note = sgRNA Position: 2101893; note = Sequence Name: 56322-704_101_SL_seq_7345
gggccagcggagactcctgg

SEQ ID NO: 7346 - DNA, 20 bp, Homo sapiens
  source 1..20: mol_type = genomic DNA; note = Gene: STK35; note = Location (start to end; relative to TSS): STK35_22_52; note = Orientation (relative to transcription): sense; note = sgRNA Position: 2101875; note = Sequence Name: 56322-704_101_SL_seq_7346
ctcactcggctggcgtcccg

SEQ ID NO: 7347 - DNA, 20 bp, Homo sapiens
  source 1..20: mol_type = genomic DNA; note = Gene: STK35; note = Location (start to end; relative to TSS): STK35_54_84; note = Orientation (relative to transcription): sense; note = sgRNA Position: 2101907; note = Sequence Name: 56322-704_101_SL_seq_7347
ccaggagtctccgctggccc

SEQ ID NO: 7348 - DNA, 20 bp, Homo sapiens
  source 1..20: mol_type = genomic DNA; note = Gene: STK35; note = Location (start to end; relative to TSS): STK35_20_50; note = Orientation (relative to transcription): sense; note = sgRNA Position: 2101873; note = Sequence Name: 56322-704_101_SL_seq_7348
ggctcactcggctggcgtcc

SEQ ID NO: 7349 - DNA, 20 bp, Homo sapiens
  source 1..20: mol_type = genomic DNA; note = Gene: STK35; note = Location (start to end; relative to TSS): STK35_53_83; note = Orientation (relative to transcription): sense; note = sgRNA Position: 2101906; note = Sequence Name: 56322-704_101_SL_seq_7349
accaggagtctccgctggcc

SEQ ID NO: 7350 - DNA, 20 bp, Homo sapiens
  source 1..20: mol_type = genomic DNA; note = Gene: STK36; note = Location (start to end; relative to TSS): STK36_27_57; note = Orientation (relative to transcription): sense; note = sgRNA Position: 218672139; note = Sequence Name: 56322-704_101_SL_seq_7350
tcccaggaagtgcccatgtg

SEQ ID NO: 7351 - DNA, 20 bp, Homo sapiens
  source 1..20: mol_type = genomic DNA; note = Gene: STK36; note = Location (start to end; relative to TSS): STK36_125_155; note = Orientation (relative to transcription): sense; note = sgRNA Position: 218672237; note = Sequence Name: 56322-704_101_SL_seq_7351
gaaagggagccgaaagagac

SEQ ID NO: 7352 - DNA, 20 bp, Homo sapiens
  source 1..20: mol_type = genomic DNA; note = Gene: STK36; note = Location (start to end; relative to TSS): STK36_37_67; note = Orientation (relative to transcription): antisense; note = sgRNA Position: 218672129; note = Sequence Name: 56322-704_101_SL_seq_7352
accacacatgggcacttcct

SEQ ID NO: 7353 - DNA, 20 bp, Homo sapiens
  source 1..20: mol_type = genomic DNA; note = Gene: STK36; note = Location (start to end; relative to TSS): STK36_109_139; note = Orientation (relative to transcription): sense; note = sgRNA Position: 218672221; note = Sequence Name: 56322-704_101_SL_seq_7353
gcgagtaaaattgtaagaaa

SEQ ID NO: 7354 - DNA, 20 bp, Homo sapiens
  source 1..20: mol_type = genomic DNA; note = Gene: STK36; note = Location (start to end; relative to TSS): STK36_48_78; note = Orientation (relative to transcription): antisense; note = sgRNA Position: 218672140; note = Sequence Name: 56322-704_101_SL_seq_7354
atggacggcggaccacacat

SEQ ID NO: 7355 - DNA, 20 bp, Homo sapiens
  source 1..20: mol_type = genomic DNA; note = Gene: STK36; note = Location (start to end; relative to TSS): STK36_108_138; note = Orientation (relative to transcription): sense; note = sgRNA Position: 218672220; note = Sequence Name: 56322-704_101_SL_seq_7355
agcgagtaaaattgtaagaa

SEQ ID NO: 7356 - DNA, 20 bp, Homo sapiens
  source 1..20: mol_type = genomic DNA; note = Gene: STK36; note = Location (start to end; relative to TSS): STK36_49_79; note = Orientation (relative to transcription): antisense; note = sgRNA Position: 218672141; note = Sequence Name: 56322-704_101_SL_seq_7356
aatggacggcggaccacaca

SEQ ID NO: 7357 - DNA, 20 bp, Homo sapiens
  source 1..20: mol_type = genomic DNA; note = Gene: STK36; note = Location (start to end; relative to TSS): STK36_94_124; note = Orientation (relative to transcription): antisense; note = sgRNA Position: 218672186; note = Sequence Name: 56322-704_101_SL_seq_7357
agaactggtgagaagttcag

SEQ ID NO: 7358 - DNA, 20 bp, Homo sapiens
  source 1..20: mol_type = genomic DNA; note = Gene: STK36; note = Location (start to end; relative to TSS): STK36_16_46; note = Orientation (relative to transcription): antisense; note = sgRNA Position: 218672108; note = Sequence Name: 56322-704_101_SL_seq_7358
ggacacatccgaactgcctc

SEQ ID NO: 7359 - DNA, 20 bp, Homo sapiens
  source 1..20: mol_type = genomic DNA; note = Gene: STK36; note = Location (start to end; relative to TSS): STK36_48_78; note = Orientation (relative to transcription): antisense; note = sgRNA Position: 218672140; note = Sequence Name: 56322-704_101_SL_seq_7359
atggacggcggaccacacat

SEQ ID NO: 7360 - DNA, 20 bp, Homo sapiens
  source 1..20: mol_type = genomic DNA; note = Gene: STK38; note = Location (start to end; relative to TSS): STK38_27_57; note = Orientation (relative to transcription): sense; note = sgRNA Position: 36547428; note = Sequence Name: 56322-704_101_SL_seq_7360
cgtctccgcggcgggggacc

SEQ ID NO: 7361 - DNA, 20 bp, Homo sapiens
  source 1..20: mol_type = genomic DNA; note = Gene: STK38; note = Location (start to end; relative to TSS): STK38_70_100; note = Orientation (relative to transcription): antisense; note = sgRNA Position: 36547405; note = Sequence Name: 56322-704_101_SL_seq_7361
cggaaaagacgcgagcgctg

SEQ ID NO: 7362 - DNA, 20 bp, Homo sapiens
  source 1..20: mol_type = genomic DNA; note = Gene: STK38; note = Location (start to end; relative to TSS): STK38_25_55; note = Orientation (relative to transcription): antisense; note = sgRNA Position: 36547450; note = Sequence Name: 56322-704_101_SL_seq_7362
gccgcggagacgggctggcg

SEQ ID NO: 7363 - DNA, 20 bp, Homo sapiens
  source 1..20: mol_type = genomic DNA; note = Gene: STK38; note = Location (start to end; relative to TSS): STK38_69_99; note = Orientation (relative to transcription): antisense; note = sgRNA Position: 36547406; note = Sequence Name: 56322-704_101_SL_seq_7363
ggaaaagacgcgagcgctga

SEQ ID NO: 7364 - DNA, 20 bp, Homo sapiens
  source 1..20: mol_type = genomic DNA; note = Gene: STK38; note = Location (start to end; relative to TSS): STK38_18_48; note = Orientation (relative to transcription): sense; note = sgRNA Position: 36547437; note = Sequence Name: 56322-704_101_SL_seq_7364
gcgccagcccgtctccgcgg

SEQ ID NO: 7365 - DNA, 20 bp, Homo sapiens
  source 1..20: mol_type = genomic DNA; note = Gene: STK38; note = Location (start to end; relative to TSS): STK38_68_98; note = Orientation (relative to transcription): antisense; note = sgRNA Position: 36547407; note = Sequence Name: 56322-704_101_SL_seq_7365
gaaaagacgcgagcgctgag

SEQ ID NO: 7366 - DNA, 20 bp, Homo sapiens
  source 1..20: mol_type = genomic DNA; note = Gene: STK38; note = Location (start to end; relative to TSS): STK38_20_50; note = Orientation (relative to transcription): sense; note = sgRNA Position: 36547435; note = Sequence Name: 56322-704_101_SL_seq_7366
gccagcccgtctccgcggcg

SEQ ID NO: 7367 - DNA, 20 bp, Homo sapiens
  source 1..20: mol_type = genomic DNA; note = Gene: STK38; note = Location (start to end; relative to TSS): STK38_62_92; note = Orientation (relative to transcription): antisense; note = sgRNA Position: 36547413; note = Sequence Name: 56322-704_101_SL_seq_7367
acgcgagcgctgaggggcca

SEQ ID NO: 7368 - DNA, 20 bp, Homo sapiens
  source 1..20: mol_type = genomic DNA; note = Gene: STK38; note = Location (start to end; relative to TSS): STK38_21_51; note = Orientation (relative to transcription): sense; note = sgRNA Position: 36547434; note = Sequence Name: 56322-704_101_SL_seq_7368
ccagcccgtctccgcggcgg

SEQ ID NO: 7369 - DNA, 20 bp, Homo sapiens
  source 1..20: mol_type = genomic DNA; note = Gene: STK38; note = Location (start to end; relative to TSS): STK38_54_84; note = Orientation (relative to transcription): antisense; note = sgRNA Position: 36547421; note = Sequence Name: 56322-704_101_SL_seq_7369
gctgaggggccaaggcagcc

SEQ ID NO: 7370 - DNA, 20 bp, Homo sapiens
  source 1..20: mol_type = genomic DNA; note = Gene: STK38L; note = Location (start to end; relative to TSS): STK38L_27_57; note = Orientation (relative to transcription): sense; note = sgRNA Position: 27244339; note = Sequence Name: 56322-704_101_SL_seq_7370
accggaggcaggtgagttcg

SEQ ID NO: 7371 - DNA, 20 bp, Homo sapiens
  source 1..20: mol_type = genomic DNA; note = Gene: STK38L; note = Location (start to end; relative to TSS): STK38L_94_124; note = Orientation (relative to transcription): sense; note = sgRNA Position: 27244406; note = Sequence Name: 56322-704_101_SL_seq_7371
actctgcgagcaggagcagg

SEQ ID NO: 7372 - DNA, 20 bp, Homo sapiens
  source 1..20: mol_type = genomic DNA; note = Gene: STK38L; note = Location (start to end; relative to TSS): STK38L_25_55; note = Orientation (relative to transcription): antisense; note = sgRNA Position: 27244317; note = Sequence Name: 56322-704_101_SL_seq_7372
cctgcctccggtcgcgcccg

SEQ ID NO: 7373 - DNA, 20 bp, Homo sapiens
  source 1..20: mol_type = genomic DNA; note = Gene: STK38L; note = Location (start to end; relative to TSS): STK38L_91_121; note = Orientation (relative to transcription): sense; note = sgRNA Position: 27244403; note = Sequence Name: 56322-704_101_SL_seq_7373
ccaactctgcgagcaggagc

SEQ ID NO: 7374 - DNA, 20 bp, Homo sapiens
  source 1..20: mol_type = genomic DNA; note = Gene: STK38L; note = Location (start to end; relative to TSS): STK38L_21_51; note = Orientation (relative to transcription): antisense; note = sgRNA Position: 27244313; note = Sequence Name: 56322-704_101_SL_seq_7374
cctccggtcgcgcccgcggc

SEQ ID NO: 7375 - DNA, 20 bp, Homo sapiens
  source 1..20: mol_type = genomic DNA; note = Gene: STK38L; note = Location (start to end; relative to TSS): STK38L_85_115; note = Orientation (relative to transcription): sense; note = sgRNA Position: 27244397; note = Sequence Name: 56322-704_101_SL_seq_7375
ccagccccaactctgcgagc

SEQ ID NO: 7376 - DNA, 20 bp, Homo sapiens
  source 1..20: mol_type = genomic DNA; note = Gene: STK38L; note = Location (start to end; relative to TSS): STK38L_46_76; note = Orientation (relative to transcription): sense; note = sgRNA Position: 27244358; note = Sequence Name: 56322-704_101_SL_seq_7376
gcggatgtagcgctcggctg

SEQ ID NO: 7377 - DNA, 20 bp, Homo sapiens
  source 1..20: mol_type = genomic DNA; note = Gene: STK38L; note = Location (start to end; relative to TSS): STK38L_80_110; note = Orientation (relative to transcription): antisense; note = sgRNA Position: 27244372; note = Sequence Name: 56322-704_101_SL_seq_7377
tggggctggcgcggcgagct

SEQ ID NO: 7378 - DNA, 20 bp, Homo sapiens
  source 1..20: mol_type = genomic DNA; note = Gene: STK38L; note = Location (start to end; relative to TSS): STK38L_47_77; note = Orientation (relative to transcription): sense; note = sgRNA Position: 27244359; note = Sequence Name: 56322-704_101_SL_seq_7378
cggatgtagcgctcggctga

SEQ ID NO: 7379 - DNA, 20 bp, Homo sapiens
  source 1..20: mol_type = genomic DNA; note = Gene: STK38L; note = Location (start to end; relative to TSS): STK38L_79_109; note = Orientation (relative to transcription): antisense; note = sgRNA Position: 27244371; note = Sequence Name: 56322-704_101_SL_seq_7379
ggggctggcgcggcgagctc

SEQ ID NO: 7380 - DNA, 20 bp, Homo sapiens
  source 1..20: mol_type = genomic DNA; note = Gene: STK39; note = Location (start to end; relative to TSS): STK39_54_84; note = Orientation (relative to transcription): sense; note = sgRNA Position: 168247517; note = Sequence Name: 56322-704_101_SL_seq_7380
gtgcgccggccgagaggtgt

SEQ ID NO: 7381 - DNA, 20 bp, Homo sapiens
  source 1..20: mol_type = genomic DNA; note = Gene: STK39; note = Location (start to end; relative to TSS): STK39_85_115; note = Orientation (relative to transcription): sense; note = sgRNA Position: 168247486; note = Sequence Name: 56322-704_101_SL_seq_7381
caaaggaagtttcaagtgga

SEQ ID NO: 7382 - DNA, 20 bp, Homo sapiens
  source 1..20: mol_type = genomic DNA; note = Gene: STK39; note = Location (start to end; relative to TSS): STK39_48_78; note = Orientation (relative to transcription): sense; note = sgRNA Position: 168247523; note = Sequence Name: 56322-704_101_SL_seq_7382
gagggcgtgcgccggccgag

SEQ ID NO: 7383 - DNA, 20 bp, Homo sapiens
  source 1..20: mol_type = genomic DNA; note = Gene: STK39; note = Location (start to end; relative to TSS): STK39_81_111; note = Orientation (relative to transcription): sense; note = sgRNA Position: 168247490; note = Sequence Name: 56322-704_101_SL_seq_7383
gaggcaaaggaagtttcaag

SEQ ID NO: 7384 - DNA, 20 bp, Homo sapiens
  source 1..20: mol_type = genomic DNA; note = Gene: STK39; note = Location (start to end; relative to TSS): STK39_40_70; note = Orientation (relative to transcription): sense; note = sgRNA Position: 168247531; note = Sequence Name: 56322-704_101_SL_seq_7384
cgggcggggagggcgtgcgc

SEQ ID NO: 7385 - DNA, 20 bp, Homo sapiens
  source 1..20: mol_type = genomic DNA; note = Gene: STK39; note = Location (start to end; relative to TSS): STK39_72_102; note = Orientation (relative to transcription): antisense; note = sgRNA Position: 168247519; note = Sequence Name: 56322-704_101_SL_seq_7385
gcctcgccgccgacacctct

SEQ ID NO: 7386 - DNA, 20 bp, Homo sapiens
  source 1..20: mol_type = genomic DNA; note = Gene: STK39; note = Location (start to end; relative to TSS): STK39_13_43; note = Orientation (relative to transcription): antisense; note = sgRNA Position: 168247578; note = Sequence Name: 56322-704_101_SL_seq_7386
cgtccccgccgaagccagct

SEQ ID NO: 7387 - DNA, 20 bp, Homo sapiens
  source 1..20: mol_type = genomic DNA; note = Gene: STK39; note = Location (start to end; relative to TSS): STK39_48_78; note = Orientation (relative to transcription): sense; note = sgRNA Position: 168247523; note = Sequence Name: 56322-704_101_SL_seq_7387
gagggcgtgcgccggccgag

SEQ ID NO: 7388 - DNA, 20 bp, Homo sapiens
  source 1..20: mol_type = genomic DNA; note = Gene: STK39; note = Location (start to end; relative to TSS): STK39_10_40; note = Orientation (relative to transcription): antisense; note = sgRNA Position: 168247581; note = Sequence Name: 56322-704_101_SL_seq_7388
ccccgccgaagccagctagg

SEQ ID NO: 7389 - DNA, 20 bp, Homo sapiens
  source 1..20: mol_type = genomic DNA; note = Gene: STK39; note = Location (start to end; relative to TSS): STK39_40_70; note = Orientation (relative to transcription): sense; note = sgRNA Position: 168247531; note = Sequence Name: 56322-704_101_SL_seq_7389
cgggcggggagggcgtgcgc

SEQ ID NO: 7390 - DNA, 20 bp, Homo sapiens
  source 1..20: mol_type = genomic DNA; note = Gene: STK4; note = Location (start to end; relative to TSS): STK4_46_76; note = Orientation (relative to transcription): sense; note = sgRNA Position: 44966584; note = Sequence Name: 56322-704_101_SL_seq_7390
ccatggagacggtacagctg

SEQ ID NO: 7391 - DNA, 20 bp, Homo sapiens
  source 1..20: mol_type = genomic DNA; note = Gene: STK4; note = Location (start to end; relative to TSS): STK4_80_110; note = Orientation (relative to transcription): antisense; note = sgRNA Position: 44966598; note = Sequence Name: 56322-704_101_SL_seq_7391
tggcccctcaccggcgcggc

SEQ ID NO: 7392 - DNA, 20 bp, Homo sapiens
  source 1..20: mol_type = genomic DNA; note = Gene: STK4; note = Location (start to end; relative to TSS): STK4_35_65; note = Orientation (relative to transcription): sense; note = sgRNA Position: 44966573; note = Sequence Name: 56322-704_101_SL_seq_7392
tgctggcagcgccatggaga

SEQ ID NO: 7393 - DNA, 20 bp, Homo sapiens
  source 1..20: mol_type = genomic DNA; note = Gene: STK4; note = Location (start to end; relative to TSS): STK4_66_96; note = Orientation (relative to transcription): sense; note = sgRNA Position: 44966604; note = Sequence Name: 56322-704_101_SL_seq_7393
aggaacccgccgcgccggtg

SEQ ID NO: 7394 - DNA, 20 bp, Homo sapiens
  source 1..20: mol_type = genomic DNA; note = Gene: STK4; note = Location (start to end; relative to TSS): STK4_29_59; note = Orientation (relative to transcription): sense; note = sgRNA Position: 44966567; note = Sequence Name: 56322-704_101_SL_seq_7394
ggcggctgctggcagcgcca

SEQ ID NO: 7395 - DNA, 20 bp, Homo sapiens
  source 1..20: mol_type = genomic DNA; note = Gene: STK4; note = Location (start to end; relative to TSS): STK4_61_91; note = Orientation (relative to transcription): sense; note = sgRNA Position: 44966599; note = Sequence Name: 56322-704_101_SL_seq_7395
agctgaggaacccgccgcgc

SEQ ID NO: 7396 - DNA, 20 bp, Homo sapiens
  source 1..20: mol_type = genomic DNA; note = Gene: STK4; note = Location (start to end; relative to TSS): STK4_18_48; note = Orientation (relative to transcription): sense; note = sgRNA Position: 44966556; note = Sequence Name: 56322-704_101_SL_seq_7396
gagcgggtctgggcggctgc

SEQ ID NO: 7397 - DNA, 20 bp, Homo sapiens
  source 1..20: mol_type = genomic DNA; note = Gene: STK4; note = Location (start to end; relative to TSS): STK4_55_85; note = Orientation (relative to transcription): antisense; note = sgRNA Position: 44966573; note = Sequence Name: 56322-704_101_SL_seq_7397
cctcagctgtaccgtctcca

SEQ ID NO: 7398 - DNA, 20 bp, Homo sapiens
  source 1..20: mol_type = genomic DNA; note = Gene: STK4; note = Location (start to end; relative to TSS): STK4_11_41; note = Orientation (relative to transcription): sense; note = sgRNA Position: 44966549; note = Sequence Name: 56322-704_101_SL_seq_7398
gagcagtgagcgggtctggg

SEQ ID NO: 7399 - DNA, 20 bp, Homo sapiens
  source 1..20: mol_type = genomic DNA; note = Gene: STK4; note = Location (start to end; relative to TSS): STK4_46_76; note = Orientation (relative to transcription): sense; note = sgRNA Position: 44966584; note = Sequence Name: 56322-704_101_SL_seq_7399
ccatggagacggtacagctg

SEQ ID NO: 7400 - DNA, 20 bp, Homo sapiens
  source 1..20: mol_type = genomic DNA; note = Gene: STK40; note = Location (start to end; relative to TSS): STK40_41_71; note = Orientation (relative to transcription): sense; note = sgRNA Position: 36385859; note = Sequence Name: 56322-704_101_SL_seq_7400
ggcggcggcggcggctcggg

SEQ ID NO: 7401 - DNA, 20 bp, Homo sapiens
  source 1..20: mol_type = genomic DNA; note = Gene: STK40; note = Location (start to end; relative to TSS): STK40_87_117; note = Orientation (relative to transcription): sense; note = sgRNA Position: 36385813; note = Sequence Name: 56322-704_101_SL_seq_7401
aggctcgcacgcctccagcc

SEQ ID NO: 7402 - DNA, 20 bp, Homo sapiens
  source 1..20: mol_type = genomic DNA; note = Gene: STK40; note = Location (start to end; relative to TSS): STK40_30_60; note = Orientation (relative to transcription): antisense; note = sgRNA Position: 36385890; note = Sequence Name: 56322-704_101_SL_seq_7402
gccgccgccgcctccctcca

SEQ ID NO: 7403 - DNA, 20 bp, Homo sapiens
  source 1..20: mol_type = genomic DNA; note = Gene: STK40; note = Location (start to end; relative to TSS): STK40_67_97; note = Orientation (relative to transcription): sense; note = sgRNA Position: 36385833; note = Sequence Name: 56322-704_101_SL_seq_7403
cgctgggaggcggcggtgag

SEQ ID NO: 7404 - DNA, 20 bp, Homo sapiens
  source 1..20: mol_type = genomic DNA; note = Gene: STK40; note = Location (start to end; relative to TSS): STK40_24_54; note = Orientation (relative to transcription): antisense; note = sgRNA Position: 36385896; note = Sequence Name: 56322-704_101_SL_seq_7404
gccgcctccctccatggctg

SEQ ID NO: 7405 - DNA, 20 bp, Homo sapiens
  source 1..20: mol_type = genomic DNA; note = Gene: STK40; note = Location (start to end; relative to TSS): STK40_60_90; note = Orientation (relative to transcription): sense; note = sgRNA Position: 36385840; note = Sequence Name: 56322-704_101_SL_seq_7405
gtggctgcgctgggaggcgg

SEQ ID NO: 7406 - DNA, 20 bp, Homo sapiens
  source 1..20: mol_type = genomic DNA; note = Gene: STK40; note = Location (start to end; relative to TSS): STK40_20_50; note = Orientation (relative to transcription): sense; note = sgRNA Position: 36385880; note = Sequence Name: 56322-704_101_SL_seq_7406
gccatggagggaggcggcgg

SEQ ID NO: 7407 - DNA, 20 bp, Homo sapiens
  source 1..20: mol_type = genomic DNA; note = Gene: STK40; note = Location (start to end; relative to TSS): STK40_57_87; note = Orientation (relative to transcription): sense; note = sgRNA Position: 36385843; note = Sequence Name: 56322-704_101_SL_seq_7407
cgggtggctgcgctgggagg

SEQ ID NO: 7408 - DNA, 20 bp, Homo sapiens
  source 1..20: mol_type = genomic DNA; note = Gene: STK40; note = Location (start to end; relative to TSS): STK40_17_47; note = Orientation (relative to transcription): sense; note = sgRNA Position: 36385883; note = Sequence Name: 56322-704_101_SL_seq_7408
gcagccatggagggaggcgg

SEQ ID NO: 7409 - DNA, 20 bp, Homo sapiens
  source 1..20: mol_type = genomic DNA; note = Gene: STK40; note = Location (start to end; relative to TSS): STK40_54_84; note = Orientation (relative to transcription): sense; note = sgRNA Position: 36385846; note = Sequence Name: 56322-704_101_SL_seq_7409
gctcgggtggctgcgctggg

SEQ ID NO: 7410 - DNA, 20 bp, Homo sapiens
  source 1..20: mol_type = genomic DNA; note = Gene: STKLD1; note = Location (start to end; relative to TSS): STKLD1_35_65; note = Orientation (relative to transcription): antisense; note = sgRNA Position: 133376407; note = Sequence Name: 56322-704_101_SL_seq_7410
cgtgggtcagtgggacccgc

SEQ ID NO: 7411 - DNA, 20 bp, Homo sapiens
  source 1..20: mol_type = genomic DNA; note = Gene: STKLD1; note = Location (start to end; relative to TSS): STKLD1_86_116; note = Orientation (relative to transcription): antisense; note = sgRNA Position: 133376458; note = Sequence Name: 56322-704_101_SL_seq_7411
tgatcagtagcgaccgcgta

SEQ ID NO: 7412 - DNA, 20 bp, Homo sapiens
  source 1..20: mol_type = genomic DNA; note = Gene: STKLD1; note = Location (start to end; relative to TSS): STKLD1_34_64; note = Orientation (relative to transcription): sense; note = sgRNA Position: 133376426; note = Sequence Name: 56322-704_101_SL_seq_7412
tcccactgacccacgcgggg

SEQ ID NO: 7413 - DNA, 20 bp, Homo sapiens
  source 1..20: mol_type = genomic DNA; note = Gene: STKLD1; note = Location (start to end; relative to TSS): STKLD1_85_115; note = Orientation (relative to transcription): antisense; note = sgRNA Position: 133376457; note = Sequence Name: 56322-704_101_SL_seq_7413
gatcagtagcgaccgcgtac

SEQ ID NO: 7414 - DNA, 20 bp, Homo sapiens
  source 1..20: mol_type = genomic DNA; note = Gene: STKLD1; note = Location (start to end; relative to TSS): STKLD1_31_61; note = Orientation (relative to transcription): sense; note = sgRNA Position: 133376423; note = Sequence Name: 56322-704_101_SL_seq_7414
gggtcccactgacccacgcg

SEQ ID NO: 7415 - DNA, 20 bp, Homo sapiens
  source 1..20: mol_type = genomic DNA; note = Gene: STKLD1; note = Location (start to end; relative to TSS): STKLD1_84_114; note = Orientation (relative to transcription): sense; note = sgRNA Position: 133376476; note = Sequence Name: 56322-704_101_SL_seq_7415
cggtcgctactgatcatgct

SEQ ID NO: 7416 - DNA, 20 bp, Homo sapiens
  source 1..20: mol_type = genomic DNA; note = Gene: STKLD1; note = Location (start to end; relative to TSS): STKLD1_30_60; note = Orientation (relative to transcription): sense; note = sgRNA Position: 133376422; note = Sequence Name: 56322-704_101_SL_seq_7416
cgggtcccactgacccacgc

SEQ ID NO: 7417 - DNA, 20 bp, Homo sapiens
  source 1..20: mol_type = genomic DNA; note = Gene: STKLD1; note = Location (start to end; relative to TSS): STKLD1_68_98; note = Orientation (relative to transcription): antisense; note = sgRNA Position: 133376440; note = Sequence Name: 56322-704_101_SL_seq_7417
tacgggcgagcgtccacccc

SEQ ID NO: 7418 - DNA, 20 bp, Homo sapiens
  source 1..20: mol_type = genomic DNA; note = Gene: STKLD1; note = Location (start to end; relative to TSS): STKLD1_29_59; note = Orientation (relative to transcription): sense; note = sgRNA Position: 133376421; note = Sequence Name: 56322-704_101_SL_seq_7418
gcgggtcccactgacccacg

SEQ ID NO: 7419 - DNA, 20 bp, Homo sapiens
  source 1..20: mol_type = genomic DNA; note = Gene: STKLD1; note = Location (start to end; relative to TSS): STKLD1_64_94; note = Orientation (relative to transcription): sense; note = sgRNA Position: 133376456; note = Sequence Name: 56322-704_101_SL_seq_7419
ggtggacgctcgcccgtacg

SEQ ID NO: 7420 - DNA, 20 bp, Homo sapiens
  source 1..20: mol_type = genomic DNA; note = Gene: STRADA; note = Location (start to end; relative to TSS): STRADA_40_70; note = Orientation (relative to transcription): sense; note = sgRNA Position: 63741735; note = Sequence Name: 56322-704_101_SL_seq_7420
tccaggaacaggtacctgcc

SEQ ID NO: 7421 - DNA, 20 bp, Homo sapiens
  source 1..20: mol_type = genomic DNA; note = Gene: STRADA; note = Location (start to end; relative to TSS): STRADA_91_121; note = Orientation (relative to transcription): antisense; note = sgRNA Position: 63741704; note = Sequence Name: 56322-704_101_SL_seq_7421
gagccaggagggactggccc

SEQ ID NO: 7422 - DNA, 20 bp, Homo sapiens
  source 1..20: mol_type = genomic DNA; note = Gene: STRADA; note = Location (start to end; relative to TSS): STRADA_43_73; note = Orientation (relative to transcription): sense; note = sgRNA Position: 63741732; note = Sequence Name: 56322-704_101_SL_seq_7422
aggaacaggtacctgcctgg

SEQ ID NO: 7423 - DNA, 20 bp, Homo sapiens
  source 1..20: mol_type = genomic DNA; note = Gene: STRADA; note = Location (start to end; relative to TSS): STRADA_79_109; note = Orientation (relative to transcription): antisense; note = sgRNA Position: 63741716; note = Sequence Name: 56322-704_101_SL_seq_7423
actggccccggcagcgtacc

SEQ ID NO: 7424 - DNA, 20 bp, Homo sapiens
  source 1..20: mol_type = genomic DNA; note = Gene: STRADA; note = Location (start to end; relative to TSS): STRADA_44_74; note = Orientation (relative to transcription): sense; note = sgRNA Position: 63741731; note = Sequence Name: 56322-704_101_SL_seq_7424
ggaacaggtacctgcctggc

SEQ ID NO: 7425 - DNA, 20 bp, Homo sapiens
  source 1..20: mol_type = genomic DNA; note = Gene: STRADA; note = Location (start to end; relative to TSS): STRADA_79_109; note = Orientation (relative to transcription): antisense; note = sgRNA Position: 63741716; note = Sequence Name: 56322-704_101_SL_seq_7425
actggccccggcagcgtacc

SEQ ID NO: 7426 - DNA, 20 bp, Homo sapiens
  source 1..20: mol_type = genomic DNA; note = Gene: STRADA; note = Location (start to end; relative to TSS): STRADA_23_53; note = Orientation (relative to transcription): sense; note = sgRNA Position: 63741752; note = Sequence Name: 56322-704_101_SL_seq_7426
cggggctgcttgctaactcc

SEQ ID NO: 7427 - DNA, 20 bp, Homo sapiens
  source 1..20: mol_type = genomic DNA; note = Gene: STRADA; note = Location (start to end; relative to TSS): STRADA_63_93; note = Orientation (relative to transcription): antisense; note = sgRNA Position: 63741732; note = Sequence Name: 56322-704_101_SL_seq_7427
taccaggcaccccgccaggc

SEQ ID NO: 7428 - DNA, 20 bp, Homo sapiens
  source 1..20: mol_type = genomic DNA; note = Gene: STRADA; note = Location (start to end; relative to TSS): STRADA_22_52; note = Orientation (relative to transcription): antisense; note = sgRNA Position: 63741773; note = Sequence Name: 56322-704_101_SL_seq_7428
gcaagcagccccgaccgtct

SEQ ID NO: 7429 - DNA, 20 bp, Homo sapiens
  source 1..20: mol_type = genomic DNA; note = Gene: STRADA; note = Location (start to end; relative to TSS): STRADA_52_82; note = Orientation (relative to transcription): sense; note = sgRNA Position: 63741723; note = Sequence Name: 56322-704_101_SL_seq_7429
tacctgcctggcggggtgcc

SEQ ID NO: 7430 - DNA, 20 bp, Homo sapiens
  source 1..20: mol_type = genomic DNA; note = Gene: STRADB; note = Location (start to end; relative to TSS): STRADB_48_78; note = Orientation (relative to transcription): antisense; note = sgRNA Position: 201451794; note = Sequence Name: 56322-704_101_SL_seq_7430
agggcggcgaggccgcgacc

SEQ ID NO: 7431 - DNA, 20 bp, Homo sapiens
  source 1..20: mol_type = genomic DNA; note = Gene: STRADB; note = Location (start to end; relative to TSS): STRADB_84_114; note = Orientation (relative to transcription): antisense; note = sgRNA Position: 201451830; note = Sequence Name: 56322-704_101_SL_seq_7431
gagcgctctaggcccgctcc

SEQ ID NO: 7432 - DNA, 20 bp, Homo sapiens
  source 1..20: mol_type = genomic DNA; note = Gene: STRADB; note = Location (start to end; relative to TSS): STRADB_47_77; note = Orientation (relative to transcription): antisense; note = sgRNA Position: 201451793; note = Sequence Name: 56322-704_101_SL_seq_7432
gggcggcgaggccgcgaccg

SEQ ID NO: 7433 - DNA, 20 bp, Homo sapiens
  source 1..20: mol_type = genomic DNA; note = Gene: STRADB; note = Location (start to end; relative to TSS): STRADB_79_109; note = Orientation (relative to transcription): antisense; note = sgRNA Position: 201451825; note = Sequence Name: 56322-704_101_SL_seq_7433
ctctaggcccgctcccggcg

SEQ ID NO: 7434 - DNA, 20 bp, Homo sapiens
  source 1..20: mol_type = genomic DNA; note = Gene: STRADB; note = Location (start to end; relative to TSS): STRADB_40_70; note = Orientation (relative to transcription): antisense; note = sgRNA Position: 201451786; note = Sequence Name: 56322-704_101_SL_seq_7434
gaggccgcgaccggggccgt

SEQ ID NO: 7435 - DNA, 20 bp, Homo sapiens
  source 1..20: mol_type = genomic DNA; note = Gene: STRADB; note = Location (start to end; relative to TSS): STRADB_77_107; note = Orientation (relative to transcription): antisense; note = sgRNA Position: 201451823; note = Sequence Name: 56322-704_101_SL_seq_7435
ctaggcccgctcccggcgcg

SEQ ID NO: 7436 - DNA, 20 bp, Homo sapiens
  source 1..20: mol_type = genomic DNA; note = Gene: STRADB; note = Location (start to end; relative to TSS): STRADB_27_57; note = Orientation (relative to transcription): sense; note = sgRNA Position: 201451793; note = Sequence Name: 56322-704_101_SL_seq_7436
caagcccacggccccggtcg

SEQ ID NO: 7437 - DNA, 20 bp, Homo sapiens
  source 1..20: mol_type = genomic DNA; note = Gene: STRADB; note = Location (start to end; relative to TSS): STRADB_68_98; note = Orientation (relative to transcription): antisense; note = sgRNA Position: 201451814; note = Sequence Name: 56322-704_101_SL_seq_7437
ctcccggcgcggggcgcggg

SEQ ID NO: 7438 - DNA, 20 bp, Homo sapiens
  source 1..20: mol_type = genomic DNA; note = Gene: STRADB; note = Location (start to end; relative to TSS): STRADB_21_51; note = Orientation (relative to transcription): sense; note = sgRNA Position: 201451787; note = Sequence Name: 56322-704_101_SL_seq_7438
gagttccaagcccacggccc

SEQ ID NO: 7439 - DNA, 20 bp, Homo sapiens
  source 1..20: mol_type = genomic DNA; note = Gene: STRADB; note = Location (start to end; relative to TSS): STRADB_67_97; note = Orientation (relative to transcription): antisense; note = sgRNA Position: 201451813; note = Sequence Name: 56322-704_101_SL_seq_7439
tcccggcgcggggcgcggga

SEQ ID NO: 7440 - DNA, 20 bp, Homo sapiens
  source 1..20: mol_type = genomic DNA; note = Gene: STYK1; note = Location (start to end; relative to TSS): STYK1_34_64; note = Orientation (relative to transcription): antisense; note = sgRNA Position: 10674014; note = Sequence Name: 56322-704_101_SL_seq_7440
atggcaccggcccagtcgga

SEQ ID NO: 7441 - DNA, 20 bp, Homo sapiens
  source 1..20: mol_type = genomic DNA; note = Gene: STYK1; note = Location (start to end; relative to TSS): STYK1_69_99; note = Orientation (relative to transcription): sense; note = sgRNA Position: 10673959; note = Sequence Name: 56322-704_101_SL_seq_7441
gagggacacggtagtgaacg

SEQ ID NO: 7442 - DNA, 20 bp, Homo sapiens
  source 1..20: mol_type = genomic DNA; note = Gene: STYK1; note = Location (start to end; relative to TSS): STYK1_33_63; note = Orientation (relative to transcription): antisense; note = sgRNA Position: 10674015; note = Sequence Name: 56322-704_101_SL_seq_7442
tggcaccggcccagtcggag

SEQ ID NO: 7443 - DNA, 20 bp, Homo sapiens
  source 1..20: mol_type = genomic DNA; note = Gene: STYK1; note = Location (start to end; relative to TSS): STYK1_68_98; note = Orientation (relative to transcription): sense; note = sgRNA Position: 10673960; note = Sequence Name: 56322-704_101_SL_seq_7443
ggagggacacggtagtgaac

SEQ ID NO: 7444 - DNA, 20 bp, Homo sapiens
  source 1..20: mol_type = genomic DNA; note = Gene: STYK1; note = Location (start to end; relative to TSS): STYK1_28_58; note = Orientation (relative to transcription): sense; note = sgRNA Position: 10674000; note = Sequence Name: 56322-704_101_SL_seq_7444
tccgactgggccggtgccat

SEQ ID NO: 7445 - DNA, 20 bp, Homo sapiens
  source 1..20: mol_type = genomic DNA; note = Gene: STYK1; note = Location (start to end; relative to TSS): STYK1_67_97; note = Orientation (relative to transcription): sense; note = sgRNA Position: 10673961; note = Sequence Name: 56322-704_101_SL_seq_7445
aggagggacacggtagtgaa

SEQ ID NO: 7446 - DNA, 20 bp, Homo sapiens
  source 1..20: mol_type = genomic DNA; note = Gene: STYK1; note = Location (start to end; relative to TSS): STYK1_20_50; note = Orientation (relative to transcription): antisense; note = sgRNA Position: 10674028; note = Sequence Name: 56322-704_101_SL_seq_7446
gtcggaggggaaataatgac

SEQ ID NO: 7447 - DNA, 20 bp, Homo sapiens
  source 1..20: mol_type = genomic DNA; note = Gene: STYK1; note = Location (start to end; relative to TSS): STYK1_63_93; note = Orientation (relative to transcription): antisense; note = sgRNA Position: 10673985; note = Sequence Name: 56322-704_101_SL_seq_7447
tgtccctcctctggtcactc

SEQ ID NO: 7448 - DNA, 20 bp, Homo sapiens
  source 1..20: mol_type = genomic DNA; note = Gene: STYK1; note = Location (start to end; relative to TSS): STYK1_19_49; note = Orientation (relative to transcription): antisense; note = sgRNA Position: 10674029; note = Sequence Name: 56322-704_101_SL_seq_7448
tcggaggggaaataatgaca

SEQ ID NO: 7449 - DNA, 20 bp, Homo sapiens
  source 1..20: mol_type = genomic DNA; note = Gene: STYK1; note = Location (start to end; relative to TSS): STYK1_53_83; note = Orientation (relative to transcription): antisense; note = sgRNA Position: 10673995; note = Sequence Name: 56322-704_101_SL_seq_7449
ctggtcactccggtttccga

SEQ ID NO: 7450 - DNA, 20 bp, Homo sapiens
  source 1..20: mol_type = genomic DNA; note = Gene: SYK; note = Location (start to end; relative to TSS): SYK_48_78; note = Orientation (relative to transcription): sense; note = sgRNA Position: 90801893; note = Sequence Name: 56322-704_101_SL_seq_7450
tcgcctcacctggcgcaggt

SEQ ID NO: 7451 - DNA, 20 bp, Homo sapiens
  source 1..20: mol_type = genomic DNA; note = Gene: SYK; note = Location (start to end; relative to TSS): SYK_91_121; note = Orientation (relative to transcription): antisense; note = sgRNA Position: 90801916; note = Sequence Name: 56322-704_101_SL_seq_7451
agaaagtcccggccgggtag

SEQ ID NO: 7452 - DNA, 20 bp, Homo sapiens
  source 1..20: mol_type = genomic DNA; note = Gene: SYK; note = Location (start to end; relative to TSS): SYK_50_80; note = Orientation (relative to transcription): antisense; note = sgRNA Position: 90801875; note = Sequence Name: 56322-704_101_SL_seq_7452
gcgccaggtgaggcgagggc

SEQ ID NO: 7453 - DNA, 20 bp, Homo sapiens
  source 1..20: mol_type = genomic DNA; note = Gene: SYK; note = Location (start to end; relative to TSS): SYK_89_119; note = Orientation (relative to transcription): sense; note = sgRNA Position: 90801934; note = Sequence Name: 56322-704_101_SL_seq_7453
ccggccgggactttctggta

SEQ ID NO: 7454 - DNA, 20 bp, Homo sapiens
  source 1..20: mol_type = genomic DNA; note = Gene: SYK; note = Location (start to end; relative to TSS): SYK_51_81; note = Orientation (relative to transcription): antisense; note = sgRNA Position: 90801876; note = Sequence Name: 56322-704_101_SL_seq_7454
tgcgccaggtgaggcgaggg

SEQ ID NO: 7455 - DNA, 20 bp, Homo sapiens
  source 1..20: mol_type = genomic DNA; note = Gene: SYK; note = Location (start to end; relative to TSS): SYK_85_115; note = Orientation (relative to transcription): antisense; note = sgRNA Position: 90801910; note = Sequence Name: 56322-704_101_SL_seq_7455
tcccggccgggtaggggacg

SEQ ID NO: 7456 - DNA, 20 bp, Homo sapiens
  source 1..20: mol_type = genomic DNA; note = Gene: SYK; note = Location (start to end; relative to TSS): SYK_44_74; note = Orientation (relative to transcription): sense; note = sgRNA Position: 90801889; note = Sequence Name: 56322-704_101_SL_seq_7456
gccctcgcctcacctggcgc

SEQ ID NO: 7457 - DNA, 20 bp, Homo sapiens
  source 1..20: mol_type = genomic DNA; note = Gene: SYK; note = Location (start to end; relative to TSS): SYK_74_104; note = Orientation (relative to transcription): sense; note = sgRNA Position: 90801919; note = Sequence Name: 56322-704_101_SL_seq_7457
ggccgcgtcccctacccggc

SEQ ID NO: 7458 - DNA, 20 bp, Homo sapiens
  source 1..20: mol_type = genomic DNA; note = Gene: SYK; note = Location (start to end; relative to TSS): SYK_38_68; note = Orientation (relative to transcription): antisense; note = sgRNA Position: 90801863; note = Sequence Name: 56322-704_101_SL_seq_7458
gcgagggcgggcgcagcgcg

SEQ ID NO: 7459 - DNA, 20 bp, Homo sapiens
  source 1..20: mol_type = genomic DNA; note = Gene: SYK; note = Location (start to end; relative to TSS): SYK_70_100; note = Orientation (relative to transcription): sense; note = sgRNA Position: 90801915; note = Sequence Name: 56322-704_101_SL_seq_7459
gtgtggccgcgtcccctacc

SEQ ID NO: 7460 - DNA, 20 bp, Homo sapiens
  source 1..20: mol_type = genomic DNA; note = Gene: TAF1; note = Location (start to end; relative to TSS): TAF1_44_74; note = Orientation (relative to transcription): sense; note = sgRNA Position: 71366427; note = Sequence Name: 56322-704_101_SL_seq_7460
aggcggcccattttctttag

SEQ ID NO: 7461 - DNA, 20 bp, Homo sapiens
  source 1..20: mol_type = genomic DNA; note = Gene: TAF1; note = Location (start to end; relative to TSS): TAF1_76_106; note = Orientation (relative to transcription): sense; note = sgRNA Position: 71366459; note = Sequence Name: 56322-704_101_SL_seq_7461
tcggcaacatcaatggagcc

SEQ ID NO: 7462 - DNA, 20 bp, Homo sapiens
  source 1..20: mol_type = genomic DNA; note = Gene: TAF1; note = Location (start to end; relative to TSS): TAF1_45_75; note = Orientation (relative to transcription): sense; note = sgRNA Position: 71366428; note = Sequence Name: 56322-704_101_SL_seq_7462
ggcggcccattttctttagc

SEQ ID NO: 7463 - DNA, 20 bp, Homo sapiens
  source 1..20: mol_type = genomic DNA; note = Gene: TAF1; note = Location (start to end; relative to TSS): TAF1_75_105; note = Orientation (relative to transcription): sense; note = sgRNA Position: 71366458; note = Sequence Name: 56322-704_101_SL_seq_7463
ttcggcaacatcaatggagc

SEQ ID NO: 7464 - DNA, 20 bp, Homo sapiens
  source 1..20: mol_type = genomic DNA; note = Gene: TAF1; note = Location (start to end; relative to TSS): TAF1_24_54; note = Orientation (relative to transcription): sense; note = sgRNA Position: 71366407; note = Sequence Name: 56322-704_101_SL_seq_7464
agcgacgaagattccgctgg

SEQ ID NO: 7465 - DNA, 20 bp, Homo sapiens
  source 1..20: mol_type = genomic DNA; note = Gene: TAF1; note = Location (start to end; relative to TSS): TAF1_69_99; note = Orientation (relative to transcription): sense; note = sgRNA Position: 71366452; note = Sequence Name: 56322-704_101_SL_seq_7465
ttccttttcggcaacatcaa

SEQ ID NO: 7466 - DNA, 20 bp, Homo sapiens
  source 1..20: mol_type = genomic DNA; note = Gene: TAF1; note = Location (start to end; relative to TSS): TAF1_27_57; note = Orientation (relative to transcription): sense; note = sgRNA Position: 71366410; note = Sequence Name: 56322-704_101_SL_seq_7466
gacgaagattccgctggagg

SEQ ID NO: 7467 - DNA, 20 bp, Homo sapiens
  source 1..20: mol_type = genomic DNA; note = Gene: TAF1; note = Location (start to end; relative to TSS): TAF1_60_90; note = Orientation (relative to transcription): antisense; note = sgRNA Position: 71366423; note = Sequence Name: 56322-704_101_SL_seq_7467
aggaaacccgctaaagaaaa

SEQ ID NO: 7468 - DNA, 20 bp, Homo sapiens
  source 1..20: mol_type = genomic DNA; note = Gene: TAF1; note = Location (start to end; relative to TSS): TAF1_21_51; note = Orientation (relative to transcription): sense; note = sgRNA Position: 71366404; note = Sequence Name: 56322-704_101_SL_seq_7468
gacagcgacgaagattccgc

SEQ ID NO: 7469 - DNA, 20 bp, Homo sapiens
  source 1..20: mol_type = genomic DNA; note = Gene: TAF1; note = Location (start to end; relative to TSS): TAF1_59_89; note = Orientation (relative to transcription): antisense; note = sgRNA Position: 71366422; note = Sequence Name: 56322-704_101_SL_seq_7469
ggaaacccgctaaagaaaat

SEQ ID NO: 7470 - DNA, 20 bp, Homo sapiens
  source 1..20: mol_type = genomic DNA; note = Gene: TAF1L; note = Location (start to end; relative to TSS): TAF1L_34_64; note = Orientation (relative to transcription): sense; note = sgRNA Position: 32635611; note = Sequence Name: 56322-704_101_SL_seq_7470
ggagctaagtagatcacttc

SEQ ID NO: 7471 - DNA, 20 bp, Homo sapiens
  source 1..20: mol_type = genomic DNA; note = Gene: TAF1L; note = Location (start to end; relative to TSS): TAF1L_90_120; note = Orientation (relative to transcription): sense; note = sgRNA Position: 32635555; note = Sequence Name: 56322-704_101_SL_seq_7471
cggctgcgatttgctgctga

SEQ ID NO: 7472 - DNA, 20 bp, Homo sapiens
  source 1..20: mol_type = genomic DNA; note = Gene: TAF1L; note = Location (start to end; relative to TSS): TAF1L_35_65; note = Orientation (relative to transcription): sense; note = sgRNA Position: 32635610; note = Sequence Name: 56322-704_101_SL_seq_7472
gagctaagtagatcacttcc

SEQ ID NO: 7473 - DNA, 20 bp, Homo sapiens
  source 1..20: mol_type = genomic DNA; note = Gene: TAF1L; note = Location (start to end; relative to TSS): TAF1L_89_119; note = Orientation (relative to transcription): sense; note = sgRNA Position: 32635556; note = Sequence Name: 56322-704_101_SL_seq_7473
ccggctgcgatttgctgctg

SEQ ID NO: 7474 - DNA, 20 bp, Homo sapiens
  source 1..20: mol_type = genomic DNA; note = Gene: TAF1L; note = Location (start to end; relative to TSS): TAF1L_20_50; note = Orientation (relative to transcription): antisense; note = sgRNA Position: 32635645; note = Sequence Name: 56322-704_101_SL_seq_7474
cttaccctaccagcgtctac

SEQ ID NO: 7475 - DNA, 20 bp, Homo sapiens
  source 1..20: mol_type = genomic DNA; note = Gene: TAF1L; note = Location (start to end; relative to TSS): TAF1L_84_114; note = Orientation (relative to transcription): antisense; note = sgRNA Position: 32635581; note = Sequence Name: 56322-704_101_SL_seq_7475
cgcagccgggtcgcataaac

SEQ ID NO: 7476 - DNA, 20 bp, Homo sapiens
  source 1..20: mol_type = genomic DNA; note = Gene: TAF1L; note = Location (start to end; relative to TSS): TAF1L_13_43; note = Orientation (relative to transcription): sense; note = sgRNA Position: 32635632; note = Sequence Name: 56322-704_101_SL_seq_7476
ggtagacgctggtagggtaa

SEQ ID NO: 7477 - DNA, 20 bp, Homo sapiens
  source 1..20: mol_type = genomic DNA; note = Gene: TAF1L; note = Location (start to end; relative to TSS): TAF1L_70_100; note = Orientation (relative to transcription): sense; note = sgRNA Position: 32635575; note = Sequence Name: 56322-704_101_SL_seq_7477
tatttccggtttatgcgacc

SEQ ID NO: 7478 - DNA, 20 bp, Homo sapiens
  source 1..20: mol_type = genomic DNA; note = Gene: TAF1L; note = Location (start to end; relative to TSS): TAF1L_12_42; note = Orientation (relative to transcription): sense; note = sgRNA Position: 32635633; note = Sequence Name: 56322-704_101_SL_seq_7478
cggtagacgctggtagggta

SEQ ID NO: 7479 - DNA, 20 bp, Homo sapiens
  source 1..20: mol_type = genomic DNA; note = Gene: TAF1L; note = Location (start to end; relative to TSS): TAF1L_62_92; note = Orientation (relative to transcription): antisense; note = sgRNA Position: 32635603; note = Sequence Name: 56322-704_101_SL_seq_7479
gaaataaaacaacagtcgcc

SEQ ID NO: 7480 - DNA, 20 bp, Homo sapiens
  source 1..20: mol_type = genomic DNA; note = Gene: TAOK1; note = Location (start to end; relative to TSS): TAOK1_39_69; note = Orientation (relative to transcription): sense; note = sgRNA Position: 29390428; note = Sequence Name: 56322-704_101_SL_seq_7480
gggtggcaaagagactgagt

SEQ ID NO: 7481 - DNA, 20 bp, Homo sapiens
  source 1..20: mol_type = genomic DNA; note = Gene: TAOK1; note = Location (start to end; relative to TSS): TAOK1_70_100; note = Orientation (relative to transcription): sense; note = sgRNA Position: 29390459; note = Sequence Name: 56322-704_101_SL_seq_7481
cctgcctgaggagagaggag

SEQ ID NO: 7482 - DNA, 20 bp, Homo sapiens
  source 1..20: mol_type = genomic DNA; note = Gene: TAOK1; note = Location (start to end; relative to TSS): TAOK1_18_48; note = Orientation (relative to transcription): sense; note = sgRNA Position: 29390407; note = Sequence Name: 56322-704_101_SL_seq_7482
gggctcggggagagagaggg

SEQ ID NO: 7483 - DNA, 20 bp, Homo sapiens
  source 1..20: mol_type = genomic DNA; note = Gene: TAOK1; note = Location (start to end; relative to TSS): TAOK1_69_99; note = Orientation (relative to transcription): sense; note = sgRNA Position: 29390458; note = Sequence Name: 56322-704_101_SL_seq_7483
gcctgcctgaggagagagga

SEQ ID NO: 7484 - DNA, 20 bp, Homo sapiens
  source 1..20: mol_type = genomic DNA; note = Gene: TAOK1; note = Location (start to end; relative to TSS): TAOK1_19_49; note = Orientation (relative to transcription): sense; note = sgRNA Position: 29390408; note = Sequence Name: 56322-704_101_SL_seq_7484
ggctcggggagagagaggga

SEQ ID NO: 7485 - DNA, 20 bp, Homo sapiens
  source 1..20: mol_type = genomic DNA; note = Gene: TAOK1; note = Location (start to end; relative to TSS): TAOK1_68_98; note = Orientation (relative to transcription): sense; note = sgRNA Position: 29390457; note = Sequence Name: 56322-704_101_SL_seq_7485
cgcctgcctgaggagagagg

SEQ ID NO: 7486 - DNA, 20 bp, Homo sapiens
  source 1..20: mol_type = genomic DNA; note = Gene: TAOK1; note = Location (start to end; relative to TSS): TAOK1_22_52; note = Orientation (relative to transcription): sense; note = sgRNA Position: 29390411; note = Sequence Name: 56322-704_101_SL_seq_7486
tcggggagagagagggaggg

SEQ ID NO: 7487 - DNA, 20 bp, Homo sapiens
  source 1..20: mol_type = genomic DNA; note = Gene: TAOK1; note = Location (start to end; relative to TSS): TAOK1_65_95; note = Orientation (relative to transcription): sense; note = sgRNA Position: 29390454; note = Sequence Name: 56322-704_101_SL_seq_7487
cgccgcctgcctgaggagag

SEQ ID NO: 7488 - DNA, 20 bp, Homo sapiens
  source 1..20: mol_type = genomic DNA; note = Gene: TAOK1; note = Location (start to end; relative to TSS): TAOK1_15_45; note = Orientation (relative to transcription): sense; note = sgRNA Position: 29390404; note = Sequence Name: 56322-704_101_SL_seq_7488
tcagggctcggggagagaga

SEQ ID NO: 7489 - DNA, 20 bp, Homo sapiens
  source 1..20: mol_type = genomic DNA; note = Gene: TAOK1; note = Location (start to end; relative to TSS): TAOK1_58_88; note = Orientation (relative to transcription): sense; note = sgRNA Position: 29390447; note = Sequence Name: 56322-704_101_SL_seq_7489
tcggtgccgccgcctgcctg

SEQ ID NO: 7490 - DNA, 20 bp, Homo sapiens
  source 1..20: mol_type = genomic DNA; note = Gene: TAOK2; note = Location (start to end; relative to TSS): TAOK2_21_51; note = Orientation (relative to transcription): sense; note = sgRNA Position: 29973915; note = Sequence Name: 56322-704_101_SL_seq_7490
agggagaccgggacgagacc

SEQ ID NO: 7491 - DNA, 20 bp, Homo sapiens
  source 1..20: mol_type = genomic DNA; note = Gene: TAOK2; note = Location (start to end; relative to TSS): TAOK2_62_92; note = Orientation (relative to transcription): sense; note = sgRNA Position: 29973956; note = Sequence Name: 56322-704_101_SL_seq_7491
gctgagacggagaagaggag

SEQ ID NO: 7492 - DNA, 20 bp, Homo sapiens
  source 1..20: mol_type = genomic DNA; note = Gene: TAOK2; note = Location (start to end; relative to TSS): TAOK2_22_52; note = Orientation (relative to transcription): sense; note = sgRNA Position: 29973916; note = Sequence Name: 56322-704_101_SL_seq_7492
gggagaccgggacgagaccg

SEQ ID NO: 7493 - DNA, 20 bp, Homo sapiens
  source 1..20: mol_type = genomic DNA; note = Gene: TAOK2; note = Location (start to end; relative to TSS): TAOK2_57_87; note = Orientation (relative to transcription): sense; note = sgRNA Position: 29973951; note = Sequence Name: 56322-704_101_SL_seq_7493
gagaggctgagacggagaag

SEQ ID NO: 7494 - DNA, 20 bp, Homo sapiens
  source 1..20: mol_type = genomic DNA; note = Gene: TAOK2; note = Location (start to end; relative to TSS): TAOK2_20_50; note = Orientation (relative to transcription): sense; note = sgRNA Position: 29973914; note = Sequence Name: 56322-704_101_SL_seq_7494
gagggagaccgggacgagac

SEQ ID NO: 7495 - DNA, 20 bp, Homo sapiens
  source 1..20: mol_type = genomic DNA; note = Gene: TAOK2; note = Location (start to end; relative to TSS): TAOK2_57_87; note = Orientation (relative to transcription): sense; note = sgRNA Position: 29973951; note = Sequence Name: 56322-704_101_SL_seq_7495
gagaggctgagacggagaag

SEQ ID NO: 7496 - DNA, 20 bp, Homo sapiens
  source 1..20: mol_type = genomic DNA; note = Gene: TAOK2; note = Location (start to end; relative to TSS): TAOK2_10_40; note = Orientation (relative to transcription): sense; note = sgRNA Position: 29973904; note = Sequence Name: 56322-704_101_SL_seq_7496
ggaagagggagagggagacc

SEQ ID NO: 7497 - DNA, 20 bp, Homo sapiens
  source 1..20: mol_type = genomic DNA; note = Gene: TAOK2; note = Location (start to end; relative to TSS): TAOK2_48_78; note = Orientation (relative to transcription): antisense; note = sgRNA Position: 29973922; note = Sequence Name: 56322-704_101_SL_seq_7497
ctctctccgcaccacagccc

SEQ ID NO: 7498 - DNA, 20 bp, Homo sapiens
  source 1..20: mol_type = genomic DNA; note = Gene: TAOK2; note = Location (start to end; relative to TSS): TAOK2_9_39; note = Orientation (relative to transcription): sense; note = sgRNA Position: 29973903; note = Sequence Name: 56322-704_101_SL_seq_7498
aggaagagggagagggagac

SEQ ID NO: 7499 - DNA, 20 bp, Homo sapiens
  source 1..20: mol_type = genomic DNA; note = Gene: TAOK2; note = Location (start to end; relative to TSS): TAOK2_40_70; note = Orientation (relative to transcription): sense; note = sgRNA Position: 29973934; note = Sequence Name: 56322-704_101_SL_seq_7499
cggggctgtggtgcggagag

SEQ ID NO: 7500 - DNA, 20 bp, Homo sapiens
  source 1..20: mol_type = genomic DNA; note = Gene: TAOK3; note = Location (start to end; relative to TSS): TAOK3_30_60; note = Orientation (relative to transcription): sense; note = sgRNA Position: 118372853; note = Sequence Name: 56322-704_101_SL_seq_7500
cgggagggtccttgtggcgc

SEQ ID NO: 7501 - DNA, 20 bp, Homo sapiens
  source 1..20: mol_type = genomic DNA; note = Gene: TAOK3; note = Location (start to end; relative to TSS): TAOK3_103_133; note = Orientation (relative to transcription): antisense; note = sgRNA Position: 118372800; note = Sequence Name: 56322-704_101_SL_seq_7501
ctgtgcgcagcctctgctcg

SEQ ID NO: 7502 - DNA, 20 bp, Homo sapiens
  source 1..20: mol_type = genomic DNA; note = Gene: TAOK3; note = Location (start to end; relative to TSS): TAOK3_31_61; note = Orientation (relative to transcription): sense; note = sgRNA Position: 118372852; note = Sequence Name: 56322-704_101_SL_seq_7502
gggagggtccttgtggcgcc

SEQ ID NO: 7503 - DNA, 20 bp, Homo sapiens
  source 1..20: mol_type = genomic DNA; note = Gene: TAOK3; note = Location (start to end; relative to TSS): TAOK3_97_127; note = Orientation (relative to transcription): antisense; note = sgRNA Position: 118372806; note = Sequence Name: 56322-704_101_SL_seq_7503
gcagcctctgctcgcggtct

SEQ ID NO: 7504 - DNA, 20 bp, Homo sapiens
  source 1..20: mol_type = genomic DNA; note = Gene: TAOK3; note = Location (start to end; relative to TSS): TAOK3_34_64; note = Orientation (relative to transcription): sense; note = sgRNA Position: 118372849; note = Sequence Name: 56322-704_101_SL_seq_7504
agggtccttgtggcgccggg

SEQ ID NO: 7505 - DNA, 20 bp, Homo sapiens
  source 1..20: mol_type = genomic DNA; note = Gene: TAOK3; note = Location (start to end; relative to TSS): TAOK3_84_114; note = Orientation (relative to transcription): sense; note = sgRNA Position: 118372799; note = Sequence Name: 56322-704_101_SL_seq_7505
aacgccgagaccgcgagcag

SEQ ID NO: 7506 - DNA, 20 bp, Homo sapiens
  source 1..20: mol_type = genomic DNA; note = Gene: TAOK3; note = Location (start to end; relative to TSS): TAOK3_36_66; note = Orientation (relative to transcription): antisense; note = sgRNA Position: 118372867; note = Sequence Name: 56322-704_101_SL_seq_7506
gcgccacaaggaccctcccg

SEQ ID NO: 7507 - DNA, 20 bp, Homo sapiens
  source 1..20: mol_type = genomic DNA; note = Gene: TAOK3; note = Location (start to end; relative to TSS): TAOK3_72_102; note = Orientation (relative to transcription): antisense; note = sgRNA Position: 118372831; note = Sequence Name: 56322-704_101_SL_seq_7507
ttgcgtcccactctccacgc

SEQ ID NO: 7508 - DNA, 20 bp, Homo sapiens
  source 1..20: mol_type = genomic DNA; note = Gene: TAOK3; note = Location (start to end; relative to TSS): TAOK3_24_54; note = Orientation (relative to transcription): sense; note = sgRNA Position: 118372859; note = Sequence Name: 56322-704_101_SL_seq_7508
cggccgcgggagggtccttg

SEQ ID NO: 7509 - DNA, 20 bp, Homo sapiens
  source 1..20: mol_type = genomic DNA; note = Gene: TAOK3; note = Location (start to end; relative to TSS): TAOK3_56_86; note = Orientation (relative to transcription): sense; note = sgRNA Position: 118372827; note = Sequence Name: 56322-704_101_SL_seq_7509
gcggggtcctgcgtggagag

SEQ ID NO: 7510 - DNA, 20 bp, Homo sapiens
  source 1..20: mol_type = genomic DNA; note = Gene: TBCK; note = Location (start to end; relative to TSS): TBCK_49_79; note = Orientation (relative to transcription): sense; note = sgRNA Position: 106316136; note = Sequence Name: 56322-704_101_SL_seq_7510
ggttccgcgaaggttaacct

SEQ ID NO: 7511 - DNA, 20 bp, Homo sapiens
  source 1..20: mol_type = genomic DNA; note = Gene: TBCK; note = Location (start to end; relative to TSS): TBCK_91_121; note = Orientation (relative to transcription): sense; note = sgRNA Position: 106316094; note = Sequence Name: 56322-704_101_SL_seq_7511
aagggcagcgtctgagctcc

SEQ ID NO: 7512 - DNA, 20 bp, Homo sapiens
  source 1..20: mol_type = genomic DNA; note = Gene: TBCK; note = Location (start to end; relative to TSS): TBCK_39_69; note = Orientation (relative to transcription): sense; note = sgRNA Position: 106316146; note = Sequence Name: 56322-704_101_SL_seq_7512
ctcctcgccgggttccgcga

SEQ ID NO: 7513 - DNA, 20 bp, Homo sapiens
  source 1..20: mol_type = genomic DNA; note = Gene: TBCK; note = Location (start to end; relative to TSS): TBCK_73_103; note = Orientation (relative to transcription): sense; note = sgRNA Position: 106316112; note = Sequence Name: 56322-704_101_SL_seq_7513
tgacttggctcgcgagcaaa

SEQ ID NO: 7514 - DNA, 20 bp, Homo sapiens
  source 1..20: mol_type = genomic DNA; note = Gene: TBCK; note = Location (start to end; relative to TSS): TBCK_37_67; note = Orientation (relative to transcription): antisense; note = sgRNA Position: 106316168; note = Sequence Name: 56322-704_101_SL_seq_7514
cccggcgaggagcgcaagcc

SEQ ID NO: 7515 - DNA, 20 bp, Homo sapiens
  source 1..20: mol_type = genomic DNA; note = Gene: TBCK; note = Location (start to end; relative to TSS): TBCK_72_102; note = Orientation (relative to transcription): sense; note = sgRNA Position: 106316113; note = Sequence Name: 56322-704_101_SL_seq_7515
ctgacttggctcgcgagcaa

SEQ ID NO: 7516 - DNA, 20 bp, Homo sapiens
  source 1..20: mol_type = genomic DNA; note = Gene: TBCK; note = Location (start to end; relative to TSS): TBCK_28_58; note = Orientation (relative to transcription): sense; note = sgRNA Position: 106316157; note = Sequence Name: 56322-704_101_SL_seq_7516
ccaggcttgcgctcctcgcc

SEQ ID NO: 7517 - DNA, 20 bp, Homo sapiens
  source 1..20: mol_type = genomic DNA; note = Gene: TBCK; note = Location (start to end; relative to TSS): TBCK_62_92; note = Orientation (relative to transcription): antisense; note = sgRNA Position: 106316143; note = Sequence Name: 56322-704_101_SL_seq_7517
tcagccaaggttaaccttcg

SEQ ID NO: 7518 - DNA, 20 bp, Homo sapiens
  source 1..20: mol_type = genomic DNA; note = Gene: TBCK; note = Location (start to end; relative to TSS): TBCK_27_57; note = Orientation (relative to transcription): sense; note = sgRNA Position: 106316158; note = Sequence Name: 56322-704_101_SL_seq_7518
gccaggcttgcgctcctcgc

SEQ ID NO: 7519 - DNA, 20 bp, Homo sapiens
  source 1..20: mol_type = genomic DNA; note = Gene: TBCK; note = Location (start to end; relative to TSS): TBCK_58_88; note = Orientation (relative to transcription): sense; note = sgRNA Position: 106316127; note = Sequence Name: 56322-704_101_SL_seq_7519
aaggttaaccttggctgact

SEQ ID NO: 7520 - DNA, 20 bp, Homo sapiens
  source 1..20: mol_type = genomic DNA; note = Gene: TBK1; note = Location (start to end; relative to TSS): TBK1_37_67; note = Orientation (relative to transcription): sense; note = sgRNA Position: 64452183; note = Sequence Name: 56322-704_101_SL_seq_7520
ggcgcggcggagacccggct

SEQ ID NO: 7521 - DNA, 20 bp, Homo sapiens
  source 1..20: mol_type = genomic DNA; note = Gene: TBK1; note = Location (start to end; relative to TSS): TBK1_73_103; note = Orientation (relative to transcription): sense; note = sgRNA Position: 64452219; note = Sequence Name: 56322-704_101_SL_seq_7521
cgcgggctgaggggccaagg

SEQ ID NO: 7522 - DNA, 20 bp, Homo sapiens
  source 1..20: mol_type = genomic DNA; note = Gene: TBK1; note = Location (start to end; relative to TSS): TBK1_38_68; note = Orientation (relative to transcription): antisense; note = sgRNA Position: 64452164; note = Sequence Name: 56322-704_101_SL_seq_7522
ggtctccgccgcgccaccgc

SEQ ID NO: 7523 - DNA, 20 bp, Homo sapiens
  source 1..20: mol_type = genomic DNA; note = Gene: TBK1; note = Location (start to end; relative to TSS): TBK1_70_100; note = Orientation (relative to transcription): sense; note = sgRNA Position: 64452216; note = Sequence Name: 56322-704_101_SL_seq_7523
ggccgcgggctgaggggcca

SEQ ID NO: 7524 - DNA, 20 bp, Homo sapiens
  source 1..20: mol_type = genomic DNA; note = Gene: TBK1; note = Location (start to end; relative to TSS): TBK1_25_55; note = Orientation (relative to transcription): antisense; note = sgRNA Position: 64452151; note = Sequence Name: 56322-704_101_SL_seq_7524
ccaccgccggcgggctcccg

SEQ ID NO: 7525 - DNA, 20 bp, Homo sapiens
  source 1..20: mol_type = genomic DNA; note = Gene: TBK1; note = Location (start to end; relative to TSS): TBK1_59_89; note = Orientation (relative to transcription): antisense; note = sgRNA Position: 64452185; note = Sequence Name: 56322-704_101_SL_seq_7525
gccgtctcacttacccagcc

SEQ ID NO: 7526 - DNA, 20 bp, Homo sapiens
  source 1..20: mol_type = genomic DNA; note = Gene: TBK1; note = Location (start to end; relative to TSS): TBK1_21_51; note = Orientation (relative to transcription): sense; note = sgRNA Position: 64452167; note = Sequence Name: 56322-704_101_SL_seq_7526
ggagcccgccggcggtggcg

SEQ ID NO: 7527 - DNA, 20 bp, Homo sapiens
  source 1..20: mol_type = genomic DNA; note = Gene: TBK1; note = Location (start to end; relative to TSS): TBK1_56_86; note = Orientation (relative to transcription): sense; note = sgRNA Position: 64452202; note = Sequence Name: 56322-704_101_SL_seq_7527
tgggtaagtgagacggccgc

SEQ ID NO: 7528 - DNA, 20 bp, Homo sapiens
  source 1..20: mol_type = genomic DNA; note = Gene: TBK1; note = Location (start to end; relative to TSS): TBK1_24_54; note = Orientation (relative to transcription): sense; note = sgRNA Position: 64452170; note = Sequence Name: 56322-704_101_SL_seq_7528
gcccgccggcggtggcgcgg

SEQ ID NO: 7529 - DNA, 20 bp, Homo sapiens
  source 1..20: mol_type = genomic DNA; note = Gene: TBK1; note = Location (start to end; relative to TSS): TBK1_55_85; note = Orientation (relative to transcription): sense; note = sgRNA Position: 64452201; note = Sequence Name: 56322-704_101_SL_seq_7529
ctgggtaagtgagacggccg

SEQ ID NO: 7530 - DNA, 20 bp, Homo sapiens
  source 1..20: mol_type = genomic DNA; note = Gene: TEC; note = Location (start to end; relative to TSS): TEC_54_84; note = Orientation (relative to transcription): antisense; note = sgRNA Position: 48269780; note = Sequence Name: 56322-704_101_SL_seq_7530
gcggctgctgggcggacctg

SEQ ID NO: 7531 - DNA, 20 bp, Homo sapiens
  source 1..20: mol_type = genomic DNA; note = Gene: TEC; note = Location (start to end; relative to TSS): TEC_97_127; note = Orientation (relative to transcription): antisense; note = sgRNA Position: 48269737; note = Sequence Name: 56322-704_101_SL_seq_7531
gggccgccccagcccgcccg

SEQ ID NO: 7532 - DNA, 20 bp, Homo sapiens
  source 1..20: mol_type = genomic DNA; note = Gene: TEC; note = Location (start to end; relative to TSS): TEC_43_73; note = Orientation (relative to transcription): antisense; note = sgRNA Position: 48269791; note = Sequence Name: 56322-704_101_SL_seq_7532
gcggacctggggagactgcg

SEQ ID NO: 7533 - DNA, 20 bp, Homo sapiens
  source 1..20: mol_type = genomic DNA; note = Gene: TEC; note = Location (start to end; relative to TSS): TEC_73_103; note = Orientation (relative to transcription): antisense; note = sgRNA Position: 48269761; note = Sequence Name: 56322-704_101_SL_seq_7533
gcccttacctggctgaagcg

SEQ ID NO: 7534 - DNA, 20 bp, Homo sapiens
  source 1..20: mol_type = genomic DNA; note = Gene: TEC; note = Location (start to end; relative to TSS): TEC_29_59; note = Orientation (relative to transcription): sense; note = sgRNA Position: 48269785; note = Sequence Name: 56322-704_101_SL_seq_7534
ctgcacctcgcagtctcccc

SEQ ID NO: 7535 - DNA, 20 bp, Homo sapiens
  source 1..20: mol_type = genomic DNA; note = Gene: TEC; note = Location (start to end; relative to TSS): TEC_62_92; note = Orientation (relative to transcription): antisense; note = sgRNA Position: 48269772; note = Sequence Name: 56322-704_101_SL_seq_7535
gctgaagcgcggctgctggg

SEQ ID NO: 7536 - DNA, 20 bp, Homo sapiens
  source 1..20: mol_type = genomic DNA; note = Gene: TEC; note = Location (start to end; relative to TSS): TEC_26_56; note = Orientation (relative to transcription): antisense; note = sgRNA Position: 48269808; note = Sequence Name: 56322-704_101_SL_seq_7536
gcgaggtgcagtctgcgccg

SEQ ID NO: 7537 - DNA, 20 bp, Homo sapiens
  source 1..20: mol_type = genomic DNA; note = Gene: TEC; note = Location (start to end; relative to TSS): TEC_57_87; note = Orientation (relative to transcription): sense; note = sgRNA Position: 48269757; note = Sequence Name: 56322-704_101_SL_seq_7537
ccagcagccgcgcttcagcc

SEQ ID NO: 7538 - DNA, 20 bp, Homo sapiens
  source 1..20: mol_type = genomic DNA; note = Gene: TEC; note = Location (start to end; relative to TSS): TEC_19_49; note = Orientation (relative to transcription): antisense; note = sgRNA Position: 48269815; note = Sequence Name: 56322-704_101_SL_seq_7538
gcagtctgcgccgcggagtc

SEQ ID NO: 7539 - DNA, 20 bp, Homo sapiens
  source 1..20: mol_type = genomic DNA; note = Gene: TEC; note = Location (start to end; relative to TSS): TEC_54_84; note = Orientation (relative to transcription): antisense; note = sgRNA Position: 48269780; note = Sequence Name: 56322-704_101_SL_seq_7539
gcggctgctgggcggacctg

SEQ ID NO: 7540 - DNA, 20 bp, Homo sapiens
  source 1..20: mol_type = genomic DNA; note = Gene: TEK; note = Location (start to end; relative to TSS): TEK_46_76; note = Orientation (relative to transcription): sense; note = sgRNA Position: 27109297; note = Sequence Name: 56322-704_101_SL_seq_7540
tgttttgatgaattgcgaga

SEQ ID NO: 7541 - DNA, 20 bp, Homo sapiens
  source 1..20: mol_type = genomic DNA; note = Gene: TEK; note = Location (start to end; relative to TSS): TEK_94_124; note = Orientation (relative to transcription): antisense; note = sgRNA Position: 27109325; note = Sequence Name: 56322-704_101_SL_seq_7541
catttggtatcagcagggct

SEQ ID NO: 7542 - DNA, 20 bp, Homo sapiens
  source 1..20: mol_type = genomic DNA; note = Gene: TEK; note = Location (start to end; relative to TSS): TEK_51_81; note = Orientation (relative to transcription): sense; note = sgRNA Position: 27109302; note = Sequence Name: 56322-704_101_SL_seq_7542
tgatgaattgcgagatggat

SEQ ID NO: 7543 - DNA, 20 bp, Homo sapiens
  source 1..20: mol_type = genomic DNA; note = Gene: TEK; note = Location (start to end; relative to TSS): TEK_93_123; note = Orientation (relative to transcription): antisense; note = sgRNA Position: 27109324; note = Sequence Name: 56322-704_101_SL_seq_7543
atttggtatcagcagggctg

SEQ ID NO: 7544 - DNA, 20 bp, Homo sapiens
  source 1..20: mol_type = genomic DNA; note = Gene: TEK; note = Location (start to end; relative to TSS): TEK_52_82; note = Orientation (relative to transcription): sense; note = sgRNA Position: 27109303; note = Sequence Name: 56322-704_101_SL_seq_7544
gatgaattgcgagatggata

SEQ ID NO: 7545 - DNA, 20 bp, Homo sapiens
  source 1..20: mol_type = genomic DNA; note = Gene: TEK; note = Location (start to end; relative to TSS): TEK_92_122; note = Orientation (relative to transcription): antisense; note = sgRNA Position: 27109323; note = Sequence Name: 56322-704_101_SL_seq_7545
tttggtatcagcagggctgg

SEQ ID NO: 7546 - DNA, 20 bp, Homo sapiens
  source 1..20: mol_type = genomic DNA; note = Gene: TEK; note = Location (start to end; relative to TSS): TEK_5_35; note = Orientation (relative to transcription): antisense; note = sgRNA Position: 27109236; note = Sequence Name: 56322-704_101_SL_seq_7546
tgcttttgctgctgctgtag

SEQ ID NO: 7547 - DNA, 20 bp, Homo sapiens
  source 1..20: mol_type = genomic DNA; note = Gene: TEK; note = Location (start to end; relative to TSS): TEK_51_81; note = Orientation (relative to transcription): sense; note = sgRNA Position: 27109302; note = Sequence Name: 56322-704_101_SL_seq_7547
tgatgaattgcgagatggat

SEQ ID NO: 7548 - DNA, 20 bp, Homo sapiens
  source 1..20: mol_type = genomic DNA; note = Gene: TEK; note = Location (start to end; relative to TSS): TEK_-1_29; note = Orientation (relative to transcription): antisense; note = sgRNA Position: 27109230; note = Sequence Name: 56322-704_101_SL_seq_7548
tgctgctgctgtaggggcag

SEQ ID NO: 7549 - DNA, 20 bp, Homo sapiens
  source 1..20: mol_type = genomic DNA; note = Gene: TEK; note = Location (start to end; relative to TSS): TEK_46_76; note = Orientation (relative to transcription): sense; note = sgRNA Position: 27109297; note = Sequence Name: 56322-704_101_SL_seq_7549
tgttttgatgaattgcgaga

SEQ ID NO: 7550 - DNA, 20 bp, Homo sapiens
  source 1..20: mol_type = genomic DNA; note = Gene: TESK1; note = Location (start to end; relative to TSS): TESK1_57_87; note = Orientation (relative to transcription): antisense; note = sgRNA Position: 35605325; note = Sequence Name: 56322-704_101_SL_seq_7550
gcgggctggcttgccgcggg

SEQ ID NO: 7551 - DNA, 20 bp, Homo sapiens
  source 1..20: mol_type = genomic DNA; note = Gene: TESK1; note = Location (start to end; relative to TSS): TESK1_92_122; note = Orientation (relative to transcription): sense; note = sgRNA Position: 35605380; note = Sequence Name: 56322-704_101_SL_seq_7551
ccaccgtcaccgccaccgcc

SEQ ID NO: 7552 - DNA, 20 bp, Homo sapiens
  source 1..20: mol_type = genomic DNA; note = Gene: TESK1; note = Location (start to end; relative to TSS): TESK1_51_81; note = Orientation (relative to transcription): sense; note = sgRNA Position: 35605339; note = Sequence Name: 56322-704_101_SL_seq_7552
cccgcggcaagccagcccgc

SEQ ID NO: 7553 - DNA, 20 bp, Homo sapiens
  source 1..20: mol_type = genomic DNA; note = Gene: TESK1; note = Location (start to end; relative to TSS): TESK1_85_115; note = Orientation (relative to transcription): antisense; note = sgRNA Position: 35605353; note = Sequence Name: 56322-704_101_SL_seq_7553
acggtggcggcagcgctccg

SEQ ID NO: 7554 - DNA, 20 bp, Homo sapiens
  source 1..20: mol_type = genomic DNA; note = Gene: TESK1; note = Location (start to end; relative to TSS): TESK1_35_65; note = Orientation (relative to transcription): sense; note = sgRNA Position: 35605323; note = Sequence Name: 56322-704_101_SL_seq_7554
cgcccgcccgcctccgcccg

SEQ ID NO: 7555 - DNA, 20 bp, Homo sapiens
  source 1..20: mol_type = genomic DNA; note = Gene: TESK1; note = Location (start to end; relative to TSS): TESK1_76_106; note = Orientation (relative to transcription): antisense; note = sgRNA Position: 35605344; note = Sequence Name: 56322-704_101_SL_seq_7555
gcagcgctccggggcgccgg

SEQ ID NO: 7556 - DNA, 20 bp, Homo sapiens
  source 1..20: mol_type = genomic DNA; note = Gene: TESK1; note = Location (start to end; relative to TSS): TESK1_12_42; note = Orientation (relative to transcription): antisense; note = sgRNA Position: 35605280; note = Sequence Name: 56322-704_101_SL_seq_7556
cggctgctccgcttagccgc

SEQ ID NO: 7557 - DNA, 20 bp, Homo sapiens
  source 1..20: mol_type = genomic DNA; note = Gene: TESK1; note = Location (start to end; relative to TSS): TESK1_57_87; note = Orientation (relative to transcription): antisense; note = sgRNA Position: 35605325; note = Sequence Name: 56322-704_101_SL_seq_7557
gcgggctggcttgccgcggg

SEQ ID NO: 7558 - DNA, 20 bp, Homo sapiens
  source 1..20: mol_type = genomic DNA; note = Gene: TESK1; note = Location (start to end; relative to TSS): TESK1_10_40; note = Orientation (relative to transcription): antisense; note = sgRNA Position: 35605278; note = Sequence Name: 56322-704_101_SL_seq_7558
gctgctccgcttagccgccg

SEQ ID NO: 7559 - DNA, 20 bp, Homo sapiens
  source 1..20: mol_type = genomic DNA; note = Gene: TESK1; note = Location (start to end; relative to TSS): TESK1_51_81; note = Orientation (relative to transcription): sense; note = sgRNA Position: 35605339; note = Sequence Name: 56322-704_101_SL_seq_7559
cccgcggcaagccagcccgc

SEQ ID NO: 7560 - DNA, 20 bp, Homo sapiens
  source 1..20: mol_type = genomic DNA; note = Gene: TESK2; note = Location (start to end; relative to TSS): TESK2_41_71; note = Orientation (relative to transcription): sense; note = sgRNA Position: 45491098; note = Sequence Name: 56322-704_101_SL_seq_7560
cgctggtcggatcgtcctcc

SEQ ID NO: 7561 - DNA, 20 bp, Homo sapiens
  source 1..20: mol_type = genomic DNA; note = Gene: TESK2; note = Location (start to end; relative to TSS): TESK2_74_104; note = Orientation (relative to transcription): antisense; note = sgRNA Position: 45491085; note = Sequence Name: 56322-704_101_SL_seq_7561
gctccccccgcctgtttggc

SEQ ID NO: 7562 - DNA, 20 bp, Homo sapiens
  source 1..20: mol_type = genomic DNA; note = Gene: TESK2; note = Location (start to end; relative to TSS): TESK2_39_69; note = Orientation (relative to transcription): antisense; note = sgRNA Position: 45491120; note = Sequence Name: 56322-704_101_SL_seq_7562
atccgaccagcgaagccaac

SEQ ID NO: 7563 - DNA, 20 bp, Homo sapiens
  source 1..20: mol_type = genomic DNA; note = Gene: TESK2; note = Location (start to end; relative to TSS): TESK2_73_103; note = Orientation (relative to transcription): antisense; note = sgRNA Position: 45491086; note = Sequence Name: 56322-704_101_SL_seq_7563
ctccccccgcctgtttggcg

SEQ ID NO: 7564 - DNA, 20 bp, Homo sapiens
  source 1..20: mol_type = genomic DNA; note = Gene: TESK2; note = Location (start to end; relative to TSS): TESK2_38_68; note = Orientation (relative to transcription): antisense; note = sgRNA Position: 45491121; note = Sequence Name: 56322-704_101_SL_seq_7564
tccgaccagcgaagccaaca

SEQ ID NO: 7565 - DNA, 20 bp, Homo sapiens
  source 1..20: mol_type = genomic DNA; note = Gene: TESK2; note = Location (start to end; relative to TSS): TESK2_68_98; note = Orientation (relative to transcription): antisense; note = sgRNA Position: 45491091; note = Sequence Name: 56322-704_101_SL_seq_7565
cccgcctgtttggcggggcc

SEQ ID NO: 7566 - DNA, 20 bp, Homo sapiens
  source 1..20: mol_type = genomic DNA; note = Gene: TESK2; note = Location (start to end; relative to TSS): TESK2_31_61; note = Orientation (relative to transcription): antisense; note = sgRNA Position: 45491128; note = Sequence Name: 56322-704_101_SL_seq_7566
agcgaagccaacagggcagc

SEQ ID NO: 7567 - DNA, 20 bp, Homo sapiens
  source 1..20: mol_type = genomic DNA; note = Gene: TESK2; note = Location (start to end; relative to TSS): TESK2_61_91; note = Orientation (relative to transcription): sense; note = sgRNA Position: 45491078; note = Sequence Name: 56322-704_101_SL_seq_7567
tggccccgccaaacaggcgg

SEQ ID NO: 7568 - DNA, 20 bp, Homo sapiens
  source 1..20: mol_type = genomic DNA; note = Gene: TESK2; note = Location (start to end; relative to TSS): TESK2_28_58; note = Orientation (relative to transcription): sense; note = sgRNA Position: 45491111; note = Sequence Name: 56322-704_101_SL_seq_7568
gccctgttggcttcgctggt

SEQ ID NO: 7569 - DNA, 20 bp, Homo sapiens
  source 1..20: mol_type = genomic DNA; note = Gene: TESK2; note = Location (start to end; relative to TSS): TESK2_58_88; note = Orientation (relative to transcription): sense; note = sgRNA Position: 45491081; note = Sequence Name: 56322-704_101_SL_seq_7569
tcctggccccgccaaacagg

SEQ ID NO: 7570 - DNA, 20 bp, Homo sapiens
  source 1..20: mol_type = genomic DNA; note = Gene: TEX14; note = Location (start to end; relative to TSS): TEX14_39_69; note = Orientation (relative to transcription): antisense; note = sgRNA Position: 58692002; note = Sequence Name: 56322-704_101_SL_seq_7570
tctcagtaacctccatgctc

SEQ ID NO: 7571 - DNA, 20 bp, Homo sapiens
  source 1..20: mol_type = genomic DNA; note = Gene: TEX14; note = Location (start to end; relative to TSS): TEX14_109_139; note = Orientation (relative to transcription): sense; note = sgRNA Position: 58691912; note = Sequence Name: 56322-704_101_SL_seq_7571
aatgtccccattagtgtgtc

SEQ ID NO: 7572 - DNA, 20 bp, Homo sapiens
  source 1..20: mol_type = genomic DNA; note = Gene: TEX14; note = Location (start to end; relative to TSS): TEX14_26_56; note = Orientation (relative to transcription): antisense; note = sgRNA Position: 58692015; note = Sequence Name: 56322-704_101_SL_seq_7572
catgctcgggatacgactcc

SEQ ID NO: 7573 - DNA, 20 bp, Homo sapiens
  source 1..20: mol_type = genomic DNA; note = Gene: TEX14; note = Location (start to end; relative to TSS): TEX14_83_113; note = Orientation (relative to transcription): antisense; note = sgRNA Position: 58691958; note = Sequence Name: 56322-704_101_SL_seq_7573
ttccagctactgcttaagct

SEQ ID NO: 7574 - DNA, 20 bp, Homo sapiens
  source 1..20: mol_type = genomic DNA; note = Gene: TEX14; note = Location (start to end; relative to TSS): TEX14_25_55; note = Orientation (relative to transcription): antisense; note = sgRNA Position: 58692016; note = Sequence Name: 56322-704_101_SL_seq_7574
atgctcgggatacgactccc

SEQ ID NO: 7575 - DNA, 20 bp, Homo sapiens
  source 1..20: mol_type = genomic DNA; note = Gene: TEX14; note = Location (start to end; relative to TSS): TEX14_79_109; note = Orientation (relative to transcription): antisense; note = sgRNA Position: 58691962; note = Sequence Name: 56322-704_101_SL_seq_7575
agctactgcttaagctaggc

SEQ ID NO: 7576 - DNA, 20 bp, Homo sapiens
  source 1..20: mol_type = genomic DNA; note = Gene: TEX14; note = Location (start to end; relative to TSS): TEX14_21_51; note = Orientation (relative to transcription): sense; note = sgRNA Position: 58692000; note = Sequence Name: 56322-704_101_SL_seq_7576
gagtcgtatcccgagcatgg

SEQ ID NO: 7577 - DNA, 20 bp, Homo sapiens
  source 1..20: mol_type = genomic DNA; note = Gene: TEX14; note = Location (start to end; relative to TSS): TEX14_72_102; note = Orientation (relative to transcription): sense; note = sgRNA Position: 58691949; note = Sequence Name: 56322-704_101_SL_seq_7577
tgcctagcttaagcagtagc

SEQ ID NO: 7578 - DNA, 20 bp, Homo sapiens
  source 1..20: mol_type = genomic DNA; note = Gene: TEX14; note = Location (start to end; relative to TSS): TEX14_18_48; note = Orientation (relative to transcription): sense; note = sgRNA Position: 58692003; note = Sequence Name: 56322-704_101_SL_seq_7578
cgggagtcgtatcccgagca

SEQ ID NO: 7579 - DNA, 20 bp, Homo sapiens
  source 1..20: mol_type = genomic DNA; note = Gene: TEX14; note = Location (start to end; relative to TSS): TEX14_62_92; note = Orientation (relative to transcription): antisense; note = sgRNA Position: 58691979; note = Sequence Name: 56322-704_101_SL_seq_7579
ggcaggccatgaagaaataa

SEQ ID NO: 7580 - DNA, 20 bp, Homo sapiens
  source 1..20: mol_type = genomic DNA; note = Gene: TGFBR1; note = Location (start to end; relative to TSS): TGFBR1_48_78; note = Orientation (relative to transcription): sense; note = sgRNA Position: 99105187; note = Sequence Name: 56322-704_101_SL_seq_7580
gggccgggccgggccacagg

SEQ ID NO: 7581 - DNA, 20 bp, Homo sapiens
  source 1..20: mol_type = genomic DNA; note = Gene: TGFBR1; note = Location (start to end; relative to TSS): TGFBR1_91_121; note = Orientation (relative to transcription): antisense; note = sgRNA Position: 99105210; note = Sequence Name: 56322-704_101_SL_seq_7581
agcagcgaccgccgcctcca

SEQ ID NO: 7582 - DNA, 20 bp, Homo sapiens
  source 1..20: mol_type = genomic DNA; note = Gene: TGFBR1; note = Location (start to end; relative to TSS): TGFBR1_28_58; note = Orientation (relative to transcription): sense; note = sgRNA Position: 99105167; note = Sequence Name: 56322-704_101_SL_seq_7582
ggtgaggcagcggcgcggcc

SEQ ID NO: 7583 - DNA, 20 bp, Homo sapiens
  source 1..20: mol_type = genomic DNA; note = Gene: TGFBR1; note = Location (start to end; relative to TSS): TGFBR1_65_95; note = Orientation (relative to transcription): antisense; note = sgRNA Position: 99105184; note = Sequence Name: 56322-704_101_SL_seq_7583
cgccgccaccgcctgtggcc

SEQ ID NO: 7584 - DNA, 20 bp, Homo sapiens
  source 1..20: mol_type = genomic DNA; note = Gene: TGFBR1; note = Location (start to end; relative to TSS): TGFBR1_23_53; note = Orientation (relative to transcription): sense; note = sgRNA Position: 99105162; note = Sequence Name: 56322-704_101_SL_seq_7584
gctggggtgaggcagcggcg

SEQ ID NO: 7585 - DNA, 20 bp, Homo sapiens
  source 1..20: mol_type = genomic DNA; note = Gene: TGFBR1; note = Location (start to end; relative to TSS): TGFBR1_58_88; note = Orientation (relative to transcription): sense; note = sgRNA Position: 99105197; note = Sequence Name: 56322-704_101_SL_seq_7585
gggccacaggcggtggcggc

SEQ ID NO: 7586 - DNA, 20 bp, Homo sapiens
  source 1..20: mol_type = genomic DNA; note = Gene: TGFBR1; note = Location (start to end; relative to TSS): TGFBR1_18_48; note = Orientation (relative to transcription): sense; note = sgRNA Position: 99105157; note = Sequence Name: 56322-704_101_SL_seq_7586
ggtttgctggggtgaggcag

SEQ ID NO: 7587 - DNA, 20 bp, Homo sapiens
  source 1..20: mol_type = genomic DNA; note = Gene: TGFBR1; note = Location (start to end; relative to TSS): TGFBR1_55_85; note = Orientation (relative to transcription): antisense; note = sgRNA Position: 99105174; note = Sequence Name: 56322-704_101_SL_seq_7587
gcctgtggcccggcccggcc

SEQ ID NO: 7588 - DNA, 20 bp, Homo sapiens
  source 1..20: mol_type = genomic DNA; note = Gene: TGFBR1; note = Location (start to end; relative to TSS): TGFBR1_12_42; note = Orientation (relative to transcription): sense; note = sgRNA Position: 99105151; note = Sequence Name: 56322-704_101_SL_seq_7588
aggcgaggtttgctggggtg

SEQ ID NO: 7589 - DNA, 20 bp, Homo sapiens
  source 1..20: mol_type = genomic DNA; note = Gene: TGFBR1; note = Location (start to end; relative to TSS): TGFBR1_48_78; note = Orientation (relative to transcription): sense; note = sgRNA Position: 99105187; note = Sequence Name: 56322-704_101_SL_seq_7589
gggccgggccgggccacagg

SEQ ID NO: 7590 - DNA, 20 bp, Homo sapiens
  source 1..20: mol_type = genomic DNA; note = Gene: TGFBR2; note = Location (start to end; relative to TSS): TGFBR2_27_57; note = Orientation (relative to transcription): sense; note = sgRNA Position: 30606654; note = Sequence Name: 56322-704_101_SL_seq_7590
cacccgctcgggacaggagc

SEQ ID NO: 7591 - DNA, 20 bp, Homo sapiens
  source 1..20: mol_type = genomic DNA; note = Gene: TGFBR2; note = Location (start to end; relative to TSS): TGFBR2_59_89; note = Orientation (relative to transcription): sense; note = sgRNA Position: 30606686; note = Sequence Name: 56322-704_101_SL_seq_7591
cagcttccctcggccgccgg

SEQ ID NO: 7592 - DNA, 20 bp, Homo sapiens
  source 1..20: mol_type = genomic DNA; note = Gene: TGFBR2; note = Location (start to end; relative to TSS): TGFBR2_26_56; note = Orientation (relative to transcription): antisense; note = sgRNA Position: 30606633; note = Sequence Name: 56322-704_101_SL_seq_7592
tcccgagcgggtgcacgcgc

SEQ ID NO: 7593 - DNA, 20 bp, Homo sapiens
  source 1..20: mol_type = genomic DNA; note = Gene: TGFBR2; note = Location (start to end; relative to TSS): TGFBR2_58_88; note = Orientation (relative to transcription): sense; note = sgRNA Position: 30606685; note = Sequence Name: 56322-704_101_SL_seq_7593
gcagcttccctcggccgccg

SEQ ID NO: 7594 - DNA, 20 bp, Homo sapiens
  source 1..20: mol_type = genomic DNA; note = Gene: TGFBR2; note = Location (start to end; relative to TSS): TGFBR2_25_55; note = Orientation (relative to transcription): antisense; note = sgRNA Position: 30606632; note = Sequence Name: 56322-704_101_SL_seq_7594
cccgagcgggtgcacgcgcg

SEQ ID NO: 7595 - DNA, 20 bp, Homo sapiens
  source 1..20: mol_type = genomic DNA; note = Gene: TGFBR2; note = Location (start to end; relative to TSS): TGFBR2_57_87; note = Orientation (relative to transcription): sense; note = sgRNA Position: 30606684; note = Sequence Name: 56322-704_101_SL_seq_7595
tgcagcttccctcggccgcc

SEQ ID NO: 7596 - DNA, 20 bp, Homo sapiens
  source 1..20: mol_type = genomic DNA; note = Gene: TGFBR2; note = Location (start to end; relative to TSS): TGFBR2_24_54; note = Orientation (relative to transcription): antisense; note = sgRNA Position: 30606631; note = Sequence Name: 56322-704_101_SL_seq_7596
ccgagcgggtgcacgcgcgg

SEQ ID NO: 7597 - DNA, 20 bp, Homo sapiens
  source 1..20: mol_type = genomic DNA; note = Gene: TGFBR2; note = Location (start to end; relative to TSS): TGFBR2_56_86; note = Orientation (relative to transcription): sense; note = sgRNA Position: 30606683; note = Sequence Name: 56322-704_101_SL_seq_7597
gtgcagcttccctcggccgc

SEQ ID NO: 7598 - DNA, 20 bp, Homo sapiens
  source 1..20: mol_type = genomic DNA; note = Gene: TGFBR2; note = Location (start to end; relative to TSS): TGFBR2_21_51; note = Orientation (relative to transcription): sense; note = sgRNA Position: 30606648; note = Sequence Name: 56322-704_101_SL_seq_7598
cgcgtgcacccgctcgggac

SEQ ID NO: 7599 - DNA, 20 bp, Homo sapiens
  source 1..20: mol_type = genomic DNA; note = Gene: TGFBR2; note = Location (start to end; relative to TSS): TGFBR2_55_85; note = Orientation (relative to transcription): antisense; note = sgRNA Position: 30606662; note = Sequence Name: 56322-704_101_SL_seq_7599
agggaagctgcacaggagtc

SEQ ID NO: 7600 - DNA, 20 bp, Homo sapiens
  source 1..20: mol_type = genomic DNA; note = Gene: TIE1; note = Location (start to end; relative to TSS): TIE1_44_74; note = Orientation (relative to transcription): antisense; note = sgRNA Position: 43301032; note = Sequence Name: 56322-704_101_SL_seq_7600
gccaggacgagctgggcctg

SEQ ID NO: 7601 - DNA, 20 bp, Homo sapiens
  source 1..20: mol_type = genomic DNA; note = Gene: TIE1; note = Location (start to end; relative to TSS): TIE1_80_110; note = Orientation (relative to transcription): antisense; note = sgRNA Position: 43301068; note = Sequence Name: 56322-704_101_SL_seq_7601
cccgccagaccatactccag

SEQ ID NO: 7602 - DNA, 20 bp, Homo sapiens
  source 1..20: mol_type = genomic DNA; note = Gene: TIE1; note = Location (start to end; relative to TSS): TIE1_38_68; note = Orientation (relative to transcription): sense; note = sgRNA Position: 43301046; note = Sequence Name: 56322-704_101_SL_seq_7602
caggcccagctcgtcctggc

SEQ ID NO: 7603 - DNA, 20 bp, Homo sapiens
  source 1..20: mol_type = genomic DNA; note = Gene: TIE1; note = Location (start to end; relative to TSS): TIE1_70_100; note = Orientation (relative to transcription): sense; note = sgRNA Position: 43301078; note = Sequence Name: 56322-704_101_SL_seq_7603
gcctctggagtatggtctgg

SEQ ID NO: 7604 - DNA, 20 bp, Homo sapiens
  source 1..20: mol_type = genomic DNA; note = Gene: TIE1; note = Location (start to end; relative to TSS): TIE1_34_64; note = Orientation (relative to transcription): sense; note = sgRNA Position: 43301042; note = Sequence Name: 56322-704_101_SL_seq_7604
accccaggcccagctcgtcc

SEQ ID NO: 7605 - DNA, 20 bp, Homo sapiens
  source 1..20: mol_type = genomic DNA; note = Gene: TIE1; note = Location (start to end; relative to TSS): TIE1_67_97; note = Orientation (relative to transcription): sense; note = sgRNA Position: 43301075; note = Sequence Name: 56322-704_101_SL_seq_7605
tcggcctctggagtatggtc

SEQ ID NO: 7606 - DNA, 20 bp, Homo sapiens
  source 1..20: mol_type = genomic DNA; note = Gene: TIE1; note = Location (start to end; relative to TSS): TIE1_31_61; note = Orientation (relative to transcription): antisense; note = sgRNA Position: 43301019; note = Sequence Name: 56322-704_101_SL_seq_7606
gggcctggggtcagatgctg

SEQ ID NO: 7607 - DNA, 20 bp, Homo sapiens
  source 1..20: mol_type = genomic DNA; note = Gene: TIE1; note = Location (start to end; relative to TSS): TIE1_61_91; note = Orientation (relative to transcription): antisense; note = sgRNA Position: 43301049; note = Sequence Name: 56322-704_101_SL_seq_7607
gaggccgacccaggccagcc

SEQ ID NO: 7608 - DNA, 20 bp, Homo sapiens
  source 1..20: mol_type = genomic DNA; note = Gene: TIE1; note = Location (start to end; relative to TSS): TIE1_19_49; note = Orientation (relative to transcription): sense; note = sgRNA Position: 43301027; note = Sequence Name: 56322-704_101_SL_seq_7608
ggcccacagcatctgacccc

SEQ ID NO: 7609 - DNA, 20 bp, Homo sapiens
  source 1..20: mol_type = genomic DNA; note = Gene: TIE1; note = Location (start to end; relative to TSS): TIE1_51_81; note = Orientation (relative to transcription): antisense; note = sgRNA Position: 43301039; note = Sequence Name: 56322-704_101_SL_seq_7609
caggccagccaggacgagct

SEQ ID NO: 7610 - DNA, 20 bp, Homo sapiens
  source 1..20: mol_type = genomic DNA; note = Gene: TK1; note = Location (start to end; relative to TSS): TK1_48_78; note = Orientation (relative to transcription): antisense; note = sgRNA Position: 78187000; note = Sequence Name: 56322-704_101_SL_seq_7610
aatgcagctcattgcgcctc

SEQ ID NO: 7611 - DNA, 20 bp, Homo sapiens
  source 1..20: mol_type = genomic DNA; note = Gene: TK1; note = Location (start to end; relative to TSS): TK1_78_108; note = Orientation (relative to transcription): antisense; note = sgRNA Position: 78186970; note = Sequence Name: 56322-704_101_SL_seq_7611
gggggagccaggcagcacag

SEQ ID NO: 7612 - DNA, 20 bp, Homo sapiens
  source 1..20: mol_type = genomic DNA; note = Gene: TK1; note = Location (start to end; relative to TSS): TK1_47_77; note = Orientation (relative to transcription): antisense; note = sgRNA Position: 78187001; note = Sequence Name: 56322-704_101_SL_seq_7612
atgcagctcattgcgcctcc

SEQ ID NO: 7613 - DNA, 20 bp, Homo sapiens
  source 1..20: mol_type = genomic DNA; note = Gene: TK1; note = Location (start to end; relative to TSS): TK1_77_107; note = Orientation (relative to transcription): antisense; note = sgRNA Position: 78186971; note = Sequence Name: 56322-704_101_SL_seq_7613
ggggagccaggcagcacagt

SEQ ID NO: 7614 - DNA, 20 bp, Homo sapiens
  source 1..20: mol_type = genomic DNA; note = Gene: TK1; note = Location (start to end; relative to TSS): TK1_23_53; note = Orientation (relative to transcription): sense; note = sgRNA Position: 78187005; note = Sequence Name: 56322-704_101_SL_seq_7614
cgggttcgtgaacttcccgg

SEQ ID NO: 7615 - DNA, 20 bp, Homo sapiens
  source 1..20: mol_type = genomic DNA; note = Gene: TK1; note = Location (start to end; relative to TSS): TK1_73_103; note = Orientation (relative to transcription): antisense; note = sgRNA Position: 78186975; note = Sequence Name: 56322-704_101_SL_seq_7615
agccaggcagcacagtgggc

SEQ ID NO: 7616 - DNA, 20 bp, Homo sapiens
  source 1..20: mol_type = genomic DNA; note = Gene: TK1; note = Location (start to end; relative to TSS): TK1_20_50; note = Orientation (relative to transcription): sense; note = sgRNA Position: 78187008; note = Sequence Name: 56322-704_101_SL_seq_7616
actcgggttcgtgaacttcc

SEQ ID NO: 7617 - DNA, 20 bp, Homo sapiens
  source 1..20: mol_type = genomic DNA; note = Gene: TK1; note = Location (start to end; relative to TSS): TK1_62_92; note = Orientation (relative to transcription): sense; note = sgRNA Position: 78186966; note = Sequence Name: 56322-704_101_SL_seq_7617
aacctgcccactgtgctgcc

SEQ ID NO: 7618 - DNA, 20 bp, Homo sapiens
  source 1..20: mol_type = genomic DNA; note = Gene: TK1; note = Location (start to end; relative to TSS): TK1_18_48; note = Orientation (relative to transcription): antisense; note = sgRNA Position: 78187030; note = Sequence Name: 56322-704_101_SL_seq_7618
acgaacccgagtactctcca

SEQ ID NO: 7619 - DNA, 20 bp, Homo sapiens
  source 1..20: mol_type = genomic DNA; note = Gene: TK1; note = Location (start to end; relative to TSS): TK1_48_78; note = Orientation (relative to transcription): antisense; note = sgRNA Position: 78187000; note = Sequence Name: 56322-704_101_SL_seq_7619
aatgcagctcattgcgcctc

SEQ ID NO: 7620 - DNA, 20 bp, Homo sapiens
  source 1..20: mol_type = genomic DNA; note = Gene: TK2; note = Location (start to end; relative to TSS): TK2_48_78; note = Orientation (relative to transcription): antisense; note = sgRNA Position: 66550070; note = Sequence Name: 56322-704_101_SL_seq_7620
cagcagcatagccgggcgag

SEQ ID NO: 7621 - DNA, 20 bp, Homo sapiens
  source 1..20: mol_type = genomic DNA; note = Gene: TK2; note = Location (start to end; relative to TSS): TK2_90_120; note = Orientation (relative to transcription): antisense; note = sgRNA Position: 66550028; note = Sequence Name: 56322-704_101_SL_seq_7621
aaagcagcgcagcgcccggg

SEQ ID NO: 7622 - DNA, 20 bp, Homo sapiens
  source 1..20: mol_type = genomic DNA; note = Gene: TK2; note = Location (start to end; relative to TSS): TK2_51_81; note = Orientation (relative to transcription): sense; note = sgRNA Position: 66550047; note = Sequence Name: 56322-704_101_SL_seq_7622
ctatgctgctgtggccgctg

SEQ ID NO: 7623 - DNA, 20 bp, Homo sapiens
  source 1..20: mol_type = genomic DNA; note = Gene: TK2; note = Location (start to end; relative to TSS): TK2_89_119; note = Orientation (relative to transcription): sense; note = sgRNA Position: 66550009; note = Sequence Name: 56322-704_101_SL_seq_7623
gcgctgcgctgctttgggcc

SEQ ID NO: 7624 - DNA, 20 bp, Homo sapiens
  source 1..20: mol_type = genomic DNA; note = Gene: TK2; note = Location (start to end; relative to TSS): TK2_39_69; note = Orientation (relative to transcription): antisense; note = sgRNA Position: 66550079; note = Sequence Name: 56322-704_101_SL_seq_7624
agccgggcgagcggatccag

SEQ ID NO: 7625 - DNA, 20 bp, Homo sapiens
  source 1..20: mol_type = genomic DNA; note = Gene: TK2; note = Location (start to end; relative to TSS): TK2_74_104; note = Orientation (relative to transcription): antisense; note = sgRNA Position: 66550044; note = Sequence Name: 56322-704_101_SL_seq_7625
cgggcggcccagccccgcag

SEQ ID NO: 7626 - DNA, 20 bp, Homo sapiens
  source 1..20: mol_type = genomic DNA; note = Gene: TK2; note = Location (start to end; relative to TSS): TK2_28_58; note = Orientation (relative to transcription): sense; note = sgRNA Position: 66550070; note = Sequence Name: 56322-704_101_SL_seq_7626
ggcctctggatccgctcgcc

SEQ ID NO: 7627 - DNA, 20 bp, Homo sapiens
  source 1..20: mol_type = genomic DNA; note = Gene: TK2; note = Location (start to end; relative to TSS): TK2_67_97; note = Orientation (relative to transcription): sense; note = sgRNA Position: 66550031; note = Sequence Name: 56322-704_101_SL_seq_7627
gctgcggggctgggccgccc

SEQ ID NO: 7628 - DNA, 20 bp, Homo sapiens
  source 1..20: mol_type = genomic DNA; note = Gene: TK2; note = Location (start to end; relative to TSS): TK2_14_44; note = Orientation (relative to transcription): sense; note = sgRNA Position: 66550084; note = Sequence Name: 56322-704_101_SL_seq_7628
aagaaggaaccccgggcctc

SEQ ID NO: 7629 - DNA, 20 bp, Homo sapiens
  source 1..20: mol_type = genomic DNA; note = Gene: TK2; note = Location (start to end; relative to TSS): TK2_48_78; note = Orientation (relative to transcription): antisense; note = sgRNA Position: 66550070; note = Sequence Name: 56322-704_101_SL_seq_7629
cagcagcatagccgggcgag

SEQ ID NO: 7630 - DNA, 20 bp, Homo sapiens
  source 1..20: mol_type = genomic DNA; note = Gene: TLK1; note = Location (start to end; relative to TSS): TLK1_45_75; note = Orientation (relative to transcription): antisense; note = sgRNA Position: 171160844; note = Sequence Name: 56322-704_101_SL_seq_7630
cggcgtcgcccgggaggcgg

SEQ ID NO: 7631 - DNA, 20 bp, Homo sapiens
  source 1..20: mol_type = genomic DNA; note = Gene: TLK1; note = Location (start to end; relative to TSS): TLK1_95_125; note = Orientation (relative to transcription): sense; note = sgRNA Position: 171160774; note = Sequence Name: 56322-704_101_SL_seq_7631
cccgcggaagtgtcctcggc

SEQ ID NO: 7632 - DNA, 20 bp, Homo sapiens
  source 1..20: mol_type = genomic DNA; note = Gene: TLK1; note = Location (start to end; relative to TSS): TLK1_40_70; note = Orientation (relative to transcription): sense; note = sgRNA Position: 171160829; note = Sequence Name: 56322-704_101_SL_seq_7632
cgcctcccgggcgacgccgg

SEQ ID NO: 7633 - DNA, 20 bp, Homo sapiens
  source 1..20: mol_type = genomic DNA; note = Gene: TLK1; note = Location (start to end; relative to TSS): TLK1_91_121; note = Orientation (relative to transcription): antisense; note = sgRNA Position: 171160798; note = Sequence Name: 56322-704_101_SL_seq_7633
cttccgcgggcggaacctgc

SEQ ID NO: 7634 - DNA, 20 bp, Homo sapiens
  source 1..20: mol_type = genomic DNA; note = Gene: TLK1; note = Location (start to end; relative to TSS): TLK1_39_69; note = Orientation (relative to transcription): sense; note = sgRNA Position: 171160830; note = Sequence Name: 56322-704_101_SL_seq_7634
ccgcctcccgggcgacgccg

SEQ ID NO: 7635 - DNA, 20 bp, Homo sapiens
  source 1..20: mol_type = genomic DNA; note = Gene: TLK1; note = Location (start to end; relative to TSS): TLK1_79_109; note = Orientation (relative to transcription): sense; note = sgRNA Position: 171160790; note = Sequence Name: 56322-704_101_SL_seq_7635
gtgccggcaggttccgcccg

SEQ ID NO: 7636 - DNA, 20 bp, Homo sapiens
  source 1..20: mol_type = genomic DNA; note = Gene: TLK1; note = Location (start to end; relative to TSS): TLK1_31_61; note = Orientation (relative to transcription): antisense; note = sgRNA Position: 171160858; note = Sequence Name: 56322-704_101_SL_seq_7636
aggcggcggcggcgggctgt

SEQ ID NO: 7637 - DNA, 20 bp, Homo sapiens
  source 1..20: mol_type = genomic DNA; note = Gene: TLK1; note = Location (start to end; relative to TSS): TLK1_72_102; note = Orientation (relative to transcription): antisense; note = sgRNA Position: 171160817; note = Sequence Name: 56322-704_101_SL_seq_7637
ccggcacctctgcagtgcgt

SEQ ID NO: 7638 - DNA, 20 bp, Homo sapiens
  source 1..20: mol_type = genomic DNA; note = Gene: TLK1; note = Location (start to end; relative to TSS): TLK1_28_58; note = Orientation (relative to transcription): sense; note = sgRNA Position: 171160841; note = Sequence Name: 56322-704_101_SL_seq_7638
gcccgccgccgccgcctccc

SEQ ID NO: 7639 - DNA, 20 bp, Homo sapiens
  source 1..20: mol_type = genomic DNA; note = Gene: TLK1; note = Location (start to end; relative to TSS): TLK1_65_95; note = Orientation (relative to transcription): antisense; note = sgRNA Position: 171160824; note = Sequence Name: 56322-704_101_SL_seq_7639
ctctgcagtgcgtcggcccc

SEQ ID NO: 7640 - DNA, 20 bp, Homo sapiens
  source 1..20: mol_type = genomic DNA; note = Gene: TLK2; note = Location (start to end; relative to TSS): TLK2_37_67; note = Orientation (relative to transcription): antisense; note = sgRNA Position: 62478868; note = Sequence Name: 56322-704_101_SL_seq_7640
tggtgcccaggacccgcctc

SEQ ID NO: 7641 - DNA, 20 bp, Homo sapiens
  source 1..20: mol_type = genomic DNA; note = Gene: TLK2; note = Location (start to end; relative to TSS): TLK2_70_100; note = Orientation (relative to transcription): antisense; note = sgRNA Position: 62478901; note = Sequence Name: 56322-704_101_SL_seq_7641
gtgcggcgcggagggcgggg

SEQ ID NO: 7642 - DNA, 20 bp, Homo sapiens
  source 1..20: mol_type = genomic DNA; note = Gene: TLK2; note = Location (start to end; relative to TSS): TLK2_32_62; note = Orientation (relative to transcription): sense; note = sgRNA Position: 62478883; note = Sequence Name: 56322-704_101_SL_seq_7642
aggcgggtcctgggcaccag

SEQ ID NO: 7643 - DNA, 20 bp, Homo sapiens
  source 1..20: mol_type = genomic DNA; note = Gene: TLK2; note = Location (start to end; relative to TSS): TLK2_69_99; note = Orientation (relative to transcription): sense; note = sgRNA Position: 62478920; note = Sequence Name: 56322-704_101_SL_seq_7643
ccctccgcgccgcacccgag

SEQ ID NO: 7644 - DNA, 20 bp, Homo sapiens
  source 1..20: mol_type = genomic DNA; note = Gene: TLK2; note = Location (start to end; relative to TSS): TLK2_24_54; note = Orientation (relative to transcription): antisense; note = sgRNA Position: 62478855; note = Sequence Name: 56322-704_101_SL_seq_7644
ccgcctccggccccttaatc

SEQ ID NO: 7645 - DNA, 20 bp, Homo sapiens
  source 1..20: mol_type = genomic DNA; note = Gene: TLK2; note = Location (start to end; relative to TSS): TLK2_66_96; note = Orientation (relative to transcription): antisense; note = sgRNA Position: 62478897; note = Sequence Name: 56322-704_101_SL_seq_7645
ggcgcggagggcgggggggt

SEQ ID NO: 7646 - DNA, 20 bp, Homo sapiens
  source 1..20: mol_type = genomic DNA; note = Gene: TLK2; note = Location (start to end; relative to TSS): TLK2_23_53; note = Orientation (relative to transcription): sense; note = sgRNA Position: 62478874; note = Sequence Name: 56322-704_101_SL_seq_7646
aggggccggaggcgggtcct

SEQ ID NO: 7647 - DNA, 20 bp, Homo sapiens
  source 1..20: mol_type = genomic DNA; note = Gene: TLK2; note = Location (start to end; relative to TSS): TLK2_57_87; note = Orientation (relative to transcription): antisense; note = sgRNA Position: 62478888; note = Sequence Name: 56322-704_101_SL_seq_7647
ggcgggggggtcggaaccgc

SEQ ID NO: 7648 - DNA, 20 bp, Homo sapiens
  source 1..20: mol_type = genomic DNA; note = Gene: TLK2; note = Location (start to end; relative to TSS): TLK2_19_49; note = Orientation (relative to transcription): antisense; note = sgRNA Position: 62478850; note = Sequence Name: 56322-704_101_SL_seq_7648
tccggccccttaatccggat

SEQ ID NO: 7649 - DNA, 20 bp, Homo sapiens
  source 1..20: mol_type = genomic DNA; note = Gene: TLK2; note = Location (start to end; relative to TSS): TLK2_49_79; note = Orientation (relative to transcription): antisense; note = sgRNA Position: 62478880; note = Sequence Name: 56322-704_101_SL_seq_7649
ggtcggaaccgctggtgccc

SEQ ID NO: 7650 - DNA, 20 bp, Homo sapiens
  source 1..20: mol_type = genomic DNA; note = Gene: TNIK; note = Location (start to end; relative to TSS): TNIK_48_78; note = Orientation (relative to transcription): antisense; note = sgRNA Position: 171460353; note = Sequence Name: 56322-704_101_SL_seq_7650
ctgcgtgggtgtatttaaat

SEQ ID NO: 7651 - DNA, 20 bp, Homo sapiens
  source 1..20: mol_type = genomic DNA; note = Gene: TNIK; note = Location (start to end; relative to TSS): TNIK_79_109; note = Orientation (relative to transcription): antisense; note = sgRNA Position: 171460322; note = Sequence Name: 56322-704_101_SL_seq_7651
tgagcgccccgatcggctaa

SEQ ID NO: 7652 - DNA, 20 bp, Homo sapiens
  source 1..20: mol_type = genomic DNA; note = Gene: TNIK; note = Location (start to end; relative to TSS): TNIK_24_54; note = Orientation (relative to transcription): antisense; note = sgRNA Position: 171460377; note = Sequence Name: 56322-704_101_SL_seq_7652
catgcttctttgcttgtgcg

SEQ ID NO: 7653 - DNA, 20 bp, Homo sapiens
  source 1..20: mol_type = genomic DNA; note = Gene: TNIK; note = Location (start to end; relative to TSS): TNIK_64_94; note = Orientation (relative to transcription): sense; note = sgRNA Position: 171460317; note = Sequence Name: 56322-704_101_SL_seq_7653
ccagcgcccttagccgatcg

SEQ ID NO: 7654 - DNA, 20 bp, Homo sapiens
  source 1..20: mol_type = genomic DNA; note = Gene: TNIK; note = Location (start to end; relative to TSS): TNIK_20_50; note = Orientation (relative to transcription): antisense; note = sgRNA Position: 171460381; note = Sequence Name: 56322-704_101_SL_seq_7654
cttctttgcttgtgcgtgga

SEQ ID NO: 7655 - DNA, 20 bp, Homo sapiens
  source 1..20: mol_type = genomic DNA; note = Gene: TNIK; note = Location (start to end; relative to TSS): TNIK_63_93; note = Orientation (relative to transcription): antisense; note = sgRNA Position: 171460338; note = Sequence Name: 56322-704_101_SL_seq_7655
ctaagggcgctggggctgcg

SEQ ID NO: 7656 - DNA, 20 bp, Homo sapiens
  source 1..20: mol_type = genomic DNA; note = Gene: TNIK; note = Location (start to end; relative to TSS): TNIK_17_47; note = Orientation (relative to transcription): antisense; note = sgRNA Position: 171460384; note = Sequence Name: 56322-704_101_SL_seq_7656
ctttgcttgtgcgtggatgg

SEQ ID NO: 7657 - DNA, 20 bp, Homo sapiens
  source 1..20: mol_type = genomic DNA; note = Gene: TNIK; note = Location (start to end; relative to TSS): TNIK_62_92; note = Orientation (relative to transcription): antisense; note = sgRNA Position: 171460339; note = Sequence Name: 56322-704_101_SL_seq_7657
taagggcgctggggctgcgt

SEQ ID NO: 7658 - DNA, 20 bp, Homo sapiens
  source 1..20: mol_type = genomic DNA; note = Gene: TNIK; note = Location (start to end; relative to TSS): TNIK_8_38; note = Orientation (relative to transcription): antisense; note = sgRNA Position: 171460393; note = Sequence Name: 56322-704_101_SL_seq_7658
tgcgtggatggcggctgcat

SEQ ID NO: 7659 - DNA, 20 bp, Homo sapiens
  source 1..20: mol_type = genomic DNA; note = Gene: TNIK; note = Location (start to end; relative to TSS): TNIK_48_78; note = Orientation (relative to transcription): antisense; note = sgRNA Position: 171460353; note = Sequence Name: 56322-704_101_SL_seq_7659
ctgcgtgggtgtatttaaat

SEQ ID NO: 7660 - DNA, 20 bp, Homo sapiens
  source 1..20: mol_type = genomic DNA; note = Gene: TNK1; note = Location (start to end; relative to TSS): TNK1_24_54; note = Orientation (relative to transcription): sense; note = sgRNA Position: 7381139; note = Sequence Name: 56322-704_101_SL_seq_7660
tccggaccgagcagggggcc

SEQ ID NO: 7661 - DNA, 20 bp, Homo sapiens
  source 1..20: mol_type = genomic DNA; note = Gene: TNK1; note = Location (start to end; relative to TSS): TNK1_60_90; note = Orientation (relative to transcription): sense; note = sgRNA Position: 7381175; note = Sequence Name: 56322-704_101_SL_seq_7661
ggcggagcagccgtcgctgg

SEQ ID NO: 7662 - DNA, 20 bp, Homo sapiens
  source 1..20: mol_type = genomic DNA; note = Gene: TNK1; note = Location (start to end; relative to TSS): TNK1_25_55; note = Orientation (relative to transcription): sense; note = sgRNA Position: 7381140; note = Sequence Name: 56322-704_101_SL_seq_7662
ccggaccgagcagggggccc

SEQ ID NO: 7663 - DNA, 20 bp, Homo sapiens
  source 1..20: mol_type = genomic DNA; note = Gene: TNK1; note = Location (start to end; relative to TSS): TNK1_59_89; note = Orientation (relative to transcription): sense; note = sgRNA Position: 7381174; note = Sequence Name: 56322-704_101_SL_seq_7663
cggcggagcagccgtcgctg

SEQ ID NO: 7664 - DNA, 20 bp, Homo sapiens
  source 1..20: mol_type = genomic DNA; note = Gene: TNK1; note = Location (start to end; relative to TSS): TNK1_22_52; note = Orientation (relative to transcription): antisense; note = sgRNA Position: 7381117; note = Sequence Name: 56322-704_101_SL_seq_7664
gctcggtccggaccctcacc

SEQ ID NO: 7665 - DNA, 20 bp, Homo sapiens
  source 1..20: mol_type = genomic DNA; note = Gene: TNK1; note = Location (start to end; relative to TSS): TNK1_58_88; note = Orientation (relative to transcription): sense; note = sgRNA Position: 7381173; note = Sequence Name: 56322-704_101_SL_seq_7665
ccggcggagcagccgtcgct

SEQ ID NO: 7666 - DNA, 20 bp, Homo sapiens
  source 1..20: mol_type = genomic DNA; note = Gene: TNK1; note = Location (start to end; relative to TSS): TNK1_18_48; note = Orientation (relative to transcription): sense; note = sgRNA Position: 7381133; note = Sequence Name: 56322-704_101_SL_seq_7666
tgagggtccggaccgagcag

SEQ ID NO: 7667 - DNA, 20 bp, Homo sapiens
  source 1..20: mol_type = genomic DNA; note = Gene: TNK1; note = Location (start to end; relative to TSS): TNK1_52_82; note = Orientation (relative to transcription): antisense; note = sgRNA Position: 7381147; note = Sequence Name: 56322-704_101_SL_seq_7667
tccgccggctctccccagcc

SEQ ID NO: 7668 - DNA, 20 bp, Homo sapiens
  source 1..20: mol_type = genomic DNA; note = Gene: TNK1; note = Location (start to end; relative to TSS): TNK1_19_49; note = Orientation (relative to transcription): sense; note = sgRNA Position: 7381134; note = Sequence Name: 56322-704_101_SL_seq_7668
gagggtccggaccgagcagg

SEQ ID NO: 7669 - DNA, 20 bp, Homo sapiens
  source 1..20: mol_type = genomic DNA; note = Gene: TNK1; note = Location (start to end; relative to TSS): TNK1_51_81; note = Orientation (relative to transcription): antisense; note = sgRNA Position: 7381146; note = Sequence Name: 56322-704_101_SL_seq_7669
ccgccggctctccccagccc

SEQ ID NO: 7670 - DNA, 20 bp, Homo sapiens
  source 1..20: mol_type = genomic DNA; note = Gene: TNK2; note = Location (start to end; relative to TSS): TNK2_37_67; note = Orientation (relative to transcription): sense; note = sgRNA Position: 195908490; note = Sequence Name: 56322-704_101_SL_seq_7670
gggaggcagcggaaggcggc

SEQ ID NO: 7671 - DNA, 20 bp, Homo sapiens
  source 1..20: mol_type = genomic DNA; note = Gene: TNK2; note = Location (start to end; relative to TSS): TNK2_83_113; note = Orientation (relative to transcription): antisense; note = sgRNA Position: 195908464; note = Sequence Name: 56322-704_101_SL_seq_7671
gcacaccaactccagctaac

SEQ ID NO: 7672 - DNA, 20 bp, Homo sapiens
  source 1..20: mol_type = genomic DNA; note = Gene: TNK2; note = Location (start to end; relative to TSS): TNK2_18_48; note = Orientation (relative to transcription): antisense; note = sgRNA Position: 195908529; note = Sequence Name: 56322-704_101_SL_seq_7672
acacagcttcagcgacgccc

SEQ ID NO: 7673 - DNA, 20 bp, Homo sapiens
  source 1..20: mol_type = genomic DNA; note = Gene: TNK2; note = Location (start to end; relative to TSS): TNK2_78_108; note = Orientation (relative to transcription): antisense; note = sgRNA Position: 195908469; note = Sequence Name: 56322-704_101_SL_seq_7673
ccaactccagctaacaggac

SEQ ID NO: 7674 - DNA, 20 bp, Homo sapiens
  source 1..20: mol_type = genomic DNA; note = Gene: TNK2; note = Location (start to end; relative to TSS): TNK2_26_56; note = Orientation (relative to transcription): sense; note = sgRNA Position: 195908501; note = Sequence Name: 56322-704_101_SL_seq_7674
ctgtgtctgcggggaggcag

SEQ ID NO: 7675 - DNA, 20 bp, Homo sapiens
  source 1..20: mol_type = genomic DNA; note = Gene: TNK2; note = Location (start to end; relative to TSS): TNK2_77_107; note = Orientation (relative to transcription): antisense; note = sgRNA Position: 195908470; note = Sequence Name: 56322-704_101_SL_seq_7675
caactccagctaacaggact

SEQ ID NO: 7676 - DNA, 20 bp, Homo sapiens
  source 1..20: mol_type = genomic DNA; note = Gene: TNK2; note = Location (start to end; relative to TSS): TNK2_30_60; note = Orientation (relative to transcription): sense; note = sgRNA Position: 195908497; note = Sequence Name: 56322-704_101_SL_seq_7676
gtctgcggggaggcagcgga

SEQ ID NO: 7677 - DNA, 20 bp, Homo sapiens
  source 1..20: mol_type = genomic DNA; note = Gene: TNK2; note = Location (start to end; relative to TSS): TNK2_69_99; note = Orientation (relative to transcription): sense; note = sgRNA Position: 195908458; note = Sequence Name: 56322-704_101_SL_seq_7677
ccagtcctgttagctggagt

SEQ ID NO: 7678 - DNA, 20 bp, Homo sapiens
  source 1..20: mol_type = genomic DNA; note = Gene: TNK2; note = Location (start to end; relative to TSS): TNK2_33_63; note = Orientation (relative to transcription): sense; note = sgRNA Position: 195908494; note = Sequence Name: 56322-704_101_SL_seq_7678
tgcggggaggcagcggaagg

SEQ ID NO: 7679 - DNA, 20 bp, Homo sapiens
  source 1..20: mol_type = genomic DNA; note = Gene: TNK2; note = Location (start to end; relative to TSS): TNK2_63_93; note = Orientation (relative to transcription): sense; note = sgRNA Position: 195908464; note = Sequence Name: 56322-704_101_SL_seq_7679
ggaagcccagtcctgttagc

SEQ ID NO: 7680 - DNA, 20 bp, Homo sapiens
  source 1..20: mol_type = genomic DNA; note = Gene: TNNI3K; note = Location (start to end; relative to TSS): TNNI3K_74_104; note = Orientation (relative to transcription): sense; note = sgRNA Position: 74235487; note = Sequence Name: 56322-704_101_SL_seq_7680
agaccaacccaaacttgtac

SEQ ID NO: 7681 - DNA, 20 bp, Homo sapiens
  source 1..20: mol_type = genomic DNA; note = Gene: TNNI3K; note = Location (start to end; relative to TSS): TNNI3K_130_160; note = Orientation (relative to transcription): antisense; note = sgRNA Position: 74235523; note = Sequence Name: 56322-704_101_SL_seq_7681
attgaaccatattacactta

SEQ ID NO: 7682 - DNA, 20 bp, Homo sapiens
  source 1..20: mol_type = genomic DNA; note = Gene: TNNI3K; note = Location (start to end; relative to TSS): TNNI3K_37_67; note = Orientation (relative to transcription): antisense; note = sgRNA Position: 74235430; note = Sequence Name: 56322-704_101_SL_seq_7682
ataagtttcttcctttctcc

SEQ ID NO: 7683 - DNA, 20 bp, Homo sapiens
  source 1..20: mol_type = genomic DNA; note = Gene: TNNI3K; note = Location (start to end; relative to TSS): TNNI3K_115_145; note = Orientation (relative to transcription): sense; note = sgRNA Position: 74235528; note = Sequence Name: 56322-704_101_SL_seq_7683
ttatttccttaagtgtaata

SEQ ID NO: 7684 - DNA, 20 bp, Homo sapiens
  source 1..20: mol_type = genomic DNA; note = Gene: TNNI3K; note = Location (start to end; relative to TSS): TNNI3K_36_66; note = Orientation (relative to transcription): antisense; note = sgRNA Position: 74235429; note = Sequence Name: 56322-704_101_SL_seq_7684
taagtttcttcctttctcca

SEQ ID NO: 7685 - DNA, 20 bp, Homo sapiens
  source 1..20: mol_type = genomic DNA; note = Gene: TNNI3K; note = Location (start to end; relative to TSS): TNNI3K_90_120; note = Orientation (relative to transcription): antisense; note = sgRNA Position: 74235483; note = Sequence Name: 56322-704_101_SL_seq_7685
ataattaccagtacaagttt

SEQ ID NO: 7686 - DNA, 20 bp, Homo sapiens
  source 1..20: mol_type = genomic DNA; note = Gene: TNNI3K; note = Location (start to end; relative to TSS): TNNI3K_17_47; note = Orientation (relative to transcription): sense; note = sgRNA Position: 74235430; note = Sequence Name: 56322-704_101_SL_seq_7686
tgaagaactgccctggagaa

SEQ ID NO: 7687 - DNA, 20 bp, Homo sapiens
  source 1..20: mol_type = genomic DNA; note = Gene: TNNI3K; note = Location (start to end; relative to TSS): TNNI3K_86_116; note = Orientation (relative to transcription): antisense; note = sgRNA Position: 74235479; note = Sequence Name: 56322-704_101_SL_seq_7687
ttaccagtacaagtttgggt

SEQ ID NO: 7688 - DNA, 20 bp, Homo sapiens
  source 1..20: mol_type = genomic DNA; note = Gene: TNNI3K; note = Location (start to end; relative to TSS): TNNI3K_10_40; note = Orientation (relative to transcription): sense; note = sgRNA Position: 74235423; note = Sequence Name: 56322-704_101_SL_seq_7688
tataacttgaagaactgccc

SEQ ID NO: 7689 - DNA, 20 bp, Homo sapiens
  source 1..20: mol_type = genomic DNA; note = Gene: TNNI3K; note = Location (start to end; relative to TSS): TNNI3K_74_104; note = Orientation (relative to transcription): sense; note = sgRNA Position: 74235487; note = Sequence Name: 56322-704_101_SL_seq_7689
agaccaacccaaacttgtac

SEQ ID NO: 7690 - DNA, 20 bp, Homo sapiens
  source 1..20: mol_type = genomic DNA; note = Gene: TP53RK; note = Location (start to end; relative to TSS): TP53RK_51_81; note = Orientation (relative to transcription): sense; note = sgRNA Position: 46689369; note = Sequence Name: 56322-704_101_SL_seq_7690
cgatggcgaggagcccgccc

SEQ ID NO: 7691 - DNA, 20 bp, Homo sapiens
  source 1..20: mol_type = genomic DNA; note = Gene: TP53RK; note = Location (start to end; relative to TSS): TP53RK_83_113; note = Orientation (relative to transcription): sense; note = sgRNA Position: 46689337; note = Sequence Name: 56322-704_101_SL_seq_7691
ctctggccgcagcccgggag

SEQ ID NO: 7692 - DNA, 20 bp, Homo sapiens
  source 1..20: mol_type = genomic DNA; note = Gene: TP53RK; note = Location (start to end; relative to TSS): TP53RK_41_71; note = Orientation (relative to transcription): antisense; note = sgRNA Position: 46689399; note = Sequence Name: 56322-704_101_SL_seq_7692
atcggccggcgtagtagctc

SEQ ID NO: 7693 - DNA, 20 bp, Homo sapiens
  source 1..20: mol_type = genomic DNA; note = Gene: TP53RK; note = Location (start to end; relative to TSS): TP53RK_78_108; note = Orientation (relative to transcription): sense; note = sgRNA Position: 46689342; note = Sequence Name: 56322-704_101_SL_seq_7693
tgaggctctggccgcagccc

SEQ ID NO: 7694 - DNA, 20 bp, Homo sapiens
  source 1..20: mol_type = genomic DNA; note = Gene: TP53RK; note = Location (start to end; relative to TSS): TP53RK_39_69; note = Orientation (relative to transcription): sense; note = sgRNA Position: 46689381; note = Sequence Name: 56322-704_101_SL_seq_7694
tactacgccggccgatggcg

SEQ ID NO: 7695 - DNA, 20 bp, Homo sapiens
  source 1..20: mol_type = genomic DNA; note = Gene: TP53RK; note = Location (start to end; relative to TSS): TP53RK_73_103; note = Orientation (relative to transcription): antisense; note = sgRNA Position: 46689367; note = Sequence Name: 56322-704_101_SL_seq_7695
agagcctcagcctccggggc

SEQ ID NO: 7696 - DNA, 20 bp, Homo sapiens
  source 1..20: mol_type = genomic DNA; note = Gene: TP53RK; note = Location (start to end; relative to TSS): TP53RK_34_64; note = Orientation (relative to transcription): sense; note = sgRNA Position: 46689386; note = Sequence Name: 56322-704_101_SL_seq_7696
agagctactacgccggccga

SEQ ID NO: 7697 - DNA, 20 bp, Homo sapiens
  source 1..20: mol_type = genomic DNA; note = Gene: TP53RK; note = Location (start to end; relative to TSS): TP53RK_66_96; note = Orientation (relative to transcription): sense; note = sgRNA Position: 46689354; note = Sequence Name: 56322-704_101_SL_seq_7697
cgccccggaggctgaggctc

SEQ ID NO: 7698 - DNA, 20 bp, Homo sapiens
  source 1..20: mol_type = genomic DNA; note = Gene: TP53RK; note = Location (start to end; relative to TSS): TP53RK_21_51; note = Orientation (relative to transcription): antisense; note = sgRNA Position: 46689419; note = Sequence Name: 56322-704_101_SL_seq_7698
tggccgccgccatgactgct

SEQ ID NO: 7699 - DNA, 20 bp, Homo sapiens
  source 1..20: mol_type = genomic DNA; note = Gene: TP53RK; note = Location (start to end; relative to TSS): TP53RK_51_81; note = Orientation (relative to transcription): sense; note = sgRNA Position: 46689369; note = Sequence Name: 56322-704_101_SL_seq_7699
cgatggcgaggagcccgccc

SEQ ID NO: 7700 - DNA, 20 bp, Homo sapiens
  source 1..20: mol_type = genomic DNA; note = Gene: TRIB1; note = Location (start to end; relative to TSS): TRIB1_53_83; note = Orientation (relative to transcription): antisense; note = sgRNA Position: 125430417; note = Sequence Name: 56322-704_101_SL_seq_7700
cctgagcgctcctgggctcc

SEQ ID NO: 7701 - DNA, 20 bp, Homo sapiens
  source 1..20: mol_type = genomic DNA; note = Gene: TRIB1; note = Location (start to end; relative to TSS): TRIB1_86_116; note = Orientation (relative to transcription): antisense; note = sgRNA Position: 125430450; note = Sequence Name: 56322-704_101_SL_seq_7701
aagccgggggaactttttcg

SEQ ID NO: 7702 - DNA, 20 bp, Homo sapiens
  source 1..20: mol_type = genomic DNA; note = Gene: TRIB1; note = Location (start to end; relative to TSS): TRIB1_54_84; note = Orientation (relative to transcription): antisense; note = sgRNA Position: 125430418; note = Sequence Name: 56322-704_101_SL_seq_7702
tcctgagcgctcctgggctc

SEQ ID NO: 7703 - DNA, 20 bp, Homo sapiens
  source 1..20: mol_type = genomic DNA; note = Gene: TRIB1; note = Location (start to end; relative to TSS): TRIB1_84_114; note = Orientation (relative to transcription): sense; note = sgRNA Position: 125430468; note = Sequence Name: 56322-704_101_SL_seq_7703
aaagttcccccggcttttgc

SEQ ID NO: 7704 - DNA, 20 bp, Homo sapiens
  source 1..20: mol_type = genomic DNA; note = Gene: TRIB1; note = Location (start to end; relative to TSS): TRIB1_34_64; note = Orientation (relative to transcription): sense; note = sgRNA Position: 125430418; note = Sequence Name: 56322-704_101_SL_seq_7704
ctcatacacgcccggagccc

SEQ ID NO: 7705 - DNA, 20 bp, Homo sapiens
  source 1..20: mol_type = genomic DNA; note = Gene: TRIB1; note = Location (start to end; relative to TSS): TRIB1_78_108; note = Orientation (relative to transcription): antisense; note = sgRNA Position: 125430442; note = Sequence Name: 56322-704_101_SL_seq_7705
ggaactttttcgcggcgctc

SEQ ID NO: 7706 - DNA, 20 bp, Homo sapiens
  source 1..20: mol_type = genomic DNA; note = Gene: TRIB1; note = Location (start to end; relative to TSS): TRIB1_44_74; note = Orientation (relative to transcription): sense; note = sgRNA Position: 125430428; note = Sequence Name: 56322-704_101_SL_seq_7706
cccggagcccaggagcgctc

SEQ ID NO: 7707 - DNA, 20 bp, Homo sapiens
  source 1..20: mol_type = genomic DNA; note = Gene: TRIB1; note = Location (start to end; relative to TSS): TRIB1_74_104; note = Orientation (relative to transcription): sense; note = sgRNA Position: 125430458; note = Sequence Name: 56322-704_101_SL_seq_7707
gcgccgcgaaaaagttcccc

SEQ ID NO: 7708 - DNA, 20 bp, Homo sapiens
  source 1..20: mol_type = genomic DNA; note = Gene: TRIB1; note = Location (start to end; relative to TSS): TRIB1_26_56; note = Orientation (relative to transcription): sense; note = sgRNA Position: 125430410; note = Sequence Name: 56322-704_101_SL_seq_7708
cgctcgctctcatacacgcc

SEQ ID NO: 7709 - DNA, 20 bp, Homo sapiens
  source 1..20: mol_type = genomic DNA; note = Gene: TRIB1; note = Location (start to end; relative to TSS): TRIB1_60_90; note = Orientation (relative to transcription): antisense; note = sgRNA Position: 125430424; note = Sequence Name: 56322-704_101_SL_seq_7709
tcgggatcctgagcgctcct

SEQ ID NO: 7710 - DNA, 20 bp, Homo sapiens
  source 1..20: mol_type = genomic DNA; note = Gene: TRIB2; note = Location (start to end; relative to TSS): TRIB2_47_77; note = Orientation (relative to transcription): antisense; note = sgRNA Position: 12716989; note = Sequence Name: 56322-704_101_SL_seq_7710
cggggatctcggagcgagcg

SEQ ID NO: 7711 - DNA, 20 bp, Homo sapiens
  source 1..20: mol_type = genomic DNA; note = Gene: TRIB2; note = Location (start to end; relative to TSS): TRIB2_92_122; note = Orientation (relative to transcription): antisense; note = sgRNA Position: 12717034; note = Sequence Name: 56322-704_101_SL_seq_7711
gcccgcatcccccggcgagg

SEQ ID NO: 7712 - DNA, 20 bp, Homo sapiens
  source 1..20: mol_type = genomic DNA; note = Gene: TRIB2; note = Location (start to end; relative to TSS): TRIB2_48_78; note = Orientation (relative to transcription): antisense; note = sgRNA Position: 12716990; note = Sequence Name: 56322-704_101_SL_seq_7712
ccggggatctcggagcgagc

SEQ ID NO: 7713 - DNA, 20 bp, Homo sapiens
  source 1..20: mol_type = genomic DNA; note = Gene: TRIB2; note = Location (start to end; relative to TSS): TRIB2_82_112; note = Orientation (relative to transcription): sense; note = sgRNA Position: 12717044; note = Sequence Name: 56322-704_101_SL_seq_7713
accgcctcgccgggggatgc

SEQ ID NO: 7714 - DNA, 20 bp, Homo sapiens
  source 1..20: mol_type = genomic DNA; note = Gene: TRIB2; note = Location (start to end; relative to TSS): TRIB2_49_79; note = Orientation (relative to transcription): antisense; note = sgRNA Position: 12716991; note = Sequence Name: 56322-704_101_SL_seq_7714
gccggggatctcggagcgag

SEQ ID NO: 7715 - DNA, 20 bp, Homo sapiens
  source 1..20: mol_type = genomic DNA; note = Gene: TRIB2; note = Location (start to end; relative to TSS): TRIB2_81_111; note = Orientation (relative to transcription): sense; note = sgRNA Position: 12717043; note = Sequence Name: 56322-704_101_SL_seq_7715
taccgcctcgccgggggatg

SEQ ID NO: 7716 - DNA, 20 bp, Homo sapiens
  source 1..20: mol_type = genomic DNA; note = Gene: TRIB2; note = Location (start to end; relative to TSS): TRIB2_39_69; note = Orientation (relative to transcription): sense; note = sgRNA Position: 12717001; note = Sequence Name: 56322-704_101_SL_seq_7716
cccgctcgctccgagatccc

SEQ ID NO: 7717 - DNA, 20 bp, Homo sapiens
  source 1..20: mol_type = genomic DNA; note = Gene: TRIB2; note = Location (start to end; relative to TSS): TRIB2_71_101; note = Orientation (relative to transcription): antisense; note = sgRNA Position: 12717013; note = Sequence Name: 56322-704_101_SL_seq_7717
ggtattaatagttacttacg

SEQ ID NO: 7718 - DNA, 20 bp, Homo sapiens
  source 1..20: mol_type = genomic DNA; note = Gene: TRIB2; note = Location (start to end; relative to TSS): TRIB2_15_45; note = Orientation (relative to transcription): sense; note = sgRNA Position: 12716977; note = Sequence Name: 56322-704_101_SL_seq_7718
cgcgcgcacacgcgcactca

SEQ ID NO: 7719 - DNA, 20 bp, Homo sapiens
  source 1..20: mol_type = genomic DNA; note = Gene: TRIB2; note = Location (start to end; relative to TSS): TRIB2_47_77; note = Orientation (relative to transcription): antisense; note = sgRNA Position: 12716989; note = Sequence Name: 56322-704_101_SL_seq_7719
cggggatctcggagcgagcg

SEQ ID NO: 7720 - DNA, 20 bp, Homo sapiens
  source 1..20: mol_type = genomic DNA; note = Gene: TRIB3; note = Location (start to end; relative to TSS): TRIB3_48_78; note = Orientation (relative to transcription): sense; note = sgRNA Position: 380834; note = Sequence Name: 56322-704_101_SL_seq_7720
gaggcccgggcgcggcgcgg

SEQ ID NO: 7721 - DNA, 20 bp, Homo sapiens
  source 1..20: mol_type = genomic DNA; note = Gene: TRIB3; note = Location (start to end; relative to TSS): TRIB3_85_115; note = Orientation (relative to transcription): sense; note = sgRNA Position: 380871; note = Sequence Name: 56322-704_101_SL_seq_7721
ggcccgagggcatcagacgg

SEQ ID NO: 7722 - DNA, 20 bp, Homo sapiens
  source 1..20: mol_type = genomic DNA; note = Gene: TRIB3; note = Location (start to end; relative to TSS): TRIB3_40_70; note = Orientation (relative to transcription): sense; note = sgRNA Position: 380826; note = Sequence Name: 56322-704_101_SL_seq_7722
agaggagagaggcccgggcg

SEQ ID NO: 7723 - DNA, 20 bp, Homo sapiens
  source 1..20: mol_type = genomic DNA; note = Gene: TRIB3; note = Location (start to end; relative to TSS): TRIB3_71_101; note = Orientation (relative to transcription): sense; note = sgRNA Position: 380857; note = Sequence Name: 56322-704_101_SL_seq_7723
atggtgcgatcccgggcccg

SEQ ID NO: 7724 - DNA, 20 bp, Homo sapiens
  source 1..20: mol_type = genomic DNA; note = Gene: TRIB3; note = Location (start to end; relative to TSS): TRIB3_31_61; note = Orientation (relative to transcription): antisense; note = sgRNA Position: 380797; note = Sequence Name: 56322-704_101_SL_seq_7724
cctctgcatccgctgcacct

SEQ ID NO: 7725 - DNA, 20 bp, Homo sapiens
  source 1..20: mol_type = genomic DNA; note = Gene: TRIB3; note = Location (start to end; relative to TSS): TRIB3_61_91; note = Orientation (relative to transcription): antisense; note = sgRNA Position: 380827; note = Sequence Name: 56322-704_101_SL_seq_7725
ccatcccccgcgccgcgccc

SEQ ID NO: 7726 - DNA, 20 bp, Homo sapiens
  source 1..20: mol_type = genomic DNA; note = Gene: TRIB3; note = Location (start to end; relative to TSS): TRIB3_22_52; note = Orientation (relative to transcription): sense; note = sgRNA Position: 380808; note = Sequence Name: 56322-704_101_SL_seq_7726
cccaggtgcagcggatgcag

SEQ ID NO: 7727 - DNA, 20 bp, Homo sapiens
  source 1..20: mol_type = genomic DNA; note = Gene: TRIB3; note = Location (start to end; relative to TSS): TRIB3_52_82; note = Orientation (relative to transcription): sense; note = sgRNA Position: 380838; note = Sequence Name: 56322-704_101_SL_seq_7727
cccgggcgcggcgcggggga

SEQ ID NO: 7728 - DNA, 20 bp, Homo sapiens
  source 1..20: mol_type = genomic DNA; note = Gene: TRIB3; note = Location (start to end; relative to TSS): TRIB3_16_46; note = Orientation (relative to transcription): antisense; note = sgRNA Position: 380782; note = Sequence Name: 56322-704_101_SL_seq_7728
cacctgggacccgccctcgc

SEQ ID NO: 7729 - DNA, 20 bp, Homo sapiens
  source 1..20: mol_type = genomic DNA; note = Gene: TRIB3; note = Location (start to end; relative to TSS): TRIB3_48_78; note = Orientation (relative to transcription): sense; note = sgRNA Position: 380834; note = Sequence Name: 56322-704_101_SL_seq_7729
gaggcccgggcgcggcgcgg

SEQ ID NO: 7730 - DNA, 20 bp, Homo sapiens
  source 1..20: mol_type = genomic DNA; note = Gene: TRIM24; note = Location (start to end; relative to TSS): TRIM24_49_79; note = Orientation (relative to transcription): antisense; note = sgRNA Position: 138460314; note = Sequence Name: 56322-704_101_SL_seq_7730
ggagaccgttcctcgcaccg

SEQ ID NO: 7731 - DNA, 20 bp, Homo sapiens
  source 1..20: mol_type = genomic DNA; note = Gene: TRIM24; note = Location (start to end; relative to TSS): TRIM24_80_110; note = Orientation (relative to transcription): sense; note = sgRNA Position: 138460365; note = Sequence Name: 56322-704_101_SL_seq_7731
ttccggccgcgccactcggg

SEQ ID NO: 7732 - DNA, 20 bp, Homo sapiens
  source 1..20: mol_type = genomic DNA; note = Gene: TRIM24; note = Location (start to end; relative to TSS): TRIM24_46_76; note = Orientation (relative to transcription): antisense; note = sgRNA Position: 138460311; note = Sequence Name: 56322-704_101_SL_seq_7732
gaccgttcctcgcaccgggg

SEQ ID NO: 7733 - DNA, 20 bp, Homo sapiens
  source 1..20: mol_type = genomic DNA; note = Gene: TRIM24; note = Location (start to end; relative to TSS): TRIM24_77_107; note = Orientation (relative to transcription): sense; note = sgRNA Position: 138460362; note = Sequence Name: 56322-704_101_SL_seq_7733
tccttccggccgcgccactc

SEQ ID NO: 7734 - DNA, 20 bp, Homo sapiens
  source 1..20: mol_type = genomic DNA; note = Gene: TRIM24; note = Location (start to end; relative to TSS): TRIM24_35_65; note = Orientation (relative to transcription): sense; note = sgRNA Position: 138460320; note = Sequence Name: 56322-704_101_SL_seq_7734
agcctccccggtgcgaggaa

SEQ ID NO: 7735 - DNA, 20 bp, Homo sapiens
  source 1..20: mol_type = genomic DNA; note = Gene: TRIM24; note = Location (start to end; relative to TSS): TRIM24_76_106; note = Orientation (relative to transcription): sense; note = sgRNA Position: 138460361; note = Sequence Name: 56322-704_101_SL_seq_7735
ctccttccggccgcgccact

SEQ ID NO: 7736 - DNA, 20 bp, Homo sapiens
  source 1..20: mol_type = genomic DNA; note = Gene: TRIM24; note = Location (start to end; relative to TSS): TRIM24_23_53; note = Orientation (relative to transcription): sense; note = sgRNA Position: 138460308; note = Sequence Name: 56322-704_101_SL_seq_7736
cggacggggtgcagcctccc

SEQ ID NO: 7737 - DNA, 20 bp, Homo sapiens
  source 1..20: mol_type = genomic DNA; note = Gene: TRIM24; note = Location (start to end; relative to TSS): TRIM24_70_100; note = Orientation (relative to transcription): antisense; note = sgRNA Position: 138460335; note = Sequence Name: 56322-704_101_SL_seq_7737
ggaaggagggtatctgtcag

SEQ ID NO: 7738 - DNA, 20 bp, Homo sapiens
  source 1..20: mol_type = genomic DNA; note = Gene: TRIM24; note = Location (start to end; relative to TSS): TRIM24_30_60; note = Orientation (relative to transcription): sense; note = sgRNA Position: 138460315; note = Sequence Name: 56322-704_101_SL_seq_7738
ggtgcagcctccccggtgcg

SEQ ID NO: 7739 - DNA, 20 bp, Homo sapiens
  source 1..20: mol_type = genomic DNA; note = Gene: TRIM24; note = Location (start to end; relative to TSS): TRIM24_63_93; note = Orientation (relative to transcription): sense; note = sgRNA Position: 138460348; note = Sequence Name: 56322-704_101_SL_seq_7739
gctgacagataccctccttc

SEQ ID NO: 7740 - DNA, 20 bp, Homo sapiens
  source 1..20: mol_type = genomic DNA; note = Gene: TRIM28; note = Location (start to end; relative to TSS): TRIM28_33_63; note = Orientation (relative to transcription): sense; note = sgRNA Position: 58544123; note = Sequence Name: 56322-704_101_SL_seq_7740
cgcgggttgaggaagaggga

SEQ ID NO: 7741 - DNA, 20 bp, Homo sapiens
  source 1..20: mol_type = genomic DNA; note = Gene: TRIM28; note = Location (start to end; relative to TSS): TRIM28_76_106; note = Orientation (relative to transcription): sense; note = sgRNA Position: 58544166; note = Sequence Name: 56322-704_101_SL_seq_7741
cacagcggcccgcttctgtg

SEQ ID NO: 7742 - DNA, 20 bp, Homo sapiens
  source 1..20: mol_type = genomic DNA; note = Gene: TRIM28; note = Location (start to end; relative to TSS): TRIM28_22_52; note = Orientation (relative to transcription): sense; note = sgRNA Position: 58544112; note = Sequence Name: 56322-704_101_SL_seq_7742
cggcgaagagacgcgggttg

SEQ ID NO: 7743 - DNA, 20 bp, Homo sapiens
  source 1..20: mol_type = genomic DNA; note = Gene: TRIM28; note = Location (start to end; relative to TSS): TRIM28_70_100; note = Orientation (relative to transcription): antisense; note = sgRNA Position: 58544140; note = Sequence Name: 56322-704_101_SL_seq_7743
ccgctgtgcgcccaagcgca

SEQ ID NO: 7744 - DNA, 20 bp, Homo sapiens
  source 1..20: mol_type = genomic DNA; note = Gene: TRIM28; note = Location (start to end; relative to TSS): TRIM28_28_58; note = Orientation (relative to transcription): sense; note = sgRNA Position: 58544118; note = Sequence Name: 56322-704_101_SL_seq_7744
agagacgcgggttgaggaag

SEQ ID NO: 7745 - DNA, 20 bp, Homo sapiens
  source 1..20: mol_type = genomic DNA; note = Gene: TRIM28; note = Location (start to end; relative to TSS): TRIM28_69_99; note = Orientation (relative to transcription): antisense; note = sgRNA Position: 58544139; note = Sequence Name: 56322-704_101_SL_seq_7745
cgctgtgcgcccaagcgcat

SEQ ID NO: 7746 - DNA, 20 bp, Homo sapiens
  source 1..20: mol_type = genomic DNA; note = Gene: TRIM28; note = Location (start to end; relative to TSS): TRIM28_29_59; note = Orientation (relative to transcription): sense; note = sgRNA Position: 58544119; note = Sequence Name: 56322-704_101_SL_seq_7746
gagacgcgggttgaggaaga

SEQ ID NO: 7747 - DNA, 20 bp, Homo sapiens
  source 1..20: mol_type = genomic DNA; note = Gene: TRIM28; note = Location (start to end; relative to TSS): TRIM28_61_91; note = Orientation (relative to transcription): sense; note = sgRNA Position: 58544151; note = Sequence Name: 56322-704_101_SL_seq_7747
ccatgcgcttgggcgcacag

SEQ ID NO: 7748 - DNA, 20 bp, Homo sapiens
  source 1..20: mol_type = genomic DNA; note = Gene: TRIM28; note = Location (start to end; relative to TSS): TRIM28_16_46; note = Orientation (relative to transcription): sense; note = sgRNA Position: 58544106; note = Sequence Name: 56322-704_101_SL_seq_7748
ctacggcggcgaagagacgc

SEQ ID NO: 7749 - DNA, 20 bp, Homo sapiens
  source 1..20: mol_type = genomic DNA; note = Gene: TRIM28; note = Location (start to end; relative to TSS): TRIM28_50_80; note = Orientation (relative to transcription): sense; note = sgRNA Position: 58544140; note = Sequence Name: 56322-704_101_SL_seq_7749
ggacggattgcccatgcgct

SEQ ID NO: 7750 - DNA, 20 bp, Homo sapiens
  source 1..20: mol_type = genomic DNA; note = Gene: TRIM33; note = Location (start to end; relative to TSS): TRIM33_29_59; note = Orientation (relative to transcription): antisense; note = sgRNA Position: 114511170; note = Sequence Name: 56322-704_101_SL_seq_7750
agccgcagccgcagcaagag

SEQ ID NO: 7751 - DNA, 20 bp, Homo sapiens
  source 1..20: mol_type = genomic DNA; note = Gene: TRIM33; note = Location (start to end; relative to TSS): TRIM33_105_135; note = Orientation (relative to transcription): antisense; note = sgRNA Position: 114511094; note = Sequence Name: 56322-704_101_SL_seq_7751
gttttcctctttgaacccgc

SEQ ID NO: 7752 - DNA, 20 bp, Homo sapiens
  source 1..20: mol_type = genomic DNA; note = Gene: TRIM33; note = Location (start to end; relative to TSS): TRIM33_24_54; note = Orientation (relative to transcription): sense; note = sgRNA Position: 114511155; note = Sequence Name: 56322-704_101_SL_seq_7752
tcttgctgcggctgcggctg

SEQ ID NO: 7753 - DNA, 20 bp, Homo sapiens
  source 1..20: mol_type = genomic DNA; note = Gene: TRIM33; note = Location (start to end; relative to TSS): TRIM33_103_133; note = Orientation (relative to transcription): sense; note = sgRNA Position: 114511076; note = Sequence Name: 56322-704_101_SL_seq_7753
gttcaaagaggaaaacatgg

SEQ ID NO: 7754 - DNA, 20 bp, Homo sapiens
  source 1..20: mol_type = genomic DNA; note = Gene: TRIM33; note = Location (start to end; relative to TSS): TRIM33_18_48; note = Orientation (relative to transcription): sense; note = sgRNA Position: 114511161; note = Sequence Name: 56322-704_101_SL_seq_7754
tgccgctcttgctgcggctg

SEQ ID NO: 7755 - DNA, 20 bp, Homo sapiens
  source 1..20: mol_type = genomic DNA; note = Gene: TRIM33; note = Location (start to end; relative to TSS): TRIM33_100_130; note = Orientation (relative to transcription): sense; note = sgRNA Position: 114511079; note = Sequence Name: 56322-704_101_SL_seq_7755
cgggttcaaagaggaaaaca

SEQ ID NO: 7756 - DNA, 20 bp, Homo sapiens
  source 1..20: mol_type = genomic DNA; note = Gene: TRIM33; note = Location (start to end; relative to TSS): TRIM33_12_42; note = Orientation (relative to transcription): sense; note = sgRNA Position: 114511167; note = Sequence Name: 56322-704_101_SL_seq_7756
ctcggctgccgctcttgctg

SEQ ID NO: 7757 - DNA, 20 bp, Homo sapiens
  source 1..20: mol_type = genomic DNA; note = Gene: TRIM33; note = Location (start to end; relative to TSS): TRIM33_91_121; note = Orientation (relative to transcription): sense; note = sgRNA Position: 114511088; note = Sequence Name: 56322-704_101_SL_seq_7757
gcggtccggcgggttcaaag

SEQ ID NO: 7758 - DNA, 20 bp, Homo sapiens
  source 1..20: mol_type = genomic DNA; note = Gene: TRIM33; note = Location (start to end; relative to TSS): TRIM33_-6_24; note = Orientation (relative to transcription): sense; note = sgRNA Position: 114511185; note = Sequence Name: 56322-704_101_SL_seq_7758
ttcgctctctcgctagctct

SEQ ID NO: 7759 - DNA, 20 bp, Homo sapiens
  source 1..20: mol_type = genomic DNA; note = Gene: TRIM33; note = Location (start to end; relative to TSS): TRIM33_29_59; note = Orientation (relative to transcription): antisense; note = sgRNA Position: 114511170; note = Sequence Name: 56322-704_101_SL_seq_7759
agccgcagccgcagcaagag

SEQ ID NO: 7760 - DNA, 20 bp, Homo sapiens
  source 1..20: mol_type = genomic DNA; note = Gene: TRIM66; note = Location (start to end; relative to TSS): TRIM66_26_56; note = Orientation (relative to transcription): antisense; note = sgRNA Position: 8682635; note = Sequence Name: 56322-704_101_SL_seq_7760
accaggacactccgtgatgg

SEQ ID NO: 7761 - DNA, 20 bp, Homo sapiens
  source 1..20: mol_type = genomic DNA; note = Gene: TRIM66; note = Location (start to end; relative to TSS): TRIM66_84_114; note = Orientation (relative to transcription): sense; note = sgRNA Position: 8682557; note = Sequence Name: 56322-704_101_SL_seq_7761
ggcgagaactgttgaagaat

SEQ ID NO: 7762 - DNA, 20 bp, Homo sapiens
  source 1..20: mol_type = genomic DNA; note = Gene: TRIM66; note = Location (start to end; relative to TSS): TRIM66_27_57; note = Orientation (relative to transcription): antisense; note = sgRNA Position: 8682634; note = Sequence Name: 56322-704_101_SL_seq_7762
caccaggacactccgtgatg

SEQ ID NO: 7763 - DNA, 20 bp, Homo sapiens
  source 1..20: mol_type = genomic DNA; note = Gene: TRIM66; note = Location (start to end; relative to TSS): TRIM66_63_93; note = Orientation (relative to transcription): sense; note = sgRNA Position: 8682578; note = Sequence Name: 56322-704_101_SL_seq_7763
ctcgttgtgctaggctcgga

SEQ ID NO: 7764 - DNA, 20 bp, Homo sapiens
  source 1..20: mol_type = genomic DNA; note = Gene: TRIM66; note = Location (start to end; relative to TSS): TRIM66_28_58; note = Orientation (relative to transcription): antisense; note = sgRNA Position: 8682633; note = Sequence Name: 56322-704_101_SL_seq_7764
ccaccaggacactccgtgat

SEQ ID NO: 7765 - DNA, 20 bp, Homo sapiens
  source 1..20: mol_type = genomic DNA; note = Gene: TRIM66; note = Location (start to end; relative to TSS): TRIM66_62_92; note = Orientation (relative to transcription): sense; note = sgRNA Position: 8682579; note = Sequence Name: 56322-704_101_SL_seq_7765
gctcgttgtgctaggctcgg

SEQ ID NO: 7766 - DNA, 20 bp, Homo sapiens
  source 1..20: mol_type = genomic DNA; note = Gene: TRIM66; note = Location (start to end; relative to TSS): TRIM66_19_49; note = Orientation (relative to transcription): sense; note = sgRNA Position: 8682622; note = Sequence Name: 56322-704_101_SL_seq_7766
cccatcacggagtgtcctgg

SEQ ID NO: 7767 - DNA, 20 bp, Homo sapiens
  source 1..20: mol_type = genomic DNA; note = Gene: TRIM66; note = Location (start to end; relative to TSS): TRIM66_59_89; note = Orientation (relative to transcription): sense; note = sgRNA Position: 8682582; note = Sequence Name: 56322-704_101_SL_seq_7767
gaggctcgttgtgctaggct

SEQ ID NO: 7768 - DNA, 20 bp, Homo sapiens
  source 1..20: mol_type = genomic DNA; note = Gene: TRIM66; note = Location (start to end; relative to TSS): TRIM66_22_52; note = Orientation (relative to transcription): sense; note = sgRNA Position: 8682619; note = Sequence Name: 56322-704_101_SL_seq_7768
atcacggagtgtcctggtgg

SEQ ID NO: 7769 - DNA, 20 bp, Homo sapiens
  source 1..20: mol_type = genomic DNA; note = Gene: TRIM66; note = Location (start to end; relative to TSS): TRIM66_54_84; note = Orientation (relative to transcription): sense; note = sgRNA Position: 8682587; note = Sequence Name: 56322-704_101_SL_seq_7769
tcggtgaggctcgttgtgct

SEQ ID NO: 7770 - DNA, 20 bp, Homo sapiens
  source 1..20: mol_type = genomic DNA; note = Gene: TRIO; note = Location (start to end; relative to TSS): TRIO_32_62; note = Orientation (relative to transcription): antisense; note = sgRNA Position: 14143380; note = Sequence Name: 56322-704_101_SL_seq_7770
acctccgggatcacgggcgc

SEQ ID NO: 7771 - DNA, 20 bp, Homo sapiens
  source 1..20: mol_type = genomic DNA; note = Gene: TRIO; note = Location (start to end; relative to TSS): TRIO_70_100; note = Orientation (relative to transcription): antisense; note = sgRNA Position: 14143418; note = Sequence Name: 56322-704_101_SL_seq_7771
acgcgcagtcgcgagggcgg

SEQ ID NO: 7772 - DNA, 20 bp, Homo sapiens
  source 1..20: mol_type = genomic DNA; note = Gene: TRIO; note = Location (start to end; relative to TSS): TRIO_19_49; note = Orientation (relative to transcription): sense; note = sgRNA Position: 14143387; note = Sequence Name: 56322-704_101_SL_seq_7772
gccgccggcgcccgtgatcc

SEQ ID NO: 7773 - DNA, 20 bp, Homo sapiens
  source 1..20: mol_type = genomic DNA; note = Gene: TRIO; note = Location (start to end; relative to TSS): TRIO_69_99; note = Orientation (relative to transcription): sense; note = sgRNA Position: 14143437; note = Sequence Name: 56322-704_101_SL_seq_7773
ctcgcgactgcgcgtccggg

SEQ ID NO: 7774 - DNA, 20 bp, Homo sapiens
  source 1..20: mol_type = genomic DNA; note = Gene: TRIO; note = Location (start to end; relative to TSS): TRIO_22_52; note = Orientation (relative to transcription): sense; note = sgRNA Position: 14143390; note = Sequence Name: 56322-704_101_SL_seq_7774
gccggcgcccgtgatcccgg

SEQ ID NO: 7775 - DNA, 20 bp, Homo sapiens
  source 1..20: mol_type = genomic DNA; note = Gene: TRIO; note = Location (start to end; relative to TSS): TRIO_66_96; note = Orientation (relative to transcription): sense; note = sgRNA Position: 14143434; note = Sequence Name: 56322-704_101_SL_seq_7775
gccctcgcgactgcgcgtcc

SEQ ID NO: 7776 - DNA, 20 bp, Homo sapiens
  source 1..20: mol_type = genomic DNA; note = Gene: TRIO; note = Location (start to end; relative to TSS): TRIO_29_59; note = Orientation (relative to transcription): antisense; note = sgRNA Position: 14143377; note = Sequence Name: 56322-704_101_SL_seq_7776
tccgggatcacgggcgccgg

SEQ ID NO: 7777 - DNA, 20 bp, Homo sapiens
  source 1..20: mol_type = genomic DNA; note = Gene: TRIO; note = Location (start to end; relative to TSS): TRIO_65_95; note = Orientation (relative to transcription): sense; note = sgRNA Position: 14143433; note = Sequence Name: 56322-704_101_SL_seq_7777
cgccctcgcgactgcgcgtc

SEQ ID NO: 7778 - DNA, 20 bp, Homo sapiens
  source 1..20: mol_type = genomic DNA; note = Gene: TRIO; note = Location (start to end; relative to TSS): TRIO_31_61; note = Orientation (relative to transcription): sense; note = sgRNA Position: 14143399; note = Sequence Name: 56322-704_101_SL_seq_7778
cgtgatcccggaggtctcgc

SEQ ID NO: 7779 - DNA, 20 bp, Homo sapiens
  source 1..20: mol_type = genomic DNA; note = Gene: TRIO; note = Location (start to end; relative to TSS): TRIO_63_93; note = Orientation (relative to transcription): antisense; note = sgRNA Position: 14143411; note = Sequence Name: 56322-704_101_SL_seq_7779
gtcgcgagggcgggggcccg

SEQ ID NO: 7780 - DNA, 20 bp, Homo sapiens
  source 1..20: mol_type = genomic DNA; note = Gene: TRPM6; note = Location (start to end; relative to TSS): TRPM6_19_49; note = Orientation (relative to transcription): sense; note = sgRNA Position: 74887878; note = Sequence Name: 56322-704_101_SL_seq_7780
tcagacagggctttgggagc

SEQ ID NO: 7781 - DNA, 20 bp, Homo sapiens
  source 1..20: mol_type = genomic DNA; note = Gene: TRPM6; note = Location (start to end; relative to TSS): TRPM6_93_123; note = Orientation (relative to transcription): sense; note = sgRNA Position: 74887804; note = Sequence Name: 56322-704_101_SL_seq_7781
agctcaggctgctcgactgg

SEQ ID NO: 7782 - DNA, 20 bp, Homo sapiens
  source 1..20: mol_type = genomic DNA; note = Gene: TRPM6; note = Location (start to end; relative to TSS): TRPM6_20_50; note = Orientation (relative to transcription): sense; note = sgRNA Position: 74887877; note = Sequence Name: 56322-704_101_SL_seq_7782
cagacagggctttgggagca

SEQ ID NO: 7783 - DNA, 20 bp, Homo sapiens
  source 1..20: mol_type = genomic DNA; note = Gene: TRPM6; note = Location (start to end; relative to TSS): TRPM6_90_120; note = Orientation (relative to transcription): sense; note = sgRNA Position: 74887807; note = Sequence Name: 56322-704_101_SL_seq_7783
gtaagctcaggctgctcgac

SEQ ID NO: 7784 - DNA, 20 bp, Homo sapiens
  source 1..20: mol_type = genomic DNA; note = Gene: TRPM6; note = Location (start to end; relative to TSS): TRPM6_14_44; note = Orientation (relative to transcription): antisense; note = sgRNA Position: 74887903; note = Sequence Name: 56322-704_101_SL_seq_7784
cctgtctgagcttttaactg

SEQ ID NO: 7785 - DNA, 20 bp, Homo sapiens
  source 1..20: mol_type = genomic DNA; note = Gene: TRPM6; note = Location (start to end; relative to TSS): TRPM6_78_108; note = Orientation (relative to transcription): sense; note = sgRNA Position: 74887819; note = Sequence Name: 56322-704_101_SL_seq_7785
gagcgcttgcaggtaagctc

SEQ ID NO: 7786 - DNA, 20 bp, Homo sapiens
  source 1..20: mol_type = genomic DNA; note = Gene: TRPM6; note = Location (start to end; relative to TSS): TRPM6_13_43; note = Orientation (relative to transcription): sense; note = sgRNA Position: 74887884; note = Sequence Name: 56322-704_101_SL_seq_7786
aaaagctcagacagggcttt

SEQ ID NO: 7787 - DNA, 20 bp, Homo sapiens
  source 1..20: mol_type = genomic DNA; note = Gene: TRPM6; note = Location (start to end; relative to TSS): TRPM6_68_98; note = Orientation (relative to transcription): sense; note = sgRNA Position: 74887829; note = Sequence Name: 56322-704_101_SL_seq_7787
acctgtcttggagcgcttgc

SEQ ID NO: 7788 - DNA, 20 bp, Homo sapiens
  source 1..20: mol_type = genomic DNA; note = Gene: TRPM6; note = Location (start to end; relative to TSS): TRPM6_12_42; note = Orientation (relative to transcription): sense; note = sgRNA Position: 74887885; note = Sequence Name: 56322-704_101_SL_seq_7788
taaaagctcagacagggctt

SEQ ID NO: 7789 - DNA, 20 bp, Homo sapiens
  source 1..20: mol_type = genomic DNA; note = Gene: TRPM6; note = Location (start to end; relative to TSS): TRPM6_56_86; note = Orientation (relative to transcription): sense; note = sgRNA Position: 74887841; note = Sequence Name: 56322-704_101_SL_seq_7789
gatgaaagaacaacctgtct

SEQ ID NO: 7790 - DNA, 20 bp, Homo sapiens
  source 1..20: mol_type = genomic DNA; note = Gene: TRPM7; note = Location (start to end; relative to TSS): TRPM7_42_72; note = Orientation (relative to transcription): antisense; note = sgRNA Position: 50686751; note = Sequence Name: 56322-704_101_SL_seq_7790
cctccgggtgactggccaca

SEQ ID NO: 7791 - DNA, 20 bp, Homo sapiens
  source 1..20: mol_type = genomic DNA; note = Gene: TRPM7; note = Location (start to end; relative to TSS): TRPM7_109_139; note = Orientation (relative to transcription): antisense; note = sgRNA Position: 50686684; note = Sequence Name: 56322-704_101_SL_seq_7791
tctcagaactaactcagctc

SEQ ID NO: 7792 - DNA, 20 bp, Homo sapiens
  source 1..20: mol_type = genomic DNA; note = Gene: TRPM7; note = Location (start to end; relative to TSS): TRPM7_33_63; note = Orientation (relative to transcription): sense; note = sgRNA Position: 50686740; note = Sequence Name: 56322-704_101_SL_seq_7792
ccctgtggccagtcacccgg

SEQ ID NO: 7793 - DNA, 20 bp, Homo sapiens
  source 1..20: mol_type = genomic DNA; note = Gene: TRPM7; note = Location (start to end; relative to TSS): TRPM7_103_133; note = Orientation (relative to transcription): sense; note = sgRNA Position: 50686670; note = Sequence Name: 56322-704_101_SL_seq_7793
gagctgagttagttctgaga

SEQ ID NO: 7794 - DNA, 20 bp, Homo sapiens
  source 1..20: mol_type = genomic DNA; note = Gene: TRPM7; note = Location (start to end; relative to TSS): TRPM7_39_69; note = Orientation (relative to transcription): sense; note = sgRNA Position: 50686734; note = Sequence Name: 56322-704_101_SL_seq_7794
ggccagtcacccggaggagt

SEQ ID NO: 7795 - DNA, 20 bp, Homo sapiens
  source 1..20: mol_type = genomic DNA; note = Gene: TRPM7; note = Location (start to end; relative to TSS): TRPM7_81_111; note = Orientation (relative to transcription): sense; note = sgRNA Position: 50686692; note = Sequence Name: 56322-704_101_SL_seq_7795
tcggcttctgctgctagcgc

SEQ ID NO: 7796 - DNA, 20 bp, Homo sapiens
  source 1..20: mol_type = genomic DNA; note = Gene: TRPM7; note = Location (start to end; relative to TSS): TRPM7_30_60; note = Orientation (relative to transcription): sense; note = sgRNA Position: 50686743; note = Sequence Name: 56322-704_101_SL_seq_7796
cgtccctgtggccagtcacc

SEQ ID NO: 7797 - DNA, 20 bp, Homo sapiens
  source 1..20: mol_type = genomic DNA; note = Gene: TRPM7; note = Location (start to end; relative to TSS): TRPM7_62_92; note = Orientation (relative to transcription): sense; note = sgRNA Position: 50686711; note = Sequence Name: 56322-704_101_SL_seq_7797
tcgcacaattatgaaagact

SEQ ID NO: 7798 - DNA, 20 bp, Homo sapiens
  source 1..20: mol_type = genomic DNA; note = Gene: TRPM7; note = Location (start to end; relative to TSS): TRPM7_18_48; note = Orientation (relative to transcription): sense; note = sgRNA Position: 50686755; note = Sequence Name: 56322-704_101_SL_seq_7798
cgggcgcgggcgcgtccctg

SEQ ID NO: 7799 - DNA, 20 bp, Homo sapiens
  source 1..20: mol_type = genomic DNA; note = Gene: TRPM7; note = Location (start to end; relative to TSS): TRPM7_50_80; note = Orientation (relative to transcription): antisense; note = sgRNA Position: 50686743; note = Sequence Name: 56322-704_101_SL_seq_7799
gaccaactcctccgggtgac

SEQ ID NO: 7800 - DNA, 20 bp, Homo sapiens
  source 1..20: mol_type = genomic DNA; note = Gene: TRRAP; note = Location (start to end; relative to TSS): TRRAP_31_61; note = Orientation (relative to transcription): sense; note = sgRNA Position: 98878589; note = Sequence Name: 56322-704_101_SL_seq_7800
agggctcggctgggggtcgc

SEQ ID NO: 7801 - DNA, 20 bp, Homo sapiens
  source 1..20: mol_type = genomic DNA; note = Gene: TRRAP; note = Location (start to end; relative to TSS): TRRAP_73_103; note = Orientation (relative to transcription): sense; note = sgRNA Position: 98878631; note = Sequence Name: 56322-704_101_SL_seq_7801
aggagccgggccgccgaggt

SEQ ID NO: 7802 - DNA, 20 bp, Homo sapiens
  source 1..20: mol_type = genomic DNA; note = Gene: TRRAP; note = Location (start to end; relative to TSS): TRRAP_32_62; note = Orientation (relative to transcription): sense; note = sgRNA Position: 98878590; note = Sequence Name: 56322-704_101_SL_seq_7802
gggctcggctgggggtcgcc

SEQ ID NO: 7803 - DNA, 20 bp, Homo sapiens
  source 1..20: mol_type = genomic DNA; note = Gene: TRRAP; note = Location (start to end; relative to TSS): TRRAP_72_102; note = Orientation (relative to transcription): antisense; note = sgRNA Position: 98878610; note = Sequence Name: 56322-704_101_SL_seq_7803
cggcccggctcctgcaggcc

SEQ ID NO: 7804 - DNA, 20 bp, Homo sapiens
  source 1..20: mol_type = genomic DNA; note = Gene: TRRAP; note = Location (start to end; relative to TSS): TRRAP_22_52; note = Orientation (relative to transcription): sense; note = sgRNA Position: 98878580; note = Sequence Name: 56322-704_101_SL_seq_7804
gttgcgacgagggctcggct

SEQ ID NO: 7805 - DNA, 20 bp, Homo sapiens
  source 1..20: mol_type = genomic DNA; note = Gene: TRRAP; note = Location (start to end; relative to TSS): TRRAP_69_99; note = Orientation (relative to transcription): sense; note = sgRNA Position: 98878627; note = Sequence Name: 56322-704_101_SL_seq_7805
ctgcaggagccgggccgccg

SEQ ID NO: 7806 - DNA, 20 bp, Homo sapiens
  source 1..20: mol_type = genomic DNA; note = Gene: TRRAP; note = Location (start to end; relative to TSS): TRRAP_23_53; note = Orientation (relative to transcription): sense; note = sgRNA Position: 98878581; note = Sequence Name: 56322-704_101_SL_seq_7806
ttgcgacgagggctcggctg

SEQ ID NO: 7807 - DNA, 20 bp, Homo sapiens
  source 1..20: mol_type = genomic DNA; note = Gene: TRRAP; note = Location (start to end; relative to TSS): TRRAP_60_90; note = Orientation (relative to transcription): sense; note = sgRNA Position: 98878618; note = Sequence Name: 56322-704_101_SL_seq_7807
gggccgggcctgcaggagcc

SEQ ID NO: 7808 - DNA, 20 bp, Homo sapiens
  source 1..20: mol_type = genomic DNA; note = Gene: TRRAP; note = Location (start to end; relative to TSS): TRRAP_24_54; note = Orientation (relative to transcription): sense; note = sgRNA Position: 98878582; note = Sequence Name: 56322-704_101_SL_seq_7808
tgcgacgagggctcggctgg

SEQ ID NO: 7809 - DNA, 20 bp, Homo sapiens
  source 1..20: mol_type = genomic DNA; note = Gene: TRRAP; note = Location (start to end; relative to TSS): TRRAP_59_89; note = Orientation (relative to transcription): antisense; note = sgRNA Position: 98878597; note = Sequence Name: 56322-704_101_SL_seq_7809
gcaggcccggcccgcgaccc

SEQ ID NO: 7810 - DNA, 20 bp, Homo sapiens
  source 1..20: mol_type = genomic DNA; note = Gene: TSSK1B; note = Location (start to end; relative to TSS): TSSK1B_49_79; note = Orientation (relative to transcription): antisense; note = sgRNA Position: 113434936; note = Sequence Name: 56322-704_101_SL_seq_7810
tcctggatagagagtccttt

SEQ ID NO: 7811 - DNA, 20 bp, Homo sapiens
  source 1..20: mol_type = genomic DNA; note = Gene: TSSK1B; note = Location (start to end; relative to TSS): TSSK1B_87_117; note = Orientation (relative to transcription): sense; note = sgRNA Position: 113434878; note = Sequence Name: 56322-704_101_SL_seq_7811
atgcgcctcggggctgtaga

SEQ ID NO: 7812 - DNA, 20 bp, Homo sapiens
  source 1..20: mol_type = genomic DNA; note = Gene: TSSK1B; note = Location (start to end; relative to TSS): TSSK1B_39_69; note = Orientation (relative to transcription): sense; note = sgRNA Position: 113434926; note = Sequence Name: 56322-704_101_SL_seq_7812
gcccaaaggactctctatcc

SEQ ID NO: 7813 - DNA, 20 bp, Homo sapiens
  source 1..20: mol_type = genomic DNA; note = Gene: TSSK1B; note = Location (start to end; relative to TSS): TSSK1B_86_116; note = Orientation (relative to transcription): sense; note = sgRNA Position: 113434879; note = Sequence Name: 56322-704_101_SL_seq_7813
catgcgcctcggggctgtag

SEQ ID NO: 7814 - DNA, 20 bp, Homo sapiens
  source 1..20: mol_type = genomic DNA; note = Gene: TSSK1B; note = Location (start to end; relative to TSS): TSSK1B_40_70; note = Orientation (relative to transcription): antisense; note = sgRNA Position: 113434945; note = Sequence Name: 56322-704_101_SL_seq_7814
gagagtcctttgggctggcc

SEQ ID NO: 7815 - DNA, 20 bp, Homo sapiens
  source 1..20: mol_type = genomic DNA; note = Gene: TSSK1B; note = Location (start to end; relative to TSS): TSSK1B_77_107; note = Orientation (relative to transcription): sense; note = sgRNA Position: 113434888; note = Sequence Name: 56322-704_101_SL_seq_7815
ctgctggcccatgcgcctcg

SEQ ID NO: 7816 - DNA, 20 bp, Homo sapiens
  source 1..20: mol_type = genomic DNA; note = Gene: TSSK1B; note = Location (start to end; relative to TSS): TSSK1B_25_55; note = Orientation (relative to transcription): sense; note = sgRNA Position: 113434940; note = Sequence Name: 56322-704_101_SL_seq_7816
agcaggcctggccagcccaa

SEQ ID NO: 7817 - DNA, 20 bp, Homo sapiens
  source 1..20: mol_type = genomic DNA; note = Gene: TSSK1B; note = Location (start to end; relative to TSS): TSSK1B_61_91; note = Orientation (relative to transcription): sense; note = sgRNA Position: 113434904; note = Sequence Name: 56322-704_101_SL_seq_7817
gatgtaaatgagcacactgc

SEQ ID NO: 7818 - DNA, 20 bp, Homo sapiens
  source 1..20: mol_type = genomic DNA; note = Gene: TSSK1B; note = Location (start to end; relative to TSS): TSSK1B_16_46; note = Orientation (relative to transcription): antisense; note = sgRNA Position: 113434969; note = Sequence Name: 56322-704_101_SL_seq_7818
ctgctgttcctgcctcctag

SEQ ID NO: 7819 - DNA, 20 bp, Homo sapiens
  source 1..20: mol_type = genomic DNA; note = Gene: TSSK1B; note = Location (start to end; relative to TSS): TSSK1B_49_79; note = Orientation (relative to transcription): antisense; note = sgRNA Position: 113434936; note = Sequence Name: 56322-704_101_SL_seq_7819
tcctggatagagagtccttt

SEQ ID NO: 7820 - DNA, 20 bp, Homo sapiens
  source 1..20: mol_type = genomic DNA; note = Gene: TSSK2; note = Location (start to end; relative to TSS): TSSK2_20_50; note = Orientation (relative to transcription): sense; note = sgRNA Position: 19131354; note = Sequence Name: 56322-704_101_SL_seq_7820
atgcctgctggcccacatga

SEQ ID NO: 7821 - DNA, 20 bp, Homo sapiens
  source 1..20: mol_type = genomic DNA; note = Gene: TSSK2; note = Location (start to end; relative to TSS): TSSK2_84_114; note = Orientation (relative to transcription): sense; note = sgRNA Position: 19131418; note = Sequence Name: 56322-704_101_SL_seq_7821
tggacgatgccacagtccta

SEQ ID NO: 7822 - DNA, 20 bp, Homo sapiens
  source 1..20: mol_type = genomic DNA; note = Gene: TSSK2; note = Location (start to end; relative to TSS): TSSK2_21_51; note = Orientation (relative to transcription): sense; note = sgRNA Position: 19131355; note = Sequence Name: 56322-704_101_SL_seq_7822
tgcctgctggcccacatgac

SEQ ID NO: 7823 - DNA, 20 bp, Homo sapiens
  source 1..20: mol_type = genomic DNA; note = Gene: TSSK2; note = Location (start to end; relative to TSS): TSSK2_83_113; note = Orientation (relative to transcription): antisense; note = sgRNA Position: 19131397; note = Sequence Name: 56322-704_101_SL_seq_7823
gtggcatcgtccatggtgcc

SEQ ID NO: 7824 - DNA, 20 bp, Homo sapiens
  source 1..20: mol_type = genomic DNA; note = Gene: TSSK2; note = Location (start to end; relative to TSS): TSSK2_22_52; note = Orientation (relative to transcription): sense; note = sgRNA Position: 19131356; note = Sequence Name: 56322-704_101_SL_seq_7824
gcctgctggcccacatgacg

SEQ ID NO: 7825 - DNA, 20 bp, Homo sapiens
  source 1..20: mol_type = genomic DNA; note = Gene: TSSK2; note = Location (start to end; relative to TSS): TSSK2_74_104; note = Orientation (relative to transcription): antisense; note = sgRNA Position: 19131388; note = Sequence Name: 56322-704_101_SL_seq_7825
tccatggtgccaggagcgac

SEQ ID NO: 7826 - DNA, 20 bp, Homo sapiens
  source 1..20: mol_type = genomic DNA; note = Gene: TSSK2; note = Location (start to end; relative to TSS): TSSK2_23_53; note = Orientation (relative to transcription): sense; note = sgRNA Position: 19131357; note = Sequence Name: 56322-704_101_SL_seq_7826
cctgctggcccacatgacgg

SEQ ID NO: 7827 - DNA, 20 bp, Homo sapiens
  source 1..20: mol_type = genomic DNA; note = Gene: TSSK2; note = Location (start to end; relative to TSS): TSSK2_64_94; note = Orientation (relative to transcription): sense; note = sgRNA Position: 19131398; note = Sequence Name: 56322-704_101_SL_seq_7827
gccagtcgctcctggcacca

SEQ ID NO: 7828 - DNA, 20 bp, Homo sapiens
  source 1..20: mol_type = genomic DNA; note = Gene: TSSK2; note = Location (start to end; relative to TSS): TSSK2_24_54; note = Orientation (relative to transcription): sense; note = sgRNA Position: 19131358; note = Sequence Name: 56322-704_101_SL_seq_7828
ctgctggcccacatgacggg

SEQ ID NO: 7829 - DNA, 20 bp, Homo sapiens
  source 1..20: mol_type = genomic DNA; note = Gene: TSSK2; note = Location (start to end; relative to TSS): TSSK2_56_86; note = Orientation (relative to transcription): sense; note = sgRNA Position: 19131390; note = Sequence Name: 56322-704_101_SL_seq_7829
gcagcggcgccagtcgctcc

SEQ ID NO: 7830 - DNA, 20 bp, Homo sapiens
  source 1..20: mol_type = genomic DNA; note = Gene: TSSK3; note = Location (start to end; relative to TSS): TSSK3_45_75; note = Orientation (relative to transcription): sense; note = sgRNA Position: 32362610; note = Sequence Name: 56322-704_101_SL_seq_7830
atgaagtccttggggagaaa

SEQ ID NO: 7831 - DNA, 20 bp, Homo sapiens
  source 1..20: mol_type = genomic DNA; note = Gene: TSSK3; note = Location (start to end; relative to TSS): TSSK3_88_118; note = Orientation (relative to transcription): sense; note = sgRNA Position: 32362653; note = Sequence Name: 56322-704_101_SL_seq_7831
ggagtagagctgcctctcag

SEQ ID NO: 7832 - DNA, 20 bp, Homo sapiens
  source 1..20: mol_type = genomic DNA; note = Gene: TSSK3; note = Location (start to end; relative to TSS): TSSK3_36_66; note = Orientation (relative to transcription): sense; note = sgRNA Position: 32362601; note = Sequence Name: 56322-704_101_SL_seq_7832
cggctgcggatgaagtcctt

SEQ ID NO: 7833 - DNA, 20 bp, Homo sapiens
  source 1..20: mol_type = genomic DNA; note = Gene: TSSK3; note = Location (start to end; relative to TSS): TSSK3_83_113; note = Orientation (relative to transcription): antisense; note = sgRNA Position: 32362628; note = Sequence Name: 56322-704_101_SL_seq_7833
ctctactccaccatcgccct

SEQ ID NO: 7834 - DNA, 20 bp, Homo sapiens
  source 1..20: mol_type = genomic DNA; note = Gene: TSSK3; note = Location (start to end; relative to TSS): TSSK3_37_67; note = Orientation (relative to transcription): sense; note = sgRNA Position: 32362602; note = Sequence Name: 56322-704_101_SL_seq_7834
ggctgcggatgaagtccttg

SEQ ID NO: 7835 - DNA, 20 bp, Homo sapiens
  source 1..20: mol_type = genomic DNA; note = Gene: TSSK3; note = Location (start to end; relative to TSS): TSSK3_67_97; note = Orientation (relative to transcription): sense; note = sgRNA Position: 32362632; note = Sequence Name: 56322-704_101_SL_seq_7835
gagcaggccaagggcgatgg

SEQ ID NO: 7836 - DNA, 20 bp, Homo sapiens
  source 1..20: mol_type = genomic DNA; note = Gene: TSSK3; note = Location (start to end; relative to TSS): TSSK3_22_52; note = Orientation (relative to transcription): sense; note = sgRNA Position: 32362587; note = Sequence Name: 56322-704_101_SL_seq_7836
tctaacgctgggggcggctg

SEQ ID NO: 7837 - DNA, 20 bp, Homo sapiens
  source 1..20: mol_type = genomic DNA; note = Gene: TSSK3; note = Location (start to end; relative to TSS): TSSK3_57_87; note = Orientation (relative to transcription): sense; note = sgRNA Position: 32362622; note = Sequence Name: 56322-704_101_SL_seq_7837
gggagaaaaggagcaggcca

SEQ ID NO: 7838 - DNA, 20 bp, Homo sapiens
  source 1..20: mol_type = genomic DNA; note = Gene: TSSK3; note = Location (start to end; relative to TSS): TSSK3_16_46; note = Orientation (relative to transcription): sense; note = sgRNA Position: 32362581; note = Sequence Name: 56322-704_101_SL_seq_7838
gaatgttctaacgctggggg

SEQ ID NO: 7839 - DNA, 20 bp, Homo sapiens
  source 1..20: mol_type = genomic DNA; note = Gene: TSSK3; note = Location (start to end; relative to TSS): TSSK3_51_81; note = Orientation (relative to transcription): sense; note = sgRNA Position: 32362616; note = Sequence Name: 56322-704_101_SL_seq_7839
tccttggggagaaaaggagc

SEQ ID NO: 7840 - DNA, 20 bp, Homo sapiens
  source 1..20: mol_type = genomic DNA; note = Gene: TSSK4; note = Location (start to end; relative to TSS): TSSK4_49_79; note = Orientation (relative to transcription): antisense; note = sgRNA Position: 24205751; note = Sequence Name: 56322-704_101_SL_seq_7840
cctccactaggaacttggag

SEQ ID NO: 7841 - DNA, 20 bp, Homo sapiens
  source 1..20: mol_type = genomic DNA; note = Gene: TSSK4; note = Location (start to end; relative to TSS): TSSK4_89_119; note = Orientation (relative to transcription): sense; note = sgRNA Position: 24205811; note = Sequence Name: 56322-704_101_SL_seq_7841
tgactatataggcaagcatt

SEQ ID NO: 7842 - DNA, 20 bp, Homo sapiens
  source 1..20: mol_type = genomic DNA; note = Gene: TSSK4; note = Location (start to end; relative to TSS): TSSK4_40_70; note = Orientation (relative to transcription): sense; note = sgRNA Position: 24205762; note = Sequence Name: 56322-704_101_SL_seq_7842
cccctccaagttcctagtgg

SEQ ID NO: 7843 - DNA, 20 bp, Homo sapiens
  source 1..20: mol_type = genomic DNA; note = Gene: TSSK4; note = Location (start to end; relative to TSS): TSSK4_87_117; note = Orientation (relative to transcription): antisense; note = sgRNA Position: 24205789; note = Sequence Name: 56322-704_101_SL_seq_7843
cctatatagtcacacgagtc

SEQ ID NO: 7844 - DNA, 20 bp, Homo sapiens
  source 1..20: mol_type = genomic DNA; note = Gene: TSSK4; note = Location (start to end; relative to TSS): TSSK4_41_71; note = Orientation (relative to transcription): sense; note = sgRNA Position: 24205763; note = Sequence Name: 56322-704_101_SL_seq_7844
ccctccaagttcctagtgga

SEQ ID NO: 7845 - DNA, 20 bp, Homo sapiens
  source 1..20: mol_type = genomic DNA; note = Gene: TSSK4; note = Location (start to end; relative to TSS): TSSK4_86_116; note = Orientation (relative to transcription): antisense; note = sgRNA Position: 24205788; note = Sequence Name: 56322-704_101_SL_seq_7845
ctatatagtcacacgagtct

SEQ ID NO: 7846 - DNA, 20 bp, Homo sapiens
  source 1..20: mol_type = genomic DNA; note = Gene: TSSK4; note = Location (start to end; relative to TSS): TSSK4_37_67; note = Orientation (relative to transcription): sense; note = sgRNA Position: 24205759; note = Sequence Name: 56322-704_101_SL_seq_7846
ttccccctccaagttcctag

SEQ ID NO: 7847 - DNA, 20 bp, Homo sapiens
  source 1..20: mol_type = genomic DNA; note = Gene: TSSK4; note = Location (start to end; relative to TSS): TSSK4_79_109; note = Orientation (relative to transcription): antisense; note = sgRNA Position: 24205781; note = Sequence Name: 56322-704_101_SL_seq_7847
gtcacacgagtctgggatgc

SEQ ID NO: 7848 - DNA, 20 bp, Homo sapiens
  source 1..20: mol_type = genomic DNA; note = Gene: TSSK4; note = Location (start to end; relative to TSS): TSSK4_48_78; note = Orientation (relative to transcription): antisense; note = sgRNA Position: 24205750; note = Sequence Name: 56322-704_101_SL_seq_7848
ctccactaggaacttggagg

SEQ ID NO: 7849 - DNA, 20 bp, Homo sapiens
  source 1..20: mol_type = genomic DNA; note = Gene: TSSK4; note = Location (start to end; relative to TSS): TSSK4_78_108; note = Orientation (relative to transcription): sense; note = sgRNA Position: 24205800; note = Sequence Name: 56322-704_101_SL_seq_7849
ccagactcgtgtgactatat

SEQ ID NO: 7850 - DNA, 20 bp, Homo sapiens
  source 1..20: mol_type = genomic DNA; note = Gene: TSSK6; note = Location (start to end; relative to TSS): TSSK6_38_68; note = Orientation (relative to transcription): sense; note = sgRNA Position: 19515486; note = Sequence Name: 56322-704_101_SL_seq_7850
ttagacccgagattggagtc

SEQ ID NO: 7851 - DNA, 20 bp, Homo sapiens
  source 1..20: mol_type = genomic DNA; note = Gene: TSSK6; note = Location (start to end; relative to TSS): TSSK6_87_117; note = Orientation (relative to transcription): antisense; note = sgRNA Position: 19515457; note = Sequence Name: 56322-704_101_SL_seq_7851
ggcgcacggggggcaggagg

SEQ ID NO: 7852 - DNA, 20 bp, Homo sapiens
  source 1..20: mol_type = genomic DNA; note = Gene: TSSK6; note = Location (start to end; relative to TSS): TSSK6_40_70; note = Orientation (relative to transcription): antisense; note = sgRNA Position: 19515504; note = Sequence Name: 56322-704_101_SL_seq_7852
ccaatctcgggtctaagcca

SEQ ID NO: 7853 - DNA, 20 bp, Homo sapiens
  source 1..20: mol_type = genomic DNA; note = Gene: TSSK6; note = Location (start to end; relative to TSS): TSSK6_73_103; note = Orientation (relative to transcription): antisense; note = sgRNA Position: 19515471; note = Sequence Name: 56322-704_101_SL_seq_7853
aggaggcggctgctgtcggg

SEQ ID NO: 7854 - DNA, 20 bp, Homo sapiens
  source 1..20: mol_type = genomic DNA; note = Gene: TSSK6; note = Location (start to end; relative to TSS): TSSK6_31_61; note = Orientation (relative to transcription): sense; note = sgRNA Position: 19515493; note = Sequence Name: 56322-704_101_SL_seq_7854
ccatggcttagacccgagat

SEQ ID NO: 7855 - DNA, 20 bp, Homo sapiens
  source 1..20: mol_type = genomic DNA; note = Gene: TSSK6; note = Location (start to end; relative to TSS): TSSK6_70_100; note = Orientation (relative to transcription): antisense; note = sgRNA Position: 19515474; note = Sequence Name: 56322-704_101_SL_seq_7855
aggcggctgctgtcgggggg

SEQ ID NO: 7856 - DNA, 20 bp, Homo sapiens
  source 1..20: mol_type = genomic DNA; note = Gene: TSSK6; note = Location (start to end; relative to TSS): TSSK6_33_63; note = Orientation (relative to transcription): antisense; note = sgRNA Position: 19515511; note = Sequence Name: 56322-704_101_SL_seq_7856
cgggtctaagccatggcgct

SEQ ID NO: 7857 - DNA, 20 bp, Homo sapiens
  source 1..20: mol_type = genomic DNA; note = Gene: TSSK6; note = Location (start to end; relative to TSS): TSSK6_66_96; note = Orientation (relative to transcription): antisense; note = sgRNA Position: 19515478; note = Sequence Name: 56322-704_101_SL_seq_7857
ggctgctgtcggggggcggc

SEQ ID NO: 7858 - DNA, 20 bp, Homo sapiens
  source 1..20: mol_type = genomic DNA; note = Gene: TSSK6; note = Location (start to end; relative to TSS): TSSK6_14_44; note = Orientation (relative to transcription): sense; note = sgRNA Position: 19515510; note = Sequence Name: 56322-704_101_SL_seq_7858
ggtgtaggtgccaagcgcca

SEQ ID NO: 7859 - DNA, 20 bp, Homo sapiens
  source 1..20: mol_type = genomic DNA; note = Gene: TSSK6; note = Location (start to end; relative to TSS): TSSK6_52_82; note = Orientation (relative to transcription): antisense; note = sgRNA Position: 19515492; note = Sequence Name: 56322-704_101_SL_seq_7859
ggcggccggactccaatctc

SEQ ID NO: 7860 - DNA, 20 bp, Homo sapiens
  source 1..20: mol_type = genomic DNA; note = Gene: TTBK1; note = Location (start to end; relative to TSS): TTBK1_26_56; note = Orientation (relative to transcription): sense; note = sgRNA Position: 43243533; note = Sequence Name: 56322-704_101_SL_seq_7860
ccgtcgcccaaggaggatcg

SEQ ID NO: 7861 - DNA, 20 bp, Homo sapiens
  source 1..20: mol_type = genomic DNA; note = Gene: TTBK1; note = Location (start to end; relative to TSS): TTBK1_63_93; note = Orientation (relative to transcription): antisense; note = sgRNA Position: 43243550; note = Sequence Name: 56322-704_101_SL_seq_7861
cgacccggatcatcccggcc

SEQ ID NO: 7862 - DNA, 20 bp, Homo sapiens
  source 1..20: mol_type = genomic DNA; note = Gene: TTBK1; note = Location (start to end; relative to TSS): TTBK1_23_53; note = Orientation (relative to transcription): antisense; note = sgRNA Position: 43243510; note = Sequence Name: 56322-704_101_SL_seq_7862
ttgggcgacggcggcggcag

SEQ ID NO: 7863 - DNA, 20 bp, Homo sapiens
  source 1..20: mol_type = genomic DNA; note = Gene: TTBK1; note = Location (start to end; relative to TSS): TTBK1_59_89; note = Orientation (relative to transcription): sense; note = sgRNA Position: 43243566; note = Sequence Name: 56322-704_101_SL_seq_7863
ccgggatgatccgggtcgga

SEQ ID NO: 7864 - DNA, 20 bp, Homo sapiens
  source 1..20: mol_type = genomic DNA; note = Gene: TTBK1; note = Location (start to end; relative to TSS): TTBK1_24_54; note = Orientation (relative to transcription): sense; note = sgRNA Position: 43243531; note = Sequence Name: 56322-704_101_SL_seq_7864
cgccgtcgcccaaggaggat

SEQ ID NO: 7865 - DNA, 20 bp, Homo sapiens
  source 1..20: mol_type = genomic DNA; note = Gene: TTBK1; note = Location (start to end; relative to TSS): TTBK1_58_88; note = Orientation (relative to transcription): antisense; note = sgRNA Position: 43243545; note = Sequence Name: 56322-704_101_SL_seq_7865
cggatcatcccggcccggcc

SEQ ID NO: 7866 - DNA, 20 bp, Homo sapiens
  source 1..20: mol_type = genomic DNA; note = Gene: TTBK1; note = Location (start to end; relative to TSS): TTBK1_25_55; note = Orientation (relative to transcription): sense; note = sgRNA Position: 43243532; note = Sequence Name: 56322-704_101_SL_seq_7866
gccgtcgcccaaggaggatc

SEQ ID NO: 7867 - DNA, 20 bp, Homo sapiens
  source 1..20: mol_type = genomic DNA; note = Gene: TTBK1; note = Location (start to end; relative to TSS): TTBK1_55_85; note = Orientation (relative to transcription): sense; note = sgRNA Position: 43243562; note = Sequence Name: 56322-704_101_SL_seq_7867
cgggccgggatgatccgggt

SEQ ID NO: 7868 - DNA, 20 bp, Homo sapiens
  source 1..20: mol_type = genomic DNA; note = Gene: TTBK1; note = Location (start to end; relative to TSS): TTBK1_19_49; note = Orientation (relative to transcription): sense; note = sgRNA Position: 43243526; note = Sequence Name: 56322-704_101_SL_seq_7868
gccgccgccgtcgcccaagg

SEQ ID NO: 7869 - DNA, 20 bp, Homo sapiens
  source 1..20: mol_type = genomic DNA; note = Gene: TTBK1; note = Location (start to end; relative to TSS): TTBK1_51_81; note = Orientation (relative to transcription): sense; note = sgRNA Position: 43243558; note = Sequence Name: 56322-704_101_SL_seq_7869
gggccgggccgggatgatcc

SEQ ID NO: 7870 - DNA, 20 bp, Homo sapiens
  source 1..20: mol_type = genomic DNA; note = Gene: TTBK2; note = Location (start to end; relative to TSS): TTBK2_45_75; note = Orientation (relative to transcription): sense; note = sgRNA Position: 42920709; note = Sequence Name: 56322-704_101_SL_seq_7870
gcaggagggggagcaggtgc

SEQ ID NO: 7871 - DNA, 20 bp, Homo sapiens
  source 1..20: mol_type = genomic DNA; note = Gene: TTBK2; note = Location (start to end; relative to TSS): TTBK2_101_131; note = Orientation (relative to transcription): antisense; note = sgRNA Position: 42920673; note = Sequence Name: 56322-704_101_SL_seq_7871
gctgctgttactgctgctgc

SEQ ID NO: 7872 - DNA, 20 bp, Homo sapiens
  source 1..20: mol_type = genomic DNA; note = Gene: TTBK2; note = Location (start to end; relative to TSS): TTBK2_39_69; note = Orientation (relative to transcription): sense; note = sgRNA Position: 42920715; note = Sequence Name: 56322-704_101_SL_seq_7872
gcggcggcaggagggggagc

SEQ ID NO: 7873 - DNA, 20 bp, Homo sapiens
  source 1..20: mol_type = genomic DNA; note = Gene: TTBK2; note = Location (start to end; relative to TSS): TTBK2_73_103; note = Orientation (relative to transcription): sense; note = sgRNA Position: 42920681; note = Sequence Name: 56322-704_101_SL_seq_7873
gagcagcggcttgggggagc

SEQ ID NO: 7874 - DNA, 20 bp, Homo sapiens
  source 1..20: mol_type = genomic DNA; note = Gene: TTBK2; note = Location (start to end; relative to TSS): TTBK2_31_61; note = Orientation (relative to transcription): sense; note = sgRNA Position: 42920723; note = Sequence Name: 56322-704_101_SL_seq_7874
aggcggcggcggcggcagga

SEQ ID NO: 7875 - DNA, 20 bp, Homo sapiens
  source 1..20: mol_type = genomic DNA; note = Gene: TTBK2; note = Location (start to end; relative to TSS): TTBK2_64_94; note = Orientation (relative to transcription): sense; note = sgRNA Position: 42920690; note = Sequence Name: 56322-704_101_SL_seq_7875
ctggcacaagagcagcggct

SEQ ID NO: 7876 - DNA, 20 bp, Homo sapiens
  source 1..20: mol_type = genomic DNA; note = Gene: TTBK2; note = Location (start to end; relative to TSS): TTBK2_14_44; note = Orientation (relative to transcription): sense; note = sgRNA Position: 42920740; note = Sequence Name: 56322-704_101_SL_seq_7876
tgggagcggtggggacgagg

SEQ ID NO: 7877 - DNA, 20 bp, Homo sapiens
  source 1..20: mol_type = genomic DNA; note = Gene: TTBK2; note = Location (start to end; relative to TSS): TTBK2_59_89; note = Orientation (relative to transcription): sense; note = sgRNA Position: 42920695; note = Sequence Name: 56322-704_101_SL_seq_7877
aggtgctggcacaagagcag

SEQ ID NO: 7878 - DNA, 20 bp, Homo sapiens
  source 1..20: mol_type = genomic DNA; note = Gene: TTBK2; note = Location (start to end; relative to TSS): TTBK2_11_41; note = Orientation (relative to transcription): antisense; note = sgRNA Position: 42920763; note = Sequence Name: 56322-704_101_SL_seq_7878
caccgctcccatcgccgctg

SEQ ID NO: 7879 - DNA, 20 bp, Homo sapiens
  source 1..20: mol_type = genomic DNA; note = Gene: TTBK2; note = Location (start to end; relative to TSS): TTBK2_45_75; note = Orientation (relative to transcription): sense; note = sgRNA Position: 42920709; note = Sequence Name: 56322-704_101_SL_seq_7879
gcaggagggggagcaggtgc

SEQ ID NO: 7880 - DNA, 20 bp, Homo sapiens
  source 1..20: mol_type = genomic DNA; note = Gene: TTK; note = Location (start to end; relative to TSS): TTK_46_76; note = Orientation (relative to transcription): antisense; note = sgRNA Position: 80004701; note = Sequence Name: 56322-704_101_SL_seq_7880
ttacctacagaaagctgcgc

SEQ ID NO: 7881 - DNA, 20 bp, Homo sapiens
  source 1..20: mol_type = genomic DNA; note = Gene: TTK; note = Location (start to end; relative to TSS): TTK_88_118; note = Orientation (relative to transcription): antisense; note = sgRNA Position: 80004743; note = Sequence Name: 56322-704_101_SL_seq_7881
gcggctgttcctcagtgcgc

SEQ ID NO: 7882 - DNA, 20 bp, Homo sapiens
  source 1..20: mol_type = genomic DNA; note = Gene: TTK; note = Location (start to end; relative to TSS): TTK_44_74; note = Orientation (relative to transcription): antisense; note = sgRNA Position: 80004699; note = Sequence Name: 56322-704_101_SL_seq_7882
acctacagaaagctgcgctg

SEQ ID NO: 7883 - DNA, 20 bp, Homo sapiens
  source 1..20: mol_type = genomic DNA; note = Gene: TTK; note = Location (start to end; relative to TSS): TTK_85_115; note = Orientation (relative to transcription): sense; note = sgRNA Position: 80004760; note = Sequence Name: 56322-704_101_SL_seq_7883
cactgaggaacagccgcagc

SEQ ID NO: 7884 - DNA, 20 bp, Homo sapiens
  source 1..20: mol_type = genomic DNA; note = Gene: TTK; note = Location (start to end; relative to TSS): TTK_45_75; note = Orientation (relative to transcription): antisense; note = sgRNA Position: 80004700; note = Sequence Name: 56322-704_101_SL_seq_7884
tacctacagaaagctgcgct

SEQ ID NO: 7885 - DNA, 20 bp, Homo sapiens
  source 1..20: mol_type = genomic DNA; note = Gene: TTK; note = Location (start to end; relative to TSS): TTK_80_110; note = Orientation (relative to transcription): antisense; note = sgRNA Position: 80004735; note = Sequence Name: 56322-704_101_SL_seq_7885
tcctcagtgcgccggtgcac

SEQ ID NO: 7886 - DNA, 20 bp, Homo sapiens
  source 1..20: mol_type = genomic DNA; note = Gene: TTK; note = Location (start to end; relative to TSS): TTK_34_64; note = Orientation (relative to transcription): sense; note = sgRNA Position: 80004709; note = Sequence Name: 56322-704_101_SL_seq_7886
tccccagcgcagctttctgt

SEQ ID NO: 7887 - DNA, 20 bp, Homo sapiens
  source 1..20: mol_type = genomic DNA; note = Gene: TTK; note = Location (start to end; relative to TSS): TTK_70_100; note = Orientation (relative to transcription): sense; note = sgRNA Position: 80004745; note = Sequence Name: 56322-704_101_SL_seq_7887
accggtgcaccggcgcactg

SEQ ID NO: 7888 - DNA, 20 bp, Homo sapiens
  source 1..20: mol_type = genomic DNA; note = Gene: TTK; note = Location (start to end; relative to TSS): TTK_30_60; note = Orientation (relative to transcription): antisense; note = sgRNA Position: 80004685; note = Sequence Name: 56322-704_101_SL_seq_7888
gcgctggggaaatgaaaaga

SEQ ID NO: 7889 - DNA, 20 bp, Homo sapiens
  source 1..20: mol_type = genomic DNA; note = Gene: TTK; note = Location (start to end; relative to TSS): TTK_60_90; note = Orientation (relative to transcription): sense; note = sgRNA Position: 80004735; note = Sequence Name: 56322-704_101_SL_seq_7889
gttctgtcttaccggtgcac

SEQ ID NO: 7890 - DNA, 20 bp, Homo sapiens
  source 1..20: mol_type = genomic DNA; note = Gene: TTN; note = Location (start to end; relative to TSS): TTN_21_51; note = Orientation (relative to transcription): antisense; note = sgRNA Position: 178807398; note = Sequence Name: 56322-704_101_SL_seq_7890
caatccctacacccgaggcg

SEQ ID NO: 7891 - DNA, 20 bp, Homo sapiens
  source 1..20: mol_type = genomic DNA; note = Gene: TTN; note = Location (start to end; relative to TSS): TTN_118_148; note = Orientation (relative to transcription): sense; note = sgRNA Position: 178807281; note = Sequence Name: 56322-704_101_SL_seq_7891
cagaaaaaccaactctccat

SEQ ID NO: 7892 - DNA, 20 bp, Homo sapiens
  source 1..20: mol_type = genomic DNA; note = Gene: TTN; note = Location (start to end; relative to TSS): TTN_26_56; note = Orientation (relative to transcription): antisense; note = sgRNA Position: 178807393; note = Sequence Name: 56322-704_101_SL_seq_7892
ctatgcaatccctacacccg

SEQ ID NO: 7893 - DNA, 20 bp, Homo sapiens
  source 1..20: mol_type = genomic DNA; note = Gene: TTN; note = Location (start to end; relative to TSS): TTN_106_136; note = Orientation (relative to transcription): antisense; note = sgRNA Position: 178807313; note = Sequence Name: 56322-704_101_SL_seq_7893
tgaccatctccgacatgaat

SEQ ID NO: 7894 - DNA, 20 bp, Homo sapiens
  source 1..20: mol_type = genomic DNA; note = Gene: TTN; note = Location (start to end; relative to TSS): TTN_17_47; note = Orientation (relative to transcription): antisense; note = sgRNA Position: 178807402; note = Sequence Name: 56322-704_101_SL_seq_7894
ccctacacccgaggcgaggc

SEQ ID NO: 7895 - DNA, 20 bp, Homo sapiens
  source 1..20: mol_type = genomic DNA; note = Gene: TTN; note = Location (start to end; relative to TSS): TTN_94_124; note = Orientation (relative to transcription): sense; note = sgRNA Position: 178807305; note = Sequence Name: 56322-704_101_SL_seq_7895
tcaccgattcatgtcggaga

SEQ ID NO: 7896 - DNA, 20 bp, Homo sapiens
  source 1..20: mol_type = genomic DNA; note = Gene: TTN; note = Location (start to end; relative to TSS): TTN_16_46; note = Orientation (relative to transcription): antisense; note = sgRNA Position: 178807403; note = Sequence Name: 56322-704_101_SL_seq_7896
cctacacccgaggcgaggct

SEQ ID NO: 7897 - DNA, 20 bp, Homo sapiens
  source 1..20: mol_type = genomic DNA; note = Gene: TTN; note = Location (start to end; relative to TSS): TTN_88_118; note = Orientation (relative to transcription): sense; note = sgRNA Position: 178807311; note = Sequence Name: 56322-704_101_SL_seq_7897
agaggctcaccgattcatgt

SEQ ID NO: 7898 - DNA, 20 bp, Homo sapiens
  source 1..20: mol_type = genomic DNA; note = Gene: TTN; note = Location (start to end; relative to TSS): TTN_8_38; note = Orientation (relative to transcription): sense; note = sgRNA Position: 178807391; note = Sequence Name: 56322-704_101_SL_seq_7898
ccagcctcgcctcgggtgta

SEQ ID NO: 7899 - DNA, 20 bp, Homo sapiens
  source 1..20: mol_type = genomic DNA; note = Gene: TTN; note = Location (start to end; relative to TSS): TTN_70_100; note = Orientation (relative to transcription): sense; note = sgRNA Position: 178807329; note = Sequence Name: 56322-704_101_SL_seq_7899
agttttgtttttaggattag

SEQ ID NO: 7900 - DNA, 20 bp, Homo sapiens
  source 1..20: mol_type = genomic DNA; note = Gene: TXK; note = Location (start to end; relative to TSS): TXK_62_92; note = Orientation (relative to transcription): antisense; note = sgRNA Position: 48134184; note = Sequence Name: 56322-704_101_SL_seq_7900
tcatggtagccccttctgcg

SEQ ID NO: 7901 - DNA, 20 bp, Homo sapiens
  source 1..20: mol_type = genomic DNA; note = Gene: TXK; note = Location (start to end; relative to TSS): TXK_112_142; note = Orientation (relative to transcription): sense; note = sgRNA Position: 48134114; note = Sequence Name: 56322-704_101_SL_seq_7901
tatttttggggcttgttctg

SEQ ID NO: 7902 - DNA, 20 bp, Homo sapiens
  source 1..20: mol_type = genomic DNA; note = Gene: TXK; note = Location (start to end; relative to TSS): TXK_63_93; note = Orientation (relative to transcription): antisense; note = sgRNA Position: 48134183; note = Sequence Name: 56322-704_101_SL_seq_7902
atcatggtagccccttctgc

SEQ ID NO: 7903 - DNA, 20 bp, Homo sapiens
  source 1..20: mol_type = genomic DNA; note = Gene: TXK; note = Location (start to end; relative to TSS): TXK_100_130; note = Orientation (relative to transcription): sense; note = sgRNA Position: 48134126; note = Sequence Name: 56322-704_101_SL_seq_7903
ggctttgtcatttatttttg

SEQ ID NO: 7904 - DNA, 20 bp, Homo sapiens
  source 1..20: mol_type = genomic DNA; note = Gene: TXK; note = Location (start to end; relative to TSS): TXK_64_94; note = Orientation (relative to transcription): antisense; note = sgRNA Position: 48134182; note = Sequence Name: 56322-704_101_SL_seq_7904
gatcatggtagccccttctg

SEQ ID NO: 7905 - DNA, 20 bp, Homo sapiens
  source 1..20: mol_type = genomic DNA; note = Gene: TXK; note = Location (start to end; relative to TSS): TXK_94_124; note = Orientation (relative to transcription): antisense; note = sgRNA Position: 48134152; note = Sequence Name: 56322-704_101_SL_seq_7905
acaaagcccatcttactcac

SEQ ID NO: 7906 - DNA, 20 bp, Homo sapiens
  source 1..20: mol_type = genomic DNA; note = Gene: TXK; note = Location (start to end; relative to TSS): TXK_44_74; note = Orientation (relative to transcription): sense; note = sgRNA Position: 48134182; note = Sequence Name: 56322-704_101_SL_seq_7906
ttgtgtgctccccgcagaag

SEQ ID NO: 7907 - DNA, 20 bp, Homo sapiens
  source 1..20: mol_type = genomic DNA; note = Gene: TXK; note = Location (start to end; relative to TSS): TXK_79_109; note = Orientation (relative to transcription): antisense; note = sgRNA Position: 48134167; note = Sequence Name: 56322-704_101_SL_seq_7907
ctcacaggaggaaaggatca

SEQ ID NO: 7908 - DNA, 20 bp, Homo sapiens
  source 1..20: mol_type = genomic DNA; note = Gene: TXK; note = Location (start to end; relative to TSS): TXK_43_73; note = Orientation (relative to transcription): sense; note = sgRNA Position: 48134183; note = Sequence Name: 56322-704_101_SL_seq_7908
gttgtgtgctccccgcagaa

SEQ ID NO: 7909 - DNA, 20 bp, Homo sapiens
  source 1..20: mol_type = genomic DNA; note = Gene: TXK; note = Location (start to end; relative to TSS): TXK_78_108; note = Orientation (relative to transcription): sense; note = sgRNA Position: 48134148; note = Sequence Name: 56322-704_101_SL_seq_7909
ctttcctcctgtgagtaaga

SEQ ID NO: 7910 - DNA, 20 bp, Homo sapiens
  source 1..20: mol_type = genomic DNA; note = Gene: TYK2; note = Location (start to end; relative to TSS): TYK2_42_72; note = Orientation (relative to transcription): sense; note = sgRNA Position: 10380506; note = Sequence Name: 56322-704_101_SL_seq_7910
ttcccccggaagggtgagtc

SEQ ID NO: 7911 - DNA, 20 bp, Homo sapiens
  source 1..20: mol_type = genomic DNA; note = Gene: TYK2; note = Location (start to end; relative to TSS): TYK2_92_122; note = Orientation (relative to transcription): sense; note = sgRNA Position: 10380456; note = Sequence Name: 56322-704_101_SL_seq_7911
aggtcctcaggaagaagccg

SEQ ID NO: 7912 - DNA, 20 bp, Homo sapiens
  source 1..20: mol_type = genomic DNA; note = Gene: TYK2; note = Location (start to end; relative to TSS): TYK2_32_62; note = Orientation (relative to transcription): sense; note = sgRNA Position: 10380516; note = Sequence Name: 56322-704_101_SL_seq_7912
cgagcttgtgttcccccgga

SEQ ID NO: 7913 - DNA, 20 bp, Homo sapiens
  source 1..20: mol_type = genomic DNA; note = Gene: TYK2; note = Location (start to end; relative to TSS): TYK2_80_110; note = Orientation (relative to transcription): sense; note = sgRNA Position: 10380468; note = Sequence Name: 56322-704_101_SL_seq_7913
gagcgcggccggaggtcctc

SEQ ID NO: 7914 - DNA, 20 bp, Homo sapiens
  source 1..20: mol_type = genomic DNA; note = Gene: TYK2; note = Location (start to end; relative to TSS): TYK2_33_63; note = Orientation (relative to transcription): sense; note = sgRNA Position: 10380515; note = Sequence Name: 56322-704_101_SL_seq_7914
gagcttgtgttcccccggaa

SEQ ID NO: 7915 - DNA, 20 bp, Homo sapiens
  source 1..20: mol_type = genomic DNA; note = Gene: TYK2; note = Location (start to end; relative to TSS): TYK2_72_102; note = Orientation (relative to transcription): sense; note = sgRNA Position: 10380476; note = Sequence Name: 56322-704_101_SL_seq_7915
cgcggaaggagcgcggccgg

SEQ ID NO: 7916 - DNA, 20 bp, Homo sapiens
  source 1..20: mol_type = genomic DNA; note = Gene: TYK2; note = Location (start to end; relative to TSS): TYK2_34_64; note = Orientation (relative to transcription): antisense; note = sgRNA Position: 10380534; note = Sequence Name: 56322-704_101_SL_seq_7916
ggggaacacaagctcgaacc

SEQ ID NO: 7917 - DNA, 20 bp, Homo sapiens
  source 1..20: mol_type = genomic DNA; note = Gene: TYK2; note = Location (start to end; relative to TSS): TYK2_65_95; note = Orientation (relative to transcription): sense; note = sgRNA Position: 10380483; note = Sequence Name: 56322-704_101_SL_seq_7917
acgcgggcgcggaaggagcg

SEQ ID NO: 7918 - DNA, 20 bp, Homo sapiens
  source 1..20: mol_type = genomic DNA; note = Gene: TYK2; note = Location (start to end; relative to TSS): TYK2_28_58; note = Orientation (relative to transcription): sense; note = sgRNA Position: 10380520; note = Sequence Name: 56322-704_101_SL_seq_7918
ggttcgagcttgtgttcccc

SEQ ID NO: 7919 - DNA, 20 bp, Homo sapiens
  source 1..20: mol_type = genomic DNA; note = Gene: TYK2; note = Location (start to end; relative to TSS): TYK2_58_88; note = Orientation (relative to transcription): sense; note = sgRNA Position: 10380490; note = Sequence Name: 56322-704_101_SL_seq_7919
agtctggacgcgggcgcgga

SEQ ID NO: 7920 - DNA, 20 bp, Homo sapiens
  source 1..20: mol_type = genomic DNA; note = Gene: TYRO3; note = Location (start to end; relative to TSS): TYRO3_18_48; note = Orientation (relative to transcription): sense; note = sgRNA Position: 41559256; note = Sequence Name: 56322-704_101_SL_seq_7920
tggtgcggcgtcgccgccga

SEQ ID NO: 7921 - DNA, 20 bp, Homo sapiens
  source 1..20: mol_type = genomic DNA; note = Gene: TYRO3; note = Location (start to end; relative to TSS): TYRO3_82_112; note = Orientation (relative to transcription): antisense; note = sgRNA Position: 41559300; note = Sequence Name: 56322-704_101_SL_seq_7921
ggcggcggcagcggcagcgg

SEQ ID NO: 7922 - DNA, 20 bp, Homo sapiens
  source 1..20: mol_type = genomic DNA; note = Gene: TYRO3; note = Location (start to end; relative to TSS): TYRO3_20_50; note = Orientation (relative to transcription): antisense; note = sgRNA Position: 41559238; note = Sequence Name: 56322-704_101_SL_seq_7922
cggcgacgccgcaccatgcc

SEQ ID NO: 7923 - DNA, 20 bp, Homo sapiens
  source 1..20: mol_type = genomic DNA; note = Gene: TYRO3; note = Location (start to end; relative to TSS): TYRO3_80_110; note = Orientation (relative to transcription): sense; note = sgRNA Position: 41559318; note = Sequence Name: 56322-704_101_SL_seq_7923
tgccgctgccgccgccaccg

SEQ ID NO: 7924 - DNA, 20 bp, Homo sapiens
  source 1..20: mol_type = genomic DNA; note = Gene: TYRO3; note = Location (start to end; relative to TSS): TYRO3_21_51; note = Orientation (relative to transcription): antisense; note = sgRNA Position: 41559239; note = Sequence Name: 56322-704_101_SL_seq_7924
gcggcgacgccgcaccatgc

SEQ ID NO: 7925 - DNA, 20 bp, Homo sapiens
  source 1..20: mol_type = genomic DNA; note = Gene: TYRO3; note = Location (start to end; relative to TSS): TYRO3_80_110; note = Orientation (relative to transcription): sense; note = sgRNA Position: 41559318; note = Sequence Name: 56322-704_101_SL_seq_7925
tgccgctgccgccgccaccg

SEQ ID NO: 7926 - DNA, 20 bp, Homo sapiens
  source 1..20: mol_type = genomic DNA; note = Gene: TYRO3; note = Location (start to end; relative to TSS): TYRO3_15_45; note = Orientation (relative to transcription): antisense; note = sgRNA Position: 41559233; note = Sequence Name: 56322-704_101_SL_seq_7926
acgccgcaccatgccgggcc

SEQ ID NO: 7927 - DNA, 20 bp, Homo sapiens
  source 1..20: mol_type = genomic DNA; note = Gene: TYRO3; note = Location (start to end; relative to TSS): TYRO3_47_77; note = Orientation (relative to transcription): sense; note = sgRNA Position: 41559285; note = Sequence Name: 56322-704_101_SL_seq_7927
ggcggagcatggggcggccg

SEQ ID NO: 7928 - DNA, 20 bp, Homo sapiens
  source 1..20: mol_type = genomic DNA; note = Gene: TYRO3; note = Location (start to end; relative to TSS): TYRO3_3_33; note = Orientation (relative to transcription): sense; note = sgRNA Position: 41559241; note = Sequence Name: 56322-704_101_SL_seq_7928
gggccgggcccggcatggtg

SEQ ID NO: 7929 - DNA, 20 bp, Homo sapiens
  source 1..20: mol_type = genomic DNA; note = Gene: TYRO3; note = Location (start to end; relative to TSS): TYRO3_37_67; note = Orientation (relative to transcription): sense; note = sgRNA Position: 41559275; note = Sequence Name: 56322-704_101_SL_seq_7929
atggcgctgaggcggagcat

SEQ ID NO: 7930 - DNA, 20 bp, Homo sapiens
  source 1..20: mol_type = genomic DNA; note = Gene: UCK1; note = Location (start to end; relative to TSS): UCK1_50_80; note = Orientation (relative to transcription): sense; note = sgRNA Position: 131531189; note = Sequence Name: 56322-704_101_SL_seq_7930
ggggacccgatgcgcgggag

SEQ ID NO: 7931 - DNA, 20 bp, Homo sapiens
  source 1..20: mol_type = genomic DNA; note = Gene: UCK1; note = Location (start to end; relative to TSS): UCK1_85_115; note = Orientation (relative to transcription): antisense; note = sgRNA Position: 131531174; note = Sequence Name: 56322-704_101_SL_seq_7931
gcctcccgccgaagccatct

SEQ ID NO: 7932 - DNA, 20 bp, Homo sapiens
  source 1..20: mol_type = genomic DNA; note = Gene: UCK1; note = Location (start to end; relative to TSS): UCK1_45_75; note = Orientation (relative to transcription): sense; note = sgRNA Position: 131531194; note = Sequence Name: 56322-704_101_SL_seq_7932
ggcgcggggacccgatgcgc

SEQ ID NO: 7933 - DNA, 20 bp, Homo sapiens
  source 1..20: mol_type = genomic DNA; note = Gene: UCK1; note = Location (start to end; relative to TSS): UCK1_75_105; note = Orientation (relative to transcription): sense; note = sgRNA Position: 131531164; note = Sequence Name: 56322-704_101_SL_seq_7933
gccgagatggcttcggcggg

SEQ ID NO: 7934 - DNA, 20 bp, Homo sapiens
  source 1..20: mol_type = genomic DNA; note = Gene: UCK1; note = Location (start to end; relative to TSS): UCK1_39_69; note = Orientation (relative to transcription): antisense; note = sgRNA Position: 131531220; note = Sequence Name: 56322-704_101_SL_seq_7934
cccgcgcccgccccttcccc

SEQ ID NO: 7935 - DNA, 20 bp, Homo sapiens
  source 1..20: mol_type = genomic DNA; note = Gene: UCK1; note = Location (start to end; relative to TSS): UCK1_71_101; note = Orientation (relative to transcription): sense; note = sgRNA Position: 131531168; note = Sequence Name: 56322-704_101_SL_seq_7935
ggaggccgagatggcttcgg

SEQ ID NO: 7936 - DNA, 20 bp, Homo sapiens
  source 1..20: mol_type = genomic DNA; note = Gene: UCK1; note = Location (start to end; relative to TSS): UCK1_34_64; note = Orientation (relative to transcription): antisense; note = sgRNA Position: 131531225; note = Sequence Name: 56322-704_101_SL_seq_7936
gcccgccccttccccaggcc

SEQ ID NO: 7937 - DNA, 20 bp, Homo sapiens
  source 1..20: mol_type = genomic DNA; note = Gene: UCK1; note = Location (start to end; relative to TSS): UCK1_64_94; note = Orientation (relative to transcription): antisense; note = sgRNA Position: 131531195; note = Sequence Name: 56322-704_101_SL_seq_7937
ggcctccgctcccgcgcatc

SEQ ID NO: 7938 - DNA, 20 bp, Homo sapiens
  source 1..20: mol_type = genomic DNA; note = Gene: UCK1; note = Location (start to end; relative to TSS): UCK1_24_54; note = Orientation (relative to transcription): sense; note = sgRNA Position: 131531215; note = Sequence Name: 56322-704_101_SL_seq_7938
gccgggcctggggaaggggc

SEQ ID NO: 7939 - DNA, 20 bp, Homo sapiens
  source 1..20: mol_type = genomic DNA; note = Gene: UCK1; note = Location (start to end; relative to TSS): UCK1_62_92; note = Orientation (relative to transcription): sense; note = sgRNA Position: 131531177; note = Sequence Name: 56322-704_101_SL_seq_7939
cgcgggagcggaggccgaga

SEQ ID NO: 7940 - DNA, 20 bp, Homo sapiens
  source 1..20: mol_type = genomic DNA; note = Gene: UCK2; note = Location (start to end; relative to TSS): UCK2_50_80; note = Orientation (relative to transcription): sense; note = sgRNA Position: 165827690; note = Sequence Name: 56322-704_101_SL_seq_7940
ccccgtcaccgggctccgag

SEQ ID NO: 7941 - DNA, 20 bp, Homo sapiens
  source 1..20: mol_type = genomic DNA; note = Gene: UCK2; note = Location (start to end; relative to TSS): UCK2_96_126; note = Orientation (relative to transcription): sense; note = sgRNA Position: 165827736; note = Sequence Name: 56322-704_101_SL_seq_7941
tcagccccggcagcgcccag

SEQ ID NO: 7942 - DNA, 20 bp, Homo sapiens
  source 1..20: mol_type = genomic DNA; note = Gene: UCK2; note = Location (start to end; relative to TSS): UCK2_43_73; note = Orientation (relative to transcription): antisense; note = sgRNA Position: 165827663; note = Sequence Name: 56322-704_101_SL_seq_7942
gacggggctgggtttcccga

SEQ ID NO: 7943 - DNA, 20 bp, Homo sapiens
  source 1..20: mol_type = genomic DNA; note = Gene: UCK2; note = Location (start to end; relative to TSS): UCK2_83_113; note = Orientation (relative to transcription): sense; note = sgRNA Position: 165827723; note = Sequence Name: 56322-704_101_SL_seq_7943
agcgacagcggcctcagccc

SEQ ID NO: 7944 - DNA, 20 bp, Homo sapiens
  source 1..20: mol_type = genomic DNA; note = Gene: UCK2; note = Location (start to end; relative to TSS): UCK2_39_69; note = Orientation (relative to transcription): sense; note = sgRNA Position: 165827679; note = Sequence Name: 56322-704_101_SL_seq_7944
gggaaacccagccccgtcac

SEQ ID NO: 7945 - DNA, 20 bp, Homo sapiens
  source 1..20: mol_type = genomic DNA; note = Gene: UCK2; note = Location (start to end; relative to TSS): UCK2_74_104; note = Orientation (relative to transcription): antisense; note = sgRNA Position: 165827694; note = Sequence Name: 56322-704_101_SL_seq_7945
tcgctcgcctgcgagccgct

SEQ ID NO: 7946 - DNA, 20 bp, Homo sapiens
  source 1..20: mol_type = genomic DNA; note = Gene: UCK2; note = Location (start to end; relative to TSS): UCK2_40_70; note = Orientation (relative to transcription): sense; note = sgRNA Position: 165827680; note = Sequence Name: 56322-704_101_SL_seq_7946
ggaaacccagccccgtcacc

SEQ ID NO: 7947 - DNA, 20 bp, Homo sapiens
  source 1..20: mol_type = genomic DNA; note = Gene: UCK2; note = Location (start to end; relative to TSS): UCK2_71_101; note = Orientation (relative to transcription): sense; note = sgRNA Position: 165827711; note = Sequence Name: 56322-704_101_SL_seq_7947
ggctcgcaggcgagcgacag

SEQ ID NO: 7948 - DNA, 20 bp, Homo sapiens
  source 1..20: mol_type = genomic DNA; note = Gene: UCK2; note = Location (start to end; relative to TSS): UCK2_19_49; note = Orientation (relative to transcription): sense; note = sgRNA Position: 165827659; note = Sequence Name: 56322-704_101_SL_seq_7948
ggaaggctcttggctccttc

SEQ ID NO: 7949 - DNA, 20 bp, Homo sapiens
  source 1..20: mol_type = genomic DNA; note = Gene: UCK2; note = Location (start to end; relative to TSS): UCK2_50_80; note = Orientation (relative to transcription): sense; note = sgRNA Position: 165827690; note = Sequence Name: 56322-704_101_SL_seq_7949
ccccgtcaccgggctccgag

SEQ ID NO: 7950 - DNA, 20 bp, Homo sapiens
  source 1..20: mol_type = genomic DNA; note = Gene: UCKL1; note = Location (start to end; relative to TSS): UCKL1_33_63; note = Orientation (relative to transcription): antisense; note = sgRNA Position: 63956379; note = Sequence Name: 56322-704_101_SL_seq_7950
ggcgcagccatggcgctcgg

SEQ ID NO: 7951 - DNA, 20 bp, Homo sapiens
  source 1..20: mol_type = genomic DNA; note = Gene: UCKL1; note = Location (start to end; relative to TSS): UCKL1_78_108; note = Orientation (relative to transcription): antisense; note = sgRNA Position: 63956334; note = Sequence Name: 56322-704_101_SL_seq_7951
gtaggtggcgacgtgggcga

SEQ ID NO: 7952 - DNA, 20 bp, Homo sapiens
  source 1..20: mol_type = genomic DNA; note = Gene: UCKL1; note = Location (start to end; relative to TSS): UCKL1_36_66; note = Orientation (relative to transcription): antisense; note = sgRNA Position: 63956376; note = Sequence Name: 56322-704_101_SL_seq_7952
gggggcgcagccatggcgct

SEQ ID NO: 7953 - DNA, 20 bp, Homo sapiens
  source 1..20: mol_type = genomic DNA; note = Gene: UCKL1; note = Location (start to end; relative to TSS): UCKL1_71_101; note = Orientation (relative to transcription): sense; note = sgRNA Position: 63956321; note = Sequence Name: 56322-704_101_SL_seq_7953
ttcgcccacgtcgccaccta

SEQ ID NO: 7954 - DNA, 20 bp, Homo sapiens
  source 1..20: mol_type = genomic DNA; note = Gene: UCKL1; note = Location (start to end; relative to TSS): UCKL1_29_59; note = Orientation (relative to transcription): sense; note = sgRNA Position: 63956363; note = Sequence Name: 56322-704_101_SL_seq_7954
gagcgccatggctgcgcccc

SEQ ID NO: 7955 - DNA, 20 bp, Homo sapiens
  source 1..20: mol_type = genomic DNA; note = Gene: UCKL1; note = Location (start to end; relative to TSS): UCKL1_61_91; note = Orientation (relative to transcription): antisense; note = sgRNA Position: 63956351; note = Sequence Name: 56322-704_101_SL_seq_7955
cgaaggatcagcgtccgcgc

SEQ ID NO: 7956 - DNA, 20 bp, Homo sapiens
  source 1..20: mol_type = genomic DNA; note = Gene: UCKL1; note = Location (start to end; relative to TSS): UCKL1_21_51; note = Orientation (relative to transcription): antisense; note = sgRNA Position: 63956391; note = Sequence Name: 56322-704_101_SL_seq_7956
gcgctcggaggcctctttgc

SEQ ID NO: 7957 - DNA, 20 bp, Homo sapiens
  source 1..20: mol_type = genomic DNA; note = Gene: UCKL1; note = Location (start to end; relative to TSS): UCKL1_55_85; note = Orientation (relative to transcription): antisense; note = sgRNA Position: 63956357; note = Sequence Name: 56322-704_101_SL_seq_7957
atcagcgtccgcgcgggccg

SEQ ID NO: 7958 - DNA, 20 bp, Homo sapiens
  source 1..20: mol_type = genomic DNA; note = Gene: UCKL1; note = Location (start to end; relative to TSS): UCKL1_22_52; note = Orientation (relative to transcription): antisense; note = sgRNA Position: 63956390; note = Sequence Name: 56322-704_101_SL_seq_7958
ggcgctcggaggcctctttg

SEQ ID NO: 7959 - DNA, 20 bp, Homo sapiens
  source 1..20: mol_type = genomic DNA; note = Gene: UCKL1; note = Location (start to end; relative to TSS): UCKL1_54_84; note = Orientation (relative to transcription): antisense; note = sgRNA Position: 63956358; note = Sequence Name: 56322-704_101_SL_seq_7959
tcagcgtccgcgcgggccgg

SEQ ID NO: 7960 - DNA, 20 bp, Homo sapiens
  source 1..20: mol_type = genomic DNA; note = Gene: UHMK1; note = Location (start to end; relative to TSS): UHMK1_26_56; note = Orientation (relative to transcription): sense; note = sgRNA Position: 162497870; note = Sequence Name: 56322-704_101_SL_seq_7960
ctgcttgaagtcccgggagt

SEQ ID NO: 7961 - DNA, 20 bp, Homo sapiens
  source 1..20: mol_type = genomic DNA; note = Gene: UHMK1; note = Location (start to end; relative to TSS): UHMK1_74_104; note = Orientation (relative to transcription): antisense; note = sgRNA Position: 162497898; note = Sequence Name: 56322-704_101_SL_seq_7961
gaccagcggctccgcaggga

SEQ ID NO: 7962 - DNA, 20 bp, Homo sapiens
  source 1..20: mol_type = genomic DNA; note = Gene: UHMK1; note = Location (start to end; relative to TSS): UHMK1_31_61; note = Orientation (relative to transcription): sense; note = sgRNA Position: 162497875; note = Sequence Name: 56322-704_101_SL_seq_7962
tgaagtcccgggagtcggtg

SEQ ID NO: 7963 - DNA, 20 bp, Homo sapiens
  source 1..20: mol_type = genomic DNA; note = Gene: UHMK1; note = Location (start to end; relative to TSS): UHMK1_72_102; note = Orientation (relative to transcription): sense; note = sgRNA Position: 162497916; note = Sequence Name: 56322-704_101_SL_seq_7963
tgcggagccgctggtccggc

SEQ ID NO: 7964 - DNA, 20 bp, Homo sapiens
  source 1..20: mol_type = genomic DNA; note = Gene: UHMK1; note = Location (start to end; relative to TSS): UHMK1_19_49; note = Orientation (relative to transcription): sense; note = sgRNA Position: 162497863; note = Sequence Name: 56322-704_101_SL_seq_7964
gtcatggctgcttgaagtcc

SEQ ID NO: 7965 - DNA, 20 bp, Homo sapiens
  source 1..20: mol_type = genomic DNA; note = Gene: UHMK1; note = Location (start to end; relative to TSS): UHMK1_68_98; note = Orientation (relative to transcription): sense; note = sgRNA Position: 162497912; note = Sequence Name: 56322-704_101_SL_seq_7965
tccctgcggagccgctggtc

SEQ ID NO: 7966 - DNA, 20 bp, Homo sapiens
  source 1..20: mol_type = genomic DNA; note = Gene: UHMK1; note = Location (start to end; relative to TSS): UHMK1_20_50; note = Orientation (relative to transcription): sense; note = sgRNA Position: 162497864; note = Sequence Name: 56322-704_101_SL_seq_7966
tcatggctgcttgaagtccc

SEQ ID NO: 7967 - DNA, 20 bp, Homo sapiens
  source 1..20: mol_type = genomic DNA; note = Gene: UHMK1; note = Location (start to end; relative to TSS): UHMK1_63_93; note = Orientation (relative to transcription): sense; note = sgRNA Position: 162497907; note = Sequence Name: 56322-704_101_SL_seq_7967
gtccctccctgcggagccgc

SEQ ID NO: 7968 - DNA, 20 bp, Homo sapiens
  source 1..20: mol_type = genomic DNA; note = Gene: UHMK1; note = Location (start to end; relative to TSS): UHMK1_23_53; note = Orientation (relative to transcription): antisense; note = sgRNA Position: 162497847; note = Sequence Name: 56322-704_101_SL_seq_7968
acttcaagcagccatgacac

SEQ ID NO: 7969 - DNA, 20 bp, Homo sapiens
  source 1..20: mol_type = genomic DNA; note = Gene: UHMK1; note = Location (start to end; relative to TSS): UHMK1_54_84; note = Orientation (relative to transcription): sense; note = sgRNA Position: 162497898; note = Sequence Name: 56322-704_101_SL_seq_7969
cggctgcaggtccctccctg

SEQ ID NO: 7970 - DNA, 20 bp, Homo sapiens
  source 1..20: mol_type = genomic DNA; note = Gene: ULK1; note = Location (start to end; relative to TSS): ULK1_41_71; note = Orientation (relative to transcription): antisense; note = sgRNA Position: 131894669; note = Sequence Name: 56322-704_101_SL_seq_7970
acggagaaacaaaagagccg

SEQ ID NO: 7971 - DNA, 20 bp, Homo sapiens
  source 1..20: mol_type = genomic DNA; note = Gene: ULK1; note = Location (start to end; relative to TSS): ULK1_75_105; note = Orientation (relative to transcription): antisense; note = sgRNA Position: 131894703; note = Sequence Name: 56322-704_101_SL_seq_7971
ctccggctccaactagggcc

SEQ ID NO: 7972 - DNA, 20 bp, Homo sapiens
  source 1..20: mol_type = genomic DNA; note = Gene: ULK1; note = Location (start to end; relative to TSS): ULK1_37_67; note = Orientation (relative to transcription): sense; note = sgRNA Position: 131894685; note = Sequence Name: 56322-704_101_SL_seq_7972
gctcttttgtttctccgttg

SEQ ID NO: 7973 - DNA, 20 bp, Homo sapiens
  source 1..20: mol_type = genomic DNA; note = Gene: ULK1; note = Location (start to end; relative to TSS): ULK1_74_104; note = Orientation (relative to transcription): antisense; note = sgRNA Position: 131894702; note = Sequence Name: 56322-704_101_SL_seq_7973
tccggctccaactagggccc

SEQ ID NO: 7974 - DNA, 20 bp, Homo sapiens
  source 1..20: mol_type = genomic DNA; note = Gene: ULK1; note = Location (start to end; relative to TSS): ULK1_35_65; note = Orientation (relative to transcription): sense; note = sgRNA Position: 131894683; note = Sequence Name: 56322-704_101_SL_seq_7974
cggctcttttgtttctccgt

SEQ ID NO: 7975 - DNA, 20 bp, Homo sapiens
  source 1..20: mol_type = genomic DNA; note = Gene: ULK1; note = Location (start to end; relative to TSS): ULK1_70_100; note = Orientation (relative to transcription): sense; note = sgRNA Position: 131894718; note = Sequence Name: 56322-704_101_SL_seq_7975
gccctagttggagccggagt

SEQ ID NO: 7976 - DNA, 20 bp, Homo sapiens
  source 1..20: mol_type = genomic DNA; note = Gene: ULK1; note = Location (start to end; relative to TSS): ULK1_33_63; note = Orientation (relative to transcription): antisense; note = sgRNA Position: 131894661; note = Sequence Name: 56322-704_101_SL_seq_7976
acaaaagagccgcggcgccc

SEQ ID NO: 7977 - DNA, 20 bp, Homo sapiens
  source 1..20: mol_type = genomic DNA; note = Gene: ULK1; note = Location (start to end; relative to TSS): ULK1_69_99; note = Orientation (relative to transcription): antisense; note = sgRNA Position: 131894697; note = Sequence Name: 56322-704_101_SL_seq_7977
ctccaactagggcccgggct

SEQ ID NO: 7978 - DNA, 20 bp, Homo sapiens
  source 1..20: mol_type = genomic DNA; note = Gene: ULK1; note = Location (start to end; relative to TSS): ULK1_34_64; note = Orientation (relative to transcription): antisense; note = sgRNA Position: 131894662; note = Sequence Name: 56322-704_101_SL_seq_7978
aacaaaagagccgcggcgcc

SEQ ID NO: 7979 - DNA, 20 bp, Homo sapiens
  source 1..20: mol_type = genomic DNA; note = Gene: ULK1; note = Location (start to end; relative to TSS): ULK1_64_94; note = Orientation (relative to transcription): sense; note = sgRNA Position: 131894712; note = Sequence Name: 56322-704_101_SL_seq_7979
gcccgggccctagttggagc

SEQ ID NO: 7980 - DNA, 20 bp, Homo sapiens
  source 1..20: mol_type = genomic DNA; note = Gene: ULK2; note = Location (start to end; relative to TSS): ULK2_42_72; note = Orientation (relative to transcription): antisense; note = sgRNA Position: 19867890; note = Sequence Name: 56322-704_101_SL_seq_7980
cgcgcttccccgcctcgcgg

SEQ ID NO: 7981 - DNA, 20 bp, Homo sapiens
  source 1..20: mol_type = genomic DNA; note = Gene: ULK2; note = Location (start to end; relative to TSS): ULK2_95_125; note = Orientation (relative to transcription): sense; note = sgRNA Position: 19867817; note = Sequence Name: 56322-704_101_SL_seq_7981
cgtcgcagcagcgccccgag

SEQ ID NO: 7982 - DNA, 20 bp, Homo sapiens
  source 1..20: mol_type = genomic DNA; note = Gene: ULK2; note = Location (start to end; relative to TSS): ULK2_36_66; note = Orientation (relative to transcription): sense; note = sgRNA Position: 19867876; note = Sequence Name: 56322-704_101_SL_seq_7982
ccgcgaggcggggaagcgcg

SEQ ID NO: 7983 - DNA, 20 bp, Homo sapiens
  source 1..20: mol_type = genomic DNA; note = Gene: ULK2; note = Location (start to end; relative to TSS): ULK2_68_98; note = Orientation (relative to transcription): antisense; note = sgRNA Position: 19867864; note = Sequence Name: 56322-704_101_SL_seq_7983
ccctagaacccgcaccgccg

SEQ ID NO: 7984 - DNA, 20 bp, Homo sapiens
  source 1..20: mol_type = genomic DNA; note = Gene: ULK2; note = Location (start to end; relative to TSS): ULK2_21_51; note = Orientation (relative to transcription): sense; note = sgRNA Position: 19867891; note = Sequence Name: 56322-704_101_SL_seq_7984
gggcgttgggcgccgccgcg

SEQ ID NO: 7985 - DNA, 20 bp, Homo sapiens
  source 1..20: mol_type = genomic DNA; note = Gene: ULK2; note = Location (start to end; relative to TSS): ULK2_65_95; note = Orientation (relative to transcription): sense; note = sgRNA Position: 19867847; note = Sequence Name: 56322-704_101_SL_seq_7985
cggtgcgggttctagggcgg

SEQ ID NO: 7986 - DNA, 20 bp, Homo sapiens
  source 1..20: mol_type = genomic DNA; note = Gene: ULK2; note = Location (start to end; relative to TSS): ULK2_24_54; note = Orientation (relative to transcription): sense; note = sgRNA Position: 19867888; note = Sequence Name: 56322-704_101_SL_seq_7986
cgttgggcgccgccgcgagg

SEQ ID NO: 7987 - DNA, 20 bp, Homo sapiens
  source 1..20: mol_type = genomic DNA; note = Gene: ULK2; note = Location (start to end; relative to TSS): ULK2_62_92; note = Orientation (relative to transcription): sense; note = sgRNA Position: 19867850; note = Sequence Name: 56322-704_101_SL_seq_7987
cggcggtgcgggttctaggg

SEQ ID NO: 7988 - DNA, 20 bp, Homo sapiens
  source 1..20: mol_type = genomic DNA; note = Gene: ULK2; note = Location (start to end; relative to TSS): ULK2_26_56; note = Orientation (relative to transcription): sense; note = sgRNA Position: 19867886; note = Sequence Name: 56322-704_101_SL_seq_7988
ttgggcgccgccgcgaggcg

SEQ ID NO: 7989 - DNA, 20 bp, Homo sapiens
  source 1..20: mol_type = genomic DNA; note = Gene: ULK2; note = Location (start to end; relative to TSS): ULK2_59_89; note = Orientation (relative to transcription): sense; note = sgRNA Position: 19867853; note = Sequence Name: 56322-704_101_SL_seq_7989
ccgcggcggtgcgggttcta

SEQ ID NO: 7990 - DNA, 20 bp, Homo sapiens
  source 1..20: mol_type = genomic DNA; note = Gene: ULK3; note = Location (start to end; relative to TSS): ULK3_39_69; note = Orientation (relative to transcription): sense; note = sgRNA Position: 74843093; note = Sequence Name: 56322-704_101_SL_seq_7990
cggaatggcggggcccggct

SEQ ID NO: 7991 - DNA, 20 bp, Homo sapiens
  source 1..20: mol_type = genomic DNA; note = Gene: ULK3; note = Location (start to end; relative to TSS): ULK3_74_104; note = Orientation (relative to transcription): antisense; note = sgRNA Position: 74843078; note = Sequence Name: 56322-704_101_SL_seq_7991
gatgaagccgtccaggcgcg

SEQ ID NO: 7992 - DNA, 20 bp, Homo sapiens
  source 1..20: mol_type = genomic DNA; note = Gene: ULK3; note = Location (start to end; relative to TSS): ULK3_40_70; note = Orientation (relative to transcription): sense; note = sgRNA Position: 74843092; note = Sequence Name: 56322-704_101_SL_seq_7992
ggaatggcggggcccggctg

SEQ ID NO: 7993 - DNA, 20 bp, Homo sapiens
  source 1..20: mol_type = genomic DNA; note = Gene: ULK3; note = Location (start to end; relative to TSS): ULK3_73_103; note = Orientation (relative to transcription): antisense; note = sgRNA Position: 74843079; note = Sequence Name: 56322-704_101_SL_seq_7993
atgaagccgtccaggcgcgg

SEQ ID NO: 7994 - DNA, 20 bp, Homo sapiens
  source 1..20: mol_type = genomic DNA; note = Gene: ULK3; note = Location (start to end; relative to TSS): ULK3_29_59; note = Orientation (relative to transcription): antisense; note = sgRNA Position: 74843123; note = Sequence Name: 56322-704_101_SL_seq_7994
tccggccgcctgcgcccgcg

SEQ ID NO: 7995 - DNA, 20 bp, Homo sapiens
  source 1..20: mol_type = genomic DNA; note = Gene: ULK3; note = Location (start to end; relative to TSS): ULK3_61_91; note = Orientation (relative to transcription): antisense; note = sgRNA Position: 74843091; note = Sequence Name: 56322-704_101_SL_seq_7995
aggcgcgggggaccccagcc

SEQ ID NO: 7996 - DNA, 20 bp, Homo sapiens
  source 1..20: mol_type = genomic DNA; note = Gene: ULK3; note = Location (start to end; relative to TSS): ULK3_28_58; note = Orientation (relative to transcription): antisense; note = sgRNA Position: 74843124; note = Sequence Name: 56322-704_101_SL_seq_7996
ccggccgcctgcgcccgcgc

SEQ ID NO: 7997 - DNA, 20 bp, Homo sapiens
  source 1..20: mol_type = genomic DNA; note = Gene: ULK3; note = Location (start to end; relative to TSS): ULK3_58_88; note = Orientation (relative to transcription): sense; note = sgRNA Position: 74843074; note = Sequence Name: 56322-704_101_SL_seq_7997
tggggtcccccgcgcctgga

SEQ ID NO: 7998 - DNA, 20 bp, Homo sapiens
  source 1..20: mol_type = genomic DNA; note = Gene: ULK3; note = Location (start to end; relative to TSS): ULK3_24_54; note = Orientation (relative to transcription): sense; note = sgRNA Position: 74843108; note = Sequence Name: 56322-704_101_SL_seq_7998
gcgggcgcaggcggccggaa

SEQ ID NO: 7999 - DNA, 20 bp, Homo sapiens
  source 1..20: mol_type = genomic DNA; note = Gene: ULK3; note = Location (start to end; relative to TSS): ULK3_54_84; note = Orientation (relative to transcription): sense; note = sgRNA Position: 74843078; note = Sequence Name: 56322-704_101_SL_seq_7999
cggctggggtcccccgcgcc

SEQ ID NO: 8000 - DNA, 20 bp, Homo sapiens
  source 1..20: mol_type = genomic DNA; note = Gene: ULK4; note = Location (start to end; relative to TSS): ULK4_51_81; note = Orientation (relative to transcription): antisense; note = sgRNA Position: 41962048; note = Sequence Name: 56322-704_101_SL_seq_8000
agaaaagagtccagtccact

SEQ ID NO: 8001 - DNA, 20 bp, Homo sapiens
  source 1..20: mol_type = genomic DNA; note = Gene: ULK4; note = Location (start to end; relative to TSS): ULK4_85_115; note = Orientation (relative to transcription): antisense; note = sgRNA Position: 41962014; note = Sequence Name: 56322-704_101_SL_seq_8001
aaccgccactgccacgcacc

SEQ ID NO: 8002 - DNA, 20 bp, Homo sapiens
  source 1..20: mol_type = genomic DNA; note = Gene: ULK4; note = Location (start to end; relative to TSS): ULK4_32_62; note = Orientation (relative to transcription): sense; note = sgRNA Position: 41962047; note = Sequence Name: 56322-704_101_SL_seq_8002
gcgggagcagccaagtggac

SEQ ID NO: 8003 - DNA, 20 bp, Homo sapiens
  source 1..20: mol_type = genomic DNA; note = Gene: ULK4; note = Location (start to end; relative to TSS): ULK4_71_101; note = Orientation (relative to transcription): sense; note = sgRNA Position: 41962008; note = Sequence Name: 56322-704_101_SL_seq_8003
agctaccaggtgcgtggcag

SEQ ID NO: 8004 - DNA, 20 bp, Homo sapiens
  source 1..20: mol_type = genomic DNA; note = Gene: ULK4; note = Location (start to end; relative to TSS): ULK4_24_54; note = Orientation (relative to transcription): antisense; note = sgRNA Position: 41962075; note = Sequence Name: 56322-704_101_SL_seq_8004
tcccgcggttgcgcgcatct

SEQ ID NO: 8005 - DNA, 20 bp, Homo sapiens
  source 1..20: mol_type = genomic DNA; note = Gene: ULK4; note = Location (start to end; relative to TSS): ULK4_65_95; note = Orientation (relative to transcription): sense; note = sgRNA Position: 41962014; note = Sequence Name: 56322-704_101_SL_seq_8005
tgacttagctaccaggtgcg

SEQ ID NO: 8006 - DNA, 20 bp, Homo sapiens
  source 1..20: mol_type = genomic DNA; note = Gene: ULK4; note = Location (start to end; relative to TSS): ULK4_27_57; note = Orientation (relative to transcription): sense; note = sgRNA Position: 41962052; note = Sequence Name: 56322-704_101_SL_seq_8006
caaccgcgggagcagccaag

SEQ ID NO: 8007 - DNA, 20 bp, Homo sapiens
  source 1..20: mol_type = genomic DNA; note = Gene: ULK4; note = Location (start to end; relative to TSS): ULK4_58_88; note = Orientation (relative to transcription): sense; note = sgRNA Position: 41962021; note = Sequence Name: 56322-704_101_SL_seq_8007
cttttcttgacttagctacc

SEQ ID NO: 8008 - DNA, 20 bp, Homo sapiens
  source 1..20: mol_type = genomic DNA; note = Gene: ULK4; note = Location (start to end; relative to TSS): ULK4_14_44; note = Orientation (relative to transcription): sense; note = sgRNA Position: 41962065; note = Sequence Name: 56322-704_101_SL_seq_8008
gccgagatgcgcgcaaccgc

SEQ ID NO: 8009 - DNA, 20 bp, Homo sapiens
  source 1..20: mol_type = genomic DNA; note = Gene: ULK4; note = Location (start to end; relative to TSS): ULK4_51_81; note = Orientation (relative to transcription): antisense; note = sgRNA Position: 41962048; note = Sequence Name: 56322-704_101_SL_seq_8009
agaaaagagtccagtccact

SEQ ID NO: 8010 - DNA, 20 bp, Homo sapiens
  source 1..20: mol_type = genomic DNA; note = Gene: VRK1; note = Location (start to end; relative to TSS): VRK1_35_65; note = Orientation (relative to transcription): sense; note = sgRNA Position: 96797443; note = Sequence Name: 56322-704_101_SL_seq_8010
cgcgacgggtctgcggctta

SEQ ID NO: 8011 - DNA, 20 bp, Homo sapiens
  source 1..20: mol_type = genomic DNA; note = Gene: VRK1; note = Location (start to end; relative to TSS): VRK1_83_113; note = Orientation (relative to transcription): sense; note = sgRNA Position: 96797491; note = Sequence Name: 56322-704_101_SL_seq_8011
cgaggactcgcgcgccgagc

SEQ ID NO: 8012 - DNA, 20 bp, Homo sapiens
  source 1..20: mol_type = genomic DNA; note = Gene: VRK1; note = Location (start to end; relative to TSS): VRK1_34_64; note = Orientation (relative to transcription): sense; note = sgRNA Position: 96797442; note = Sequence Name: 56322-704_101_SL_seq_8012
acgcgacgggtctgcggctt

SEQ ID NO: 8013 - DNA, 20 bp, Homo sapiens
  source 1..20: mol_type = genomic DNA; note = Gene: VRK1; note = Location (start to end; relative to TSS): VRK1_75_105; note = Orientation (relative to transcription): antisense; note = sgRNA Position: 96797463; note = Sequence Name: 56322-704_101_SL_seq_8013
tcctcgagccgtgtcgcctg

SEQ ID NO: 8014 - DNA, 20 bp, Homo sapiens
  source 1..20: mol_type = genomic DNA; note = Gene: VRK1; note = Location (start to end; relative to TSS): VRK1_21_51; note = Orientation (relative to transcription): sense; note = sgRNA Position: 96797429; note = Sequence Name: 56322-704_101_SL_seq_8014
cgtactgggcagaacgcgac

SEQ ID NO: 8015 - DNA, 20 bp, Homo sapiens
  source 1..20: mol_type = genomic DNA; note = Gene: VRK1; note = Location (start to end; relative to TSS): VRK1_65_95; note = Orientation (relative to transcription): sense; note = sgRNA Position: 96797473; note = Sequence Name: 56322-704_101_SL_seq_8015
gccgcaggcgacacggctcg

SEQ ID NO: 8016 - DNA, 20 bp, Homo sapiens
  source 1..20: mol_type = genomic DNA; note = Gene: VRK1; note = Location (start to end; relative to TSS): VRK1_28_58; note = Orientation (relative to transcription): sense; note = sgRNA Position: 96797436; note = Sequence Name: 56322-704_101_SL_seq_8016
ggcagaacgcgacgggtctg

SEQ ID NO: 8017 - DNA, 20 bp, Homo sapiens
  source 1..20: mol_type = genomic DNA; note = Gene: VRK1; note = Location (start to end; relative to TSS): VRK1_58_88; note = Orientation (relative to transcription): sense; note = sgRNA Position: 96797466; note = Sequence Name: 56322-704_101_SL_seq_8017
tagggaggccgcaggcgaca

SEQ ID NO: 8018 - DNA, 20 bp, Homo sapiens
  source 1..20: mol_type = genomic DNA; note = Gene: VRK1; note = Location (start to end; relative to TSS): VRK1_20_50; note = Orientation (relative to transcription): sense; note = sgRNA Position: 96797428; note = Sequence Name: 56322-704_101_SL_seq_8018
tcgtactgggcagaacgcga

SEQ ID NO: 8019 - DNA, 20 bp, Homo sapiens
  source 1..20: mol_type = genomic DNA; note = Gene: VRK1; note = Location (start to end; relative to TSS): VRK1_50_80; note = Orientation (relative to transcription): sense; note = sgRNA Position: 96797458; note = Sequence Name: 56322-704_101_SL_seq_8019
gcttagggtagggaggccgc

SEQ ID NO: 8020 - DNA, 20 bp, Homo sapiens
  source 1..20: mol_type = genomic DNA; note = Gene: VRK2; note = Location (start to end; relative to TSS): VRK2_36_66; note = Orientation (relative to transcription): antisense; note = sgRNA Position: 58046848; note = Sequence Name: 56322-704_101_SL_seq_8020
cctcaggatcccccgtcgcc

SEQ ID NO: 8021 - DNA, 20 bp, Homo sapiens
  source 1..20: mol_type = genomic DNA; note = Gene: VRK2; note = Location (start to end; relative to TSS): VRK2_89_119; note = Orientation (relative to transcription): sense; note = sgRNA Position: 58046921; note = Sequence Name: 56322-704_101_SL_seq_8021
ggcacctccgcttgcagtgc

SEQ ID NO: 8022 - DNA, 20 bp, Homo sapiens
  source 1..20: mol_type = genomic DNA; note = Gene: VRK2; note = Location (start to end; relative to TSS): VRK2_37_67; note = Orientation (relative to transcription): antisense; note = sgRNA Position: 58046849; note = Sequence Name: 56322-704_101_SL_seq_8022
gcctcaggatcccccgtcgc

SEQ ID NO: 8023 - DNA, 20 bp, Homo sapiens
  source 1..20: mol_type = genomic DNA; note = Gene: VRK2; note = Location (start to end; relative to TSS): VRK2_68_98; note = Orientation (relative to transcription): sense; note = sgRNA Position: 58046900; note = Sequence Name: 56322-704_101_SL_seq_8023
ctggggtcttgggtggcggg

SEQ ID NO: 8024 - DNA, 20 bp, Homo sapiens
  source 1..20: mol_type = genomic DNA; note = Gene: VRK2; note = Location (start to end; relative to TSS): VRK2_32_62; note = Orientation (relative to transcription): sense; note = sgRNA Position: 58046864; note = Sequence Name: 56322-704_101_SL_seq_8024
cgacgggggatcctgaggcc

SEQ ID NO: 8025 - DNA, 20 bp, Homo sapiens
  source 1..20: mol_type = genomic DNA; note = Gene: VRK2; note = Location (start to end; relative to TSS): VRK2_64_94; note = Orientation (relative to transcription): sense; note = sgRNA Position: 58046896; note = Sequence Name: 56322-704_101_SL_seq_8025
tgctctggggtcttgggtgg

SEQ ID NO: 8026 - DNA, 20 bp, Homo sapiens
  source 1..20: mol_type = genomic DNA; note = Gene: VRK2; note = Location (start to end; relative to TSS): VRK2_27_57; note = Orientation (relative to transcription): sense; note = sgRNA Position: 58046859; note = Sequence Name: 56322-704_101_SL_seq_8026
cccggcgacgggggatcctg

SEQ ID NO: 8027 - DNA, 20 bp, Homo sapiens
  source 1..20: mol_type = genomic DNA; note = Gene: VRK2; note = Location (start to end; relative to TSS): VRK2_61_91; note = Orientation (relative to transcription): sense; note = sgRNA Position: 58046893; note = Sequence Name: 56322-704_101_SL_seq_8027
tcttgctctggggtcttggg

SEQ ID NO: 8028 - DNA, 20 bp, Homo sapiens
  source 1..20: mol_type = genomic DNA; note = Gene: VRK2; note = Location (start to end; relative to TSS): VRK2_18_48; note = Orientation (relative to transcription): sense; note = sgRNA Position: 58046850; note = Sequence Name: 56322-704_101_SL_seq_8028
tgcgcgcggcccggcgacgg

SEQ ID NO: 8029 - DNA, 20 bp, Homo sapiens
  source 1..20: mol_type = genomic DNA; note = Gene: VRK2; note = Location (start to end; relative to TSS): VRK2_50_80; note = Orientation (relative to transcription): sense; note = sgRNA Position: 58046882; note = Sequence Name: 56322-704_101_SL_seq_8029
cccggtcagtctcttgctct

SEQ ID NO: 8030 - DNA, 20 bp, Homo sapiens
  source 1..20: mol_type = genomic DNA; note = Gene: VRK3; note = Location (start to end; relative to TSS): VRK3_27_57; note = Orientation (relative to transcription): sense; note = sgRNA Position: 50025321; note = Sequence Name: 56322-704_101_SL_seq_8030
gggtaactgcggaggatccg

SEQ ID NO: 8031 - DNA, 20 bp, Homo sapiens
  source 1..20: mol_type = genomic DNA; note = Gene: VRK3; note = Location (start to end; relative to TSS): VRK3_88_118; note = Orientation (relative to transcription): antisense; note = sgRNA Position: 50025280; note = Sequence Name: 56322-704_101_SL_seq_8031
tcacctctgtacttggggac

SEQ ID NO: 8032 - DNA, 20 bp, Homo sapiens
  source 1..20: mol_type = genomic DNA; note = Gene: VRK3; note = Location (start to end; relative to TSS): VRK3_28_58; note = Orientation (relative to transcription): sense; note = sgRNA Position: 50025320; note = Sequence Name: 56322-704_101_SL_seq_8032
ggtaactgcggaggatccga

SEQ ID NO: 8033 - DNA, 20 bp, Homo sapiens
  source 1..20: mol_type = genomic DNA; note = Gene: VRK3; note = Location (start to end; relative to TSS): VRK3_87_117; note = Orientation (relative to transcription): antisense; note = sgRNA Position: 50025281; note = Sequence Name: 56322-704_101_SL_seq_8033
cacctctgtacttggggact

SEQ ID NO: 8034 - DNA, 20 bp, Homo sapiens
  source 1..20: mol_type = genomic DNA; note = Gene: VRK3; note = Location (start to end; relative to TSS): VRK3_33_63; note = Orientation (relative to transcription): sense; note = sgRNA Position: 50025315; note = Sequence Name: 56322-704_101_SL_seq_8034
ctgcggaggatccgagggtc

SEQ ID NO: 8035 - DNA, 20 bp, Homo sapiens
  source 1..20: mol_type = genomic DNA; note = Gene: VRK3; note = Location (start to end; relative to TSS): VRK3_86_116; note = Orientation (relative to transcription): antisense; note = sgRNA Position: 50025282; note = Sequence Name: 56322-704_101_SL_seq_8035
acctctgtacttggggactg

SEQ ID NO: 8036 - DNA, 20 bp, Homo sapiens
  source 1..20: mol_type = genomic DNA; note = Gene: VRK3; note = Location (start to end; relative to TSS): VRK3_34_64; note = Orientation (relative to transcription): antisense; note = sgRNA Position: 50025334; note = Sequence Name: 56322-704_101_SL_seq_8036
tcggatcctccgcagttacc

SEQ ID NO: 8037 - DNA, 20 bp, Homo sapiens
  source 1..20: mol_type = genomic DNA; note = Gene: VRK3; note = Location (start to end; relative to TSS): VRK3_76_106; note = Orientation (relative to transcription): sense; note = sgRNA Position: 50025272; note = Sequence Name: 56322-704_101_SL_seq_8037
accccagtccccaagtacag

SEQ ID NO: 8038 - DNA, 20 bp, Homo sapiens
  source 1..20: mol_type = genomic DNA; note = Gene: VRK3; note = Location (start to end; relative to TSS): VRK3_19_49; note = Orientation (relative to transcription): sense; note = sgRNA Position: 50025329; note = Sequence Name: 56322-704_101_SL_seq_8038
gtgagtccgggtaactgcgg

SEQ ID NO: 8039 - DNA, 20 bp, Homo sapiens
  source 1..20: mol_type = genomic DNA; note = Gene: VRK3; note = Location (start to end; relative to TSS): VRK3_53_83; note = Orientation (relative to transcription): antisense; note = sgRNA Position: 50025315; note = Sequence Name: 56322-704_101_SL_seq_8039
ggcttctgcagcctgaccct

SEQ ID NO: 8040 - DNA, 20 bp, Homo sapiens
  source 1..20: mol_type = genomic DNA; note = Gene: WEE1; note = Location (start to end; relative to TSS): WEE1_32_62; note = Orientation (relative to transcription): antisense; note = sgRNA Position: 9573708; note = Sequence Name: 56322-704_101_SL_seq_8040
cggcccgagcaccgaggctg

SEQ ID NO: 8041 - DNA, 20 bp, Homo sapiens
  source 1..20: mol_type = genomic DNA; note = Gene: WEE1; note = Location (start to end; relative to TSS): WEE1_87_117; note = Orientation (relative to transcription): sense; note = sgRNA Position: 9573783; note = Sequence Name: 56322-704_101_SL_seq_8041
cgtccgcagcccgagcgccc

SEQ ID NO: 8042 - DNA, 20 bp, Homo sapiens
  source 1..20: mol_type = genomic DNA; note = Gene: WEE1; note = Location (start to end; relative to TSS): WEE1_38_68; note = Orientation (relative to transcription): antisense; note = sgRNA Position: 9573714; note = Sequence Name: 56322-704_101_SL_seq_8042
gcggggcggcccgagcaccg

SEQ ID NO: 8043 - DNA, 20 bp, Homo sapiens
  source 1..20: mol_type = genomic DNA; note = Gene: WEE1; note = Location (start to end; relative to TSS): WEE1_83_113; note = Orientation (relative to transcription): antisense; note = sgRNA Position: 9573759; note = Sequence Name: 56322-704_101_SL_seq_8043
gctgcggacggtggcggcag

SEQ ID NO: 8044 - DNA, 20 bp, Homo sapiens
  source 1..20: mol_type = genomic DNA; note = Gene: WEE1; note = Location (start to end; relative to TSS): WEE1_19_49; note = Orientation (relative to transcription): sense; note = sgRNA Position: 9573715; note = Sequence Name: 56322-704_101_SL_seq_8044
gagacctcagcctcggtgct

SEQ ID NO: 8045 - DNA, 20 bp, Homo sapiens
  source 1..20: mol_type = genomic DNA; note = Gene: WEE1; note = Location (start to end; relative to TSS): WEE1_80_110; note = Orientation (relative to transcription): antisense; note = sgRNA Position: 9573756; note = Sequence Name: 56322-704_101_SL_seq_8045
gcggacggtggcggcagcgg

SEQ ID NO: 8046 - DNA, 20 bp, Homo sapiens
  source 1..20: mol_type = genomic DNA; note = Gene: WEE1; note = Location (start to end; relative to TSS): WEE1_20_50; note = Orientation (relative to transcription): sense; note = sgRNA Position: 9573716; note = Sequence Name: 56322-704_101_SL_seq_8046
agacctcagcctcggtgctc

SEQ ID NO: 8047 - DNA, 20 bp, Homo sapiens
  source 1..20: mol_type = genomic DNA; note = Gene: WEE1; note = Location (start to end; relative to TSS): WEE1_75_105; note = Orientation (relative to transcription): antisense; note = sgRNA Position: 9573751; note = Sequence Name: 56322-704_101_SL_seq_8047
cggtggcggcagcggcggcg

SEQ ID NO: 8048 - DNA, 20 bp, Homo sapiens
  source 1..20: mol_type = genomic DNA; note = Gene: WEE1; note = Location (start to end; relative to TSS): WEE1_22_52; note = Orientation (relative to transcription): antisense; note = sgRNA Position: 9573698; note = Sequence Name: 56322-704_101_SL_seq_8048
accgaggctgaggtctcctc

SEQ ID NO: 8049 - DNA, 20 bp, Homo sapiens
  source 1..20: mol_type = genomic DNA; note = Gene: WEE1; note = Location (start to end; relative to TSS): WEE1_60_90; note = Orientation (relative to transcription): antisense; note = sgRNA Position: 9573736; note = Sequence Name: 56322-704_101_SL_seq_8049
cggcgcggactttccggcag

SEQ ID NO: 8050 - DNA, 20 bp, Homo sapiens
  source 1..20: mol_type = genomic DNA; note = Gene: WEE2; note = Location (start to end; relative to TSS): WEE2_54_84; note = Orientation (relative to transcription): antisense; note = sgRNA Position: 141708413; note = Sequence Name: 56322-704_101_SL_seq_8050
tgaattcctttaatttagca

SEQ ID NO: 8051 - DNA, 20 bp, Homo sapiens
  source 1..20: mol_type = genomic DNA; note = Gene: WEE2; note = Location (start to end; relative to TSS): WEE2_164_194; note = Orientation (relative to transcription): sense; note = sgRNA Position: 141708543; note = Sequence Name: 56322-704_101_SL_seq_8051
ggagctttctttaatcagaa

SEQ ID NO: 8052 - DNA, 20 bp, Homo sapiens
  source 1..20: mol_type = genomic DNA; note = Gene: WEE2; note = Location (start to end; relative to TSS): WEE2_65_95; note = Orientation (relative to transcription): sense; note = sgRNA Position: 141708444; note = Sequence Name: 56322-704_101_SL_seq_8052
tcaattttctcactagtatt

SEQ ID NO: 8053 - DNA, 20 bp, Homo sapiens
  source 1..20: mol_type = genomic DNA; note = Gene: WEE2; note = Location (start to end; relative to TSS): WEE2_161_191; note = Orientation (relative to transcription): antisense; note = sgRNA Position: 141708520; note = Sequence Name: 56322-704_101_SL_seq_8053
aagaaagctccagtgactct

SEQ ID NO: 8054 - DNA, 20 bp, Homo sapiens
  source 1..20: mol_type = genomic DNA; note = Gene: WEE2; note = Location (start to end; relative to TSS): WEE2_75_105; note = Orientation (relative to transcription): sense; note = sgRNA Position: 141708454; note = Sequence Name: 56322-704_101_SL_seq_8054
cactagtatttggtaacaca

SEQ ID NO: 8055 - DNA, 20 bp, Homo sapiens
  source 1..20: mol_type = genomic DNA; note = Gene: WEE2; note = Location (start to end; relative to TSS): WEE2_143_173; note = Orientation (relative to transcription): sense; note = sgRNA Position: 141708522; note = Sequence Name: 56322-704_101_SL_seq_8055
ttaattgctccgagagtcac

SEQ ID NO: 8056 - DNA, 20 bp, Homo sapiens
  source 1..20: mol_type = genomic DNA; note = Gene: WEE2; note = Location (start to end; relative to TSS): WEE2_76_106; note = Orientation (relative to transcription): sense; note = sgRNA Position: 141708455; note = Sequence Name: 56322-704_101_SL_seq_8056
actagtatttggtaacacat

SEQ ID NO: 8057 - DNA, 20 bp, Homo sapiens
  source 1..20: mol_type = genomic DNA; note = Gene: WEE2; note = Location (start to end; relative to TSS): WEE2_124_154; note = Orientation (relative to transcription): antisense; note = sgRNA Position: 141708483; note = Sequence Name: 56322-704_101_SL_seq_8057
gttcatgtacagaactcttc

SEQ ID NO: 8058 - DNA, 20 bp, Homo sapiens
  source 1..20: mol_type = genomic DNA; note = Gene: WEE2; note = Location (start to end; relative to TSS): WEE2_10_40; note = Orientation (relative to transcription): sense; note = sgRNA Position: 141708389; note = Sequence Name: 56322-704_101_SL_seq_8058
cttattcccaaattggctaa

SEQ ID NO: 8059 - DNA, 20 bp, Homo sapiens
  source 1..20: mol_type = genomic DNA; note = Gene: WEE2; note = Location (start to end; relative to TSS): WEE2_54_84; note = Orientation (relative to transcription): antisense; note = sgRNA Position: 141708413; note = Sequence Name: 56322-704_101_SL_seq_8059
tgaattcctttaatttagca

SEQ ID NO: 8060 - DNA, 20 bp, Homo sapiens
  source 1..20: mol_type = genomic DNA; note = Gene: WNK1; note = Location (start to end; relative to TSS): WNK1_50_80; note = Orientation (relative to transcription): sense; note = sgRNA Position: 752655; note = Sequence Name: 56322-704_101_SL_seq_8060
ccactccgcacccccatctt

SEQ ID NO: 8061 - DNA, 20 bp, Homo sapiens
  source 1..20: mol_type = genomic DNA; note = Gene: WNK1; note = Location (start to end; relative to TSS): WNK1_94_124; note = Orientation (relative to transcription): antisense; note = sgRNA Position: 752679; note = Sequence Name: 56322-704_101_SL_seq_8061
aaagagcagccacccccacc

SEQ ID NO: 8062 - DNA, 20 bp, Homo sapiens
  source 1..20: mol_type = genomic DNA; note = Gene: WNK1; note = Location (start to end; relative to TSS): WNK1_32_62; note = Orientation (relative to transcription): antisense; note = sgRNA Position: 752617; note = Sequence Name: 56322-704_101_SL_seq_8062
gagaggagccgcgtccaccc

SEQ ID NO: 8063 - DNA, 20 bp, Homo sapiens
  source 1..20: mol_type = genomic DNA; note = Gene: WNK1; note = Location (start to end; relative to TSS): WNK1_67_97; note = Orientation (relative to transcription): sense; note = sgRNA Position: 752672; note = Sequence Name: 56322-704_101_SL_seq_8063
cttcggtgacagaaggcgcc

SEQ ID NO: 8064 - DNA, 20 bp, Homo sapiens
  source 1..20: mol_type = genomic DNA; note = Gene: WNK1; note = Location (start to end; relative to TSS): WNK1_33_63; note = Orientation (relative to transcription): antisense; note = sgRNA Position: 752618; note = Sequence Name: 56322-704_101_SL_seq_8064
agagaggagccgcgtccacc

SEQ ID NO: 8065 - DNA, 20 bp, Homo sapiens
  source 1..20: mol_type = genomic DNA; note = Gene: WNK1; note = Location (start to end; relative to TSS): WNK1_64_94; note = Orientation (relative to transcription): antisense; note = sgRNA Position: 752649; note = Sequence Name: 56322-704_101_SL_seq_8065
tgtcaccgaagatgggggtg

SEQ ID NO: 8066 - DNA, 20 bp, Homo sapiens
  source 1..20: mol_type = genomic DNA; note = Gene: WNK1; note = Location (start to end; relative to TSS): WNK1_27_57; note = Orientation (relative to transcription): sense; note = sgRNA Position: 752632; note = Sequence Name: 56322-704_101_SL_seq_8066
ggtggacgcggctcctctct

SEQ ID NO: 8067 - DNA, 20 bp, Homo sapiens
  source 1..20: mol_type = genomic DNA; note = Gene: WNK1; note = Location (start to end; relative to TSS): WNK1_59_89; note = Orientation (relative to transcription): antisense; note = sgRNA Position: 752644; note = Sequence Name: 56322-704_101_SL_seq_8067
ccgaagatgggggtgcggag

SEQ ID NO: 8068 - DNA, 20 bp, Homo sapiens
  source 1..20: mol_type = genomic DNA; note = Gene: WNK1; note = Location (start to end; relative to TSS): WNK1_15_45; note = Orientation (relative to transcription): sense; note = sgRNA Position: 752620; note = Sequence Name: 56322-704_101_SL_seq_8068
gagagtttcccgggtggacg

SEQ ID NO: 8069 - DNA, 20 bp, Homo sapiens
  source 1..20: mol_type = genomic DNA; note = Gene: WNK1; note = Location (start to end; relative to TSS): WNK1_49_79; note = Orientation (relative to transcription): antisense; note = sgRNA Position: 752634; note = Sequence Name: 56322-704_101_SL_seq_8069
gggtgcggagtggccgagag

SEQ ID NO: 8070 - DNA, 20 bp, Homo sapiens
  source 1..20: mol_type = genomic DNA; note = Gene: WNK2; note = Location (start to end; relative to TSS): WNK2_25_55; note = Orientation (relative to transcription): sense; note = sgRNA Position: 93184190; note = Sequence Name: 56322-704_101_SL_seq_8070
cggagccgcgcgaagccggc

SEQ ID NO: 8071 - DNA, 20 bp, Homo sapiens
  source 1..20: mol_type = genomic DNA; note = Gene: WNK2; note = Location (start to end; relative to TSS): WNK2_85_115; note = Orientation (relative to transcription): sense; note = sgRNA Position: 93184250; note = Sequence Name: 56322-704_101_SL_seq_8071
agagagcagcgcgcaggagc

SEQ ID NO: 8072 - DNA, 20 bp, Homo sapiens
  source 1..20: mol_type = genomic DNA; note = Gene: WNK2; note = Location (start to end; relative to TSS): WNK2_34_64; note = Orientation (relative to transcription): sense; note = sgRNA Position: 93184199; note = Sequence Name: 56322-704_101_SL_seq_8072
gcgaagccggcaggagcacg

SEQ ID NO: 8073 - DNA, 20 bp, Homo sapiens
  source 1..20: mol_type = genomic DNA; note = Gene: WNK2; note = Location (start to end; relative to TSS): WNK2_79_109; note = Orientation (relative to transcription): sense; note = sgRNA Position: 93184244; note = Sequence Name: 56322-704_101_SL_seq_8073
ggcccgagagagcagcgcgc

SEQ ID NO: 8074 - DNA, 20 bp, Homo sapiens
  source 1..20: mol_type = genomic DNA; note = Gene: WNK2; note = Location (start to end; relative to TSS): WNK2_35_65; note = Orientation (relative to transcription): sense; note = sgRNA Position: 93184200; note = Sequence Name: 56322-704_101_SL_seq_8074
cgaagccggcaggagcacgc

SEQ ID NO: 8075 - DNA, 20 bp, Homo sapiens
  source 1..20: mol_type = genomic DNA; note = Gene: WNK2; note = Location (start to end; relative to TSS): WNK2_76_106; note = Orientation (relative to transcription): antisense; note = sgRNA Position: 93184221; note = Sequence Name: 56322-704_101_SL_seq_8075
tctctcgggccgggccactg

SEQ ID NO: 8076 - DNA, 20 bp, Homo sapiens
  source 1..20: mol_type = genomic DNA; note = Gene: WNK2; note = Location (start to end; relative to TSS): WNK2_21_51; note = Orientation (relative to transcription): sense; note = sgRNA Position: 93184186; note = Sequence Name: 56322-704_101_SL_seq_8076
ggagcggagccgcgcgaagc

SEQ ID NO: 8077 - DNA, 20 bp, Homo sapiens
  source 1..20: mol_type = genomic DNA; note = Gene: WNK2; note = Location (start to end; relative to TSS): WNK2_74_104; note = Orientation (relative to transcription): antisense; note = sgRNA Position: 93184219; note = Sequence Name: 56322-704_101_SL_seq_8077
tctcgggccgggccactgcg

SEQ ID NO: 8078 - DNA, 20 bp, Homo sapiens
  source 1..20: mol_type = genomic DNA; note = Gene: WNK2; note = Location (start to end; relative to TSS): WNK2_22_52; note = Orientation (relative to transcription): antisense; note = sgRNA Position: 93184167; note = Sequence Name: 56322-704_101_SL_seq_8078
gcgcggctccgctcccgcac

SEQ ID NO: 8079 - DNA, 20 bp, Homo sapiens
  source 1..20: mol_type = genomic DNA; note = Gene: WNK2; note = Location (start to end; relative to TSS): WNK2_53_83; note = Orientation (relative to transcription): sense; note = sgRNA Position: 93184218; note = Sequence Name: 56322-704_101_SL_seq_8079
gcgggagcgcggccccgcag

SEQ ID NO: 8080 - DNA, 20 bp, Homo sapiens
  source 1..20: mol_type = genomic DNA; note = Gene: WNK3; note = Location (start to end; relative to TSS): WNK3_49_79; note = Orientation (relative to transcription): antisense; note = sgRNA Position: 54357993; note = Sequence Name: 56322-704_101_SL_seq_8080
gcccaagctcgcgctcggcc

SEQ ID NO: 8081 - DNA, 20 bp, Homo sapiens
  source 1..20: mol_type = genomic DNA; note = Gene: WNK3; note = Location (start to end; relative to TSS): WNK3_79_109; note = Orientation (relative to transcription): antisense; note = sgRNA Position: 54357963; note = Sequence Name: 56322-704_101_SL_seq_8081
agcgggcggagagaggggag

SEQ ID NO: 8082 - DNA, 20 bp, Homo sapiens
  source 1..20: mol_type = genomic DNA; note = Gene: WNK3; note = Location (start to end; relative to TSS): WNK3_21_51; note = Orientation (relative to transcription): sense; note = sgRNA Position: 54358001; note = Sequence Name: 56322-704_101_SL_seq_8082
cgcgtgcgtctgctcagctc

SEQ ID NO: 8083 - DNA, 20 bp, Homo sapiens
  source 1..20: mol_type = genomic DNA; note = Gene: WNK3; note = Location (start to end; relative to TSS): WNK3_78_108; note = Orientation (relative to transcription): antisense; note = sgRNA Position: 54357964; note = Sequence Name: 56322-704_101_SL_seq_8083
gcgggcggagagaggggagc

SEQ ID NO: 8084 - DNA, 20 bp, Homo sapiens
  source 1..20: mol_type = genomic DNA; note = Gene: WNK3; note = Location (start to end; relative to TSS): WNK3_22_52; note = Orientation (relative to transcription): sense; note = sgRNA Position: 54358000; note = Sequence Name: 56322-704_101_SL_seq_8084
gcgtgcgtctgctcagctcc

SEQ ID NO: 8085 - DNA, 20 bp, Homo sapiens
  source 1..20: mol_type = genomic DNA; note = Gene: WNK3; note = Location (start to end; relative to TSS): WNK3_77_107; note = Orientation (relative to transcription): antisense; note = sgRNA Position: 54357965; note = Sequence Name: 56322-704_101_SL_seq_8085
cgggcggagagaggggagcg

SEQ ID NO: 8086 - DNA, 20 bp, Homo sapiens
  source 1..20: mol_type = genomic DNA; note = Gene: WNK3; note = Location (start to end; relative to TSS): WNK3_17_47; note = Orientation (relative to transcription): antisense; note = sgRNA Position: 54358025; note = Sequence Name: 56322-704_101_SL_seq_8086
gacgcacgcgtactccagcc

SEQ ID NO: 8087 - DNA, 20 bp, Homo sapiens
  source 1..20: mol_type = genomic DNA; note = Gene: WNK3; note = Location (start to end; relative to TSS): WNK3_54_84; note = Orientation (relative to transcription): antisense; note = sgRNA Position: 54357988; note = Sequence Name: 56322-704_101_SL_seq_8087
tacgagcccaagctcgcgct

SEQ ID NO: 8088 - DNA, 20 bp, Homo sapiens
  source 1..20: mol_type = genomic DNA; note = Gene: WNK3; note = Location (start to end; relative to TSS): WNK3_16_46; note = Orientation (relative to transcription): antisense; note = sgRNA Position: 54358026; note = Sequence Name: 56322-704_101_SL_seq_8088
acgcacgcgtactccagcca

SEQ ID NO: 8089 - DNA, 20 bp, Homo sapiens
  source 1..20: mol_type = genomic DNA; note = Gene: WNK3; note = Location (start to end; relative to TSS): WNK3_49_79; note = Orientation (relative to transcription): antisense; note = sgRNA Position: 54357993; note = Sequence Name: 56322-704_101_SL_seq_8089
gcccaagctcgcgctcggcc

SEQ ID NO: 8090 - DNA, 20 bp, Homo sapiens
  source 1..20: mol_type = genomic DNA; note = Gene: WNK4; note = Location (start to end; relative to TSS): WNK4_46_76; note = Orientation (relative to transcription): antisense; note = sgRNA Position: 42780662; note = Sequence Name: 56322-704_101_SL_seq_8090
agggtagaaaatcagacggc

SEQ ID NO: 8091 - DNA, 20 bp, Homo sapiens
  source 1..20: mol_type = genomic DNA; note = Gene: WNK4; note = Location (start to end; relative to TSS): WNK4_76_106; note = Orientation (relative to transcription): antisense; note = sgRNA Position: 42780692; note = Sequence Name: 56322-704_101_SL_seq_8091
atgccaacatgaggaagagc

SEQ ID NO: 8092 - DNA, 20 bp, Homo sapiens
  source 1..20: mol_type = genomic DNA; note = Gene: WNK4; note = Location (start to end; relative to TSS): WNK4_41_71; note = Orientation (relative to transcription): antisense; note = sgRNA Position: 42780657; note = Sequence Name: 56322-704_101_SL_seq_8092
agaaaatcagacggccggag

SEQ ID NO: 8093 - DNA, 20 bp, Homo sapiens
  source 1..20: mol_type = genomic DNA; note = Gene: WNK4; note = Location (start to end; relative to TSS): WNK4_75_105; note = Orientation (relative to transcription): antisense; note = sgRNA Position: 42780691; note = Sequence Name: 56322-704_101_SL_seq_8093
tgccaacatgaggaagagca

SEQ ID NO: 8094 - DNA, 20 bp, Homo sapiens
  source 1..20: mol_type = genomic DNA; note = Gene: WNK4; note = Location (start to end; relative to TSS): WNK4_38_68; note = Orientation (relative to transcription): antisense; note = sgRNA Position: 42780654; note = Sequence Name: 56322-704_101_SL_seq_8094
aaatcagacggccggagagg

SEQ ID NO: 8095 - DNA, 20 bp, Homo sapiens
  source 1..20: mol_type = genomic DNA; note = Gene: WNK4; note = Location (start to end; relative to TSS): WNK4_73_103; note = Orientation (relative to transcription): sense; note = sgRNA Position: 42780709; note = Sequence Name: 56322-704_101_SL_seq_8095
cttcctcatgttggcatccc

SEQ ID NO: 8096 - DNA, 20 bp, Homo sapiens
  source 1..20: mol_type = genomic DNA; note = Gene: WNK4; note = Location (start to end; relative to TSS): WNK4_35_65; note = Orientation (relative to transcription): antisense; note = sgRNA Position: 42780651; note = Sequence Name: 56322-704_101_SL_seq_8096
tcagacggccggagaggagg

SEQ ID NO: 8097 - DNA, 20 bp, Homo sapiens
  source 1..20: mol_type = genomic DNA; note = Gene: WNK4; note = Location (start to end; relative to TSS): WNK4_65_95; note = Orientation (relative to transcription): antisense; note = sgRNA Position: 42780681; note = Sequence Name: 56322-704_101_SL_seq_8097
aggaagagcagggcgccgaa

SEQ ID NO: 8098 - DNA, 20 bp, Homo sapiens
  source 1..20: mol_type = genomic DNA; note = Gene: WNK4; note = Location (start to end; relative to TSS): WNK4_18_48; note = Orientation (relative to transcription): sense; note = sgRNA Position: 42780654; note = Sequence Name: 56322-704_101_SL_seq_8098
ctgtcaggccgcctcctctc

SEQ ID NO: 8099 - DNA, 20 bp, Homo sapiens
  source 1..20: mol_type = genomic DNA; note = Gene: WNK4; note = Location (start to end; relative to TSS): WNK4_64_94; note = Orientation (relative to transcription): sense; note = sgRNA Position: 42780700; note = Sequence Name: 56322-704_101_SL_seq_8099
cgccctgctcttcctcatgt

SEQ ID NO: 8100 - DNA, 20 bp, Homo sapiens
  source 1..20: mol_type = genomic DNA; note = Gene: YES1; note = Location (start to end; relative to TSS): YES1_20_50; note = Orientation (relative to transcription): sense; note = sgRNA Position: 812198; note = Sequence Name: 56322-704_101_SL_seq_8100
cgaggaggtggaggagggag

SEQ ID NO: 8101 - DNA, 20 bp, Homo sapiens
  source 1..20: mol_type = genomic DNA; note = Gene: YES1; note = Location (start to end; relative to TSS): YES1_72_102; note = Orientation (relative to transcription): antisense; note = sgRNA Position: 812166; note = Sequence Name: 56322-704_101_SL_seq_8101
ccgcagctcgaggtggcgga

SEQ ID NO: 8102 - DNA, 20 bp, Homo sapiens
  source 1..20: mol_type = genomic DNA; note = Gene: YES1; note = Location (start to end; relative to TSS): YES1_21_51; note = Orientation (relative to transcription): antisense; note = sgRNA Position: 812217; note = Sequence Name: 56322-704_101_SL_seq_8102
tcctccacctcctcgtcccg

SEQ ID NO: 8103 - DNA, 20 bp, Homo sapiens
  source 1..20: mol_type = genomic DNA; note = Gene: YES1; note = Location (start to end; relative to TSS): YES1_69_99; note = Orientation (relative to transcription): antisense; note = sgRNA Position: 812169; note = Sequence Name: 56322-704_101_SL_seq_8103
cagctcgaggtggcggaggg

SEQ ID NO: 8104 - DNA, 20 bp, Homo sapiens
  source 1..20: mol_type = genomic DNA; note = Gene: YES1; note = Location (start to end; relative to TSS): YES1_22_52; note = Orientation (relative to transcription): antisense; note = sgRNA Position: 812216; note = Sequence Name: 56322-704_101_SL_seq_8104
ctcctccacctcctcgtccc

SEQ ID NO: 8105 - DNA, 20 bp, Homo sapiens
  source 1..20: mol_type = genomic DNA; note = Gene: YES1; note = Location (start to end; relative to TSS): YES1_66_96; note = Orientation (relative to transcription): antisense; note = sgRNA Position: 812172; note = Sequence Name: 56322-704_101_SL_seq_8105
ctcgaggtggcggagggcgg

SEQ ID NO: 8106 - DNA, 20 bp, Homo sapiens
  source 1..20: mol_type = genomic DNA; note = Gene: YES1; note = Location (start to end; relative to TSS): YES1_23_53; note = Orientation (relative to transcription): antisense; note = sgRNA Position: 812215; note = Sequence Name: 56322-704_101_SL_seq_8106
cctcctccacctcctcgtcc

SEQ ID NO: 8107 - DNA, 20 bp, Homo sapiens
  source 1..20: mol_type = genomic DNA; note = Gene: YES1; note = Location (start to end; relative to TSS): YES1_63_93; note = Orientation (relative to transcription): sense; note = sgRNA Position: 812155; note = Sequence Name: 56322-704_101_SL_seq_8107
ccctccgccacctcgagctg

SEQ ID NO: 8108 - DNA, 20 bp, Homo sapiens
  source 1..20: mol_type = genomic DNA; note = Gene: YES1; note = Location (start to end; relative to TSS): YES1_29_59; note = Orientation (relative to transcription): sense; note = sgRNA Position: 812189; note = Sequence Name: 56322-704_101_SL_seq_8108
ggaggagggagagggcccgc

SEQ ID NO: 8109 - DNA, 20 bp, Homo sapiens
  source 1..20: mol_type = genomic DNA; note = Gene: YES1; note = Location (start to end; relative to TSS): YES1_61_91; note = Orientation (relative to transcription): antisense; note = sgRNA Position: 812177; note = Sequence Name: 56322-704_101_SL_seq_8109
ggtggcggagggcggaggcg

SEQ ID NO: 8110 - DNA, 20 bp, Homo sapiens
  source 1..20: mol_type = genomic DNA; note = Gene: ZAP70; note = Location (start to end; relative to TSS): ZAP70_29_59; note = Orientation (relative to transcription): sense; note = sgRNA Position: 97713631; note = Sequence Name: 56322-704_101_SL_seq_8110
ccaggccttccgggcaggcc

SEQ ID NO: 8111 - DNA, 20 bp, Homo sapiens
  source 1..20: mol_type = genomic DNA; note = Gene: ZAP70; note = Location (start to end; relative to TSS): ZAP70_68_98; note = Orientation (relative to transcription): sense; note = sgRNA Position: 97713670; note = Sequence Name: 56322-704_101_SL_seq_8111
gagctgctgctggggcattc

SEQ ID NO: 8112 - DNA, 20 bp, Homo sapiens
  source 1..20: mol_type = genomic DNA; note = Gene: ZAP70; note = Location (start to end; relative to TSS): ZAP70_19_49; note = Orientation (relative to transcription): sense; note = sgRNA Position: 97713621; note = Sequence Name: 56322-704_101_SL_seq_8112
tcagcagacaccaggccttc

SEQ ID NO: 8113 - DNA, 20 bp, Homo sapiens
  source 1..20: mol_type = genomic DNA; note = Gene: ZAP70; note = Location (start to end; relative to TSS): ZAP70_65_95; note = Orientation (relative to transcription): antisense; note = sgRNA Position: 97713647; note = Sequence Name: 56322-704_101_SL_seq_8113
agcagcagctctgaggccca

SEQ ID NO: 8114 - DNA, 20 bp, Homo sapiens
  source 1..20: mol_type = genomic DNA; note = Gene: ZAP70; note = Location (start to end; relative to TSS): ZAP70_20_50; note = Orientation (relative to transcription): sense; note = sgRNA Position: 97713622; note = Sequence Name: 56322-704_101_SL_seq_8114
cagcagacaccaggccttcc

SEQ ID NO: 8115 - DNA, 20 bp, Homo sapiens
  source 1..20: mol_type = genomic DNA; note = Gene: ZAP70; note = Location (start to end; relative to TSS): ZAP70_62_92; note = Orientation (relative to transcription): antisense; note = sgRNA Position: 97713644; note = Sequence Name: 56322-704_101_SL_seq_8115
agcagctctgaggcccacgg

SEQ ID NO: 8116 - DNA, 20 bp, Homo sapiens
  source 1..20: mol_type = genomic DNA; note = Gene: ZAP70; note = Location (start to end; relative to TSS): ZAP70_21_51; note = Orientation (relative to transcription): antisense; note = sgRNA Position: 97713603; note = Sequence Name: 56322-704_101_SL_seq_8116
gcctggtgtctgctgagctc

SEQ ID NO: 8117 - DNA, 20 bp, Homo sapiens
  source 1..20: mol_type = genomic DNA; note = Gene: ZAP70; note = Location (start to end; relative to TSS): ZAP70_61_91; note = Orientation (relative to transcription): antisense; note = sgRNA Position: 97713643; note = Sequence Name: 56322-704_101_SL_seq_8117
gcagctctgaggcccacggt

SEQ ID NO: 8118 - DNA, 20 bp, Homo sapiens
  source 1..20: mol_type = genomic DNA; note = Gene: ZAP70; note = Location (start to end; relative to TSS): ZAP70_24_54; note = Orientation (relative to transcription): sense; note = sgRNA Position: 97713626; note = Sequence Name: 56322-704_101_SL_seq_8118
agacaccaggccttccgggc

SEQ ID NO: 8119 - DNA, 20 bp, Homo sapiens
  source 1..20: mol_type = genomic DNA; note = Gene: ZAP70; note = Location (start to end; relative to TSS): ZAP70_56_86; note = Orientation (relative to transcription): antisense; note = sgRNA Position: 97713638; note = Sequence Name: 56322-704_101_SL_seq_8119
tctgaggcccacggtgggcc

SEQ ID NO: 8120 - DNA, 20 bp, Homo sapiens
  source 1..20: mol_type = genomic DNA; note = Gene: A1BG; note = Location (start to end; relative to TSS): A1BG_51_81; note = Orientation (relative to transcription): antisense; note = sgRNA Position: 58353437; note = Sequence Name: 56322-704_101_SL_seq_8120
gaccacgagcatggacatga

SEQ ID NO: 8121 - DNA, 20 bp, Homo sapiens
  source 1..20: mol_type = genomic DNA; note = Gene: A1BG; note = Location (start to end; relative to TSS): A1BG_88_118; note = Orientation (relative to transcription): sense; note = sgRNA Position: 58353380; note = Sequence Name: 56322-704_101_SL_seq_8121
ctcctggggtctgggtccct

SEQ ID NO: 8122 - DNA, 20 bp, Homo sapiens
  source 1..20: mol_type = genomic DNA; note = Gene: A1BG; note = Location (start to end; relative to TSS): A1BG_40_70; note = Orientation (relative to transcription): sense; note = sgRNA Position: 58353428; note = Sequence Name: 56322-704_101_SL_seq_8122
gaccatcatgtccatgctcg

SEQ ID NO: 8123 - DNA, 20 bp, Homo sapiens
  source 1..20: mol_type = genomic DNA; note = Gene: A1BG; note = Location (start to end; relative to TSS): A1BG_74_104; note = Orientation (relative to transcription): sense; note = sgRNA Position: 58353394; note = Sequence Name: 56322-704_101_SL_seq_8123
ctgtggggtgaggcctcctg

SEQ ID NO: 8124 - DNA, 20 bp, Homo sapiens
  source 1..20: mol_type = genomic DNA; note = Gene: A1BG; note = Location (start to end; relative to TSS): A1BG_36_66; note = Orientation (relative to transcription): antisense; note = sgRNA Position: 58353452; note = Sequence Name: 56322-704_101_SL_seq_8124
catgatggtcgcgctcactc

SEQ ID NO: 8125 - DNA, 20 bp, Homo sapiens
  source 1..20: mol_type = genomic DNA; note = Gene: A1BG; note = Location (start to end; relative to TSS): A1BG_73_103; note = Orientation (relative to transcription): sense; note = sgRNA Position: 58353395; note = Sequence Name: 56322-704_101_SL_seq_8125
gctgtggggtgaggcctcct

SEQ ID NO: 8126 - DNA, 20 bp, Homo sapiens
  source 1..20: mol_type = genomic DNA; note = Gene: A1BG; note = Location (start to end; relative to TSS): A1BG_18_48; note = Orientation (relative to transcription): antisense; note = sgRNA Position: 58353470; note = Sequence Name: 56322-704_101_SL_seq_8126
tccggtgcagtgagtgtctg

SEQ ID NO: 8127 - DNA, 20 bp, Homo sapiens
  source 1..20: mol_type = genomic DNA; note = Gene: A1BG; note = Location (start to end; relative to TSS): A1BG_57_87; note = Orientation (relative to transcription): sense; note = sgRNA Position: 58353411; note = Sequence Name: 56322-704_101_SL_seq_8127
tcgtggtctttctcttgctg

SEQ ID NO: 8128 - DNA, 20 bp, Homo sapiens
  source 1..20: mol_type = genomic DNA; note = Gene: A1BG; note = Location (start to end; relative to TSS): A1BG_19_49; note = Orientation (relative to transcription): antisense; note = sgRNA Position: 58353469; note = Sequence Name: 56322-704_101_SL_seq_8128
ctccggtgcagtgagtgtct

SEQ ID NO: 8129 - DNA, 20 bp, Homo sapiens
  source 1..20: mol_type = genomic DNA; note = Gene: A1BG; note = Location (start to end; relative to TSS): A1BG_51_81; note = Orientation (relative to transcription): antisense; note = sgRNA Position: 58353437; note = Sequence Name: 56322-704_101_SL_seq_8129
gaccacgagcatggacatga

SEQ ID NO: 8130 - DNA, 20 bp, Homo sapiens
  source 1..20: mol_type = genomic DNA; note = Gene: ACAN; note = Location (start to end; relative to TSS): ACAN_41_71; note = Orientation (relative to transcription): sense; note = sgRNA Position: 88803503; note = Sequence Name: 56322-704_101_SL_seq_8130
gacgcgcgcagcgctgctca

SEQ ID NO: 8131 - DNA, 20 bp, Homo sapiens
  source 1..20: mol_type = genomic DNA; note = Gene: ACAN; note = Location (start to end; relative to TSS): ACAN_89_119; note = Orientation (relative to transcription): antisense; note = sgRNA Position: 88803531; note = Sequence Name: 56322-704_101_SL_seq_8131
cgtcagacgccggccggcga

SEQ ID NO: 8132 - DNA, 20 bp, Homo sapiens
  source 1..20: mol_type = genomic DNA; note = Gene: ACAN; note = Location (start to end; relative to TSS): ACAN_26_56; note = Orientation (relative to transcription): antisense; note = sgRNA Position: 88803468; note = Sequence Name: 56322-704_101_SL_seq_8132
tcagctctgcgagccccctc

SEQ ID NO: 8133 - DNA, 20 bp, Homo sapiens
  source 1..20: mol_type = genomic DNA; note = Gene: ACAN; note = Location (start to end; relative to TSS): ACAN_84_114; note = Orientation (relative to transcription): sense; note = sgRNA Position: 88803546; note = Sequence Name: 56322-704_101_SL_seq_8133
cgccggccggcgtctgacgc

SEQ ID NO: 8134 - DNA, 20 bp, Homo sapiens
  source 1..20: mol_type = genomic DNA; note = Gene: ACAN; note = Location (start to end; relative to TSS): ACAN_21_51; note = Orientation (relative to transcription): antisense; note = sgRNA Position: 88803463; note = Sequence Name: 56322-704_101_SL_seq_8134
tctgcgagccccctctggag

SEQ ID NO: 8135 - DNA, 20 bp, Homo sapiens
  source 1..20: mol_type = genomic DNA; note = Gene: ACAN; note = Location (start to end; relative to TSS): ACAN_83_113; note = Orientation (relative to transcription): sense; note = sgRNA Position: 88803545; note = Sequence Name: 56322-704_101_SL_seq_8135
tcgccggccggcgtctgacg

SEQ ID NO: 8136 - DNA, 20 bp, Homo sapiens
  source 1..20: mol_type = genomic DNA; note = Gene: ACAN; note = Location (start to end; relative to TSS): ACAN_18_48; note = Orientation (relative to transcription): antisense; note = sgRNA Position: 88803460; note = Sequence Name: 56322-704_101_SL_seq_8136
gcgagccccctctggagcgg

SEQ ID NO: 8137 - DNA, 20 bp, Homo sapiens
  source 1..20: mol_type = genomic DNA; note = Gene: ACAN; note = Location (start to end; relative to TSS): ACAN_71_101; note = Orientation (relative to transcription): sense; note = sgRNA Position: 88803533; note = Sequence Name: 56322-704_101_SL_seq_8137
ctctcagcaccctcgccggc

SEQ ID NO: 8138 - DNA, 20 bp, Homo sapiens
  source 1..20: mol_type = genomic DNA; note = Gene: ACAN; note = Location (start to end; relative to TSS): ACAN_17_47; note = Orientation (relative to transcription): antisense; note = sgRNA Position: 88803459; note = Sequence Name: 56322-704_101_SL_seq_8138
cgagccccctctggagcggc

SEQ ID NO: 8139 - DNA, 20 bp, Homo sapiens
  source 1..20: mol_type = genomic DNA; note = Gene: ACAN; note = Location (start to end; relative to TSS): ACAN_67_97; note = Orientation (relative to transcription): sense; note = sgRNA Position: 88803529; note = Sequence Name: 56322-704_101_SL_seq_8139
ctctctctcagcaccctcgc

SEQ ID NO: 8140 - DNA, 20 bp, Homo sapiens
  source 1..20: mol_type = genomic DNA; note = Gene: ADAMTSL1; note = Location (start to end; relative to TSS): ADAMTSL1_63_93; note = Orientation (relative to transcription): antisense; note = sgRNA Position: 18474222; note = Sequence Name: 56322-704_101_SL_seq_8140
ttccatgcttggatccttgc

SEQ ID NO: 8141 - DNA, 20 bp, Homo sapiens
  source 1..20: mol_type = genomic DNA; note = Gene: ADAMTSL1; note = Location (start to end; relative to TSS): ADAMTSL1_112_142; note = Orientation (relative to transcription): sense; note = sgRNA Position: 18474291; note = Sequence Name: 56322-704_101_SL_seq_8141
ctttctggctttcctgctcc

SEQ ID NO: 8142 - DNA, 20 bp, Homo sapiens
  source 1..20: mol_type = genomic DNA; note = Gene: ADAMTSL1; note = Location (start to end; relative to TSS): ADAMTSL1_51_81; note = Orientation (relative to transcription): antisense; note = sgRNA Position: 18474210; note = Sequence Name: 56322-704_101_SL_seq_8142
atccttgccggaatcagaat

SEQ ID NO: 8143 - DNA, 20 bp, Homo sapiens
  source 1..20: mol_type = genomic DNA; note = Gene: ADAMTSL1; note = Location (start to end; relative to TSS): ADAMTSL1_104_134; note = Orientation (relative to transcription): antisense; note = sgRNA Position: 18474263; note = Sequence Name: 56322-704_101_SL_seq_8143
agaaagaggagcagtgtgcc

SEQ ID NO: 8144 - DNA, 20 bp, Homo sapiens
  source 1..20: mol_type = genomic DNA; note = Gene: ADAMTSL1; note = Location (start to end; relative to TSS): ADAMTSL1_52_82; note = Orientation (relative to transcription): sense; note = sgRNA Position: 18474231; note = Sequence Name: 56322-704_101_SL_seq_8144
ttccggcaaggatccaagca

SEQ ID NO: 8145 - DNA, 20 bp, Homo sapiens
  source 1..20: mol_type = genomic DNA; note = Gene: ADAMTSL1; note = Location (start to end; relative to TSS): ADAMTSL1_91_121; note = Orientation (relative to transcription): antisense; note = sgRNA Position: 18474250; note = Sequence Name: 56322-704_101_SL_seq_8145
gtgtgccaggagttgcccga

SEQ ID NO: 8146 - DNA, 20 bp, Homo sapiens
  source 1..20: mol_type = genomic DNA; note = Gene: ADAMTSL1; note = Location (start to end; relative to TSS): ADAMTSL1_40_70; note = Orientation (relative to transcription): sense; note = sgRNA Position: 18474219; note = Sequence Name: 56322-704_101_SL_seq_8146
gtccgattctgattccggca

SEQ ID NO: 8147 - DNA, 20 bp, Homo sapiens
  source 1..20: mol_type = genomic DNA; note = Gene: ADAMTSL1; note = Location (start to end; relative to TSS): ADAMTSL1_74_104; note = Orientation (relative to transcription): antisense; note = sgRNA Position: 18474233; note = Sequence Name: 56322-704_101_SL_seq_8147
cgacggcagcattccatgct

SEQ ID NO: 8148 - DNA, 20 bp, Homo sapiens
  source 1..20: mol_type = genomic DNA; note = Gene: ADAMTSL1; note = Location (start to end; relative to TSS): ADAMTSL1_35_65; note = Orientation (relative to transcription): sense; note = sgRNA Position: 18474214; note = Sequence Name: 56322-704_101_SL_seq_8148
tcagtgtccgattctgattc

SEQ ID NO: 8149 - DNA, 20 bp, Homo sapiens
  source 1..20: mol_type = genomic DNA; note = Gene: ADAMTSL1; note = Location (start to end; relative to TSS): ADAMTSL1_66_96; note = Orientation (relative to transcription): sense; note = sgRNA Position: 18474245; note = Sequence Name: 56322-704_101_SL_seq_8149
caagcatggaatgctgccgt

SEQ ID NO: 8150 - DNA, 20 bp, Homo sapiens
  source 1..20: mol_type = genomic DNA; note = Gene: ADAMTSL3; note = Location (start to end; relative to TSS): ADAMTSL3_29_59; note = Orientation (relative to transcription): sense; note = sgRNA Position: 83654178; note = Sequence Name: 56322-704_101_SL_seq_8150
ctggtgccggattccgcacg

SEQ ID NO: 8151 - DNA, 20 bp, Homo sapiens
  source 1..20: mol_type = genomic DNA; note = Gene: ADAMTSL3; note = Location (start to end; relative to TSS): ADAMTSL3_91_121; note = Orientation (relative to transcription): sense; note = sgRNA Position: 83654240; note = Sequence Name: 56322-704_101_SL_seq_8151
gccgagcccgcgcggccccg

SEQ ID NO: 8152 - DNA, 20 bp, Homo sapiens
  source 1..20: mol_type = genomic DNA; note = Gene: ADAMTSL3; note = Location (start to end; relative to TSS): ADAMTSL3_37_67; note = Orientation (relative to transcription): antisense; note = sgRNA Position: 83654166; note = Sequence Name: 56322-704_101_SL_seq_8152
ctcgtgcggaatccggcacc

SEQ ID NO: 8153 - DNA, 20 bp, Homo sapiens
  source 1..20: mol_type = genomic DNA; note = Gene: ADAMTSL3; note = Location (start to end; relative to TSS): ADAMTSL3_89_119; note = Orientation (relative to transcription): antisense; note = sgRNA Position: 83654218; note = Sequence Name: 56322-704_101_SL_seq_8153
cgcgggctcggcgcgcgctg

SEQ ID NO: 8154 - DNA, 20 bp, Homo sapiens
  source 1..20: mol_type = genomic DNA; note = Gene: ADAMTSL3; note = Location (start to end; relative to TSS): ADAMTSL3_38_68; note = Orientation (relative to transcription): sense; note = sgRNA Position: 83654187; note = Sequence Name: 56322-704_101_SL_seq_8154
gattccgcacgaggtgttga

SEQ ID NO: 8155 - DNA, 20 bp, Homo sapiens
  source 1..20: mol_type = genomic DNA; note = Gene: ADAMTSL3; note = Location (start to end; relative to TSS): ADAMTSL3_83_113; note = Orientation (relative to transcription): sense; note = sgRNA Position: 83654232; note = Sequence Name: 56322-704_101_SL_seq_8155
cagcgcgcgccgagcccgcg

SEQ ID NO: 8156 - DNA, 20 bp, Homo sapiens
  source 1..20: mol_type = genomic DNA; note = Gene: ADAMTSL3; note = Location (start to end; relative to TSS): ADAMTSL3_39_69; note = Orientation (relative to transcription): sense; note = sgRNA Position: 83654188; note = Sequence Name: 56322-704_101_SL_seq_8156
attccgcacgaggtgttgac

SEQ ID NO: 8157 - DNA, 20 bp, Homo sapiens
  source 1..20: mol_type = genomic DNA; note = Gene: ADAMTSL3; note = Location (start to end; relative to TSS): ADAMTSL3_80_110; note = Orientation (relative to transcription): antisense; note = sgRNA Position: 83654209; note = Sequence Name: 56322-704_101_SL_seq_8157
ggcgcgcgctggggagaagt

SEQ ID NO: 8158 - DNA, 20 bp, Homo sapiens
  source 1..20: mol_type = genomic DNA; note = Gene: ADAMTSL3; note = Location (start to end; relative to TSS): ADAMTSL3_20_50; note = Orientation (relative to transcription): antisense; note = sgRNA Position: 83654149; note = Sequence Name: 56322-704_101_SL_seq_8158
accaggaccttccccgacgc

SEQ ID NO: 8159 - DNA, 20 bp, Homo sapiens
  source 1..20: mol_type = genomic DNA; note = Gene: ADAMTSL3; note = Location (start to end; relative to TSS): ADAMTSL3_51_81; note = Orientation (relative to transcription): antisense; note = sgRNA Position: 83654180; note = Sequence Name: 56322-704_101_SL_seq_8159
ccgcccgtcaacacctcgtg

SEQ ID NO: 8160 - DNA, 20 bp, Homo sapiens
  source 1..20: mol_type = genomic DNA; note = Gene: ADGRA2; note = Location (start to end; relative to TSS): ADGRA2_50_80; note = Orientation (relative to transcription): antisense; note = sgRNA Position: 37796939; note = Sequence Name: 56322-704_101_SL_seq_8160
ggcgctgggctgggacctag

SEQ ID NO: 8161 - DNA, 20 bp, Homo sapiens
  source 1..20: mol_type = genomic DNA; note = Gene: ADGRA2; note = Location (start to end; relative to TSS): ADGRA2_92_122; note = Orientation (relative to transcription): sense; note = sgRNA Position: 37797001; note = Sequence Name: 56322-704_101_SL_seq_8161
gcctccagtgtcccgagggc

SEQ ID NO: 8162 - DNA, 20 bp, Homo sapiens
  source 1..20: mol_type = genomic DNA; note = Gene: ADGRA2; note = Location (start to end; relative to TSS): ADGRA2_52_82; note = Orientation (relative to transcription): sense; note = sgRNA Position: 37796961; note = Sequence Name: 56322-704_101_SL_seq_8162
cagcccagcgcccagcgagc

SEQ ID NO: 8163 - DNA, 20 bp, Homo sapiens
  source 1..20: mol_type = genomic DNA; note = Gene: ADGRA2; note = Location (start to end; relative to TSS): ADGRA2_88_118; note = Orientation (relative to transcription): sense; note = sgRNA Position: 37796997; note = Sequence Name: 56322-704_101_SL_seq_8163
ccgggcctccagtgtcccga

SEQ ID NO: 8164 - DNA, 20 bp, Homo sapiens
  source 1..20: mol_type = genomic DNA; note = Gene: ADGRA2; note = Location (start to end; relative to TSS): ADGRA2_40_70; note = Orientation (relative to transcription): antisense; note = sgRNA Position: 37796929; note = Sequence Name: 56322-704_101_SL_seq_8164
tgggacctagcggatcgcgc

SEQ ID NO: 8165 - DNA, 20 bp, Homo sapiens
  source 1..20: mol_type = genomic DNA; note = Gene: ADGRA2; note = Location (start to end; relative to TSS): ADGRA2_87_117; note = Orientation (relative to transcription): sense; note = sgRNA Position: 37796996; note = Sequence Name: 56322-704_101_SL_seq_8165
gccgggcctccagtgtcccg

SEQ ID NO: 8166 - DNA, 20 bp, Homo sapiens
  source 1..20: mol_type = genomic DNA; note = Gene: ADGRA2; note = Location (start to end; relative to TSS): ADGRA2_39_69; note = Orientation (relative to transcription): antisense; note = sgRNA Position: 37796928; note = Sequence Name: 56322-704_101_SL_seq_8166
gggacctagcggatcgcgcc

SEQ ID NO: 8167 - DNA, 20 bp, Homo sapiens
  source 1..20: mol_type = genomic DNA; note = Gene: ADGRA2; note = Location (start to end; relative to TSS): ADGRA2_71_101; note = Orientation (relative to transcription): antisense; note = sgRNA Position: 37796960; note = Sequence Name: 56322-704_101_SL_seq_8167
ctccgcgtcgcctgctcgct

SEQ ID NO: 8168 - DNA, 20 bp, Homo sapiens
  source 1..20: mol_type = genomic DNA; note = Gene: ADGRA2; note = Location (start to end; relative to TSS): ADGRA2_26_56; note = Orientation (relative to transcription): sense; note = sgRNA Position: 37796935; note = Sequence Name: 56322-704_101_SL_seq_8168
ggagcccggcgcgatccgct

SEQ ID NO: 8169 - DNA, 20 bp, Homo sapiens
  source 1..20: mol_type = genomic DNA; note = Gene: ADGRA2; note = Location (start to end; relative to TSS): ADGRA2_60_90; note = Orientation (relative to transcription): sense; note = sgRNA Position: 37796969; note = Sequence Name: 56322-704_101_SL_seq_8169
cgcccagcgagcaggcgacg

SEQ ID NO: 8170 - DNA, 20 bp, Homo sapiens
  source 1..20: mol_type = genomic DNA; note = Gene: ADGRA3; note = Location (start to end; relative to TSS): ADGRA3_41_71; note = Orientation (relative to transcription): sense; note = sgRNA Position: 22516001; note = Sequence Name: 56322-704_101_SL_seq_8170
ccgggcggtagagcggcgct

SEQ ID NO: 8171 - DNA, 20 bp, Homo sapiens
  source 1..20: mol_type = genomic DNA; note = Gene: ADGRA3; note = Location (start to end; relative to TSS): ADGRA3_89_119; note = Orientation (relative to transcription): antisense; note = sgRNA Position: 22515973; note = Sequence Name: 56322-704_101_SL_seq_8171
ctgggcctctagggagccgg

SEQ ID NO: 8172 - DNA, 20 bp, Homo sapiens
  source 1..20: mol_type = genomic DNA; note = Gene: ADGRA3; note = Location (start to end; relative to TSS): ADGRA3_34_64; note = Orientation (relative to transcription): sense; note = sgRNA Position: 22516008; note = Sequence Name: 56322-704_101_SL_seq_8172
gctcgcgccgggcggtagag

SEQ ID NO: 8173 - DNA, 20 bp, Homo sapiens
  source 1..20: mol_type = genomic DNA; note = Gene: ADGRA3; note = Location (start to end; relative to TSS): ADGRA3_83_113; note = Orientation (relative to transcription): antisense; note = sgRNA Position: 22515979; note = Sequence Name: 56322-704_101_SL_seq_8173
ctctagggagccgggggtca

SEQ ID NO: 8174 - DNA, 20 bp, Homo sapiens
  source 1..20: mol_type = genomic DNA; note = Gene: ADGRA3; note = Location (start to end; relative to TSS): ADGRA3_26_56; note = Orientation (relative to transcription): sense; note = sgRNA Position: 22516016; note = Sequence Name: 56322-704_101_SL_seq_8174
gaggcggtgctcgcgccggg

SEQ ID NO: 8175 - DNA, 20 bp, Homo sapiens
  source 1..20: mol_type = genomic DNA; note = Gene: ADGRA3; note = Location (start to end; relative to TSS): ADGRA3_75_105; note = Orientation (relative to transcription): sense; note = sgRNA Position: 22515967; note = Sequence Name: 56322-704_101_SL_seq_8175
cgtgacccccggctccctag

SEQ ID NO: 8176 - DNA, 20 bp, Homo sapiens
  source 1..20: mol_type = genomic DNA; note = Gene: ADGRA3; note = Location (start to end; relative to TSS): ADGRA3_23_53; note = Orientation (relative to transcription): sense; note = sgRNA Position: 22516019; note = Sequence Name: 56322-704_101_SL_seq_8176
gaggaggcggtgctcgcgcc

SEQ ID NO: 8177 - DNA, 20 bp, Homo sapiens
  source 1..20: mol_type = genomic DNA; note = Gene: ADGRA3; note = Location (start to end; relative to TSS): ADGRA3_74_104; note = Orientation (relative to transcription): antisense; note = sgRNA Position: 22515988; note = Sequence Name: 56322-704_101_SL_seq_8177
gccgggggtcacggccgcat

SEQ ID NO: 8178 - DNA, 20 bp, Homo sapiens
  source 1..20: mol_type = genomic DNA; note = Gene: ADGRA3; note = Location (start to end; relative to TSS): ADGRA3_22_52; note = Orientation (relative to transcription): sense; note = sgRNA Position: 22516020; note = Sequence Name: 56322-704_101_SL_seq_8178
ggaggaggcggtgctcgcgc

SEQ ID NO: 8179 - DNA, 20 bp, Homo sapiens
  source 1..20: mol_type = genomic DNA; note = Gene: ADGRA3; note = Location (start to end; relative to TSS): ADGRA3_64_94; note = Orientation (relative to transcription): sense; note = sgRNA Position: 22515978; note = Sequence Name: 56322-704_101_SL_seq_8179
acccatgcggccgtgacccc

SEQ ID NO: 8180 - DNA, 20 bp, Homo sapiens
  source 1..20: mol_type = genomic DNA; note = Gene: ADGRF5; note = Location (start to end; relative to TSS): ADGRF5_59_89; note = Orientation (relative to transcription): antisense; note = sgRNA Position: 46921875; note = Sequence Name: 56322-704_101_SL_seq_8180
ttcgcgttttcaggcaggac

SEQ ID NO: 8181 - DNA, 20 bp, Homo sapiens
  source 1..20: mol_type = genomic DNA; note = Gene: ADGRF5; note = Location (start to end; relative to TSS): ADGRF5_101_131; note = Orientation (relative to transcription): antisense; note = sgRNA Position: 46921833; note = Sequence Name: 56322-704_101_SL_seq_8181
gggctctcacgcccagtgga

SEQ ID NO: 8182 - DNA, 20 bp, Homo sapiens
  source 1..20: mol_type = genomic DNA; note = Gene: ADGRF5; note = Location (start to end; relative to TSS): ADGRF5_22_52; note = Orientation (relative to transcription): sense; note = sgRNA Position: 46921892; note = Sequence Name: 56322-704_101_SL_seq_8182
ggggaggctgagcgtgggag

SEQ ID NO: 8183 - DNA, 20 bp, Homo sapiens
  source 1..20: mol_type = genomic DNA; note = Gene: ADGRF5; note = Location (start to end; relative to TSS): ADGRF5_80_110; note = Orientation (relative to transcription): sense; note = sgRNA Position: 46921834; note = Sequence Name: 56322-704_101_SL_seq_8183
ttgcttggttctccctccac

SEQ ID NO: 8184 - DNA, 20 bp, Homo sapiens
  source 1..20: mol_type = genomic DNA; note = Gene: ADGRF5; note = Location (start to end; relative to TSS): ADGRF5_17_47; note = Orientation (relative to transcription): sense; note = sgRNA Position: 46921897; note = Sequence Name: 56322-704_101_SL_seq_8184
agctgggggaggctgagcgt

SEQ ID NO: 8185 - DNA, 20 bp, Homo sapiens
  source 1..20: mol_type = genomic DNA; note = Gene: ADGRF5; note = Location (start to end; relative to TSS): ADGRF5_65_95; note = Orientation (relative to transcription): sense; note = sgRNA Position: 46921849; note = Sequence Name: 56322-704_101_SL_seq_8185
aacgcgaaatgagtcttgct

SEQ ID NO: 8186 - DNA, 20 bp, Homo sapiens
  source 1..20: mol_type = genomic DNA; note = Gene: ADGRF5; note = Location (start to end; relative to TSS): ADGRF5_16_46; note = Orientation (relative to transcription): sense; note = sgRNA Position: 46921898; note = Sequence Name: 56322-704_101_SL_seq_8186
tagctgggggaggctgagcg

SEQ ID NO: 8187 - DNA, 20 bp, Homo sapiens
  source 1..20: mol_type = genomic DNA; note = Gene: ADGRF5; note = Location (start to end; relative to TSS): ADGRF5_64_94; note = Orientation (relative to transcription): antisense; note = sgRNA Position: 46921870; note = Sequence Name: 56322-704_101_SL_seq_8187
ctcatttcgcgttttcaggc

SEQ ID NO: 8188 - DNA, 20 bp, Homo sapiens
  source 1..20: mol_type = genomic DNA; note = Gene: ADGRF5; note = Location (start to end; relative to TSS): ADGRF5_6_36; note = Orientation (relative to transcription): sense; note = sgRNA Position: 46921908; note = Sequence Name: 56322-704_101_SL_seq_8188
gggaggatcatagctggggg

SEQ ID NO: 8189 - DNA, 20 bp, Homo sapiens
  source 1..20: mol_type = genomic DNA; note = Gene: ADGRF5; note = Location (start to end; relative to TSS): ADGRF5_59_89; note = Orientation (relative to transcription): antisense; note = sgRNA Position: 46921875; note = Sequence Name: 56322-704_101_SL_seq_8189
ttcgcgttttcaggcaggac

SEQ ID NO: 8190 - DNA, 20 bp, Homo sapiens
  source 1..20: mol_type = genomic DNA; note = Gene: ADORA3; note = Location (start to end; relative to TSS): ADORA3_19_49; note = Orientation (relative to transcription): sense; note = sgRNA Position: 111503590; note = Sequence Name: 56322-704_101_SL_seq_8190
tctggaaacttgaggatgtg

SEQ ID NO: 8191 - DNA, 20 bp, Homo sapiens
  source 1..20: mol_type = genomic DNA; note = Gene: ADORA3; note = Location (start to end; relative to TSS): ADORA3_77_107; note = Orientation (relative to transcription): antisense; note = sgRNA Position: 111503552; note = Sequence Name: 56322-704_101_SL_seq_8191
ccttagaaagggctcatcac

SEQ ID NO: 8192 - DNA, 20 bp, Homo sapiens
  source 1..20: mol_type = genomic DNA; note = Gene: ADORA3; note = Location (start to end; relative to TSS): ADORA3_18_48; note = Orientation (relative to transcription): antisense; note = sgRNA Position: 111503611; note = Sequence Name: 56322-704_101_SL_seq_8192
tcaagtttccagaatgctgt

SEQ ID NO: 8193 - DNA, 20 bp, Homo sapiens
  source 1..20: mol_type = genomic DNA; note = Gene: ADORA3; note = Location (start to end; relative to TSS): ADORA3_75_105; note = Orientation (relative to transcription): sense; note = sgRNA Position: 111503534; note = Sequence Name: 56322-704_101_SL_seq_8193
tgagccctttctaaggagaa

SEQ ID NO: 8194 - DNA, 20 bp, Homo sapiens
  source 1..20: mol_type = genomic DNA; note = Gene: ADORA3; note = Location (start to end; relative to TSS): ADORA3_35_65; note = Orientation (relative to transcription): sense; note = sgRNA Position: 111503574; note = Sequence Name: 56322-704_101_SL_seq_8194
tgtgcggtgcataaaggggc

SEQ ID NO: 8195 - DNA, 20 bp, Homo sapiens
  source 1..20: mol_type = genomic DNA; note = Gene: ADORA3; note = Location (start to end; relative to TSS): ADORA3_74_104; note = Orientation (relative to transcription): antisense; note = sgRNA Position: 111503555; note = Sequence Name: 56322-704_101_SL_seq_8195
tagaaagggctcatcacagg

SEQ ID NO: 8196 - DNA, 20 bp, Homo sapiens
  source 1..20: mol_type = genomic DNA; note = Gene: ADORA3; note = Location (start to end; relative to TSS): ADORA3_31_61; note = Orientation (relative to transcription): sense; note = sgRNA Position: 111503578; note = Sequence Name: 56322-704_101_SL_seq_8196
aggatgtgcggtgcataaag

SEQ ID NO: 8197 - DNA, 20 bp, Homo sapiens
  source 1..20: mol_type = genomic DNA; note = Gene: ADORA3; note = Location (start to end; relative to TSS): ADORA3_73_103; note = Orientation (relative to transcription): antisense; note = sgRNA Position: 111503556; note = Sequence Name: 56322-704_101_SL_seq_8197
agaaagggctcatcacaggt

SEQ ID NO: 8198 - DNA, 20 bp, Homo sapiens
  source 1..20: mol_type = genomic DNA; note = Gene: ADORA3; note = Location (start to end; relative to TSS): ADORA3_29_59; note = Orientation (relative to transcription): sense; note = sgRNA Position: 111503580; note = Sequence Name: 56322-704_101_SL_seq_8198
tgaggatgtgcggtgcataa

SEQ ID NO: 8199 - DNA, 20 bp, Homo sapiens
  source 1..20: mol_type = genomic DNA; note = Gene: ADORA3; note = Location (start to end; relative to TSS): ADORA3_68_98; note = Orientation (relative to transcription): sense; note = sgRNA Position: 111503541; note = Sequence Name: 56322-704_101_SL_seq_8199
cctgtgatgagccctttcta

SEQ ID NO: 8200 - DNA, 20 bp, Homo sapiens
  source 1..20: mol_type = genomic DNA; note = Gene: AGER; note = Location (start to end; relative to TSS): AGER_39_69; note = Orientation (relative to transcription): antisense; note = sgRNA Position: 32184210; note = Sequence Name: 56322-704_101_SL_seq_8200
ccaggctccaactgctgttc

SEQ ID NO: 8201 - DNA, 20 bp, Homo sapiens
  source 1..20: mol_type = genomic DNA; note = Gene: AGER; note = Location (start to end; relative to TSS): AGER_102_132; note = Orientation (relative to transcription): antisense; note = sgRNA Position: 32184147; note = Sequence Name: 56322-704_101_SL_seq_8201
tttctgcagggagggtcagt

SEQ ID NO: 8202 - DNA, 20 bp, Homo sapiens
  source 1..20: mol_type = genomic DNA; note = Gene: AGER; note = Location (start to end; relative to TSS): AGER_37_67; note = Orientation (relative to transcription): sense; note = sgRNA Position: 32184192; note = Sequence Name: 56322-704_101_SL_seq_8202
agcagttggagcctgggtgc

SEQ ID NO: 8203 - DNA, 20 bp, Homo sapiens
  source 1..20: mol_type = genomic DNA; note = Gene: AGER; note = Location (start to end; relative to TSS): AGER_101_131; note = Orientation (relative to transcription): antisense; note = sgRNA Position: 32184148; note = Sequence Name: 56322-704_101_SL_seq_8203
ttctgcagggagggtcagtg

SEQ ID NO: 8204 - DNA, 20 bp, Homo sapiens
  source 1..20: mol_type = genomic DNA; note = Gene: AGER; note = Location (start to end; relative to TSS): AGER_31_61; note = Orientation (relative to transcription): sense; note = sgRNA Position: 32184198; note = Sequence Name: 56322-704_101_SL_seq_8204
cggaacagcagttggagcct

SEQ ID NO: 8205 - DNA, 20 bp, Homo sapiens
  source 1..20: mol_type = genomic DNA; note = Gene: AGER; note = Location (start to end; relative to TSS): AGER_94_124; note = Orientation (relative to transcription): antisense; note = sgRNA Position: 32184155; note = Sequence Name: 56322-704_101_SL_seq_8205
gggagggtcagtggggttga

SEQ ID NO: 8206 - DNA, 20 bp, Homo sapiens
  source 1..20: mol_type = genomic DNA; note = Gene: AGER; note = Location (start to end; relative to TSS): AGER_30_60; note = Orientation (relative to transcription): sense; note = sgRNA Position: 32184199; note = Sequence Name: 56322-704_101_SL_seq_8206
ccggaacagcagttggagcc

SEQ ID NO: 8207 - DNA, 20 bp, Homo sapiens
  source 1..20: mol_type = genomic DNA; note = Gene: AGER; note = Location (start to end; relative to TSS): AGER_70_100; note = Orientation (relative to transcription): antisense; note = sgRNA Position: 32184179; note = Sequence Name: 56322-704_101_SL_seq_8207
gtggctcaccccacagactg

SEQ ID NO: 8208 - DNA, 20 bp, Homo sapiens
  source 1..20: mol_type = genomic DNA; note = Gene: AGER; note = Location (start to end; relative to TSS): AGER_23_53; note = Orientation (relative to transcription): sense; note = sgRNA Position: 32184206; note = Sequence Name: 56322-704_101_SL_seq_8208
atggctgccggaacagcagt

SEQ ID NO: 8209 - DNA, 20 bp, Homo sapiens
  source 1..20: mol_type = genomic DNA; note = Gene: AGER; note = Location (start to end; relative to TSS): AGER_53_83; note = Orientation (relative to transcription): sense; note = sgRNA Position: 32184176; note = Sequence Name: 56322-704_101_SL_seq_8209
gtgctggtcctcagtctgtg

SEQ ID NO: 8210 - DNA, 20 bp, Homo sapiens
  source 1..20: mol_type = genomic DNA; note = Gene: ALCAM; note = Location (start to end; relative to TSS): ALCAM_39_69; note = Orientation (relative to transcription): antisense; note = sgRNA Position: 105366954; note = Sequence Name: 56322-704_101_SL_seq_8210
gtctcctcaggtggcagcgg

SEQ ID NO: 8211 - DNA, 20 bp, Homo sapiens
  source 1..20: mol_type = genomic DNA; note = Gene: ALCAM; note = Location (start to end; relative to TSS): ALCAM_71_101; note = Orientation (relative to transcription): antisense; note = sgRNA Position: 105366986; note = Sequence Name: 56322-704_101_SL_seq_8211
actcgcaggaggcggcgacg

SEQ ID NO: 8212 - DNA, 20 bp, Homo sapiens
  source 1..20: mol_type = genomic DNA; note = Gene: ALCAM; note = Location (start to end; relative to TSS): ALCAM_30_60; note = Orientation (relative to transcription): antisense; note = sgRNA Position: 105366945; note = Sequence Name: 56322-704_101_SL_seq_8212
ggtggcagcggtggtagcag

SEQ ID NO: 8213 - DNA, 20 bp, Homo sapiens
  source 1..20: mol_type = genomic DNA; note = Gene: ALCAM; note = Location (start to end; relative to TSS): ALCAM_70_100; note = Orientation (relative to transcription): antisense; note = sgRNA Position: 105366985; note = Sequence Name: 56322-704_101_SL_seq_8213
ctcgcaggaggcggcgacgg

SEQ ID NO: 8214 - DNA, 20 bp, Homo sapiens
  source 1..20: mol_type = genomic DNA; note = Gene: ALCAM; note = Location (start to end; relative to TSS): ALCAM_24_54; note = Orientation (relative to transcription): antisense; note = sgRNA Position: 105366939; note = Sequence Name: 56322-704_101_SL_seq_8214
agcggtggtagcagcggcag

SEQ ID NO: 8215 - DNA, 20 bp, Homo sapiens
  source 1..20: mol_type = genomic DNA; note = Gene: ALCAM; note = Location (start to end; relative to TSS): ALCAM_68_98; note = Orientation (relative to transcription): antisense; note = sgRNA Position: 105366983; note = Sequence Name: 56322-704_101_SL_seq_8215
cgcaggaggcggcgacgggg

SEQ ID NO: 8216 - DNA, 20 bp, Homo sapiens
  source 1..20: mol_type = genomic DNA; note = Gene: ALCAM; note = Location (start to end; relative to TSS): ALCAM_26_56; note = Orientation (relative to transcription): sense; note = sgRNA Position: 105366961; note = Sequence Name: 56322-704_101_SL_seq_8216
gctaccaccgctgccacctg

SEQ ID NO: 8217 - DNA, 20 bp, Homo sapiens
  source 1..20: mol_type = genomic DNA; note = Gene: ALCAM; note = Location (start to end; relative to TSS): ALCAM_61_91; note = Orientation (relative to transcription): antisense; note = sgRNA Position: 105366976; note = Sequence Name: 56322-704_101_SL_seq_8217
ggcggcgacgggggggcggc

SEQ ID NO: 8218 - DNA, 20 bp, Homo sapiens
  source 1..20: mol_type = genomic DNA; note = Gene: ALCAM; note = Location (start to end; relative to TSS): ALCAM_21_51; note = Orientation (relative to transcription): antisense; note = sgRNA Position: 105366936; note = Sequence Name: 56322-704_101_SL_seq_8218
ggtggtagcagcggcagcgg

SEQ ID NO: 8219 - DNA, 20 bp, Homo sapiens
  source 1..20: mol_type = genomic DNA; note = Gene: ALCAM; note = Location (start to end; relative to TSS): ALCAM_51_81; note = Orientation (relative to transcription): antisense; note = sgRNA Position: 105366966; note = Sequence Name: 56322-704_101_SL_seq_8219
ggggggcggcgggtctcctc

SEQ ID NO: 8220 - DNA, 20 bp, Homo sapiens
  source 1..20: mol_type = genomic DNA; note = Gene: ALPK2; note = Location (start to end; relative to TSS): ALPK2_47_77; note = Orientation (relative to transcription): sense; note = sgRNA Position: 58629020; note = Sequence Name: 56322-704_101_SL_seq_8220
gcaatgacctagttcactga

SEQ ID NO: 8221 - DNA, 20 bp, Homo sapiens
  source 1..20: mol_type = genomic DNA; note = Gene: ALPK2; note = Location (start to end; relative to TSS): ALPK2_106_136; note = Orientation (relative to transcription): sense; note = sgRNA Position: 58628961; note = Sequence Name: 56322-704_101_SL_seq_8221
ggcatggaatttcccctctt

SEQ ID NO: 8222 - DNA, 20 bp, Homo sapiens
  source 1..20: mol_type = genomic DNA; note = Gene: ALPK2; note = Location (start to end; relative to TSS): ALPK2_48_78; note = Orientation (relative to transcription): sense; note = sgRNA Position: 58629019; note = Sequence Name: 56322-704_101_SL_seq_8222
caatgacctagttcactgaa

SEQ ID NO: 8223 - DNA, 20 bp, Homo sapiens
  source 1..20: mol_type = genomic DNA; note = Gene: ALPK2; note = Location (start to end; relative to TSS): ALPK2_101_131; note = Orientation (relative to transcription): antisense; note = sgRNA Position: 58628986; note = Sequence Name: 56322-704_101_SL_seq_8223
ttccatgcccggggaagttc

SEQ ID NO: 8224 - DNA, 20 bp, Homo sapiens
  source 1..20: mol_type = genomic DNA; note = Gene: ALPK2; note = Location (start to end; relative to TSS): ALPK2_51_81; note = Orientation (relative to transcription): sense; note = sgRNA Position: 58629016; note = Sequence Name: 56322-704_101_SL_seq_8224
tgacctagttcactgaaggg

SEQ ID NO: 8225 - DNA, 20 bp, Homo sapiens
  source 1..20: mol_type = genomic DNA; note = Gene: ALPK2; note = Location (start to end; relative to TSS): ALPK2_90_120; note = Orientation (relative to transcription): sense; note = sgRNA Position: 58628977; note = Sequence Name: 56322-704_101_SL_seq_8225
ttccagaacttccccgggca

SEQ ID NO: 8226 - DNA, 20 bp, Homo sapiens
  source 1..20: mol_type = genomic DNA; note = Gene: ALPK2; note = Location (start to end; relative to TSS): ALPK2_52_82; note = Orientation (relative to transcription): sense; note = sgRNA Position: 58629015; note = Sequence Name: 56322-704_101_SL_seq_8226
gacctagttcactgaagggc

SEQ ID NO: 8227 - DNA, 20 bp, Homo sapiens
  source 1..20: mol_type = genomic DNA; note = Gene: ALPK2; note = Location (start to end; relative to TSS): ALPK2_85_115; note = Orientation (relative to transcription): sense; note = sgRNA Position: 58628982; note = Sequence Name: 56322-704_101_SL_seq_8227
tcttcttccagaacttcccc

SEQ ID NO: 8228 - DNA, 20 bp, Homo sapiens
  source 1..20: mol_type = genomic DNA; note = Gene: ALPK2; note = Location (start to end; relative to TSS): ALPK2_53_83; note = Orientation (relative to transcription): sense; note = sgRNA Position: 58629014; note = Sequence Name: 56322-704_101_SL_seq_8228
acctagttcactgaagggcg

SEQ ID NO: 8229 - DNA, 20 bp, Homo sapiens
  source 1..20: mol_type = genomic DNA; note = Gene: ALPK2; note = Location (start to end; relative to TSS): ALPK2_84_114; note = Orientation (relative to transcription): sense; note = sgRNA Position: 58628983; note = Sequence Name: 56322-704_101_SL_seq_8229
ctcttcttccagaacttccc

SEQ ID NO: 8230 - DNA, 20 bp, Homo sapiens
  source 1..20: mol_type = genomic DNA; note = Gene: ALPK3; note = Location (start to end; relative to TSS): ALPK3_32_62; note = Orientation (relative to transcription): antisense; note = sgRNA Position: 84817394; note = Sequence Name: 56322-704_101_SL_seq_8230
ctcgcctgtcctccaggccc

SEQ ID NO: 8231 - DNA, 20 bp, Homo sapiens
  source 1..20: mol_type = genomic DNA; note = Gene: ALPK3; note = Location (start to end; relative to TSS): ALPK3_71_101; note = Orientation (relative to transcription): sense; note = sgRNA Position: 84817453; note = Sequence Name: 56322-704_101_SL_seq_8231
tcggggagggcggtgccatg

SEQ ID NO: 8232 - DNA, 20 bp, Homo sapiens
  source 1..20: mol_type = genomic DNA; note = Gene: ALPK3; note = Location (start to end; relative to TSS): ALPK3_38_68; note = Orientation (relative to transcription): antisense; note = sgRNA Position: 84817400; note = Sequence Name: 56322-704_101_SL_seq_8232
cgctgcctcgcctgtcctcc

SEQ ID NO: 8233 - DNA, 20 bp, Homo sapiens
  source 1..20: mol_type = genomic DNA; note = Gene: ALPK3; note = Location (start to end; relative to TSS): ALPK3_70_100; note = Orientation (relative to transcription): sense; note = sgRNA Position: 84817452; note = Sequence Name: 56322-704_101_SL_seq_8233
gtcggggagggcggtgccat

SEQ ID NO: 8234 - DNA, 20 bp, Homo sapiens
  source 1..20: mol_type = genomic DNA; note = Gene: ALPK3; note = Location (start to end; relative to TSS): ALPK3_39_69; note = Orientation (relative to transcription): sense; note = sgRNA Position: 84817421; note = Sequence Name: 56322-704_101_SL_seq_8234
aggcgaggcagcggcgagtg

SEQ ID NO: 8235 - DNA, 20 bp, Homo sapiens
  source 1..20: mol_type = genomic DNA; note = Gene: ALPK3; note = Location (start to end; relative to TSS): ALPK3_69_99; note = Orientation (relative to transcription): sense; note = sgRNA Position: 84817451; note = Sequence Name: 56322-704_101_SL_seq_8235
ggtcggggagggcggtgcca

SEQ ID NO: 8236 - DNA, 20 bp, Homo sapiens
  source 1..20: mol_type = genomic DNA; note = Gene: ALPK3; note = Location (start to end; relative to TSS): ALPK3_30_60; note = Orientation (relative to transcription): sense; note = sgRNA Position: 84817412; note = Sequence Name: 56322-704_101_SL_seq_8236
ctggaggacaggcgaggcag

SEQ ID NO: 8237 - DNA, 20 bp, Homo sapiens
  source 1..20: mol_type = genomic DNA; note = Gene: ALPK3; note = Location (start to end; relative to TSS): ALPK3_61_91; note = Orientation (relative to transcription): sense; note = sgRNA Position: 84817443; note = Sequence Name: 56322-704_101_SL_seq_8237
gggccggcggtcggggaggg

SEQ ID NO: 8238 - DNA, 20 bp, Homo sapiens
  source 1..20: mol_type = genomic DNA; note = Gene: ALPK3; note = Location (start to end; relative to TSS): ALPK3_24_54; note = Orientation (relative to transcription): sense; note = sgRNA Position: 84817406; note = Sequence Name: 56322-704_101_SL_seq_8238
cggggcctggaggacaggcg

SEQ ID NO: 8239 - DNA, 20 bp, Homo sapiens
  source 1..20: mol_type = genomic DNA; note = Gene: ALPK3; note = Location (start to end; relative to TSS): ALPK3_58_88; note = Orientation (relative to transcription): sense; note = sgRNA Position: 84817440; note = Sequence Name: 56322-704_101_SL_seq_8239
gcggggccggcggtcgggga

SEQ ID NO: 8240 - DNA, 20 bp, Homo sapiens
  source 1..20: mol_type = genomic DNA; note = Gene: AMIGO1; note = Location (start to end; relative to TSS): AMIGO1_46_76; note = Orientation (relative to transcription): antisense; note = sgRNA Position: 109509677; note = Sequence Name: 56322-704_101_SL_seq_8240
cgcggatcggtgcggggagc

SEQ ID NO: 8241 - DNA, 20 bp, Homo sapiens
  source 1..20: mol_type = genomic DNA; note = Gene: AMIGO1; note = Location (start to end; relative to TSS): AMIGO1_77_107; note = Orientation (relative to transcription): sense; note = sgRNA Position: 109509626; note = Sequence Name: 56322-704_101_SL_seq_8241
gaggcagcgaccgcggtcgg

SEQ ID NO: 8242 - DNA, 20 bp, Homo sapiens
  source 1..20: mol_type = genomic DNA; note = Gene: AMIGO1; note = Location (start to end; relative to TSS): AMIGO1_43_73; note = Orientation (relative to transcription): antisense; note = sgRNA Position: 109509680; note = Sequence Name: 56322-704_101_SL_seq_8242
ggatcggtgcggggagccgg

SEQ ID NO: 8243 - DNA, 20 bp, Homo sapiens
  source 1..20: mol_type = genomic DNA; note = Gene: AMIGO1; note = Location (start to end; relative to TSS): AMIGO1_74_104; note = Orientation (relative to transcription): sense; note = sgRNA Position: 109509629; note = Sequence Name: 56322-704_101_SL_seq_8243
ctggaggcagcgaccgcggt

SEQ ID NO: 8244 - DNA, 20 bp, Homo sapiens
  source 1..20: mol_type = genomic DNA; note = Gene: AMIGO1; note = Location (start to end; relative to TSS): AMIGO1_23_53; note = Orientation (relative to transcription): antisense; note = sgRNA Position: 109509700; note = Sequence Name: 56322-704_101_SL_seq_8244
aggcgcagcgatcccagcgg

SEQ ID NO: 8245 - DNA, 20 bp, Homo sapiens
  source 1..20: mol_type = genomic DNA; note = Gene: AMIGO1; note = Location (start to end; relative to TSS): AMIGO1_53_83; note = Orientation (relative to transcription): antisense; note = sgRNA Position: 109509670; note = Sequence Name: 56322-704_101_SL_seq_8245
ggcctggcgcggatcggtgc

SEQ ID NO: 8246 - DNA, 20 bp, Homo sapiens
  source 1..20: mol_type = genomic DNA; note = Gene: AMIGO1; note = Location (start to end; relative to TSS): AMIGO1_22_52; note = Orientation (relative to transcription): antisense; note = sgRNA Position: 109509701; note = Sequence Name: 56322-704_101_SL_seq_8246
ggcgcagcgatcccagcgga

SEQ ID NO: 8247 - DNA, 20 bp, Homo sapiens
  source 1..20: mol_type = genomic DNA; note = Gene: AMIGO1; note = Location (start to end; relative to TSS): AMIGO1_52_82; note = Orientation (relative to transcription): antisense; note = sgRNA Position: 109509671; note = Sequence Name: 56322-704_101_SL_seq_8247
gcctggcgcggatcggtgcg

SEQ ID NO: 8248 - DNA, 20 bp, Homo sapiens
  source 1..20: mol_type = genomic DNA; note = Gene: AMIGO1; note = Location (start to end; relative to TSS): AMIGO1_18_48; note = Orientation (relative to transcription): sense; note = sgRNA Position: 109509685; note = Sequence Name: 56322-704_101_SL_seq_8248
cgctgggatcgctgcgcctc

SEQ ID NO: 8249 - DNA, 20 bp, Homo sapiens
  source 1..20: mol_type = genomic DNA; note = Gene: AMIGO1; note = Location (start to end; relative to TSS): AMIGO1_49_79; note = Orientation (relative to transcription): sense; note = sgRNA Position: 109509654; note = Sequence Name: 56322-704_101_SL_seq_8249
accgatccgcgccaggcctg

SEQ ID NO: 8250 - DNA, 20 bp, Homo sapiens
  source 1..20: mol_type = genomic DNA; note = Gene: AMIGO2; note = Location (start to end; relative to TSS): AMIGO2_42_72; note = Orientation (relative to transcription): sense; note = sgRNA Position: 47079893; note = Sequence Name: 56322-704_101_SL_seq_8250
cggcgccccagcccgtctcc

SEQ ID NO: 8251 - DNA, 20 bp, Homo sapiens
  source 1..20: mol_type = genomic DNA; note = Gene: AMIGO2; note = Location (start to end; relative to TSS): AMIGO2_74_104; note = Orientation (relative to transcription): antisense; note = sgRNA Position: 47079881; note = Sequence Name: 56322-704_101_SL_seq_8251
ccggggttcccgcgcgcccg

SEQ ID NO: 8252 - DNA, 20 bp, Homo sapiens
  source 1..20: mol_type = genomic DNA; note = Gene: AMIGO2; note = Location (start to end; relative to TSS): AMIGO2_20_50; note = Orientation (relative to transcription): antisense; note = sgRNA Position: 47079935; note = Sequence Name: 56322-704_101_SL_seq_8252
cctgcgcgtcctgcctcctg

SEQ ID NO: 8253 - DNA, 20 bp, Homo sapiens
  source 1..20: mol_type = genomic DNA; note = Gene: AMIGO2; note = Location (start to end; relative to TSS): AMIGO2_65_95; note = Orientation (relative to transcription): sense; note = sgRNA Position: 47079870; note = Sequence Name: 56322-704_101_SL_seq_8253
ccccgggcgcgcgggaaccc

SEQ ID NO: 8254 - DNA, 20 bp, Homo sapiens
  source 1..20: mol_type = genomic DNA; note = Gene: AMIGO2; note = Location (start to end; relative to TSS): AMIGO2_22_52; note = Orientation (relative to transcription): sense; note = sgRNA Position: 47079913; note = Sequence Name: 56322-704_101_SL_seq_8254
aggacgcgcaggggtgggac

SEQ ID NO: 8255 - DNA, 20 bp, Homo sapiens
  source 1..20: mol_type = genomic DNA; note = Gene: AMIGO2; note = Location (start to end; relative to TSS): AMIGO2_57_87; note = Orientation (relative to transcription): sense; note = sgRNA Position: 47079878; note = Sequence Name: 56322-704_101_SL_seq_8255
tctcccggccccgggcgcgc

SEQ ID NO: 8256 - DNA, 20 bp, Homo sapiens
  source 1..20: mol_type = genomic DNA; note = Gene: AMIGO2; note = Location (start to end; relative to TSS): AMIGO2_19_49; note = Orientation (relative to transcription): antisense; note = sgRNA Position: 47079936; note = Sequence Name: 56322-704_101_SL_seq_8256
ctgcgcgtcctgcctcctgc

SEQ ID NO: 8257 - DNA, 20 bp, Homo sapiens
  source 1..20: mol_type = genomic DNA; note = Gene: AMIGO2; note = Location (start to end; relative to TSS): AMIGO2_56_86; note = Orientation (relative to transcription): sense; note = sgRNA Position: 47079879; note = Sequence Name: 56322-704_101_SL_seq_8257
gtctcccggccccgggcgcg

SEQ ID NO: 8258 - DNA, 20 bp, Homo sapiens
  source 1..20: mol_type = genomic DNA; note = Gene: AMIGO2; note = Location (start to end; relative to TSS): AMIGO2_17_47; note = Orientation (relative to transcription): sense; note = sgRNA Position: 47079918; note = Sequence Name: 56322-704_101_SL_seq_8258
gaggcaggacgcgcaggggt

SEQ ID NO: 8259 - DNA, 20 bp, Homo sapiens
  source 1..20: mol_type = genomic DNA; note = Gene: AMIGO2; note = Location (start to end; relative to TSS): AMIGO2_49_79; note = Orientation (relative to transcription): sense; note = sgRNA Position: 47079886; note = Sequence Name: 56322-704_101_SL_seq_8259
ccagcccgtctcccggcccc

SEQ ID NO: 8260 - DNA, 20 bp, Homo sapiens
  source 1..20: mol_type = genomic DNA; note = Gene: AMIGO3; note = Location (start to end; relative to TSS): AMIGO3_37_67; note = Orientation (relative to transcription): sense; note = sgRNA Position: 49719623; note = Sequence Name: 56322-704_101_SL_seq_8260
ccgcctcacaacctgggaac

SEQ ID NO: 8261 - DNA, 20 bp, Homo sapiens
  source 1..20: mol_type = genomic DNA; note = Gene: AMIGO3; note = Location (start to end; relative to TSS): AMIGO3_88_118; note = Orientation (relative to transcription): sense; note = sgRNA Position: 49719572; note = Sequence Name: 56322-704_101_SL_seq_8261
ccgccgtgcctcctcggcaa

SEQ ID NO: 8262 - DNA, 20 bp, Homo sapiens
  source 1..20: mol_type = genomic DNA; note = Gene: AMIGO3; note = Location (start to end; relative to TSS): AMIGO3_41_71; note = Orientation (relative to transcription): antisense; note = sgRNA Position: 49719639; note = Sequence Name: 56322-704_101_SL_seq_8262
tcccaggttgtgaggcggtg

SEQ ID NO: 8263 - DNA, 20 bp, Homo sapiens
  source 1..20: mol_type = genomic DNA; note = Gene: AMIGO3; note = Location (start to end; relative to TSS): AMIGO3_87_117; note = Orientation (relative to transcription): sense; note = sgRNA Position: 49719573; note = Sequence Name: 56322-704_101_SL_seq_8263
cccgccgtgcctcctcggca

SEQ ID NO: 8264 - DNA, 20 bp, Homo sapiens
  source 1..20: mol_type = genomic DNA; note = Gene: AMIGO3; note = Location (start to end; relative to TSS): AMIGO3_45_75; note = Orientation (relative to transcription): sense; note = sgRNA Position: 49719615; note = Sequence Name: 56322-704_101_SL_seq_8264
caacctgggaaccggagagt

SEQ ID NO: 8265 - DNA, 20 bp, Homo sapiens
  source 1..20: mol_type = genomic DNA; note = Gene: AMIGO3; note = Location (start to end; relative to TSS): AMIGO3_82_112; note = Orientation (relative to transcription): sense; note = sgRNA Position: 49719578; note = Sequence Name: 56322-704_101_SL_seq_8265
aagaacccgccgtgcctcct

SEQ ID NO: 8266 - DNA, 20 bp, Homo sapiens
  source 1..20: mol_type = genomic DNA; note = Gene: AMIGO3; note = Location (start to end; relative to TSS): AMIGO3_31_61; note = Orientation (relative to transcription): sense; note = sgRNA Position: 49719629; note = Sequence Name: 56322-704_101_SL_seq_8266
gccgcaccgcctcacaacct

SEQ ID NO: 8267 - DNA, 20 bp, Homo sapiens
  source 1..20: mol_type = genomic DNA; note = Gene: AMIGO3; note = Location (start to end; relative to TSS): AMIGO3_79_109; note = Orientation (relative to transcription): antisense; note = sgRNA Position: 49719601; note = Sequence Name: 56322-704_101_SL_seq_8267
ggcgggttcttgccagccga

SEQ ID NO: 8268 - DNA, 20 bp, Homo sapiens
  source 1..20: mol_type = genomic DNA; note = Gene: AMIGO3; note = Location (start to end; relative to TSS): AMIGO3_30_60; note = Orientation (relative to transcription): sense; note = sgRNA Position: 49719630; note = Sequence Name: 56322-704_101_SL_seq_8268
tgccgcaccgcctcacaacc

SEQ ID NO: 8269 - DNA, 20 bp, Homo sapiens
  source 1..20: mol_type = genomic DNA; note = Gene: AMIGO3; note = Location (start to end; relative to TSS): AMIGO3_65_95; note = Orientation (relative to transcription): antisense; note = sgRNA Position: 49719615; note = Sequence Name: 56322-704_101_SL_seq_8269
agccgacggcccctactctc

SEQ ID NO: 8270 - DNA, 20 bp, Homo sapiens
  source 1..20: mol_type = genomic DNA; note = Gene: AXL; note = Location (start to end; relative to TSS): AXL_39_69; note = Orientation (relative to transcription): antisense; note = sgRNA Position: 41219268; note = Sequence Name: 56322-704_101_SL_seq_8270
cctgcctggcacagcggcag

SEQ ID NO: 8271 - DNA, 20 bp, Homo sapiens
  source 1..20: mol_type = genomic DNA; note = Gene: AXL; note = Location (start to end; relative to TSS): AXL_73_103; note = Orientation (relative to transcription): antisense; note = sgRNA Position: 41219302; note = Sequence Name: 56322-704_101_SL_seq_8271
ccccccagctccaggctccc

SEQ ID NO: 8272 - DNA, 20 bp, Homo sapiens
  source 1..20: mol_type = genomic DNA; note = Gene: AXL; note = Location (start to end; relative to TSS): AXL_36_66; note = Orientation (relative to transcription): antisense; note = sgRNA Position: 41219265; note = Sequence Name: 56322-704_101_SL_seq_8272
gcctggcacagcggcagggg

SEQ ID NO: 8273 - DNA, 20 bp, Homo sapiens
  source 1..20: mol_type = genomic DNA; note = Gene: AXL; note = Location (start to end; relative to TSS): AXL_68_98; note = Orientation (relative to transcription): sense; note = sgRNA Position: 41219317; note = Sequence Name: 56322-704_101_SL_seq_8273
ggagcctggagctgggggga

SEQ ID NO: 8274 - DNA, 20 bp, Homo sapiens
  source 1..20: mol_type = genomic DNA; note = Gene: AXL; note = Location (start to end; relative to TSS): AXL_26_56; note = Orientation (relative to transcription): sense; note = sgRNA Position: 41219275; note = Sequence Name: 56322-704_101_SL_seq_8274
gcctcccctgccgctgtgcc

SEQ ID NO: 8275 - DNA, 20 bp, Homo sapiens
  source 1..20: mol_type = genomic DNA; note = Gene: AXL; note = Location (start to end; relative to TSS): AXL_62_92; note = Orientation (relative to transcription): sense; note = sgRNA Position: 41219311; note = Sequence Name: 56322-704_101_SL_seq_8275
atccggggagcctggagctg

SEQ ID NO: 8276 - DNA, 20 bp, Homo sapiens
  source 1..20: mol_type = genomic DNA; note = Gene: AXL; note = Location (start to end; relative to TSS): AXL_30_60; note = Orientation (relative to transcription): sense; note = sgRNA Position: 41219279; note = Sequence Name: 56322-704_101_SL_seq_8276
cccctgccgctgtgccaggc

SEQ ID NO: 8277 - DNA, 20 bp, Homo sapiens
  source 1..20: mol_type = genomic DNA; note = Gene: AXL; note = Location (start to end; relative to TSS): AXL_61_91; note = Orientation (relative to transcription): sense; note = sgRNA Position: 41219310; note = Sequence Name: 56322-704_101_SL_seq_8277
aatccggggagcctggagct

SEQ ID NO: 8278 - DNA, 20 bp, Homo sapiens
  source 1..20: mol_type = genomic DNA; note = Gene: AXL; note = Location (start to end; relative to TSS): AXL_23_53; note = Orientation (relative to transcription): antisense; note = sgRNA Position: 41219252; note = Sequence Name: 56322-704_101_SL_seq_8278
gcaggggaggcccttgccac

SEQ ID NO: 8279 - DNA, 20 bp, Homo sapiens
  source 1..20: mol_type = genomic DNA; note = Gene: AXL; note = Location (start to end; relative to TSS): AXL_53_83; note = Orientation (relative to transcription): antisense; note = sgRNA Position: 41219282; note = Sequence Name: 56322-704_101_SL_seq_8279
cggatttggcactgcctgcc

SEQ ID NO: 8280 - DNA, 20 bp, Homo sapiens
  source 1..20: mol_type = genomic DNA; note = Gene: AZGP1; note = Location (start to end; relative to TSS): AZGP1_64_94; note = Orientation (relative to transcription): sense; note = sgRNA Position: 99975943; note = Sequence Name: 56322-704_101_SL_seq_8280
aggagaaccaagatggtgag

SEQ ID NO: 8281 - DNA, 20 bp, Homo sapiens
  source 1..20: mol_type = genomic DNA; note = Gene: AZGP1; note = Location (start to end; relative to TSS): AZGP1_101_131; note = Orientation (relative to transcription): sense; note = sgRNA Position: 99975906; note = Sequence Name: 56322-704_101_SL_seq_8281
gggtgctggagaggactgga

SEQ ID NO: 8282 - DNA, 20 bp, Homo sapiens
  source 1..20: mol_type = genomic DNA; note = Gene: AZGP1; note = Location (start to end; relative to TSS): AZGP1_65_95; note = Orientation (relative to transcription): sense; note = sgRNA Position: 99975942; note = Sequence Name: 56322-704_101_SL_seq_8282
ggagaaccaagatggtgagt

SEQ ID NO: 8283 - DNA, 20 bp, Homo sapiens
  source 1..20: mol_type = genomic DNA; note = Gene: AZGP1; note = Location (start to end; relative to TSS): AZGP1_97_127; note = Orientation (relative to transcription): sense; note = sgRNA Position: 99975910; note = Sequence Name: 56322-704_101_SL_seq_8283
ggatgggtgctggagaggac

SEQ ID NO: 8284 - DNA, 20 bp, Homo sapiens
  source 1..20: mol_type = genomic DNA; note = Gene: AZGP1; note = Location (start to end; relative to TSS): AZGP1_60_90; note = Orientation (relative to transcription): antisense; note = sgRNA Position: 99975967; note = Sequence Name: 56322-704_101_SL_seq_8284
tggttctcctgggggacagc

SEQ ID NO: 8285 - DNA, 20 bp, Homo sapiens
  source 1..20: mol_type = genomic DNA; note = Gene: AZGP1; note = Location (start to end; relative to TSS): AZGP1_92_122; note = Orientation (relative to transcription): sense; note = sgRNA Position: 99975915; note = Sequence Name: 56322-704_101_SL_seq_8285
gcaagggatgggtgctggag

SEQ ID NO: 8286 - DNA, 20 bp, Homo sapiens
  source 1..20: mol_type = genomic DNA; note = Gene: AZGP1; note = Location (start to end; relative to TSS): AZGP1_57_87; note = Orientation (relative to transcription): sense; note = sgRNA Position: 99975950; note = Sequence Name: 56322-704_101_SL_seq_8286
gtcccccaggagaaccaaga

SEQ ID NO: 8287 - DNA, 20 bp, Homo sapiens
  source 1..20: mol_type = genomic DNA; note = Gene: AZGP1; note = Location (start to end; relative to TSS): AZGP1_87_117; note = Orientation (relative to transcription): sense; note = sgRNA Position: 99975920; note = Sequence Name: 56322-704_101_SL_seq_8287
ggaaagcaagggatgggtgc

SEQ ID NO: 8288 - DNA, 20 bp, Homo sapiens
  source 1..20: mol_type = genomic DNA; note = Gene: AZGP1; note = Location (start to end; relative to TSS): AZGP1_44_74; note = Orientation (relative to transcription): sense; note = sgRNA Position: 99975963; note = Sequence Name: 56322-704_101_SL_seq_8288
tctgggtcctgctgtccccc

SEQ ID NO: 8289 - DNA, 20 bp, Homo sapiens
  source 1..20: mol_type = genomic DNA; note = Gene: AZGP1; note = Location (start to end; relative to TSS): AZGP1_75_105; note = Orientation (relative to transcription): sense; note = sgRNA Position: 99975932; note = Sequence Name: 56322-704_101_SL_seq_8289
gatggtgagtggggaaagca

SEQ ID NO: 8290 - DNA, 20 bp, Homo sapiens
  source 1..20: mol_type = genomic DNA; note = Gene: B2M; note = Location (start to end; relative to TSS): B2M_53_83; note = Orientation (relative to transcription): sense; note = sgRNA Position: 44711596; note = Sequence Name: 56322-704_101_SL_seq_8290
gctactctctctttctggcc

SEQ ID NO: 8291 - DNA, 20 bp, Homo sapiens
  source 1..20: mol_type = genomic DNA; note = Gene: B2M; note = Location (start to end; relative to TSS): B2M_93_123; note = Orientation (relative to transcription): sense; note = sgRNA Position: 44711636; note = Sequence Name: 56322-704_101_SL_seq_8291
tctctcctaccctcccgctc

SEQ ID NO: 8292 - DNA, 20 bp, Homo sapiens
  source 1..20: mol_type = genomic DNA; note = Gene: B2M; note = Location (start to end; relative to TSS): B2M_40_70; note = Orientation (relative to transcription): antisense; note = sgRNA Position: 44711563; note = Sequence Name: 56322-704_101_SL_seq_8292
cgcgagcacagctaaggcca

SEQ ID NO: 8293 - DNA, 20 bp, Homo sapiens
  source 1..20: mol_type = genomic DNA; note = Gene: B2M; note = Location (start to end; relative to TSS): B2M_92_122; note = Orientation (relative to transcription): antisense; note = sgRNA Position: 44711615; note = Sequence Name: 56322-704_101_SL_seq_8293
agggtaggagagactcacgc

SEQ ID NO: 8294 - DNA, 20 bp, Homo sapiens
  source 1..20: mol_type = genomic DNA; note = Gene: B2M; note = Location (start to end; relative to TSS): B2M_46_76; note = Orientation (relative to transcription): antisense; note = sgRNA Position: 44711569; note = Sequence Name: 56322-704_101_SL_seq_8294
gagtagcgcgagcacagcta

SEQ ID NO: 8295 - DNA, 20 bp, Homo sapiens
  source 1..20: mol_type = genomic DNA; note = Gene: B2M; note = Location (start to end; relative to TSS): B2M_80_110; note = Orientation (relative to transcription): antisense; note = sgRNA Position: 44711603; note = Sequence Name: 56322-704_101_SL_seq_8295
actcacgctggatagcctcc

SEQ ID NO: 8296 - DNA, 20 bp, Homo sapiens
  source 1..20: mol_type = genomic DNA; note = Gene: B2M; note = Location (start to end; relative to TSS): B2M_25_55; note = Orientation (relative to transcription): antisense; note = sgRNA Position: 44711548; note = Sequence Name: 56322-704_101_SL_seq_8296
ggccacggagcgagacatct

SEQ ID NO: 8297 - DNA, 20 bp, Homo sapiens
  source 1..20: mol_type = genomic DNA; note = Gene: B2M; note = Location (start to end; relative to TSS): B2M_56_86; note = Orientation (relative to transcription): sense; note = sgRNA Position: 44711599; note = Sequence Name: 56322-704_101_SL_seq_8297
actctctctttctggcctgg

SEQ ID NO: 8298 - DNA, 20 bp, Homo sapiens
  source 1..20: mol_type = genomic DNA; note = Gene: B2M; note = Location (start to end; relative to TSS): B2M_14_44; note = Orientation (relative to transcription): sense; note = sgRNA Position: 44711557; note = Sequence Name: 56322-704_101_SL_seq_8298
ggccgagatgtctcgctccg

SEQ ID NO: 8299 - DNA, 20 bp, Homo sapiens
  source 1..20: mol_type = genomic DNA; note = Gene: B2M; note = Location (start to end; relative to TSS): B2M_46_76; note = Orientation (relative to transcription): antisense; note = sgRNA Position: 44711569; note = Sequence Name: 56322-704_101_SL_seq_8299
gagtagcgcgagcacagcta

SEQ ID NO: 8300 - DNA, 20 bp, Homo sapiens
  source 1..20: mol_type = genomic DNA; note = Gene: BCAM; note = Location (start to end; relative to TSS): BCAM_35_65; note = Orientation (relative to transcription): sense; note = sgRNA Position: 44809164; note = Sequence Name: 56322-704_101_SL_seq_8300
cccaggcgcgcggggccccg

SEQ ID NO: 8301 - DNA, 20 bp, Homo sapiens
  source 1..20: mol_type = genomic DNA; note = Gene: BCAM; note = Location (start to end; relative to TSS): BCAM_73_103; note = Orientation (relative to transcription): sense; note = sgRNA Position: 44809202; note = Sequence Name: 56322-704_101_SL_seq_8301
gtcctgctggcggcgcaccc

SEQ ID NO: 8302 - DNA, 20 bp, Homo sapiens
  source 1..20: mol_type = genomic DNA; note = Gene: BCAM; note = Location (start to end; relative to TSS): BCAM_27_57; note = Orientation (relative to transcription): sense; note = sgRNA Position: 44809156; note = Sequence Name: 56322-704_101_SL_seq_8302
cgcaccggcccaggcgcgcg

SEQ ID NO: 8303 - DNA, 20 bp, Homo sapiens
  source 1..20: mol_type = genomic DNA; note = Gene: BCAM; note = Location (start to end; relative to TSS): BCAM_63_93; note = Orientation (relative to transcription): sense; note = sgRNA Position: 44809192; note = Sequence Name: 56322-704_101_SL_seq_8303
gttgctcgcagtcctgctgg

SEQ ID NO: 8304 - DNA, 20 bp, Homo sapiens
  source 1..20: mol_type = genomic DNA; note = Gene: BCAM; note = Location (start to end; relative to TSS): BCAM_28_58; note = Orientation (relative to transcription): antisense; note = sgRNA Position: 44809137; note = Sequence Name: 56322-704_101_SL_seq_8304
gcctgggccggtgcgtccgg

SEQ ID NO: 8305 - DNA, 20 bp, Homo sapiens
  source 1..20: mol_type = genomic DNA; note = Gene: BCAM; note = Location (start to end; relative to TSS): BCAM_61_91; note = Orientation (relative to transcription): antisense; note = sgRNA Position: 44809170; note = Sequence Name: 56322-704_101_SL_seq_8305
actgcgagcaacagcagccg

SEQ ID NO: 8306 - DNA, 20 bp, Homo sapiens
  source 1..20: mol_type = genomic DNA; note = Gene: BCAM; note = Location (start to end; relative to TSS): BCAM_29_59; note = Orientation (relative to transcription): antisense; note = sgRNA Position: 44809138; note = Sequence Name: 56322-704_101_SL_seq_8306
cgcctgggccggtgcgtccg

SEQ ID NO: 8307 - DNA, 20 bp, Homo sapiens
  source 1..20: mol_type = genomic DNA; note = Gene: BCAM; note = Location (start to end; relative to TSS): BCAM_60_90; note = Orientation (relative to transcription): antisense; note = sgRNA Position: 44809169; note = Sequence Name: 56322-704_101_SL_seq_8307
ctgcgagcaacagcagccgc

SEQ ID NO: 8308 - DNA, 20 bp, Homo sapiens
  source 1..20: mol_type = genomic DNA; note = Gene: BCAM; note = Location (start to end; relative to TSS): BCAM_18_48; note = Orientation (relative to transcription): sense; note = sgRNA Position: 44809147; note = Sequence Name: 56322-704_101_SL_seq_8308
gcccccggacgcaccggccc

SEQ ID NO: 8309 - DNA, 20 bp, Homo sapiens
  source 1..20: mol_type = genomic DNA; note = Gene: BCAM; note = Location (start to end; relative to TSS): BCAM_59_89; note = Orientation (relative to transcription): antisense; note = sgRNA Position: 44809168; note = Sequence Name: 56322-704_101_SL_seq_8309
tgcgagcaacagcagccgcg

SEQ ID NO: 8310 - DNA, 20 bp, Homo sapiens
  source 1..20: mol_type = genomic DNA; note = Gene: BCAN; note = Location (start to end; relative to TSS): BCAN_31_61; note = Orientation (relative to transcription): antisense; note = sgRNA Position: 156642154; note = Sequence Name: 56322-704_101_SL_seq_8310
gcggagactgcgcgagcgtg

SEQ ID NO: 8311 - DNA, 20 bp, Homo sapiens
  source 1..20: mol_type = genomic DNA; note = Gene: BCAN; note = Location (start to end; relative to TSS): BCAN_77_107; note = Orientation (relative to transcription): sense; note = sgRNA Position: 156642220; note = Sequence Name: 56322-704_101_SL_seq_8311
gtgcacccggaggagacccc

SEQ ID NO: 8312 - DNA, 20 bp, Homo sapiens
  source 1..20: mol_type = genomic DNA; note = Gene: BCAN; note = Location (start to end; relative to TSS): BCAN_26_56; note = Orientation (relative to transcription): antisense; note = sgRNA Position: 156642149; note = Sequence Name: 56322-704_101_SL_seq_8312
gactgcgcgagcgtgaggag

SEQ ID NO: 8313 - DNA, 20 bp, Homo sapiens
  source 1..20: mol_type = genomic DNA; note = Gene: BCAN; note = Location (start to end; relative to TSS): BCAN_67_97; note = Orientation (relative to transcription): sense; note = sgRNA Position: 156642210; note = Sequence Name: 56322-704_101_SL_seq_8313
ggactgagccgtgcacccgg

SEQ ID NO: 8314 - DNA, 20 bp, Homo sapiens
  source 1..20: mol_type = genomic DNA; note = Gene: BCAN; note = Location (start to end; relative to TSS): BCAN_22_52; note = Orientation (relative to transcription): antisense; note = sgRNA Position: 156642145; note = Sequence Name: 56322-704_101_SL_seq_8314
gcgcgagcgtgaggagaggc

SEQ ID NO: 8315 - DNA, 20 bp, Homo sapiens
  source 1..20: mol_type = genomic DNA; note = Gene: BCAN; note = Location (start to end; relative to TSS): BCAN_64_94; note = Orientation (relative to transcription): sense; note = sgRNA Position: 156642207; note = Sequence Name: 56322-704_101_SL_seq_8315
gcaggactgagccgtgcacc

SEQ ID NO: 8316 - DNA, 20 bp, Homo sapiens
  source 1..20: mol_type = genomic DNA; note = Gene: BCAN; note = Location (start to end; relative to TSS): BCAN_21_51; note = Orientation (relative to transcription): antisense; note = sgRNA Position: 156642144; note = Sequence Name: 56322-704_101_SL_seq_8316
cgcgagcgtgaggagaggct

SEQ ID NO: 8317 - DNA, 20 bp, Homo sapiens
  source 1..20: mol_type = genomic DNA; note = Gene: BCAN; note = Location (start to end; relative to TSS): BCAN_53_83; note = Orientation (relative to transcription): antisense; note = sgRNA Position: 156642176; note = Sequence Name: 56322-704_101_SL_seq_8317
tgcagctgcagctgagactg

SEQ ID NO: 8318 - DNA, 20 bp, Homo sapiens
  source 1..20: mol_type = genomic DNA; note = Gene: BCAN; note = Location (start to end; relative to TSS): BCAN_20_50; note = Orientation (relative to transcription): antisense; note = sgRNA Position: 156642143; note = Sequence Name: 56322-704_101_SL_seq_8318
gcgagcgtgaggagaggctg

SEQ ID NO: 8319 - DNA, 20 bp, Homo sapiens
  source 1..20: mol_type = genomic DNA; note = Gene: BCAN; note = Location (start to end; relative to TSS): BCAN_50_80; note = Orientation (relative to transcription): antisense; note = sgRNA Position: 156642173; note = Sequence Name: 56322-704_101_SL_seq_8319
agctgcagctgagactgcgg

SEQ ID NO: 8320 - DNA, 20 bp, Homo sapiens
  source 1..20: mol_type = genomic DNA; note = Gene: BOC; note = Location (start to end; relative to TSS): BOC_55_85; note = Orientation (relative to transcription): antisense; note = sgRNA Position: 113211618; note = Sequence Name: 56322-704_101_SL_seq_8320
gcagcaggaggacaacgcag

SEQ ID NO: 8321 - DNA, 20 bp, Homo sapiens
  source 1..20: mol_type = genomic DNA; note = Gene: BOC; note = Location (start to end; relative to TSS): BOC_92_122; note = Orientation (relative to transcription): antisense; note = sgRNA Position: 113211655; note = Sequence Name: 56322-704_101_SL_seq_8321
agggtccccgcggcagaaag

SEQ ID NO: 8322 - DNA, 20 bp, Homo sapiens
  source 1..20: mol_type = genomic DNA; note = Gene: BOC; note = Location (start to end; relative to TSS): BOC_56_86; note = Orientation (relative to transcription): antisense; note = sgRNA Position: 113211619; note = Sequence Name: 56322-704_101_SL_seq_8322
ggcagcaggaggacaacgca

SEQ ID NO: 8323 - DNA, 20 bp, Homo sapiens
  source 1..20: mol_type = genomic DNA; note = Gene: BOC; note = Location (start to end; relative to TSS): BOC_89_119; note = Orientation (relative to transcription): antisense; note = sgRNA Position: 113211652; note = Sequence Name: 56322-704_101_SL_seq_8323
gtccccgcggcagaaagcgg

SEQ ID NO: 8324 - DNA, 20 bp, Homo sapiens
  source 1..20: mol_type = genomic DNA; note = Gene: BOC; note = Location (start to end; relative to TSS): BOC_33_63; note = Orientation (relative to transcription): antisense; note = sgRNA Position: 113211596; note = Sequence Name: 56322-704_101_SL_seq_8324
gacgccgcgcccagcgcacc

SEQ ID NO: 8325 - DNA, 20 bp, Homo sapiens
  source 1..20: mol_type = genomic DNA; note = Gene: BOC; note = Location (start to end; relative to TSS): BOC_76_106; note = Orientation (relative to transcription): sense; note = sgRNA Position: 113211659; note = Sequence Name: 56322-704_101_SL_seq_8325
gcggccgccgctttctgccg

SEQ ID NO: 8326 - DNA, 20 bp, Homo sapiens
  source 1..20: mol_type = genomic DNA; note = Gene: BOC; note = Location (start to end; relative to TSS): BOC_20_50; note = Orientation (relative to transcription): antisense; note = sgRNA Position: 113211583; note = Sequence Name: 56322-704_101_SL_seq_8326
gcgcacccggtccctccata

SEQ ID NO: 8327 - DNA, 20 bp, Homo sapiens
  source 1..20: mol_type = genomic DNA; note = Gene: BOC; note = Location (start to end; relative to TSS): BOC_56_86; note = Orientation (relative to transcription): antisense; note = sgRNA Position: 113211619; note = Sequence Name: 56322-704_101_SL_seq_8327
ggcagcaggaggacaacgca

SEQ ID NO: 8328 - DNA, 20 bp, Homo sapiens
  source 1..20: mol_type = genomic DNA; note = Gene: BOC; note = Location (start to end; relative to TSS): BOC_15_45; note = Orientation (relative to transcription): sense; note = sgRNA Position: 113211598; note = Sequence Name: 56322-704_101_SL_seq_8328
atggagggaccgggtgcgct

SEQ ID NO: 8329 - DNA, 20 bp, Homo sapiens
  source 1..20: mol_type = genomic DNA; note = Gene: BOC; note = Location (start to end; relative to TSS): BOC_55_85; note = Orientation (relative to transcription): antisense; note = sgRNA Position: 113211618; note = Sequence Name: 56322-704_101_SL_seq_8329
gcagcaggaggacaacgcag

SEQ ID NO: 8330 - DNA, 20 bp, Homo sapiens
  source 1..20: mol_type = genomic DNA; note = Gene: BSG; note = Location (start to end; relative to TSS): BSG_51_81; note = Orientation (relative to transcription): sense; note = sgRNA Position: 572673; note = Sequence Name: 56322-704_101_SL_seq_8330
ctgctgggattcgcgctgct

SEQ ID NO: 8331 - DNA, 20 bp, Homo sapiens
  source 1..20: mol_type = genomic DNA; note = Gene: BSG; note = Location (start to end; relative to TSS): BSG_85_115; note = Orientation (relative to transcription): sense; note = sgRNA Position: 572707; note = Sequence Name: 56322-704_101_SL_seq_8331
cctccggggctggtgaggag

SEQ ID NO: 8332 - DNA, 20 bp, Homo sapiens
  source 1..20: mol_type = genomic DNA; note = Gene: BSG; note = Location (start to end; relative to TSS): BSG_36_66; note = Orientation (relative to transcription): sense; note = sgRNA Position: 572658; note = Sequence Name: 56322-704_101_SL_seq_8332
gctgcgctgttcgtgctgct

SEQ ID NO: 8333 - DNA, 20 bp, Homo sapiens
  source 1..20: mol_type = genomic DNA; note = Gene: BSG; note = Location (start to end; relative to TSS): BSG_70_100; note = Orientation (relative to transcription): sense; note = sgRNA Position: 572692; note = Sequence Name: 56322-704_101_SL_seq_8333
tgggcacccacggagcctcc

SEQ ID NO: 8334 - DNA, 20 bp, Homo sapiens
  source 1..20: mol_type = genomic DNA; note = Gene: BSG; note = Location (start to end; relative to TSS): BSG_20_50; note = Orientation (relative to transcription): antisense; note = sgRNA Position: 572622; note = Sequence Name: 56322-704_101_SL_seq_8334
ccatgattcctattcctcgc

SEQ ID NO: 8335 - DNA, 20 bp, Homo sapiens
  source 1..20: mol_type = genomic DNA; note = Gene: BSG; note = Location (start to end; relative to TSS): BSG_69_99; note = Orientation (relative to transcription): sense; note = sgRNA Position: 572691; note = Sequence Name: 56322-704_101_SL_seq_8335
ctgggcacccacggagcctc

SEQ ID NO: 8336 - DNA, 20 bp, Homo sapiens
  source 1..20: mol_type = genomic DNA; note = Gene: BSG; note = Location (start to end; relative to TSS): BSG_14_44; note = Orientation (relative to transcription): sense; note = sgRNA Position: 572636; note = Sequence Name: 56322-704_101_SL_seq_8336
gcgaggaataggaatcatgg

SEQ ID NO: 8337 - DNA, 20 bp, Homo sapiens
  source 1..20: mol_type = genomic DNA; note = Gene: BSG; note = Location (start to end; relative to TSS): BSG_60_90; note = Orientation (relative to transcription): sense; note = sgRNA Position: 572682; note = Sequence Name: 56322-704_101_SL_seq_8337
ttcgcgctgctgggcaccca

SEQ ID NO: 8338 - DNA, 20 bp, Homo sapiens
  source 1..20: mol_type = genomic DNA; note = Gene: BSG; note = Location (start to end; relative to TSS): BSG_11_41; note = Orientation (relative to transcription): sense; note = sgRNA Position: 572633; note = Sequence Name: 56322-704_101_SL_seq_8338
ccggcgaggaataggaatca

SEQ ID NO: 8339 - DNA, 20 bp, Homo sapiens
  source 1..20: mol_type = genomic DNA; note = Gene: BSG; note = Location (start to end; relative to TSS): BSG_51_81; note = Orientation (relative to transcription): sense; note = sgRNA Position: 572673; note = Sequence Name: 56322-704_101_SL_seq_8339
ctgctgggattcgcgctgct

SEQ ID NO: 8340 - DNA, 20 bp, Homo sapiens
  source 1..20: mol_type = genomic DNA; note = Gene: BTLA; note = Location (start to end; relative to TSS): BTLA_72_102; note = Orientation (relative to transcription): antisense; note = sgRNA Position: 112499396; note = Sequence Name: 56322-704_101_SL_seq_8340
ggaaaaactgctcaagtaga

SEQ ID NO: 8341 - DNA, 20 bp, Homo sapiens
  source 1..20: mol_type = genomic DNA; note = Gene: BTLA; note = Location (start to end; relative to TSS): BTLA_115_145; note = Orientation (relative to transcription): sense; note = sgRNA Position: 112499333; note = Sequence Name: 56322-704_101_SL_seq_8341
ttgcctgccatgcttggaac

SEQ ID NO: 8342 - DNA, 20 bp, Homo sapiens
  source 1..20: mol_type = genomic DNA; note = Gene: BTLA; note = Location (start to end; relative to TSS): BTLA_17_47; note = Orientation (relative to transcription): antisense; note = sgRNA Position: 112499451; note = Sequence Name: 56322-704_101_SL_seq_8342
ggtcagtttacctaccccag

SEQ ID NO: 8343 - DNA, 20 bp, Homo sapiens
  source 1..20: mol_type = genomic DNA; note = Gene: BTLA; note = Location (start to end; relative to TSS): BTLA_109_139; note = Orientation (relative to transcription): sense; note = sgRNA Position: 112499339; note = Sequence Name: 56322-704_101_SL_seq_8343
aagacattgcctgccatgct

SEQ ID NO: 8344 - DNA, 20 bp, Homo sapiens
  source 1..20: mol_type = genomic DNA; note = Gene: BTLA; note = Location (start to end; relative to TSS): BTLA_-2_28; note = Orientation (relative to transcription): sense; note = sgRNA Position: 112499450; note = Sequence Name: 56322-704_101_SL_seq_8344
ttcacagatgccactggggt

SEQ ID NO: 8345 - DNA, 20 bp, Homo sapiens
  source 1..20: mol_type = genomic DNA; note = Gene: BTLA; note = Location (start to end; relative to TSS): BTLA_93_123; note = Orientation (relative to transcription): antisense; note = sgRNA Position: 112499375; note = Sequence Name: 56322-704_101_SL_seq_8345
tttcctgcacatatcagtga

SEQ ID NO: 8346 - DNA, 20 bp, Homo sapiens
  source 1..20: mol_type = genomic DNA; note = Gene: BTLA; note = Location (start to end; relative to TSS): BTLA_-6_24; note = Orientation (relative to transcription): sense; note = sgRNA Position: 112499454; note = Sequence Name: 56322-704_101_SL_seq_8346
ttatttcacagatgccactg

SEQ ID NO: 8347 - DNA, 20 bp, Homo sapiens
  source 1..20: mol_type = genomic DNA; note = Gene: BTLA; note = Location (start to end; relative to TSS): BTLA_81_111; note = Orientation (relative to transcription): sense; note = sgRNA Position: 112499367; note = Sequence Name: 56322-704_101_SL_seq_8347
tttccatcactgatatgtgc

SEQ ID NO: 8348 - DNA, 20 bp, Homo sapiens
  source 1..20: mol_type = genomic DNA; note = Gene: BTLA; note = Location (start to end; relative to TSS): BTLA_-7_23; note = Orientation (relative to transcription): sense; note = sgRNA Position: 112499455; note = Sequence Name: 56322-704_101_SL_seq_8348
gttatttcacagatgccact

SEQ ID NO: 8349 - DNA, 20 bp, Homo sapiens
  source 1..20: mol_type = genomic DNA; note = Gene: BTLA; note = Location (start to end; relative to TSS): BTLA_72_102; note = Orientation (relative to transcription): antisense; note = sgRNA Position: 112499396; note = Sequence Name: 56322-704_101_SL_seq_8349
ggaaaaactgctcaagtaga

SEQ ID NO: 8350 - DNA, 20 bp, Homo sapiens
  source 1..20: mol_type = genomic DNA; note = Gene: BTN1A1; note = Location (start to end; relative to TSS): BTN1A1_38_68; note = Orientation (relative to transcription): sense; note = sgRNA Position: 26500367; note = Sequence Name: 56322-704_101_SL_seq_8350
atcacccaggtcagtatgtg

SEQ ID NO: 8351 - DNA, 20 bp, Homo sapiens
  source 1..20: mol_type = genomic DNA; note = Gene: BTN1A1; note = Location (start to end; relative to TSS): BTN1A1_83_113; note = Orientation (relative to transcription): antisense; note = sgRNA Position: 26500392; note = Sequence Name: 56322-704_101_SL_seq_8351
ctctggctgctcactccctc

SEQ ID NO: 8352 - DNA, 20 bp, Homo sapiens
  source 1..20: mol_type = genomic DNA; note = Gene: BTN1A1; note = Location (start to end; relative to TSS): BTN1A1_42_72; note = Orientation (relative to transcription): antisense; note = sgRNA Position: 26500351; note = Sequence Name: 56322-704_101_SL_seq_8352
catactgacctgggtgatct

SEQ ID NO: 8353 - DNA, 20 bp, Homo sapiens
  source 1..20: mol_type = genomic DNA; note = Gene: BTN1A1; note = Location (start to end; relative to TSS): BTN1A1_82_112; note = Orientation (relative to transcription): antisense; note = sgRNA Position: 26500391; note = Sequence Name: 56322-704_101_SL_seq_8353
tctggctgctcactccctca

SEQ ID NO: 8354 - DNA, 20 bp, Homo sapiens
  source 1..20: mol_type = genomic DNA; note = Gene: BTN1A1; note = Location (start to end; relative to TSS): BTN1A1_33_63; note = Orientation (relative to transcription): antisense; note = sgRNA Position: 26500342; note = Sequence Name: 56322-704_101_SL_seq_8354
ctgggtgatcttggagaaaa

SEQ ID NO: 8355 - DNA, 20 bp, Homo sapiens
  source 1..20: mol_type = genomic DNA; note = Gene: BTN1A1; note = Location (start to end; relative to TSS): BTN1A1_75_105; note = Orientation (relative to transcription): sense; note = sgRNA Position: 26500404; note = Sequence Name: 56322-704_101_SL_seq_8355
ctgagggagtgagcagccag

SEQ ID NO: 8356 - DNA, 20 bp, Homo sapiens
  source 1..20: mol_type = genomic DNA; note = Gene: BTN1A1; note = Location (start to end; relative to TSS): BTN1A1_24_54; note = Orientation (relative to transcription): antisense; note = sgRNA Position: 26500333; note = Sequence Name: 56322-704_101_SL_seq_8356
cttggagaaaaaggcacaag

SEQ ID NO: 8357 - DNA, 20 bp, Homo sapiens
  source 1..20: mol_type = genomic DNA; note = Gene: BTN1A1; note = Location (start to end; relative to TSS): BTN1A1_59_89; note = Orientation (relative to transcription): sense; note = sgRNA Position: 26500388; note = Sequence Name: 56322-704_101_SL_seq_8357
ggttactctcagctccctga

SEQ ID NO: 8358 - DNA, 20 bp, Homo sapiens
  source 1..20: mol_type = genomic DNA; note = Gene: BTN1A1; note = Location (start to end; relative to TSS): BTN1A1_25_55; note = Orientation (relative to transcription): sense; note = sgRNA Position: 26500354; note = Sequence Name: 56322-704_101_SL_seq_8358
ctttttctccaagatcaccc

SEQ ID NO: 8359 - DNA, 20 bp, Homo sapiens
  source 1..20: mol_type = genomic DNA; note = Gene: BTN1A1; note = Location (start to end; relative to TSS): BTN1A1_58_88; note = Orientation (relative to transcription): sense; note = sgRNA Position: 26500387; note = Sequence Name: 56322-704_101_SL_seq_8359
tggttactctcagctccctg

SEQ ID NO: 8360 - DNA, 20 bp, Homo sapiens
  source 1..20: mol_type = genomic DNA; note = Gene: BTN2A1; note = Location (start to end; relative to TSS): BTN2A1_46_76; note = Orientation (relative to transcription): sense; note = sgRNA Position: 26458027; note = Sequence Name: 56322-704_101_SL_seq_8360
ttttttctcctcttttggga

SEQ ID NO: 8361 - DNA, 20 bp, Homo sapiens
  source 1..20: mol_type = genomic DNA; note = Gene: BTN2A1; note = Location (start to end; relative to TSS): BTN2A1_94_124; note = Orientation (relative to transcription): sense; note = sgRNA Position: 26458075; note = Sequence Name: 56322-704_101_SL_seq_8361
ctgggcagattggagagaag

SEQ ID NO: 8362 - DNA, 20 bp, Homo sapiens
  source 1..20: mol_type = genomic DNA; note = Gene: BTN2A1; note = Location (start to end; relative to TSS): BTN2A1_33_63; note = Orientation (relative to transcription): antisense; note = sgRNA Position: 26457994; note = Sequence Name: 56322-704_101_SL_seq_8362
attgttcttccccttctcct

SEQ ID NO: 8363 - DNA, 20 bp, Homo sapiens
  source 1..20: mol_type = genomic DNA; note = Gene: BTN2A1; note = Location (start to end; relative to TSS): BTN2A1_84_114; note = Orientation (relative to transcription): sense; note = sgRNA Position: 26458065; note = Sequence Name: 56322-704_101_SL_seq_8363
gcctgtgcccctgggcagat

SEQ ID NO: 8364 - DNA, 20 bp, Homo sapiens
  source 1..20: mol_type = genomic DNA; note = Gene: BTN2A1; note = Location (start to end; relative to TSS): BTN2A1_15_45; note = Orientation (relative to transcription): sense; note = sgRNA Position: 26457996; note = Sequence Name: 56322-704_101_SL_seq_8364
acatggcgacctaggagaag

SEQ ID NO: 8365 - DNA, 20 bp, Homo sapiens
  source 1..20: mol_type = genomic DNA; note = Gene: BTN2A1; note = Location (start to end; relative to TSS): BTN2A1_76_106; note = Orientation (relative to transcription): sense; note = sgRNA Position: 26458057; note = Sequence Name: 56322-704_101_SL_seq_8365
ctagtagtgcctgtgcccct

SEQ ID NO: 8366 - DNA, 20 bp, Homo sapiens
  source 1..20: mol_type = genomic DNA; note = Gene: BTN2A1; note = Location (start to end; relative to TSS): BTN2A1_14_44; note = Orientation (relative to transcription): sense; note = sgRNA Position: 26457995; note = Sequence Name: 56322-704_101_SL_seq_8366
aacatggcgacctaggagaa

SEQ ID NO: 8367 - DNA, 20 bp, Homo sapiens
  source 1..20: mol_type = genomic DNA; note = Gene: BTN2A1; note = Location (start to end; relative to TSS): BTN2A1_63_93; note = Orientation (relative to transcription): antisense; note = sgRNA Position: 26458024; note = Sequence Name: 56322-704_101_SL_seq_8367
gacacaaaccttcccaaaag

SEQ ID NO: 8368 - DNA, 20 bp, Homo sapiens
  source 1..20: mol_type = genomic DNA; note = Gene: BTN2A1; note = Location (start to end; relative to TSS): BTN2A1_13_43; note = Orientation (relative to transcription): sense; note = sgRNA Position: 26457994; note = Sequence Name: 56322-704_101_SL_seq_8368
aaacatggcgacctaggaga

SEQ ID NO: 8369 - DNA, 20 bp, Homo sapiens
  source 1..20: mol_type = genomic DNA; note = Gene: BTN2A1; note = Location (start to end; relative to TSS): BTN2A1_46_76; note = Orientation (relative to transcription): sense; note = sgRNA Position: 26458027; note = Sequence Name: 56322-704_101_SL_seq_8369
ttttttctcctcttttggga

SEQ ID NO: 8370 - DNA, 20 bp, Homo sapiens
  source 1..20: mol_type = genomic DNA; note = Gene: BTN2A2; note = Location (start to end; relative to TSS): BTN2A2_29_59; note = Orientation (relative to transcription): antisense; note = sgRNA Position: 26383143; note = Sequence Name: 56322-704_101_SL_seq_8370
gagttgcggactcggtatct

SEQ ID NO: 8371 - DNA, 20 bp, Homo sapiens
  source 1..20: mol_type = genomic DNA; note = Gene: BTN2A2; note = Location (start to end; relative to TSS): BTN2A2_119_149; note = Orientation (relative to transcription): sense; note = sgRNA Position: 26383253; note = Sequence Name: 56322-704_101_SL_seq_8371
tgcccatgggtgagttgtat

SEQ ID NO: 8372 - DNA, 20 bp, Homo sapiens
  source 1..20: mol_type = genomic DNA; note = Gene: BTN2A2; note = Location (start to end; relative to TSS): BTN2A2_37_67; note = Orientation (relative to transcription): antisense; note = sgRNA Position: 26383151; note = Sequence Name: 56322-704_101_SL_seq_8372
gatgtttggagttgcggact

SEQ ID NO: 8373 - DNA, 20 bp, Homo sapiens
  source 1..20: mol_type = genomic DNA; note = Gene: BTN2A2; note = Location (start to end; relative to TSS): BTN2A2_106_136; note = Orientation (relative to transcription): sense; note = sgRNA Position: 26383240; note = Sequence Name: 56322-704_101_SL_seq_8373
ctggtggtgactgtgcccat

SEQ ID NO: 8374 - DNA, 20 bp, Homo sapiens
  source 1..20: mol_type = genomic DNA; note = Gene: BTN2A2; note = Location (start to end; relative to TSS): BTN2A2_43_73; note = Orientation (relative to transcription): sense; note = sgRNA Position: 26383177; note = Sequence Name: 56322-704_101_SL_seq_8374
caaacatcgcgattaatagg

SEQ ID NO: 8375 - DNA, 20 bp, Homo sapiens
  source 1..20: mol_type = genomic DNA; note = Gene: BTN2A2; note = Location (start to end; relative to TSS): BTN2A2_105_135; note = Orientation (relative to transcription): sense; note = sgRNA Position: 26383239; note = Sequence Name: 56322-704_101_SL_seq_8375
tctggtggtgactgtgccca

SEQ ID NO: 8376 - DNA, 20 bp, Homo sapiens
  source 1..20: mol_type = genomic DNA; note = Gene: BTN2A2; note = Location (start to end; relative to TSS): BTN2A2_51_81; note = Orientation (relative to transcription): antisense; note = sgRNA Position: 26383165; note = Sequence Name: 56322-704_101_SL_seq_8376
ctcctattaatcgcgatgtt

SEQ ID NO: 8377 - DNA, 20 bp, Homo sapiens
  source 1..20: mol_type = genomic DNA; note = Gene: BTN2A2; note = Location (start to end; relative to TSS): BTN2A2_90_120; note = Orientation (relative to transcription): sense; note = sgRNA Position: 26383224; note = Sequence Name: 56322-704_101_SL_seq_8377
tgggatgctttgttgtctgg

SEQ ID NO: 8378 - DNA, 20 bp, Homo sapiens
  source 1..20: mol_type = genomic DNA; note = Gene: BTN2A2; note = Location (start to end; relative to TSS): BTN2A2_15_45; note = Orientation (relative to transcription): antisense; note = sgRNA Position: 26383129; note = Sequence Name: 56322-704_101_SL_seq_8378
gtatctgggacctgttctct

SEQ ID NO: 8379 - DNA, 20 bp, Homo sapiens
  source 1..20: mol_type = genomic DNA; note = Gene: BTN2A2; note = Location (start to end; relative to TSS): BTN2A2_51_81; note = Orientation (relative to transcription): antisense; note = sgRNA Position: 26383165; note = Sequence Name: 56322-704_101_SL_seq_8379
ctcctattaatcgcgatgtt

SEQ ID NO: 8380 - DNA, 20 bp, Homo sapiens
  source 1..20: mol_type = genomic DNA; note = Gene: BTN3A1; note = Location (start to end; relative to TSS): BTN3A1_48_78; note = Orientation (relative to transcription): sense; note = sgRNA Position: 26402349; note = Sequence Name: 56322-704_101_SL_seq_8380
tttaaccatagtagaaagaa

SEQ ID NO: 8381 - DNA, 20 bp, Homo sapiens
  source 1..20: mol_type = genomic DNA; note = Gene: BTN3A1; note = Location (start to end; relative to TSS): BTN3A1_94_124; note = Orientation (relative to transcription): antisense; note = sgRNA Position: 26402375; note = Sequence Name: 56322-704_101_SL_seq_8381
aatcacagcccacagaagaa

SEQ ID NO: 8382 - DNA, 20 bp, Homo sapiens
  source 1..20: mol_type = genomic DNA; note = Gene: BTN3A1; note = Location (start to end; relative to TSS): BTN3A1_62_92; note = Orientation (relative to transcription): antisense; note = sgRNA Position: 26402343; note = Sequence Name: 56322-704_101_SL_seq_8382
gttctccattctttctacta

SEQ ID NO: 8383 - DNA, 20 bp, Homo sapiens
  source 1..20: mol_type = genomic DNA; note = Gene: BTN3A1; note = Location (start to end; relative to TSS): BTN3A1_93_123; note = Orientation (relative to transcription): sense; note = sgRNA Position: 26402394; note = Sequence Name: 56322-704_101_SL_seq_8383
ctgtgggctgtgattttcag

SEQ ID NO: 8384 - DNA, 20 bp, Homo sapiens
  source 1..20: mol_type = genomic DNA; note = Gene: BTN3A1; note = Location (start to end; relative to TSS): BTN3A1_46_76; note = Orientation (relative to transcription): antisense; note = sgRNA Position: 26402327; note = Sequence Name: 56322-704_101_SL_seq_8384
actatggttaaatctccttc

SEQ ID NO: 8385 - DNA, 20 bp, Homo sapiens
  source 1..20: mol_type = genomic DNA; note = Gene: BTN3A1; note = Location (start to end; relative to TSS): BTN3A1_77_107; note = Orientation (relative to transcription): sense; note = sgRNA Position: 26402378; note = Sequence Name: 56322-704_101_SL_seq_8385
attaactgcctttcttctgt

SEQ ID NO: 8386 - DNA, 20 bp, Homo sapiens
  source 1..20: mol_type = genomic DNA; note = Gene: BTN3A1; note = Location (start to end; relative to TSS): BTN3A1_38_68; note = Orientation (relative to transcription): antisense; note = sgRNA Position: 26402319; note = Sequence Name: 56322-704_101_SL_seq_8386
taaatctccttctggaagaa

SEQ ID NO: 8387 - DNA, 20 bp, Homo sapiens
  source 1..20: mol_type = genomic DNA; note = Gene: BTN3A1; note = Location (start to end; relative to TSS): BTN3A1_76_106; note = Orientation (relative to transcription): sense; note = sgRNA Position: 26402377; note = Sequence Name: 56322-704_101_SL_seq_8387
tattaactgcctttcttctg

SEQ ID NO: 8388 - DNA, 20 bp, Homo sapiens
  source 1..20: mol_type = genomic DNA; note = Gene: BTN3A1; note = Location (start to end; relative to TSS): BTN3A1_3_33; note = Orientation (relative to transcription): antisense; note = sgRNA Position: 26402284; note = Sequence Name: 56322-704_101_SL_seq_8388
gagactgtcgggtcatcgtg

SEQ ID NO: 8389 - DNA, 20 bp, Homo sapiens
  source 1..20: mol_type = genomic DNA; note = Gene: BTN3A1; note = Location (start to end; relative to TSS): BTN3A1_46_76; note = Orientation (relative to transcription): antisense; note = sgRNA Position: 26402327; note = Sequence Name: 56322-704_101_SL_seq_8389
actatggttaaatctccttc

SEQ ID NO: 8390 - DNA, 20 bp, Homo sapiens
  source 1..20: mol_type = genomic DNA; note = Gene: BTN3A2; note = Location (start to end; relative to TSS): BTN3A2_38_68; note = Orientation (relative to transcription): sense; note = sgRNA Position: 26365262; note = Sequence Name: 56322-704_101_SL_seq_8390
tttcctttcttccggatgag

SEQ ID NO: 8391 - DNA, 20 bp, Homo sapiens
  source 1..20: mol_type = genomic DNA; note = Gene: BTN3A2; note = Location (start to end; relative to TSS): BTN3A2_112_142; note = Orientation (relative to transcription): sense; note = sgRNA Position: 26365336; note = Sequence Name: 56322-704_101_SL_seq_8391
gtgggctctgattctccaat

SEQ ID NO: 8392 - DNA, 20 bp, Homo sapiens
  source 1..20: mol_type = genomic DNA; note = Gene: BTN3A2; note = Location (start to end; relative to TSS): BTN3A2_50_80; note = Orientation (relative to transcription): antisense; note = sgRNA Position: 26365254; note = Sequence Name: 56322-704_101_SL_seq_8392
tagcctctcatccggaagaa

SEQ ID NO: 8393 - DNA, 20 bp, Homo sapiens
  source 1..20: mol_type = genomic DNA; note = Gene: BTN3A2; note = Location (start to end; relative to TSS): BTN3A2_111_141; note = Orientation (relative to transcription): sense; note = sgRNA Position: 26365335; note = Sequence Name: 56322-704_101_SL_seq_8393
tgtgggctctgattctccaa

SEQ ID NO: 8394 - DNA, 20 bp, Homo sapiens
  source 1..20: mol_type = genomic DNA; note = Gene: BTN3A2; note = Location (start to end; relative to TSS): BTN3A2_58_88; note = Orientation (relative to transcription): antisense; note = sgRNA Position: 26365262; note = Sequence Name: 56322-704_101_SL_seq_8394
ttatggcttagcctctcatc

SEQ ID NO: 8395 - DNA, 20 bp, Homo sapiens
  source 1..20: mol_type = genomic DNA; note = Gene: BTN3A2; note = Location (start to end; relative to TSS): BTN3A2_94_124; note = Orientation (relative to transcription): sense; note = sgRNA Position: 26365318; note = Sequence Name: 56322-704_101_SL_seq_8395
attgaccgtctttattctgt

SEQ ID NO: 8396 - DNA, 20 bp, Homo sapiens
  source 1..20: mol_type = genomic DNA; note = Gene: BTN3A2; note = Location (start to end; relative to TSS): BTN3A2_61_91; note = Orientation (relative to transcription): sense; note = sgRNA Position: 26365285; note = Sequence Name: 56322-704_101_SL_seq_8396
ctaagccataatagaaagaa

SEQ ID NO: 8397 - DNA, 20 bp, Homo sapiens
  source 1..20: mol_type = genomic DNA; note = Gene: BTN3A2; note = Location (start to end; relative to TSS): BTN3A2_93_123; note = Orientation (relative to transcription): sense; note = sgRNA Position: 26365317; note = Sequence Name: 56322-704_101_SL_seq_8397
gattgaccgtctttattctg

SEQ ID NO: 8398 - DNA, 20 bp, Homo sapiens
  source 1..20: mol_type = genomic DNA; note = Gene: BTN3A2; note = Location (start to end; relative to TSS): BTN3A2_30_60; note = Orientation (relative to transcription): sense; note = sgRNA Position: 26365254; note = Sequence Name: 56322-704_101_SL_seq_8398
tttctctttttcctttcttc

SEQ ID NO: 8399 - DNA, 20 bp, Homo sapiens
  source 1..20: mol_type = genomic DNA; note = Gene: BTN3A2; note = Location (start to end; relative to TSS): BTN3A2_61_91; note = Orientation (relative to transcription): sense; note = sgRNA Position: 26365285; note = Sequence Name: 56322-704_101_SL_seq_8399
ctaagccataatagaaagaa

SEQ ID NO: 8400 - DNA, 20 bp, Homo sapiens
  source 1..20: mol_type = genomic DNA; note = Gene: BTN3A3; note = Location (start to end; relative to TSS): BTN3A3_83_113; note = Orientation (relative to transcription): sense; note = sgRNA Position: 26440613; note = Sequence Name: 56322-704_101_SL_seq_8400
tattaaccaccattcttcag

SEQ ID NO: 8401 - DNA, 20 bp, Homo sapiens
  source 1..20: mol_type = genomic DNA; note = Gene: BTN3A3; note = Location (start to end; relative to TSS): BTN3A3_121_151; note = Orientation (relative to transcription): sense; note = sgRNA Position: 26440651; note = Sequence Name: 56322-704_101_SL_seq_8401
ggggaatactaagaagtaag

SEQ ID NO: 8402 - DNA, 20 bp, Homo sapiens
  source 1..20: mol_type = genomic DNA; note = Gene: BTN3A3; note = Location (start to end; relative to TSS): BTN3A3_55_85; note = Orientation (relative to transcription): sense; note = sgRNA Position: 26440585; note = Sequence Name: 56322-704_101_SL_seq_8402
ctcaaccataatagaaagaa

SEQ ID NO: 8403 - DNA, 20 bp, Homo sapiens
  source 1..20: mol_type = genomic DNA; note = Gene: BTN3A3; note = Location (start to end; relative to TSS): BTN3A3_98_128; note = Orientation (relative to transcription): antisense; note = sgRNA Position: 26440608; note = Sequence Name: 56322-704_101_SL_seq_8403
cacagcccactgaagaatgg

SEQ ID NO: 8404 - DNA, 20 bp, Homo sapiens
  source 1..20: mol_type = genomic DNA; note = Gene: BTN3A3; note = Location (start to end; relative to TSS): BTN3A3_28_58; note = Orientation (relative to transcription): antisense; note = sgRNA Position: 26440538; note = Sequence Name: 56322-704_101_SL_seq_8404
agaaaggaaaaagaaagcag

SEQ ID NO: 8405 - DNA, 20 bp, Homo sapiens
  source 1..20: mol_type = genomic DNA; note = Gene: BTN3A3; note = Location (start to end; relative to TSS): BTN3A3_84_114; note = Orientation (relative to transcription): sense; note = sgRNA Position: 26440614; note = Sequence Name: 56322-704_101_SL_seq_8405
attaaccaccattcttcagt

SEQ ID NO: 8406 - DNA, 20 bp, Homo sapiens
  source 1..20: mol_type = genomic DNA; note = Gene: BTN3A3; note = Location (start to end; relative to TSS): BTN3A3_44_74; note = Orientation (relative to transcription): antisense; note = sgRNA Position: 26440554; note = Sequence Name: 56322-704_101_SL_seq_8406
gagtctctcattccgaagaa

SEQ ID NO: 8407 - DNA, 20 bp, Homo sapiens
  source 1..20: mol_type = genomic DNA; note = Gene: BTN3A3; note = Location (start to end; relative to TSS): BTN3A3_83_113; note = Orientation (relative to transcription): sense; note = sgRNA Position: 26440613; note = Sequence Name: 56322-704_101_SL_seq_8407
tattaaccaccattcttcag

SEQ ID NO: 8408 - DNA, 20 bp, Homo sapiens
  source 1..20: mol_type = genomic DNA; note = Gene: BTN3A3; note = Location (start to end; relative to TSS): BTN3A3_9_39; note = Orientation (relative to transcription): antisense; note = sgRNA Position: 26440519; note = Sequence Name: 56322-704_101_SL_seq_8408
gaggctatctggttattgtg

SEQ ID NO: 8409 - DNA, 20 bp, Homo sapiens
  source 1..20: mol_type = genomic DNA; note = Gene: BTN3A3; note = Location (start to end; relative to TSS): BTN3A3_44_74; note = Orientation (relative to transcription): antisense; note = sgRNA Position: 26440554; note = Sequence Name: 56322-704_101_SL_seq_8409
gagtctctcattccgaagaa

SEQ ID NO: 8410 - DNA, 20 bp, Homo sapiens
  source 1..20: mol_type = genomic DNA; note = Gene: BTNL10; note = Location (start to end; relative to TSS): BTNL10_64_94; note = Orientation (relative to transcription): sense; note = sgRNA Position: 228513273; note = Sequence Name: 56322-704_101_SL_seq_8410
atatttttgcaaaaaacaaa

SEQ ID NO: 8411 - DNA, 20 bp, Homo sapiens
  source 1..20: mol_type = genomic DNA; note = Gene: BTNL10; note = Location (start to end; relative to TSS): BTNL10_95_125; note = Orientation (relative to transcription): sense; note = sgRNA Position: 228513242; note = Sequence Name: 56322-704_101_SL_seq_8411
ctggaaactgggggacttgg

SEQ ID NO: 8412 - DNA, 20 bp, Homo sapiens
  source 1..20: mol_type = genomic DNA; note = Gene: BTNL10; note = Location (start to end; relative to TSS): BTNL10_28_58; note = Orientation (relative to transcription): antisense; note = sgRNA Position: 228513329; note = Sequence Name: 56322-704_101_SL_seq_8412
tgcagcagaaaaaaaaaaaa

SEQ ID NO: 8413 - DNA, 20 bp, Homo sapiens
  source 1..20: mol_type = genomic DNA; note = Gene: BTNL10; note = Location (start to end; relative to TSS): BTNL10_76_106; note = Orientation (relative to transcription): sense; note = sgRNA Position: 228513261; note = Sequence Name: 56322-704_101_SL_seq_8413
aaaacaaaaggaagaatctc

SEQ ID NO: 8414 - DNA, 20 bp, Homo sapiens
  source 1..20: mol_type = genomic DNA; note = Gene: BTNL10; note = Location (start to end; relative to TSS): BTNL10_32_62; note = Orientation (relative to transcription): sense; note = sgRNA Position: 228513305; note = Sequence Name: 56322-704_101_SL_seq_8414
ttctgctgcaactgccagaa

SEQ ID NO: 8415 - DNA, 20 bp, Homo sapiens
  source 1..20: mol_type = genomic DNA; note = Gene: BTNL10; note = Location (start to end; relative to TSS): BTNL10_64_94; note = Orientation (relative to transcription): sense; note = sgRNA Position: 228513273; note = Sequence Name: 56322-704_101_SL_seq_8415
atatttttgcaaaaaacaaa

SEQ ID NO: 8416 - DNA, 20 bp, Homo sapiens
  source 1..20: mol_type = genomic DNA; note = Gene: BTNL10; note = Location (start to end; relative to TSS): BTNL10_-1_29; note = Orientation (relative to transcription): antisense; note = sgRNA Position: 228513358; note = Sequence Name: 56322-704_101_SL_seq_8416
gaagagtgtgatccccagtg

SEQ ID NO: 8417 - DNA, 20 bp, Homo sapiens
  source 1..20: mol_type = genomic DNA; note = Gene: BTNL10; note = Location (start to end; relative to TSS): BTNL10_32_62; note = Orientation (relative to transcription): sense; note = sgRNA Position: 228513305; note = Sequence Name: 56322-704_101_SL_seq_8417
ttctgctgcaactgccagaa

SEQ ID NO: 8418 - DNA, 20 bp, Homo sapiens
  source 1..20: mol_type = genomic DNA; note = Gene: BTNL10; note = Location (start to end; relative to TSS): BTNL10_-7_23; note = Orientation (relative to transcription): sense; note = sgRNA Position: 228513344; note = Sequence Name: 56322-704_101_SL_seq_8418
cactggggatcacactcttc

SEQ ID NO: 8419 - DNA, 20 bp, Homo sapiens
  source 1..20: mol_type = genomic DNA; note = Gene: BTNL10; note = Location (start to end; relative to TSS): BTNL10_28_58; note = Orientation (relative to transcription): antisense; note = sgRNA Position: 228513329; note = Sequence Name: 56322-704_101_SL_seq_8419
tgcagcagaaaaaaaaaaaa

SEQ ID NO: 8420 - DNA, 20 bp, Homo sapiens
  source 1..20: mol_type = genomic DNA; note = Gene: BTNL2; note = Location (start to end; relative to TSS): BTNL2_34_64; note = Orientation (relative to transcription): sense; note = sgRNA Position: 32407123; note = Sequence Name: 56322-704_101_SL_seq_8420
ctttgttccagggaggatgg

SEQ ID NO: 8421 - DNA, 20 bp, Homo sapiens
  source 1..20: mol_type = genomic DNA; note = Gene: BTNL2; note = Location (start to end; relative to TSS): BTNL2_106_136; note = Orientation (relative to transcription): antisense; note = sgRNA Position: 32407071; note = Sequence Name: 56322-704_101_SL_seq_8421
tcattgtcagcaggatgaat

SEQ ID NO: 8422 - DNA, 20 bp, Homo sapiens
  source 1..20: mol_type = genomic DNA; note = Gene: BTNL2; note = Location (start to end; relative to TSS): BTNL2_37_67; note = Orientation (relative to transcription): antisense; note = sgRNA Position: 32407140; note = Sequence Name: 56322-704_101_SL_seq_8422
tcctccctggaacaaagaca

SEQ ID NO: 8423 - DNA, 20 bp, Homo sapiens
  source 1..20: mol_type = genomic DNA; note = Gene: BTNL2; note = Location (start to end; relative to TSS): BTNL2_102_132; note = Orientation (relative to transcription): antisense; note = sgRNA Position: 32407075; note = Sequence Name: 56322-704_101_SL_seq_8423
tgtcagcaggatgaatagga

SEQ ID NO: 8424 - DNA, 20 bp, Homo sapiens
  source 1..20: mol_type = genomic DNA; note = Gene: BTNL2; note = Location (start to end; relative to TSS): BTNL2_31_61; note = Orientation (relative to transcription): sense; note = sgRNA Position: 32407126; note = Sequence Name: 56322-704_101_SL_seq_8424
tgtctttgttccagggagga

SEQ ID NO: 8425 - DNA, 20 bp, Homo sapiens
  source 1..20: mol_type = genomic DNA; note = Gene: BTNL2; note = Location (start to end; relative to TSS): BTNL2_99_129; note = Orientation (relative to transcription): antisense; note = sgRNA Position: 32407078; note = Sequence Name: 56322-704_101_SL_seq_8425
cagcaggatgaataggaagg

SEQ ID NO: 8426 - DNA, 20 bp, Homo sapiens
  source 1..20: mol_type = genomic DNA; note = Gene: BTNL2; note = Location (start to end; relative to TSS): BTNL2_24_54; note = Orientation (relative to transcription): sense; note = sgRNA Position: 32407133; note = Sequence Name: 56322-704_101_SL_seq_8426
gtttccttgtctttgttcca

SEQ ID NO: 8427 - DNA, 20 bp, Homo sapiens
  source 1..20: mol_type = genomic DNA; note = Gene: BTNL2; note = Location (start to end; relative to TSS): BTNL2_71_101; note = Orientation (relative to transcription): antisense; note = sgRNA Position: 32407106; note = Sequence Name: 56322-704_101_SL_seq_8427
gcaccagacagattgtagcc

SEQ ID NO: 8428 - DNA, 20 bp, Homo sapiens
  source 1..20: mol_type = genomic DNA; note = Gene: BTNL2; note = Location (start to end; relative to TSS): BTNL2_27_57; note = Orientation (relative to transcription): sense; note = sgRNA Position: 32407130; note = Sequence Name: 56322-704_101_SL_seq_8428
tccttgtctttgttccaggg

SEQ ID NO: 8429 - DNA, 20 bp, Homo sapiens
  source 1..20: mol_type = genomic DNA; note = Gene: BTNL2; note = Location (start to end; relative to TSS): BTNL2_59_89; note = Orientation (relative to transcription): sense; note = sgRNA Position: 32407098; note = Sequence Name: 56322-704_101_SL_seq_8429
tttccaggctacaatctgtc

SEQ ID NO: 8430 - DNA, 20 bp, Homo sapiens
  source 1..20: mol_type = genomic DNA; note = Gene: BTNL3; note = Location (start to end; relative to TSS): BTNL3_54_84; note = Orientation (relative to transcription): sense; note = sgRNA Position: 180988926; note = Sequence Name: 56322-704_101_SL_seq_8430
gttcatgaagagcctctcca

SEQ ID NO: 8431 - DNA, 20 bp, Homo sapiens
  source 1..20: mol_type = genomic DNA; note = Gene: BTNL3; note = Location (start to end; relative to TSS): BTNL3_88_118; note = Orientation (relative to transcription): antisense; note = sgRNA Position: 180988940; note = Sequence Name: 56322-704_101_SL_seq_8431
aggccagctgtctcaggcgc

SEQ ID NO: 8432 - DNA, 20 bp, Homo sapiens
  source 1..20: mol_type = genomic DNA; note = Gene: BTNL3; note = Location (start to end; relative to TSS): BTNL3_19_49; note = Orientation (relative to transcription): antisense; note = sgRNA Position: 180988871; note = Sequence Name: 56322-704_101_SL_seq_8432
ccctagagcctccctaaaca

SEQ ID NO: 8433 - DNA, 20 bp, Homo sapiens
  source 1..20: mol_type = genomic DNA; note = Gene: BTNL3; note = Location (start to end; relative to TSS): BTNL3_80_110; note = Orientation (relative to transcription): antisense; note = sgRNA Position: 180988932; note = Sequence Name: 56322-704_101_SL_seq_8433
tgtctcaggcgcaggagccg

SEQ ID NO: 8434 - DNA, 20 bp, Homo sapiens
  source 1..20: mol_type = genomic DNA; note = Gene: BTNL3; note = Location (start to end; relative to TSS): BTNL3_10_40; note = Orientation (relative to transcription): sense; note = sgRNA Position: 180988882; note = Sequence Name: 56322-704_101_SL_seq_8434
ccatgtttagggaggctcta

SEQ ID NO: 8435 - DNA, 20 bp, Homo sapiens
  source 1..20: mol_type = genomic DNA; note = Gene: BTNL3; note = Location (start to end; relative to TSS): BTNL3_76_106; note = Orientation (relative to transcription): sense; note = sgRNA Position: 180988948; note = Sequence Name: 56322-704_101_SL_seq_8435
gctcctgcgcctgagacagc

SEQ ID NO: 8436 - DNA, 20 bp, Homo sapiens
  source 1..20: mol_type = genomic DNA; note = Gene: BTNL3; note = Location (start to end; relative to TSS): BTNL3_9_39; note = Orientation (relative to transcription): sense; note = sgRNA Position: 180988881; note = Sequence Name: 56322-704_101_SL_seq_8436
gccatgtttagggaggctct

SEQ ID NO: 8437 - DNA, 20 bp, Homo sapiens
  source 1..20: mol_type = genomic DNA; note = Gene: BTNL3; note = Location (start to end; relative to TSS): BTNL3_75_105; note = Orientation (relative to transcription): antisense; note = sgRNA Position: 180988927; note = Sequence Name: 56322-704_101_SL_seq_8437
caggcgcaggagccgtggag

SEQ ID NO: 8438 - DNA, 20 bp, Homo sapiens
  source 1..20: mol_type = genomic DNA; note = Gene: BTNL3; note = Location (start to end; relative to TSS): BTNL3_5_35; note = Orientation (relative to transcription): antisense; note = sgRNA Position: 180988857; note = Sequence Name: 56322-704_101_SL_seq_8438
taaacatggctgtatgaatg

SEQ ID NO: 8439 - DNA, 20 bp, Homo sapiens
  source 1..20: mol_type = genomic DNA; note = Gene: BTNL3; note = Location (start to end; relative to TSS): BTNL3_54_84; note = Orientation (relative to transcription): sense; note = sgRNA Position: 180988926; note = Sequence Name: 56322-704_101_SL_seq_8439
gttcatgaagagcctctcca

SEQ ID NO: 8440 - DNA, 20 bp, Homo sapiens
  source 1..20: mol_type = genomic DNA; note = Gene: BTNL8; note = Location (start to end; relative to TSS): BTNL8_48_78; note = Orientation (relative to transcription): antisense; note = sgRNA Position: 180899213; note = Sequence Name: 56322-704_101_SL_seq_8440
ctggcctaatgctcaaggtg

SEQ ID NO: 8441 - DNA, 20 bp, Homo sapiens
  source 1..20: mol_type = genomic DNA; note = Gene: BTNL8; note = Location (start to end; relative to TSS): BTNL8_90_120; note = Orientation (relative to transcription): antisense; note = sgRNA Position: 180899255; note = Sequence Name: 56322-704_101_SL_seq_8441
atgacaggagaggtgacgga

SEQ ID NO: 8442 - DNA, 20 bp, Homo sapiens
  source 1..20: mol_type = genomic DNA; note = Gene: BTNL8; note = Location (start to end; relative to TSS): BTNL8_34_64; note = Orientation (relative to transcription): antisense; note = sgRNA Position: 180899199; note = Sequence Name: 56322-704_101_SL_seq_8442
aaggtgcggaagccacggag

SEQ ID NO: 8443 - DNA, 20 bp, Homo sapiens
  source 1..20: mol_type = genomic DNA; note = Gene: BTNL8; note = Location (start to end; relative to TSS): BTNL8_75_105; note = Orientation (relative to transcription): antisense; note = sgRNA Position: 180899240; note = Sequence Name: 56322-704_101_SL_seq_8443
acggatggattagagagaag

SEQ ID NO: 8444 - DNA, 20 bp, Homo sapiens
  source 1..20: mol_type = genomic DNA; note = Gene: BTNL8; note = Location (start to end; relative to TSS): BTNL8_35_65; note = Orientation (relative to transcription): sense; note = sgRNA Position: 180899220; note = Sequence Name: 56322-704_101_SL_seq_8444
gcttccgcaccttgagcatt

SEQ ID NO: 8445 - DNA, 20 bp, Homo sapiens
  source 1..20: mol_type = genomic DNA; note = Gene: BTNL8; note = Location (start to end; relative to TSS): BTNL8_67_97; note = Orientation (relative to transcription): antisense; note = sgRNA Position: 180899232; note = Sequence Name: 56322-704_101_SL_seq_8445
attagagagaagaggagaac

SEQ ID NO: 8446 - DNA, 20 bp, Homo sapiens
  source 1..20: mol_type = genomic DNA; note = Gene: BTNL8; note = Location (start to end; relative to TSS): BTNL8_20_50; note = Orientation (relative to transcription): antisense; note = sgRNA Position: 180899185; note = Sequence Name: 56322-704_101_SL_seq_8446
acggagaggctctgcgtgag

SEQ ID NO: 8447 - DNA, 20 bp, Homo sapiens
  source 1..20: mol_type = genomic DNA; note = Gene: BTNL8; note = Location (start to end; relative to TSS): BTNL8_53_83; note = Orientation (relative to transcription): antisense; note = sgRNA Position: 180899218; note = Sequence Name: 56322-704_101_SL_seq_8447
gagaactggcctaatgctca

SEQ ID NO: 8448 - DNA, 20 bp, Homo sapiens
  source 1..20: mol_type = genomic DNA; note = Gene: BTNL8; note = Location (start to end; relative to TSS): BTNL8_17_47; note = Orientation (relative to transcription): antisense; note = sgRNA Position: 180899182; note = Sequence Name: 56322-704_101_SL_seq_8448
gagaggctctgcgtgagcgg

SEQ ID NO: 8449 - DNA, 20 bp, Homo sapiens
  source 1..20: mol_type = genomic DNA; note = Gene: BTNL8; note = Location (start to end; relative to TSS): BTNL8_48_78; note = Orientation (relative to transcription): antisense; note = sgRNA Position: 180899213; note = Sequence Name: 56322-704_101_SL_seq_8449
ctggcctaatgctcaaggtg

SEQ ID NO: 8450 - DNA, 20 bp, Homo sapiens
  source 1..20: mol_type = genomic DNA; note = Gene: BTNL9; note = Location (start to end; relative to TSS): BTNL9_40_70; note = Orientation (relative to transcription): sense; note = sgRNA Position: 181040332; note = Sequence Name: 56322-704_101_SL_seq_8450
tctagggaatcttagcatct

SEQ ID NO: 8451 - DNA, 20 bp, Homo sapiens
  source 1..20: mol_type = genomic DNA; note = Gene: BTNL9; note = Location (start to end; relative to TSS): BTNL9_122_152; note = Orientation (relative to transcription): antisense; note = sgRNA Position: 181040394; note = Sequence Name: 56322-704_101_SL_seq_8451
ctgaaatggcagatgagtcc

SEQ ID NO: 8452 - DNA, 20 bp, Homo sapiens
  source 1..20: mol_type = genomic DNA; note = Gene: BTNL9; note = Location (start to end; relative to TSS): BTNL9_39_69; note = Orientation (relative to transcription): antisense; note = sgRNA Position: 181040311; note = Sequence Name: 56322-704_101_SL_seq_8452
aagattccctagacgtggac

SEQ ID NO: 8453 - DNA, 20 bp, Homo sapiens
  source 1..20: mol_type = genomic DNA; note = Gene: BTNL9; note = Location (start to end; relative to TSS): BTNL9_99_129; note = Orientation (relative to transcription): antisense; note = sgRNA Position: 181040371; note = Sequence Name: 56322-704_101_SL_seq_8453
tgagctcacctcctctgcaa

SEQ ID NO: 8454 - DNA, 20 bp, Homo sapiens
  source 1..20: mol_type = genomic DNA; note = Gene: BTNL9; note = Location (start to end; relative to TSS): BTNL9_24_54; note = Orientation (relative to transcription): sense; note = sgRNA Position: 181040316; note = Sequence Name: 56322-704_101_SL_seq_8454
cagctgccagtccacgtcta

SEQ ID NO: 8455 - DNA, 20 bp, Homo sapiens
  source 1..20: mol_type = genomic DNA; note = Gene: BTNL9; note = Location (start to end; relative to TSS): BTNL9_98_128; note = Orientation (relative to transcription): antisense; note = sgRNA Position: 181040370; note = Sequence Name: 56322-704_101_SL_seq_8455
gagctcacctcctctgcaaa

SEQ ID NO: 8456 - DNA, 20 bp, Homo sapiens
  source 1..20: mol_type = genomic DNA; note = Gene: BTNL9; note = Location (start to end; relative to TSS): BTNL9_23_53; note = Orientation (relative to transcription): sense; note = sgRNA Position: 181040315; note = Sequence Name: 56322-704_101_SL_seq_8456
tcagctgccagtccacgtct

SEQ ID NO: 8457 - DNA, 20 bp, Homo sapiens
  source 1..20: mol_type = genomic DNA; note = Gene: BTNL9; note = Location (start to end; relative to TSS): BTNL9_79_109; note = Orientation (relative to transcription): sense; note = sgRNA Position: 181040371; note = Sequence Name: 56322-704_101_SL_seq_8457
gcaatcatcaccctttgcag

SEQ ID NO: 8458 - DNA, 20 bp, Homo sapiens
  source 1..20: mol_type = genomic DNA; note = Gene: BTNL9; note = Location (start to end; relative to TSS): BTNL9_22_52; note = Orientation (relative to transcription): antisense; note = sgRNA Position: 181040294; note = Sequence Name: 56322-704_101_SL_seq_8458
gactggcagctgagctccag

SEQ ID NO: 8459 - DNA, 20 bp, Homo sapiens
  source 1..20: mol_type = genomic DNA; note = Gene: BTNL9; note = Location (start to end; relative to TSS): BTNL9_73_103; note = Orientation (relative to transcription): antisense; note = sgRNA Position: 181040345; note = Sequence Name: 56322-704_101_SL_seq_8459
atgattgctgtaaagtgtct

SEQ ID NO: 8460 - DNA, 20 bp, Homo sapiens
  source 1..20: mol_type = genomic DNA; note = Gene: CADM1; note = Location (start to end; relative to TSS): CADM1_42_72; note = Orientation (relative to transcription): sense; note = sgRNA Position: 115504349; note = Sequence Name: 56322-704_101_SL_seq_8460
ccagtgtgcggcggcagcgg

SEQ ID NO: 8461 - DNA, 20 bp, Homo sapiens
  source 1..20: mol_type = genomic DNA; note = Gene: CADM1; note = Location (start to end; relative to TSS): CADM1_93_123; note = Orientation (relative to transcription): antisense; note = sgRNA Position: 115504318; note = Sequence Name: 56322-704_101_SL_seq_8461
gcaacagcagaagccggagc

SEQ ID NO: 8462 - DNA, 20 bp, Homo sapiens
  source 1..20: mol_type = genomic DNA; note = Gene: CADM1; note = Location (start to end; relative to TSS): CADM1_40_70; note = Orientation (relative to transcription): antisense; note = sgRNA Position: 115504371; note = Sequence Name: 56322-704_101_SL_seq_8462
gccgcacactgggatccgct

SEQ ID NO: 8463 - DNA, 20 bp, Homo sapiens
  source 1..20: mol_type = genomic DNA; note = Gene: CADM1; note = Location (start to end; relative to TSS): CADM1_85_115; note = Orientation (relative to transcription): antisense; note = sgRNA Position: 115504326; note = Sequence Name: 56322-704_101_SL_seq_8463
agaagccggagccggagccc

SEQ ID NO: 8464 - DNA, 20 bp, Homo sapiens
  source 1..20: mol_type = genomic DNA; note = Gene: CADM1; note = Location (start to end; relative to TSS): CADM1_39_69; note = Orientation (relative to transcription): sense; note = sgRNA Position: 115504352; note = Sequence Name: 56322-704_101_SL_seq_8464
atcccagtgtgcggcggcag

SEQ ID NO: 8465 - DNA, 20 bp, Homo sapiens
  source 1..20: mol_type = genomic DNA; note = Gene: CADM1; note = Location (start to end; relative to TSS): CADM1_82_112; note = Orientation (relative to transcription): antisense; note = sgRNA Position: 115504329; note = Sequence Name: 56322-704_101_SL_seq_8465
agccggagccggagcccggg

SEQ ID NO: 8466 - DNA, 20 bp, Homo sapiens
  source 1..20: mol_type = genomic DNA; note = Gene: CADM1; note = Location (start to end; relative to TSS): CADM1_33_63; note = Orientation (relative to transcription): sense; note = sgRNA Position: 115504358; note = Sequence Name: 56322-704_101_SL_seq_8466
gagcggatcccagtgtgcgg

SEQ ID NO: 8467 - DNA, 20 bp, Homo sapiens
  source 1..20: mol_type = genomic DNA; note = Gene: CADM1; note = Location (start to end; relative to TSS): CADM1_71_101; note = Orientation (relative to transcription): sense; note = sgRNA Position: 115504320; note = Sequence Name: 56322-704_101_SL_seq_8467
cgcctcccgggctccggctc

SEQ ID NO: 8468 - DNA, 20 bp, Homo sapiens
  source 1..20: mol_type = genomic DNA; note = Gene: CADM1; note = Location (start to end; relative to TSS): CADM1_30_60; note = Orientation (relative to transcription): sense; note = sgRNA Position: 115504361; note = Sequence Name: 56322-704_101_SL_seq_8468
gccgagcggatcccagtgtg

SEQ ID NO: 8469 - DNA, 20 bp, Homo sapiens
  source 1..20: mol_type = genomic DNA; note = Gene: CADM1; note = Location (start to end; relative to TSS): CADM1_65_95; note = Orientation (relative to transcription): sense; note = sgRNA Position: 115504326; note = Sequence Name: 56322-704_101_SL_seq_8469
cggcggcgcctcccgggctc

SEQ ID NO: 8470 - DNA, 20 bp, Homo sapiens
  source 1..20: mol_type = genomic DNA; note = Gene: CADM2; note = Location (start to end; relative to TSS): CADM2_32_62; note = Orientation (relative to transcription): sense; note = sgRNA Position: 84959047; note = Sequence Name: 56322-704_101_SL_seq_8470
gccgctgcagccggagcatc

SEQ ID NO: 8471 - DNA, 20 bp, Homo sapiens
  source 1..20: mol_type = genomic DNA; note = Gene: CADM2; note = Location (start to end; relative to TSS): CADM2_79_109; note = Orientation (relative to transcription): antisense; note = sgRNA Position: 84959074; note = Sequence Name: 56322-704_101_SL_seq_8471
ggcggtagcagcggcagcgg

SEQ ID NO: 8472 - DNA, 20 bp, Homo sapiens
  source 1..20: mol_type = genomic DNA; note = Gene: CADM2; note = Location (start to end; relative to TSS): CADM2_33_63; note = Orientation (relative to transcription): sense; note = sgRNA Position: 84959048; note = Sequence Name: 56322-704_101_SL_seq_8472
ccgctgcagccggagcatcc

SEQ ID NO: 8473 - DNA, 20 bp, Homo sapiens
  source 1..20: mol_type = genomic DNA; note = Gene: CADM2; note = Location (start to end; relative to TSS): CADM2_76_106; note = Orientation (relative to transcription): antisense; note = sgRNA Position: 84959071; note = Sequence Name: 56322-704_101_SL_seq_8473
ggtagcagcggcagcggcgg

SEQ ID NO: 8474 - DNA, 20 bp, Homo sapiens
  source 1..20: mol_type = genomic DNA; note = Gene: CADM2; note = Location (start to end; relative to TSS): CADM2_23_53; note = Orientation (relative to transcription): sense; note = sgRNA Position: 84959038; note = Sequence Name: 56322-704_101_SL_seq_8474
gccacagccgccgctgcagc

SEQ ID NO: 8475 - DNA, 20 bp, Homo sapiens
  source 1..20: mol_type = genomic DNA; note = Gene: CADM2; note = Location (start to end; relative to TSS): CADM2_70_100; note = Orientation (relative to transcription): antisense; note = sgRNA Position: 84959065; note = Sequence Name: 56322-704_101_SL_seq_8475
agcggcagcggcggcggcag

SEQ ID NO: 8476 - DNA, 20 bp, Homo sapiens
  source 1..20: mol_type = genomic DNA; note = Gene: CADM2; note = Location (start to end; relative to TSS): CADM2_24_54; note = Orientation (relative to transcription): antisense; note = sgRNA Position: 84959019; note = Sequence Name: 56322-704_101_SL_seq_8476
agcggcggctgtggcggcag

SEQ ID NO: 8477 - DNA, 20 bp, Homo sapiens
  source 1..20: mol_type = genomic DNA; note = Gene: CADM2; note = Location (start to end; relative to TSS): CADM2_67_97; note = Orientation (relative to transcription): antisense; note = sgRNA Position: 84959062; note = Sequence Name: 56322-704_101_SL_seq_8477
ggcagcggcggcggcagtgg

SEQ ID NO: 8478 - DNA, 20 bp, Homo sapiens
  source 1..20: mol_type = genomic DNA; note = Gene: CADM2; note = Location (start to end; relative to TSS): CADM2_30_60; note = Orientation (relative to transcription): antisense; note = sgRNA Position: 84959025; note = Sequence Name: 56322-704_101_SL_seq_8478
ggctgcagcggcggctgtgg

SEQ ID NO: 8479 - DNA, 20 bp, Homo sapiens
  source 1..20: mol_type = genomic DNA; note = Gene: CADM2; note = Location (start to end; relative to TSS): CADM2_60_90; note = Orientation (relative to transcription): antisense; note = sgRNA Position: 84959055; note = Sequence Name: 56322-704_101_SL_seq_8479
gcggcggcagtggcggctcc

SEQ ID NO: 8480 - DNA, 20 bp, Homo sapiens
  source 1..20: mol_type = genomic DNA; note = Gene: CADM3; note = Location (start to end; relative to TSS): CADM3_34_64; note = Orientation (relative to transcription): antisense; note = sgRNA Position: 159171655; note = Sequence Name: 56322-704_101_SL_seq_8480
agggcgcccccgagccgctt

SEQ ID NO: 8481 - DNA, 20 bp, Homo sapiens
  source 1..20: mol_type = genomic DNA; note = Gene: CADM3; note = Location (start to end; relative to TSS): CADM3_73_103; note = Orientation (relative to transcription): sense; note = sgRNA Position: 159171714; note = Sequence Name: 56322-704_101_SL_seq_8481
ctccccatccccagcccccg

SEQ ID NO: 8482 - DNA, 20 bp, Homo sapiens
  source 1..20: mol_type = genomic DNA; note = Gene: CADM3; note = Location (start to end; relative to TSS): CADM3_25_55; note = Orientation (relative to transcription): antisense; note = sgRNA Position: 159171646; note = Sequence Name: 56322-704_101_SL_seq_8482
ccgagccgcttcggagcccg

SEQ ID NO: 8483 - DNA, 20 bp, Homo sapiens
  source 1..20: mol_type = genomic DNA; note = Gene: CADM3; note = Location (start to end; relative to TSS): CADM3_72_102; note = Orientation (relative to transcription): sense; note = sgRNA Position: 159171713; note = Sequence Name: 56322-704_101_SL_seq_8483
cctccccatccccagccccc

SEQ ID NO: 8484 - DNA, 20 bp, Homo sapiens
  source 1..20: mol_type = genomic DNA; note = Gene: CADM3; note = Location (start to end; relative to TSS): CADM3_26_56; note = Orientation (relative to transcription): antisense; note = sgRNA Position: 159171647; note = Sequence Name: 56322-704_101_SL_seq_8484
cccgagccgcttcggagccc

SEQ ID NO: 8485 - DNA, 20 bp, Homo sapiens
  source 1..20: mol_type = genomic DNA; note = Gene: CADM3; note = Location (start to end; relative to TSS): CADM3_71_101; note = Orientation (relative to transcription): sense; note = sgRNA Position: 159171712; note = Sequence Name: 56322-704_101_SL_seq_8485
ccctccccatccccagcccc

SEQ ID NO: 8486 - DNA, 20 bp, Homo sapiens
  source 1..20: mol_type = genomic DNA; note = Gene: CADM3; note = Location (start to end; relative to TSS): CADM3_18_48; note = Orientation (relative to transcription): sense; note = sgRNA Position: 159171659; note = Sequence Name: 56322-704_101_SL_seq_8486
ccgggctccgaagcggctcg

SEQ ID NO: 8487 - DNA, 20 bp, Homo sapiens
  source 1..20: mol_type = genomic DNA; note = Gene: CADM3; note = Location (start to end; relative to TSS): CADM3_54_84; note = Orientation (relative to transcription): antisense; note = sgRNA Position: 159171675; note = Sequence Name: 56322-704_101_SL_seq_8487
ggactacgatgttgaccgaa

SEQ ID NO: 8488 - DNA, 20 bp, Homo sapiens
  source 1..20: mol_type = genomic DNA; note = Gene: CADM3; note = Location (start to end; relative to TSS): CADM3_19_49; note = Orientation (relative to transcription): sense; note = sgRNA Position: 159171660; note = Sequence Name: 56322-704_101_SL_seq_8488
cgggctccgaagcggctcgg

SEQ ID NO: 8489 - DNA, 20 bp, Homo sapiens
  source 1..20: mol_type = genomic DNA; note = Gene: CADM3; note = Location (start to end; relative to TSS): CADM3_53_83; note = Orientation (relative to transcription): antisense; note = sgRNA Position: 159171674; note = Sequence Name: 56322-704_101_SL_seq_8489
gactacgatgttgaccgaaa

SEQ ID NO: 8490 - DNA, 20 bp, Homo sapiens
  source 1..20: mol_type = genomic DNA; note = Gene: CADM4; note = Location (start to end; relative to TSS): CADM4_59_89; note = Orientation (relative to transcription): antisense; note = sgRNA Position: 43639787; note = Sequence Name: 56322-704_101_SL_seq_8490
gaagcgccgggcccggccca

SEQ ID NO: 8491 - DNA, 20 bp, Homo sapiens
  source 1..20: mol_type = genomic DNA; note = Gene: CADM4; note = Location (start to end; relative to TSS): CADM4_89_119; note = Orientation (relative to transcription): sense; note = sgRNA Position: 43639737; note = Sequence Name: 56322-704_101_SL_seq_8491
tgctgtgggcggccgcggcg

SEQ ID NO: 8492 - DNA, 20 bp, Homo sapiens
  source 1..20: mol_type = genomic DNA; note = Gene: CADM4; note = Location (start to end; relative to TSS): CADM4_56_86; note = Orientation (relative to transcription): sense; note = sgRNA Position: 43639770; note = Sequence Name: 56322-704_101_SL_seq_8492
gccgggcccggcgcttccag

SEQ ID NO: 8493 - DNA, 20 bp, Homo sapiens
  source 1..20: mol_type = genomic DNA; note = Gene: CADM4; note = Location (start to end; relative to TSS): CADM4_87_117; note = Orientation (relative to transcription): sense; note = sgRNA Position: 43639739; note = Sequence Name: 56322-704_101_SL_seq_8493
gctgctgtgggcggccgcgg

SEQ ID NO: 8494 - DNA, 20 bp, Homo sapiens
  source 1..20: mol_type = genomic DNA; note = Gene: CADM4; note = Location (start to end; relative to TSS): CADM4_20_50; note = Orientation (relative to transcription): antisense; note = sgRNA Position: 43639826; note = Sequence Name: 56322-704_101_SL_seq_8494
gccgccgctcgctcccggcc

SEQ ID NO: 8495 - DNA, 20 bp, Homo sapiens
  source 1..20: mol_type = genomic DNA; note = Gene: CADM4; note = Location (start to end; relative to TSS): CADM4_66_96; note = Orientation (relative to transcription): antisense; note = sgRNA Position: 43639780; note = Sequence Name: 56322-704_101_SL_seq_8495
gccactggaagcgccgggcc

SEQ ID NO: 8496 - DNA, 20 bp, Homo sapiens
  source 1..20: mol_type = genomic DNA; note = Gene: CADM4; note = Location (start to end; relative to TSS): CADM4_10_40; note = Orientation (relative to transcription): sense; note = sgRNA Position: 43639816; note = Sequence Name: 56322-704_101_SL_seq_8496
gccgggccgggagcgagcgg

SEQ ID NO: 8497 - DNA, 20 bp, Homo sapiens
  source 1..20: mol_type = genomic DNA; note = Gene: CADM4; note = Location (start to end; relative to TSS): CADM4_59_89; note = Orientation (relative to transcription): antisense; note = sgRNA Position: 43639787; note = Sequence Name: 56322-704_101_SL_seq_8497
gaagcgccgggcccggccca

SEQ ID NO: 8498 - DNA, 20 bp, Homo sapiens
  source 1..20: mol_type = genomic DNA; note = Gene: CADM4; note = Location (start to end; relative to TSS): CADM4_7_37; note = Orientation (relative to transcription): sense; note = sgRNA Position: 43639819; note = Sequence Name: 56322-704_101_SL_seq_8498
ggtgccgggccgggagcgag

SEQ ID NO: 8499 - DNA, 20 bp, Homo sapiens
  source 1..20: mol_type = genomic DNA; note = Gene: CADM4; note = Location (start to end; relative to TSS): CADM4_56_86; note = Orientation (relative to transcription): sense; note = sgRNA Position: 43639770; note = Sequence Name: 56322-704_101_SL_seq_8499
gccgggcccggcgcttccag

SEQ ID NO: 8500 - DNA, 20 bp, Homo sapiens
  source 1..20: mol_type = genomic DNA; note = Gene: CCDC141; note = Location (start to end; relative to TSS): CCDC141_48_78; note = Orientation (relative to transcription): antisense; note = sgRNA Position: 179050085; note = Sequence Name: 56322-704_101_SL_seq_8500
tgccaaaaggaaagaacagg

SEQ ID NO: 8501 - DNA, 20 bp, Homo sapiens
  source 1..20: mol_type = genomic DNA; note = Gene: CCDC141; note = Location (start to end; relative to TSS): CCDC141_99_129; note = Orientation (relative to transcription): antisense; note = sgRNA Position: 179050034; note = Sequence Name: 56322-704_101_SL_seq_8501
agggttacttggattcattc

SEQ ID NO: 8502 - DNA, 20 bp, Homo sapiens
  source 1..20: mol_type = genomic DNA; note = Gene: CCDC141; note = Location (start to end; relative to TSS): CCDC141_51_81; note = Orientation (relative to transcription): antisense; note = sgRNA Position: 179050082; note = Sequence Name: 56322-704_101_SL_seq_8502
ctctgccaaaaggaaagaac

SEQ ID NO: 8503 - DNA, 20 bp, Homo sapiens
  source 1..20: mol_type = genomic DNA; note = Gene: CCDC141; note = Location (start to end; relative to TSS): CCDC141_98_128; note = Orientation (relative to transcription): antisense; note = sgRNA Position: 179050035; note = Sequence Name: 56322-704_101_SL_seq_8503
gggttacttggattcattca

SEQ ID NO: 8504 - DNA, 20 bp, Homo sapiens
  source 1..20: mol_type = genomic DNA; note = Gene: CCDC141; note = Location (start to end; relative to TSS): CCDC141_61_91; note = Orientation (relative to transcription): antisense; note = sgRNA Position: 179050072; note = Sequence Name: 56322-704_101_SL_seq_8504
acactgattactctgccaaa

SEQ ID NO: 8505 - DNA, 20 bp, Homo sapiens
  source 1..20: mol_type = genomic DNA; note = Gene: CCDC141; note = Location (start to end; relative to TSS): CCDC141_92_122; note = Orientation (relative to transcription): sense; note = sgRNA Position: 179050021; note = Sequence Name: 56322-704_101_SL_seq_8505
tgaatgaatccaagtaaccc

SEQ ID NO: 8506 - DNA, 20 bp, Homo sapiens
  source 1..20: mol_type = genomic DNA; note = Gene: CCDC141; note = Location (start to end; relative to TSS): CCDC141_4_34; note = Orientation (relative to transcription): antisense; note = sgRNA Position: 179050129; note = Sequence Name: 56322-704_101_SL_seq_8506
gagtttatcgtgagagagaa

SEQ ID NO: 8507 - DNA, 20 bp, Homo sapiens
  source 1..20: mol_type = genomic DNA; note = Gene: CCDC141; note = Location (start to end; relative to TSS): CCDC141_51_81; note = Orientation (relative to transcription): antisense; note = sgRNA Position: 179050082; note = Sequence Name: 56322-704_101_SL_seq_8507
ctctgccaaaaggaaagaac

SEQ ID NO: 8508 - DNA, 20 bp, Homo sapiens
  source 1..20: mol_type = genomic DNA; note = Gene: CCDC141; note = Location (start to end; relative to TSS): CCDC141_2_32; note = Orientation (relative to transcription): sense; note = sgRNA Position: 179050111; note = Sequence Name: 56322-704_101_SL_seq_8508
ctctcacgataaactcaatg

SEQ ID NO: 8509 - DNA, 20 bp, Homo sapiens
  source 1..20: mol_type = genomic DNA; note = Gene: CCDC141; note = Location (start to end; relative to TSS): CCDC141_48_78; note = Orientation (relative to transcription): antisense; note = sgRNA Position: 179050085; note = Sequence Name: 56322-704_101_SL_seq_8509
tgccaaaaggaaagaacagg

SEQ ID NO: 8510 - DNA, 20 bp, Homo sapiens
  source 1..20: mol_type = genomic DNA; note = Gene: CD101; note = Location (start to end; relative to TSS): CD101_30_60; note = Orientation (relative to transcription): sense; note = sgRNA Position: 117001816; note = Sequence Name: 56322-704_101_SL_seq_8510
aaggactgtgctggcccaaa

SEQ ID NO: 8511 - DNA, 20 bp, Homo sapiens
  source 1..20: mol_type = genomic DNA; note = Gene: CD101; note = Location (start to end; relative to TSS): CD101_123_153; note = Orientation (relative to transcription): sense; note = sgRNA Position: 117001909; note = Sequence Name: 56322-704_101_SL_seq_8511
tcacaggagttcatcaactc

SEQ ID NO: 8512 - DNA, 20 bp, Homo sapiens
  source 1..20: mol_type = genomic DNA; note = Gene: CD101; note = Location (start to end; relative to TSS): CD101_48_78; note = Orientation (relative to transcription): sense; note = sgRNA Position: 117001834; note = Sequence Name: 56322-704_101_SL_seq_8512
aatggcaggcatctcatatg

SEQ ID NO: 8513 - DNA, 20 bp, Homo sapiens
  source 1..20: mol_type = genomic DNA; note = Gene: CD101; note = Location (start to end; relative to TSS): CD101_115_145; note = Orientation (relative to transcription): antisense; note = sgRNA Position: 117001881; note = Sequence Name: 56322-704_101_SL_seq_8513
ctgtgacaagagaaacataa

SEQ ID NO: 8514 - DNA, 20 bp, Homo sapiens
  source 1..20: mol_type = genomic DNA; note = Gene: CD101; note = Location (start to end; relative to TSS): CD101_54_84; note = Orientation (relative to transcription): antisense; note = sgRNA Position: 117001820; note = Sequence Name: 56322-704_101_SL_seq_8514
catatgagatgcctgccatt

SEQ ID NO: 8515 - DNA, 20 bp, Homo sapiens
  source 1..20: mol_type = genomic DNA; note = Gene: CD101; note = Location (start to end; relative to TSS): CD101_107_137; note = Orientation (relative to transcription): sense; note = sgRNA Position: 117001893; note = Sequence Name: 56322-704_101_SL_seq_8515
ctttatgtttctcttgtcac

SEQ ID NO: 8516 - DNA, 20 bp, Homo sapiens
  source 1..20: mol_type = genomic DNA; note = Gene: CD101; note = Location (start to end; relative to TSS): CD101_21_51; note = Orientation (relative to transcription): sense; note = sgRNA Position: 117001807; note = Sequence Name: 56322-704_101_SL_seq_8516
gggacgaaaaaggactgtgc

SEQ ID NO: 8517 - DNA, 20 bp, Homo sapiens
  source 1..20: mol_type = genomic DNA; note = Gene: CD101; note = Location (start to end; relative to TSS): CD101_54_84; note = Orientation (relative to transcription): antisense; note = sgRNA Position: 117001820; note = Sequence Name: 56322-704_101_SL_seq_8517
catatgagatgcctgccatt

SEQ ID NO: 8518 - DNA, 20 bp, Homo sapiens
  source 1..20: mol_type = genomic DNA; note = Gene: CD101; note = Location (start to end; relative to TSS): CD101_11_41; note = Orientation (relative to transcription): sense; note = sgRNA Position: 117001797; note = Sequence Name: 56322-704_101_SL_seq_8518
tgacactattgggacgaaaa

SEQ ID NO: 8519 - DNA, 20 bp, Homo sapiens
  source 1..20: mol_type = genomic DNA; note = Gene: CD101; note = Location (start to end; relative to TSS): CD101_48_78; note = Orientation (relative to transcription): sense; note = sgRNA Position: 117001834; note = Sequence Name: 56322-704_101_SL_seq_8519
aatggcaggcatctcatatg

SEQ ID NO: 8520 - DNA, 20 bp, Homo sapiens
  source 1..20: mol_type = genomic DNA; note = Gene: CD160; note = Location (start to end; relative to TSS): CD160_46_76; note = Orientation (relative to transcription): sense; note = sgRNA Position: 145719571; note = Sequence Name: 56322-704_101_SL_seq_8520
ctcgaggtaaaaaggcctgc

SEQ ID NO: 8521 - DNA, 20 bp, Homo sapiens
  source 1..20: mol_type = genomic DNA; note = Gene: CD160; note = Location (start to end; relative to TSS): CD160_81_111; note = Orientation (relative to transcription): antisense; note = sgRNA Position: 145719586; note = Sequence Name: 56322-704_101_SL_seq_8521
catcccttcacctggacccc

SEQ ID NO: 8522 - DNA, 20 bp, Homo sapiens
  source 1..20: mol_type = genomic DNA; note = Gene: CD160; note = Location (start to end; relative to TSS): CD160_47_77; note = Orientation (relative to transcription): sense; note = sgRNA Position: 145719572; note = Sequence Name: 56322-704_101_SL_seq_8522
tcgaggtaaaaaggcctgct

SEQ ID NO: 8523 - DNA, 20 bp, Homo sapiens
  source 1..20: mol_type = genomic DNA; note = Gene: CD160; note = Location (start to end; relative to TSS): CD160_78_108; note = Orientation (relative to transcription): sense; note = sgRNA Position: 145719603; note = Sequence Name: 56322-704_101_SL_seq_8523
gtccaggtgaagggatggga

SEQ ID NO: 8524 - DNA, 20 bp, Homo sapiens
  source 1..20: mol_type = genomic DNA; note = Gene: CD160; note = Location (start to end; relative to TSS): CD160_23_53; note = Orientation (relative to transcription): antisense; note = sgRNA Position: 145719528; note = Sequence Name: 56322-704_101_SL_seq_8524
cttctttcttgttctcagac

SEQ ID NO: 8525 - DNA, 20 bp, Homo sapiens
  source 1..20: mol_type = genomic DNA; note = Gene: CD160; note = Location (start to end; relative to TSS): CD160_56_86; note = Orientation (relative to transcription): sense; note = sgRNA Position: 145719581; note = Sequence Name: 56322-704_101_SL_seq_8525
aaaggcctgctggggacctg

SEQ ID NO: 8526 - DNA, 20 bp, Homo sapiens
  source 1..20: mol_type = genomic DNA; note = Gene: CD160; note = Location (start to end; relative to TSS): CD160_21_51; note = Orientation (relative to transcription): antisense; note = sgRNA Position: 145719526; note = Sequence Name: 56322-704_101_SL_seq_8526
tctttcttgttctcagactg

SEQ ID NO: 8527 - DNA, 20 bp, Homo sapiens
  source 1..20: mol_type = genomic DNA; note = Gene: CD160; note = Location (start to end; relative to TSS): CD160_55_85; note = Orientation (relative to transcription): sense; note = sgRNA Position: 145719580; note = Sequence Name: 56322-704_101_SL_seq_8527
aaaaggcctgctggggacct

SEQ ID NO: 8528 - DNA, 20 bp, Homo sapiens
  source 1..20: mol_type = genomic DNA; note = Gene: CD160; note = Location (start to end; relative to TSS): CD160_20_50; note = Orientation (relative to transcription): antisense; note = sgRNA Position: 145719525; note = Sequence Name: 56322-704_101_SL_seq_8528
ctttcttgttctcagactgg

SEQ ID NO: 8529 - DNA, 20 bp, Homo sapiens
  source 1..20: mol_type = genomic DNA; note = Gene: CD160; note = Location (start to end; relative to TSS): CD160_54_84; note = Orientation (relative to transcription): sense; note = sgRNA Position: 145719579; note = Sequence Name: 56322-704_101_SL_seq_8529
aaaaaggcctgctggggacc

SEQ ID NO: 8530 - DNA, 20 bp, Homo sapiens
  source 1..20: mol_type = genomic DNA; note = Gene: CD19; note = Location (start to end; relative to TSS): CD19_39_69; note = Orientation (relative to transcription): antisense; note = sgRNA Position: 28932016; note = Sequence Name: 56322-704_101_SL_seq_8530
aggaggaagaagaggaggcg

SEQ ID NO: 8531 - DNA, 20 bp, Homo sapiens
  source 1..20: mol_type = genomic DNA; note = Gene: CD19; note = Location (start to end; relative to TSS): CD19_71_101; note = Orientation (relative to transcription): antisense; note = sgRNA Position: 28932048; note = Sequence Name: 56322-704_101_SL_seq_8531
cctcgggcctgacttccatg

SEQ ID NO: 8532 - DNA, 20 bp, Homo sapiens
  source 1..20: mol_type = genomic DNA; note = Gene: CD19; note = Location (start to end; relative to TSS): CD19_36_66; note = Orientation (relative to transcription): antisense; note = sgRNA Position: 28932013; note = Sequence Name: 56322-704_101_SL_seq_8532
aggaagaagaggaggcgagg

SEQ ID NO: 8533 - DNA, 20 bp, Homo sapiens
  source 1..20: mol_type = genomic DNA; note = Gene: CD19; note = Location (start to end; relative to TSS): CD19_70_100; note = Orientation (relative to transcription): antisense; note = sgRNA Position: 28932047; note = Sequence Name: 56322-704_101_SL_seq_8533
ctcgggcctgacttccatgg

SEQ ID NO: 8534 - DNA, 20 bp, Homo sapiens
  source 1..20: mol_type = genomic DNA; note = Gene: CD19; note = Location (start to end; relative to TSS): CD19_33_63; note = Orientation (relative to transcription): antisense; note = sgRNA Position: 28932010; note = Sequence Name: 56322-704_101_SL_seq_8534
aagaagaggaggcgaggagg

SEQ ID NO: 8535 - DNA, 20 bp, Homo sapiens
  source 1..20: mol_type = genomic DNA; note = Gene: CD19; note = Location (start to end; relative to TSS): CD19_65_95; note = Orientation (relative to transcription): antisense; note = sgRNA Position: 28932042; note = Sequence Name: 56322-704_101_SL_seq_8535
gcctgacttccatgggggtg

SEQ ID NO: 8536 - DNA, 20 bp, Homo sapiens
  source 1..20: mol_type = genomic DNA; note = Gene: CD19; note = Location (start to end; relative to TSS): CD19_28_58; note = Orientation (relative to transcription): antisense; note = sgRNA Position: 28932005; note = Sequence Name: 56322-704_101_SL_seq_8536
gaggaggcgaggaggtggca

SEQ ID NO: 8537 - DNA, 20 bp, Homo sapiens
  source 1..20: mol_type = genomic DNA; note = Gene: CD19; note = Location (start to end; relative to TSS): CD19_59_89; note = Orientation (relative to transcription): antisense; note = sgRNA Position: 28932036; note = Sequence Name: 56322-704_101_SL_seq_8537
cttccatgggggtgaggaag

SEQ ID NO: 8538 - DNA, 20 bp, Homo sapiens
  source 1..20: mol_type = genomic DNA; note = Gene: CD19; note = Location (start to end; relative to TSS): CD19_25_55; note = Orientation (relative to transcription): antisense; note = sgRNA Position: 28932002; note = Sequence Name: 56322-704_101_SL_seq_8538
gaggcgaggaggtggcatgg

SEQ ID NO: 8539 - DNA, 20 bp, Homo sapiens
  source 1..20: mol_type = genomic DNA; note = Gene: CD19; note = Location (start to end; relative to TSS): CD19_55_85; note = Orientation (relative to transcription): sense; note = sgRNA Position: 28932052; note = Sequence Name: 56322-704_101_SL_seq_8539
tcctcacccccatggaagtc

SEQ ID NO: 8540 - DNA, 20 bp, Homo sapiens
  source 1..20: mol_type = genomic DNA; note = Gene: CD1A; note = Location (start to end; relative to TSS): CD1A_48_78; note = Orientation (relative to transcription): sense; note = sgRNA Position: 158254498; note = Sequence Name: 56322-704_101_SL_seq_8540
agggaaatgagagactgagt

SEQ ID NO: 8541 - DNA, 20 bp, Homo sapiens
  source 1..20: mol_type = genomic DNA; note = Gene: CD1A; note = Location (start to end; relative to TSS): CD1A_99_129; note = Orientation (relative to transcription): sense; note = sgRNA Position: 158254549; note = Sequence Name: 56322-704_101_SL_seq_8541
ttctttgttgcagtcagggg

SEQ ID NO: 8542 - DNA, 20 bp, Homo sapiens
  source 1..20: mol_type = genomic DNA; note = Gene: CD1A; note = Location (start to end; relative to TSS): CD1A_53_83; note = Orientation (relative to transcription): antisense; note = sgRNA Position: 158254483; note = Sequence Name: 56322-704_101_SL_seq_8542
ctcagtctctcatttccctc

SEQ ID NO: 8543 - DNA, 20 bp, Homo sapiens
  source 1..20: mol_type = genomic DNA; note = Gene: CD1A; note = Location (start to end; relative to TSS): CD1A_96_126; note = Orientation (relative to transcription): sense; note = sgRNA Position: 158254546; note = Sequence Name: 56322-704_101_SL_seq_8543
attttctttgttgcagtcag

SEQ ID NO: 8544 - DNA, 20 bp, Homo sapiens
  source 1..20: mol_type = genomic DNA; note = Gene: CD1A; note = Location (start to end; relative to TSS): CD1A_57_87; note = Orientation (relative to transcription): sense; note = sgRNA Position: 158254507; note = Sequence Name: 56322-704_101_SL_seq_8544
agagactgagtaggcatctc

SEQ ID NO: 8545 - DNA, 20 bp, Homo sapiens
  source 1..20: mol_type = genomic DNA; note = Gene: CD1A; note = Location (start to end; relative to TSS): CD1A_95_125; note = Orientation (relative to transcription): sense; note = sgRNA Position: 158254545; note = Sequence Name: 56322-704_101_SL_seq_8545
gattttctttgttgcagtca

SEQ ID NO: 8546 - DNA, 20 bp, Homo sapiens
  source 1..20: mol_type = genomic DNA; note = Gene: CD1A; note = Location (start to end; relative to TSS): CD1A_58_88; note = Orientation (relative to transcription): sense; note = sgRNA Position: 158254508; note = Sequence Name: 56322-704_101_SL_seq_8546
gagactgagtaggcatctca

SEQ ID NO: 8547 - DNA, 20 bp, Homo sapiens
  source 1..20: mol_type = genomic DNA; note = Gene: CD1A; note = Location (start to end; relative to TSS): CD1A_94_124; note = Orientation (relative to transcription): sense; note = sgRNA Position: 158254544; note = Sequence Name: 56322-704_101_SL_seq_8547
ggattttctttgttgcagtc

SEQ ID NO: 8548 - DNA, 20 bp, Homo sapiens
  source 1..20: mol_type = genomic DNA; note = Gene: CD1A; note = Location (start to end; relative to TSS): CD1A_28_58; note = Orientation (relative to transcription): sense; note = sgRNA Position: 158254478; note = Sequence Name: 56322-704_101_SL_seq_8548
gagaggagagtcagaaccag

SEQ ID NO: 8549 - DNA, 20 bp, Homo sapiens
  source 1..20: mol_type = genomic DNA; note = Gene: CD1A; note = Location (start to end; relative to TSS): CD1A_58_88; note = Orientation (relative to transcription): sense; note = sgRNA Position: 158254508; note = Sequence Name: 56322-704_101_SL_seq_8549
gagactgagtaggcatctca

SEQ ID NO: 8550 - DNA, 20 bp, Homo sapiens
  source 1..20: mol_type = genomic DNA; note = Gene: CD1B; note = Location (start to end; relative to TSS): CD1B_81_111; note = Orientation (relative to transcription): antisense; note = sgRNA Position: 158331446; note = Sequence Name: 56322-704_101_SL_seq_8550
tgggagatgcaacttcttac

SEQ ID NO: 8551 - DNA, 20 bp, Homo sapiens
  source 1..20: mol_type = genomic DNA; note = Gene: CD1B; note = Location (start to end; relative to TSS): CD1B_121_151; note = Orientation (relative to transcription): antisense; note = sgRNA Position: 158331406; note = Sequence Name: 56322-704_101_SL_seq_8551
agaacagctaacagttgaaa

SEQ ID NO: 8552 - DNA, 20 bp, Homo sapiens
  source 1..20: mol_type = genomic DNA; note = Gene: CD1B; note = Location (start to end; relative to TSS): CD1B_10_40; note = Orientation (relative to transcription): sense; note = sgRNA Position: 158331497; note = Sequence Name: 56322-704_101_SL_seq_8552
gaagtcactacagggtactg

SEQ ID NO: 8553 - DNA, 20 bp, Homo sapiens
  source 1..20: mol_type = genomic DNA; note = Gene: CD1B; note = Location (start to end; relative to TSS): CD1B_101_131; note = Orientation (relative to transcription): antisense; note = sgRNA Position: 158331426; note = Sequence Name: 56322-704_101_SL_seq_8553
tggcagcagcagcatttcac

SEQ ID NO: 8554 - DNA, 20 bp, Homo sapiens
  source 1..20: mol_type = genomic DNA; note = Gene: CD1B; note = Location (start to end; relative to TSS): CD1B_2_32; note = Orientation (relative to transcription): sense; note = sgRNA Position: 158331505; note = Sequence Name: 56322-704_101_SL_seq_8554
agagagaagaagtcactaca

SEQ ID NO: 8555 - DNA, 20 bp, Homo sapiens
  source 1..20: mol_type = genomic DNA; note = Gene: CD1B; note = Location (start to end; relative to TSS): CD1B_100_130; note = Orientation (relative to transcription): antisense; note = sgRNA Position: 158331427; note = Sequence Name: 56322-704_101_SL_seq_8555
ggcagcagcagcatttcact

SEQ ID NO: 8556 - DNA, 20 bp, Homo sapiens
  source 1..20: mol_type = genomic DNA; note = Gene: CD1B; note = Location (start to end; relative to TSS): CD1B_1_31; note = Orientation (relative to transcription): sense; note = sgRNA Position: 158331506; note = Sequence Name: 56322-704_101_SL_seq_8556
aagagagaagaagtcactac

SEQ ID NO: 8557 - DNA, 20 bp, Homo sapiens
  source 1..20: mol_type = genomic DNA; note = Gene: CD1B; note = Location (start to end; relative to TSS): CD1B_81_111; note = Orientation (relative to transcription): antisense; note = sgRNA Position: 158331446; note = Sequence Name: 56322-704_101_SL_seq_8557
tgggagatgcaacttcttac

SEQ ID NO: 8558 - DNA, 20 bp, Homo sapiens
  source 1..20: mol_type = genomic DNA; note = Gene: CD1B; note = Location (start to end; relative to TSS): CD1B_-22_8; note = Orientation (relative to transcription): sense; note = sgRNA Position: 158331529; note = Sequence Name: 56322-704_101_SL_seq_8558
tgaggaagagatttggcagt

SEQ ID NO: 8559 - DNA, 20 bp, Homo sapiens
  source 1..20: mol_type = genomic DNA; note = Gene: CD1B; note = Location (start to end; relative to TSS): CD1B_10_40; note = Orientation (relative to transcription): sense; note = sgRNA Position: 158331497; note = Sequence Name: 56322-704_101_SL_seq_8559
gaagtcactacagggtactg

SEQ ID NO: 8560 - DNA, 20 bp, Homo sapiens
  source 1..20: mol_type = genomic DNA; note = Gene: CD1C; note = Location (start to end; relative to TSS): CD1C_20_50; note = Orientation (relative to transcription): sense; note = sgRNA Position: 158289969; note = Sequence Name: 56322-704_101_SL_seq_8560
tggggaagattgttggtaga

SEQ ID NO: 8561 - DNA, 20 bp, Homo sapiens
  source 1..20: mol_type = genomic DNA; note = Gene: CD1C; note = Location (start to end; relative to TSS): CD1C_180_210; note = Orientation (relative to transcription): antisense; note = sgRNA Position: 158290109; note = Sequence Name: 56322-704_101_SL_seq_8561
cgtctgcattgtcaccacct

SEQ ID NO: 8562 - DNA, 20 bp, Homo sapiens
  source 1..20: mol_type = genomic DNA; note = Gene: CD1C; note = Location (start to end; relative to TSS): CD1C_35_65; note = Orientation (relative to transcription): sense; note = sgRNA Position: 158289984; note = Sequence Name: 56322-704_101_SL_seq_8562
gtagaaggaagtcagaatat

SEQ ID NO: 8563 - DNA, 20 bp, Homo sapiens
  source 1..20: mol_type = genomic DNA; note = Gene: CD1C; note = Location (start to end; relative to TSS): CD1C_157_187; note = Orientation (relative to transcription): sense; note = sgRNA Position: 158290106; note = Sequence Name: 56322-704_101_SL_seq_8563
ctagctcttcttctcccagg

SEQ ID NO: 8564 - DNA, 20 bp, Homo sapiens
  source 1..20: mol_type = genomic DNA; note = Gene: CD1C; note = Location (start to end; relative to TSS): CD1C_43_73; note = Orientation (relative to transcription): sense; note = sgRNA Position: 158289992; note = Sequence Name: 56322-704_101_SL_seq_8564
aagtcagaatataggtacag

SEQ ID NO: 8565 - DNA, 20 bp, Homo sapiens
  source 1..20: mol_type = genomic DNA; note = Gene: CD1C; note = Location (start to end; relative to TSS): CD1C_154_184; note = Orientation (relative to transcription): sense; note = sgRNA Position: 158290103; note = Sequence Name: 56322-704_101_SL_seq_8565
ctgctagctcttcttctccc

SEQ ID NO: 8566 - DNA, 20 bp, Homo sapiens
  source 1..20: mol_type = genomic DNA; note = Gene: CD1C; note = Location (start to end; relative to TSS): CD1C_13_43; note = Orientation (relative to transcription): sense; note = sgRNA Position: 158289962; note = Sequence Name: 56322-704_101_SL_seq_8566
cggctgatggggaagattgt

SEQ ID NO: 8567 - DNA, 20 bp, Homo sapiens
  source 1..20: mol_type = genomic DNA; note = Gene: CD1C; note = Location (start to end; relative to TSS): CD1C_43_73; note = Orientation (relative to transcription): sense; note = sgRNA Position: 158289992; note = Sequence Name: 56322-704_101_SL_seq_8567
aagtcagaatataggtacag

SEQ ID NO: 8568 - DNA, 20 bp, Homo sapiens
  source 1..20: mol_type = genomic DNA; note = Gene: CD1C; note = Location (start to end; relative to TSS): CD1C_2_32; note = Orientation (relative to transcription): sense; note = sgRNA Position: 158289951; note = Sequence Name: 56322-704_101_SL_seq_8568
gttgctgtcagcggctgatg

SEQ ID NO: 8569 - DNA, 20 bp, Homo sapiens
  source 1..20: mol_type = genomic DNA; note = Gene: CD1C; note = Location (start to end; relative to TSS): CD1C_35_65; note = Orientation (relative to transcription): sense; note = sgRNA Position: 158289984; note = Sequence Name: 56322-704_101_SL_seq_8569
gtagaaggaagtcagaatat

SEQ ID NO: 8570 - DNA, 20 bp, Homo sapiens
  source 1..20: mol_type = genomic DNA; note = Gene: CD1D; note = Location (start to end; relative to TSS): CD1D_41_71; note = Orientation (relative to transcription): sense; note = sgRNA Position: 158180962; note = Sequence Name: 56322-704_101_SL_seq_8570
cgccggcaagcccagcgagg

SEQ ID NO: 8571 - DNA, 20 bp, Homo sapiens
  source 1..20: mol_type = genomic DNA; note = Gene: CD1D; note = Location (start to end; relative to TSS): CD1D_83_113; note = Orientation (relative to transcription): sense; note = sgRNA Position: 158181004; note = Sequence Name: 56322-704_101_SL_seq_8571
gggaattggctggcacccag

SEQ ID NO: 8572 - DNA, 20 bp, Homo sapiens
  source 1..20: mol_type = genomic DNA; note = Gene: CD1D; note = Location (start to end; relative to TSS): CD1D_38_68; note = Orientation (relative to transcription): sense; note = sgRNA Position: 158180959; note = Sequence Name: 56322-704_101_SL_seq_8572
aaccgccggcaagcccagcg

SEQ ID NO: 8573 - DNA, 20 bp, Homo sapiens
  source 1..20: mol_type = genomic DNA; note = Gene: CD1D; note = Location (start to end; relative to TSS): CD1D_77_107; note = Orientation (relative to transcription): antisense; note = sgRNA Position: 158180978; note = Sequence Name: 56322-704_101_SL_seq_8573
caattcccaagcccagaccc

SEQ ID NO: 8574 - DNA, 20 bp, Homo sapiens
  source 1..20: mol_type = genomic DNA; note = Gene: CD1D; note = Location (start to end; relative to TSS): CD1D_29_59; note = Orientation (relative to transcription): antisense; note = sgRNA Position: 158180930; note = Sequence Name: 56322-704_101_SL_seq_8574
cggtttgctgcttctgccga

SEQ ID NO: 8575 - DNA, 20 bp, Homo sapiens
  source 1..20: mol_type = genomic DNA; note = Gene: CD1D; note = Location (start to end; relative to TSS): CD1D_73_103; note = Orientation (relative to transcription): sense; note = sgRNA Position: 158180994; note = Sequence Name: 56322-704_101_SL_seq_8575
gtctgggcttgggaattggc

SEQ ID NO: 8576 - DNA, 20 bp, Homo sapiens
  source 1..20: mol_type = genomic DNA; note = Gene: CD1D; note = Location (start to end; relative to TSS): CD1D_28_58; note = Orientation (relative to transcription): antisense; note = sgRNA Position: 158180929; note = Sequence Name: 56322-704_101_SL_seq_8576
ggtttgctgcttctgccgaa

SEQ ID NO: 8577 - DNA, 20 bp, Homo sapiens
  source 1..20: mol_type = genomic DNA; note = Gene: CD1D; note = Location (start to end; relative to TSS): CD1D_60_90; note = Orientation (relative to transcription): antisense; note = sgRNA Position: 158180961; note = Sequence Name: 56322-704_101_SL_seq_8577
ccccggcagccctcctcgct

SEQ ID NO: 8578 - DNA, 20 bp, Homo sapiens
  source 1..20: mol_type = genomic DNA; note = Gene: CD1D; note = Location (start to end; relative to TSS): CD1D_24_54; note = Orientation (relative to transcription): sense; note = sgRNA Position: 158180945; note = Sequence Name: 56322-704_101_SL_seq_8578
cggcagaagcagcaaaccgc

SEQ ID NO: 8579 - DNA, 20 bp, Homo sapiens
  source 1..20: mol_type = genomic DNA; note = Gene: CD1D; note = Location (start to end; relative to TSS): CD1D_57_87; note = Orientation (relative to transcription): sense; note = sgRNA Position: 158180978; note = Sequence Name: 56322-704_101_SL_seq_8579
gaggagggctgccggggtct

SEQ ID NO: 8580 - DNA, 20 bp, Homo sapiens
  source 1..20: mol_type = genomic DNA; note = Gene: CD1E; note = Location (start to end; relative to TSS): CD1E_65_95; note = Orientation (relative to transcription): antisense; note = sgRNA Position: 158353965; note = Sequence Name: 56322-704_101_SL_seq_8580
ctgttaaaggagggattcct

SEQ ID NO: 8581 - DNA, 20 bp, Homo sapiens
  source 1..20: mol_type = genomic DNA; note = Gene: CD1E; note = Location (start to end; relative to TSS): CD1E_103_133; note = Orientation (relative to transcription): antisense; note = sgRNA Position: 158354003; note = Sequence Name: 56322-704_101_SL_seq_8581
gaccctcgaagaggaggaac

SEQ ID NO: 8582 - DNA, 20 bp, Homo sapiens
  source 1..20: mol_type = genomic DNA; note = Gene: CD1E; note = Location (start to end; relative to TSS): CD1E_61_91; note = Orientation (relative to transcription): antisense; note = sgRNA Position: 158353961; note = Sequence Name: 56322-704_101_SL_seq_8582
taaaggagggattccttggc

SEQ ID NO: 8583 - DNA, 20 bp, Homo sapiens
  source 1..20: mol_type = genomic DNA; note = Gene: CD1E; note = Location (start to end; relative to TSS): CD1E_91_121; note = Orientation (relative to transcription): sense; note = sgRNA Position: 158354011; note = Sequence Name: 56322-704_101_SL_seq_8583
gctcctgttcctcctcttcg

SEQ ID NO: 8584 - DNA, 20 bp, Homo sapiens
  source 1..20: mol_type = genomic DNA; note = Gene: CD1E; note = Location (start to end; relative to TSS): CD1E_39_69; note = Orientation (relative to transcription): sense; note = sgRNA Position: 158353959; note = Sequence Name: 56322-704_101_SL_seq_8584
ttagggcaggtgtcctgcca

SEQ ID NO: 8585 - DNA, 20 bp, Homo sapiens
  source 1..20: mol_type = genomic DNA; note = Gene: CD1E; note = Location (start to end; relative to TSS): CD1E_74_104; note = Orientation (relative to transcription): antisense; note = sgRNA Position: 158353974; note = Sequence Name: 56322-704_101_SL_seq_8585
attgaagctctgttaaagga

SEQ ID NO: 8586 - DNA, 20 bp, Homo sapiens
  source 1..20: mol_type = genomic DNA; note = Gene: CD1E; note = Location (start to end; relative to TSS): CD1E_22_52; note = Orientation (relative to transcription): sense; note = sgRNA Position: 158353942; note = Sequence Name: 56322-704_101_SL_seq_8586
tactgatatctgaattatta

SEQ ID NO: 8587 - DNA, 20 bp, Homo sapiens
  source 1..20: mol_type = genomic DNA; note = Gene: CD1E; note = Location (start to end; relative to TSS): CD1E_65_95; note = Orientation (relative to transcription): antisense; note = sgRNA Position: 158353965; note = Sequence Name: 56322-704_101_SL_seq_8587
ctgttaaaggagggattcct

SEQ ID NO: 8588 - DNA, 20 bp, Homo sapiens
  source 1..20: mol_type = genomic DNA; note = Gene: CD1E; note = Location (start to end; relative to TSS): CD1E_26_56; note = Orientation (relative to transcription): sense; note = sgRNA Position: 158353946; note = Sequence Name: 56322-704_101_SL_seq_8588
gatatctgaattattagggc

SEQ ID NO: 8589 - DNA, 20 bp, Homo sapiens
  source 1..20: mol_type = genomic DNA; note = Gene: CD1E; note = Location (start to end; relative to TSS): CD1E_61_91; note = Orientation (relative to transcription): antisense; note = sgRNA Position: 158353961; note = Sequence Name: 56322-704_101_SL_seq_8589
taaaggagggattccttggc

SEQ ID NO: 8590 - DNA, 20 bp, Homo sapiens
  source 1..20: mol_type = genomic DNA; note = Gene: CD2; note = Location (start to end; relative to TSS): CD2_51_81; note = Orientation (relative to transcription): antisense; note = sgRNA Position: 116754487; note = Sequence Name: 56322-704_101_SL_seq_8590
ggaaagctcatcttaggggt

SEQ ID NO: 8591 - DNA, 20 bp, Homo sapiens
  source 1..20: mol_type = genomic DNA; note = Gene: CD2; note = Location (start to end; relative to TSS): CD2_118_148; note = Orientation (relative to transcription): antisense; note = sgRNA Position: 116754554; note = Sequence Name: 56322-704_101_SL_seq_8591
ttgactcttatgcttacctt

SEQ ID NO: 8592 - DNA, 20 bp, Homo sapiens
  source 1..20: mol_type = genomic DNA; note = Gene: CD2; note = Location (start to end; relative to TSS): CD2_55_85; note = Orientation (relative to transcription): antisense; note = sgRNA Position: 116754491; note = Sequence Name: 56322-704_101_SL_seq_8592
acatggaaagctcatcttag

SEQ ID NO: 8593 - DNA, 20 bp, Homo sapiens
  source 1..20: mol_type = genomic DNA; note = Gene: CD2; note = Location (start to end; relative to TSS): CD2_93_123; note = Orientation (relative to transcription): sense; note = sgRNA Position: 116754549; note = Sequence Name: 56322-704_101_SL_seq_8593
attttcaatgtttcttccaa

SEQ ID NO: 8594 - DNA, 20 bp, Homo sapiens
  source 1..20: mol_type = genomic DNA; note = Gene: CD2; note = Location (start to end; relative to TSS): CD2_56_86; note = Orientation (relative to transcription): antisense; note = sgRNA Position: 116754492; note = Sequence Name: 56322-704_101_SL_seq_8594
tacatggaaagctcatctta

SEQ ID NO: 8595 - DNA, 20 bp, Homo sapiens
  source 1..20: mol_type = genomic DNA; note = Gene: CD2; note = Location (start to end; relative to TSS): CD2_88_118; note = Orientation (relative to transcription): antisense; note = sgRNA Position: 116754524; note = Sequence Name: 56322-704_101_SL_seq_8595
attgaaaatcagaaggaagc

SEQ ID NO: 8596 - DNA, 20 bp, Homo sapiens
  source 1..20: mol_type = genomic DNA; note = Gene: CD2; note = Location (start to end; relative to TSS): CD2_16_46; note = Orientation (relative to transcription): sense; note = sgRNA Position: 116754472; note = Sequence Name: 56322-704_101_SL_seq_8596
gaagagctcagaatcaaaag

SEQ ID NO: 8597 - DNA, 20 bp, Homo sapiens
  source 1..20: mol_type = genomic DNA; note = Gene: CD2; note = Location (start to end; relative to TSS): CD2_55_85; note = Orientation (relative to transcription): antisense; note = sgRNA Position: 116754491; note = Sequence Name: 56322-704_101_SL_seq_8597
acatggaaagctcatcttag

SEQ ID NO: 8598 - DNA, 20 bp, Homo sapiens
  source 1..20: mol_type = genomic DNA; note = Gene: CD2; note = Location (start to end; relative to TSS): CD2_15_45; note = Orientation (relative to transcription): antisense; note = sgRNA Position: 116754451; note = Sequence Name: 56322-704_101_SL_seq_8598
ttctgagctcttcatgcaaa

SEQ ID NO: 8599 - DNA, 20 bp, Homo sapiens
  source 1..20: mol_type = genomic DNA; note = Gene: CD2; note = Location (start to end; relative to TSS): CD2_51_81; note = Orientation (relative to transcription): antisense; note = sgRNA Position: 116754487; note = Sequence Name: 56322-704_101_SL_seq_8599
ggaaagctcatcttaggggt

SEQ ID NO: 8600 - DNA, 20 bp, Homo sapiens
  source 1..20: mol_type = genomic DNA; note = Gene: CD200; note = Location (start to end; relative to TSS): CD200_31_61; note = Orientation (relative to transcription): antisense; note = sgRNA Position: 112333193; note = Sequence Name: 56322-704_101_SL_seq_8600
tgctcctggaggcgcgcgcg

SEQ ID NO: 8601 - DNA, 20 bp, Homo sapiens
  source 1..20: mol_type = genomic DNA; note = Gene: CD200; note = Location (start to end; relative to TSS): CD200_73_103; note = Orientation (relative to transcription): sense; note = sgRNA Position: 112333255; note = Sequence Name: 56322-704_101_SL_seq_8601
gggcttgggaaggagggcgc

SEQ ID NO: 8602 - DNA, 20 bp, Homo sapiens
  source 1..20: mol_type = genomic DNA; note = Gene: CD200; note = Location (start to end; relative to TSS): CD200_29_59; note = Orientation (relative to transcription): sense; note = sgRNA Position: 112333211; note = Sequence Name: 56322-704_101_SL_seq_8602
cgcgcctccaggagcaagga

SEQ ID NO: 8603 - DNA, 20 bp, Homo sapiens
  source 1..20: mol_type = genomic DNA; note = Gene: CD200; note = Location (start to end; relative to TSS): CD200_67_97; note = Orientation (relative to transcription): sense; note = sgRNA Position: 112333249; note = Sequence Name: 56322-704_101_SL_seq_8603
gggccggggcttgggaagga

SEQ ID NO: 8604 - DNA, 20 bp, Homo sapiens
  source 1..20: mol_type = genomic DNA; note = Gene: CD200; note = Location (start to end; relative to TSS): CD200_28_58; note = Orientation (relative to transcription): antisense; note = sgRNA Position: 112333190; note = Sequence Name: 56322-704_101_SL_seq_8604
tcctggaggcgcgcgcgagg

SEQ ID NO: 8605 - DNA, 20 bp, Homo sapiens
  source 1..20: mol_type = genomic DNA; note = Gene: CD200; note = Location (start to end; relative to TSS): CD200_66_96; note = Orientation (relative to transcription): sense; note = sgRNA Position: 112333248; note = Sequence Name: 56322-704_101_SL_seq_8605
ggggccggggcttgggaagg

SEQ ID NO: 8606 - DNA, 20 bp, Homo sapiens
  source 1..20: mol_type = genomic DNA; note = Gene: CD200; note = Location (start to end; relative to TSS): CD200_25_55; note = Orientation (relative to transcription): sense; note = sgRNA Position: 112333207; note = Sequence Name: 56322-704_101_SL_seq_8606
cgcgcgcgcctccaggagca

SEQ ID NO: 8607 - DNA, 20 bp, Homo sapiens
  source 1..20: mol_type = genomic DNA; note = Gene: CD200; note = Location (start to end; relative to TSS): CD200_63_93; note = Orientation (relative to transcription): sense; note = sgRNA Position: 112333245; note = Sequence Name: 56322-704_101_SL_seq_8607
agcggggccggggcttggga

SEQ ID NO: 8608 - DNA, 20 bp, Homo sapiens
  source 1..20: mol_type = genomic DNA; note = Gene: CD200; note = Location (start to end; relative to TSS): CD200_18_48; note = Orientation (relative to transcription): antisense; note = sgRNA Position: 112333180; note = Sequence Name: 56322-704_101_SL_seq_8608
gcgcgcgaggtggctgactg

SEQ ID NO: 8609 - DNA, 20 bp, Homo sapiens
  source 1..20: mol_type = genomic DNA; note = Gene: CD200; note = Location (start to end; relative to TSS): CD200_52_82; note = Orientation (relative to transcription): sense; note = sgRNA Position: 112333234; note = Sequence Name: 56322-704_101_SL_seq_8609
agaggctggtgagcggggcc

SEQ ID NO: 8610 - DNA, 20 bp, Homo sapiens
  source 1..20: mol_type = genomic DNA; note = Gene: CD200R1; note = Location (start to end; relative to TSS): CD200R1_52_82; note = Orientation (relative to transcription): antisense; note = sgRNA Position: 112975047; note = Sequence Name: 56322-704_101_SL_seq_8610
gtttagcctggttagtaact

SEQ ID NO: 8611 - DNA, 20 bp, Homo sapiens
  source 1..20: mol_type = genomic DNA; note = Gene: CD200R1; note = Location (start to end; relative to TSS): CD200R1_99_129; note = Orientation (relative to transcription): sense; note = sgRNA Position: 112974980; note = Sequence Name: 56322-704_101_SL_seq_8611
ggagtgccccactgttgatg

SEQ ID NO: 8612 - DNA, 20 bp, Homo sapiens
  source 1..20: mol_type = genomic DNA; note = Gene: CD200R1; note = Location (start to end; relative to TSS): CD200R1_59_89; note = Orientation (relative to transcription): sense; note = sgRNA Position: 112975020; note = Sequence Name: 56322-704_101_SL_seq_8612
gctaaaccacatagacgtga

SEQ ID NO: 8613 - DNA, 20 bp, Homo sapiens
  source 1..20: mol_type = genomic DNA; note = Gene: CD200R1; note = Location (start to end; relative to TSS): CD200R1_98_128; note = Orientation (relative to transcription): sense; note = sgRNA Position: 112974981; note = Sequence Name: 56322-704_101_SL_seq_8613
gggagtgccccactgttgat

SEQ ID NO: 8614 - DNA, 20 bp, Homo sapiens
  source 1..20: mol_type = genomic DNA; note = Gene: CD200R1; note = Location (start to end; relative to TSS): CD200R1_63_93; note = Orientation (relative to transcription): sense; note = sgRNA Position: 112975016; note = Sequence Name: 56322-704_101_SL_seq_8614
aaccacatagacgtgaagga

SEQ ID NO: 8615 - DNA, 20 bp, Homo sapiens
  source 1..20: mol_type = genomic DNA; note = Gene: CD200R1; note = Location (start to end; relative to TSS): CD200R1_97_127; note = Orientation (relative to transcription): sense; note = sgRNA Position: 112974982; note = Sequence Name: 56322-704_101_SL_seq_8615
agggagtgccccactgttga

SEQ ID NO: 8616 - DNA, 20 bp, Homo sapiens
  source 1..20: mol_type = genomic DNA; note = Gene: CD200R1; note = Location (start to end; relative to TSS): CD200R1_37_67; note = Orientation (relative to transcription): sense; note = sgRNA Position: 112975042; note = Sequence Name: 56322-704_101_SL_seq_8616
gttcgtccaagttactaacc

SEQ ID NO: 8617 - DNA, 20 bp, Homo sapiens
  source 1..20: mol_type = genomic DNA; note = Gene: CD200R1; note = Location (start to end; relative to TSS): CD200R1_73_103; note = Orientation (relative to transcription): sense; note = sgRNA Position: 112975006; note = Sequence Name: 56322-704_101_SL_seq_8617
acgtgaaggaaggggctaga

SEQ ID NO: 8618 - DNA, 20 bp, Homo sapiens
  source 1..20: mol_type = genomic DNA; note = Gene: CD200R1; note = Location (start to end; relative to TSS): CD200R1_30_60; note = Orientation (relative to transcription): antisense; note = sgRNA Position: 112975069; note = Sequence Name: 56322-704_101_SL_seq_8618
gacgaacagaagcttttctc

SEQ ID NO: 8619 - DNA, 20 bp, Homo sapiens
  source 1..20: mol_type = genomic DNA; note = Gene: CD200R1; note = Location (start to end; relative to TSS): CD200R1_63_93; note = Orientation (relative to transcription): sense; note = sgRNA Position: 112975016; note = Sequence Name: 56322-704_101_SL_seq_8619
aaccacatagacgtgaagga

SEQ ID NO: 8620 - DNA, 20 bp, Homo sapiens
  source 1..20: mol_type = genomic DNA; note = Gene: CD200R1L; note = Location (start to end; relative to TSS): CD200R1L_50_80; note = Orientation (relative to transcription): antisense; note = sgRNA Position: 112846810; note = Sequence Name: 56322-704_101_SL_seq_8620
ggaaaactgggcgcatacac

SEQ ID NO: 8621 - DNA, 20 bp, Homo sapiens
  source 1..20: mol_type = genomic DNA; note = Gene: CD200R1L; note = Location (start to end; relative to TSS): CD200R1L_129_159; note = Orientation (relative to transcription): sense; note = sgRNA Position: 112846711; note = Sequence Name: 56322-704_101_SL_seq_8621
acgccagtcatattggatta

SEQ ID NO: 8622 - DNA, 20 bp, Homo sapiens
  source 1..20: mol_type = genomic DNA; note = Gene: CD200R1L; note = Location (start to end; relative to TSS): CD200R1L_62_92; note = Orientation (relative to transcription): antisense; note = sgRNA Position: 112846798; note = Sequence Name: 56322-704_101_SL_seq_8622
cttataaaaagaggaaaact

SEQ ID NO: 8623 - DNA, 20 bp, Homo sapiens
  source 1..20: mol_type = genomic DNA; note = Gene: CD200R1L; note = Location (start to end; relative to TSS): CD200R1L_128_158; note = Orientation (relative to transcription): sense; note = sgRNA Position: 112846712; note = Sequence Name: 56322-704_101_SL_seq_8623
gacgccagtcatattggatt

SEQ ID NO: 8624 - DNA, 20 bp, Homo sapiens
  source 1..20: mol_type = genomic DNA; note = Gene: CD200R1L; note = Location (start to end; relative to TSS): CD200R1L_71_101; note = Orientation (relative to transcription): antisense; note = sgRNA Position: 112846789; note = Sequence Name: 56322-704_101_SL_seq_8624
tatggtgtccttataaaaag

SEQ ID NO: 8625 - DNA, 20 bp, Homo sapiens
  source 1..20: mol_type = genomic DNA; note = Gene: CD200R1L; note = Location (start to end; relative to TSS): CD200R1L_122_152; note = Orientation (relative to transcription): sense; note = sgRNA Position: 112846718; note = Sequence Name: 56322-704_101_SL_seq_8625
accaaagacgccagtcatat

SEQ ID NO: 8626 - DNA, 20 bp, Homo sapiens
  source 1..20: mol_type = genomic DNA; note = Gene: CD200R1L; note = Location (start to end; relative to TSS): CD200R1L_28_58; note = Orientation (relative to transcription): antisense; note = sgRNA Position: 112846832; note = Sequence Name: 56322-704_101_SL_seq_8626
gaacaccatgtgaagataaa

SEQ ID NO: 8627 - DNA, 20 bp, Homo sapiens
  source 1..20: mol_type = genomic DNA; note = Gene: CD200R1L; note = Location (start to end; relative to TSS): CD200R1L_62_92; note = Orientation (relative to transcription): antisense; note = sgRNA Position: 112846798; note = Sequence Name: 56322-704_101_SL_seq_8627
cttataaaaagaggaaaact

SEQ ID NO: 8628 - DNA, 20 bp, Homo sapiens
  source 1..20: mol_type = genomic DNA; note = Gene: CD200R1L; note = Location (start to end; relative to TSS): CD200R1L_14_44; note = Orientation (relative to transcription): sense; note = sgRNA Position: 112846826; note = Sequence Name: 56322-704_101_SL_seq_8628
ctctgccttttatcttcaca

SEQ ID NO: 8629 - DNA, 20 bp, Homo sapiens
  source 1..20: mol_type = genomic DNA; note = Gene: CD200R1L; note = Location (start to end; relative to TSS): CD200R1L_50_80; note = Orientation (relative to transcription): antisense; note = sgRNA Position: 112846810; note = Sequence Name: 56322-704_101_SL_seq_8629
ggaaaactgggcgcatacac

SEQ ID NO: 8630 - DNA, 20 bp, Homo sapiens
  source 1..20: mol_type = genomic DNA; note = Gene: CD22; note = Location (start to end; relative to TSS): CD22_62_92; note = Orientation (relative to transcription): sense; note = sgRNA Position: 35329275; note = Sequence Name: 56322-704_101_SL_seq_8630
attcaacaagcaagttatta

SEQ ID NO: 8631 - DNA, 20 bp, Homo sapiens
  source 1..20: mol_type = genomic DNA; note = Gene: CD22; note = Location (start to end; relative to TSS): CD22_118_148; note = Orientation (relative to transcription): antisense; note = sgRNA Position: 35329311; note = Sequence Name: 56322-704_101_SL_seq_8631
actgtgttcccagctctggg

SEQ ID NO: 8632 - DNA, 20 bp, Homo sapiens
  source 1..20: mol_type = genomic DNA; note = Gene: CD22; note = Location (start to end; relative to TSS): CD22_76_106; note = Orientation (relative to transcription): sense; note = sgRNA Position: 35329289; note = Sequence Name: 56322-704_101_SL_seq_8632
ttattacggaacagcagtta

SEQ ID NO: 8633 - DNA, 20 bp, Homo sapiens
  source 1..20: mol_type = genomic DNA; note = Gene: CD22; note = Location (start to end; relative to TSS): CD22_109_139; note = Orientation (relative to transcription): antisense; note = sgRNA Position: 35329302; note = Sequence Name: 56322-704_101_SL_seq_8633
ccagctctgggaggtatgcc

SEQ ID NO: 8634 - DNA, 20 bp, Homo sapiens
  source 1..20: mol_type = genomic DNA; note = Gene: CD22; note = Location (start to end; relative to TSS): CD22_8_38; note = Orientation (relative to transcription): antisense; note = sgRNA Position: 35329201; note = Sequence Name: 56322-704_101_SL_seq_8634
tcttccctcttcagggaccc

SEQ ID NO: 8635 - DNA, 20 bp, Homo sapiens
  source 1..20: mol_type = genomic DNA; note = Gene: CD22; note = Location (start to end; relative to TSS): CD22_77_107; note = Orientation (relative to transcription): sense; note = sgRNA Position: 35329290; note = Sequence Name: 56322-704_101_SL_seq_8635
tattacggaacagcagttat

SEQ ID NO: 8636 - DNA, 20 bp, Homo sapiens
  source 1..20: mol_type = genomic DNA; note = Gene: CD22; note = Location (start to end; relative to TSS): CD22_-5_25; note = Orientation (relative to transcription): sense; note = sgRNA Position: 35329208; note = Sequence Name: 56322-704_101_SL_seq_8636
gctgccagggtccctgaaga

SEQ ID NO: 8637 - DNA, 20 bp, Homo sapiens
  source 1..20: mol_type = genomic DNA; note = Gene: CD22; note = Location (start to end; relative to TSS): CD22_76_106; note = Orientation (relative to transcription): sense; note = sgRNA Position: 35329289; note = Sequence Name: 56322-704_101_SL_seq_8637
ttattacggaacagcagtta

SEQ ID NO: 8638 - DNA, 20 bp, Homo sapiens
  source 1..20: mol_type = genomic DNA; note = Gene: CD22; note = Location (start to end; relative to TSS): CD22_-6_24; note = Orientation (relative to transcription): sense; note = sgRNA Position: 35329207; note = Sequence Name: 56322-704_101_SL_seq_8638
tgctgccagggtccctgaag

SEQ ID NO: 8639 - DNA, 20 bp, Homo sapiens
  source 1..20: mol_type = genomic DNA; note = Gene: CD22; note = Location (start to end; relative to TSS): CD22_62_92; note = Orientation (relative to transcription): sense; note = sgRNA Position: 35329275; note = Sequence Name: 56322-704_101_SL_seq_8639
attcaacaagcaagttatta

SEQ ID NO: 8640 - DNA, 20 bp, Homo sapiens
  source 1..20: mol_type = genomic DNA; note = Gene: CD226; note = Location (start to end; relative to TSS): CD226_79_109; note = Orientation (relative to transcription): antisense; note = sgRNA Position: 69947790; note = Sequence Name: 56322-704_101_SL_seq_8640
acttacattctatgtggagg

SEQ ID NO: 8641 - DNA, 20 bp, Homo sapiens
  source 1..20: mol_type = genomic DNA; note = Gene: CD226; note = Location (start to end; relative to TSS): CD226_142_172; note = Orientation (relative to transcription): antisense; note = sgRNA Position: 69947727; note = Sequence Name: 56322-704_101_SL_seq_8641
taactcagctgtaggcaatg

SEQ ID NO: 8642 - DNA, 20 bp, Homo sapiens
  source 1..20: mol_type = genomic DNA; note = Gene: CD226; note = Location (start to end; relative to TSS): CD226_80_110; note = Orientation (relative to transcription): sense; note = sgRNA Position: 69947769; note = Sequence Name: 56322-704_101_SL_seq_8642
atagaatgtaagttctatca

SEQ ID NO: 8643 - DNA, 20 bp, Homo sapiens
  source 1..20: mol_type = genomic DNA; note = Gene: CD226; note = Location (start to end; relative to TSS): CD226_135_165; note = Orientation (relative to transcription): sense; note = sgRNA Position: 69947714; note = Sequence Name: 56322-704_101_SL_seq_8643
tcattgcctacagctgagtt

SEQ ID NO: 8644 - DNA, 20 bp, Homo sapiens
  source 1..20: mol_type = genomic DNA; note = Gene: CD226; note = Location (start to end; relative to TSS): CD226_19_49; note = Orientation (relative to transcription): antisense; note = sgRNA Position: 69947850; note = Sequence Name: 56322-704_101_SL_seq_8644
agtgaaaggtggtgcatgca

SEQ ID NO: 8645 - DNA, 20 bp, Homo sapiens
  source 1..20: mol_type = genomic DNA; note = Gene: CD226; note = Location (start to end; relative to TSS): CD226_82_112; note = Orientation (relative to transcription): antisense; note = sgRNA Position: 69947787; note = Sequence Name: 56322-704_101_SL_seq_8645
agaacttacattctatgtgg

SEQ ID NO: 8646 - DNA, 20 bp, Homo sapiens
  source 1..20: mol_type = genomic DNA; note = Gene: CD226; note = Location (start to end; relative to TSS): CD226_30_60; note = Orientation (relative to transcription): antisense; note = sgRNA Position: 69947839; note = Sequence Name: 56322-704_101_SL_seq_8646
tataaataataagtgaaagg

SEQ ID NO: 8647 - DNA, 20 bp, Homo sapiens
  source 1..20: mol_type = genomic DNA; note = Gene: CD226; note = Location (start to end; relative to TSS): CD226_80_110; note = Orientation (relative to transcription): sense; note = sgRNA Position: 69947769; note = Sequence Name: 56322-704_101_SL_seq_8647
atagaatgtaagttctatca

SEQ ID NO: 8648 - DNA, 20 bp, Homo sapiens
  source 1..20: mol_type = genomic DNA; note = Gene: CD226; note = Location (start to end; relative to TSS): CD226_33_63; note = Orientation (relative to transcription): antisense; note = sgRNA Position: 69947836; note = Sequence Name: 56322-704_101_SL_seq_8648
aaatataaataataagtgaa

SEQ ID NO: 8649 - DNA, 20 bp, Homo sapiens
  source 1..20: mol_type = genomic DNA; note = Gene: CD226; note = Location (start to end; relative to TSS): CD226_79_109; note = Orientation (relative to transcription): antisense; note = sgRNA Position: 69947790; note = Sequence Name: 56322-704_101_SL_seq_8649
acttacattctatgtggagg

SEQ ID NO: 8650 - DNA, 20 bp, Homo sapiens
  source 1..20: mol_type = genomic DNA; note = Gene: CD244; note = Location (start to end; relative to TSS): CD244_45_75; note = Orientation (relative to transcription): sense; note = sgRNA Position: 160862818; note = Sequence Name: 56322-704_101_SL_seq_8650
gcgttaacagcctctaattg

SEQ ID NO: 8651 - DNA, 20 bp, Homo sapiens
  source 1..20: mol_type = genomic DNA; note = Gene: CD244; note = Location (start to end; relative to TSS): CD244_106_136; note = Orientation (relative to transcription): sense; note = sgRNA Position: 160862757; note = Sequence Name: 56322-704_101_SL_seq_8651
ccatcgtcctcttgctgact

SEQ ID NO: 8652 - DNA, 20 bp, Homo sapiens
  source 1..20: mol_type = genomic DNA; note = Gene: CD244; note = Location (start to end; relative to TSS): CD244_54_84; note = Orientation (relative to transcription): sense; note = sgRNA Position: 160862809; note = Sequence Name: 56322-704_101_SL_seq_8652
gcctctaattgaggaaactg

SEQ ID NO: 8653 - DNA, 20 bp, Homo sapiens
  source 1..20: mol_type = genomic DNA; note = Gene: CD244; note = Location (start to end; relative to TSS): CD244_105_135; note = Orientation (relative to transcription): sense; note = sgRNA Position: 160862758; note = Sequence Name: 56322-704_101_SL_seq_8653
cccatcgtcctcttgctgac

SEQ ID NO: 8654 - DNA, 20 bp, Homo sapiens
  source 1..20: mol_type = genomic DNA; note = Gene: CD244; note = Location (start to end; relative to TSS): CD244_35_65; note = Orientation (relative to transcription): antisense; note = sgRNA Position: 160862848; note = Sequence Name: 56322-704_101_SL_seq_8654
acgcctgctgtgagctgaca

SEQ ID NO: 8655 - DNA, 20 bp, Homo sapiens
  source 1..20: mol_type = genomic DNA; note = Gene: CD244; note = Location (start to end; relative to TSS): CD244_71_101; note = Orientation (relative to transcription): sense; note = sgRNA Position: 160862792; note = Sequence Name: 56322-704_101_SL_seq_8655
ctgtggctggacaggttgca

SEQ ID NO: 8656 - DNA, 20 bp, Homo sapiens
  source 1..20: mol_type = genomic DNA; note = Gene: CD244; note = Location (start to end; relative to TSS): CD244_23_53; note = Orientation (relative to transcription): sense; note = sgRNA Position: 160862840; note = Sequence Name: 56322-704_101_SL_seq_8656
tggccttgtcagctcacagc

SEQ ID NO: 8657 - DNA, 20 bp, Homo sapiens
  source 1..20: mol_type = genomic DNA; note = Gene: CD244; note = Location (start to end; relative to TSS): CD244_54_84; note = Orientation (relative to transcription): sense; note = sgRNA Position: 160862809; note = Sequence Name: 56322-704_101_SL_seq_8657
gcctctaattgaggaaactg

SEQ ID NO: 8658 - DNA, 20 bp, Homo sapiens
  source 1..20: mol_type = genomic DNA; note = Gene: CD244; note = Location (start to end; relative to TSS): CD244_10_40; note = Orientation (relative to transcription): antisense; note = sgRNA Position: 160862873; note = Sequence Name: 56322-704_101_SL_seq_8658
actgagaaagccccagcgcc

SEQ ID NO: 8659 - DNA, 20 bp, Homo sapiens
  source 1..20: mol_type = genomic DNA; note = Gene: CD244; note = Location (start to end; relative to TSS): CD244_45_75; note = Orientation (relative to transcription): sense; note = sgRNA Position: 160862818; note = Sequence Name: 56322-704_101_SL_seq_8659
gcgttaacagcctctaattg

SEQ ID NO: 8660 - DNA, 20 bp, Homo sapiens
  source 1..20: mol_type = genomic DNA; note = Gene: CD274; note = Location (start to end; relative to TSS): CD274_45_75; note = Orientation (relative to transcription): antisense; note = sgRNA Position: 5450593; note = Sequence Name: 56322-704_101_SL_seq_8660
caacgctccctacctgcagg

SEQ ID NO: 8661 - DNA, 20 bp, Homo sapiens
  source 1..20: mol_type = genomic DNA; note = Gene: CD274; note = Location (start to end; relative to TSS): CD274_84_114; note = Orientation (relative to transcription): sense; note = sgRNA Position: 5450652; note = Sequence Name: 56322-704_101_SL_seq_8661
gtatctctggctagctcgct

SEQ ID NO: 8662 - DNA, 20 bp, Homo sapiens
  source 1..20: mol_type = genomic DNA; note = Gene: CD274; note = Location (start to end; relative to TSS): CD274_28_58; note = Orientation (relative to transcription): sense; note = sgRNA Position: 5450596; note = Sequence Name: 56322-704_101_SL_seq_8662
gcttctgtccgcctgcaggt

SEQ ID NO: 8663 - DNA, 20 bp, Homo sapiens
  source 1..20: mol_type = genomic DNA; note = Gene: CD274; note = Location (start to end; relative to TSS): CD274_73_103; note = Orientation (relative to transcription): antisense; note = sgRNA Position: 5450621; note = Sequence Name: 56322-704_101_SL_seq_8663
tactgggccgtgggcacccg

SEQ ID NO: 8664 - DNA, 20 bp, Homo sapiens
  source 1..20: mol_type = genomic DNA; note = Gene: CD274; note = Location (start to end; relative to TSS): CD274_29_59; note = Orientation (relative to transcription): antisense; note = sgRNA Position: 5450577; note = Sequence Name: 56322-704_101_SL_seq_8664
caggcggacagaagcgcggc

SEQ ID NO: 8665 - DNA, 20 bp, Homo sapiens
  source 1..20: mol_type = genomic DNA; note = Gene: CD274; note = Location (start to end; relative to TSS): CD274_71_101; note = Orientation (relative to transcription): sense; note = sgRNA Position: 5450639; note = Sequence Name: 56322-704_101_SL_seq_8665
tgcccacggcccagtatctc

SEQ ID NO: 8666 - DNA, 20 bp, Homo sapiens
  source 1..20: mol_type = genomic DNA; note = Gene: CD274; note = Location (start to end; relative to TSS): CD274_33_63; note = Orientation (relative to transcription): antisense; note = sgRNA Position: 5450581; note = Sequence Name: 56322-704_101_SL_seq_8666
cctgcaggcggacagaagcg

SEQ ID NO: 8667 - DNA, 20 bp, Homo sapiens
  source 1..20: mol_type = genomic DNA; note = Gene: CD274; note = Location (start to end; relative to TSS): CD274_70_100; note = Orientation (relative to transcription): antisense; note = sgRNA Position: 5450618; note = Sequence Name: 56322-704_101_SL_seq_8667
tgggccgtgggcacccgcgg

SEQ ID NO: 8668 - DNA, 20 bp, Homo sapiens
  source 1..20: mol_type = genomic DNA; note = Gene: CD274; note = Location (start to end; relative to TSS): CD274_24_54; note = Orientation (relative to transcription): antisense; note = sgRNA Position: 5450572; note = Sequence Name: 56322-704_101_SL_seq_8668
ggacagaagcgcggctggtg

SEQ ID NO: 8669 - DNA, 20 bp, Homo sapiens
  source 1..20: mol_type = genomic DNA; note = Gene: CD274; note = Location (start to end; relative to TSS): CD274_57_87; note = Orientation (relative to transcription): sense; note = sgRNA Position: 5450625; note = Sequence Name: 56322-704_101_SL_seq_8669
tgttcctccgcgggtgccca

SEQ ID NO: 8670 - DNA, 20 bp, Homo sapiens
  source 1..20: mol_type = genomic DNA; note = Gene: CD276; note = Location (start to end; relative to TSS): CD276_50_80; note = Orientation (relative to transcription): antisense; note = sgRNA Position: 73684439; note = Sequence Name: 56322-704_101_SL_seq_8670
cgcgccgactctgggactca

SEQ ID NO: 8671 - DNA, 20 bp, Homo sapiens
  source 1..20: mol_type = genomic DNA; note = Gene: CD276; note = Location (start to end; relative to TSS): CD276_102_132; note = Orientation (relative to transcription): sense; note = sgRNA Position: 73684511; note = Sequence Name: 56322-704_101_SL_seq_8671
ggggcggcctttgtctgctg

SEQ ID NO: 8672 - DNA, 20 bp, Homo sapiens
  source 1..20: mol_type = genomic DNA; note = Gene: CD276; note = Location (start to end; relative to TSS): CD276_51_81; note = Orientation (relative to transcription): antisense; note = sgRNA Position: 73684440; note = Sequence Name: 56322-704_101_SL_seq_8672
ccgcgccgactctgggactc

SEQ ID NO: 8673 - DNA, 20 bp, Homo sapiens
  source 1..20: mol_type = genomic DNA; note = Gene: CD276; note = Location (start to end; relative to TSS): CD276_102_132; note = Orientation (relative to transcription): sense; note = sgRNA Position: 73684511; note = Sequence Name: 56322-704_101_SL_seq_8673
ggggcggcctttgtctgctg

SEQ ID NO: 8674 - DNA, 20 bp, Homo sapiens
  source 1..20: mol_type = genomic DNA; note = Gene: CD276; note = Location (start to end; relative to TSS): CD276_44_74; note = Orientation (relative to transcription): antisense; note = sgRNA Position: 73684433; note = Sequence Name: 56322-704_101_SL_seq_8674
gactctgggactcagggacg

SEQ ID NO: 8675 - DNA, 20 bp, Homo sapiens
  source 1..20: mol_type = genomic DNA; note = Gene: CD276; note = Location (start to end; relative to TSS): CD276_76_106; note = Orientation (relative to transcription): sense; note = sgRNA Position: 73684485; note = Sequence Name: 56322-704_101_SL_seq_8675
ctggcgtggcgcgggcggcg

SEQ ID NO: 8676 - DNA, 20 bp, Homo sapiens
  source 1..20: mol_type = genomic DNA; note = Gene: CD276; note = Location (start to end; relative to TSS): CD276_34_64; note = Orientation (relative to transcription): antisense; note = sgRNA Position: 73684423; note = Sequence Name: 56322-704_101_SL_seq_8676
ctcagggacgcggcccagcc

SEQ ID NO: 8677 - DNA, 20 bp, Homo sapiens
  source 1..20: mol_type = genomic DNA; note = Gene: CD276; note = Location (start to end; relative to TSS): CD276_67_97; note = Orientation (relative to transcription): sense; note = sgRNA Position: 73684476; note = Sequence Name: 56322-704_101_SL_seq_8677
cggtgagtgctggcgtggcg

SEQ ID NO: 8678 - DNA, 20 bp, Homo sapiens
  source 1..20: mol_type = genomic DNA; note = Gene: CD276; note = Location (start to end; relative to TSS): CD276_12_42; note = Orientation (relative to transcription): antisense; note = sgRNA Position: 73684401; note = Sequence Name: 56322-704_101_SL_seq_8678
gctcagtcgccgccgcagcg

SEQ ID NO: 8679 - DNA, 20 bp, Homo sapiens
  source 1..20: mol_type = genomic DNA; note = Gene: CD276; note = Location (start to end; relative to TSS): CD276_44_74; note = Orientation (relative to transcription): antisense; note = sgRNA Position: 73684433; note = Sequence Name: 56322-704_101_SL_seq_8679
gactctgggactcagggacg

SEQ ID NO: 8680 - DNA, 20 bp, Homo sapiens
  source 1..20: mol_type = genomic DNA; note = Gene: CD28; note = Location (start to end; relative to TSS): CD28_41_71; note = Orientation (relative to transcription): antisense; note = sgRNA Position: 203706686; note = Sequence Name: 56322-704_101_SL_seq_8680
gagcatctttgtcctgacga

SEQ ID NO: 8681 - DNA, 20 bp, Homo sapiens
  source 1..20: mol_type = genomic DNA; note = Gene: CD28; note = Location (start to end; relative to TSS): CD28_205_235; note = Orientation (relative to transcription): sense; note = sgRNA Position: 203706870; note = Sequence Name: 56322-704_101_SL_seq_8681
agtgtagttttgctgtaata

SEQ ID NO: 8682 - DNA, 20 bp, Homo sapiens
  source 1..20: mol_type = genomic DNA; note = Gene: CD28; note = Location (start to end; relative to TSS): CD28_40_70; note = Orientation (relative to transcription): antisense; note = sgRNA Position: 203706685; note = Sequence Name: 56322-704_101_SL_seq_8682
agcatctttgtcctgacgat

SEQ ID NO: 8683 - DNA, 20 bp, Homo sapiens
  source 1..20: mol_type = genomic DNA; note = Gene: CD28; note = Location (start to end; relative to TSS): CD28_158_188; note = Orientation (relative to transcription): antisense; note = sgRNA Position: 203706803; note = Sequence Name: 56322-704_101_SL_seq_8683
ttaaaataaactaagccaat

SEQ ID NO: 8684 - DNA, 20 bp, Homo sapiens
  source 1..20: mol_type = genomic DNA; note = Gene: CD28; note = Location (start to end; relative to TSS): CD28_35_65; note = Orientation (relative to transcription): sense; note = sgRNA Position: 203706700; note = Sequence Name: 56322-704_101_SL_seq_8684
tcgtcaggacaaagatgctc

SEQ ID NO: 8685 - DNA, 20 bp, Homo sapiens
  source 1..20: mol_type = genomic DNA; note = Gene: CD28; note = Location (start to end; relative to TSS): CD28_91_121; note = Orientation (relative to transcription): antisense; note = sgRNA Position: 203706736; note = Sequence Name: 56322-704_101_SL_seq_8685
ttacctgttacttgaattga

SEQ ID NO: 8686 - DNA, 20 bp, Homo sapiens
  source 1..20: mol_type = genomic DNA; note = Gene: CD28; note = Location (start to end; relative to TSS): CD28_34_64; note = Orientation (relative to transcription): antisense; note = sgRNA Position: 203706679; note = Sequence Name: 56322-704_101_SL_seq_8686
tttgtcctgacgatgggcta

SEQ ID NO: 8687 - DNA, 20 bp, Homo sapiens
  source 1..20: mol_type = genomic DNA; note = Gene: CD28; note = Location (start to end; relative to TSS): CD28_90_120; note = Orientation (relative to transcription): antisense; note = sgRNA Position: 203706735; note = Sequence Name: 56322-704_101_SL_seq_8687
tacctgttacttgaattgaa

SEQ ID NO: 8688 - DNA, 20 bp, Homo sapiens
  source 1..20: mol_type = genomic DNA; note = Gene: CD28; note = Location (start to end; relative to TSS): CD28_20_50; note = Orientation (relative to transcription): sense; note = sgRNA Position: 203706685; note = Sequence Name: 56322-704_101_SL_seq_8688
tggaaccctagcccatcgtc

SEQ ID NO: 8689 - DNA, 20 bp, Homo sapiens
  source 1..20: mol_type = genomic DNA; note = Gene: CD28; note = Location (start to end; relative to TSS): CD28_79_109; note = Orientation (relative to transcription): sense; note = sgRNA Position: 203706744; note = Sequence Name: 56322-704_101_SL_seq_8689
ttcccttcaattcaagtaac

SEQ ID NO: 8690 - DNA, 20 bp, Homo sapiens
  source 1..20: mol_type = genomic DNA; note = Gene: CD300A; note = Location (start to end; relative to TSS): CD300A_35_65; note = Orientation (relative to transcription): sense; note = sgRNA Position: 74466695; note = Sequence Name: 56322-704_101_SL_seq_8690
gtgccgcctgtgctggggaa

SEQ ID NO: 8691 - DNA, 20 bp, Homo sapiens
  source 1..20: mol_type = genomic DNA; note = Gene: CD300A; note = Location (start to end; relative to TSS): CD300A_105_135; note = Orientation (relative to transcription): antisense; note = sgRNA Position: 74466745; note = Sequence Name: 56322-704_101_SL_seq_8691
gggaagggaaactctcacct

SEQ ID NO: 8692 - DNA, 20 bp, Homo sapiens
  source 1..20: mol_type = genomic DNA; note = Gene: CD300A; note = Location (start to end; relative to TSS): CD300A_34_64; note = Orientation (relative to transcription): sense; note = sgRNA Position: 74466694; note = Sequence Name: 56322-704_101_SL_seq_8692
agtgccgcctgtgctgggga

SEQ ID NO: 8693 - DNA, 20 bp, Homo sapiens
  source 1..20: mol_type = genomic DNA; note = Gene: CD300A; note = Location (start to end; relative to TSS): CD300A_99_129; note = Orientation (relative to transcription): sense; note = sgRNA Position: 74466759; note = Sequence Name: 56322-704_101_SL_seq_8693
aggtgagagtttcccttccc

SEQ ID NO: 8694 - DNA, 20 bp, Homo sapiens
  source 1..20: mol_type = genomic DNA; note = Gene: CD300A; note = Location (start to end; relative to TSS): CD300A_28_58; note = Orientation (relative to transcription): antisense; note = sgRNA Position: 74466668; note = Sequence Name: 56322-704_101_SL_seq_8694
gcggcacttgcagcagctcc

SEQ ID NO: 8695 - DNA, 20 bp, Homo sapiens
  source 1..20: mol_type = genomic DNA; note = Gene: CD300A; note = Location (start to end; relative to TSS): CD300A_98_128; note = Orientation (relative to transcription): sense; note = sgRNA Position: 74466758; note = Sequence Name: 56322-704_101_SL_seq_8695
caggtgagagtttcccttcc

SEQ ID NO: 8696 - DNA, 20 bp, Homo sapiens
  source 1..20: mol_type = genomic DNA; note = Gene: CD300A; note = Location (start to end; relative to TSS): CD300A_30_60; note = Orientation (relative to transcription): sense; note = sgRNA Position: 74466690; note = Sequence Name: 56322-704_101_SL_seq_8696
tgcaagtgccgcctgtgctg

SEQ ID NO: 8697 - DNA, 20 bp, Homo sapiens
  source 1..20: mol_type = genomic DNA; note = Gene: CD300A; note = Location (start to end; relative to TSS): CD300A_72_102; note = Orientation (relative to transcription): sense; note = sgRNA Position: 74466732; note = Sequence Name: 56322-704_101_SL_seq_8697
ttgggctctgttgcttctct

SEQ ID NO: 8698 - DNA, 20 bp, Homo sapiens
  source 1..20: mol_type = genomic DNA; note = Gene: CD300A; note = Location (start to end; relative to TSS): CD300A_18_48; note = Orientation (relative to transcription): antisense; note = sgRNA Position: 74466658; note = Sequence Name: 56322-704_101_SL_seq_8698
cagcagctccaggccctacc

SEQ ID NO: 8699 - DNA, 20 bp, Homo sapiens
  source 1..20: mol_type = genomic DNA; note = Gene: CD300A; note = Location (start to end; relative to TSS): CD300A_50_80; note = Orientation (relative to transcription): antisense; note = sgRNA Position: 74466690; note = Sequence Name: 56322-704_101_SL_seq_8699
catggtcccttccccagcac

SEQ ID NO: 8700 - DNA, 20 bp, Homo sapiens
  source 1..20: mol_type = genomic DNA; note = Gene: CD300C; note = Location (start to end; relative to TSS): CD300C_46_76; note = Orientation (relative to transcription): sense; note = sgRNA Position: 74546045; note = Sequence Name: 56322-704_101_SL_seq_8700
catcgccacccaagggaccc

SEQ ID NO: 8701 - DNA, 20 bp, Homo sapiens
  source 1..20: mol_type = genomic DNA; note = Gene: CD300C; note = Location (start to end; relative to TSS): CD300C_84_114; note = Orientation (relative to transcription): antisense; note = sgRNA Position: 74546027; note = Sequence Name: 56322-704_101_SL_seq_8701
ctcctctcaaccctgacgtc

SEQ ID NO: 8702 - DNA, 20 bp, Homo sapiens
  source 1..20: mol_type = genomic DNA; note = Gene: CD300C; note = Location (start to end; relative to TSS): CD300C_38_68; note = Orientation (relative to transcription): sense; note = sgRNA Position: 74546053; note = Sequence Name: 56322-704_101_SL_seq_8702
agtggctgcatcgccaccca

SEQ ID NO: 8703 - DNA, 20 bp, Homo sapiens
  source 1..20: mol_type = genomic DNA; note = Gene: CD300C; note = Location (start to end; relative to TSS): CD300C_73_103; note = Orientation (relative to transcription): sense; note = sgRNA Position: 74546018; note = Sequence Name: 56322-704_101_SL_seq_8703
tgccagacgtcagggttgag

SEQ ID NO: 8704 - DNA, 20 bp, Homo sapiens
  source 1..20: mol_type = genomic DNA; note = Gene: CD300C; note = Location (start to end; relative to TSS): CD300C_39_69; note = Orientation (relative to transcription): sense; note = sgRNA Position: 74546052; note = Sequence Name: 56322-704_101_SL_seq_8704
gtggctgcatcgccacccaa

SEQ ID NO: 8705 - DNA, 20 bp, Homo sapiens
  source 1..20: mol_type = genomic DNA; note = Gene: CD300C; note = Location (start to end; relative to TSS): CD300C_72_102; note = Orientation (relative to transcription): antisense; note = sgRNA Position: 74546039; note = Sequence Name: 56322-704_101_SL_seq_8705
ctgacgtctggcaaagtcca

SEQ ID NO: 8706 - DNA, 20 bp, Homo sapiens
  source 1..20: mol_type = genomic DNA; note = Gene: CD300C; note = Location (start to end; relative to TSS): CD300C_20_50; note = Orientation (relative to transcription): sense; note = sgRNA Position: 74546071; note = Sequence Name: 56322-704_101_SL_seq_8706
agctgtgggctgtggggaag

SEQ ID NO: 8707 - DNA, 20 bp, Homo sapiens
  source 1..20: mol_type = genomic DNA; note = Gene: CD300C; note = Location (start to end; relative to TSS): CD300C_63_93; note = Orientation (relative to transcription): antisense; note = sgRNA Position: 74546048; note = Sequence Name: 56322-704_101_SL_seq_8707
ggcaaagtccagggtccctt

SEQ ID NO: 8708 - DNA, 20 bp, Homo sapiens
  source 1..20: mol_type = genomic DNA; note = Gene: CD300C; note = Location (start to end; relative to TSS): CD300C_24_54; note = Orientation (relative to transcription): antisense; note = sgRNA Position: 74546087; note = Sequence Name: 56322-704_101_SL_seq_8708
tccccacagcccacagcttc

SEQ ID NO: 8709 - DNA, 20 bp, Homo sapiens
  source 1..20: mol_type = genomic DNA; note = Gene: CD300C; note = Location (start to end; relative to TSS): CD300C_60_90; note = Orientation (relative to transcription): antisense; note = sgRNA Position: 74546051; note = Sequence Name: 56322-704_101_SL_seq_8709
aaagtccagggtcccttggg

SEQ ID NO: 8710 - DNA, 20 bp, Homo sapiens
  source 1..20: mol_type = genomic DNA; note = Gene: CD300E; note = Location (start to end; relative to TSS): CD300E_41_71; note = Orientation (relative to transcription): antisense; note = sgRNA Position: 74623693; note = Sequence Name: 56322-704_101_SL_seq_8710
aagtatatgtaacggagcct

SEQ ID NO: 8711 - DNA, 20 bp, Homo sapiens
  source 1..20: mol_type = genomic DNA; note = Gene: CD300E; note = Location (start to end; relative to TSS): CD300E_92_122; note = Orientation (relative to transcription): sense; note = sgRNA Position: 74623622; note = Sequence Name: 56322-704_101_SL_seq_8711
gccaaggagacaggaacatg

SEQ ID NO: 8712 - DNA, 20 bp, Homo sapiens
  source 1..20: mol_type = genomic DNA; note = Gene: CD300E; note = Location (start to end; relative to TSS): CD300E_42_72; note = Orientation (relative to transcription): antisense; note = sgRNA Position: 74623692; note = Sequence Name: 56322-704_101_SL_seq_8712
caagtatatgtaacggagcc

SEQ ID NO: 8713 - DNA, 20 bp, Homo sapiens
  source 1..20: mol_type = genomic DNA; note = Gene: CD300E; note = Location (start to end; relative to TSS): CD300E_83_113; note = Orientation (relative to transcription): sense; note = sgRNA Position: 74623631; note = Sequence Name: 56322-704_101_SL_seq_8713
aggacggaagccaaggagac

SEQ ID NO: 8714 - DNA, 20 bp, Homo sapiens
  source 1..20: mol_type = genomic DNA; note = Gene: CD300E; note = Location (start to end; relative to TSS): CD300E_45_75; note = Orientation (relative to transcription): sense; note = sgRNA Position: 74623669; note = Sequence Name: 56322-704_101_SL_seq_8714
acatatacttggattccagc

SEQ ID NO: 8715 - DNA, 20 bp, Homo sapiens
  source 1..20: mol_type = genomic DNA; note = Gene: CD300E; note = Location (start to end; relative to TSS): CD300E_79_109; note = Orientation (relative to transcription): antisense; note = sgRNA Position: 74623655; note = Sequence Name: 56322-704_101_SL_seq_8715
cttccgtcctcagcaaatct

SEQ ID NO: 8716 - DNA, 20 bp, Homo sapiens
  source 1..20: mol_type = genomic DNA; note = Gene: CD300E; note = Location (start to end; relative to TSS): CD300E_46_76; note = Orientation (relative to transcription): sense; note = sgRNA Position: 74623668; note = Sequence Name: 56322-704_101_SL_seq_8716
catatacttggattccagct

SEQ ID NO: 8717 - DNA, 20 bp, Homo sapiens
  source 1..20: mol_type = genomic DNA; note = Gene: CD300E; note = Location (start to end; relative to TSS): CD300E_76_106; note = Orientation (relative to transcription): sense; note = sgRNA Position: 74623638; note = Sequence Name: 56322-704_101_SL_seq_8717
tttgctgaggacggaagcca

SEQ ID NO: 8718 - DNA, 20 bp, Homo sapiens
  source 1..20: mol_type = genomic DNA; note = Gene: CD300E; note = Location (start to end; relative to TSS): CD300E_34_64; note = Orientation (relative to transcription): sense; note = sgRNA Position: 74623680; note = Sequence Name: 56322-704_101_SL_seq_8718
caggctccgttacatatact

SEQ ID NO: 8719 - DNA, 20 bp, Homo sapiens
  source 1..20: mol_type = genomic DNA; note = Gene: CD300E; note = Location (start to end; relative to TSS): CD300E_67_97; note = Orientation (relative to transcription): sense; note = sgRNA Position: 74623647; note = Sequence Name: 56322-704_101_SL_seq_8719
ggacctagatttgctgagga

SEQ ID NO: 8720 - DNA, 20 bp, Homo sapiens
  source 1..20: mol_type = genomic DNA; note = Gene: CD300LB; note = Location (start to end; relative to TSS): CD300LB_67_97; note = Orientation (relative to transcription): sense; note = sgRNA Position: 74531384; note = Sequence Name: 56322-704_101_SL_seq_8720
tttgccactggttgcagatc

SEQ ID NO: 8721 - DNA, 20 bp, Homo sapiens
  source 1..20: mol_type = genomic DNA; note = Gene: CD300LB; note = Location (start to end; relative to TSS): CD300LB_142_172; note = Orientation (relative to transcription): sense; note = sgRNA Position: 74531309; note = Sequence Name: 56322-704_101_SL_seq_8721
ttctcagcctctcaggtgag

SEQ ID NO: 8722 - DNA, 20 bp, Homo sapiens
  source 1..20: mol_type = genomic DNA; note = Gene: CD300LB; note = Location (start to end; relative to TSS): CD300LB_70_100; note = Orientation (relative to transcription): sense; note = sgRNA Position: 74531381; note = Sequence Name: 56322-704_101_SL_seq_8722
gccactggttgcagatcagg

SEQ ID NO: 8723 - DNA, 20 bp, Homo sapiens
  source 1..20: mol_type = genomic DNA; note = Gene: CD300LB; note = Location (start to end; relative to TSS): CD300LB_110_140; note = Orientation (relative to transcription): antisense; note = sgRNA Position: 74531361; note = Sequence Name: 56322-704_101_SL_seq_8723
gccacatggctctgccttcc

SEQ ID NO: 8724 - DNA, 20 bp, Homo sapiens
  source 1..20: mol_type = genomic DNA; note = Gene: CD300LB; note = Location (start to end; relative to TSS): CD300LB_55_85; note = Orientation (relative to transcription): sense; note = sgRNA Position: 74531396; note = Sequence Name: 56322-704_101_SL_seq_8724
ctgggatctgcatttgccac

SEQ ID NO: 8725 - DNA, 20 bp, Homo sapiens
  source 1..20: mol_type = genomic DNA; note = Gene: CD300LB; note = Location (start to end; relative to TSS): CD300LB_87_117; note = Orientation (relative to transcription): sense; note = sgRNA Position: 74531364; note = Sequence Name: 56322-704_101_SL_seq_8725
aggcggacgaggagccggga

SEQ ID NO: 8726 - DNA, 20 bp, Homo sapiens
  source 1..20: mol_type = genomic DNA; note = Gene: CD300LB; note = Location (start to end; relative to TSS): CD300LB_53_83; note = Orientation (relative to transcription): antisense; note = sgRNA Position: 74531418; note = Sequence Name: 56322-704_101_SL_seq_8726
tgcagatcccagatgcactc

SEQ ID NO: 8727 - DNA, 20 bp, Homo sapiens
  source 1..20: mol_type = genomic DNA; note = Gene: CD300LB; note = Location (start to end; relative to TSS): CD300LB_83_113; note = Orientation (relative to transcription): sense; note = sgRNA Position: 74531368; note = Sequence Name: 56322-704_101_SL_seq_8727
gatcaggcggacgaggagcc

SEQ ID NO: 8728 - DNA, 20 bp, Homo sapiens
  source 1..20: mol_type = genomic DNA; note = Gene: CD300LB; note = Location (start to end; relative to TSS): CD300LB_33_63; note = Orientation (relative to transcription): antisense; note = sgRNA Position: 74531438; note = Sequence Name: 56322-704_101_SL_seq_8728
tggaagttctgcctgagctc

SEQ ID NO: 8729 - DNA, 20 bp, Homo sapiens
  source 1..20: mol_type = genomic DNA; note = Gene: CD300LB; note = Location (start to end; relative to TSS): CD300LB_67_97; note = Orientation (relative to transcription): sense; note = sgRNA Position: 74531384; note = Sequence Name: 56322-704_101_SL_seq_8729
tttgccactggttgcagatc

SEQ ID NO: 8730 - DNA, 20 bp, Homo sapiens
  source 1..20: mol_type = genomic DNA; note = Gene: CD300LD; note = Location (start to end; relative to TSS): CD300LD_40_70; note = Orientation (relative to transcription): sense; note = sgRNA Position: 74592219; note = Sequence Name: 56322-704_101_SL_seq_8730
gtgatcaccaaggagaggag

SEQ ID NO: 8731 - DNA, 20 bp, Homo sapiens
  source 1..20: mol_type = genomic DNA; note = Gene: CD300LD; note = Location (start to end; relative to TSS): CD300LD_117_147; note = Orientation (relative to transcription): antisense; note = sgRNA Position: 74592162; note = Sequence Name: 56322-704_101_SL_seq_8731
agctccagccacactcacct

SEQ ID NO: 8732 - DNA, 20 bp, Homo sapiens
  source 1..20: mol_type = genomic DNA; note = Gene: CD300LD; note = Location (start to end; relative to TSS): CD300LD_39_69; note = Orientation (relative to transcription): antisense; note = sgRNA Position: 74592240; note = Sequence Name: 56322-704_101_SL_seq_8732
ccttggtgatcacaggtgtc

SEQ ID NO: 8733 - DNA, 20 bp, Homo sapiens
  source 1..20: mol_type = genomic DNA; note = Gene: CD300LD; note = Location (start to end; relative to TSS): CD300LD_114_144; note = Orientation (relative to transcription): antisense; note = sgRNA Position: 74592165; note = Sequence Name: 56322-704_101_SL_seq_8733
tccagccacactcacctggg

SEQ ID NO: 8734 - DNA, 20 bp, Homo sapiens
  source 1..20: mol_type = genomic DNA; note = Gene: CD300LD; note = Location (start to end; relative to TSS): CD300LD_35_65; note = Orientation (relative to transcription): sense; note = sgRNA Position: 74592224; note = Sequence Name: 56322-704_101_SL_seq_8734
cacctgtgatcaccaaggag

SEQ ID NO: 8735 - DNA, 20 bp, Homo sapiens
  source 1..20: mol_type = genomic DNA; note = Gene: CD300LD; note = Location (start to end; relative to TSS): CD300LD_104_134; note = Orientation (relative to transcription): sense; note = sgRNA Position: 74592155; note = Sequence Name: 56322-704_101_SL_seq_8735
tcctcccaggtgagtgtggc

SEQ ID NO: 8736 - DNA, 20 bp, Homo sapiens
  source 1..20: mol_type = genomic DNA; note = Gene: CD300LD; note = Location (start to end; relative to TSS): CD300LD_30_60; note = Orientation (relative to transcription): sense; note = sgRNA Position: 74592229; note = Sequence Name: 56322-704_101_SL_seq_8736
ccagacacctgtgatcacca

SEQ ID NO: 8737 - DNA, 20 bp, Homo sapiens
  source 1..20: mol_type = genomic DNA; note = Gene: CD300LD; note = Location (start to end; relative to TSS): CD300LD_100_130; note = Orientation (relative to transcription): sense; note = sgRNA Position: 74592159; note = Sequence Name: 56322-704_101_SL_seq_8737
ctcatcctcccaggtgagtg

SEQ ID NO: 8738 - DNA, 20 bp, Homo sapiens
  source 1..20: mol_type = genomic DNA; note = Gene: CD300LD; note = Location (start to end; relative to TSS): CD300LD_27_57; note = Orientation (relative to transcription): antisense; note = sgRNA Position: 74592252; note = Sequence Name: 56322-704_101_SL_seq_8738
caggtgtctggtgcccttca

SEQ ID NO: 8739 - DNA, 20 bp, Homo sapiens
  source 1..20: mol_type = genomic DNA; note = Gene: CD300LD; note = Location (start to end; relative to TSS): CD300LD_91_121; note = Orientation (relative to transcription): sense; note = sgRNA Position: 74592168; note = Sequence Name: 56322-704_101_SL_seq_8739
ctgctgcttctcatcctccc

SEQ ID NO: 8740 - DNA, 20 bp, Homo sapiens
  source 1..20: mol_type = genomic DNA; note = Gene: CD300LF; note = Location (start to end; relative to TSS): CD300LF_42_72; note = Orientation (relative to transcription): antisense; note = sgRNA Position: 74712877; note = Sequence Name: 56322-704_101_SL_seq_8740
ggggcatcttctcttcagac

SEQ ID NO: 8741 - DNA, 20 bp, Homo sapiens
  source 1..20: mol_type = genomic DNA; note = Gene: CD300LF; note = Location (start to end; relative to TSS): CD300LF_77_107; note = Orientation (relative to transcription): sense; note = sgRNA Position: 74712822; note = Sequence Name: 56322-704_101_SL_seq_8741
tcttctggctctcaggtgag

SEQ ID NO: 8742 - DNA, 20 bp, Homo sapiens
  source 1..20: mol_type = genomic DNA; note = Gene: CD300LF; note = Location (start to end; relative to TSS): CD300LF_23_53; note = Orientation (relative to transcription): antisense; note = sgRNA Position: 74712896; note = Sequence Name: 56322-704_101_SL_seq_8742
caggtccccgttcccctcag

SEQ ID NO: 8743 - DNA, 20 bp, Homo sapiens
  source 1..20: mol_type = genomic DNA; note = Gene: CD300LF; note = Location (start to end; relative to TSS): CD300LF_63_93; note = Orientation (relative to transcription): antisense; note = sgRNA Position: 74712856; note = Sequence Name: 56322-704_101_SL_seq_8743
ggagcaggtagagtgtcagc

SEQ ID NO: 8744 - DNA, 20 bp, Homo sapiens
  source 1..20: mol_type = genomic DNA; note = Gene: CD300LF; note = Location (start to end; relative to TSS): CD300LF_16_46; note = Orientation (relative to transcription): antisense; note = sgRNA Position: 74712903; note = Sequence Name: 56322-704_101_SL_seq_8744
ccgttcccctcagtggagcc

SEQ ID NO: 8745 - DNA, 20 bp, Homo sapiens
  source 1..20: mol_type = genomic DNA; note = Gene: CD300LF; note = Location (start to end; relative to TSS): CD300LF_62_92; note = Orientation (relative to transcription): antisense; note = sgRNA Position: 74712857; note = Sequence Name: 56322-704_101_SL_seq_8745
gagcaggtagagtgtcagca

SEQ ID NO: 8746 - DNA, 20 bp, Homo sapiens
  source 1..20: mol_type = genomic DNA; note = Gene: CD300LF; note = Location (start to end; relative to TSS): CD300LF_9_39; note = Orientation (relative to transcription): sense; note = sgRNA Position: 74712890; note = Sequence Name: 56322-704_101_SL_seq_8746
aggctccactgaggggaacg

SEQ ID NO: 8747 - DNA, 20 bp, Homo sapiens
  source 1..20: mol_type = genomic DNA; note = Gene: CD300LF; note = Location (start to end; relative to TSS): CD300LF_61_91; note = Orientation (relative to transcription): antisense; note = sgRNA Position: 74712858; note = Sequence Name: 56322-704_101_SL_seq_8747
agcaggtagagtgtcagcag

SEQ ID NO: 8748 - DNA, 20 bp, Homo sapiens
  source 1..20: mol_type = genomic DNA; note = Gene: CD300LF; note = Location (start to end; relative to TSS): CD300LF_8_38; note = Orientation (relative to transcription): sense; note = sgRNA Position: 74712891; note = Sequence Name: 56322-704_101_SL_seq_8748
caggctccactgaggggaac

SEQ ID NO: 8749 - DNA, 20 bp, Homo sapiens
  source 1..20: mol_type = genomic DNA; note = Gene: CD300LF; note = Location (start to end; relative to TSS): CD300LF_42_72; note = Orientation (relative to transcription): antisense; note = sgRNA Position: 74712877; note = Sequence Name: 56322-704_101_SL_seq_8749
ggggcatcttctcttcagac

SEQ ID NO: 8750 - DNA, 20 bp, Homo sapiens
  source 1..20: mol_type = genomic DNA; note = Gene: CD300LG; note = Location (start to end; relative to TSS): CD300LG_34_64; note = Orientation (relative to transcription): sense; note = sgRNA Position: 43847236; note = Sequence Name: 56322-704_101_SL_seq_8750
gcggcttctggtcctgctat

SEQ ID NO: 8751 - DNA, 20 bp, Homo sapiens
  source 1..20: mol_type = genomic DNA; note = Gene: CD300LG; note = Location (start to end; relative to TSS): CD300LG_69_99; note = Orientation (relative to transcription): sense; note = sgRNA Position: 43847271; note = Sequence Name: 56322-704_101_SL_seq_8751
tcccaggtgagatggggaga

SEQ ID NO: 8752 - DNA, 20 bp, Homo sapiens
  source 1..20: mol_type = genomic DNA; note = Gene: CD300LG; note = Location (start to end; relative to TSS): CD300LG_35_65; note = Orientation (relative to transcription): sense; note = sgRNA Position: 43847237; note = Sequence Name: 56322-704_101_SL_seq_8752
cggcttctggtcctgctatg

SEQ ID NO: 8753 - DNA, 20 bp, Homo sapiens
  source 1..20: mol_type = genomic DNA; note = Gene: CD300LG; note = Location (start to end; relative to TSS): CD300LG_68_98; note = Orientation (relative to transcription): sense; note = sgRNA Position: 43847270; note = Sequence Name: 56322-704_101_SL_seq_8753
ctcccaggtgagatggggag

SEQ ID NO: 8754 - DNA, 20 bp, Homo sapiens
  source 1..20: mol_type = genomic DNA; note = Gene: CD300LG; note = Location (start to end; relative to TSS): CD300LG_33_63; note = Orientation (relative to transcription): sense; note = sgRNA Position: 43847235; note = Sequence Name: 56322-704_101_SL_seq_8754
tgcggcttctggtcctgcta

SEQ ID NO: 8755 - DNA, 20 bp, Homo sapiens
  source 1..20: mol_type = genomic DNA; note = Gene: CD300LG; note = Location (start to end; relative to TSS): CD300LG_63_93; note = Orientation (relative to transcription): sense; note = sgRNA Position: 43847265; note = Sequence Name: 56322-704_101_SL_seq_8755
tgctgctcccaggtgagatg

SEQ ID NO: 8756 - DNA, 20 bp, Homo sapiens
  source 1..20: mol_type = genomic DNA; note = Gene: CD300LG; note = Location (start to end; relative to TSS): CD300LG_29_59; note = Orientation (relative to transcription): antisense; note = sgRNA Position: 43847211; note = Sequence Name: 56322-704_101_SL_seq_8756
agaagccgcattctgggcgc

SEQ ID NO: 8757 - DNA, 20 bp, Homo sapiens
  source 1..20: mol_type = genomic DNA; note = Gene: CD300LG; note = Location (start to end; relative to TSS): CD300LG_61_91; note = Orientation (relative to transcription): sense; note = sgRNA Position: 43847263; note = Sequence Name: 56322-704_101_SL_seq_8757
cctgctgctcccaggtgaga

SEQ ID NO: 8758 - DNA, 20 bp, Homo sapiens
  source 1..20: mol_type = genomic DNA; note = Gene: CD300LG; note = Location (start to end; relative to TSS): CD300LG_19_49; note = Orientation (relative to transcription): antisense; note = sgRNA Position: 43847201; note = Sequence Name: 56322-704_101_SL_seq_8758
ttctgggcgctggacaccgt

SEQ ID NO: 8759 - DNA, 20 bp, Homo sapiens
  source 1..20: mol_type = genomic DNA; note = Gene: CD300LG; note = Location (start to end; relative to TSS): CD300LG_53_83; note = Orientation (relative to transcription): sense; note = sgRNA Position: 43847255; note = Sequence Name: 56322-704_101_SL_seq_8759
tggggttgcctgctgctccc

SEQ ID NO: 8760 - DNA, 20 bp, Homo sapiens
  source 1..20: mol_type = genomic DNA; note = Gene: CD33; note = Location (start to end; relative to TSS): CD33_45_75; note = Orientation (relative to transcription): sense; note = sgRNA Position: 51225151; note = Sequence Name: 56322-704_101_SL_seq_8760
ctgctgcccctgctgtgggc

SEQ ID NO: 8761 - DNA, 20 bp, Homo sapiens
  source 1..20: mol_type = genomic DNA; note = Gene: CD33; note = Location (start to end; relative to TSS): CD33_80_110; note = Orientation (relative to transcription): sense; note = sgRNA Position: 51225186; note = Sequence Name: 56322-704_101_SL_seq_8761
gggagaggggttgtcgggct

SEQ ID NO: 8762 - DNA, 20 bp, Homo sapiens
  source 1..20: mol_type = genomic DNA; note = Gene: CD33; note = Location (start to end; relative to TSS): CD33_42_72; note = Orientation (relative to transcription): antisense; note = sgRNA Position: 51225128; note = Sequence Name: 56322-704_101_SL_seq_8762
aggggcagcagtagcagcag

SEQ ID NO: 8763 - DNA, 20 bp, Homo sapiens
  source 1..20: mol_type = genomic DNA; note = Gene: CD33; note = Location (start to end; relative to TSS): CD33_75_105; note = Orientation (relative to transcription): sense; note = sgRNA Position: 51225181; note = Sequence Name: 56322-704_101_SL_seq_8763
ctgtggggagaggggttgtc

SEQ ID NO: 8764 - DNA, 20 bp, Homo sapiens
  source 1..20: mol_type = genomic DNA; note = Gene: CD33; note = Location (start to end; relative to TSS): CD33_40_70; note = Orientation (relative to transcription): sense; note = sgRNA Position: 51225146; note = Sequence Name: 56322-704_101_SL_seq_8764
tgctactgctgcccctgctg

SEQ ID NO: 8765 - DNA, 20 bp, Homo sapiens
  source 1..20: mol_type = genomic DNA; note = Gene: CD33; note = Location (start to end; relative to TSS): CD33_74_104; note = Orientation (relative to transcription): sense; note = sgRNA Position: 51225180; note = Sequence Name: 56322-704_101_SL_seq_8765
gctgtggggagaggggttgt

SEQ ID NO: 8766 - DNA, 20 bp, Homo sapiens
  source 1..20: mol_type = genomic DNA; note = Gene: CD33; note = Location (start to end; relative to TSS): CD33_41_71; note = Orientation (relative to transcription): sense; note = sgRNA Position: 51225147; note = Sequence Name: 56322-704_101_SL_seq_8766
gctactgctgcccctgctgt

SEQ ID NO: 8767 - DNA, 20 bp, Homo sapiens
  source 1..20: mol_type = genomic DNA; note = Gene: CD33; note = Location (start to end; relative to TSS): CD33_74_104; note = Orientation (relative to transcription): sense; note = sgRNA Position: 51225180; note = Sequence Name: 56322-704_101_SL_seq_8767
gctgtggggagaggggttgt

SEQ ID NO: 8768 - DNA, 20 bp, Homo sapiens
  source 1..20: mol_type = genomic DNA; note = Gene: CD33; note = Location (start to end; relative to TSS): CD33_31_61; note = Orientation (relative to transcription): antisense; note = sgRNA Position: 51225117; note = Sequence Name: 56322-704_101_SL_seq_8768
tagcagcagcggcatgtctg

SEQ ID NO: 8769 - DNA, 20 bp, Homo sapiens
  source 1..20: mol_type = genomic DNA; note = Gene: CD33; note = Location (start to end; relative to TSS): CD33_61_91; note = Orientation (relative to transcription): antisense; note = sgRNA Position: 51225147; note = Sequence Name: 56322-704_101_SL_seq_8769
ccactcacctgcccacagca

SEQ ID NO: 8770 - DNA, 20 bp, Homo sapiens
  source 1..20: mol_type = genomic DNA; note = Gene: CD4; note = Location (start to end; relative to TSS): CD4_42_72; note = Orientation (relative to transcription): antisense; note = sgRNA Position: 6789576; note = Sequence Name: 56322-704_101_SL_seq_8770
caaccaggagcccagtgggg

SEQ ID NO: 8771 - DNA, 20 bp, Homo sapiens
  source 1..20: mol_type = genomic DNA; note = Gene: CD4; note = Location (start to end; relative to TSS): CD4_81_111; note = Orientation (relative to transcription): sense; note = sgRNA Position: 6789635; note = Sequence Name: 56322-704_101_SL_seq_8771
acgcctgtttgagaagcagc

SEQ ID NO: 8772 - DNA, 20 bp, Homo sapiens
  source 1..20: mol_type = genomic DNA; note = Gene: CD4; note = Location (start to end; relative to TSS): CD4_41_71; note = Orientation (relative to transcription): antisense; note = sgRNA Position: 6789575; note = Sequence Name: 56322-704_101_SL_seq_8772
aaccaggagcccagtgggga

SEQ ID NO: 8773 - DNA, 20 bp, Homo sapiens
  source 1..20: mol_type = genomic DNA; note = Gene: CD4; note = Location (start to end; relative to TSS): CD4_80_110; note = Orientation (relative to transcription): sense; note = sgRNA Position: 6789634; note = Sequence Name: 56322-704_101_SL_seq_8773
tacgcctgtttgagaagcag

SEQ ID NO: 8774 - DNA, 20 bp, Homo sapiens
  source 1..20: mol_type = genomic DNA; note = Gene: CD4; note = Location (start to end; relative to TSS): CD4_30_60; note = Orientation (relative to transcription): sense; note = sgRNA Position: 6789584; note = Sequence Name: 56322-704_101_SL_seq_8774
caccctccccactgggctcc

SEQ ID NO: 8775 - DNA, 20 bp, Homo sapiens
  source 1..20: mol_type = genomic DNA; note = Gene: CD4; note = Location (start to end; relative to TSS): CD4_78_108; note = Orientation (relative to transcription): antisense; note = sgRNA Position: 6789612; note = Sequence Name: 56322-704_101_SL_seq_8775
caaacaggcgtatctgtgtg

SEQ ID NO: 8776 - DNA, 20 bp, Homo sapiens
  source 1..20: mol_type = genomic DNA; note = Gene: CD4; note = Location (start to end; relative to TSS): CD4_22_52; note = Orientation (relative to transcription): sense; note = sgRNA Position: 6789576; note = Sequence Name: 56322-704_101_SL_seq_8776
gaacaaagcaccctccccac

SEQ ID NO: 8777 - DNA, 20 bp, Homo sapiens
  source 1..20: mol_type = genomic DNA; note = Gene: CD4; note = Location (start to end; relative to TSS): CD4_72_102; note = Orientation (relative to transcription): antisense; note = sgRNA Position: 6789606; note = Sequence Name: 56322-704_101_SL_seq_8777
ggcgtatctgtgtgaggact

SEQ ID NO: 8778 - DNA, 20 bp, Homo sapiens
  source 1..20: mol_type = genomic DNA; note = Gene: CD4; note = Location (start to end; relative to TSS): CD4_23_53; note = Orientation (relative to transcription): sense; note = sgRNA Position: 6789577; note = Sequence Name: 56322-704_101_SL_seq_8778
aacaaagcaccctccccact

SEQ ID NO: 8779 - DNA, 20 bp, Homo sapiens
  source 1..20: mol_type = genomic DNA; note = Gene: CD4; note = Location (start to end; relative to TSS): CD4_57_87; note = Orientation (relative to transcription): antisense; note = sgRNA Position: 6789591; note = Sequence Name: 56322-704_101_SL_seq_8779
ggacttggagctctgcaacc

SEQ ID NO: 8780 - DNA, 20 bp, Homo sapiens
  source 1..20: mol_type = genomic DNA; note = Gene: CD47; note = Location (start to end; relative to TSS): CD47_36_66; note = Orientation (relative to transcription): sense; note = sgRNA Position: 108090971; note = Sequence Name: 56322-704_101_SL_seq_8780
ggtcctgcctgtaacggcgg

SEQ ID NO: 8781 - DNA, 20 bp, Homo sapiens
  source 1..20: mol_type = genomic DNA; note = Gene: CD47; note = Location (start to end; relative to TSS): CD47_70_100; note = Orientation (relative to transcription): sense; note = sgRNA Position: 108090937; note = Sequence Name: 56322-704_101_SL_seq_8781
ccggacacctgcggcggcgg

SEQ ID NO: 8782 - DNA, 20 bp, Homo sapiens
  source 1..20: mol_type = genomic DNA; note = Gene: CD47; note = Location (start to end; relative to TSS): CD47_33_63; note = Orientation (relative to transcription): sense; note = sgRNA Position: 108090974; note = Sequence Name: 56322-704_101_SL_seq_8782
gtcggtcctgcctgtaacgg

SEQ ID NO: 8783 - DNA, 20 bp, Homo sapiens
  source 1..20: mol_type = genomic DNA; note = Gene: CD47; note = Location (start to end; relative to TSS): CD47_67_97; note = Orientation (relative to transcription): sense; note = sgRNA Position: 108090940; note = Sequence Name: 56322-704_101_SL_seq_8783
gctccggacacctgcggcgg

SEQ ID NO: 8784 - DNA, 20 bp, Homo sapiens
  source 1..20: mol_type = genomic DNA; note = Gene: CD47; note = Location (start to end; relative to TSS): CD47_23_53; note = Orientation (relative to transcription): antisense; note = sgRNA Position: 108091004; note = Sequence Name: 56322-704_101_SL_seq_8784
cgaccgccgccgcgcgtcac

SEQ ID NO: 8785 - DNA, 20 bp, Homo sapiens
  source 1..20: mol_type = genomic DNA; note = Gene: CD47; note = Location (start to end; relative to TSS): CD47_64_94; note = Orientation (relative to transcription): sense; note = sgRNA Position: 108090943; note = Sequence Name: 56322-704_101_SL_seq_8785
gctgctccggacacctgcgg

SEQ ID NO: 8786 - DNA, 20 bp, Homo sapiens
  source 1..20: mol_type = genomic DNA; note = Gene: CD47; note = Location (start to end; relative to TSS): CD47_30_60; note = Orientation (relative to transcription): sense; note = sgRNA Position: 108090977; note = Sequence Name: 56322-704_101_SL_seq_8786
gcggtcggtcctgcctgtaa

SEQ ID NO: 8787 - DNA, 20 bp, Homo sapiens
  source 1..20: mol_type = genomic DNA; note = Gene: CD47; note = Location (start to end; relative to TSS): CD47_61_91; note = Orientation (relative to transcription): sense; note = sgRNA Position: 108090946; note = Sequence Name: 56322-704_101_SL_seq_8787
gctgctgctccggacacctg

SEQ ID NO: 8788 - DNA, 20 bp, Homo sapiens
  source 1..20: mol_type = genomic DNA; note = Gene: CD47; note = Location (start to end; relative to TSS): CD47_19_49; note = Orientation (relative to transcription): antisense; note = sgRNA Position: 108091008; note = Sequence Name: 56322-704_101_SL_seq_8788
cgccgccgcgcgtcacaggc

SEQ ID NO: 8789 - DNA, 20 bp, Homo sapiens
  source 1..20: mol_type = genomic DNA; note = Gene: CD47; note = Location (start to end; relative to TSS): CD47_52_82; note = Orientation (relative to transcription): antisense; note = sgRNA Position: 108090975; note = Sequence Name: 56322-704_101_SL_seq_8789
gcagccgccgccgccgttac

SEQ ID NO: 8790 - DNA, 20 bp, Homo sapiens
  source 1..20: mol_type = genomic DNA; note = Gene: CD48; note = Location (start to end; relative to TSS): CD48_65_95; note = Orientation (relative to transcription): sense; note = sgRNA Position: 160711733; note = Sequence Name: 56322-704_101_SL_seq_8790
ttgggattcgtgtctggctc

SEQ ID NO: 8791 - DNA, 20 bp, Homo sapiens
  source 1..20: mol_type = genomic DNA; note = Gene: CD48; note = Location (start to end; relative to TSS): CD48_111_141; note = Orientation (relative to transcription): antisense; note = sgRNA Position: 160711707; note = Sequence Name: 56322-704_101_SL_seq_8791
ctggtcaccaggagtgacag

SEQ ID NO: 8792 - DNA, 20 bp, Homo sapiens
  source 1..20: mol_type = genomic DNA; note = Gene: CD48; note = Location (start to end; relative to TSS): CD48_29_59; note = Orientation (relative to transcription): antisense; note = sgRNA Position: 160711789; note = Sequence Name: 56322-704_101_SL_seq_8792
ccagaacttcccagcaacgc

SEQ ID NO: 8793 - DNA, 20 bp, Homo sapiens
  source 1..20: mol_type = genomic DNA; note = Gene: CD48; note = Location (start to end; relative to TSS): CD48_95_125; note = Orientation (relative to transcription): sense; note = sgRNA Position: 160711703; note = Sequence Name: 56322-704_101_SL_seq_8793
actgctgcctctgtcactcc

SEQ ID NO: 8794 - DNA, 20 bp, Homo sapiens
  source 1..20: mol_type = genomic DNA; note = Gene: CD48; note = Location (start to end; relative to TSS): CD48_24_54; note = Orientation (relative to transcription): sense; note = sgRNA Position: 160711774; note = Sequence Name: 56322-704_101_SL_seq_8794
cgttgctgggaagttctgga

SEQ ID NO: 8795 - DNA, 20 bp, Homo sapiens
  source 1..20: mol_type = genomic DNA; note = Gene: CD48; note = Location (start to end; relative to TSS): CD48_67_97; note = Orientation (relative to transcription): antisense; note = sgRNA Position: 160711751; note = Sequence Name: 56322-704_101_SL_seq_8795
cagacacgaatcccaacctc

SEQ ID NO: 8796 - DNA, 20 bp, Homo sapiens
  source 1..20: mol_type = genomic DNA; note = Gene: CD48; note = Location (start to end; relative to TSS): CD48_11_41; note = Orientation (relative to transcription): antisense; note = sgRNA Position: 160711807; note = Sequence Name: 56322-704_101_SL_seq_8796
gcaggagacagttgagagcc

SEQ ID NO: 8797 - DNA, 20 bp, Homo sapiens
  source 1..20: mol_type = genomic DNA; note = Gene: CD48; note = Location (start to end; relative to TSS): CD48_65_95; note = Orientation (relative to transcription): sense; note = sgRNA Position: 160711733; note = Sequence Name: 56322-704_101_SL_seq_8797
ttgggattcgtgtctggctc

SEQ ID NO: 8798 - DNA, 20 bp, Homo sapiens
  source 1..20: mol_type = genomic DNA; note = Gene: CD48; note = Location (start to end; relative to TSS): CD48_0_30; note = Orientation (relative to transcription): antisense; note = sgRNA Position: 160711818; note = Sequence Name: 56322-704_101_SL_seq_8798
ttgagagcctggctagaaaa

SEQ ID NO: 8799 - DNA, 20 bp, Homo sapiens
  source 1..20: mol_type = genomic DNA; note = Gene: CD48; note = Location (start to end; relative to TSS): CD48_42_72; note = Orientation (relative to transcription): sense; note = sgRNA Position: 160711756; note = Sequence Name: 56322-704_101_SL_seq_8799
gaaggaagcatgtgctccag

SEQ ID NO: 8800 - DNA, 20 bp, Homo sapiens
  source 1..20: mol_type = genomic DNA; note = Gene: CD7; note = Location (start to end; relative to TSS): CD7_58_88; note = Orientation (relative to transcription): sense; note = sgRNA Position: 82317526; note = Sequence Name: 56322-704_101_SL_seq_8800
gaggctcagctgcactcgcc

SEQ ID NO: 8801 - DNA, 20 bp, Homo sapiens
  source 1..20: mol_type = genomic DNA; note = Gene: CD7; note = Location (start to end; relative to TSS): CD7_90_120; note = Orientation (relative to transcription): sense; note = sgRNA Position: 82317494; note = Sequence Name: 56322-704_101_SL_seq_8801
ctgggtgtggggaacatggc

SEQ ID NO: 8802 - DNA, 20 bp, Homo sapiens
  source 1..20: mol_type = genomic DNA; note = Gene: CD7; note = Location (start to end; relative to TSS): CD7_53_83; note = Orientation (relative to transcription): antisense; note = sgRNA Position: 82317551; note = Sequence Name: 56322-704_101_SL_seq_8802
ctgagcctctctgggtctac

SEQ ID NO: 8803 - DNA, 20 bp, Homo sapiens
  source 1..20: mol_type = genomic DNA; note = Gene: CD7; note = Location (start to end; relative to TSS): CD7_85_115; note = Orientation (relative to transcription): antisense; note = sgRNA Position: 82317519; note = Sequence Name: 56322-704_101_SL_seq_8803
cacacccagctctcccagcc

SEQ ID NO: 8804 - DNA, 20 bp, Homo sapiens
  source 1..20: mol_type = genomic DNA; note = Gene: CD7; note = Location (start to end; relative to TSS): CD7_18_48; note = Orientation (relative to transcription): sense; note = sgRNA Position: 82317566; note = Sequence Name: 56322-704_101_SL_seq_8804
ctcctgtgtgctgctctctg

SEQ ID NO: 8805 - DNA, 20 bp, Homo sapiens
  source 1..20: mol_type = genomic DNA; note = Gene: CD7; note = Location (start to end; relative to TSS): CD7_61_91; note = Orientation (relative to transcription): antisense; note = sgRNA Position: 82317543; note = Sequence Name: 56322-704_101_SL_seq_8805
gagtgcagctgagcctctct

SEQ ID NO: 8806 - DNA, 20 bp, Homo sapiens
  source 1..20: mol_type = genomic DNA; note = Gene: CD7; note = Location (start to end; relative to TSS): CD7_19_49; note = Orientation (relative to transcription): antisense; note = sgRNA Position: 82317585; note = Sequence Name: 56322-704_101_SL_seq_8806
agcagcacacaggagaccgc

SEQ ID NO: 8807 - DNA, 20 bp, Homo sapiens
  source 1..20: mol_type = genomic DNA; note = Gene: CD7; note = Location (start to end; relative to TSS): CD7_58_88; note = Orientation (relative to transcription): sense; note = sgRNA Position: 82317526; note = Sequence Name: 56322-704_101_SL_seq_8807
gaggctcagctgcactcgcc

SEQ ID NO: 8808 - DNA, 20 bp, Homo sapiens
  source 1..20: mol_type = genomic DNA; note = Gene: CD7; note = Location (start to end; relative to TSS): CD7_20_50; note = Orientation (relative to transcription): sense; note = sgRNA Position: 82317564; note = Sequence Name: 56322-704_101_SL_seq_8808
cctgtgtgctgctctctgtg

SEQ ID NO: 8809 - DNA, 20 bp, Homo sapiens
  source 1..20: mol_type = genomic DNA; note = Gene: CD7; note = Location (start to end; relative to TSS): CD7_53_83; note = Orientation (relative to transcription): antisense; note = sgRNA Position: 82317551; note = Sequence Name: 56322-704_101_SL_seq_8809
ctgagcctctctgggtctac

SEQ ID NO: 8810 - DNA, 20 bp, Homo sapiens
  source 1..20: mol_type = genomic DNA; note = Gene: CD79A; note = Location (start to end; relative to TSS): CD79A_29_59; note = Orientation (relative to transcription): antisense; note = sgRNA Position: 41877314; note = Sequence Name: 56322-704_101_SL_seq_8810
tggaggactcctggaccccc

SEQ ID NO: 8811 - DNA, 20 bp, Homo sapiens
  source 1..20: mol_type = genomic DNA; note = Gene: CD79A; note = Location (start to end; relative to TSS): CD79A_74_104; note = Orientation (relative to transcription): sense; note = sgRNA Position: 41877379; note = Sequence Name: 56322-704_101_SL_seq_8811
ctgctgtctgctgtctacct

SEQ ID NO: 8812 - DNA, 20 bp, Homo sapiens
  source 1..20: mol_type = genomic DNA; note = Gene: CD79A; note = Location (start to end; relative to TSS): CD79A_13_43; note = Orientation (relative to transcription): antisense; note = sgRNA Position: 41877298; note = Sequence Name: 56322-704_101_SL_seq_8812
ccccaggcatcttctcccag

SEQ ID NO: 8813 - DNA, 20 bp, Homo sapiens
  source 1..20: mol_type = genomic DNA; note = Gene: CD79A; note = Location (start to end; relative to TSS): CD79A_73_103; note = Orientation (relative to transcription): antisense; note = sgRNA Position: 41877358; note = Sequence Name: 56322-704_101_SL_seq_8813
cagcagacagcaggaagagg

SEQ ID NO: 8814 - DNA, 20 bp, Homo sapiens
  source 1..20: mol_type = genomic DNA; note = Gene: CD79A; note = Location (start to end; relative to TSS): CD79A_12_42; note = Orientation (relative to transcription): antisense; note = sgRNA Position: 41877297; note = Sequence Name: 56322-704_101_SL_seq_8814
cccaggcatcttctcccagt

SEQ ID NO: 8815 - DNA, 20 bp, Homo sapiens
  source 1..20: mol_type = genomic DNA; note = Gene: CD79A; note = Location (start to end; relative to TSS): CD79A_66_96; note = Orientation (relative to transcription): antisense; note = sgRNA Position: 41877351; note = Sequence Name: 56322-704_101_SL_seq_8815
cagcaggaagaggaggaaga

SEQ ID NO: 8816 - DNA, 20 bp, Homo sapiens
  source 1..20: mol_type = genomic DNA; note = Gene: CD79A; note = Location (start to end; relative to TSS): CD79A_11_41; note = Orientation (relative to transcription): sense; note = sgRNA Position: 41877316; note = Sequence Name: 56322-704_101_SL_seq_8816
gagaagatgcctgggggtcc

SEQ ID NO: 8817 - DNA, 20 bp, Homo sapiens
  source 1..20: mol_type = genomic DNA; note = Gene: CD79A; note = Location (start to end; relative to TSS): CD79A_63_93; note = Orientation (relative to transcription): antisense; note = sgRNA Position: 41877348; note = Sequence Name: 56322-704_101_SL_seq_8817
caggaagaggaggaagatgg

SEQ ID NO: 8818 - DNA, 20 bp, Homo sapiens
  source 1..20: mol_type = genomic DNA; note = Gene: CD79A; note = Location (start to end; relative to TSS): CD79A_8_38; note = Orientation (relative to transcription): antisense; note = sgRNA Position: 41877293; note = Sequence Name: 56322-704_101_SL_seq_8818
ggcatcttctcccagtgggt

SEQ ID NO: 8819 - DNA, 20 bp, Homo sapiens
  source 1..20: mol_type = genomic DNA; note = Gene: CD79A; note = Location (start to end; relative to TSS): CD79A_59_89; note = Orientation (relative to transcription): antisense; note = sgRNA Position: 41877344; note = Sequence Name: 56322-704_101_SL_seq_8819
aagaggaggaagatggtggc

SEQ ID NO: 8820 - DNA, 20 bp, Homo sapiens
  source 1..20: mol_type = genomic DNA; note = Gene: CD79B; note = Location (start to end; relative to TSS): CD79B_25_55; note = Orientation (relative to transcription): antisense; note = sgRNA Position: 63932302; note = Sequence Name: 56322-704_101_SL_seq_8820
caaacccgtgacaacgtccg

SEQ ID NO: 8821 - DNA, 20 bp, Homo sapiens
  source 1..20: mol_type = genomic DNA; note = Gene: CD79B; note = Location (start to end; relative to TSS): CD79B_82_112; note = Orientation (relative to transcription): sense; note = sgRNA Position: 63932225; note = Sequence Name: 56322-704_101_SL_seq_8821
tcctgtgcccagccactgga

SEQ ID NO: 8822 - DNA, 20 bp, Homo sapiens
  source 1..20: mol_type = genomic DNA; note = Gene: CD79B; note = Location (start to end; relative to TSS): CD79B_24_54; note = Orientation (relative to transcription): sense; note = sgRNA Position: 63932283; note = Sequence Name: 56322-704_101_SL_seq_8822
gttgtcacgggtttggggtc

SEQ ID NO: 8823 - DNA, 20 bp, Homo sapiens
  source 1..20: mol_type = genomic DNA; note = Gene: CD79B; note = Location (start to end; relative to TSS): CD79B_78_108; note = Orientation (relative to transcription): sense; note = sgRNA Position: 63932229; note = Sequence Name: 56322-704_101_SL_seq_8823
tgtctcctgtgcccagccac

SEQ ID NO: 8824 - DNA, 20 bp, Homo sapiens
  source 1..20: mol_type = genomic DNA; note = Gene: CD79B; note = Location (start to end; relative to TSS): CD79B_23_53; note = Orientation (relative to transcription): sense; note = sgRNA Position: 63932284; note = Sequence Name: 56322-704_101_SL_seq_8824
cgttgtcacgggtttggggt

SEQ ID NO: 8825 - DNA, 20 bp, Homo sapiens
  source 1..20: mol_type = genomic DNA; note = Gene: CD79B; note = Location (start to end; relative to TSS): CD79B_75_105; note = Orientation (relative to transcription): antisense; note = sgRNA Position: 63932252; note = Sequence Name: 56322-704_101_SL_seq_8825
cacaggagacaacgccagcc

SEQ ID NO: 8826 - DNA, 20 bp, Homo sapiens
  source 1..20: mol_type = genomic DNA; note = Gene: CD79B; note = Location (start to end; relative to TSS): CD79B_19_49; note = Orientation (relative to transcription): sense; note = sgRNA Position: 63932288; note = Sequence Name: 56322-704_101_SL_seq_8826
cggacgttgtcacgggtttg

SEQ ID NO: 8827 - DNA, 20 bp, Homo sapiens
  source 1..20: mol_type = genomic DNA; note = Gene: CD79B; note = Location (start to end; relative to TSS): CD79B_69_99; note = Orientation (relative to transcription): antisense; note = sgRNA Position: 63932258; note = Sequence Name: 56322-704_101_SL_seq_8827
agacaacgccagcctggcca

SEQ ID NO: 8828 - DNA, 20 bp, Homo sapiens
  source 1..20: mol_type = genomic DNA; note = Gene: CD79B; note = Location (start to end; relative to TSS): CD79B_17_47; note = Orientation (relative to transcription): antisense; note = sgRNA Position: 63932310; note = Sequence Name: 56322-704_101_SL_seq_8828
tgacaacgtccgaggctcct

SEQ ID NO: 8829 - DNA, 20 bp, Homo sapiens
  source 1..20: mol_type = genomic DNA; note = Gene: CD79B; note = Location (start to end; relative to TSS): CD79B_52_82; note = Orientation (relative to transcription): sense; note = sgRNA Position: 63932255; note = Sequence Name: 56322-704_101_SL_seq_8829
agcggtgaccatggccaggc

SEQ ID NO: 8830 - DNA, 20 bp, Homo sapiens
  source 1..20: mol_type = genomic DNA; note = Gene: CD80; note = Location (start to end; relative to TSS): CD80_89_119; note = Orientation (relative to transcription): sense; note = sgRNA Position: 119559501; note = Sequence Name: 56322-704_101_SL_seq_8830
agaagagaacatctcagaag

SEQ ID NO: 8831 - DNA, 20 bp, Homo sapiens
  source 1..20: mol_type = genomic DNA; note = Gene: CD80; note = Location (start to end; relative to TSS): CD80_175_205; note = Orientation (relative to transcription): sense; note = sgRNA Position: 119559415; note = Sequence Name: 56322-704_101_SL_seq_8831
atttactattatcttactat

SEQ ID NO: 8832 - DNA, 20 bp, Homo sapiens
  source 1..20: mol_type = genomic DNA; note = Gene: CD80; note = Location (start to end; relative to TSS): CD80_5_35; note = Orientation (relative to transcription): antisense; note = sgRNA Position: 119559605; note = Sequence Name: 56322-704_101_SL_seq_8832
taacttctgttactttacag

SEQ ID NO: 8833 - DNA, 20 bp, Homo sapiens
  source 1..20: mol_type = genomic DNA; note = Gene: CD80; note = Location (start to end; relative to TSS): CD80_174_204; note = Orientation (relative to transcription): sense; note = sgRNA Position: 119559416; note = Sequence Name: 56322-704_101_SL_seq_8833
catttactattatcttacta

SEQ ID NO: 8834 - DNA, 20 bp, Homo sapiens
  source 1..20: mol_type = genomic DNA; note = Gene: CD80; note = Location (start to end; relative to TSS): CD80_3_33; note = Orientation (relative to transcription): sense; note = sgRNA Position: 119559587; note = Sequence Name: 56322-704_101_SL_seq_8834
aaagtaacagaagttagaag

SEQ ID NO: 8835 - DNA, 20 bp, Homo sapiens
  source 1..20: mol_type = genomic DNA; note = Gene: CD80; note = Location (start to end; relative to TSS): CD80_128_158; note = Orientation (relative to transcription): sense; note = sgRNA Position: 119559462; note = Sequence Name: 56322-704_101_SL_seq_8835
caaaggatttaaagaaaaag

SEQ ID NO: 8836 - DNA, 20 bp, Homo sapiens
  source 1..20: mol_type = genomic DNA; note = Gene: CD80; note = Location (start to end; relative to TSS): CD80_2_32; note = Orientation (relative to transcription): sense; note = sgRNA Position: 119559588; note = Sequence Name: 56322-704_101_SL_seq_8836
taaagtaacagaagttagaa

SEQ ID NO: 8837 - DNA, 20 bp, Homo sapiens
  source 1..20: mol_type = genomic DNA; note = Gene: CD80; note = Location (start to end; relative to TSS): CD80_111_141; note = Orientation (relative to transcription): sense; note = sgRNA Position: 119559479; note = Sequence Name: 56322-704_101_SL_seq_8837
gagtcttaccctgaaatcaa

SEQ ID NO: 8838 - DNA, 20 bp, Homo sapiens
  source 1..20: mol_type = genomic DNA; note = Gene: CD80; note = Location (start to end; relative to TSS): CD80_1_31; note = Orientation (relative to transcription): sense; note = sgRNA Position: 119559589; note = Sequence Name: 56322-704_101_SL_seq_8838
gtaaagtaacagaagttaga

SEQ ID NO: 8839 - DNA, 20 bp, Homo sapiens
  source 1..20: mol_type = genomic DNA; note = Gene: CD80; note = Location (start to end; relative to TSS): CD80_89_119; note = Orientation (relative to transcription): sense; note = sgRNA Position: 119559501; note = Sequence Name: 56322-704_101_SL_seq_8839
agaagagaacatctcagaag

SEQ ID NO: 8840 - DNA, 20 bp, Homo sapiens
  source 1..20: mol_type = genomic DNA; note = Gene: CD83; note = Location (start to end; relative to TSS): CD83_38_68; note = Orientation (relative to transcription): antisense; note = sgRNA Position: 14117816; note = Sequence Name: 56322-704_101_SL_seq_8840
aagctggaggccgcgcgaca

SEQ ID NO: 8841 - DNA, 20 bp, Homo sapiens
  source 1..20: mol_type = genomic DNA; note = Gene: CD83; note = Location (start to end; relative to TSS): CD83_109_139; note = Orientation (relative to transcription): antisense; note = sgRNA Position: 14117887; note = Sequence Name: 56322-704_101_SL_seq_8841
gggtgtcgtggaggggcggg

SEQ ID NO: 8842 - DNA, 20 bp, Homo sapiens
  source 1..20: mol_type = genomic DNA; note = Gene: CD83; note = Location (start to end; relative to TSS): CD83_46_76; note = Orientation (relative to transcription): sense; note = sgRNA Position: 14117844; note = Sequence Name: 56322-704_101_SL_seq_8842
cagcttctgctcctgagctg

SEQ ID NO: 8843 - DNA, 20 bp, Homo sapiens
  source 1..20: mol_type = genomic DNA; note = Gene: CD83; note = Location (start to end; relative to TSS): CD83_102_132; note = Orientation (relative to transcription): antisense; note = sgRNA Position: 14117880; note = Sequence Name: 56322-704_101_SL_seq_8843
gtggaggggcggggggcgac

SEQ ID NO: 8844 - DNA, 20 bp, Homo sapiens
  source 1..20: mol_type = genomic DNA; note = Gene: CD83; note = Location (start to end; relative to TSS): CD83_50_80; note = Orientation (relative to transcription): sense; note = sgRNA Position: 14117848; note = Sequence Name: 56322-704_101_SL_seq_8844
ttctgctcctgagctgcggt

SEQ ID NO: 8845 - DNA, 20 bp, Homo sapiens
  source 1..20: mol_type = genomic DNA; note = Gene: CD83; note = Location (start to end; relative to TSS): CD83_93_123; note = Orientation (relative to transcription): antisense; note = sgRNA Position: 14117871; note = Sequence Name: 56322-704_101_SL_seq_8845
cggggggcgacaggcgagac

SEQ ID NO: 8846 - DNA, 20 bp, Homo sapiens
  source 1..20: mol_type = genomic DNA; note = Gene: CD83; note = Location (start to end; relative to TSS): CD83_34_64; note = Orientation (relative to transcription): antisense; note = sgRNA Position: 14117812; note = Sequence Name: 56322-704_101_SL_seq_8846
tggaggccgcgcgacatggc

SEQ ID NO: 8847 - DNA, 20 bp, Homo sapiens
  source 1..20: mol_type = genomic DNA; note = Gene: CD83; note = Location (start to end; relative to TSS): CD83_66_96; note = Orientation (relative to transcription): antisense; note = sgRNA Position: 14117844; note = Sequence Name: 56322-704_101_SL_seq_8847
cgcgagccctaccgcagctc

SEQ ID NO: 8848 - DNA, 20 bp, Homo sapiens
  source 1..20: mol_type = genomic DNA; note = Gene: CD83; note = Location (start to end; relative to TSS): CD83_19_49; note = Orientation (relative to transcription): sense; note = sgRNA Position: 14117817; note = Sequence Name: 56322-704_101_SL_seq_8848
agcgctccagccatgtcgcg

SEQ ID NO: 8849 - DNA, 20 bp, Homo sapiens
  source 1..20: mol_type = genomic DNA; note = Gene: CD83; note = Location (start to end; relative to TSS): CD83_50_80; note = Orientation (relative to transcription): sense; note = sgRNA Position: 14117848; note = Sequence Name: 56322-704_101_SL_seq_8849
ttctgctcctgagctgcggt

SEQ ID NO: 8850 - DNA, 20 bp, Homo sapiens
  source 1..20: mol_type = genomic DNA; note = Gene: CD84; note = Location (start to end; relative to TSS): CD84_71_101; note = Orientation (relative to transcription): antisense; note = sgRNA Position: 160579421; note = Sequence Name: 56322-704_101_SL_seq_8850
aaaggagcaagatccatagg

SEQ ID NO: 8851 - DNA, 20 bp, Homo sapiens
  source 1..20: mol_type = genomic DNA; note = Gene: CD84; note = Location (start to end; relative to TSS): CD84_103_133; note = Orientation (relative to transcription): antisense; note = sgRNA Position: 160579389; note = Sequence Name: 56322-704_101_SL_seq_8851
cagcaagggtcagaactcac

SEQ ID NO: 8852 - DNA, 20 bp, Homo sapiens
  source 1..20: mol_type = genomic DNA; note = Gene: CD84; note = Location (start to end; relative to TSS): CD84_49_79; note = Orientation (relative to transcription): sense; note = sgRNA Position: 160579423; note = Sequence Name: 56322-704_101_SL_seq_8852
agatggctcagcaccaccta

SEQ ID NO: 8853 - DNA, 20 bp, Homo sapiens
  source 1..20: mol_type = genomic DNA; note = Gene: CD84; note = Location (start to end; relative to TSS): CD84_95_125; note = Orientation (relative to transcription): antisense; note = sgRNA Position: 160579397; note = Sequence Name: 56322-704_101_SL_seq_8853
gtcagaactcacaggtttgc

SEQ ID NO: 8854 - DNA, 20 bp, Homo sapiens
  source 1..20: mol_type = genomic DNA; note = Gene: CD84; note = Location (start to end; relative to TSS): CD84_34_64; note = Orientation (relative to transcription): antisense; note = sgRNA Position: 160579458; note = Sequence Name: 56322-704_101_SL_seq_8854
tttcagggtctaaccttctg

SEQ ID NO: 8855 - DNA, 20 bp, Homo sapiens
  source 1..20: mol_type = genomic DNA; note = Gene: CD84; note = Location (start to end; relative to TSS): CD84_89_119; note = Orientation (relative to transcription): antisense; note = sgRNA Position: 160579403; note = Sequence Name: 56322-704_101_SL_seq_8855
actcacaggtttgcaggcaa

SEQ ID NO: 8856 - DNA, 20 bp, Homo sapiens
  source 1..20: mol_type = genomic DNA; note = Gene: CD84; note = Location (start to end; relative to TSS): CD84_32_62; note = Orientation (relative to transcription): sense; note = sgRNA Position: 160579440; note = Sequence Name: 56322-704_101_SL_seq_8856
aggttagaccctgaaagaga

SEQ ID NO: 8857 - DNA, 20 bp, Homo sapiens
  source 1..20: mol_type = genomic DNA; note = Gene: CD84; note = Location (start to end; relative to TSS): CD84_74_104; note = Orientation (relative to transcription): antisense; note = sgRNA Position: 160579418; note = Sequence Name: 56322-704_101_SL_seq_8857
ggcaaaggagcaagatccat

SEQ ID NO: 8858 - DNA, 20 bp, Homo sapiens
  source 1..20: mol_type = genomic DNA; note = Gene: CD84; note = Location (start to end; relative to TSS): CD84_24_54; note = Orientation (relative to transcription): antisense; note = sgRNA Position: 160579468; note = Sequence Name: 56322-704_101_SL_seq_8858
taaccttctgtggaaaagca

SEQ ID NO: 8859 - DNA, 20 bp, Homo sapiens
  source 1..20: mol_type = genomic DNA; note = Gene: CD84; note = Location (start to end; relative to TSS): CD84_71_101; note = Orientation (relative to transcription): antisense; note = sgRNA Position: 160579421; note = Sequence Name: 56322-704_101_SL_seq_8859
aaaggagcaagatccatagg

SEQ ID NO: 8860 - DNA, 20 bp, Homo sapiens
  source 1..20: mol_type = genomic DNA; note = Gene: CD86; note = Location (start to end; relative to TSS): CD86_30_60; note = Orientation (relative to transcription): sense; note = sgRNA Position: 122055418; note = Sequence Name: 56322-704_101_SL_seq_8860
gcttctctgctgctgtaaca

SEQ ID NO: 8861 - DNA, 20 bp, Homo sapiens
  source 1..20: mol_type = genomic DNA; note = Gene: CD86; note = Location (start to end; relative to TSS): CD86_134_164; note = Orientation (relative to transcription): antisense; note = sgRNA Position: 122055502; note = Sequence Name: 56322-704_101_SL_seq_8861
agaattattactcaccactg

SEQ ID NO: 8862 - DNA, 20 bp, Homo sapiens
  source 1..20: mol_type = genomic DNA; note = Gene: CD86; note = Location (start to end; relative to TSS): CD86_48_78; note = Orientation (relative to transcription): sense; note = sgRNA Position: 122055436; note = Sequence Name: 56322-704_101_SL_seq_8862
cagggactagcacagacaca

SEQ ID NO: 8863 - DNA, 20 bp, Homo sapiens
  source 1..20: mol_type = genomic DNA; note = Gene: CD86; note = Location (start to end; relative to TSS): CD86_111_141; note = Orientation (relative to transcription): sense; note = sgRNA Position: 122055499; note = Sequence Name: 56322-704_101_SL_seq_8863
cagccaaaatggatccccag

SEQ ID NO: 8864 - DNA, 20 bp, Homo sapiens
  source 1..20: mol_type = genomic DNA; note = Gene: CD86; note = Location (start to end; relative to TSS): CD86_56_86; note = Orientation (relative to transcription): sense; note = sgRNA Position: 122055444; note = Sequence Name: 56322-704_101_SL_seq_8864
agcacagacacacggatgag

SEQ ID NO: 8865 - DNA, 20 bp, Homo sapiens
  source 1..20: mol_type = genomic DNA; note = Gene: CD86; note = Location (start to end; relative to TSS): CD86_100_130; note = Orientation (relative to transcription): sense; note = sgRNA Position: 122055488; note = Sequence Name: 56322-704_101_SL_seq_8865
cacagcagaagcagccaaaa

SEQ ID NO: 8866 - DNA, 20 bp, Homo sapiens
  source 1..20: mol_type = genomic DNA; note = Gene: CD86; note = Location (start to end; relative to TSS): CD86_57_87; note = Orientation (relative to transcription): sense; note = sgRNA Position: 122055445; note = Sequence Name: 56322-704_101_SL_seq_8866
gcacagacacacggatgagt

SEQ ID NO: 8867 - DNA, 20 bp, Homo sapiens
  source 1..20: mol_type = genomic DNA; note = Gene: CD86; note = Location (start to end; relative to TSS): CD86_96_126; note = Orientation (relative to transcription): antisense; note = sgRNA Position: 122055464; note = Sequence Name: 56322-704_101_SL_seq_8867
ttctgctgtgacctaatatc

SEQ ID NO: 8868 - DNA, 20 bp, Homo sapiens
  source 1..20: mol_type = genomic DNA; note = Gene: CD86; note = Location (start to end; relative to TSS): CD86_8_38; note = Orientation (relative to transcription): antisense; note = sgRNA Position: 122055376; note = Sequence Name: 56322-704_101_SL_seq_8868
caccctgtgcaagccttcct

SEQ ID NO: 8869 - DNA, 20 bp, Homo sapiens
  source 1..20: mol_type = genomic DNA; note = Gene: CD86; note = Location (start to end; relative to TSS): CD86_48_78; note = Orientation (relative to transcription): sense; note = sgRNA Position: 122055436; note = Sequence Name: 56322-704_101_SL_seq_8869
cagggactagcacagacaca

SEQ ID NO: 8870 - DNA, 20 bp, Homo sapiens
  source 1..20: mol_type = genomic DNA; note = Gene: CD8A; note = Location (start to end; relative to TSS): CD8A_42_72; note = Orientation (relative to transcription): antisense; note = sgRNA Position: 86790867; note = Sequence Name: 56322-704_101_SL_seq_8870
ggctcgaagctcgggcgcga

SEQ ID NO: 8871 - DNA, 20 bp, Homo sapiens
  source 1..20: mol_type = genomic DNA; note = Gene: CD8A; note = Location (start to end; relative to TSS): CD8A_94_124; note = Orientation (relative to transcription): sense; note = sgRNA Position: 86790795; note = Sequence Name: 56322-704_101_SL_seq_8871
gaccgccttgctcctgccgc

SEQ ID NO: 8872 - DNA, 20 bp, Homo sapiens
  source 1..20: mol_type = genomic DNA; note = Gene: CD8A; note = Location (start to end; relative to TSS): CD8A_41_71; note = Orientation (relative to transcription): antisense; note = sgRNA Position: 86790868; note = Sequence Name: 56322-704_101_SL_seq_8872
gctcgaagctcgggcgcgag

SEQ ID NO: 8873 - DNA, 20 bp, Homo sapiens
  source 1..20: mol_type = genomic DNA; note = Gene: CD8A; note = Location (start to end; relative to TSS): CD8A_93_123; note = Orientation (relative to transcription): antisense; note = sgRNA Position: 86790816; note = Sequence Name: 56322-704_101_SL_seq_8873
gagcaaggcggtcactggta

SEQ ID NO: 8874 - DNA, 20 bp, Homo sapiens
  source 1..20: mol_type = genomic DNA; note = Gene: CD8A; note = Location (start to end; relative to TSS): CD8A_38_68; note = Orientation (relative to transcription): antisense; note = sgRNA Position: 86790871; note = Sequence Name: 56322-704_101_SL_seq_8874
cgaagctcgggcgcgagggg

SEQ ID NO: 8875 - DNA, 20 bp, Homo sapiens
  source 1..20: mol_type = genomic DNA; note = Gene: CD8A; note = Location (start to end; relative to TSS): CD8A_74_104; note = Orientation (relative to transcription): antisense; note = sgRNA Position: 86790835; note = Sequence Name: 56322-704_101_SL_seq_8875
aaggccatgacgcgctcccc

SEQ ID NO: 8876 - DNA, 20 bp, Homo sapiens
  source 1..20: mol_type = genomic DNA; note = Gene: CD8A; note = Location (start to end; relative to TSS): CD8A_31_61; note = Orientation (relative to transcription): antisense; note = sgRNA Position: 86790878; note = Sequence Name: 56322-704_101_SL_seq_8876
cgggcgcgaggggaggcgcg

SEQ ID NO: 8877 - DNA, 20 bp, Homo sapiens
  source 1..20: mol_type = genomic DNA; note = Gene: CD8A; note = Location (start to end; relative to TSS): CD8A_61_91; note = Orientation (relative to transcription): sense; note = sgRNA Position: 86790828; note = Sequence Name: 56322-704_101_SL_seq_8877
gcgtcctggggagcgcgtca

SEQ ID NO: 8878 - DNA, 20 bp, Homo sapiens
  source 1..20: mol_type = genomic DNA; note = Gene: CD8A; note = Location (start to end; relative to TSS): CD8A_20_50; note = Orientation (relative to transcription): antisense; note = sgRNA Position: 86790889; note = Sequence Name: 56322-704_101_SL_seq_8878
ggaggcgcgcgggagccggt

SEQ ID NO: 8879 - DNA, 20 bp, Homo sapiens
  source 1..20: mol_type = genomic DNA; note = Gene: CD8A; note = Location (start to end; relative to TSS): CD8A_50_80; note = Orientation (relative to transcription): antisense; note = sgRNA Position: 86790859; note = Sequence Name: 56322-704_101_SL_seq_8879
cgctgcttggctcgaagctc

SEQ ID NO: 8880 - DNA, 20 bp, Homo sapiens
  source 1..20: mol_type = genomic DNA; note = Gene: CD8B; note = Location (start to end; relative to TSS): CD8B_42_72; note = Orientation (relative to transcription): sense; note = sgRNA Position: 86861820; note = Sequence Name: 56322-704_101_SL_seq_8880
cgcgcagctgacaggtaagg

SEQ ID NO: 8881 - DNA, 20 bp, Homo sapiens
  source 1..20: mol_type = genomic DNA; note = Gene: CD8B; note = Location (start to end; relative to TSS): CD8B_79_109; note = Orientation (relative to transcription): sense; note = sgRNA Position: 86861783; note = Sequence Name: 56322-704_101_SL_seq_8881
cccaagggtctgcgctcccg

SEQ ID NO: 8882 - DNA, 20 bp, Homo sapiens
  source 1..20: mol_type = genomic DNA; note = Gene: CD8B; note = Location (start to end; relative to TSS): CD8B_39_69; note = Orientation (relative to transcription): sense; note = sgRNA Position: 86861823; note = Sequence Name: 56322-704_101_SL_seq_8882
ggccgcgcagctgacaggta

SEQ ID NO: 8883 - DNA, 20 bp, Homo sapiens
  source 1..20: mol_type = genomic DNA; note = Gene: CD8B; note = Location (start to end; relative to TSS): CD8B_78_108; note = Orientation (relative to transcription): sense; note = sgRNA Position: 86861784; note = Sequence Name: 56322-704_101_SL_seq_8883
acccaagggtctgcgctccc

SEQ ID NO: 8884 - DNA, 20 bp, Homo sapiens
  source 1..20: mol_type = genomic DNA; note = Gene: CD8B; note = Location (start to end; relative to TSS): CD8B_34_64; note = Orientation (relative to transcription): sense; note = sgRNA Position: 86861828; note = Sequence Name: 56322-704_101_SL_seq_8884
ctcttggccgcgcagctgac

SEQ ID NO: 8885 - DNA, 20 bp, Homo sapiens
  source 1..20: mol_type = genomic DNA; note = Gene: CD8B; note = Location (start to end; relative to TSS): CD8B_64_94; note = Orientation (relative to transcription): sense; note = sgRNA Position: 86861798; note = Sequence Name: 56322-704_101_SL_seq_8885
gcggcgcgcgggctacccaa

SEQ ID NO: 8886 - DNA, 20 bp, Homo sapiens
  source 1..20: mol_type = genomic DNA; note = Gene: CD8B; note = Location (start to end; relative to TSS): CD8B_28_58; note = Orientation (relative to transcription): antisense; note = sgRNA Position: 86861854; note = Sequence Name: 56322-704_101_SL_seq_8886
gccaagaggagccacagccg

SEQ ID NO: 8887 - DNA, 20 bp, Homo sapiens
  source 1..20: mol_type = genomic DNA; note = Gene: CD8B; note = Location (start to end; relative to TSS): CD8B_63_93; note = Orientation (relative to transcription): sense; note = sgRNA Position: 86861799; note = Sequence Name: 56322-704_101_SL_seq_8887
ggcggcgcgcgggctaccca

SEQ ID NO: 8888 - DNA, 20 bp, Homo sapiens
  source 1..20: mol_type = genomic DNA; note = Gene: CD8B; note = Location (start to end; relative to TSS): CD8B_18_48; note = Orientation (relative to transcription): sense; note = sgRNA Position: 86861844; note = Sequence Name: 56322-704_101_SL_seq_8888
gccgcggctgtggctcctct

SEQ ID NO: 8889 - DNA, 20 bp, Homo sapiens
  source 1..20: mol_type = genomic DNA; note = Gene: CD8B; note = Location (start to end; relative to TSS): CD8B_50_80; note = Orientation (relative to transcription): antisense; note = sgRNA Position: 86861832; note = Sequence Name: 56322-704_101_SL_seq_8889
cgccttacctgtcagctgcg

SEQ ID NO: 8890 - DNA, 20 bp, Homo sapiens
  source 1..20: mol_type = genomic DNA; note = Gene: CD96; note = Location (start to end; relative to TSS): CD96_93_123; note = Orientation (relative to transcription): antisense; note = sgRNA Position: 111542296; note = Sequence Name: 56322-704_101_SL_seq_8890
tacccttgacaaaatgtatc

SEQ ID NO: 8891 - DNA, 20 bp, Homo sapiens
  source 1..20: mol_type = genomic DNA; note = Gene: CD96; note = Location (start to end; relative to TSS): CD96_128_158; note = Orientation (relative to transcription): sense; note = sgRNA Position: 111542351; note = Sequence Name: 56322-704_101_SL_seq_8891
tgtcggatgggccgctttag

SEQ ID NO: 8892 - DNA, 20 bp, Homo sapiens
  source 1..20: mol_type = genomic DNA; note = Gene: CD96; note = Location (start to end; relative to TSS): CD96_82_112; note = Orientation (relative to transcription): sense; note = sgRNA Position: 111542305; note = Sequence Name: 56322-704_101_SL_seq_8892
atccagatacattttgtcaa

SEQ ID NO: 8893 - DNA, 20 bp, Homo sapiens
  source 1..20: mol_type = genomic DNA; note = Gene: CD96; note = Location (start to end; relative to TSS): CD96_115_145; note = Orientation (relative to transcription): sense; note = sgRNA Position: 111542338; note = Sequence Name: 56322-704_101_SL_seq_8893
agttgtcccttcttgtcgga

SEQ ID NO: 8894 - DNA, 20 bp, Homo sapiens
  source 1..20: mol_type = genomic DNA; note = Gene: CD96; note = Location (start to end; relative to TSS): CD96_81_111; note = Orientation (relative to transcription): sense; note = sgRNA Position: 111542304; note = Sequence Name: 56322-704_101_SL_seq_8894
catccagatacattttgtca

SEQ ID NO: 8895 - DNA, 20 bp, Homo sapiens
  source 1..20: mol_type = genomic DNA; note = Gene: CD96; note = Location (start to end; relative to TSS): CD96_111_141; note = Orientation (relative to transcription): sense; note = sgRNA Position: 111542334; note = Sequence Name: 56322-704_101_SL_seq_8895
ttccagttgtcccttcttgt

SEQ ID NO: 8896 - DNA, 20 bp, Homo sapiens
  source 1..20: mol_type = genomic DNA; note = Gene: CD96; note = Location (start to end; relative to TSS): CD96_7_37; note = Orientation (relative to transcription): sense; note = sgRNA Position: 111542230; note = Sequence Name: 56322-704_101_SL_seq_8896
attacagaaatgctggtgta

SEQ ID NO: 8897 - DNA, 20 bp, Homo sapiens
  source 1..20: mol_type = genomic DNA; note = Gene: CD96; note = Location (start to end; relative to TSS): CD96_82_112; note = Orientation (relative to transcription): sense; note = sgRNA Position: 111542305; note = Sequence Name: 56322-704_101_SL_seq_8897
atccagatacattttgtcaa

SEQ ID NO: 8898 - DNA, 20 bp, Homo sapiens
  source 1..20: mol_type = genomic DNA; note = Gene: CD96; note = Location (start to end; relative to TSS): CD96_0_30; note = Orientation (relative to transcription): sense; note = sgRNA Position: 111542223; note = Sequence Name: 56322-704_101_SL_seq_8898
tgtgatcattacagaaatgc

SEQ ID NO: 8899 - DNA, 20 bp, Homo sapiens
  source 1..20: mol_type = genomic DNA; note = Gene: CD96; note = Location (start to end; relative to TSS): CD96_81_111; note = Orientation (relative to transcription): sense; note = sgRNA Position: 111542304; note = Sequence Name: 56322-704_101_SL_seq_8899
catccagatacattttgtca

SEQ ID NO: 8900 - DNA, 20 bp, Homo sapiens
  source 1..20: mol_type = genomic DNA; note = Gene: CDON; note = Location (start to end; relative to TSS): CDON_23_53; note = Orientation (relative to transcription): antisense; note = sgRNA Position: 126062839; note = Sequence Name: 56322-704_101_SL_seq_8900
agccgggctcccgggctcag

SEQ ID NO: 8901 - DNA, 20 bp, Homo sapiens
  source 1..20: mol_type = genomic DNA; note = Gene: CDON; note = Location (start to end; relative to TSS): CDON_91_121; note = Orientation (relative to transcription): sense; note = sgRNA Position: 126062751; note = Sequence Name: 56322-704_101_SL_seq_8901
cgccccagccccggcgtgcg

SEQ ID NO: 8902 - DNA, 20 bp, Homo sapiens
  source 1..20: mol_type = genomic DNA; note = Gene: CDON; note = Location (start to end; relative to TSS): CDON_21_51; note = Orientation (relative to transcription): sense; note = sgRNA Position: 126062821; note = Sequence Name: 56322-704_101_SL_seq_8902
gcccgggagcccggctcgcg

SEQ ID NO: 8903 - DNA, 20 bp, Homo sapiens
  source 1..20: mol_type = genomic DNA; note = Gene: CDON; note = Location (start to end; relative to TSS): CDON_86_116; note = Orientation (relative to transcription): antisense; note = sgRNA Position: 126062776; note = Sequence Name: 56322-704_101_SL_seq_8903
gctggggcgctgggcagggc

SEQ ID NO: 8904 - DNA, 20 bp, Homo sapiens
  source 1..20: mol_type = genomic DNA; note = Gene: CDON; note = Location (start to end; relative to TSS): CDON_20_50; note = Orientation (relative to transcription): antisense; note = sgRNA Position: 126062842; note = Sequence Name: 56322-704_101_SL_seq_8904
cgggctcccgggctcagggg

SEQ ID NO: 8905 - DNA, 20 bp, Homo sapiens
  source 1..20: mol_type = genomic DNA; note = Gene: CDON; note = Location (start to end; relative to TSS): CDON_82_112; note = Orientation (relative to transcription): sense; note = sgRNA Position: 126062760; note = Sequence Name: 56322-704_101_SL_seq_8905
cctgcccagcgccccagccc

SEQ ID NO: 8906 - DNA, 20 bp, Homo sapiens
  source 1..20: mol_type = genomic DNA; note = Gene: CDON; note = Location (start to end; relative to TSS): CDON_18_48; note = Orientation (relative to transcription): antisense; note = sgRNA Position: 126062844; note = Sequence Name: 56322-704_101_SL_seq_8906
ggctcccgggctcaggggag

SEQ ID NO: 8907 - DNA, 20 bp, Homo sapiens
  source 1..20: mol_type = genomic DNA; note = Gene: CDON; note = Location (start to end; relative to TSS): CDON_75_105; note = Orientation (relative to transcription): antisense; note = sgRNA Position: 126062787; note = Sequence Name: 56322-704_101_SL_seq_8907
gggcagggcgggcgggcgtg

SEQ ID NO: 8908 - DNA, 20 bp, Homo sapiens
  source 1..20: mol_type = genomic DNA; note = Gene: CDON; note = Location (start to end; relative to TSS): CDON_19_49; note = Orientation (relative to transcription): antisense; note = sgRNA Position: 126062843; note = Sequence Name: 56322-704_101_SL_seq_8908
gggctcccgggctcagggga

SEQ ID NO: 8909 - DNA, 20 bp, Homo sapiens
  source 1..20: mol_type = genomic DNA; note = Gene: CDON; note = Location (start to end; relative to TSS): CDON_68_98; note = Orientation (relative to transcription): antisense; note = sgRNA Position: 126062794; note = Sequence Name: 56322-704_101_SL_seq_8909
gcgggcgggcgtggggtccc

SEQ ID NO: 8910 - DNA, 20 bp, Homo sapiens
  source 1..20: mol_type = genomic DNA; note = Gene: CEACAM1; note = Location (start to end; relative to TSS): CEACAM1_55_85; note = Orientation (relative to transcription): antisense; note = sgRNA Position: 42528422; note = Sequence Name: 56322-704_101_SL_seq_8910
tggaggagagcttgggctcc

SEQ ID NO: 8911 - DNA, 20 bp, Homo sapiens
  source 1..20: mol_type = genomic DNA; note = Gene: CEACAM1; note = Location (start to end; relative to TSS): CEACAM1_106_136; note = Orientation (relative to transcription): antisense; note = sgRNA Position: 42528371; note = Sequence Name: 56322-704_101_SL_seq_8911
tggggctgagaggtgcccca

SEQ ID NO: 8912 - DNA, 20 bp, Homo sapiens
  source 1..20: mol_type = genomic DNA; note = Gene: CEACAM1; note = Location (start to end; relative to TSS): CEACAM1_62_92; note = Orientation (relative to transcription): antisense; note = sgRNA Position: 42528415; note = Sequence Name: 56322-704_101_SL_seq_8912
tcacctgtggaggagagctt

SEQ ID NO: 8913 - DNA, 20 bp, Homo sapiens
  source 1..20: mol_type = genomic DNA; note = Gene: CEACAM1; note = Location (start to end; relative to TSS): CEACAM1_93_123; note = Orientation (relative to transcription): antisense; note = sgRNA Position: 42528384; note = Sequence Name: 56322-704_101_SL_seq_8913
tgccccatggtgtctcctgc

SEQ ID NO: 8914 - DNA, 20 bp, Homo sapiens
  source 1..20: mol_type = genomic DNA; note = Gene: CEACAM1; note = Location (start to end; relative to TSS): CEACAM1_39_69; note = Orientation (relative to transcription): antisense; note = sgRNA Position: 42528438; note = Sequence Name: 56322-704_101_SL_seq_8914
ctccaggaacgcttcgagca

SEQ ID NO: 8915 - DNA, 20 bp, Homo sapiens
  source 1..20: mol_type = genomic DNA; note = Gene: CEACAM1; note = Location (start to end; relative to TSS): CEACAM1_81_111; note = Orientation (relative to transcription): sense; note = sgRNA Position: 42528376; note = Sequence Name: 56322-704_101_SL_seq_8915
gggccagcaggagacaccat

SEQ ID NO: 8916 - DNA, 20 bp, Homo sapiens
  source 1..20: mol_type = genomic DNA; note = Gene: CEACAM1; note = Location (start to end; relative to TSS): CEACAM1_50_80; note = Orientation (relative to transcription): sense; note = sgRNA Position: 42528407; note = Sequence Name: 56322-704_101_SL_seq_8916
gagcccaagctctcctccac

SEQ ID NO: 8917 - DNA, 20 bp, Homo sapiens
  source 1..20: mol_type = genomic DNA; note = Gene: CEACAM1; note = Location (start to end; relative to TSS): CEACAM1_80_110; note = Orientation (relative to transcription): sense; note = sgRNA Position: 42528377; note = Sequence Name: 56322-704_101_SL_seq_8917
agggccagcaggagacacca

SEQ ID NO: 8918 - DNA, 20 bp, Homo sapiens
  source 1..20: mol_type = genomic DNA; note = Gene: CEACAM1; note = Location (start to end; relative to TSS): CEACAM1_28_58; note = Orientation (relative to transcription): sense; note = sgRNA Position: 42528429; note = Sequence Name: 56322-704_101_SL_seq_8918
agccgtgctcgaagcgttcc

SEQ ID NO: 8919 - DNA, 20 bp, Homo sapiens
  source 1..20: mol_type = genomic DNA; note = Gene: CEACAM1; note = Location (start to end; relative to TSS): CEACAM1_62_92; note = Orientation (relative to transcription): antisense; note = sgRNA Position: 42528415; note = Sequence Name: 56322-704_101_SL_seq_8919
tcacctgtggaggagagctt

SEQ ID NO: 8920 - DNA, 20 bp, Homo sapiens
  source 1..20: mol_type = genomic DNA; note = Gene: CEACAM16; note = Location (start to end; relative to TSS): CEACAM16_79_109; note = Orientation (relative to transcription): sense; note = sgRNA Position: 44699256; note = Sequence Name: 56322-704_101_SL_seq_8920
catttactctgcgccagtcg

SEQ ID NO: 8921 - DNA, 20 bp, Homo sapiens
  source 1..20: mol_type = genomic DNA; note = Gene: CEACAM16; note = Location (start to end; relative to TSS): CEACAM16_157_187; note = Orientation (relative to transcription): antisense; note = sgRNA Position: 44699314; note = Sequence Name: 56322-704_101_SL_seq_8921
aacaatagtactcacatcac

SEQ ID NO: 8922 - DNA, 20 bp, Homo sapiens
  source 1..20: mol_type = genomic DNA; note = Gene: CEACAM16; note = Location (start to end; relative to TSS): CEACAM16_26_56; note = Orientation (relative to transcription): antisense; note = sgRNA Position: 44699183; note = Sequence Name: 56322-704_101_SL_seq_8922
atgagcacctattgtttgcc

SEQ ID NO: 8923 - DNA, 20 bp, Homo sapiens
  source 1..20: mol_type = genomic DNA; note = Gene: CEACAM16; note = Location (start to end; relative to TSS): CEACAM16_156_186; note = Orientation (relative to transcription): antisense; note = sgRNA Position: 44699313; note = Sequence Name: 56322-704_101_SL_seq_8923
acaatagtactcacatcaca

SEQ ID NO: 8924 - DNA, 20 bp, Homo sapiens
  source 1..20: mol_type = genomic DNA; note = Gene: CEACAM16; note = Location (start to end; relative to TSS): CEACAM16_10_40; note = Orientation (relative to transcription): sense; note = sgRNA Position: 44699187; note = Sequence Name: 56322-704_101_SL_seq_8924
aacagcacctggcaaacaat

SEQ ID NO: 8925 - DNA, 20 bp, Homo sapiens
  source 1..20: mol_type = genomic DNA; note = Gene: CEACAM16; note = Location (start to end; relative to TSS): CEACAM16_145_175; note = Orientation (relative to transcription): antisense; note = sgRNA Position: 44699302; note = Sequence Name: 56322-704_101_SL_seq_8925
cacatcacagggctgttgaa

SEQ ID NO: 8926 - DNA, 20 bp, Homo sapiens
  source 1..20: mol_type = genomic DNA; note = Gene: CEACAM16; note = Location (start to end; relative to TSS): CEACAM16_6_36; note = Orientation (relative to transcription): antisense; note = sgRNA Position: 44699163; note = Sequence Name: 56322-704_101_SL_seq_8926
aggtgctgttctaggcgctg

SEQ ID NO: 8927 - DNA, 20 bp, Homo sapiens
  source 1..20: mol_type = genomic DNA; note = Gene: CEACAM16; note = Location (start to end; relative to TSS): CEACAM16_101_131; note = Orientation (relative to transcription): antisense; note = sgRNA Position: 44699258; note = Sequence Name: 56322-704_101_SL_seq_8927
agtacagtacttaccacgac

SEQ ID NO: 8928 - DNA, 20 bp, Homo sapiens
  source 1..20: mol_type = genomic DNA; note = Gene: CEACAM16; note = Location (start to end; relative to TSS): CEACAM16_-1_29; note = Orientation (relative to transcription): sense; note = sgRNA Position: 44699176; note = Sequence Name: 56322-704_101_SL_seq_8928
tcagcgcctagaacagcacc

SEQ ID NO: 8929 - DNA, 20 bp, Homo sapiens
  source 1..20: mol_type = genomic DNA; note = Gene: CEACAM16; note = Location (start to end; relative to TSS): CEACAM16_79_109; note = Orientation (relative to transcription): sense; note = sgRNA Position: 44699256; note = Sequence Name: 56322-704_101_SL_seq_8929
catttactctgcgccagtcg

SEQ ID NO: 8930 - DNA, 20 bp, Homo sapiens
  source 1..20: mol_type = genomic DNA; note = Gene: CEACAM18; note = Location (start to end; relative to TSS): CEACAM18_41_71; note = Orientation (relative to transcription): sense; note = sgRNA Position: 51478606; note = Sequence Name: 56322-704_101_SL_seq_8930
gaggtggctgtgtctctgga

SEQ ID NO: 8931 - DNA, 20 bp, Homo sapiens
  source 1..20: mol_type = genomic DNA; note = Gene: CEACAM18; note = Location (start to end; relative to TSS): CEACAM18_76_106; note = Orientation (relative to transcription): sense; note = sgRNA Position: 51478641; note = Sequence Name: 56322-704_101_SL_seq_8931
ggaggaccccaggcagctca

SEQ ID NO: 8932 - DNA, 20 bp, Homo sapiens
  source 1..20: mol_type = genomic DNA; note = Gene: CEACAM18; note = Location (start to end; relative to TSS): CEACAM18_40_70; note = Orientation (relative to transcription): sense; note = sgRNA Position: 51478605; note = Sequence Name: 56322-704_101_SL_seq_8932
ggaggtggctgtgtctctgg

SEQ ID NO: 8933 - DNA, 20 bp, Homo sapiens
  source 1..20: mol_type = genomic DNA; note = Gene: CEACAM18; note = Location (start to end; relative to TSS): CEACAM18_75_105; note = Orientation (relative to transcription): antisense; note = sgRNA Position: 51478620; note = Sequence Name: 56322-704_101_SL_seq_8933
cctggggtcctccaggagga

SEQ ID NO: 8934 - DNA, 20 bp, Homo sapiens
  source 1..20: mol_type = genomic DNA; note = Gene: CEACAM18; note = Location (start to end; relative to TSS): CEACAM18_37_67; note = Orientation (relative to transcription): sense; note = sgRNA Position: 51478602; note = Sequence Name: 56322-704_101_SL_seq_8934
agaggaggtggctgtgtctc

SEQ ID NO: 8935 - DNA, 20 bp, Homo sapiens
  source 1..20: mol_type = genomic DNA; note = Gene: CEACAM18; note = Location (start to end; relative to TSS): CEACAM18_74_104; note = Orientation (relative to transcription): antisense; note = sgRNA Position: 51478619; note = Sequence Name: 56322-704_101_SL_seq_8935
ctggggtcctccaggaggag

SEQ ID NO: 8936 - DNA, 20 bp, Homo sapiens
  source 1..20: mol_type = genomic DNA; note = Gene: CEACAM18; note = Location (start to end; relative to TSS): CEACAM18_19_49; note = Orientation (relative to transcription): sense; note = sgRNA Position: 51478584; note = Sequence Name: 56322-704_101_SL_seq_8936
acaggtcttggagggagcag

SEQ ID NO: 8937 - DNA, 20 bp, Homo sapiens
  source 1..20: mol_type = genomic DNA; note = Gene: CEACAM18; note = Location (start to end; relative to TSS): CEACAM18_55_85; note = Orientation (relative to transcription): sense; note = sgRNA Position: 51478620; note = Sequence Name: 56322-704_101_SL_seq_8937
tctggagggacccctcctcc

SEQ ID NO: 8938 - DNA, 20 bp, Homo sapiens
  source 1..20: mol_type = genomic DNA; note = Gene: CEACAM18; note = Location (start to end; relative to TSS): CEACAM18_11_41; note = Orientation (relative to transcription): sense; note = sgRNA Position: 51478576; note = Sequence Name: 56322-704_101_SL_seq_8938
caggagacacaggtcttgga

SEQ ID NO: 8939 - DNA, 20 bp, Homo sapiens
  source 1..20: mol_type = genomic DNA; note = Gene: CEACAM18; note = Location (start to end; relative to TSS): CEACAM18_41_71; note = Orientation (relative to transcription): sense; note = sgRNA Position: 51478606; note = Sequence Name: 56322-704_101_SL_seq_8939
gaggtggctgtgtctctgga

SEQ ID NO: 8940 - DNA, 20 bp, Homo sapiens
  source 1..20: mol_type = genomic DNA; note = Gene: CEACAM19; note = Location (start to end; relative to TSS): CEACAM19_43_73; note = Orientation (relative to transcription): sense; note = sgRNA Position: 44671551; note = Sequence Name: 56322-704_101_SL_seq_8940
tttatggtggctgctgaatg

SEQ ID NO: 8941 - DNA, 20 bp, Homo sapiens
  source 1..20: mol_type = genomic DNA; note = Gene: CEACAM19; note = Location (start to end; relative to TSS): CEACAM19_94_124; note = Orientation (relative to transcription): antisense; note = sgRNA Position: 44671582; note = Sequence Name: 56322-704_101_SL_seq_8941
tctgtttgaacaattcccct

SEQ ID NO: 8942 - DNA, 20 bp, Homo sapiens
  source 1..20: mol_type = genomic DNA; note = Gene: CEACAM19; note = Location (start to end; relative to TSS): CEACAM19_27_57; note = Orientation (relative to transcription): sense; note = sgRNA Position: 44671535; note = Sequence Name: 56322-704_101_SL_seq_8942
gcaatgggaacagttattta

SEQ ID NO: 8943 - DNA, 20 bp, Homo sapiens
  source 1..20: mol_type = genomic DNA; note = Gene: CEACAM19; note = Location (start to end; relative to TSS): CEACAM19_87_117; note = Orientation (relative to transcription): sense; note = sgRNA Position: 44671595; note = Sequence Name: 56322-704_101_SL_seq_8943
caggggaattgttcaaacag

SEQ ID NO: 8944 - DNA, 20 bp, Homo sapiens
  source 1..20: mol_type = genomic DNA; note = Gene: CEACAM19; note = Location (start to end; relative to TSS): CEACAM19_30_60; note = Orientation (relative to transcription): sense; note = sgRNA Position: 44671538; note = Sequence Name: 56322-704_101_SL_seq_8944
atgggaacagttatttatgg

SEQ ID NO: 8945 - DNA, 20 bp, Homo sapiens
  source 1..20: mol_type = genomic DNA; note = Gene: CEACAM19; note = Location (start to end; relative to TSS): CEACAM19_70_100; note = Orientation (relative to transcription): sense; note = sgRNA Position: 44671578; note = Sequence Name: 56322-704_101_SL_seq_8945
gtgtgtttgaacaaacccag

SEQ ID NO: 8946 - DNA, 20 bp, Homo sapiens
  source 1..20: mol_type = genomic DNA; note = Gene: CEACAM19; note = Location (start to end; relative to TSS): CEACAM19_26_56; note = Orientation (relative to transcription): antisense; note = sgRNA Position: 44671514; note = Sequence Name: 56322-704_101_SL_seq_8946
ctgttcccattgcacagatg

SEQ ID NO: 8947 - DNA, 20 bp, Homo sapiens
  source 1..20: mol_type = genomic DNA; note = Gene: CEACAM19; note = Location (start to end; relative to TSS): CEACAM19_69_99; note = Orientation (relative to transcription): sense; note = sgRNA Position: 44671577; note = Sequence Name: 56322-704_101_SL_seq_8947
tgtgtgtttgaacaaaccca

SEQ ID NO: 8948 - DNA, 20 bp, Homo sapiens
  source 1..20: mol_type = genomic DNA; note = Gene: CEACAM19; note = Location (start to end; relative to TSS): CEACAM19_17_47; note = Orientation (relative to transcription): antisense; note = sgRNA Position: 44671505; note = Sequence Name: 56322-704_101_SL_seq_8948
ttgcacagatgtggaaacag

SEQ ID NO: 8949 - DNA, 20 bp, Homo sapiens
  source 1..20: mol_type = genomic DNA; note = Gene: CEACAM19; note = Location (start to end; relative to TSS): CEACAM19_68_98; note = Orientation (relative to transcription): sense; note = sgRNA Position: 44671576; note = Sequence Name: 56322-704_101_SL_seq_8949
gtgtgtgtttgaacaaaccc

SEQ ID NO: 8950 - DNA, 20 bp, Homo sapiens
  source 1..20: mol_type = genomic DNA; note = Gene: CEACAM20; note = Location (start to end; relative to TSS): CEACAM20_25_55; note = Orientation (relative to transcription): sense; note = sgRNA Position: 44529626; note = Sequence Name: 56322-704_101_SL_seq_8950
tgtgtgagtttgtagcaggg

SEQ ID NO: 8951 - DNA, 20 bp, Homo sapiens
  source 1..20: mol_type = genomic DNA; note = Gene: CEACAM20; note = Location (start to end; relative to TSS): CEACAM20_92_122; note = Orientation (relative to transcription): sense; note = sgRNA Position: 44529559; note = Sequence Name: 56322-704_101_SL_seq_8951
ctgtatctgtgtgtgcaagc

SEQ ID NO: 8952 - DNA, 20 bp, Homo sapiens
  source 1..20: mol_type = genomic DNA; note = Gene: CEACAM20; note = Location (start to end; relative to TSS): CEACAM20_26_56; note = Orientation (relative to transcription): sense; note = sgRNA Position: 44529625; note = Sequence Name: 56322-704_101_SL_seq_8952
gtgtgagtttgtagcagggt

SEQ ID NO: 8953 - DNA, 20 bp, Homo sapiens
  source 1..20: mol_type = genomic DNA; note = Gene: CEACAM20; note = Location (start to end; relative to TSS): CEACAM20_88_118; note = Orientation (relative to transcription): antisense; note = sgRNA Position: 44529583; note = Sequence Name: 56322-704_101_SL_seq_8953
acagatacagtcctcactcc

SEQ ID NO: 8954 - DNA, 20 bp, Homo sapiens
  source 1..20: mol_type = genomic DNA; note = Gene: CEACAM20; note = Location (start to end; relative to TSS): CEACAM20_31_61; note = Orientation (relative to transcription): sense; note = sgRNA Position: 44529620; note = Sequence Name: 56322-704_101_SL_seq_8954
agtttgtagcagggtgggag

SEQ ID NO: 8955 - DNA, 20 bp, Homo sapiens
  source 1..20: mol_type = genomic DNA; note = Gene: CEACAM20; note = Location (start to end; relative to TSS): CEACAM20_68_98; note = Orientation (relative to transcription): sense; note = sgRNA Position: 44529583; note = Sequence Name: 56322-704_101_SL_seq_8955
gaggggctgcacctggagtg

SEQ ID NO: 8956 - DNA, 20 bp, Homo sapiens
  source 1..20: mol_type = genomic DNA; note = Gene: CEACAM20; note = Location (start to end; relative to TSS): CEACAM20_22_52; note = Orientation (relative to transcription): sense; note = sgRNA Position: 44529629; note = Sequence Name: 56322-704_101_SL_seq_8956
gtgtgtgtgagtttgtagca

SEQ ID NO: 8957 - DNA, 20 bp, Homo sapiens
  source 1..20: mol_type = genomic DNA; note = Gene: CEACAM20; note = Location (start to end; relative to TSS): CEACAM20_61_91; note = Orientation (relative to transcription): sense; note = sgRNA Position: 44529590; note = Sequence Name: 56322-704_101_SL_seq_8957
ggaggtggaggggctgcacc

SEQ ID NO: 8958 - DNA, 20 bp, Homo sapiens
  source 1..20: mol_type = genomic DNA; note = Gene: CEACAM20; note = Location (start to end; relative to TSS): CEACAM20_21_51; note = Orientation (relative to transcription): sense; note = sgRNA Position: 44529630; note = Sequence Name: 56322-704_101_SL_seq_8958
tgtgtgtgtgagtttgtagc

SEQ ID NO: 8959 - DNA, 20 bp, Homo sapiens
  source 1..20: mol_type = genomic DNA; note = Gene: CEACAM20; note = Location (start to end; relative to TSS): CEACAM20_51_81; note = Orientation (relative to transcription): sense; note = sgRNA Position: 44529600; note = Sequence Name: 56322-704_101_SL_seq_8959
aggagagaagggaggtggag

SEQ ID NO: 8960 - DNA, 20 bp, Homo sapiens
  source 1..20: mol_type = genomic DNA; note = Gene: CEACAM21; note = Location (start to end; relative to TSS): CEACAM21_53_83; note = Orientation (relative to transcription): sense; note = sgRNA Position: 41576245; note = Sequence Name: 56322-704_101_SL_seq_8960
gcccaagctcctctccacag

SEQ ID NO: 8961 - DNA, 20 bp, Homo sapiens
  source 1..20: mol_type = genomic DNA; note = Gene: CEACAM21; note = Location (start to end; relative to TSS): CEACAM21_115_145; note = Orientation (relative to transcription): antisense; note = sgRNA Position: 41576287; note = Sequence Name: 56322-704_101_SL_seq_8961
ctgtggggacaagctgaggg

SEQ ID NO: 8962 - DNA, 20 bp, Homo sapiens
  source 1..20: mol_type = genomic DNA; note = Gene: CEACAM21; note = Location (start to end; relative to TSS): CEACAM21_63_93; note = Orientation (relative to transcription): antisense; note = sgRNA Position: 41576235; note = Sequence Name: 56322-704_101_SL_seq_8962
tcctctgtggagaggagctt

SEQ ID NO: 8963 - DNA, 20 bp, Homo sapiens
  source 1..20: mol_type = genomic DNA; note = Gene: CEACAM21; note = Location (start to end; relative to TSS): CEACAM21_107_137; note = Orientation (relative to transcription): antisense; note = sgRNA Position: 41576279; note = Sequence Name: 56322-704_101_SL_seq_8963
acaagctgaggggggcccca

SEQ ID NO: 8964 - DNA, 20 bp, Homo sapiens
  source 1..20: mol_type = genomic DNA; note = Gene: CEACAM21; note = Location (start to end; relative to TSS): CEACAM21_40_70; note = Orientation (relative to transcription): antisense; note = sgRNA Position: 41576212; note = Sequence Name: 56322-704_101_SL_seq_8964
ctccaggaacgctctagaca

SEQ ID NO: 8965 - DNA, 20 bp, Homo sapiens
  source 1..20: mol_type = genomic DNA; note = Gene: CEACAM21; note = Location (start to end; relative to TSS): CEACAM21_76_106; note = Orientation (relative to transcription): antisense; note = sgRNA Position: 41576248; note = Sequence Name: 56322-704_101_SL_seq_8965
gcctgctctgtcctcctctg

SEQ ID NO: 8966 - DNA, 20 bp, Homo sapiens
  source 1..20: mol_type = genomic DNA; note = Gene: CEACAM21; note = Location (start to end; relative to TSS): CEACAM21_41_71; note = Orientation (relative to transcription): antisense; note = sgRNA Position: 41576213; note = Sequence Name: 56322-704_101_SL_seq_8966
gctccaggaacgctctagac

SEQ ID NO: 8967 - DNA, 20 bp, Homo sapiens
  source 1..20: mol_type = genomic DNA; note = Gene: CEACAM21; note = Location (start to end; relative to TSS): CEACAM21_71_101; note = Orientation (relative to transcription): antisense; note = sgRNA Position: 41576243; note = Sequence Name: 56322-704_101_SL_seq_8967
ctctgtcctcctctgtggag

SEQ ID NO: 8968 - DNA, 20 bp, Homo sapiens
  source 1..20: mol_type = genomic DNA; note = Gene: CEACAM21; note = Location (start to end; relative to TSS): CEACAM21_29_59; note = Orientation (relative to transcription): sense; note = sgRNA Position: 41576221; note = Sequence Name: 56322-704_101_SL_seq_8968
aaccctgtctagagcgttcc

SEQ ID NO: 8969 - DNA, 20 bp, Homo sapiens
  source 1..20: mol_type = genomic DNA; note = Gene: CEACAM21; note = Location (start to end; relative to TSS): CEACAM21_63_93; note = Orientation (relative to transcription): antisense; note = sgRNA Position: 41576235; note = Sequence Name: 56322-704_101_SL_seq_8969
tcctctgtggagaggagctt

SEQ ID NO: 8970 - DNA, 20 bp, Homo sapiens
  source 1..20: mol_type = genomic DNA; note = Gene: CEACAM3; note = Location (start to end; relative to TSS): CEACAM3_35_65; note = Orientation (relative to transcription): sense; note = sgRNA Position: 41796648; note = Sequence Name: 56322-704_101_SL_seq_8970
gcccaggctcttttccacag

SEQ ID NO: 8971 - DNA, 20 bp, Homo sapiens
  source 1..20: mol_type = genomic DNA; note = Gene: CEACAM3; note = Location (start to end; relative to TSS): CEACAM3_99_129; note = Orientation (relative to transcription): antisense; note = sgRNA Position: 41796692; note = Sequence Name: 56322-704_101_SL_seq_8971
ctctgtggggagaggctgag

SEQ ID NO: 8972 - DNA, 20 bp, Homo sapiens
  source 1..20: mol_type = genomic DNA; note = Gene: CEACAM3; note = Location (start to end; relative to TSS): CEACAM3_45_75; note = Orientation (relative to transcription): antisense; note = sgRNA Position: 41796638; note = Sequence Name: 56322-704_101_SL_seq_8972
tcctctgtggaaaagagcct

SEQ ID NO: 8973 - DNA, 20 bp, Homo sapiens
  source 1..20: mol_type = genomic DNA; note = Gene: CEACAM3; note = Location (start to end; relative to TSS): CEACAM3_98_128; note = Orientation (relative to transcription): antisense; note = sgRNA Position: 41796691; note = Sequence Name: 56322-704_101_SL_seq_8973
tctgtggggagaggctgagg

SEQ ID NO: 8974 - DNA, 20 bp, Homo sapiens
  source 1..20: mol_type = genomic DNA; note = Gene: CEACAM3; note = Location (start to end; relative to TSS): CEACAM3_22_52; note = Orientation (relative to transcription): antisense; note = sgRNA Position: 41796615; note = Sequence Name: 56322-704_101_SL_seq_8974
ctccaggaatgctgtagtca

SEQ ID NO: 8975 - DNA, 20 bp, Homo sapiens
  source 1..20: mol_type = genomic DNA; note = Gene: CEACAM3; note = Location (start to end; relative to TSS): CEACAM3_97_127; note = Orientation (relative to transcription): antisense; note = sgRNA Position: 41796690; note = Sequence Name: 56322-704_101_SL_seq_8975
ctgtggggagaggctgaggg

SEQ ID NO: 8976 - DNA, 20 bp, Homo sapiens
  source 1..20: mol_type = genomic DNA; note = Gene: CEACAM3; note = Location (start to end; relative to TSS): CEACAM3_23_53; note = Orientation (relative to transcription): antisense; note = sgRNA Position: 41796616; note = Sequence Name: 56322-704_101_SL_seq_8976
gctccaggaatgctgtagtc

SEQ ID NO: 8977 - DNA, 20 bp, Homo sapiens
  source 1..20: mol_type = genomic DNA; note = Gene: CEACAM3; note = Location (start to end; relative to TSS): CEACAM3_89_119; note = Orientation (relative to transcription): antisense; note = sgRNA Position: 41796682; note = Sequence Name: 56322-704_101_SL_seq_8977
agaggctgaggggggcccca

SEQ ID NO: 8978 - DNA, 20 bp, Homo sapiens
  source 1..20: mol_type = genomic DNA; note = Gene: CEACAM3; note = Location (start to end; relative to TSS): CEACAM3_19_49; note = Orientation (relative to transcription): sense; note = sgRNA Position: 41796632; note = Sequence Name: 56322-704_101_SL_seq_8978
ctacagcattcctggagccc

SEQ ID NO: 8979 - DNA, 20 bp, Homo sapiens
  source 1..20: mol_type = genomic DNA; note = Gene: CEACAM3; note = Location (start to end; relative to TSS): CEACAM3_58_88; note = Orientation (relative to transcription): antisense; note = sgRNA Position: 41796651; note = Sequence Name: 56322-704_101_SL_seq_8979
gcctgctctttcctcctctg

SEQ ID NO: 8980 - DNA, 20 bp, Homo sapiens
  source 1..20: mol_type = genomic DNA; note = Gene: CEACAM4; note = Location (start to end; relative to TSS): CEACAM4_60_90; note = Orientation (relative to transcription): sense; note = sgRNA Position: 41626990; note = Sequence Name: 56322-704_101_SL_seq_8980
agcccagctcctctccacag

SEQ ID NO: 8981 - DNA, 20 bp, Homo sapiens
  source 1..20: mol_type = genomic DNA; note = Gene: CEACAM4; note = Location (start to end; relative to TSS): CEACAM4_110_140; note = Orientation (relative to transcription): antisense; note = sgRNA Position: 41626960; note = Sequence Name: 56322-704_101_SL_seq_8981
agcggctgagggggggccca

SEQ ID NO: 8982 - DNA, 20 bp, Homo sapiens
  source 1..20: mol_type = genomic DNA; note = Gene: CEACAM4; note = Location (start to end; relative to TSS): CEACAM4_64_94; note = Orientation (relative to transcription): antisense; note = sgRNA Position: 41627006; note = Sequence Name: 56322-704_101_SL_seq_8982
gtggagaggagctgggctcc

SEQ ID NO: 8983 - DNA, 20 bp, Homo sapiens
  source 1..20: mol_type = genomic DNA; note = Gene: CEACAM4; note = Location (start to end; relative to TSS): CEACAM4_109_139; note = Orientation (relative to transcription): sense; note = sgRNA Position: 41626941; note = Sequence Name: 56322-704_101_SL_seq_8983
cccccctcagccgctccccg

SEQ ID NO: 8984 - DNA, 20 bp, Homo sapiens
  source 1..20: mol_type = genomic DNA; note = Gene: CEACAM4; note = Location (start to end; relative to TSS): CEACAM4_37_67; note = Orientation (relative to transcription): sense; note = sgRNA Position: 41627013; note = Sequence Name: 56322-704_101_SL_seq_8984
agctctgacaagagcgttcc

SEQ ID NO: 8985 - DNA, 20 bp, Homo sapiens
  source 1..20: mol_type = genomic DNA; note = Gene: CEACAM4; note = Location (start to end; relative to TSS): CEACAM4_71_101; note = Orientation (relative to transcription): antisense; note = sgRNA Position: 41626999; note = Sequence Name: 56322-704_101_SL_seq_8985
gtcctctgtggagaggagct

SEQ ID NO: 8986 - DNA, 20 bp, Homo sapiens
  source 1..20: mol_type = genomic DNA; note = Gene: CEACAM4; note = Location (start to end; relative to TSS): CEACAM4_25_55; note = Orientation (relative to transcription): antisense; note = sgRNA Position: 41627045; note = Sequence Name: 56322-704_101_SL_seq_8986
ctgctgtgactgtcggctgt

SEQ ID NO: 8987 - DNA, 20 bp, Homo sapiens
  source 1..20: mol_type = genomic DNA; note = Gene: CEACAM4; note = Location (start to end; relative to TSS): CEACAM4_64_94; note = Orientation (relative to transcription): antisense; note = sgRNA Position: 41627006; note = Sequence Name: 56322-704_101_SL_seq_8987
gtggagaggagctgggctcc

SEQ ID NO: 8988 - DNA, 20 bp, Homo sapiens
  source 1..20: mol_type = genomic DNA; note = Gene: CEACAM4; note = Location (start to end; relative to TSS): CEACAM4_23_53; note = Orientation (relative to transcription): antisense; note = sgRNA Position: 41627047; note = Sequence Name: 56322-704_101_SL_seq_8988
gctgtgactgtcggctgtcg

SEQ ID NO: 8989 - DNA, 20 bp, Homo sapiens
  source 1..20: mol_type = genomic DNA; note = Gene: CEACAM4; note = Location (start to end; relative to TSS): CEACAM4_60_90; note = Orientation (relative to transcription): sense; note = sgRNA Position: 41626990; note = Sequence Name: 56322-704_101_SL_seq_8989
agcccagctcctctccacag

SEQ ID NO: 8990 - DNA, 20 bp, Homo sapiens
  source 1..20: mol_type = genomic DNA; note = Gene: CEACAM5; note = Location (start to end; relative to TSS): CEACAM5_73_103; note = Orientation (relative to transcription): antisense; note = sgRNA Position: 41708705; note = Sequence Name: 56322-704_101_SL_seq_8990
gtctgctctgtcctcctctg

SEQ ID NO: 8991 - DNA, 20 bp, Homo sapiens
  source 1..20: mol_type = genomic DNA; note = Gene: CEACAM5; note = Location (start to end; relative to TSS): CEACAM5_119_149; note = Orientation (relative to transcription): sense; note = sgRNA Position: 41708771; note = Sequence Name: 56322-704_101_SL_seq_8991
cccacagatggtgcatcccc

SEQ ID NO: 8992 - DNA, 20 bp, Homo sapiens
  source 1..20: mol_type = genomic DNA; note = Gene: CEACAM5; note = Location (start to end; relative to TSS): CEACAM5_50_80; note = Orientation (relative to transcription): sense; note = sgRNA Position: 41708702; note = Sequence Name: 56322-704_101_SL_seq_8992
actcaagctcttctccacag

SEQ ID NO: 8993 - DNA, 20 bp, Homo sapiens
  source 1..20: mol_type = genomic DNA; note = Gene: CEACAM5; note = Location (start to end; relative to TSS): CEACAM5_115_145; note = Orientation (relative to transcription): antisense; note = sgRNA Position: 41708747; note = Sequence Name: 56322-704_101_SL_seq_8993
catctgtggggaggggccga

SEQ ID NO: 8994 - DNA, 20 bp, Homo sapiens
  source 1..20: mol_type = genomic DNA; note = Gene: CEACAM5; note = Location (start to end; relative to TSS): CEACAM5_21_51; note = Orientation (relative to transcription): antisense; note = sgRNA Position: 41708653; note = Sequence Name: 56322-704_101_SL_seq_8994
tcaaggctgctgtgactgtc

SEQ ID NO: 8995 - DNA, 20 bp, Homo sapiens
  source 1..20: mol_type = genomic DNA; note = Gene: CEACAM5; note = Location (start to end; relative to TSS): CEACAM5_104_134; note = Orientation (relative to transcription): antisense; note = sgRNA Position: 41708736; note = Sequence Name: 56322-704_101_SL_seq_8995
aggggccgagggagactcca

SEQ ID NO: 8996 - DNA, 20 bp, Homo sapiens
  source 1..20: mol_type = genomic DNA; note = Gene: CEACAM5; note = Location (start to end; relative to TSS): CEACAM5_26_56; note = Orientation (relative to transcription): sense; note = sgRNA Position: 41708678; note = Sequence Name: 56322-704_101_SL_seq_8996
cagccttgacaaaacgttcc

SEQ ID NO: 8997 - DNA, 20 bp, Homo sapiens
  source 1..20: mol_type = genomic DNA; note = Gene: CEACAM5; note = Location (start to end; relative to TSS): CEACAM5_90_120; note = Orientation (relative to transcription): sense; note = sgRNA Position: 41708742; note = Sequence Name: 56322-704_101_SL_seq_8997
agagaccatggagtctccct

SEQ ID NO: 8998 - DNA, 20 bp, Homo sapiens
  source 1..20: mol_type = genomic DNA; note = Gene: CEACAM5; note = Location (start to end; relative to TSS): CEACAM5_38_68; note = Orientation (relative to transcription): antisense; note = sgRNA Position: 41708670; note = Sequence Name: 56322-704_101_SL_seq_8998
gttccaggaacgttttgtca

SEQ ID NO: 8999 - DNA, 20 bp, Homo sapiens
  source 1..20: mol_type = genomic DNA; note = Gene: CEACAM5; note = Location (start to end; relative to TSS): CEACAM5_73_103; note = Orientation (relative to transcription): antisense; note = sgRNA Position: 41708705; note = Sequence Name: 56322-704_101_SL_seq_8999
gtctgctctgtcctcctctg

SEQ ID NO: 9000 - DNA, 20 bp, Homo sapiens
  source 1..20: mol_type = genomic DNA; note = Gene: CEACAM6; note = Location (start to end; relative to TSS): CEACAM6_46_76; note = Orientation (relative to transcription): antisense; note = sgRNA Position: 41755582; note = Sequence Name: 56322-704_101_SL_seq_9000
cttgagctccaggaatgctc

SEQ ID NO: 9001 - DNA, 20 bp, Homo sapiens
  source 1..20: mol_type = genomic DNA; note = Gene: CEACAM6; note = Location (start to end; relative to TSS): CEACAM6_116_146; note = Orientation (relative to transcription): antisense; note = sgRNA Position: 41755652; note = Sequence Name: 56322-704_101_SL_seq_9001
tctgcagggaggggctgagg

SEQ ID NO: 9002 - DNA, 20 bp, Homo sapiens
  source 1..20: mol_type = genomic DNA; note = Gene: CEACAM6; note = Location (start to end; relative to TSS): CEACAM6_53_83; note = Orientation (relative to transcription): sense; note = sgRNA Position: 41755609; note = Sequence Name: 56322-704_101_SL_seq_9002
gctcaagctcctctacaaag

SEQ ID NO: 9003 - DNA, 20 bp, Homo sapiens
  source 1..20: mol_type = genomic DNA; note = Gene: CEACAM6; note = Location (start to end; relative to TSS): CEACAM6_115_145; note = Orientation (relative to transcription): antisense; note = sgRNA Position: 41755651; note = Sequence Name: 56322-704_101_SL_seq_9003
ctgcagggaggggctgaggg

SEQ ID NO: 9004 - DNA, 20 bp, Homo sapiens
  source 1..20: mol_type = genomic DNA; note = Gene: CEACAM6; note = Location (start to end; relative to TSS): CEACAM6_40_70; note = Orientation (relative to transcription): antisense; note = sgRNA Position: 41755576; note = Sequence Name: 56322-704_101_SL_seq_9004
ctccaggaatgctctggtca

SEQ ID NO: 9005 - DNA, 20 bp, Homo sapiens
  source 1..20: mol_type = genomic DNA; note = Gene: CEACAM6; note = Location (start to end; relative to TSS): CEACAM6_107_137; note = Orientation (relative to transcription): antisense; note = sgRNA Position: 41755643; note = Sequence Name: 56322-704_101_SL_seq_9005
aggggctgaggggggtccca

SEQ ID NO: 9006 - DNA, 20 bp, Homo sapiens
  source 1..20: mol_type = genomic DNA; note = Gene: CEACAM6; note = Location (start to end; relative to TSS): CEACAM6_41_71; note = Orientation (relative to transcription): antisense; note = sgRNA Position: 41755577; note = Sequence Name: 56322-704_101_SL_seq_9006
gctccaggaatgctctggtc

SEQ ID NO: 9007 - DNA, 20 bp, Homo sapiens
  source 1..20: mol_type = genomic DNA; note = Gene: CEACAM6; note = Location (start to end; relative to TSS): CEACAM6_71_101; note = Orientation (relative to transcription): antisense; note = sgRNA Position: 41755607; note = Sequence Name: 56322-704_101_SL_seq_9007
ctctgtccacctctttgtag

SEQ ID NO: 9008 - DNA, 20 bp, Homo sapiens
  source 1..20: mol_type = genomic DNA; note = Gene: CEACAM6; note = Location (start to end; relative to TSS): CEACAM6_24_54; note = Orientation (relative to transcription): antisense; note = sgRNA Position: 41755560; note = Sequence Name: 56322-704_101_SL_seq_9008
gtcagggctgctgtgactgt

SEQ ID NO: 9009 - DNA, 20 bp, Homo sapiens
  source 1..20: mol_type = genomic DNA; note = Gene: CEACAM6; note = Location (start to end; relative to TSS): CEACAM6_56_86; note = Orientation (relative to transcription): sense; note = sgRNA Position: 41755612; note = Sequence Name: 56322-704_101_SL_seq_9009
caagctcctctacaaagagg

SEQ ID NO: 9010 - DNA, 20 bp, Homo sapiens
  source 1..20: mol_type = genomic DNA; note = Gene: CEACAM7; note = Location (start to end; relative to TSS): CEACAM7_54_84; note = Orientation (relative to transcription): sense; note = sgRNA Position: 41688192; note = Sequence Name: 56322-704_101_SL_seq_9010
gcccaagctcttctccacag

SEQ ID NO: 9011 - DNA, 20 bp, Homo sapiens
  source 1..20: mol_type = genomic DNA; note = Gene: CEACAM7; note = Location (start to end; relative to TSS): CEACAM7_114_144; note = Orientation (relative to transcription): antisense; note = sgRNA Position: 41688152; note = Sequence Name: 56322-704_101_SL_seq_9011
ctctgtatggacaggctgaa

SEQ ID NO: 9012 - DNA, 20 bp, Homo sapiens
  source 1..20: mol_type = genomic DNA; note = Gene: CEACAM7; note = Location (start to end; relative to TSS): CEACAM7_57_87; note = Orientation (relative to transcription): antisense; note = sgRNA Position: 41688209; note = Sequence Name: 56322-704_101_SL_seq_9012
tggagaagagcttgggctcc

SEQ ID NO: 9013 - DNA, 20 bp, Homo sapiens
  source 1..20: mol_type = genomic DNA; note = Gene: CEACAM7; note = Location (start to end; relative to TSS): CEACAM7_113_143; note = Orientation (relative to transcription): antisense; note = sgRNA Position: 41688153; note = Sequence Name: 56322-704_101_SL_seq_9013
tctgtatggacaggctgaag

SEQ ID NO: 9014 - DNA, 20 bp, Homo sapiens
  source 1..20: mol_type = genomic DNA; note = Gene: CEACAM7; note = Location (start to end; relative to TSS): CEACAM7_41_71; note = Orientation (relative to transcription): antisense; note = sgRNA Position: 41688225; note = Sequence Name: 56322-704_101_SL_seq_9014
ctccaggaactctcttgtca

SEQ ID NO: 9015 - DNA, 20 bp, Homo sapiens
  source 1..20: mol_type = genomic DNA; note = Gene: CEACAM7; note = Location (start to end; relative to TSS): CEACAM7_104_134; note = Orientation (relative to transcription): antisense; note = sgRNA Position: 41688162; note = Sequence Name: 56322-704_101_SL_seq_9015
acaggctgaaggggacccca

SEQ ID NO: 9016 - DNA, 20 bp, Homo sapiens
  source 1..20: mol_type = genomic DNA; note = Gene: CEACAM7; note = Location (start to end; relative to TSS): CEACAM7_42_72; note = Orientation (relative to transcription): antisense; note = sgRNA Position: 41688224; note = Sequence Name: 56322-704_101_SL_seq_9016
gctccaggaactctcttgtc

SEQ ID NO: 9017 - DNA, 20 bp, Homo sapiens
  source 1..20: mol_type = genomic DNA; note = Gene: CEACAM7; note = Location (start to end; relative to TSS): CEACAM7_77_107; note = Orientation (relative to transcription): antisense; note = sgRNA Position: 41688189; note = Sequence Name: 56322-704_101_SL_seq_9017
tgctgcctgcttgtcctctg

SEQ ID NO: 9018 - DNA, 20 bp, Homo sapiens
  source 1..20: mol_type = genomic DNA; note = Gene: CEACAM7; note = Location (start to end; relative to TSS): CEACAM7_30_60; note = Orientation (relative to transcription): sense; note = sgRNA Position: 41688216; note = Sequence Name: 56322-704_101_SL_seq_9018
agccctgacaagagagttcc

SEQ ID NO: 9019 - DNA, 20 bp, Homo sapiens
  source 1..20: mol_type = genomic DNA; note = Gene: CEACAM7; note = Location (start to end; relative to TSS): CEACAM7_64_94; note = Orientation (relative to transcription): antisense; note = sgRNA Position: 41688202; note = Sequence Name: 56322-704_101_SL_seq_9019
tcctctgtggagaagagctt

SEQ ID NO: 9020 - DNA, 20 bp, Homo sapiens
  source 1..20: mol_type = genomic DNA; note = Gene: CEACAM8; note = Location (start to end; relative to TSS): CEACAM8_42_72; note = Orientation (relative to transcription): sense; note = sgRNA Position: 42594858; note = Sequence Name: 56322-704_101_SL_seq_9020
tcccaggctcatctccacag

SEQ ID NO: 9021 - DNA, 20 bp, Homo sapiens
  source 1..20: mol_type = genomic DNA; note = Gene: CEACAM8; note = Location (start to end; relative to TSS): CEACAM8_110_140; note = Orientation (relative to transcription): sense; note = sgRNA Position: 42594790; note = Sequence Name: 56322-704_101_SL_seq_9021
cctgcagatggcgcatcccc

SEQ ID NO: 9022 - DNA, 20 bp, Homo sapiens
  source 1..20: mol_type = genomic DNA; note = Gene: CEACAM8; note = Location (start to end; relative to TSS): CEACAM8_52_82; note = Orientation (relative to transcription): antisense; note = sgRNA Position: 42594868; note = Sequence Name: 56322-704_101_SL_seq_9022
tcctctgtggagatgagcct

SEQ ID NO: 9023 - DNA, 20 bp, Homo sapiens
  source 1..20: mol_type = genomic DNA; note = Gene: CEACAM8; note = Location (start to end; relative to TSS): CEACAM8_104_134; note = Orientation (relative to transcription): antisense; note = sgRNA Position: 42594816; note = Sequence Name: 56322-704_101_SL_seq_9023
tctgcaggaaggggctgaga

SEQ ID NO: 9024 - DNA, 20 bp, Homo sapiens
  source 1..20: mol_type = genomic DNA; note = Gene: CEACAM8; note = Location (start to end; relative to TSS): CEACAM8_53_83; note = Orientation (relative to transcription): antisense; note = sgRNA Position: 42594867; note = Sequence Name: 56322-704_101_SL_seq_9024
ctcctctgtggagatgagcc

SEQ ID NO: 9025 - DNA, 20 bp, Homo sapiens
  source 1..20: mol_type = genomic DNA; note = Gene: CEACAM8; note = Location (start to end; relative to TSS): CEACAM8_103_133; note = Orientation (relative to transcription): antisense; note = sgRNA Position: 42594817; note = Sequence Name: 56322-704_101_SL_seq_9025
ctgcaggaaggggctgagat

SEQ ID NO: 9026 - DNA, 20 bp, Homo sapiens
  source 1..20: mol_type = genomic DNA; note = Gene: CEACAM8; note = Location (start to end; relative to TSS): CEACAM8_29_59; note = Orientation (relative to transcription): antisense; note = sgRNA Position: 42594891; note = Sequence Name: 56322-704_101_SL_seq_9026
atccagaaactttctgagca

SEQ ID NO: 9027 - DNA, 20 bp, Homo sapiens
  source 1..20: mol_type = genomic DNA; note = Gene: CEACAM8; note = Location (start to end; relative to TSS): CEACAM8_95_125; note = Orientation (relative to transcription): antisense; note = sgRNA Position: 42594825; note = Sequence Name: 56322-704_101_SL_seq_9027
aggggctgagatgggcccca

SEQ ID NO: 9028 - DNA, 20 bp, Homo sapiens
  source 1..20: mol_type = genomic DNA; note = Gene: CEACAM8; note = Location (start to end; relative to TSS): CEACAM8_26_56; note = Orientation (relative to transcription): sense; note = sgRNA Position: 42594874; note = Sequence Name: 56322-704_101_SL_seq_9028
tcagaaagtttctggatccc

SEQ ID NO: 9029 - DNA, 20 bp, Homo sapiens
  source 1..20: mol_type = genomic DNA; note = Gene: CEACAM8; note = Location (start to end; relative to TSS): CEACAM8_65_95; note = Orientation (relative to transcription): antisense; note = sgRNA Position: 42594855; note = Sequence Name: 56322-704_101_SL_seq_9029
tgcctgcgtgttctcctctg

SEQ ID NO: 9030 - DNA, 20 bp, Homo sapiens
  source 1..20: mol_type = genomic DNA; note = Gene: CHL1; note = Location (start to end; relative to TSS): CHL1_38_68; note = Orientation (relative to transcription): antisense; note = sgRNA Position: 196807; note = Sequence Name: 56322-704_101_SL_seq_9030
cggggtctacgccctcctgc

SEQ ID NO: 9031 - DNA, 20 bp, Homo sapiens
  source 1..20: mol_type = genomic DNA; note = Gene: CHL1; note = Location (start to end; relative to TSS): CHL1_87_117; note = Orientation (relative to transcription): antisense; note = sgRNA Position: 196856; note = Sequence Name: 56322-704_101_SL_seq_9031
gccgctggctctctggccgc

SEQ ID NO: 9032 - DNA, 20 bp, Homo sapiens
  source 1..20: mol_type = genomic DNA; note = Gene: CHL1; note = Location (start to end; relative to TSS): CHL1_35_65; note = Orientation (relative to transcription): antisense; note = sgRNA Position: 196804; note = Sequence Name: 56322-704_101_SL_seq_9032
ggtctacgccctcctgccgg

SEQ ID NO: 9033 - DNA, 20 bp, Homo sapiens
  source 1..20: mol_type = genomic DNA; note = Gene: CHL1; note = Location (start to end; relative to TSS): CHL1_83_113; note = Orientation (relative to transcription): antisense; note = sgRNA Position: 196852; note = Sequence Name: 56322-704_101_SL_seq_9033
ctggctctctggccgcggga

SEQ ID NO: 9034 - DNA, 20 bp, Homo sapiens
  source 1..20: mol_type = genomic DNA; note = Gene: CHL1; note = Location (start to end; relative to TSS): CHL1_31_61; note = Orientation (relative to transcription): antisense; note = sgRNA Position: 196800; note = Sequence Name: 56322-704_101_SL_seq_9034
tacgccctcctgccggaggc

SEQ ID NO: 9035 - DNA, 20 bp, Homo sapiens
  source 1..20: mol_type = genomic DNA; note = Gene: CHL1; note = Location (start to end; relative to TSS): CHL1_64_94; note = Orientation (relative to transcription): antisense; note = sgRNA Position: 196833; note = Sequence Name: 56322-704_101_SL_seq_9035
aaggctggagccgttctggc

SEQ ID NO: 9036 - DNA, 20 bp, Homo sapiens
  source 1..20: mol_type = genomic DNA; note = Gene: CHL1; note = Location (start to end; relative to TSS): CHL1_30_60; note = Orientation (relative to transcription): sense; note = sgRNA Position: 196819; note = Sequence Name: 56322-704_101_SL_seq_9036
cggcaggagggcgtagaccc

SEQ ID NO: 9037 - DNA, 20 bp, Homo sapiens
  source 1..20: mol_type = genomic DNA; note = Gene: CHL1; note = Location (start to end; relative to TSS): CHL1_62_92; note = Orientation (relative to transcription): sense; note = sgRNA Position: 196851; note = Sequence Name: 56322-704_101_SL_seq_9037
gaacggctccagccttcccg

SEQ ID NO: 9038 - DNA, 20 bp, Homo sapiens
  source 1..20: mol_type = genomic DNA; note = Gene: CHL1; note = Location (start to end; relative to TSS): CHL1_18_48; note = Orientation (relative to transcription): sense; note = sgRNA Position: 196807; note = Sequence Name: 56322-704_101_SL_seq_9038
agagccagcctccggcagga

SEQ ID NO: 9039 - DNA, 20 bp, Homo sapiens
  source 1..20: mol_type = genomic DNA; note = Gene: CHL1; note = Location (start to end; relative to TSS): CHL1_56_86; note = Orientation (relative to transcription): antisense; note = sgRNA Position: 196825; note = Sequence Name: 56322-704_101_SL_seq_9039
agccgttctggctggcaccg

SEQ ID NO: 9040 - DNA, 20 bp, Homo sapiens
  source 1..20: mol_type = genomic DNA; note = Gene: CILP; note = Location (start to end; relative to TSS): CILP_32_62; note = Orientation (relative to transcription): antisense; note = sgRNA Position: 65211437; note = Sequence Name: 56322-704_101_SL_seq_9040
gagctcaccgtgtcttgagc

SEQ ID NO: 9041 - DNA, 20 bp, Homo sapiens
  source 1..20: mol_type = genomic DNA; note = Gene: CILP; note = Location (start to end; relative to TSS): CILP_72_102; note = Orientation (relative to transcription): antisense; note = sgRNA Position: 65211397; note = Sequence Name: 56322-704_101_SL_seq_9041
agcagtggggtgcagggatg

SEQ ID NO: 9042 - DNA, 20 bp, Homo sapiens
  source 1..20: mol_type = genomic DNA; note = Gene: CILP; note = Location (start to end; relative to TSS): CILP_18_48; note = Orientation (relative to transcription): antisense; note = sgRNA Position: 65211451; note = Sequence Name: 56322-704_101_SL_seq_9042
ttgagcaggactcctcagct

SEQ ID NO: 9043 - DNA, 20 bp, Homo sapiens
  source 1..20: mol_type = genomic DNA; note = Gene: CILP; note = Location (start to end; relative to TSS): CILP_66_96; note = Orientation (relative to transcription): antisense; note = sgRNA Position: 65211403; note = Sequence Name: 56322-704_101_SL_seq_9043
ggggtgcagggatggggtga

SEQ ID NO: 9044 - DNA, 20 bp, Homo sapiens
  source 1..20: mol_type = genomic DNA; note = Gene: CILP; note = Location (start to end; relative to TSS): CILP_19_49; note = Orientation (relative to transcription): antisense; note = sgRNA Position: 65211450; note = Sequence Name: 56322-704_101_SL_seq_9044
cttgagcaggactcctcagc

SEQ ID NO: 9045 - DNA, 20 bp, Homo sapiens
  source 1..20: mol_type = genomic DNA; note = Gene: CILP; note = Location (start to end; relative to TSS): CILP_65_95; note = Orientation (relative to transcription): antisense; note = sgRNA Position: 65211404; note = Sequence Name: 56322-704_101_SL_seq_9045
gggtgcagggatggggtgag

SEQ ID NO: 9046 - DNA, 20 bp, Homo sapiens
  source 1..20: mol_type = genomic DNA; note = Gene: CILP; note = Location (start to end; relative to TSS): CILP_17_47; note = Orientation (relative to transcription): antisense; note = sgRNA Position: 65211452; note = Sequence Name: 56322-704_101_SL_seq_9046
tgagcaggactcctcagctg

SEQ ID NO: 9047 - DNA, 20 bp, Homo sapiens
  source 1..20: mol_type = genomic DNA; note = Gene: CILP; note = Location (start to end; relative to TSS): CILP_59_89; note = Orientation (relative to transcription): antisense; note = sgRNA Position: 65211410; note = Sequence Name: 56322-704_101_SL_seq_9047
agggatggggtgaggggaat

SEQ ID NO: 9048 - DNA, 20 bp, Homo sapiens
  source 1..20: mol_type = genomic DNA; note = Gene: CILP; note = Location (start to end; relative to TSS): CILP_16_46; note = Orientation (relative to transcription): sense; note = sgRNA Position: 65211433; note = Sequence Name: 56322-704_101_SL_seq_9048
gaggagtcctgctcaagaca

SEQ ID NO: 9049 - DNA, 20 bp, Homo sapiens
  source 1..20: mol_type = genomic DNA; note = Gene: CILP; note = Location (start to end; relative to TSS): CILP_54_84; note = Orientation (relative to transcription): antisense; note = sgRNA Position: 65211415; note = Sequence Name: 56322-704_101_SL_seq_9049
tggggtgaggggaataggag

SEQ ID NO: 9050 - DNA, 20 bp, Homo sapiens
  source 1..20: mol_type = genomic DNA; note = Gene: CILP2; note = Location (start to end; relative to TSS): CILP2_25_55; note = Orientation (relative to transcription): sense; note = sgRNA Position: 19538316; note = Sequence Name: 56322-704_101_SL_seq_9050
cccgagcacgccgcggagcc

SEQ ID NO: 9051 - DNA, 20 bp, Homo sapiens
  source 1..20: mol_type = genomic DNA; note = Gene: CILP2; note = Location (start to end; relative to TSS): CILP2_77_107; note = Orientation (relative to transcription): antisense; note = sgRNA Position: 19538348; note = Sequence Name: 56322-704_101_SL_seq_9051
cagcagcgacgccatggccg

SEQ ID NO: 9052 - DNA, 20 bp, Homo sapiens
  source 1..20: mol_type = genomic DNA; note = Gene: CILP2; note = Location (start to end; relative to TSS): CILP2_23_53; note = Orientation (relative to transcription): antisense; note = sgRNA Position: 19538294; note = Sequence Name: 56322-704_101_SL_seq_9052
ggcgtgctcgggtccaactc

SEQ ID NO: 9053 - DNA, 20 bp, Homo sapiens
  source 1..20: mol_type = genomic DNA; note = Gene: CILP2; note = Location (start to end; relative to TSS): CILP2_57_87; note = Orientation (relative to transcription): sense; note = sgRNA Position: 19538348; note = Sequence Name: 56322-704_101_SL_seq_9053
cggacgctctgccccggcca

SEQ ID NO: 9054 - DNA, 20 bp, Homo sapiens
  source 1..20: mol_type = genomic DNA; note = Gene: CILP2; note = Location (start to end; relative to TSS): CILP2_18_48; note = Orientation (relative to transcription): sense; note = sgRNA Position: 19538309; note = Sequence Name: 56322-704_101_SL_seq_9054
agttggacccgagcacgccg

SEQ ID NO: 9055 - DNA, 20 bp, Homo sapiens
  source 1..20: mol_type = genomic DNA; note = Gene: CILP2; note = Location (start to end; relative to TSS): CILP2_53_83; note = Orientation (relative to transcription): antisense; note = sgRNA Position: 19538324; note = Sequence Name: 56322-704_101_SL_seq_9055
agagcgtccgagggagggtc

SEQ ID NO: 9056 - DNA, 20 bp, Homo sapiens
  source 1..20: mol_type = genomic DNA; note = Gene: CILP2; note = Location (start to end; relative to TSS): CILP2_19_49; note = Orientation (relative to transcription): antisense; note = sgRNA Position: 19538290; note = Sequence Name: 56322-704_101_SL_seq_9056
tgctcgggtccaactccggc

SEQ ID NO: 9057 - DNA, 20 bp, Homo sapiens
  source 1..20: mol_type = genomic DNA; note = Gene: CILP2; note = Location (start to end; relative to TSS): CILP2_52_82; note = Orientation (relative to transcription): antisense; note = sgRNA Position: 19538323; note = Sequence Name: 56322-704_101_SL_seq_9057
gagcgtccgagggagggtcc

SEQ ID NO: 9058 - DNA, 20 bp, Homo sapiens
  source 1..20: mol_type = genomic DNA; note = Gene: CILP2; note = Location (start to end; relative to TSS): CILP2_20_50; note = Orientation (relative to transcription): antisense; note = sgRNA Position: 19538291; note = Sequence Name: 56322-704_101_SL_seq_9058
gtgctcgggtccaactccgg

SEQ ID NO: 9059 - DNA, 20 bp, Homo sapiens
  source 1..20: mol_type = genomic DNA; note = Gene: CILP2; note = Location (start to end; relative to TSS): CILP2_51_81; note = Orientation (relative to transcription): sense; note = sgRNA Position: 19538342; note = Sequence Name: 56322-704_101_SL_seq_9059
ctccctcggacgctctgccc

SEQ ID NO: 9060 - DNA, 20 bp, Homo sapiens
  source 1..20: mol_type = genomic DNA; note = Gene: CLMP; note = Location (start to end; relative to TSS): CLMP_58_88; note = Orientation (relative to transcription): antisense; note = sgRNA Position: 123195186; note = Sequence Name: 56322-704_101_SL_seq_9060
gggtcagggaggaaaacgcg

SEQ ID NO: 9061 - DNA, 20 bp, Homo sapiens
  source 1..20: mol_type = genomic DNA; note = Gene: CLMP; note = Location (start to end; relative to TSS): CLMP_92_122; note = Orientation (relative to transcription): antisense; note = sgRNA Position: 123195152; note = Sequence Name: 56322-704_101_SL_seq_9061
ccaccagctggcgcccggac

SEQ ID NO: 9062 - DNA, 20 bp, Homo sapiens
  source 1..20: mol_type = genomic DNA; note = Gene: CLMP; note = Location (start to end; relative to TSS): CLMP_52_82; note = Orientation (relative to transcription): sense; note = sgRNA Position: 123195172; note = Sequence Name: 56322-704_101_SL_seq_9062
cgcgttttcctccctgaccc

SEQ ID NO: 9063 - DNA, 20 bp, Homo sapiens
  source 1..20: mol_type = genomic DNA; note = Gene: CLMP; note = Location (start to end; relative to TSS): CLMP_83_113; note = Orientation (relative to transcription): sense; note = sgRNA Position: 123195141; note = Sequence Name: 56322-704_101_SL_seq_9063
cccgtccgggcgccagctgg

SEQ ID NO: 9064 - DNA, 20 bp, Homo sapiens
  source 1..20: mol_type = genomic DNA; note = Gene: CLMP; note = Location (start to end; relative to TSS): CLMP_50_80; note = Orientation (relative to transcription): antisense; note = sgRNA Position: 123195194; note = Sequence Name: 56322-704_101_SL_seq_9064
gaggaaaacgcgaggcgaaa

SEQ ID NO: 9065 - DNA, 20 bp, Homo sapiens
  source 1..20: mol_type = genomic DNA; note = Gene: CLMP; note = Location (start to end; relative to TSS): CLMP_80_110; note = Orientation (relative to transcription): sense; note = sgRNA Position: 123195144; note = Sequence Name: 56322-704_101_SL_seq_9065
gctcccgtccgggcgccagc

SEQ ID NO: 9066 - DNA, 20 bp, Homo sapiens
  source 1..20: mol_type = genomic DNA; note = Gene: CLMP; note = Location (start to end; relative to TSS): CLMP_34_64; note = Orientation (relative to transcription): antisense; note = sgRNA Position: 123195210; note = Sequence Name: 56322-704_101_SL_seq_9066
gaaaaggcgctaccgcttcg

SEQ ID NO: 9067 - DNA, 20 bp, Homo sapiens
  source 1..20: mol_type = genomic DNA; note = Gene: CLMP; note = Location (start to end; relative to TSS): CLMP_69_99; note = Orientation (relative to transcription): antisense; note = sgRNA Position: 123195175; note = Sequence Name: 56322-704_101_SL_seq_9067
agccgggaccagggtcaggg

SEQ ID NO: 9068 - DNA, 20 bp, Homo sapiens
  source 1..20: mol_type = genomic DNA; note = Gene: CLMP; note = Location (start to end; relative to TSS): CLMP_13_43; note = Orientation (relative to transcription): sense; note = sgRNA Position: 123195211; note = Sequence Name: 56322-704_101_SL_seq_9068
gggaaaagtgttccacgaag

SEQ ID NO: 9069 - DNA, 20 bp, Homo sapiens
  source 1..20: mol_type = genomic DNA; note = Gene: CLMP; note = Location (start to end; relative to TSS): CLMP_50_80; note = Orientation (relative to transcription): antisense; note = sgRNA Position: 123195194; note = Sequence Name: 56322-704_101_SL_seq_9069
gaggaaaacgcgaggcgaaa

SEQ ID NO: 9070 - DNA, 20 bp, Homo sapiens
  source 1..20: mol_type = genomic DNA; note = Gene: CNTFR; note = Location (start to end; relative to TSS): CNTFR_39_69; note = Orientation (relative to transcription): sense; note = sgRNA Position: 34589661; note = Sequence Name: 56322-704_101_SL_seq_9070
cggcgcggcgcgaggctcgg

SEQ ID NO: 9071 - DNA, 20 bp, Homo sapiens
  source 1..20: mol_type = genomic DNA; note = Gene: CNTFR; note = Location (start to end; relative to TSS): CNTFR_96_126; note = Orientation (relative to transcription): antisense; note = sgRNA Position: 34589624; note = Sequence Name: 56322-704_101_SL_seq_9071
agcgagcgaggcagggagcg

SEQ ID NO: 9072 - DNA, 20 bp, Homo sapiens
  source 1..20: mol_type = genomic DNA; note = Gene: CNTFR; note = Location (start to end; relative to TSS): CNTFR_42_72; note = Orientation (relative to transcription): sense; note = sgRNA Position: 34589658; note = Sequence Name: 56322-704_101_SL_seq_9072
cgcggcgcgaggctcggcgg

SEQ ID NO: 9073 - DNA, 20 bp, Homo sapiens
  source 1..20: mol_type = genomic DNA; note = Gene: CNTFR; note = Location (start to end; relative to TSS): CNTFR_95_125; note = Orientation (relative to transcription): sense; note = sgRNA Position: 34589605; note = Sequence Name: 56322-704_101_SL_seq_9073
cctgcctcgctcgctgccgg

SEQ ID NO: 9074 - DNA, 20 bp, Homo sapiens
  source 1..20: mol_type = genomic DNA; note = Gene: CNTFR; note = Location (start to end; relative to TSS): CNTFR_31_61; note = Orientation (relative to transcription): sense; note = sgRNA Position: 34589669; note = Sequence Name: 56322-704_101_SL_seq_9074
gctccagccggcgcggcgcg

SEQ ID NO: 9075 - DNA, 20 bp, Homo sapiens
  source 1..20: mol_type = genomic DNA; note = Gene: CNTFR; note = Location (start to end; relative to TSS): CNTFR_94_124; note = Orientation (relative to transcription): sense; note = sgRNA Position: 34589606; note = Sequence Name: 56322-704_101_SL_seq_9075
ccctgcctcgctcgctgccg

SEQ ID NO: 9076 - DNA, 20 bp, Homo sapiens
  source 1..20: mol_type = genomic DNA; note = Gene: CNTFR; note = Location (start to end; relative to TSS): CNTFR_36_66; note = Orientation (relative to transcription): sense; note = sgRNA Position: 34589664; note = Sequence Name: 56322-704_101_SL_seq_9076
agccggcgcggcgcgaggct

SEQ ID NO: 9077 - DNA, 20 bp, Homo sapiens
  source 1..20: mol_type = genomic DNA; note = Gene: CNTFR; note = Location (start to end; relative to TSS): CNTFR_77_107; note = Orientation (relative to transcription): antisense; note = sgRNA Position: 34589643; note = Sequence Name: 56322-704_101_SL_seq_9077
gcggagctagcaccgcccgc

SEQ ID NO: 9078 - DNA, 20 bp, Homo sapiens
  source 1..20: mol_type = genomic DNA; note = Gene: CNTFR; note = Location (start to end; relative to TSS): CNTFR_24_54; note = Orientation (relative to transcription): sense; note = sgRNA Position: 34589676; note = Sequence Name: 56322-704_101_SL_seq_9078
ggcggcggctccagccggcg

SEQ ID NO: 9079 - DNA, 20 bp, Homo sapiens
  source 1..20: mol_type = genomic DNA; note = Gene: CNTFR; note = Location (start to end; relative to TSS): CNTFR_56_86; note = Orientation (relative to transcription): sense; note = sgRNA Position: 34589644; note = Sequence Name: 56322-704_101_SL_seq_9079
cggcggtgggatccggcggg

SEQ ID NO: 9080 - DNA, 20 bp, Homo sapiens
  source 1..20: mol_type = genomic DNA; note = Gene: CNTN1; note = Location (start to end; relative to TSS): CNTN1_28_58; note = Orientation (relative to transcription): sense; note = sgRNA Position: 40692493; note = Sequence Name: 56322-704_101_SL_seq_9080
gaggcgaggaggggcgccgg

SEQ ID NO: 9081 - DNA, 20 bp, Homo sapiens
  source 1..20: mol_type = genomic DNA; note = Gene: CNTN1; note = Location (start to end; relative to TSS): CNTN1_71_101; note = Orientation (relative to transcription): antisense; note = sgRNA Position: 40692516; note = Sequence Name: 56322-704_101_SL_seq_9081
cacttccgctgcaaacacct

SEQ ID NO: 9082 - DNA, 20 bp, Homo sapiens
  source 1..20: mol_type = genomic DNA; note = Gene: CNTN1; note = Location (start to end; relative to TSS): CNTN1_25_55; note = Orientation (relative to transcription): sense; note = sgRNA Position: 40692490; note = Sequence Name: 56322-704_101_SL_seq_9082
gccgaggcgaggaggggcgc

SEQ ID NO: 9083 - DNA, 20 bp, Homo sapiens
  source 1..20: mol_type = genomic DNA; note = Gene: CNTN1; note = Location (start to end; relative to TSS): CNTN1_64_94; note = Orientation (relative to transcription): sense; note = sgRNA Position: 40692529; note = Sequence Name: 56322-704_101_SL_seq_9083
caggtgtttgcagcggaagt

SEQ ID NO: 9084 - DNA, 20 bp, Homo sapiens
  source 1..20: mol_type = genomic DNA; note = Gene: CNTN1; note = Location (start to end; relative to TSS): CNTN1_20_50; note = Orientation (relative to transcription): antisense; note = sgRNA Position: 40692465; note = Sequence Name: 56322-704_101_SL_seq_9084
cgcctcggcggagcccaccc

SEQ ID NO: 9085 - DNA, 20 bp, Homo sapiens
  source 1..20: mol_type = genomic DNA; note = Gene: CNTN1; note = Location (start to end; relative to TSS): CNTN1_63_93; note = Orientation (relative to transcription): sense; note = sgRNA Position: 40692528; note = Sequence Name: 56322-704_101_SL_seq_9085
ccaggtgtttgcagcggaag

SEQ ID NO: 9086 - DNA, 20 bp, Homo sapiens
  source 1..20: mol_type = genomic DNA; note = Gene: CNTN1; note = Location (start to end; relative to TSS): CNTN1_19_49; note = Orientation (relative to transcription): sense; note = sgRNA Position: 40692484; note = Sequence Name: 56322-704_101_SL_seq_9086
ggctccgccgaggcgaggag

SEQ ID NO: 9087 - DNA, 20 bp, Homo sapiens
  source 1..20: mol_type = genomic DNA; note = Gene: CNTN1; note = Location (start to end; relative to TSS): CNTN1_57_87; note = Orientation (relative to transcription): sense; note = sgRNA Position: 40692522; note = Sequence Name: 56322-704_101_SL_seq_9087
gcgctcccaggtgtttgcag

SEQ ID NO: 9088 - DNA, 20 bp, Homo sapiens
  source 1..20: mol_type = genomic DNA; note = Gene: CNTN1; note = Location (start to end; relative to TSS): CNTN1_18_48; note = Orientation (relative to transcription): sense; note = sgRNA Position: 40692483; note = Sequence Name: 56322-704_101_SL_seq_9088
gggctccgccgaggcgagga

SEQ ID NO: 9089 - DNA, 20 bp, Homo sapiens
  source 1..20: mol_type = genomic DNA; note = Gene: CNTN1; note = Location (start to end; relative to TSS): CNTN1_53_83; note = Orientation (relative to transcription): antisense; note = sgRNA Position: 40692498; note = Sequence Name: 56322-704_101_SL_seq_9089
ctgggagcgcatctccccac

SEQ ID NO: 9090 - DNA, 20 bp, Homo sapiens
  source 1..20: mol_type = genomic DNA; note = Gene: CNTN2; note = Location (start to end; relative to TSS): CNTN2_42_72; note = Orientation (relative to transcription): antisense; note = sgRNA Position: 205043260; note = Sequence Name: 56322-704_101_SL_seq_9090
agccgctcgctgtccgggtg

SEQ ID NO: 9091 - DNA, 20 bp, Homo sapiens
  source 1..20: mol_type = genomic DNA; note = Gene: CNTN2; note = Location (start to end; relative to TSS): CNTN2_73_103; note = Orientation (relative to transcription): sense; note = sgRNA Position: 205043311; note = Sequence Name: 56322-704_101_SL_seq_9091
aaggacagcggcccagacag

SEQ ID NO: 9092 - DNA, 20 bp, Homo sapiens
  source 1..20: mol_type = genomic DNA; note = Gene: CNTN2; note = Location (start to end; relative to TSS): CNTN2_36_66; note = Orientation (relative to transcription): antisense; note = sgRNA Position: 205043254; note = Sequence Name: 56322-704_101_SL_seq_9092
tcgctgtccgggtgcggcgg

SEQ ID NO: 9093 - DNA, 20 bp, Homo sapiens
  source 1..20: mol_type = genomic DNA; note = Gene: CNTN2; note = Location (start to end; relative to TSS): CNTN2_72_102; note = Orientation (relative to transcription): sense; note = sgRNA Position: 205043310; note = Sequence Name: 56322-704_101_SL_seq_9093
aaaggacagcggcccagaca

SEQ ID NO: 9094 - DNA, 20 bp, Homo sapiens
  source 1..20: mol_type = genomic DNA; note = Gene: CNTN2; note = Location (start to end; relative to TSS): CNTN2_37_67; note = Orientation (relative to transcription): sense; note = sgRNA Position: 205043275; note = Sequence Name: 56322-704_101_SL_seq_9094
acccggacagcgagcggctg

SEQ ID NO: 9095 - DNA, 20 bp, Homo sapiens
  source 1..20: mol_type = genomic DNA; note = Gene: CNTN2; note = Location (start to end; relative to TSS): CNTN2_71_101; note = Orientation (relative to transcription): sense; note = sgRNA Position: 205043309; note = Sequence Name: 56322-704_101_SL_seq_9095
caaaggacagcggcccagac

SEQ ID NO: 9096 - DNA, 20 bp, Homo sapiens
  source 1..20: mol_type = genomic DNA; note = Gene: CNTN2; note = Location (start to end; relative to TSS): CNTN2_39_69; note = Orientation (relative to transcription): antisense; note = sgRNA Position: 205043257; note = Sequence Name: 56322-704_101_SL_seq_9096
cgctcgctgtccgggtgcgg

SEQ ID NO: 9097 - DNA, 20 bp, Homo sapiens
  source 1..20: mol_type = genomic DNA; note = Gene: CNTN2; note = Location (start to end; relative to TSS): CNTN2_69_99; note = Orientation (relative to transcription): antisense; note = sgRNA Position: 205043287; note = Sequence Name: 56322-704_101_SL_seq_9097
cgctgtcctttgggccctgg

SEQ ID NO: 9098 - DNA, 20 bp, Homo sapiens
  source 1..20: mol_type = genomic DNA; note = Gene: CNTN2; note = Location (start to end; relative to TSS): CNTN2_21_51; note = Orientation (relative to transcription): antisense; note = sgRNA Position: 205043239; note = Sequence Name: 56322-704_101_SL_seq_9098
ggcggcggccgcggcggcgg

SEQ ID NO: 9099 - DNA, 20 bp, Homo sapiens
  source 1..20: mol_type = genomic DNA; note = Gene: CNTN2; note = Location (start to end; relative to TSS): CNTN2_54_84; note = Orientation (relative to transcription): sense; note = sgRNA Position: 205043292; note = Sequence Name: 56322-704_101_SL_seq_9099
ctgaggccgccagggcccaa

SEQ ID NO: 9100 - DNA, 20 bp, Homo sapiens
  source 1..20: mol_type = genomic DNA; note = Gene: CNTN3; note = Location (start to end; relative to TSS): CNTN3_48_78; note = Orientation (relative to transcription): sense; note = sgRNA Position: 74614587; note = Sequence Name: 56322-704_101_SL_seq_9100
ggtggcagcggcgggcgggc

SEQ ID NO: 9101 - DNA, 20 bp, Homo sapiens
  source 1..20: mol_type = genomic DNA; note = Gene: CNTN3; note = Location (start to end; relative to TSS): CNTN3_82_112; note = Orientation (relative to transcription): antisense; note = sgRNA Position: 74614573; note = Sequence Name: 56322-704_101_SL_seq_9101
acggttcccggcccagtcca

SEQ ID NO: 9102 - DNA, 20 bp, Homo sapiens
  source 1..20: mol_type = genomic DNA; note = Gene: CNTN3; note = Location (start to end; relative to TSS): CNTN3_30_60; note = Orientation (relative to transcription): sense; note = sgRNA Position: 74614605; note = Sequence Name: 56322-704_101_SL_seq_9102
gcgcttggcggcggcggcgg

SEQ ID NO: 9103 - DNA, 20 bp, Homo sapiens
  source 1..20: mol_type = genomic DNA; note = Gene: CNTN3; note = Location (start to end; relative to TSS): CNTN3_67_97; note = Orientation (relative to transcription): sense; note = sgRNA Position: 74614568; note = Sequence Name: 56322-704_101_SL_seq_9103
ctggcgccgtggactgggcc

SEQ ID NO: 9104 - DNA, 20 bp, Homo sapiens
  source 1..20: mol_type = genomic DNA; note = Gene: CNTN3; note = Location (start to end; relative to TSS): CNTN3_21_51; note = Orientation (relative to transcription): sense; note = sgRNA Position: 74614614; note = Sequence Name: 56322-704_101_SL_seq_9104
agcagcctggcgcttggcgg

SEQ ID NO: 9105 - DNA, 20 bp, Homo sapiens
  source 1..20: mol_type = genomic DNA; note = Gene: CNTN3; note = Location (start to end; relative to TSS): CNTN3_66_96; note = Orientation (relative to transcription): sense; note = sgRNA Position: 74614569; note = Sequence Name: 56322-704_101_SL_seq_9105
gctggcgccgtggactgggc

SEQ ID NO: 9106 - DNA, 20 bp, Homo sapiens
  source 1..20: mol_type = genomic DNA; note = Gene: CNTN3; note = Location (start to end; relative to TSS): CNTN3_26_56; note = Orientation (relative to transcription): antisense; note = sgRNA Position: 74614629; note = Sequence Name: 56322-704_101_SL_seq_9106
cgccaagcgccaggctgctg

SEQ ID NO: 9107 - DNA, 20 bp, Homo sapiens
  source 1..20: mol_type = genomic DNA; note = Gene: CNTN3; note = Location (start to end; relative to TSS): CNTN3_56_86; note = Orientation (relative to transcription): sense; note = sgRNA Position: 74614579; note = Sequence Name: 56322-704_101_SL_seq_9107
cggcgggcgggctggcgccg

SEQ ID NO: 9108 - DNA, 20 bp, Homo sapiens
  source 1..20: mol_type = genomic DNA; note = Gene: CNTN3; note = Location (start to end; relative to TSS): CNTN3_18_48; note = Orientation (relative to transcription): sense; note = sgRNA Position: 74614617; note = Sequence Name: 56322-704_101_SL_seq_9108
cacagcagcctggcgcttgg

SEQ ID NO: 9109 - DNA, 20 bp, Homo sapiens
  source 1..20: mol_type = genomic DNA; note = Gene: CNTN3; note = Location (start to end; relative to TSS): CNTN3_48_78; note = Orientation (relative to transcription): sense; note = sgRNA Position: 74614587; note = Sequence Name: 56322-704_101_SL_seq_9109
ggtggcagcggcgggcgggc

SEQ ID NO: 9110 - DNA, 20 bp, Homo sapiens
  source 1..20: mol_type = genomic DNA; note = Gene: CNTN4; note = Location (start to end; relative to TSS): CNTN4_38_68; note = Orientation (relative to transcription): antisense; note = sgRNA Position: 2098910; note = Sequence Name: 56322-704_101_SL_seq_9110
gtccgaggggcccggggcgg

SEQ ID NO: 9111 - DNA, 20 bp, Homo sapiens
  source 1..20: mol_type = genomic DNA; note = Gene: CNTN4; note = Location (start to end; relative to TSS): CNTN4_76_106; note = Orientation (relative to transcription): antisense; note = sgRNA Position: 2098948; note = Sequence Name: 56322-704_101_SL_seq_9111
gccgggctggcgagagcctc

SEQ ID NO: 9112 - DNA, 20 bp, Homo sapiens
  source 1..20: mol_type = genomic DNA; note = Gene: CNTN4; note = Location (start to end; relative to TSS): CNTN4_37_67; note = Orientation (relative to transcription): sense; note = sgRNA Position: 2098929; note = Sequence Name: 56322-704_101_SL_seq_9112
ccgggcccctcggactgtgc

SEQ ID NO: 9113 - DNA, 20 bp, Homo sapiens
  source 1..20: mol_type = genomic DNA; note = Gene: CNTN4; note = Location (start to end; relative to TSS): CNTN4_71_101; note = Orientation (relative to transcription): antisense; note = sgRNA Position: 2098943; note = Sequence Name: 56322-704_101_SL_seq_9113
gctggcgagagcctcgggtg

SEQ ID NO: 9114 - DNA, 20 bp, Homo sapiens
  source 1..20: mol_type = genomic DNA; note = Gene: CNTN4; note = Location (start to end; relative to TSS): CNTN4_27_57; note = Orientation (relative to transcription): sense; note = sgRNA Position: 2098919; note = Sequence Name: 56322-704_101_SL_seq_9114
cgccgccgccccgggcccct

SEQ ID NO: 9115 - DNA, 20 bp, Homo sapiens
  source 1..20: mol_type = genomic DNA; note = Gene: CNTN4; note = Location (start to end; relative to TSS): CNTN4_65_95; note = Orientation (relative to transcription): antisense; note = sgRNA Position: 2098937; note = Sequence Name: 56322-704_101_SL_seq_9115
gagagcctcgggtgcggcgc

SEQ ID NO: 9116 - DNA, 20 bp, Homo sapiens
  source 1..20: mol_type = genomic DNA; note = Gene: CNTN4; note = Location (start to end; relative to TSS): CNTN4_18_48; note = Orientation (relative to transcription): sense; note = sgRNA Position: 2098910; note = Sequence Name: 56322-704_101_SL_seq_9116
gggagctttcgccgccgccc

SEQ ID NO: 9117 - DNA, 20 bp, Homo sapiens
  source 1..20: mol_type = genomic DNA; note = Gene: CNTN4; note = Location (start to end; relative to TSS): CNTN4_52_82; note = Orientation (relative to transcription): antisense; note = sgRNA Position: 2098924; note = Sequence Name: 56322-704_101_SL_seq_9117
gcggcgccggcacagtccga

SEQ ID NO: 9118 - DNA, 20 bp, Homo sapiens
  source 1..20: mol_type = genomic DNA; note = Gene: CNTN4; note = Location (start to end; relative to TSS): CNTN4_19_49; note = Orientation (relative to transcription): sense; note = sgRNA Position: 2098911; note = Sequence Name: 56322-704_101_SL_seq_9118
ggagctttcgccgccgcccc

SEQ ID NO: 9119 - DNA, 20 bp, Homo sapiens
  source 1..20: mol_type = genomic DNA; note = Gene: CNTN4; note = Location (start to end; relative to TSS): CNTN4_51_81; note = Orientation (relative to transcription): antisense; note = sgRNA Position: 2098923; note = Sequence Name: 56322-704_101_SL_seq_9119
cggcgccggcacagtccgag

SEQ ID NO: 9120 - DNA, 20 bp, Homo sapiens
  source 1..20: mol_type = genomic DNA; note = Gene: CNTN5; note = Location (start to end; relative to TSS): CNTN5_19_49; note = Orientation (relative to transcription): antisense; note = sgRNA Position: 99020974; note = Sequence Name: 56322-704_101_SL_seq_9120
gttatattgggaagtaggtg

SEQ ID NO: 9121 - DNA, 20 bp, Homo sapiens
  source 1..20: mol_type = genomic DNA; note = Gene: CNTN5; note = Location (start to end; relative to TSS): CNTN5_83_113; note = Orientation (relative to transcription): sense; note = sgRNA Position: 99021058; note = Sequence Name: 56322-704_101_SL_seq_9121
cattaaagctcggggcggag

SEQ ID NO: 9122 - DNA, 20 bp, Homo sapiens
  source 1..20: mol_type = genomic DNA; note = Gene: CNTN5; note = Location (start to end; relative to TSS): CNTN5_24_54; note = Orientation (relative to transcription): sense; note = sgRNA Position: 99020999; note = Sequence Name: 56322-704_101_SL_seq_9122
caatataaccaactacggcg

SEQ ID NO: 9123 - DNA, 20 bp, Homo sapiens
  source 1..20: mol_type = genomic DNA; note = Gene: CNTN5; note = Location (start to end; relative to TSS): CNTN5_78_108; note = Orientation (relative to transcription): sense; note = sgRNA Position: 99021053; note = Sequence Name: 56322-704_101_SL_seq_9123
agtgccattaaagctcgggg

SEQ ID NO: 9124 - DNA, 20 bp, Homo sapiens
  source 1..20: mol_type = genomic DNA; note = Gene: CNTN5; note = Location (start to end; relative to TSS): CNTN5_25_55; note = Orientation (relative to transcription): sense; note = sgRNA Position: 99021000; note = Sequence Name: 56322-704_101_SL_seq_9124
aatataaccaactacggcgt

SEQ ID NO: 9125 - DNA, 20 bp, Homo sapiens
  source 1..20: mol_type = genomic DNA; note = Gene: CNTN5; note = Location (start to end; relative to TSS): CNTN5_75_105; note = Orientation (relative to transcription): sense; note = sgRNA Position: 99021050; note = Sequence Name: 56322-704_101_SL_seq_9125
caaagtgccattaaagctcg

SEQ ID NO: 9126 - DNA, 20 bp, Homo sapiens
  source 1..20: mol_type = genomic DNA; note = Gene: CNTN5; note = Location (start to end; relative to TSS): CNTN5_26_56; note = Orientation (relative to transcription): sense; note = sgRNA Position: 99021001; note = Sequence Name: 56322-704_101_SL_seq_9126
atataaccaactacggcgtg

SEQ ID NO: 9127 - DNA, 20 bp, Homo sapiens
  source 1..20: mol_type = genomic DNA; note = Gene: CNTN5; note = Location (start to end; relative to TSS): CNTN5_74_104; note = Orientation (relative to transcription): sense; note = sgRNA Position: 99021049; note = Sequence Name: 56322-704_101_SL_seq_9127
ccaaagtgccattaaagctc

SEQ ID NO: 9128 - DNA, 20 bp, Homo sapiens
  source 1..20: mol_type = genomic DNA; note = Gene: CNTN5; note = Location (start to end; relative to TSS): CNTN5_27_57; note = Orientation (relative to transcription): sense; note = sgRNA Position: 99021002; note = Sequence Name: 56322-704_101_SL_seq_9128
tataaccaactacggcgtgg

SEQ ID NO: 9129 - DNA, 20 bp, Homo sapiens
  source 1..20: mol_type = genomic DNA; note = Gene: CNTN5; note = Location (start to end; relative to TSS): CNTN5_73_103; note = Orientation (relative to transcription): sense; note = sgRNA Position: 99021048; note = Sequence Name: 56322-704_101_SL_seq_9129
gccaaagtgccattaaagct

SEQ ID NO: 9130 - DNA, 20 bp, Homo sapiens
  source 1..20: mol_type = genomic DNA; note = Gene: CNTN6; note = Location (start to end; relative to TSS): CNTN6_66_96; note = Orientation (relative to transcription): sense; note = sgRNA Position: 1093116; note = Sequence Name: 56322-704_101_SL_seq_9130
aagatcccgagacatttccc

SEQ ID NO: 9131 - DNA, 20 bp, Homo sapiens
  source 1..20: mol_type = genomic DNA; note = Gene: CNTN6; note = Location (start to end; relative to TSS): CNTN6_121_151; note = Orientation (relative to transcription): sense; note = sgRNA Position: 1093171; note = Sequence Name: 56322-704_101_SL_seq_9131
tgctgcaatgagaatattgc

SEQ ID NO: 9132 - DNA, 20 bp, Homo sapiens
  source 1..20: mol_type = genomic DNA; note = Gene: CNTN6; note = Location (start to end; relative to TSS): CNTN6_33_63; note = Orientation (relative to transcription): antisense; note = sgRNA Position: 1093063; note = Sequence Name: 56322-704_101_SL_seq_9132
tctgtttcaagctctcagcc

SEQ ID NO: 9133 - DNA, 20 bp, Homo sapiens
  source 1..20: mol_type = genomic DNA; note = Gene: CNTN6; note = Location (start to end; relative to TSS): CNTN6_81_111; note = Orientation (relative to transcription): antisense; note = sgRNA Position: 1093111; note = Sequence Name: 56322-704_101_SL_seq_9133
atcttaccagggaaatgtct

SEQ ID NO: 9134 - DNA, 20 bp, Homo sapiens
  source 1..20: mol_type = genomic DNA; note = Gene: CNTN6; note = Location (start to end; relative to TSS): CNTN6_16_46; note = Orientation (relative to transcription): antisense; note = sgRNA Position: 1093046; note = Sequence Name: 56322-704_101_SL_seq_9134
gccaggcatgctgtgcgtcc

SEQ ID NO: 9135 - DNA, 20 bp, Homo sapiens
  source 1..20: mol_type = genomic DNA; note = Gene: CNTN6; note = Location (start to end; relative to TSS): CNTN6_80_110; note = Orientation (relative to transcription): antisense; note = sgRNA Position: 1093110; note = Sequence Name: 56322-704_101_SL_seq_9135
tcttaccagggaaatgtctc

SEQ ID NO: 9136 - DNA, 20 bp, Homo sapiens
  source 1..20: mol_type = genomic DNA; note = Gene: CNTN6; note = Location (start to end; relative to TSS): CNTN6_6_36; note = Orientation (relative to transcription): sense; note = sgRNA Position: 1093056; note = Sequence Name: 56322-704_101_SL_seq_9136
gcctggacgcacagcatgcc

SEQ ID NO: 9137 - DNA, 20 bp, Homo sapiens
  source 1..20: mol_type = genomic DNA; note = Gene: CNTN6; note = Location (start to end; relative to TSS): CNTN6_66_96; note = Orientation (relative to transcription): sense; note = sgRNA Position: 1093116; note = Sequence Name: 56322-704_101_SL_seq_9137
aagatcccgagacatttccc

SEQ ID NO: 9138 - DNA, 20 bp, Homo sapiens
  source 1..20: mol_type = genomic DNA; note = Gene: CNTN6; note = Location (start to end; relative to TSS): CNTN6_-2_28; note = Orientation (relative to transcription): antisense; note = sgRNA Position: 1093028; note = Sequence Name: 56322-704_101_SL_seq_9138
ccaggcagaaccaagccgta

SEQ ID NO: 9139 - DNA, 20 bp, Homo sapiens
  source 1..20: mol_type = genomic DNA; note = Gene: CNTN6; note = Location (start to end; relative to TSS): CNTN6_33_63; note = Orientation (relative to transcription): antisense; note = sgRNA Position: 1093063; note = Sequence Name: 56322-704_101_SL_seq_9139
tctgtttcaagctctcagcc

SEQ ID NO: 9140 - DNA, 20 bp, Homo sapiens
  source 1..20: mol_type = genomic DNA; note = Gene: CRTAM; note = Location (start to end; relative to TSS): CRTAM_43_73; note = Orientation (relative to transcription): sense; note = sgRNA Position: 122838569; note = Sequence Name: 56322-704_101_SL_seq_9140
gtggagagttctcagcttgc

SEQ ID NO: 9141 - DNA, 20 bp, Homo sapiens
  source 1..20: mol_type = genomic DNA; note = Gene: CRTAM; note = Location (start to end; relative to TSS): CRTAM_84_114; note = Orientation (relative to transcription): antisense; note = sgRNA Position: 122838590; note = Sequence Name: 56322-704_101_SL_seq_9141
ctctaagtccttaccttgca

SEQ ID NO: 9142 - DNA, 20 bp, Homo sapiens
  source 1..20: mol_type = genomic DNA; note = Gene: CRTAM; note = Location (start to end; relative to TSS): CRTAM_48_78; note = Orientation (relative to transcription): sense; note = sgRNA Position: 122838574; note = Sequence Name: 56322-704_101_SL_seq_9142
gagttctcagcttgctggca

SEQ ID NO: 9143 - DNA, 20 bp, Homo sapiens
  source 1..20: mol_type = genomic DNA; note = Gene: CRTAM; note = Location (start to end; relative to TSS): CRTAM_83_113; note = Orientation (relative to transcription): antisense; note = sgRNA Position: 122838589; note = Sequence Name: 56322-704_101_SL_seq_9143
tctaagtccttaccttgcaa

SEQ ID NO: 9144 - DNA, 20 bp, Homo sapiens
  source 1..20: mol_type = genomic DNA; note = Gene: CRTAM; note = Location (start to end; relative to TSS): CRTAM_27_57; note = Orientation (relative to transcription): antisense; note = sgRNA Position: 122838533; note = Sequence Name: 56322-704_101_SL_seq_9144
catactgtgctgtgctgctg

SEQ ID NO: 9145 - DNA, 20 bp, Homo sapiens
  source 1..20: mol_type = genomic DNA; note = Gene: CRTAM; note = Location (start to end; relative to TSS): CRTAM_82_112; note = Orientation (relative to transcription): antisense; note = sgRNA Position: 122838588; note = Sequence Name: 56322-704_101_SL_seq_9145
ctaagtccttaccttgcaag

SEQ ID NO: 9146 - DNA, 20 bp, Homo sapiens
  source 1..20: mol_type = genomic DNA; note = Gene: CRTAM; note = Location (start to end; relative to TSS): CRTAM_24_54; note = Orientation (relative to transcription): sense; note = sgRNA Position: 122838550; note = Sequence Name: 56322-704_101_SL_seq_9146
cagcacagcacagtatgtgg

SEQ ID NO: 9147 - DNA, 20 bp, Homo sapiens
  source 1..20: mol_type = genomic DNA; note = Gene: CRTAM; note = Location (start to end; relative to TSS): CRTAM_67_97; note = Orientation (relative to transcription): sense; note = sgRNA Position: 122838593; note = Sequence Name: 56322-704_101_SL_seq_9147
atggttccccttgcaaggta

SEQ ID NO: 9148 - DNA, 20 bp, Homo sapiens
  source 1..20: mol_type = genomic DNA; note = Gene: CRTAM; note = Location (start to end; relative to TSS): CRTAM_21_51; note = Orientation (relative to transcription): sense; note = sgRNA Position: 122838547; note = Sequence Name: 56322-704_101_SL_seq_9148
cagcagcacagcacagtatg

SEQ ID NO: 9149 - DNA, 20 bp, Homo sapiens
  source 1..20: mol_type = genomic DNA; note = Gene: CRTAM; note = Location (start to end; relative to TSS): CRTAM_62_92; note = Orientation (relative to transcription): sense; note = sgRNA Position: 122838588; note = Sequence Name: 56322-704_101_SL_seq_9149
ctggcatggttccccttgca

SEQ ID NO: 9150 - DNA, 20 bp, Homo sapiens
  source 1..20: mol_type = genomic DNA; note = Gene: CSF1R; note = Location (start to end; relative to TSS): CSF1R_46_76; note = Orientation (relative to transcription): antisense; note = sgRNA Position: 150086504; note = Sequence Name: 56322-704_101_SL_seq_9150
tctcagctactagctccgca

SEQ ID NO: 9151 - DNA, 20 bp, Homo sapiens
  source 1..20: mol_type = genomic DNA; note = Gene: CSF1R; note = Location (start to end; relative to TSS): CSF1R_94_124; note = Orientation (relative to transcription): sense; note = sgRNA Position: 150086436; note = Sequence Name: 56322-704_101_SL_seq_9151
tgcctgccacttccccaccg

SEQ ID NO: 9152 - DNA, 20 bp, Homo sapiens
  source 1..20: mol_type = genomic DNA; note = Gene: CSF1R; note = Location (start to end; relative to TSS): CSF1R_41_71; note = Orientation (relative to transcription): antisense; note = sgRNA Position: 150086509; note = Sequence Name: 56322-704_101_SL_seq_9152
gctactagctccgcagggat

SEQ ID NO: 9153 - DNA, 20 bp, Homo sapiens
  source 1..20: mol_type = genomic DNA; note = Gene: CSF1R; note = Location (start to end; relative to TSS): CSF1R_86_116; note = Orientation (relative to transcription): antisense; note = sgRNA Position: 150086464; note = Sequence Name: 56322-704_101_SL_seq_9153
caggcaggtgcagggctgca

SEQ ID NO: 9154 - DNA, 20 bp, Homo sapiens
  source 1..20: mol_type = genomic DNA; note = Gene: CSF1R; note = Location (start to end; relative to TSS): CSF1R_40_70; note = Orientation (relative to transcription): antisense; note = sgRNA Position: 150086510; note = Sequence Name: 56322-704_101_SL_seq_9154
ctactagctccgcagggatc

SEQ ID NO: 9155 - DNA, 20 bp, Homo sapiens
  source 1..20: mol_type = genomic DNA; note = Gene: CSF1R; note = Location (start to end; relative to TSS): CSF1R_78_108; note = Orientation (relative to transcription): antisense; note = sgRNA Position: 150086472; note = Sequence Name: 56322-704_101_SL_seq_9155
tgcagggctgcaaggtgccc

SEQ ID NO: 9156 - DNA, 20 bp, Homo sapiens
  source 1..20: mol_type = genomic DNA; note = Gene: CSF1R; note = Location (start to end; relative to TSS): CSF1R_33_63; note = Orientation (relative to transcription): antisense; note = sgRNA Position: 150086517; note = Sequence Name: 56322-704_101_SL_seq_9156
ctccgcagggatcgggacac

SEQ ID NO: 9157 - DNA, 20 bp, Homo sapiens
  source 1..20: mol_type = genomic DNA; note = Gene: CSF1R; note = Location (start to end; relative to TSS): CSF1R_77_107; note = Orientation (relative to transcription): antisense; note = sgRNA Position: 150086473; note = Sequence Name: 56322-704_101_SL_seq_9157
gcagggctgcaaggtgccca

SEQ ID NO: 9158 - DNA, 20 bp, Homo sapiens
  source 1..20: mol_type = genomic DNA; note = Gene: CSF1R; note = Location (start to end; relative to TSS): CSF1R_22_52; note = Orientation (relative to transcription): sense; note = sgRNA Position: 150086508; note = Sequence Name: 56322-704_101_SL_seq_9158
gtccagtgtcccgatccctg

SEQ ID NO: 9159 - DNA, 20 bp, Homo sapiens
  source 1..20: mol_type = genomic DNA; note = Gene: CSF1R; note = Location (start to end; relative to TSS): CSF1R_52_82; note = Orientation (relative to transcription): sense; note = sgRNA Position: 150086478; note = Sequence Name: 56322-704_101_SL_seq_9159
agctgagagctctgtgccct

SEQ ID NO: 9160 - DNA, 20 bp, Homo sapiens
  source 1..20: mol_type = genomic DNA; note = Gene: CTLA4; note = Location (start to end; relative to TSS): CTLA4_74_104; note = Orientation (relative to transcription): antisense; note = sgRNA Position: 203867851; note = Sequence Name: 56322-704_101_SL_seq_9160
tttgaacccacacagaatca

SEQ ID NO: 9161 - DNA, 20 bp, Homo sapiens
  source 1..20: mol_type = genomic DNA; note = Gene: CTLA4; note = Location (start to end; relative to TSS): CTLA4_144_174; note = Orientation (relative to transcription): sense; note = sgRNA Position: 203867941; note = Sequence Name: 56322-704_101_SL_seq_9161
acaccgctcccataaagcca

SEQ ID NO: 9162 - DNA, 20 bp, Homo sapiens
  source 1..20: mol_type = genomic DNA; note = Gene: CTLA4; note = Location (start to end; relative to TSS): CTLA4_58_88; note = Orientation (relative to transcription): sense; note = sgRNA Position: 203867855; note = Sequence Name: 56322-704_101_SL_seq_9162
ataaagtccttgattctgtg

SEQ ID NO: 9163 - DNA, 20 bp, Homo sapiens
  source 1..20: mol_type = genomic DNA; note = Gene: CTLA4; note = Location (start to end; relative to TSS): CTLA4_118_148; note = Orientation (relative to transcription): antisense; note = sgRNA Position: 203867895; note = Sequence Name: 56322-704_101_SL_seq_9163
gaagtagagcaaaacctttc

SEQ ID NO: 9164 - DNA, 20 bp, Homo sapiens
  source 1..20: mol_type = genomic DNA; note = Gene: CTLA4; note = Location (start to end; relative to TSS): CTLA4_59_89; note = Orientation (relative to transcription): sense; note = sgRNA Position: 203867856; note = Sequence Name: 56322-704_101_SL_seq_9164
taaagtccttgattctgtgt

SEQ ID NO: 9165 - DNA, 20 bp, Homo sapiens
  source 1..20: mol_type = genomic DNA; note = Gene: CTLA4; note = Location (start to end; relative to TSS): CTLA4_95_125; note = Orientation (relative to transcription): sense; note = sgRNA Position: 203867892; note = Sequence Name: 56322-704_101_SL_seq_9165
caaagcttcaggatcctgaa

SEQ ID NO: 9166 - DNA, 20 bp, Homo sapiens
  source 1..20: mol_type = genomic DNA; note = Gene: CTLA4; note = Location (start to end; relative to TSS): CTLA4_19_49; note = Orientation (relative to transcription): sense; note = sgRNA Position: 203867816; note = Sequence Name: 56322-704_101_SL_seq_9166
gcacatgtgtaatacatatc

SEQ ID NO: 9167 - DNA, 20 bp, Homo sapiens
  source 1..20: mol_type = genomic DNA; note = Gene: CTLA4; note = Location (start to end; relative to TSS): CTLA4_59_89; note = Orientation (relative to transcription): sense; note = sgRNA Position: 203867856; note = Sequence Name: 56322-704_101_SL_seq_9167
taaagtccttgattctgtgt

SEQ ID NO: 9168 - DNA, 20 bp, Homo sapiens
  source 1..20: mol_type = genomic DNA; note = Gene: CTLA4; note = Location (start to end; relative to TSS): CTLA4_20_50; note = Orientation (relative to transcription): sense; note = sgRNA Position: 203867817; note = Sequence Name: 56322-704_101_SL_seq_9168
cacatgtgtaatacatatct

SEQ ID NO: 9169 - DNA, 20 bp, Homo sapiens
  source 1..20: mol_type = genomic DNA; note = Gene: CTLA4; note = Location (start to end; relative to TSS): CTLA4_58_88; note = Orientation (relative to transcription): sense; note = sgRNA Position: 203867855; note = Sequence Name: 56322-704_101_SL_seq_9169
ataaagtccttgattctgtg

SEQ ID NO: 9170 - DNA, 20 bp, Homo sapiens
  source 1..20: mol_type = genomic DNA; note = Gene: CXADR; note = Location (start to end; relative to TSS): CXADR_47_77; note = Orientation (relative to transcription): antisense; note = sgRNA Position: 17513096; note = Sequence Name: 56322-704_101_SL_seq_9170
gggcggcggctgcaggtagg

SEQ ID NO: 9171 - DNA, 20 bp, Homo sapiens
  source 1..20: mol_type = genomic DNA; note = Gene: CXADR; note = Location (start to end; relative to TSS): CXADR_90_120; note = Orientation (relative to transcription): sense; note = sgRNA Position: 17513159; note = Sequence Name: 56322-704_101_SL_seq_9171
ctgtgcttcgtgctcctgtg

SEQ ID NO: 9172 - DNA, 20 bp, Homo sapiens
  source 1..20: mol_type = genomic DNA; note = Gene: CXADR; note = Location (start to end; relative to TSS): CXADR_42_72; note = Orientation (relative to transcription): sense; note = sgRNA Position: 17513111; note = Sequence Name: 56322-704_101_SL_seq_9172
ctacctgcagccgccgccca

SEQ ID NO: 9173 - DNA, 20 bp, Homo sapiens
  source 1..20: mol_type = genomic DNA; note = Gene: CXADR; note = Location (start to end; relative to TSS): CXADR_85_115; note = Orientation (relative to transcription): antisense; note = sgRNA Position: 17513134; note = Sequence Name: 56322-704_101_SL_seq_9173
gaagcacagcaggagcgcca

SEQ ID NO: 9174 - DNA, 20 bp, Homo sapiens
  source 1..20: mol_type = genomic DNA; note = Gene: CXADR; note = Location (start to end; relative to TSS): CXADR_50_80; note = Orientation (relative to transcription): antisense; note = sgRNA Position: 17513099; note = Sequence Name: 56322-704_101_SL_seq_9174
cgtgggcggcggctgcaggt

SEQ ID NO: 9175 - DNA, 20 bp, Homo sapiens
  source 1..20: mol_type = genomic DNA; note = Gene: CXADR; note = Location (start to end; relative to TSS): CXADR_82_112; note = Orientation (relative to transcription): antisense; note = sgRNA Position: 17513131; note = Sequence Name: 56322-704_101_SL_seq_9175
gcacagcaggagcgccatgg

SEQ ID NO: 9176 - DNA, 20 bp, Homo sapiens
  source 1..20: mol_type = genomic DNA; note = Gene: CXADR; note = Location (start to end; relative to TSS): CXADR_34_64; note = Orientation (relative to transcription): antisense; note = sgRNA Position: 17513083; note = Sequence Name: 56322-704_101_SL_seq_9176
aggtaggcggctctcgctcc

SEQ ID NO: 9177 - DNA, 20 bp, Homo sapiens
  source 1..20: mol_type = genomic DNA; note = Gene: CXADR; note = Location (start to end; relative to TSS): CXADR_64_94; note = Orientation (relative to transcription): antisense; note = sgRNA Position: 17513113; note = Sequence Name: 56322-704_101_SL_seq_9177
ggtggctgccgtgccgtggg

SEQ ID NO: 9178 - DNA, 20 bp, Homo sapiens
  source 1..20: mol_type = genomic DNA; note = Gene: CXADR; note = Location (start to end; relative to TSS): CXADR_27_57; note = Orientation (relative to transcription): antisense; note = sgRNA Position: 17513076; note = Sequence Name: 56322-704_101_SL_seq_9178
cggctctcgctcctggtccc

SEQ ID NO: 9179 - DNA, 20 bp, Homo sapiens
  source 1..20: mol_type = genomic DNA; note = Gene: CXADR; note = Location (start to end; relative to TSS): CXADR_59_89; note = Orientation (relative to transcription): sense; note = sgRNA Position: 17513128; note = Sequence Name: 56322-704_101_SL_seq_9179
ccacggcacggcagccacca

SEQ ID NO: 9180 - DNA, 20 bp, Homo sapiens
  source 1..20: mol_type = genomic DNA; note = Gene: DCC; note = Location (start to end; relative to TSS): DCC_44_74; note = Orientation (relative to transcription): sense; note = sgRNA Position: 52340267; note = Sequence Name: 56322-704_101_SL_seq_9180
cccccccgcctctcctccct

SEQ ID NO: 9181 - DNA, 20 bp, Homo sapiens
  source 1..20: mol_type = genomic DNA; note = Gene: DCC; note = Location (start to end; relative to TSS): DCC_79_109; note = Orientation (relative to transcription): antisense; note = sgRNA Position: 52340282; note = Sequence Name: 56322-704_101_SL_seq_9181
ggtttttcttccgagagccg

SEQ ID NO: 9182 - DNA, 20 bp, Homo sapiens
  source 1..20: mol_type = genomic DNA; note = Gene: DCC; note = Location (start to end; relative to TSS): DCC_41_71; note = Orientation (relative to transcription): antisense; note = sgRNA Position: 52340244; note = Sequence Name: 56322-704_101_SL_seq_9182
aggcgggggggactgcgggg

SEQ ID NO: 9183 - DNA, 20 bp, Homo sapiens
  source 1..20: mol_type = genomic DNA; note = Gene: DCC; note = Location (start to end; relative to TSS): DCC_78_108; note = Orientation (relative to transcription): antisense; note = sgRNA Position: 52340281; note = Sequence Name: 56322-704_101_SL_seq_9183
gtttttcttccgagagccga

SEQ ID NO: 9184 - DNA, 20 bp, Homo sapiens
  source 1..20: mol_type = genomic DNA; note = Gene: DCC; note = Location (start to end; relative to TSS): DCC_46_76; note = Orientation (relative to transcription): antisense; note = sgRNA Position: 52340249; note = Sequence Name: 56322-704_101_SL_seq_9184
aggagaggcgggggggactg

SEQ ID NO: 9185 - DNA, 20 bp, Homo sapiens
  source 1..20: mol_type = genomic DNA; note = Gene: DCC; note = Location (start to end; relative to TSS): DCC_77_107; note = Orientation (relative to transcription): antisense; note = sgRNA Position: 52340280; note = Sequence Name: 56322-704_101_SL_seq_9185
tttttcttccgagagccgag

SEQ ID NO: 9186 - DNA, 20 bp, Homo sapiens
  source 1..20: mol_type = genomic DNA; note = Gene: DCC; note = Location (start to end; relative to TSS): DCC_19_49; note = Orientation (relative to transcription): antisense; note = sgRNA Position: 52340222; note = Sequence Name: 56322-704_101_SL_seq_9186
gagcgctctcacttgttact

SEQ ID NO: 9187 - DNA, 20 bp, Homo sapiens
  source 1..20: mol_type = genomic DNA; note = Gene: DCC; note = Location (start to end; relative to TSS): DCC_54_84; note = Orientation (relative to transcription): antisense; note = sgRNA Position: 52340257; note = Sequence Name: 56322-704_101_SL_seq_9187
acccagggaggagaggcggg

SEQ ID NO: 9188 - DNA, 20 bp, Homo sapiens
  source 1..20: mol_type = genomic DNA; note = Gene: DCC; note = Location (start to end; relative to TSS): DCC_18_48; note = Orientation (relative to transcription): antisense; note = sgRNA Position: 52340221; note = Sequence Name: 56322-704_101_SL_seq_9188
agcgctctcacttgttactg

SEQ ID NO: 9189 - DNA, 20 bp, Homo sapiens
  source 1..20: mol_type = genomic DNA; note = Gene: DCC; note = Location (start to end; relative to TSS): DCC_53_83; note = Orientation (relative to transcription): sense; note = sgRNA Position: 52340276; note = Sequence Name: 56322-704_101_SL_seq_9189
ctctcctccctgggtcccct

SEQ ID NO: 9190 - DNA, 20 bp, Homo sapiens
  source 1..20: mol_type = genomic DNA; note = Gene: DSCAM; note = Location (start to end; relative to TSS): DSCAM_55_85; note = Orientation (relative to transcription): antisense; note = sgRNA Position: 40847099; note = Sequence Name: 56322-704_101_SL_seq_9190
ggctcatctttgccgtgctc

SEQ ID NO: 9191 - DNA, 20 bp, Homo sapiens
  source 1..20: mol_type = genomic DNA; note = Gene: DSCAM; note = Location (start to end; relative to TSS): DSCAM_85_115; note = Orientation (relative to transcription): antisense; note = sgRNA Position: 40847069; note = Sequence Name: 56322-704_101_SL_seq_9191
ctccgcatccaggcagcagg

SEQ ID NO: 9192 - DNA, 20 bp, Homo sapiens
  source 1..20: mol_type = genomic DNA; note = Gene: DSCAM; note = Location (start to end; relative to TSS): DSCAM_41_71; note = Orientation (relative to transcription): antisense; note = sgRNA Position: 40847113; note = Sequence Name: 56322-704_101_SL_seq_9192
gtgctccggcctcagtcaca

SEQ ID NO: 9193 - DNA, 20 bp, Homo sapiens
  source 1..20: mol_type = genomic DNA; note = Gene: DSCAM; note = Location (start to end; relative to TSS): DSCAM_76_106; note = Orientation (relative to transcription): antisense; note = sgRNA Position: 40847078; note = Sequence Name: 56322-704_101_SL_seq_9193
caggcagcaggcgggcgggc

SEQ ID NO: 9194 - DNA, 20 bp, Homo sapiens
  source 1..20: mol_type = genomic DNA; note = Gene: DSCAM; note = Location (start to end; relative to TSS): DSCAM_34_64; note = Orientation (relative to transcription): sense; note = sgRNA Position: 40847100; note = Sequence Name: 56322-704_101_SL_seq_9194
atgtgactgaggccggagca

SEQ ID NO: 9195 - DNA, 20 bp, Homo sapiens
  source 1..20: mol_type = genomic DNA; note = Gene: DSCAM; note = Location (start to end; relative to TSS): DSCAM_74_104; note = Orientation (relative to transcription): sense; note = sgRNA Position: 40847060; note = Sequence Name: 56322-704_101_SL_seq_9195
gcccgcctgctgcctggatg

SEQ ID NO: 9196 - DNA, 20 bp, Homo sapiens
  source 1..20: mol_type = genomic DNA; note = Gene: DSCAM; note = Location (start to end; relative to TSS): DSCAM_27_57; note = Orientation (relative to transcription): sense; note = sgRNA Position: 40847107; note = Sequence Name: 56322-704_101_SL_seq_9196
gggatccatgtgactgaggc

SEQ ID NO: 9197 - DNA, 20 bp, Homo sapiens
  source 1..20: mol_type = genomic DNA; note = Gene: DSCAM; note = Location (start to end; relative to TSS): DSCAM_68_98; note = Orientation (relative to transcription): sense; note = sgRNA Position: 40847066; note = Sequence Name: 56322-704_101_SL_seq_9197
ctgcccgcccgcctgctgcc

SEQ ID NO: 9198 - DNA, 20 bp, Homo sapiens
  source 1..20: mol_type = genomic DNA; note = Gene: DSCAM; note = Location (start to end; relative to TSS): DSCAM_6_36; note = Orientation (relative to transcription): sense; note = sgRNA Position: 40847128; note = Sequence Name: 56322-704_101_SL_seq_9198
caggcagggaaggttggcag

SEQ ID NO: 9199 - DNA, 20 bp, Homo sapiens
  source 1..20: mol_type = genomic DNA; note = Gene: DSCAM; note = Location (start to end; relative to TSS): DSCAM_41_71; note = Orientation (relative to transcription): antisense; note = sgRNA Position: 40847113; note = Sequence Name: 56322-704_101_SL_seq_9199
gtgctccggcctcagtcaca

SEQ ID NO: 9200 - DNA, 20 bp, Homo sapiens
  source 1..20: mol_type = genomic DNA; note = Gene: DSCAML1; note = Location (start to end; relative to TSS): DSCAML1_43_73; note = Orientation (relative to transcription): sense; note = sgRNA Position: 117797149; note = Sequence Name: 56322-704_101_SL_seq_9200
gctgggagcgcgctgagcgg

SEQ ID NO: 9201 - DNA, 20 bp, Homo sapiens
  source 1..20: mol_type = genomic DNA; note = Gene: DSCAML1; note = Location (start to end; relative to TSS): DSCAML1_93_123; note = Orientation (relative to transcription): antisense; note = sgRNA Position: 117797119; note = Sequence Name: 56322-704_101_SL_seq_9201
cggggaggtggtcctgtggc

SEQ ID NO: 9202 - DNA, 20 bp, Homo sapiens
  source 1..20: mol_type = genomic DNA; note = Gene: DSCAML1; note = Location (start to end; relative to TSS): DSCAML1_40_70; note = Orientation (relative to transcription): sense; note = sgRNA Position: 117797152; note = Sequence Name: 56322-704_101_SL_seq_9202
gcggctgggagcgcgctgag

SEQ ID NO: 9203 - DNA, 20 bp, Homo sapiens
  source 1..20: mol_type = genomic DNA; note = Gene: DSCAML1; note = Location (start to end; relative to TSS): DSCAML1_85_115; note = Orientation (relative to transcription): antisense; note = sgRNA Position: 117797127; note = Sequence Name: 56322-704_101_SL_seq_9203
tggtcctgtggccggccgtg

SEQ ID NO: 9204 - DNA, 20 bp, Homo sapiens
  source 1..20: mol_type = genomic DNA; note = Gene: DSCAML1; note = Location (start to end; relative to TSS): DSCAML1_26_56; note = Orientation (relative to transcription): sense; note = sgRNA Position: 117797166; note = Sequence Name: 56322-704_101_SL_seq_9204
ggcgccgagtgcgggcggct

SEQ ID NO: 9205 - DNA, 20 bp, Homo sapiens
  source 1..20: mol_type = genomic DNA; note = Gene: DSCAML1; note = Location (start to end; relative to TSS): DSCAML1_72_102; note = Orientation (relative to transcription): sense; note = sgRNA Position: 117797120; note = Sequence Name: 56322-704_101_SL_seq_9205
gctgccgcacggccggccac

SEQ ID NO: 9206 - DNA, 20 bp, Homo sapiens
  source 1..20: mol_type = genomic DNA; note = Gene: DSCAML1; note = Location (start to end; relative to TSS): DSCAML1_21_51; note = Orientation (relative to transcription): sense; note = sgRNA Position: 117797171; note = Sequence Name: 56322-704_101_SL_seq_9206
agcggggcgccgagtgcggg

SEQ ID NO: 9207 - DNA, 20 bp, Homo sapiens
  source 1..20: mol_type = genomic DNA; note = Gene: DSCAML1; note = Location (start to end; relative to TSS): DSCAML1_61_91; note = Orientation (relative to transcription): sense; note = sgRNA Position: 117797131; note = Sequence Name: 56322-704_101_SL_seq_9207
gggggagaggcgctgccgca

SEQ ID NO: 9208 - DNA, 20 bp, Homo sapiens
  source 1..20: mol_type = genomic DNA; note = Gene: DSCAML1; note = Location (start to end; relative to TSS): DSCAML1_18_48; note = Orientation (relative to transcription): sense; note = sgRNA Position: 117797174; note = Sequence Name: 56322-704_101_SL_seq_9208
gagagcggggcgccgagtgc

SEQ ID NO: 9209 - DNA, 20 bp, Homo sapiens
  source 1..20: mol_type = genomic DNA; note = Gene: DSCAML1; note = Location (start to end; relative to TSS): DSCAML1_48_78; note = Orientation (relative to transcription): sense; note = sgRNA Position: 117797144; note = Sequence Name: 56322-704_101_SL_seq_9209
gagcgcgctgagcgggggag

SEQ ID NO: 9210 - DNA, 20 bp, Homo sapiens
  source 1..20: mol_type = genomic DNA; note = Gene: EMB; note = Location (start to end; relative to TSS): EMB_41_71; note = Orientation (relative to transcription): antisense; note = sgRNA Position: 50441243; note = Sequence Name: 56322-704_101_SL_seq_9210
gcgcacactcgcaggtggcc

SEQ ID NO: 9211 - DNA, 20 bp, Homo sapiens
  source 1..20: mol_type = genomic DNA; note = Gene: EMB; note = Location (start to end; relative to TSS): EMB_78_108; note = Orientation (relative to transcription): antisense; note = sgRNA Position: 50441206; note = Sequence Name: 56322-704_101_SL_seq_9211
ctccctcagctcgccgccgc

SEQ ID NO: 9212 - DNA, 20 bp, Homo sapiens
  source 1..20: mol_type = genomic DNA; note = Gene: EMB; note = Location (start to end; relative to TSS): EMB_35_65; note = Orientation (relative to transcription): sense; note = sgRNA Position: 50441229; note = Sequence Name: 56322-704_101_SL_seq_9212
ggccacctgcgagtgtgcgc

SEQ ID NO: 9213 - DNA, 20 bp, Homo sapiens
  source 1..20: mol_type = genomic DNA; note = Gene: EMB; note = Location (start to end; relative to TSS): EMB_67_97; note = Orientation (relative to transcription): sense; note = sgRNA Position: 50441197; note = Sequence Name: 56322-704_101_SL_seq_9213
cacccgcggcggcgagctga

SEQ ID NO: 9214 - DNA, 20 bp, Homo sapiens
  source 1..20: mol_type = genomic DNA; note = Gene: EMB; note = Location (start to end; relative to TSS): EMB_36_66; note = Orientation (relative to transcription): sense; note = sgRNA Position: 50441228; note = Sequence Name: 56322-704_101_SL_seq_9214
gccacctgcgagtgtgcgca

SEQ ID NO: 9215 - DNA, 20 bp, Homo sapiens
  source 1..20: mol_type = genomic DNA; note = Gene: EMB; note = Location (start to end; relative to TSS): EMB_66_96; note = Orientation (relative to transcription): sense; note = sgRNA Position: 50441198; note = Sequence Name: 56322-704_101_SL_seq_9215
acacccgcggcggcgagctg

SEQ ID NO: 9216 - DNA, 20 bp, Homo sapiens
  source 1..20: mol_type = genomic DNA; note = Gene: EMB; note = Location (start to end; relative to TSS): EMB_20_50; note = Orientation (relative to transcription): antisense; note = sgRNA Position: 50441264; note = Sequence Name: 56322-704_101_SL_seq_9216
ggcgctcgcagccagtgccg

SEQ ID NO: 9217 - DNA, 20 bp, Homo sapiens
  source 1..20: mol_type = genomic DNA; note = Gene: EMB; note = Location (start to end; relative to TSS): EMB_53_83; note = Orientation (relative to transcription): sense; note = sgRNA Position: 50441211; note = Sequence Name: 56322-704_101_SL_seq_9217
gcagggactctggacacccg

SEQ ID NO: 9218 - DNA, 20 bp, Homo sapiens
  source 1..20: mol_type = genomic DNA; note = Gene: EMB; note = Location (start to end; relative to TSS): EMB_19_49; note = Orientation (relative to transcription): antisense; note = sgRNA Position: 50441265; note = Sequence Name: 56322-704_101_SL_seq_9218
gcgctcgcagccagtgccgc

SEQ ID NO: 9219 - DNA, 20 bp, Homo sapiens
  source 1..20: mol_type = genomic DNA; note = Gene: EMB; note = Location (start to end; relative to TSS): EMB_49_79; note = Orientation (relative to transcription): antisense; note = sgRNA Position: 50441235; note = Sequence Name: 56322-704_101_SL_seq_9219
gagtccctgcgcacactcgc

SEQ ID NO: 9220 - DNA, 20 bp, Homo sapiens
  source 1..20: mol_type = genomic DNA; note = Gene: ERMAP; note = Location (start to end; relative to TSS): ERMAP_41_71; note = Orientation (relative to transcription): antisense; note = sgRNA Position: 42817169; note = Sequence Name: 56322-704_101_SL_seq_9220
agactcccaagcctcttggt

SEQ ID NO: 9221 - DNA, 20 bp, Homo sapiens
  source 1..20: mol_type = genomic DNA; note = Gene: ERMAP; note = Location (start to end; relative to TSS): ERMAP_73_103; note = Orientation (relative to transcription): antisense; note = sgRNA Position: 42817201; note = Sequence Name: 56322-704_101_SL_seq_9221
ccaacttccagtggcccggt

SEQ ID NO: 9222 - DNA, 20 bp, Homo sapiens
  source 1..20: mol_type = genomic DNA; note = Gene: ERMAP; note = Location (start to end; relative to TSS): ERMAP_38_68; note = Orientation (relative to transcription): antisense; note = sgRNA Position: 42817166; note = Sequence Name: 56322-704_101_SL_seq_9222
ctcccaagcctcttggtcgg

SEQ ID NO: 9223 - DNA, 20 bp, Homo sapiens
  source 1..20: mol_type = genomic DNA; note = Gene: ERMAP; note = Location (start to end; relative to TSS): ERMAP_72_102; note = Orientation (relative to transcription): antisense; note = sgRNA Position: 42817200; note = Sequence Name: 56322-704_101_SL_seq_9223
caacttccagtggcccggtc

SEQ ID NO: 9224 - DNA, 20 bp, Homo sapiens
  source 1..20: mol_type = genomic DNA; note = Gene: ERMAP; note = Location (start to end; relative to TSS): ERMAP_27_57; note = Orientation (relative to transcription): sense; note = sgRNA Position: 42817175; note = Sequence Name: 56322-704_101_SL_seq_9224
agccgccgaccaagaggctt

SEQ ID NO: 9225 - DNA, 20 bp, Homo sapiens
  source 1..20: mol_type = genomic DNA; note = Gene: ERMAP; note = Location (start to end; relative to TSS): ERMAP_67_97; note = Orientation (relative to transcription): antisense; note = sgRNA Position: 42817195; note = Sequence Name: 56322-704_101_SL_seq_9225
tccagtggcccggtcgggaa

SEQ ID NO: 9226 - DNA, 20 bp, Homo sapiens
  source 1..20: mol_type = genomic DNA; note = Gene: ERMAP; note = Location (start to end; relative to TSS): ERMAP_26_56; note = Orientation (relative to transcription): sense; note = sgRNA Position: 42817174; note = Sequence Name: 56322-704_101_SL_seq_9226
gagccgccgaccaagaggct

SEQ ID NO: 9227 - DNA, 20 bp, Homo sapiens
  source 1..20: mol_type = genomic DNA; note = Gene: ERMAP; note = Location (start to end; relative to TSS): ERMAP_64_94; note = Orientation (relative to transcription): sense; note = sgRNA Position: 42817212; note = Sequence Name: 56322-704_101_SL_seq_9227
ccgaccgggccactggaagt

SEQ ID NO: 9228 - DNA, 20 bp, Homo sapiens
  source 1..20: mol_type = genomic DNA; note = Gene: ERMAP; note = Location (start to end; relative to TSS): ERMAP_21_51; note = Orientation (relative to transcription): sense; note = sgRNA Position: 42817169; note = Sequence Name: 56322-704_101_SL_seq_9228
cgctggagccgccgaccaag

SEQ ID NO: 9229 - DNA, 20 bp, Homo sapiens
  source 1..20: mol_type = genomic DNA; note = Gene: ERMAP; note = Location (start to end; relative to TSS): ERMAP_57_87; note = Orientation (relative to transcription): sense; note = sgRNA Position: 42817205; note = Sequence Name: 56322-704_101_SL_seq_9229
acctttcccgaccgggccac

SEQ ID NO: 9230 - DNA, 20 bp, Homo sapiens
  source 1..20: mol_type = genomic DNA; note = Gene: ESAM; note = Location (start to end; relative to TSS): ESAM_42_72; note = Orientation (relative to transcription): antisense; note = sgRNA Position: 124762244; note = Sequence Name: 56322-704_101_SL_seq_9230
gcgacggccggagcgtgcgc

SEQ ID NO: 9231 - DNA, 20 bp, Homo sapiens
  source 1..20: mol_type = genomic DNA; note = Gene: ESAM; note = Location (start to end; relative to TSS): ESAM_77_107; note = Orientation (relative to transcription): antisense; note = sgRNA Position: 124762209; note = Sequence Name: 56322-704_101_SL_seq_9231
cgcgggacgcacggacctgc

SEQ ID NO: 9232 - DNA, 20 bp, Homo sapiens
  source 1..20: mol_type = genomic DNA; note = Gene: ESAM; note = Location (start to end; relative to TSS): ESAM_43_73; note = Orientation (relative to transcription): sense; note = sgRNA Position: 124762223; note = Sequence Name: 56322-704_101_SL_seq_9232
ctccggccgtcgcgcagcct

SEQ ID NO: 9233 - DNA, 20 bp, Homo sapiens
  source 1..20: mol_type = genomic DNA; note = Gene: ESAM; note = Location (start to end; relative to TSS): ESAM_73_103; note = Orientation (relative to transcription): sense; note = sgRNA Position: 124762193; note = Sequence Name: 56322-704_101_SL_seq_9233
aggtccgtgcgtcccgcggc

SEQ ID NO: 9234 - DNA, 20 bp, Homo sapiens
  source 1..20: mol_type = genomic DNA; note = Gene: ESAM; note = Location (start to end; relative to TSS): ESAM_26_56; note = Orientation (relative to transcription): sense; note = sgRNA Position: 124762240; note = Sequence Name: 56322-704_101_SL_seq_9234
ctcggctcccgcgcacgctc

SEQ ID NO: 9235 - DNA, 20 bp, Homo sapiens
  source 1..20: mol_type = genomic DNA; note = Gene: ESAM; note = Location (start to end; relative to TSS): ESAM_58_88; note = Orientation (relative to transcription): antisense; note = sgRNA Position: 124762228; note = Sequence Name: 56322-704_101_SL_seq_9235
caggtgccgaggctgcgcga

SEQ ID NO: 9236 - DNA, 20 bp, Homo sapiens
  source 1..20: mol_type = genomic DNA; note = Gene: ESAM; note = Location (start to end; relative to TSS): ESAM_19_49; note = Orientation (relative to transcription): antisense; note = sgRNA Position: 124762267; note = Sequence Name: 56322-704_101_SL_seq_9236
agccgagccgctgacaccca

SEQ ID NO: 9237 - DNA, 20 bp, Homo sapiens
  source 1..20: mol_type = genomic DNA; note = Gene: ESAM; note = Location (start to end; relative to TSS): ESAM_54_84; note = Orientation (relative to transcription): antisense; note = sgRNA Position: 124762232; note = Sequence Name: 56322-704_101_SL_seq_9237
tgccgaggctgcgcgacggc

SEQ ID NO: 9238 - DNA, 20 bp, Homo sapiens
  source 1..20: mol_type = genomic DNA; note = Gene: ESAM; note = Location (start to end; relative to TSS): ESAM_20_50; note = Orientation (relative to transcription): antisense; note = sgRNA Position: 124762266; note = Sequence Name: 56322-704_101_SL_seq_9238
gagccgagccgctgacaccc

SEQ ID NO: 9239 - DNA, 20 bp, Homo sapiens
  source 1..20: mol_type = genomic DNA; note = Gene: ESAM; note = Location (start to end; relative to TSS): ESAM_53_83; note = Orientation (relative to transcription): sense; note = sgRNA Position: 124762213; note = Sequence Name: 56322-704_101_SL_seq_9239
cgcgcagcctcggcacctgc

SEQ ID NO: 9240 - DNA, 20 bp, Homo sapiens
  source 1..20: mol_type = genomic DNA; note = Gene: F11R; note = Location (start to end; relative to TSS): F11R_37_67; note = Orientation (relative to transcription): antisense; note = sgRNA Position: 161021111; note = Sequence Name: 56322-704_101_SL_seq_9240
aacagccgccgaaggactcc

SEQ ID NO: 9241 - DNA, 20 bp, Homo sapiens
  source 1..20: mol_type = genomic DNA; note = Gene: F11R; note = Location (start to end; relative to TSS): F11R_100_130; note = Orientation (relative to transcription): sense; note = sgRNA Position: 161021028; note = Sequence Name: 56322-704_101_SL_seq_9241
actgttgtgcctcttcatat

SEQ ID NO: 9242 - DNA, 20 bp, Homo sapiens
  source 1..20: mol_type = genomic DNA; note = Gene: F11R; note = Location (start to end; relative to TSS): F11R_36_66; note = Orientation (relative to transcription): antisense; note = sgRNA Position: 161021112; note = Sequence Name: 56322-704_101_SL_seq_9242
acagccgccgaaggactcct

SEQ ID NO: 9243 - DNA, 20 bp, Homo sapiens
  source 1..20: mol_type = genomic DNA; note = Gene: F11R; note = Location (start to end; relative to TSS): F11R_75_105; note = Orientation (relative to transcription): sense; note = sgRNA Position: 161021053; note = Sequence Name: 56322-704_101_SL_seq_9243
ggacaaaggcgcaagtcgag

SEQ ID NO: 9244 - DNA, 20 bp, Homo sapiens
  source 1..20: mol_type = genomic DNA; note = Gene: F11R; note = Location (start to end; relative to TSS): F11R_35_65; note = Orientation (relative to transcription): sense; note = sgRNA Position: 161021093; note = Sequence Name: 56322-704_101_SL_seq_9244
tccttcggcggctgttgtgt

SEQ ID NO: 9245 - DNA, 20 bp, Homo sapiens
  source 1..20: mol_type = genomic DNA; note = Gene: F11R; note = Location (start to end; relative to TSS): F11R_70_100; note = Orientation (relative to transcription): antisense; note = sgRNA Position: 161021078; note = Sequence Name: 56322-704_101_SL_seq_9245
cctttgtccccatcgcgatc

SEQ ID NO: 9246 - DNA, 20 bp, Homo sapiens
  source 1..20: mol_type = genomic DNA; note = Gene: F11R; note = Location (start to end; relative to TSS): F11R_23_53; note = Orientation (relative to transcription): sense; note = sgRNA Position: 161021105; note = Sequence Name: 56322-704_101_SL_seq_9246
tgttcccaggagtccttcgg

SEQ ID NO: 9247 - DNA, 20 bp, Homo sapiens
  source 1..20: mol_type = genomic DNA; note = Gene: F11R; note = Location (start to end; relative to TSS): F11R_53_83; note = Orientation (relative to transcription): sense; note = sgRNA Position: 161021075; note = Sequence Name: 56322-704_101_SL_seq_9247
gtcgggagcctgatcgcgat

SEQ ID NO: 9248 - DNA, 20 bp, Homo sapiens
  source 1..20: mol_type = genomic DNA; note = Gene: F11R; note = Location (start to end; relative to TSS): F11R_20_50; note = Orientation (relative to transcription): sense; note = sgRNA Position: 161021108; note = Sequence Name: 56322-704_101_SL_seq_9248
gtctgttcccaggagtcctt

SEQ ID NO: 9249 - DNA, 20 bp, Homo sapiens
  source 1..20: mol_type = genomic DNA; note = Gene: F11R; note = Location (start to end; relative to TSS): F11R_52_82; note = Orientation (relative to transcription): sense; note = sgRNA Position: 161021076; note = Sequence Name: 56322-704_101_SL_seq_9249
tgtcgggagcctgatcgcga

SEQ ID NO: 9250 - DNA, 20 bp, Homo sapiens
  source 1..20: mol_type = genomic DNA; note = Gene: FAM187A; note = Location (start to end; relative to TSS): FAM187A_35_65; note = Orientation (relative to transcription): antisense; note = sgRNA Position: 44899810; note = Sequence Name: 56322-704_101_SL_seq_9250
caccccagcagtcccggcct

SEQ ID NO: 9251 - DNA, 20 bp, Homo sapiens
  source 1..20: mol_type = genomic DNA; note = Gene: FAM187A; note = Location (start to end; relative to TSS): FAM187A_85_115; note = Orientation (relative to transcription): sense; note = sgRNA Position: 44899880; note = Sequence Name: 56322-704_101_SL_seq_9251
agttctatgtattaaatgcc

SEQ ID NO: 9252 - DNA, 20 bp, Homo sapiens
  source 1..20: mol_type = genomic DNA; note = Gene: FAM187A; note = Location (start to end; relative to TSS): FAM187A_30_60; note = Orientation (relative to transcription): sense; note = sgRNA Position: 44899825; note = Sequence Name: 56322-704_101_SL_seq_9252
ggccgggactgctggggtga

SEQ ID NO: 9253 - DNA, 20 bp, Homo sapiens
  source 1..20: mol_type = genomic DNA; note = Gene: FAM187A; note = Location (start to end; relative to TSS): FAM187A_63_93; note = Orientation (relative to transcription): antisense; note = sgRNA Position: 44899838; note = Sequence Name: 56322-704_101_SL_seq_9253
cgtccccttactcagcctcc

SEQ ID NO: 9254 - DNA, 20 bp, Homo sapiens
  source 1..20: mol_type = genomic DNA; note = Gene: FAM187A; note = Location (start to end; relative to TSS): FAM187A_24_54; note = Orientation (relative to transcription): sense; note = sgRNA Position: 44899819; note = Sequence Name: 56322-704_101_SL_seq_9254
gaccaaggccgggactgctg

SEQ ID NO: 9255 - DNA, 20 bp, Homo sapiens
  source 1..20: mol_type = genomic DNA; note = Gene: FAM187A; note = Location (start to end; relative to TSS): FAM187A_60_90; note = Orientation (relative to transcription): sense; note = sgRNA Position: 44899855; note = Sequence Name: 56322-704_101_SL_seq_9255
ggctgagtaaggggacggaa

SEQ ID NO: 9256 - DNA, 20 bp, Homo sapiens
  source 1..20: mol_type = genomic DNA; note = Gene: FAM187A; note = Location (start to end; relative to TSS): FAM187A_23_53; note = Orientation (relative to transcription): sense; note = sgRNA Position: 44899818; note = Sequence Name: 56322-704_101_SL_seq_9256
ggaccaaggccgggactgct

SEQ ID NO: 9257 - DNA, 20 bp, Homo sapiens
  source 1..20: mol_type = genomic DNA; note = Gene: FAM187A; note = Location (start to end; relative to TSS): FAM187A_59_89; note = Orientation (relative to transcription): sense; note = sgRNA Position: 44899854; note = Sequence Name: 56322-704_101_SL_seq_9257
aggctgagtaaggggacgga

SEQ ID NO: 9258 - DNA, 20 bp, Homo sapiens
  source 1..20: mol_type = genomic DNA; note = Gene: FAM187A; note = Location (start to end; relative to TSS): FAM187A_22_52; note = Orientation (relative to transcription): sense; note = sgRNA Position: 44899817; note = Sequence Name: 56322-704_101_SL_seq_9258
gggaccaaggccgggactgc

SEQ ID NO: 9259 - DNA, 20 bp, Homo sapiens
  source 1..20: mol_type = genomic DNA; note = Gene: FAM187A; note = Location (start to end; relative to TSS): FAM187A_55_85; note = Orientation (relative to transcription): sense; note = sgRNA Position: 44899850; note = Sequence Name: 56322-704_101_SL_seq_9259
cgggaggctgagtaagggga

SEQ ID NO: 9260 - DNA, 20 bp, Homo sapiens
  source 1..20: mol_type = genomic DNA; note = Gene: FCAMR; note = Location (start to end; relative to TSS): FCAMR_71_101; note = Orientation (relative to transcription): sense; note = sgRNA Position: 206970365; note = Sequence Name: 56322-704_101_SL_seq_9260
aagtgacagtaagaatgaca

SEQ ID NO: 9261 - DNA, 20 bp, Homo sapiens
  source 1..20: mol_type = genomic DNA; note = Gene: FCAMR; note = Location (start to end; relative to TSS): FCAMR_127_157; note = Orientation (relative to transcription): sense; note = sgRNA Position: 206970309; note = Sequence Name: 56322-704_101_SL_seq_9261
atccaaagagaagtgacttg

SEQ ID NO: 9262 - DNA, 20 bp, Homo sapiens
  source 1..20: mol_type = genomic DNA; note = Gene: FCAMR; note = Location (start to end; relative to TSS): FCAMR_72_102; note = Orientation (relative to transcription): sense; note = sgRNA Position: 206970364; note = Sequence Name: 56322-704_101_SL_seq_9262
agtgacagtaagaatgacaa

SEQ ID NO: 9263 - DNA, 20 bp, Homo sapiens
  source 1..20: mol_type = genomic DNA; note = Gene: FCAMR; note = Location (start to end; relative to TSS): FCAMR_118_148; note = Orientation (relative to transcription): antisense; note = sgRNA Position: 206970338; note = Sequence Name: 56322-704_101_SL_seq_9263
tggattttattatttataag

SEQ ID NO: 9264 - DNA, 20 bp, Homo sapiens
  source 1..20: mol_type = genomic DNA; note = Gene: FCAMR; note = Location (start to end; relative to TSS): FCAMR_53_83; note = Orientation (relative to transcription): antisense; note = sgRNA Position: 206970403; note = Sequence Name: 56322-704_101_SL_seq_9264
ctgaagaacttttccaggag

SEQ ID NO: 9265 - DNA, 20 bp, Homo sapiens
  source 1..20: mol_type = genomic DNA; note = Gene: FCAMR; note = Location (start to end; relative to TSS): FCAMR_83_113; note = Orientation (relative to transcription): sense; note = sgRNA Position: 206970353; note = Sequence Name: 56322-704_101_SL_seq_9265
gaatgacaagggattaggac

SEQ ID NO: 9266 - DNA, 20 bp, Homo sapiens
  source 1..20: mol_type = genomic DNA; note = Gene: FCAMR; note = Location (start to end; relative to TSS): FCAMR_45_75; note = Orientation (relative to transcription): sense; note = sgRNA Position: 206970391; note = Sequence Name: 56322-704_101_SL_seq_9266
cactcctggaaaagttcttc

SEQ ID NO: 9267 - DNA, 20 bp, Homo sapiens
  source 1..20: mol_type = genomic DNA; note = Gene: FCAMR; note = Location (start to end; relative to TSS): FCAMR_78_108; note = Orientation (relative to transcription): sense; note = sgRNA Position: 206970358; note = Sequence Name: 56322-704_101_SL_seq_9267
agtaagaatgacaagggatt

SEQ ID NO: 9268 - DNA, 20 bp, Homo sapiens
  source 1..20: mol_type = genomic DNA; note = Gene: FCAMR; note = Location (start to end; relative to TSS): FCAMR_31_61; note = Orientation (relative to transcription): sense; note = sgRNA Position: 206970405; note = Sequence Name: 56322-704_101_SL_seq_9268
gaagctactgttaccactcc

SEQ ID NO: 9269 - DNA, 20 bp, Homo sapiens
  source 1..20: mol_type = genomic DNA; note = Gene: FCAMR; note = Location (start to end; relative to TSS): FCAMR_71_101; note = Orientation (relative to transcription): sense; note = sgRNA Position: 206970365; note = Sequence Name: 56322-704_101_SL_seq_9269
aagtgacagtaagaatgaca

SEQ ID NO: 9270 - DNA, 20 bp, Homo sapiens
  source 1..20: mol_type = genomic DNA; note = Gene: FCAR; note = Location (start to end; relative to TSS): FCAR_60_90; note = Orientation (relative to transcription): antisense; note = sgRNA Position: 54874301; note = Sequence Name: 56322-704_101_SL_seq_9270
acaggagggtggtctgtttg

SEQ ID NO: 9271 - DNA, 20 bp, Homo sapiens
  source 1..20: mol_type = genomic DNA; note = Gene: FCAR; note = Location (start to end; relative to TSS): FCAR_117_147; note = Orientation (relative to transcription): sense; note = sgRNA Position: 54874378; note = Sequence Name: 56322-704_101_SL_seq_9271
agagaaatcccaaaataatc

SEQ ID NO: 9272 - DNA, 20 bp, Homo sapiens
  source 1..20: mol_type = genomic DNA; note = Gene: FCAR; note = Location (start to end; relative to TSS): FCAR_58_88; note = Orientation (relative to transcription): sense; note = sgRNA Position: 54874319; note = Sequence Name: 56322-704_101_SL_seq_9272
cagaccaccctcctgtgtct

SEQ ID NO: 9273 - DNA, 20 bp, Homo sapiens
  source 1..20: mol_type = genomic DNA; note = Gene: FCAR; note = Location (start to end; relative to TSS): FCAR_89_119; note = Orientation (relative to transcription): sense; note = sgRNA Position: 54874350; note = Sequence Name: 56322-704_101_SL_seq_9273
agagtaaaagtgggttagag

SEQ ID NO: 9274 - DNA, 20 bp, Homo sapiens
  source 1..20: mol_type = genomic DNA; note = Gene: FCAR; note = Location (start to end; relative to TSS): FCAR_42_72; note = Orientation (relative to transcription): antisense; note = sgRNA Position: 54874283; note = Sequence Name: 56322-704_101_SL_seq_9274
tggggtccatcgtgctgaca

SEQ ID NO: 9275 - DNA, 20 bp, Homo sapiens
  source 1..20: mol_type = genomic DNA; note = Gene: FCAR; note = Location (start to end; relative to TSS): FCAR_74_104; note = Orientation (relative to transcription): antisense; note = sgRNA Position: 54874315; note = Sequence Name: 56322-704_101_SL_seq_9275
aaactcaccaagacacagga

SEQ ID NO: 9276 - DNA, 20 bp, Homo sapiens
  source 1..20: mol_type = genomic DNA; note = Gene: FCAR; note = Location (start to end; relative to TSS): FCAR_27_57; note = Orientation (relative to transcription): sense; note = sgRNA Position: 54874288; note = Sequence Name: 56322-704_101_SL_seq_9276
ctgaggccgtgtcagcacga

SEQ ID NO: 9277 - DNA, 20 bp, Homo sapiens
  source 1..20: mol_type = genomic DNA; note = Gene: FCAR; note = Location (start to end; relative to TSS): FCAR_58_88; note = Orientation (relative to transcription): sense; note = sgRNA Position: 54874319; note = Sequence Name: 56322-704_101_SL_seq_9277
cagaccaccctcctgtgtct

SEQ ID NO: 9278 - DNA, 20 bp, Homo sapiens
  source 1..20: mol_type = genomic DNA; note = Gene: FCAR; note = Location (start to end; relative to TSS): FCAR_10_40; note = Orientation (relative to transcription): sense; note = sgRNA Position: 54874271; note = Sequence Name: 56322-704_101_SL_seq_9278
aaaggagagcaacggggctg

SEQ ID NO: 9279 - DNA, 20 bp, Homo sapiens
  source 1..20: mol_type = genomic DNA; note = Gene: FCAR; note = Location (start to end; relative to TSS): FCAR_42_72; note = Orientation (relative to transcription): antisense; note = sgRNA Position: 54874283; note = Sequence Name: 56322-704_101_SL_seq_9279
tggggtccatcgtgctgaca

SEQ ID NO: 9280 - DNA, 20 bp, Homo sapiens
  source 1..20: mol_type = genomic DNA; note = Gene: FCER1A; note = Location (start to end; relative to TSS): FCER1A_48_78; note = Orientation (relative to transcription): antisense; note = sgRNA Position: 159302390; note = Sequence Name: 56322-704_101_SL_seq_9280
ggctacacacagtagagtag

SEQ ID NO: 9281 - DNA, 20 bp, Homo sapiens
  source 1..20: mol_type = genomic DNA; note = Gene: FCER1A; note = Location (start to end; relative to TSS): FCER1A_86_116; note = Orientation (relative to transcription): sense; note = sgRNA Position: 159302448; note = Sequence Name: 56322-704_101_SL_seq_9281
ttcaattacccctcccaggg

SEQ ID NO: 9282 - DNA, 20 bp, Homo sapiens
  source 1..20: mol_type = genomic DNA; note = Gene: FCER1A; note = Location (start to end; relative to TSS): FCER1A_49_79; note = Orientation (relative to transcription): antisense; note = sgRNA Position: 159302391; note = Sequence Name: 56322-704_101_SL_seq_9282
aggctacacacagtagagta

SEQ ID NO: 9283 - DNA, 20 bp, Homo sapiens
  source 1..20: mol_type = genomic DNA; note = Gene: FCER1A; note = Location (start to end; relative to TSS): FCER1A_83_113; note = Orientation (relative to transcription): sense; note = sgRNA Position: 159302445; note = Sequence Name: 56322-704_101_SL_seq_9283
agattcaattacccctccca

SEQ ID NO: 9284 - DNA, 20 bp, Homo sapiens
  source 1..20: mol_type = genomic DNA; note = Gene: FCER1A; note = Location (start to end; relative to TSS): FCER1A_35_65; note = Orientation (relative to transcription): antisense; note = sgRNA Position: 159302377; note = Sequence Name: 56322-704_101_SL_seq_9284
agagtaggggattccatggc

SEQ ID NO: 9285 - DNA, 20 bp, Homo sapiens
  source 1..20: mol_type = genomic DNA; note = Gene: FCER1A; note = Location (start to end; relative to TSS): FCER1A_82_112; note = Orientation (relative to transcription): sense; note = sgRNA Position: 159302444; note = Sequence Name: 56322-704_101_SL_seq_9285
gagattcaattacccctccc

SEQ ID NO: 9286 - DNA, 20 bp, Homo sapiens
  source 1..20: mol_type = genomic DNA; note = Gene: FCER1A; note = Location (start to end; relative to TSS): FCER1A_39_69; note = Orientation (relative to transcription): antisense; note = sgRNA Position: 159302381; note = Sequence Name: 56322-704_101_SL_seq_9286
cagtagagtaggggattcca

SEQ ID NO: 9287 - DNA, 20 bp, Homo sapiens
  source 1..20: mol_type = genomic DNA; note = Gene: FCER1A; note = Location (start to end; relative to TSS): FCER1A_69_99; note = Orientation (relative to transcription): antisense; note = sgRNA Position: 159302411; note = Sequence Name: 56322-704_101_SL_seq_9287
ctacttaccgaagaacagta

SEQ ID NO: 9288 - DNA, 20 bp, Homo sapiens
  source 1..20: mol_type = genomic DNA; note = Gene: FCER1A; note = Location (start to end; relative to TSS): FCER1A_18_48; note = Orientation (relative to transcription): antisense; note = sgRNA Position: 159302360; note = Sequence Name: 56322-704_101_SL_seq_9288
ggcaggagccatcttcttca

SEQ ID NO: 9289 - DNA, 20 bp, Homo sapiens
  source 1..20: mol_type = genomic DNA; note = Gene: FCER1A; note = Location (start to end; relative to TSS): FCER1A_48_78; note = Orientation (relative to transcription): antisense; note = sgRNA Position: 159302390; note = Sequence Name: 56322-704_101_SL_seq_9289
ggctacacacagtagagtag

SEQ ID NO: 9290 - DNA, 20 bp, Homo sapiens
  source 1..20: mol_type = genomic DNA; note = Gene: FCGR1A; note = Location (start to end; relative to TSS): FCGR1A_50_80; note = Orientation (relative to transcription): sense; note = sgRNA Position: 149782770; note = Sequence Name: 56322-704_101_SL_seq_9290
ttgacaactctgctcctttg

SEQ ID NO: 9291 - DNA, 20 bp, Homo sapiens
  source 1..20: mol_type = genomic DNA; note = Gene: FCGR1A; note = Location (start to end; relative to TSS): FCGR1A_94_124; note = Orientation (relative to transcription): sense; note = sgRNA Position: 149782814; note = Sequence Name: 56322-704_101_SL_seq_9291
agttagaagggtacaggctg

SEQ ID NO: 9292 - DNA, 20 bp, Homo sapiens
  source 1..20: mol_type = genomic DNA; note = Gene: FCGR1A; note = Location (start to end; relative to TSS): FCGR1A_31_61; note = Orientation (relative to transcription): antisense; note = sgRNA Position: 149782731; note = Sequence Name: 56322-704_101_SL_seq_9292
acatgttgtctccaagctgg

SEQ ID NO: 9293 - DNA, 20 bp, Homo sapiens
  source 1..20: mol_type = genomic DNA; note = Gene: FCGR1A; note = Location (start to end; relative to TSS): FCGR1A_88_118; note = Orientation (relative to transcription): sense; note = sgRNA Position: 149782808; note = Sequence Name: 56322-704_101_SL_seq_9293
ggggacagttagaagggtac

SEQ ID NO: 9294 - DNA, 20 bp, Homo sapiens
  source 1..20: mol_type = genomic DNA; note = Gene: FCGR1A; note = Location (start to end; relative to TSS): FCGR1A_30_60; note = Orientation (relative to transcription): antisense; note = sgRNA Position: 149782730; note = Sequence Name: 56322-704_101_SL_seq_9294
catgttgtctccaagctggt

SEQ ID NO: 9295 - DNA, 20 bp, Homo sapiens
  source 1..20: mol_type = genomic DNA; note = Gene: FCGR1A; note = Location (start to end; relative to TSS): FCGR1A_73_103; note = Orientation (relative to transcription): antisense; note = sgRNA Position: 149782773; note = Sequence Name: 56322-704_101_SL_seq_9295
ctgagtccaacttaccccaa

SEQ ID NO: 9296 - DNA, 20 bp, Homo sapiens
  source 1..20: mol_type = genomic DNA; note = Gene: FCGR1A; note = Location (start to end; relative to TSS): FCGR1A_34_64; note = Orientation (relative to transcription): antisense; note = sgRNA Position: 149782734; note = Sequence Name: 56322-704_101_SL_seq_9296
accacatgttgtctccaagc

SEQ ID NO: 9297 - DNA, 20 bp, Homo sapiens
  source 1..20: mol_type = genomic DNA; note = Gene: FCGR1A; note = Location (start to end; relative to TSS): FCGR1A_67_97; note = Orientation (relative to transcription): sense; note = sgRNA Position: 149782787; note = Sequence Name: 56322-704_101_SL_seq_9297
ttggggtaagttggactcag

SEQ ID NO: 9298 - DNA, 20 bp, Homo sapiens
  source 1..20: mol_type = genomic DNA; note = Gene: FCGR1A; note = Location (start to end; relative to TSS): FCGR1A_24_54; note = Orientation (relative to transcription): sense; note = sgRNA Position: 149782744; note = Sequence Name: 56322-704_101_SL_seq_9298
accagcttggagacaacatg

SEQ ID NO: 9299 - DNA, 20 bp, Homo sapiens
  source 1..20: mol_type = genomic DNA; note = Gene: FCGR1A; note = Location (start to end; relative to TSS): FCGR1A_58_88; note = Orientation (relative to transcription): sense; note = sgRNA Position: 149782778; note = Sequence Name: 56322-704_101_SL_seq_9299
tctgctcctttggggtaagt

SEQ ID NO: 9300 - DNA, 20 bp, Homo sapiens
  source 1..20: mol_type = genomic DNA; note = Gene: FCGR1BP; note = Location (start to end; relative to TSS): FCGR1BP_51_81; note = Orientation (relative to transcription): sense; note = sgRNA Position: 121087421; note = Sequence Name: 56322-704_101_SL_seq_9300
ttgacaactctgctcctttg

SEQ ID NO: 9301 - DNA, 20 bp, Homo sapiens
  source 1..20: mol_type = genomic DNA; note = Gene: FCGR1BP; note = Location (start to end; relative to TSS): FCGR1BP_95_125; note = Orientation (relative to transcription): sense; note = sgRNA Position: 121087465; note = Sequence Name: 56322-704_101_SL_seq_9301
agttagaagggtacaggctg

SEQ ID NO: 9302 - DNA, 20 bp, Homo sapiens
  source 1..20: mol_type = genomic DNA; note = Gene: FCGR1BP; note = Location (start to end; relative to TSS): FCGR1BP_35_65; note = Orientation (relative to transcription): antisense; note = sgRNA Position: 121087385; note = Sequence Name: 56322-704_101_SL_seq_9302
accacatgttgtctccaagc

SEQ ID NO: 9303 - DNA, 20 bp, Homo sapiens
  source 1..20: mol_type = genomic DNA; note = Gene: FCGR1BP; note = Location (start to end; relative to TSS): FCGR1BP_89_119; note = Orientation (relative to transcription): sense; note = sgRNA Position: 121087459; note = Sequence Name: 56322-704_101_SL_seq_9303
ggggacagttagaagggtac

SEQ ID NO: 9304 - DNA, 20 bp, Homo sapiens
  source 1..20: mol_type = genomic DNA; note = Gene: FCGR1BP; note = Location (start to end; relative to TSS): FCGR1BP_32_62; note = Orientation (relative to transcription): antisense; note = sgRNA Position: 121087382; note = Sequence Name: 56322-704_101_SL_seq_9304
acatgttgtctccaagctgg

SEQ ID NO: 9305 - DNA, 20 bp, Homo sapiens
  source 1..20: mol_type = genomic DNA; note = Gene: FCGR1BP; note = Location (start to end; relative to TSS): FCGR1BP_74_104; note = Orientation (relative to transcription): antisense; note = sgRNA Position: 121087424; note = Sequence Name: 56322-704_101_SL_seq_9305
ctgagtccaacttaccccaa

SEQ ID NO: 9306 - DNA, 20 bp, Homo sapiens
  source 1..20: mol_type = genomic DNA; note = Gene: FCGR1BP; note = Location (start to end; relative to TSS): FCGR1BP_31_61; note = Orientation (relative to transcription): antisense; note = sgRNA Position: 121087381; note = Sequence Name: 56322-704_101_SL_seq_9306
catgttgtctccaagctggt

SEQ ID NO: 9307 - DNA, 20 bp, Homo sapiens
  source 1..20: mol_type = genomic DNA; note = Gene: FCGR1BP; note = Location (start to end; relative to TSS): FCGR1BP_68_98; note = Orientation (relative to transcription): sense; note = sgRNA Position: 121087438; note = Sequence Name: 56322-704_101_SL_seq_9307
ttggggtaagttggactcag

SEQ ID NO: 9308 - DNA, 20 bp, Homo sapiens
  source 1..20: mol_type = genomic DNA; note = Gene: FCGR1BP; note = Location (start to end; relative to TSS): FCGR1BP_25_55; note = Orientation (relative to transcription): sense; note = sgRNA Position: 121087395; note = Sequence Name: 56322-704_101_SL_seq_9308
accagcttggagacaacatg

SEQ ID NO: 9309 - DNA, 20 bp, Homo sapiens
  source 1..20: mol_type = genomic DNA; note = Gene: FCGR1BP; note = Location (start to end; relative to TSS): FCGR1BP_59_89; note = Orientation (relative to transcription): sense; note = sgRNA Position: 121087429; note = Sequence Name: 56322-704_101_SL_seq_9309
tctgctcctttggggtaagt

SEQ ID NO: 9310 - DNA, 20 bp, Homo sapiens
  source 1..20: mol_type = genomic DNA; note = Gene: FCGR1CP; note = Location (start to end; relative to TSS): FCGR1CP_46_76; note = Orientation (relative to transcription): antisense; note = sgRNA Position: 143874822; note = Sequence Name: 56322-704_101_SL_seq_9310
ctgagtccaacttaccccaa

SEQ ID NO: 9311 - DNA, 20 bp, Homo sapiens
  source 1..20: mol_type = genomic DNA; note = Gene: FCGR1CP; note = Location (start to end; relative to TSS): FCGR1CP_180_210; note = Orientation (relative to transcription): antisense; note = sgRNA Position: 143874956; note = Sequence Name: 56322-704_101_SL_seq_9311
aaataagctctaataaaccg

SEQ ID NO: 9312 - DNA, 20 bp, Homo sapiens
  source 1..20: mol_type = genomic DNA; note = Gene: FCGR1CP; note = Location (start to end; relative to TSS): FCGR1CP_40_70; note = Orientation (relative to transcription): sense; note = sgRNA Position: 143874836; note = Sequence Name: 56322-704_101_SL_seq_9312
ttggggtaagttggactcag

SEQ ID NO: 9313 - DNA, 20 bp, Homo sapiens
  source 1..20: mol_type = genomic DNA; note = Gene: FCGR1CP; note = Location (start to end; relative to TSS): FCGR1CP_154_184; note = Orientation (relative to transcription): sense; note = sgRNA Position: 143874950; note = Sequence Name: 56322-704_101_SL_seq_9313
aacttgtatctgtgcttcca

SEQ ID NO: 9314 - DNA, 20 bp, Homo sapiens
  source 1..20: mol_type = genomic DNA; note = Gene: FCGR1CP; note = Location (start to end; relative to TSS): FCGR1CP_31_61; note = Orientation (relative to transcription): sense; note = sgRNA Position: 143874827; note = Sequence Name: 56322-704_101_SL_seq_9314
tctgctcctttggggtaagt

SEQ ID NO: 9315 - DNA, 20 bp, Homo sapiens
  source 1..20: mol_type = genomic DNA; note = Gene: FCGR1CP; note = Location (start to end; relative to TSS): FCGR1CP_67_97; note = Orientation (relative to transcription): sense; note = sgRNA Position: 143874863; note = Sequence Name: 56322-704_101_SL_seq_9315
agttagaagggtacaggctg

SEQ ID NO: 9316 - DNA, 20 bp, Homo sapiens
  source 1..20: mol_type = genomic DNA; note = Gene: FCGR1CP; note = Location (start to end; relative to TSS): FCGR1CP_23_53; note = Orientation (relative to transcription): sense; note = sgRNA Position: 143874819; note = Sequence Name: 56322-704_101_SL_seq_9316
ttgacaactctgctcctttg

SEQ ID NO: 9317 - DNA, 20 bp, Homo sapiens
  source 1..20: mol_type = genomic DNA; note = Gene: FCGR1CP; note = Location (start to end; relative to TSS): FCGR1CP_61_91; note = Orientation (relative to transcription): sense; note = sgRNA Position: 143874857; note = Sequence Name: 56322-704_101_SL_seq_9317
ggggacagttagaagggtac

SEQ ID NO: 9318 - DNA, 20 bp, Homo sapiens
  source 1..20: mol_type = genomic DNA; note = Gene: FCGR1CP; note = Location (start to end; relative to TSS): FCGR1CP_7_37; note = Orientation (relative to transcription): antisense; note = sgRNA Position: 143874783; note = Sequence Name: 56322-704_101_SL_seq_9318
accacatgttgtctccaagc

SEQ ID NO: 9319 - DNA, 20 bp, Homo sapiens
  source 1..20: mol_type = genomic DNA; note = Gene: FCGR1CP; note = Location (start to end; relative to TSS): FCGR1CP_46_76; note = Orientation (relative to transcription): antisense; note = sgRNA Position: 143874822; note = Sequence Name: 56322-704_101_SL_seq_9319
ctgagtccaacttaccccaa

SEQ ID NO: 9320 - DNA, 20 bp, Homo sapiens
  source 1..20: mol_type = genomic DNA; note = Gene: FCGR2A; note = Location (start to end; relative to TSS): FCGR2A_47_77; note = Orientation (relative to transcription): antisense; note = sgRNA Position: 161505510; note = Sequence Name: 56322-704_101_SL_seq_9320
tgaagcagccacaggtttct

SEQ ID NO: 9321 - DNA, 20 bp, Homo sapiens
  source 1..20: mol_type = genomic DNA; note = Gene: FCGR2A; note = Location (start to end; relative to TSS): FCGR2A_90_120; note = Orientation (relative to transcription): sense; note = sgRNA Position: 161505573; note = Sequence Name: 56322-704_101_SL_seq_9321
agtgagggtcattctgaaat

SEQ ID NO: 9322 - DNA, 20 bp, Homo sapiens
  source 1..20: mol_type = genomic DNA; note = Gene: FCGR2A; note = Location (start to end; relative to TSS): FCGR2A_55_85; note = Orientation (relative to transcription): antisense; note = sgRNA Position: 161505518; note = Sequence Name: 56322-704_101_SL_seq_9322
tcaatggttgaagcagccac

SEQ ID NO: 9323 - DNA, 20 bp, Homo sapiens
  source 1..20: mol_type = genomic DNA; note = Gene: FCGR2A; note = Location (start to end; relative to TSS): FCGR2A_89_119; note = Orientation (relative to transcription): sense; note = sgRNA Position: 161505572; note = Sequence Name: 56322-704_101_SL_seq_9323
gagtgagggtcattctgaaa

SEQ ID NO: 9324 - DNA, 20 bp, Homo sapiens
  source 1..20: mol_type = genomic DNA; note = Gene: FCGR2A; note = Location (start to end; relative to TSS): FCGR2A_30_60; note = Orientation (relative to transcription): sense; note = sgRNA Position: 161505513; note = Sequence Name: 56322-704_101_SL_seq_9324
atgtatgtcccagaaacctg

SEQ ID NO: 9325 - DNA, 20 bp, Homo sapiens
  source 1..20: mol_type = genomic DNA; note = Gene: FCGR2A; note = Location (start to end; relative to TSS): FCGR2A_65_95; note = Orientation (relative to transcription): sense; note = sgRNA Position: 161505548; note = Sequence Name: 56322-704_101_SL_seq_9325
ttgacagttttgctgctgct

SEQ ID NO: 9326 - DNA, 20 bp, Homo sapiens
  source 1..20: mol_type = genomic DNA; note = Gene: FCGR2A; note = Location (start to end; relative to TSS): FCGR2A_25_55; note = Orientation (relative to transcription): antisense; note = sgRNA Position: 161505488; note = Sequence Name: 56322-704_101_SL_seq_9326
gacatacattctgagacatt

SEQ ID NO: 9327 - DNA, 20 bp, Homo sapiens
  source 1..20: mol_type = genomic DNA; note = Gene: FCGR2A; note = Location (start to end; relative to TSS): FCGR2A_64_94; note = Orientation (relative to transcription): sense; note = sgRNA Position: 161505547; note = Sequence Name: 56322-704_101_SL_seq_9327
attgacagttttgctgctgc

SEQ ID NO: 9328 - DNA, 20 bp, Homo sapiens
  source 1..20: mol_type = genomic DNA; note = Gene: FCGR2A; note = Location (start to end; relative to TSS): FCGR2A_24_54; note = Orientation (relative to transcription): antisense; note = sgRNA Position: 161505487; note = Sequence Name: 56322-704_101_SL_seq_9328
acatacattctgagacattt

SEQ ID NO: 9329 - DNA, 20 bp, Homo sapiens
  source 1..20: mol_type = genomic DNA; note = Gene: FCGR2A; note = Location (start to end; relative to TSS): FCGR2A_55_85; note = Orientation (relative to transcription): antisense; note = sgRNA Position: 161505518; note = Sequence Name: 56322-704_101_SL_seq_9329
tcaatggttgaagcagccac

SEQ ID NO: 9330 - DNA, 20 bp, Homo sapiens
  source 1..20: mol_type = genomic DNA; note = Gene: FCGR2B; note = Location (start to end; relative to TSS): FCGR2B_38_68; note = Orientation (relative to transcription): antisense; note = sgRNA Position: 161663187; note = Sequence Name: 56322-704_101_SL_seq_9330
cacagccttctctcaaagct

SEQ ID NO: 9331 - DNA, 20 bp, Homo sapiens
  source 1..20: mol_type = genomic DNA; note = Gene: FCGR2B; note = Location (start to end; relative to TSS): FCGR2B_79_109; note = Orientation (relative to transcription): antisense; note = sgRNA Position: 161663228; note = Sequence Name: 56322-704_101_SL_seq_9331
catcactccctggagcgagc

SEQ ID NO: 9332 - DNA, 20 bp, Homo sapiens
  source 1..20: mol_type = genomic DNA; note = Gene: FCGR2B; note = Location (start to end; relative to TSS): FCGR2B_35_65; note = Orientation (relative to transcription): antisense; note = sgRNA Position: 161663184; note = Sequence Name: 56322-704_101_SL_seq_9332
agccttctctcaaagcttgg

SEQ ID NO: 9333 - DNA, 20 bp, Homo sapiens
  source 1..20: mol_type = genomic DNA; note = Gene: FCGR2B; note = Location (start to end; relative to TSS): FCGR2B_72_102; note = Orientation (relative to transcription): sense; note = sgRNA Position: 161663241; note = Sequence Name: 56322-704_101_SL_seq_9333
agctcgctccagggagtgat

SEQ ID NO: 9334 - DNA, 20 bp, Homo sapiens
  source 1..20: mol_type = genomic DNA; note = Gene: FCGR2B; note = Location (start to end; relative to TSS): FCGR2B_20_50; note = Orientation (relative to transcription): antisense; note = sgRNA Position: 161663169; note = Sequence Name: 56322-704_101_SL_seq_9334
cttggcggattctaccctag

SEQ ID NO: 9335 - DNA, 20 bp, Homo sapiens
  source 1..20: mol_type = genomic DNA; note = Gene: FCGR2B; note = Location (start to end; relative to TSS): FCGR2B_71_101; note = Orientation (relative to transcription): sense; note = sgRNA Position: 161663240; note = Sequence Name: 56322-704_101_SL_seq_9335
cagctcgctccagggagtga

SEQ ID NO: 9336 - DNA, 20 bp, Homo sapiens
  source 1..20: mol_type = genomic DNA; note = Gene: FCGR2B; note = Location (start to end; relative to TSS): FCGR2B_19_49; note = Orientation (relative to transcription): antisense; note = sgRNA Position: 161663168; note = Sequence Name: 56322-704_101_SL_seq_9336
ttggcggattctaccctaga

SEQ ID NO: 9337 - DNA, 20 bp, Homo sapiens
  source 1..20: mol_type = genomic DNA; note = Gene: FCGR2B; note = Location (start to end; relative to TSS): FCGR2B_63_93; note = Orientation (relative to transcription): sense; note = sgRNA Position: 161663232; note = Sequence Name: 56322-704_101_SL_seq_9337
ctgggcgccagctcgctcca

SEQ ID NO: 9338 - DNA, 20 bp, Homo sapiens
  source 1..20: mol_type = genomic DNA; note = Gene: FCGR2B; note = Location (start to end; relative to TSS): FCGR2B_24_54; note = Orientation (relative to transcription): sense; note = sgRNA Position: 161663193; note = Sequence Name: 56322-704_101_SL_seq_9338
atccgccaagctttgagaga

SEQ ID NO: 9339 - DNA, 20 bp, Homo sapiens
  source 1..20: mol_type = genomic DNA; note = Gene: FCGR2B; note = Location (start to end; relative to TSS): FCGR2B_62_92; note = Orientation (relative to transcription): sense; note = sgRNA Position: 161663231; note = Sequence Name: 56322-704_101_SL_seq_9339
tctgggcgccagctcgctcc

SEQ ID NO: 9340 - DNA, 20 bp, Homo sapiens
  source 1..20: mol_type = genomic DNA; note = Gene: FCGR2C; note = Location (start to end; relative to TSS): FCGR2C_45_75; note = Orientation (relative to transcription): sense; note = sgRNA Position: 161581409; note = Sequence Name: 56322-704_101_SL_seq_9340
aggctgtgactgctgtgctc

SEQ ID NO: 9341 - DNA, 20 bp, Homo sapiens
  source 1..20: mol_type = genomic DNA; note = Gene: FCGR2C; note = Location (start to end; relative to TSS): FCGR2C_80_110; note = Orientation (relative to transcription): antisense; note = sgRNA Position: 161581424; note = Sequence Name: 56322-704_101_SL_seq_9341
catcactccctggagcgagc

SEQ ID NO: 9342 - DNA, 20 bp, Homo sapiens
  source 1..20: mol_type = genomic DNA; note = Gene: FCGR2C; note = Location (start to end; relative to TSS): FCGR2C_36_66; note = Orientation (relative to transcription): antisense; note = sgRNA Position: 161581380; note = Sequence Name: 56322-704_101_SL_seq_9342
agccttctctcaaagcttgg

SEQ ID NO: 9343 - DNA, 20 bp, Homo sapiens
  source 1..20: mol_type = genomic DNA; note = Gene: FCGR2C; note = Location (start to end; relative to TSS): FCGR2C_73_103; note = Orientation (relative to transcription): sense; note = sgRNA Position: 161581437; note = Sequence Name: 56322-704_101_SL_seq_9343
agctcgctccagggagtgat

SEQ ID NO: 9344 - DNA, 20 bp, Homo sapiens
  source 1..20: mol_type = genomic DNA; note = Gene: FCGR2C; note = Location (start to end; relative to TSS): FCGR2C_39_69; note = Orientation (relative to transcription): antisense; note = sgRNA Position: 161581383; note = Sequence Name: 56322-704_101_SL_seq_9344
cacagccttctctcaaagct

SEQ ID NO: 9345 - DNA, 20 bp, Homo sapiens
  source 1..20: mol_type = genomic DNA; note = Gene: FCGR2C; note = Location (start to end; relative to TSS): FCGR2C_72_102; note = Orientation (relative to transcription): sense; note = sgRNA Position: 161581436; note = Sequence Name: 56322-704_101_SL_seq_9345
cagctcgctccagggagtga

SEQ ID NO: 9346 - DNA, 20 bp, Homo sapiens
  source 1..20: mol_type = genomic DNA; note = Gene: FCGR2C; note = Location (start to end; relative to TSS): FCGR2C_20_50; note = Orientation (relative to transcription): antisense; note = sgRNA Position: 161581364; note = Sequence Name: 56322-704_101_SL_seq_9346
ttggcggattctaccctaga

SEQ ID NO: 9347 - DNA, 20 bp, Homo sapiens
  source 1..20: mol_type = genomic DNA; note = Gene: FCGR2C; note = Location (start to end; relative to TSS): FCGR2C_64_94; note = Orientation (relative to transcription): sense; note = sgRNA Position: 161581428; note = Sequence Name: 56322-704_101_SL_seq_9347
ctgggcgccagctcgctcca

SEQ ID NO: 9348 - DNA, 20 bp, Homo sapiens
  source 1..20: mol_type = genomic DNA; note = Gene: FCGR2C; note = Location (start to end; relative to TSS): FCGR2C_25_55; note = Orientation (relative to transcription): sense; note = sgRNA Position: 161581389; note = Sequence Name: 56322-704_101_SL_seq_9348
atccgccaagctttgagaga

SEQ ID NO: 9349 - DNA, 20 bp, Homo sapiens
  source 1..20: mol_type = genomic DNA; note = Gene: FCGR2C; note = Location (start to end; relative to TSS): FCGR2C_63_93; note = Orientation (relative to transcription): sense; note = sgRNA Position: 161581427; note = Sequence Name: 56322-704_101_SL_seq_9349
tctgggcgccagctcgctcc

SEQ ID NO: 9350 - DNA, 20 bp, Homo sapiens
  source 1..20: mol_type = genomic DNA; note = Gene: FCGR3A; note = Location (start to end; relative to TSS): FCGR3A_47_77; note = Orientation (relative to transcription): sense; note = sgRNA Position: 161549747; note = Sequence Name: 56322-704_101_SL_seq_9350
gtgacttgtccactccagtg

SEQ ID NO: 9351 - DNA, 20 bp, Homo sapiens
  source 1..20: mol_type = genomic DNA; note = Gene: FCGR3A; note = Location (start to end; relative to TSS): FCGR3A_102_132; note = Orientation (relative to transcription): sense; note = sgRNA Position: 161549692; note = Sequence Name: 56322-704_101_SL_seq_9351
tgctacttctaggtaagtca

SEQ ID NO: 9352 - DNA, 20 bp, Homo sapiens
  source 1..20: mol_type = genomic DNA; note = Gene: FCGR3A; note = Location (start to end; relative to TSS): FCGR3A_43_73; note = Orientation (relative to transcription): antisense; note = sgRNA Position: 161549771; note = Sequence Name: 56322-704_101_SL_seq_9352
gacaagtcaccaaagatatc

SEQ ID NO: 9353 - DNA, 20 bp, Homo sapiens
  source 1..20: mol_type = genomic DNA; note = Gene: FCGR3A; note = Location (start to end; relative to TSS): FCGR3A_92_122; note = Orientation (relative to transcription): sense; note = sgRNA Position: 161549702; note = Sequence Name: 56322-704_101_SL_seq_9353
ccaactgctctgctacttct

SEQ ID NO: 9354 - DNA, 20 bp, Homo sapiens
  source 1..20: mol_type = genomic DNA; note = Gene: FCGR3A; note = Location (start to end; relative to TSS): FCGR3A_32_62; note = Orientation (relative to transcription): antisense; note = sgRNA Position: 161549782; note = Sequence Name: 56322-704_101_SL_seq_9354
aaagatatccggagccctaa

SEQ ID NO: 9355 - DNA, 20 bp, Homo sapiens
  source 1..20: mol_type = genomic DNA; note = Gene: FCGR3A; note = Location (start to end; relative to TSS): FCGR3A_70_100; note = Orientation (relative to transcription): antisense; note = sgRNA Position: 161549744; note = Sequence Name: 56322-704_101_SL_seq_9355
gctgccacatgatgccacac

SEQ ID NO: 9356 - DNA, 20 bp, Homo sapiens
  source 1..20: mol_type = genomic DNA; note = Gene: FCGR3A; note = Location (start to end; relative to TSS): FCGR3A_31_61; note = Orientation (relative to transcription): antisense; note = sgRNA Position: 161549783; note = Sequence Name: 56322-704_101_SL_seq_9356
aagatatccggagccctaaa

SEQ ID NO: 9357 - DNA, 20 bp, Homo sapiens
  source 1..20: mol_type = genomic DNA; note = Gene: FCGR3A; note = Location (start to end; relative to TSS): FCGR3A_65_95; note = Orientation (relative to transcription): antisense; note = sgRNA Position: 161549749; note = Sequence Name: 56322-704_101_SL_seq_9357
cacatgatgccacactggag

SEQ ID NO: 9358 - DNA, 20 bp, Homo sapiens
  source 1..20: mol_type = genomic DNA; note = Gene: FCGR3A; note = Location (start to end; relative to TSS): FCGR3A_25_55; note = Orientation (relative to transcription): sense; note = sgRNA Position: 161549769; note = Sequence Name: 56322-704_101_SL_seq_9358
tttagggctccggatatctt

SEQ ID NO: 9359 - DNA, 20 bp, Homo sapiens
  source 1..20: mol_type = genomic DNA; note = Gene: FCGR3A; note = Location (start to end; relative to TSS): FCGR3A_57_87; note = Orientation (relative to transcription): sense; note = sgRNA Position: 161549737; note = Sequence Name: 56322-704_101_SL_seq_9359
cactccagtgtggcatcatg

SEQ ID NO: 9360 - DNA, 20 bp, Homo sapiens
  source 1..20: mol_type = genomic DNA; note = Gene: FCGR3B; note = Location (start to end; relative to TSS): FCGR3B_43_73; note = Orientation (relative to transcription): antisense; note = sgRNA Position: 161631129; note = Sequence Name: 56322-704_101_SL_seq_9360
gacaagtcaccaaagatatc

SEQ ID NO: 9361 - DNA, 20 bp, Homo sapiens
  source 1..20: mol_type = genomic DNA; note = Gene: FCGR3B; note = Location (start to end; relative to TSS): FCGR3B_111_141; note = Orientation (relative to transcription): sense; note = sgRNA Position: 161631041; note = Sequence Name: 56322-704_101_SL_seq_9361
taggtaagtcaggatctccc

SEQ ID NO: 9362 - DNA, 20 bp, Homo sapiens
  source 1..20: mol_type = genomic DNA; note = Gene: FCGR3B; note = Location (start to end; relative to TSS): FCGR3B_47_77; note = Orientation (relative to transcription): sense; note = sgRNA Position: 161631105; note = Sequence Name: 56322-704_101_SL_seq_9362
gtgacttgtccactccagtg

SEQ ID NO: 9363 - DNA, 20 bp, Homo sapiens
  source 1..20: mol_type = genomic DNA; note = Gene: FCGR3B; note = Location (start to end; relative to TSS): FCGR3B_92_122; note = Orientation (relative to transcription): sense; note = sgRNA Position: 161631060; note = Sequence Name: 56322-704_101_SL_seq_9363
ccaactgctctgctacttct

SEQ ID NO: 9364 - DNA, 20 bp, Homo sapiens
  source 1..20: mol_type = genomic DNA; note = Gene: FCGR3B; note = Location (start to end; relative to TSS): FCGR3B_32_62; note = Orientation (relative to transcription): antisense; note = sgRNA Position: 161631140; note = Sequence Name: 56322-704_101_SL_seq_9364
aaagatatccggagccctaa

SEQ ID NO: 9365 - DNA, 20 bp, Homo sapiens
  source 1..20: mol_type = genomic DNA; note = Gene: FCGR3B; note = Location (start to end; relative to TSS): FCGR3B_70_100; note = Orientation (relative to transcription): antisense; note = sgRNA Position: 161631102; note = Sequence Name: 56322-704_101_SL_seq_9365
gctgccacatgatgccacac

SEQ ID NO: 9366 - DNA, 20 bp, Homo sapiens
  source 1..20: mol_type = genomic DNA; note = Gene: FCGR3B; note = Location (start to end; relative to TSS): FCGR3B_31_61; note = Orientation (relative to transcription): antisense; note = sgRNA Position: 161631141; note = Sequence Name: 56322-704_101_SL_seq_9366
aagatatccggagccctaaa

SEQ ID NO: 9367 - DNA, 20 bp, Homo sapiens
  source 1..20: mol_type = genomic DNA; note = Gene: FCGR3B; note = Location (start to end; relative to TSS): FCGR3B_65_95; note = Orientation (relative to transcription): antisense; note = sgRNA Position: 161631107; note = Sequence Name: 56322-704_101_SL_seq_9367
cacatgatgccacactggag

SEQ ID NO: 9368 - DNA, 20 bp, Homo sapiens
  source 1..20: mol_type = genomic DNA; note = Gene: FCGR3B; note = Location (start to end; relative to TSS): FCGR3B_25_55; note = Orientation (relative to transcription): sense; note = sgRNA Position: 161631127; note = Sequence Name: 56322-704_101_SL_seq_9368
tttagggctccggatatctt

SEQ ID NO: 9369 - DNA, 20 bp, Homo sapiens
  source 1..20: mol_type = genomic DNA; note = Gene: FCGR3B; note = Location (start to end; relative to TSS): FCGR3B_57_87; note = Orientation (relative to transcription): sense; note = sgRNA Position: 161631095; note = Sequence Name: 56322-704_101_SL_seq_9369
cactccagtgtggcatcatg

SEQ ID NO: 9370 - DNA, 20 bp, Homo sapiens
  source 1..20: mol_type = genomic DNA; note = Gene: FCGRT; note = Location (start to end; relative to TSS): FCGRT_35_65; note = Orientation (relative to transcription): sense; note = sgRNA Position: 49512722; note = Sequence Name: 56322-704_101_SL_seq_9370
agccggccagggccgcaggc

SEQ ID NO: 9371 - DNA, 20 bp, Homo sapiens
  source 1..20: mol_type = genomic DNA; note = Gene: FCGRT; note = Location (start to end; relative to TSS): FCGRT_72_102; note = Orientation (relative to transcription): sense; note = sgRNA Position: 49512759; note = Sequence Name: 56322-704_101_SL_seq_9371
gaagggaacgtgagccgacc

SEQ ID NO: 9372 - DNA, 20 bp, Homo sapiens
  source 1..20: mol_type = genomic DNA; note = Gene: FCGRT; note = Location (start to end; relative to TSS): FCGRT_26_56; note = Orientation (relative to transcription): antisense; note = sgRNA Position: 49512693; note = Sequence Name: 56322-704_101_SL_seq_9372
cggctcctggctcccgtgac

SEQ ID NO: 9373 - DNA, 20 bp, Homo sapiens
  source 1..20: mol_type = genomic DNA; note = Gene: FCGRT; note = Location (start to end; relative to TSS): FCGRT_56_86; note = Orientation (relative to transcription): antisense; note = sgRNA Position: 49512723; note = Sequence Name: 56322-704_101_SL_seq_9373
cctcgctcccttcctgcctg

SEQ ID NO: 9374 - DNA, 20 bp, Homo sapiens
  source 1..20: mol_type = genomic DNA; note = Gene: FCGRT; note = Location (start to end; relative to TSS): FCGRT_23_53; note = Orientation (relative to transcription): sense; note = sgRNA Position: 49512710; note = Sequence Name: 56322-704_101_SL_seq_9374
acgggagccaggagccggcc

SEQ ID NO: 9375 - DNA, 20 bp, Homo sapiens
  source 1..20: mol_type = genomic DNA; note = Gene: FCGRT; note = Location (start to end; relative to TSS): FCGRT_55_85; note = Orientation (relative to transcription): sense; note = sgRNA Position: 49512742; note = Sequence Name: 56322-704_101_SL_seq_9375
aggaagggagcgaggctgaa

SEQ ID NO: 9376 - DNA, 20 bp, Homo sapiens
  source 1..20: mol_type = genomic DNA; note = Gene: FCGRT; note = Location (start to end; relative to TSS): FCGRT_24_54; note = Orientation (relative to transcription): sense; note = sgRNA Position: 49512711; note = Sequence Name: 56322-704_101_SL_seq_9376
cgggagccaggagccggcca

SEQ ID NO: 9377 - DNA, 20 bp, Homo sapiens
  source 1..20: mol_type = genomic DNA; note = Gene: FCGRT; note = Location (start to end; relative to TSS): FCGRT_54_84; note = Orientation (relative to transcription): sense; note = sgRNA Position: 49512741; note = Sequence Name: 56322-704_101_SL_seq_9377
caggaagggagcgaggctga

SEQ ID NO: 9378 - DNA, 20 bp, Homo sapiens
  source 1..20: mol_type = genomic DNA; note = Gene: FCGRT; note = Location (start to end; relative to TSS): FCGRT_18_48; note = Orientation (relative to transcription): sense; note = sgRNA Position: 49512705; note = Sequence Name: 56322-704_101_SL_seq_9378
cagtcacgggagccaggagc

SEQ ID NO: 9379 - DNA, 20 bp, Homo sapiens
  source 1..20: mol_type = genomic DNA; note = Gene: FCGRT; note = Location (start to end; relative to TSS): FCGRT_50_80; note = Orientation (relative to transcription): antisense; note = sgRNA Position: 49512717; note = Sequence Name: 56322-704_101_SL_seq_9379
tcccttcctgcctgcggccc

SEQ ID NO: 9380 - DNA, 20 bp, Homo sapiens
  source 1..20: mol_type = genomic DNA; note = Gene: FCMR; note = Location (start to end; relative to TSS): FCMR_40_70; note = Orientation (relative to transcription): antisense; note = sgRNA Position: 206921897; note = Sequence Name: 56322-704_101_SL_seq_9380
tccaagagcccctagagagg

SEQ ID NO: 9381 - DNA, 20 bp, Homo sapiens
  source 1..20: mol_type = genomic DNA; note = Gene: FCMR; note = Location (start to end; relative to TSS): FCMR_74_104; note = Orientation (relative to transcription): sense; note = sgRNA Position: 206921843; note = Sequence Name: 56322-704_101_SL_seq_9381
ggacaatggacttctggctt

SEQ ID NO: 9382 - DNA, 20 bp, Homo sapiens
  source 1..20: mol_type = genomic DNA; note = Gene: FCMR; note = Location (start to end; relative to TSS): FCMR_34_64; note = Orientation (relative to transcription): sense; note = sgRNA Position: 206921883; note = Sequence Name: 56322-704_101_SL_seq_9382
cctctctaggggctcttgga

SEQ ID NO: 9383 - DNA, 20 bp, Homo sapiens
  source 1..20: mol_type = genomic DNA; note = Gene: FCMR; note = Location (start to end; relative to TSS): FCMR_68_98; note = Orientation (relative to transcription): sense; note = sgRNA Position: 206921849; note = Sequence Name: 56322-704_101_SL_seq_9383
tagaagggacaatggacttc

SEQ ID NO: 9384 - DNA, 20 bp, Homo sapiens
  source 1..20: mol_type = genomic DNA; note = Gene: FCMR; note = Location (start to end; relative to TSS): FCMR_36_66; note = Orientation (relative to transcription): antisense; note = sgRNA Position: 206921901; note = Sequence Name: 56322-704_101_SL_seq_9384
agagcccctagagaggggga

SEQ ID NO: 9385 - DNA, 20 bp, Homo sapiens
  source 1..20: mol_type = genomic DNA; note = Gene: FCMR; note = Location (start to end; relative to TSS): FCMR_67_97; note = Orientation (relative to transcription): antisense; note = sgRNA Position: 206921870; note = Sequence Name: 56322-704_101_SL_seq_9385
attgtcccttctagagtgca

SEQ ID NO: 9386 - DNA, 20 bp, Homo sapiens
  source 1..20: mol_type = genomic DNA; note = Gene: FCMR; note = Location (start to end; relative to TSS): FCMR_21_51; note = Orientation (relative to transcription): sense; note = sgRNA Position: 206921896; note = Sequence Name: 56322-704_101_SL_seq_9386
gtgtctccatccccctctct

SEQ ID NO: 9387 - DNA, 20 bp, Homo sapiens
  source 1..20: mol_type = genomic DNA; note = Gene: FCMR; note = Location (start to end; relative to TSS): FCMR_53_83; note = Orientation (relative to transcription): sense; note = sgRNA Position: 206921864; note = Sequence Name: 56322-704_101_SL_seq_9387
atggaccttgcactctagaa

SEQ ID NO: 9388 - DNA, 20 bp, Homo sapiens
  source 1..20: mol_type = genomic DNA; note = Gene: FCMR; note = Location (start to end; relative to TSS): FCMR_22_52; note = Orientation (relative to transcription): sense; note = sgRNA Position: 206921895; note = Sequence Name: 56322-704_101_SL_seq_9388
tgtctccatccccctctcta

SEQ ID NO: 9389 - DNA, 20 bp, Homo sapiens
  source 1..20: mol_type = genomic DNA; note = Gene: FCMR; note = Location (start to end; relative to TSS): FCMR_52_82; note = Orientation (relative to transcription): sense; note = sgRNA Position: 206921865; note = Sequence Name: 56322-704_101_SL_seq_9389
gatggaccttgcactctaga

SEQ ID NO: 9390 - DNA, 20 bp, Homo sapiens
  source 1..20: mol_type = genomic DNA; note = Gene: FCRL1; note = Location (start to end; relative to TSS): FCRL1_64_94; note = Orientation (relative to transcription): antisense; note = sgRNA Position: 157820052; note = Sequence Name: 56322-704_101_SL_seq_9390
catgaggaccaggtcaggga

SEQ ID NO: 9391 - DNA, 20 bp, Homo sapiens
  source 1..20: mol_type = genomic DNA; note = Gene: FCRL1; note = Location (start to end; relative to TSS): FCRL1_131_161; note = Orientation (relative to transcription): sense; note = sgRNA Position: 157819965; note = Sequence Name: 56322-704_101_SL_seq_9391
catgggatgcaatcatgctt

SEQ ID NO: 9392 - DNA, 20 bp, Homo sapiens
  source 1..20: mol_type = genomic DNA; note = Gene: FCRL1; note = Location (start to end; relative to TSS): FCRL1_68_98; note = Orientation (relative to transcription): antisense; note = sgRNA Position: 157820048; note = Sequence Name: 56322-704_101_SL_seq_9392
gcagcatgaggaccaggtca

SEQ ID NO: 9393 - DNA, 20 bp, Homo sapiens
  source 1..20: mol_type = genomic DNA; note = Gene: FCRL1; note = Location (start to end; relative to TSS): FCRL1_130_160; note = Orientation (relative to transcription): sense; note = sgRNA Position: 157819966; note = Sequence Name: 56322-704_101_SL_seq_9393
gcatgggatgcaatcatgct

SEQ ID NO: 9394 - DNA, 20 bp, Homo sapiens
  source 1..20: mol_type = genomic DNA; note = Gene: FCRL1; note = Location (start to end; relative to TSS): FCRL1_20_50; note = Orientation (relative to transcription): sense; note = sgRNA Position: 157820076; note = Sequence Name: 56322-704_101_SL_seq_9394
tgcattctttttttgatgag

SEQ ID NO: 9395 - DNA, 20 bp, Homo sapiens
  source 1..20: mol_type = genomic DNA; note = Gene: FCRL1; note = Location (start to end; relative to TSS): FCRL1_68_98; note = Orientation (relative to transcription): antisense; note = sgRNA Position: 157820048; note = Sequence Name: 56322-704_101_SL_seq_9395
gcagcatgaggaccaggtca

SEQ ID NO: 9396 - DNA, 20 bp, Homo sapiens
  source 1..20: mol_type = genomic DNA; note = Gene: FCRL1; note = Location (start to end; relative to TSS): FCRL1_30_60; note = Orientation (relative to transcription): sense; note = sgRNA Position: 157820066; note = Sequence Name: 56322-704_101_SL_seq_9396
ttttgatgagaggcatctct

SEQ ID NO: 9397 - DNA, 20 bp, Homo sapiens
  source 1..20: mol_type = genomic DNA; note = Gene: FCRL1; note = Location (start to end; relative to TSS): FCRL1_64_94; note = Orientation (relative to transcription): antisense; note = sgRNA Position: 157820052; note = Sequence Name: 56322-704_101_SL_seq_9397
catgaggaccaggtcaggga

SEQ ID NO: 9398 - DNA, 20 bp, Homo sapiens
  source 1..20: mol_type = genomic DNA; note = Gene: FCRL1; note = Location (start to end; relative to TSS): FCRL1_-3_27; note = Orientation (relative to transcription): sense; note = sgRNA Position: 157820099; note = Sequence Name: 56322-704_101_SL_seq_9398
gctgctgctgctcgactctg

SEQ ID NO: 9399 - DNA, 20 bp, Homo sapiens
  source 1..20: mol_type = genomic DNA; note = Gene: FCRL1; note = Location (start to end; relative to TSS): FCRL1_47_77; note = Orientation (relative to transcription): sense; note = sgRNA Position: 157820049; note = Sequence Name: 56322-704_101_SL_seq_9399
tctaggtaccatccctgacc

SEQ ID NO: 9400 - DNA, 20 bp, Homo sapiens
  source 1..20: mol_type = genomic DNA; note = Gene: FCRL2; note = Location (start to end; relative to TSS): FCRL2_40_70; note = Orientation (relative to transcription): sense; note = sgRNA Position: 157777068; note = Sequence Name: 56322-704_101_SL_seq_9400
attaggtcctcatgctgctg

SEQ ID NO: 9401 - DNA, 20 bp, Homo sapiens
  source 1..20: mol_type = genomic DNA; note = Gene: FCRL2; note = Location (start to end; relative to TSS): FCRL2_106_136; note = Orientation (relative to transcription): sense; note = sgRNA Position: 157777002; note = Sequence Name: 56322-704_101_SL_seq_9401
agtgaggtggcagctgaatg

SEQ ID NO: 9402 - DNA, 20 bp, Homo sapiens
  source 1..20: mol_type = genomic DNA; note = Gene: FCRL2; note = Location (start to end; relative to TSS): FCRL2_56_86; note = Orientation (relative to transcription): antisense; note = sgRNA Position: 157777072; note = Sequence Name: 56322-704_101_SL_seq_9402
gcaatgaccacagcagcatg

SEQ ID NO: 9403 - DNA, 20 bp, Homo sapiens
  source 1..20: mol_type = genomic DNA; note = Gene: FCRL2; note = Location (start to end; relative to TSS): FCRL2_93_123; note = Orientation (relative to transcription): sense; note = sgRNA Position: 157777015; note = Sequence Name: 56322-704_101_SL_seq_9403
aatttgactgagaagtgagg

SEQ ID NO: 9404 - DNA, 20 bp, Homo sapiens
  source 1..20: mol_type = genomic DNA; note = Gene: FCRL2; note = Location (start to end; relative to TSS): FCRL2_23_53; note = Orientation (relative to transcription): sense; note = sgRNA Position: 157777085; note = Sequence Name: 56322-704_101_SL_seq_9404
tcttttcaaatagctggatt

SEQ ID NO: 9405 - DNA, 20 bp, Homo sapiens
  source 1..20: mol_type = genomic DNA; note = Gene: FCRL2; note = Location (start to end; relative to TSS): FCRL2_90_120; note = Orientation (relative to transcription): sense; note = sgRNA Position: 157777018; note = Sequence Name: 56322-704_101_SL_seq_9405
aataatttgactgagaagtg

SEQ ID NO: 9406 - DNA, 20 bp, Homo sapiens
  source 1..20: mol_type = genomic DNA; note = Gene: FCRL2; note = Location (start to end; relative to TSS): FCRL2_19_49; note = Orientation (relative to transcription): antisense; note = sgRNA Position: 157777109; note = Sequence Name: 56322-704_101_SL_seq_9406
tttgaaaagagatgtactct

SEQ ID NO: 9407 - DNA, 20 bp, Homo sapiens
  source 1..20: mol_type = genomic DNA; note = Gene: FCRL2; note = Location (start to end; relative to TSS): FCRL2_60_90; note = Orientation (relative to transcription): sense; note = sgRNA Position: 157777048; note = Sequence Name: 56322-704_101_SL_seq_9407
tggtcattgctggtcatctt

SEQ ID NO: 9408 - DNA, 20 bp, Homo sapiens
  source 1..20: mol_type = genomic DNA; note = Gene: FCRL2; note = Location (start to end; relative to TSS): FCRL2_17_47; note = Orientation (relative to transcription): sense; note = sgRNA Position: 157777091; note = Sequence Name: 56322-704_101_SL_seq_9408
tacatctcttttcaaatagc

SEQ ID NO: 9409 - DNA, 20 bp, Homo sapiens
  source 1..20: mol_type = genomic DNA; note = Gene: FCRL2; note = Location (start to end; relative to TSS): FCRL2_56_86; note = Orientation (relative to transcription): antisense; note = sgRNA Position: 157777072; note = Sequence Name: 56322-704_101_SL_seq_9409
gcaatgaccacagcagcatg

SEQ ID NO: 9410 - DNA, 20 bp, Homo sapiens
  source 1..20: mol_type = genomic DNA; note = Gene: FCRL3; note = Location (start to end; relative to TSS): FCRL3_49_79; note = Orientation (relative to transcription): sense; note = sgRNA Position: 157700696; note = Sequence Name: 56322-704_101_SL_seq_9410
ttctaaaaatgtatcactac

SEQ ID NO: 9411 - DNA, 20 bp, Homo sapiens
  source 1..20: mol_type = genomic DNA; note = Gene: FCRL3; note = Location (start to end; relative to TSS): FCRL3_166_196; note = Orientation (relative to transcription): antisense; note = sgRNA Position: 157700599; note = Sequence Name: 56322-704_101_SL_seq_9411
agacctgcaagaatcagaaa

SEQ ID NO: 9412 - DNA, 20 bp, Homo sapiens
  source 1..20: mol_type = genomic DNA; note = Gene: FCRL3; note = Location (start to end; relative to TSS): FCRL3_50_80; note = Orientation (relative to transcription): sense; note = sgRNA Position: 157700695; note = Sequence Name: 56322-704_101_SL_seq_9412
tctaaaaatgtatcactacc

SEQ ID NO: 9413 - DNA, 20 bp, Homo sapiens
  source 1..20: mol_type = genomic DNA; note = Gene: FCRL3; note = Location (start to end; relative to TSS): FCRL3_165_195; note = Orientation (relative to transcription): antisense; note = sgRNA Position: 157700600; note = Sequence Name: 56322-704_101_SL_seq_9413
gacctgcaagaatcagaaaa

SEQ ID NO: 9414 - DNA, 20 bp, Homo sapiens
  source 1..20: mol_type = genomic DNA; note = Gene: FCRL3; note = Location (start to end; relative to TSS): FCRL3_51_81; note = Orientation (relative to transcription): antisense; note = sgRNA Position: 157700714; note = Sequence Name: 56322-704_101_SL_seq_9414
tgatacatttttagaagttg

SEQ ID NO: 9415 - DNA, 20 bp, Homo sapiens
  source 1..20: mol_type = genomic DNA; note = Gene: FCRL3; note = Location (start to end; relative to TSS): FCRL3_133_163; note = Orientation (relative to transcription): antisense; note = sgRNA Position: 157700632; note = Sequence Name: 56322-704_101_SL_seq_9415
ttagtgtcatattttgcttt

SEQ ID NO: 9416 - DNA, 20 bp, Homo sapiens
  source 1..20: mol_type = genomic DNA; note = Gene: FCRL3; note = Location (start to end; relative to TSS): FCRL3_52_82; note = Orientation (relative to transcription): antisense; note = sgRNA Position: 157700713; note = Sequence Name: 56322-704_101_SL_seq_9416
gtgatacatttttagaagtt

SEQ ID NO: 9417 - DNA, 20 bp, Homo sapiens
  source 1..20: mol_type = genomic DNA; note = Gene: FCRL3; note = Location (start to end; relative to TSS): FCRL3_113_143; note = Orientation (relative to transcription): antisense; note = sgRNA Position: 157700652; note = Sequence Name: 56322-704_101_SL_seq_9417
gggctctgaaaatgtgaatg

SEQ ID NO: 9418 - DNA, 20 bp, Homo sapiens
  source 1..20: mol_type = genomic DNA; note = Gene: FCRL3; note = Location (start to end; relative to TSS): FCRL3_21_51; note = Orientation (relative to transcription): antisense; note = sgRNA Position: 157700744; note = Sequence Name: 56322-704_101_SL_seq_9418
tccatcagctgcagtctctc

SEQ ID NO: 9419 - DNA, 20 bp, Homo sapiens
  source 1..20: mol_type = genomic DNA; note = Gene: FCRL3; note = Location (start to end; relative to TSS): FCRL3_51_81; note = Orientation (relative to transcription): antisense; note = sgRNA Position: 157700714; note = Sequence Name: 56322-704_101_SL_seq_9419
tgatacatttttagaagttg

SEQ ID NO: 9420 - DNA, 20 bp, Homo sapiens
  source 1..20: mol_type = genomic DNA; note = Gene: FCRL4; note = Location (start to end; relative to TSS): FCRL4_48_78; note = Orientation (relative to transcription): sense; note = sgRNA Position: 157598013; note = Sequence Name: 56322-704_101_SL_seq_9420
ggtgtaggcaagtgctgctt

SEQ ID NO: 9421 - DNA, 20 bp, Homo sapiens
  source 1..20: mol_type = genomic DNA; note = Gene: FCRL4; note = Location (start to end; relative to TSS): FCRL4_105_135; note = Orientation (relative to transcription): antisense; note = sgRNA Position: 157597976; note = Sequence Name: 56322-704_101_SL_seq_9421
ggattggagaaggagttctg

SEQ ID NO: 9422 - DNA, 20 bp, Homo sapiens
  source 1..20: mol_type = genomic DNA; note = Gene: FCRL4; note = Location (start to end; relative to TSS): FCRL4_57_87; note = Orientation (relative to transcription): sense; note = sgRNA Position: 157598004; note = Sequence Name: 56322-704_101_SL_seq_9422
aagtgctgctttggcaatct

SEQ ID NO: 9423 - DNA, 20 bp, Homo sapiens
  source 1..20: mol_type = genomic DNA; note = Gene: FCRL4; note = Location (start to end; relative to TSS): FCRL4_99_129; note = Orientation (relative to transcription): sense; note = sgRNA Position: 157597962; note = Sequence Name: 56322-704_101_SL_seq_9423
cagaactccttctccaatcc

SEQ ID NO: 9424 - DNA, 20 bp, Homo sapiens
  source 1..20: mol_type = genomic DNA; note = Gene: FCRL4; note = Location (start to end; relative to TSS): FCRL4_33_63; note = Orientation (relative to transcription): sense; note = sgRNA Position: 157598028; note = Sequence Name: 56322-704_101_SL_seq_9424
ctcactgctggtgctggtgt

SEQ ID NO: 9425 - DNA, 20 bp, Homo sapiens
  source 1..20: mol_type = genomic DNA; note = Gene: FCRL4; note = Location (start to end; relative to TSS): FCRL4_93_123; note = Orientation (relative to transcription): antisense; note = sgRNA Position: 157597988; note = Sequence Name: 56322-704_101_SL_seq_9425
gagttctgaggagacaagcc

SEQ ID NO: 9426 - DNA, 20 bp, Homo sapiens
  source 1..20: mol_type = genomic DNA; note = Gene: FCRL4; note = Location (start to end; relative to TSS): FCRL4_21_51; note = Orientation (relative to transcription): sense; note = sgRNA Position: 157598040; note = Sequence Name: 56322-704_101_SL_seq_9426
aagcttactgagctcactgc

SEQ ID NO: 9427 - DNA, 20 bp, Homo sapiens
  source 1..20: mol_type = genomic DNA; note = Gene: FCRL4; note = Location (start to end; relative to TSS): FCRL4_66_96; note = Orientation (relative to transcription): sense; note = sgRNA Position: 157597995; note = Sequence Name: 56322-704_101_SL_seq_9427
tttggcaatctgggctgacc

SEQ ID NO: 9428 - DNA, 20 bp, Homo sapiens
  source 1..20: mol_type = genomic DNA; note = Gene: FCRL4; note = Location (start to end; relative to TSS): FCRL4_27_57; note = Orientation (relative to transcription): sense; note = sgRNA Position: 157598034; note = Sequence Name: 56322-704_101_SL_seq_9428
actgagctcactgctggtgc

SEQ ID NO: 9429 - DNA, 20 bp, Homo sapiens
  source 1..20: mol_type = genomic DNA; note = Gene: FCRL4; note = Location (start to end; relative to TSS): FCRL4_57_87; note = Orientation (relative to transcription): sense; note = sgRNA Position: 157598004; note = Sequence Name: 56322-704_101_SL_seq_9429
aagtgctgctttggcaatct

SEQ ID NO: 9430 - DNA, 20 bp, Homo sapiens
  source 1..20: mol_type = genomic DNA; note = Gene: FCRL5; note = Location (start to end; relative to TSS): FCRL5_70_100; note = Orientation (relative to transcription): antisense; note = sgRNA Position: 157552441; note = Sequence Name: 56322-704_101_SL_seq_9430
ttggacttgatcttacagtc

SEQ ID NO: 9431 - DNA, 20 bp, Homo sapiens
  source 1..20: mol_type = genomic DNA; note = Gene: FCRL5; note = Location (start to end; relative to TSS): FCRL5_108_138; note = Orientation (relative to transcription): sense; note = sgRNA Position: 157552383; note = Sequence Name: 56322-704_101_SL_seq_9431
tctcttttgatctcagccct

SEQ ID NO: 9432 - DNA, 20 bp, Homo sapiens
  source 1..20: mol_type = genomic DNA; note = Gene: FCRL5; note = Location (start to end; relative to TSS): FCRL5_48_78; note = Orientation (relative to transcription): antisense; note = sgRNA Position: 157552463; note = Sequence Name: 56322-704_101_SL_seq_9432
gacactgcacaccagctcca

SEQ ID NO: 9433 - DNA, 20 bp, Homo sapiens
  source 1..20: mol_type = genomic DNA; note = Gene: FCRL5; note = Location (start to end; relative to TSS): FCRL5_89_119; note = Orientation (relative to transcription): antisense; note = sgRNA Position: 157552422; note = Sequence Name: 56322-704_101_SL_seq_9433
cctcaattccaaaacaggtt

SEQ ID NO: 9434 - DNA, 20 bp, Homo sapiens
  source 1..20: mol_type = genomic DNA; note = Gene: FCRL5; note = Location (start to end; relative to TSS): FCRL5_22_52; note = Orientation (relative to transcription): sense; note = sgRNA Position: 157552469; note = Sequence Name: 56322-704_101_SL_seq_9434
agcttctcagatgtgctcct

SEQ ID NO: 9435 - DNA, 20 bp, Homo sapiens
  source 1..20: mol_type = genomic DNA; note = Gene: FCRL5; note = Location (start to end; relative to TSS): FCRL5_80_110; note = Orientation (relative to transcription): sense; note = sgRNA Position: 157552411; note = Sequence Name: 56322-704_101_SL_seq_9435
ccaaacctgttttggaattg

SEQ ID NO: 9436 - DNA, 20 bp, Homo sapiens
  source 1..20: mol_type = genomic DNA; note = Gene: FCRL5; note = Location (start to end; relative to TSS): FCRL5_28_58; note = Orientation (relative to transcription): sense; note = sgRNA Position: 157552463; note = Sequence Name: 56322-704_101_SL_seq_9436
tcagatgtgctccttggagc

SEQ ID NO: 9437 - DNA, 20 bp, Homo sapiens
  source 1..20: mol_type = genomic DNA; note = Gene: FCRL5; note = Location (start to end; relative to TSS): FCRL5_70_100; note = Orientation (relative to transcription): antisense; note = sgRNA Position: 157552441; note = Sequence Name: 56322-704_101_SL_seq_9437
ttggacttgatcttacagtc

SEQ ID NO: 9438 - DNA, 20 bp, Homo sapiens
  source 1..20: mol_type = genomic DNA; note = Gene: FCRL5; note = Location (start to end; relative to TSS): FCRL5_-13_17; note = Orientation (relative to transcription): antisense; note = sgRNA Position: 157552524; note = Sequence Name: 56322-704_101_SL_seq_9438
tgcattagtgaattgaaaaa

SEQ ID NO: 9439 - DNA, 20 bp, Homo sapiens
  source 1..20: mol_type = genomic DNA; note = Gene: FCRL5; note = Location (start to end; relative to TSS): FCRL5_22_52; note = Orientation (relative to transcription): sense; note = sgRNA Position: 157552469; note = Sequence Name: 56322-704_101_SL_seq_9439
agcttctcagatgtgctcct

SEQ ID NO: 9440 - DNA, 20 bp, Homo sapiens
  source 1..20: mol_type = genomic DNA; note = Gene: FCRL6; note = Location (start to end; relative to TSS): FCRL6_40_70; note = Orientation (relative to transcription): antisense; note = sgRNA Position: 159802406; note = Sequence Name: 56322-704_101_SL_seq_9440
ggcctgttctggcacagcgg

SEQ ID NO: 9441 - DNA, 20 bp, Homo sapiens
  source 1..20: mol_type = genomic DNA; note = Gene: FCRL6; note = Location (start to end; relative to TSS): FCRL6_106_136; note = Orientation (relative to transcription): sense; note = sgRNA Position: 159802492; note = Sequence Name: 56322-704_101_SL_seq_9441
catcccctcttggagcacta

SEQ ID NO: 9442 - DNA, 20 bp, Homo sapiens
  source 1..20: mol_type = genomic DNA; note = Gene: FCRL6; note = Location (start to end; relative to TSS): FCRL6_39_69; note = Orientation (relative to transcription): antisense; note = sgRNA Position: 159802405; note = Sequence Name: 56322-704_101_SL_seq_9442
gcctgttctggcacagcgga

SEQ ID NO: 9443 - DNA, 20 bp, Homo sapiens
  source 1..20: mol_type = genomic DNA; note = Gene: FCRL6; note = Location (start to end; relative to TSS): FCRL6_96_126; note = Orientation (relative to transcription): sense; note = sgRNA Position: 159802482; note = Sequence Name: 56322-704_101_SL_seq_9443
cgagcatgggcatcccctct

SEQ ID NO: 9444 - DNA, 20 bp, Homo sapiens
  source 1..20: mol_type = genomic DNA; note = Gene: FCRL6; note = Location (start to end; relative to TSS): FCRL6_29_59; note = Orientation (relative to transcription): sense; note = sgRNA Position: 159802415; note = Sequence Name: 56322-704_101_SL_seq_9444
tccctccgctgtgccagaac

SEQ ID NO: 9445 - DNA, 20 bp, Homo sapiens
  source 1..20: mol_type = genomic DNA; note = Gene: FCRL6; note = Location (start to end; relative to TSS): FCRL6_83_113; note = Orientation (relative to transcription): sense; note = sgRNA Position: 159802469; note = Sequence Name: 56322-704_101_SL_seq_9445
tttggtaagtcaacgagcat

SEQ ID NO: 9446 - DNA, 20 bp, Homo sapiens
  source 1..20: mol_type = genomic DNA; note = Gene: FCRL6; note = Location (start to end; relative to TSS): FCRL6_31_61; note = Orientation (relative to transcription): antisense; note = sgRNA Position: 159802397; note = Sequence Name: 56322-704_101_SL_seq_9446
tggcacagcggagggaacac

SEQ ID NO: 9447 - DNA, 20 bp, Homo sapiens
  source 1..20: mol_type = genomic DNA; note = Gene: FCRL6; note = Location (start to end; relative to TSS): FCRL6_82_112; note = Orientation (relative to transcription): sense; note = sgRNA Position: 159802468; note = Sequence Name: 56322-704_101_SL_seq_9447
ctttggtaagtcaacgagca

SEQ ID NO: 9448 - DNA, 20 bp, Homo sapiens
  source 1..20: mol_type = genomic DNA; note = Gene: FCRL6; note = Location (start to end; relative to TSS): FCRL6_20_50; note = Orientation (relative to transcription): antisense; note = sgRNA Position: 159802386; note = Sequence Name: 56322-704_101_SL_seq_9448
agggaacacaggtcagaaac

SEQ ID NO: 9449 - DNA, 20 bp, Homo sapiens
  source 1..20: mol_type = genomic DNA; note = Gene: FCRL6; note = Location (start to end; relative to TSS): FCRL6_65_95; note = Orientation (relative to transcription): sense; note = sgRNA Position: 159802451; note = Sequence Name: 56322-704_101_SL_seq_9449
tggacggctgtgctgctctt

SEQ ID NO: 9450 - DNA, 20 bp, Homo sapiens
  source 1..20: mol_type = genomic DNA; note = Gene: FCRLA; note = Location (start to end; relative to TSS): FCRLA_35_65; note = Orientation (relative to transcription): sense; note = sgRNA Position: 161707290; note = Sequence Name: 56322-704_101_SL_seq_9450
gggctgtgtcctcatggcct

SEQ ID NO: 9451 - DNA, 20 bp, Homo sapiens
  source 1..20: mol_type = genomic DNA; note = Gene: FCRLA; note = Location (start to end; relative to TSS): FCRLA_67_97; note = Orientation (relative to transcription): antisense; note = sgRNA Position: 161707302; note = Sequence Name: 56322-704_101_SL_seq_9451
cacaccaagggaaaggtaga

SEQ ID NO: 9452 - DNA, 20 bp, Homo sapiens
  source 1..20: mol_type = genomic DNA; note = Gene: FCRLA; note = Location (start to end; relative to TSS): FCRLA_34_64; note = Orientation (relative to transcription): antisense; note = sgRNA Position: 161707269; note = Sequence Name: 56322-704_101_SL_seq_9452
gaggacacagcccagcttca

SEQ ID NO: 9453 - DNA, 20 bp, Homo sapiens
  source 1..20: mol_type = genomic DNA; note = Gene: FCRLA; note = Location (start to end; relative to TSS): FCRLA_65_95; note = Orientation (relative to transcription): sense; note = sgRNA Position: 161707320; note = Sequence Name: 56322-704_101_SL_seq_9453
cctttcccttggtgtgctct

SEQ ID NO: 9454 - DNA, 20 bp, Homo sapiens
  source 1..20: mol_type = genomic DNA; note = Gene: FCRLA; note = Location (start to end; relative to TSS): FCRLA_29_59; note = Orientation (relative to transcription): sense; note = sgRNA Position: 161707284; note = Sequence Name: 56322-704_101_SL_seq_9454
gaagctgggctgtgtcctca

SEQ ID NO: 9455 - DNA, 20 bp, Homo sapiens
  source 1..20: mol_type = genomic DNA; note = Gene: FCRLA; note = Location (start to end; relative to TSS): FCRLA_61_91; note = Orientation (relative to transcription): antisense; note = sgRNA Position: 161707296; note = Sequence Name: 56322-704_101_SL_seq_9455
aagggaaaggtagagggccc

SEQ ID NO: 9456 - DNA, 20 bp, Homo sapiens
  source 1..20: mol_type = genomic DNA; note = Gene: FCRLA; note = Location (start to end; relative to TSS): FCRLA_20_50; note = Orientation (relative to transcription): antisense; note = sgRNA Position: 161707255; note = Sequence Name: 56322-704_101_SL_seq_9456
gcttcatggtgactgtgttt

SEQ ID NO: 9457 - DNA, 20 bp, Homo sapiens
  source 1..20: mol_type = genomic DNA; note = Gene: FCRLA; note = Location (start to end; relative to TSS): FCRLA_54_84; note = Orientation (relative to transcription): sense; note = sgRNA Position: 161707309; note = Sequence Name: 56322-704_101_SL_seq_9457
tgggccctctacctttccct

SEQ ID NO: 9458 - DNA, 20 bp, Homo sapiens
  source 1..20: mol_type = genomic DNA; note = Gene: FCRLA; note = Location (start to end; relative to TSS): FCRLA_15_45; note = Orientation (relative to transcription): sense; note = sgRNA Position: 161707270; note = Sequence Name: 56322-704_101_SL_seq_9458
aacacagtcaccatgaagct

SEQ ID NO: 9459 - DNA, 20 bp, Homo sapiens
  source 1..20: mol_type = genomic DNA; note = Gene: FCRLA; note = Location (start to end; relative to TSS): FCRLA_53_83; note = Orientation (relative to transcription): antisense; note = sgRNA Position: 161707288; note = Sequence Name: 56322-704_101_SL_seq_9459
ggtagagggcccaggccatg

SEQ ID NO: 9460 - DNA, 20 bp, Homo sapiens
  source 1..20: mol_type = genomic DNA; note = Gene: FCRLB; note = Location (start to end; relative to TSS): FCRLB_54_84; note = Orientation (relative to transcription): sense; note = sgRNA Position: 161721624; note = Sequence Name: 56322-704_101_SL_seq_9460
tccttcccatcagatttcca

SEQ ID NO: 9461 - DNA, 20 bp, Homo sapiens
  source 1..20: mol_type = genomic DNA; note = Gene: FCRLB; note = Location (start to end; relative to TSS): FCRLB_92_122; note = Orientation (relative to transcription): sense; note = sgRNA Position: 161721662; note = Sequence Name: 56322-704_101_SL_seq_9461
gttctaaacaaccacaggta

SEQ ID NO: 9462 - DNA, 20 bp, Homo sapiens
  source 1..20: mol_type = genomic DNA; note = Gene: FCRLB; note = Location (start to end; relative to TSS): FCRLB_55_85; note = Orientation (relative to transcription): sense; note = sgRNA Position: 161721625; note = Sequence Name: 56322-704_101_SL_seq_9462
ccttcccatcagatttccaa

SEQ ID NO: 9463 - DNA, 20 bp, Homo sapiens
  source 1..20: mol_type = genomic DNA; note = Gene: FCRLB; note = Location (start to end; relative to TSS): FCRLB_87_117; note = Orientation (relative to transcription): sense; note = sgRNA Position: 161721657; note = Sequence Name: 56322-704_101_SL_seq_9463
ccccggttctaaacaaccac

SEQ ID NO: 9464 - DNA, 20 bp, Homo sapiens
  source 1..20: mol_type = genomic DNA; note = Gene: FCRLB; note = Location (start to end; relative to TSS): FCRLB_49_79; note = Orientation (relative to transcription): antisense; note = sgRNA Position: 161721599; note = Sequence Name: 56322-704_101_SL_seq_9464
tgggaaggagatcaattatc

SEQ ID NO: 9465 - DNA, 20 bp, Homo sapiens
  source 1..20: mol_type = genomic DNA; note = Gene: FCRLB; note = Location (start to end; relative to TSS): FCRLB_80_110; note = Orientation (relative to transcription): antisense; note = sgRNA Position: 161721630; note = Sequence Name: 56322-704_101_SL_seq_9465
accggggcaccttgatccct

SEQ ID NO: 9466 - DNA, 20 bp, Homo sapiens
  source 1..20: mol_type = genomic DNA; note = Gene: FCRLB; note = Location (start to end; relative to TSS): FCRLB_32_62; note = Orientation (relative to transcription): antisense; note = sgRNA Position: 161721582; note = Sequence Name: 56322-704_101_SL_seq_9466
atcaggtactgtcaactccc

SEQ ID NO: 9467 - DNA, 20 bp, Homo sapiens
  source 1..20: mol_type = genomic DNA; note = Gene: FCRLB; note = Location (start to end; relative to TSS): FCRLB_62_92; note = Orientation (relative to transcription): sense; note = sgRNA Position: 161721632; note = Sequence Name: 56322-704_101_SL_seq_9467
atcagatttccaagggatca

SEQ ID NO: 9468 - DNA, 20 bp, Homo sapiens
  source 1..20: mol_type = genomic DNA; note = Gene: FCRLB; note = Location (start to end; relative to TSS): FCRLB_6_36; note = Orientation (relative to transcription): sense; note = sgRNA Position: 161721576; note = Sequence Name: 56322-704_101_SL_seq_9468
ggggaagatactatcttcct

SEQ ID NO: 9469 - DNA, 20 bp, Homo sapiens
  source 1..20: mol_type = genomic DNA; note = Gene: FCRLB; note = Location (start to end; relative to TSS): FCRLB_49_79; note = Orientation (relative to transcription): antisense; note = sgRNA Position: 161721599; note = Sequence Name: 56322-704_101_SL_seq_9469
tgggaaggagatcaattatc

SEQ ID NO: 9470 - DNA, 20 bp, Homo sapiens
  source 1..20: mol_type = genomic DNA; note = Gene: FGFR1; note = Location (start to end; relative to TSS): FGFR1_36_66; note = Orientation (relative to transcription): sense; note = sgRNA Position: 38468575; note = Sequence Name: 56322-704_101_SL_seq_9470
cggcggcgggcggcagctag

SEQ ID NO: 9471 - DNA, 20 bp, Homo sapiens
  source 1..20: mol_type = genomic DNA; note = Gene: FGFR1; note = Location (start to end; relative to TSS): FGFR1_79_109; note = Orientation (relative to transcription): antisense; note = sgRNA Position: 38468552; note = Sequence Name: 56322-704_101_SL_seq_9471
tccgcgcgctgcggctgcac

SEQ ID NO: 9472 - DNA, 20 bp, Homo sapiens
  source 1..20: mol_type = genomic DNA; note = Gene: FGFR1; note = Location (start to end; relative to TSS): FGFR1_23_53; note = Orientation (relative to transcription): sense; note = sgRNA Position: 38468588; note = Sequence Name: 56322-704_101_SL_seq_9472
ggcgcggcgtcctcggcggc

SEQ ID NO: 9473 - DNA, 20 bp, Homo sapiens
  source 1..20: mol_type = genomic DNA; note = Gene: FGFR1; note = Location (start to end; relative to TSS): FGFR1_72_102; note = Orientation (relative to transcription): sense; note = sgRNA Position: 38468539; note = Sequence Name: 56322-704_101_SL_seq_9473
ggtgcagccgcagcgcgcgg

SEQ ID NO: 9474 - DNA, 20 bp, Homo sapiens
  source 1..20: mol_type = genomic DNA; note = Gene: FGFR1; note = Location (start to end; relative to TSS): FGFR1_26_56; note = Orientation (relative to transcription): sense; note = sgRNA Position: 38468585; note = Sequence Name: 56322-704_101_SL_seq_9474
gcggcgtcctcggcggcggg

SEQ ID NO: 9475 - DNA, 20 bp, Homo sapiens
  source 1..20: mol_type = genomic DNA; note = Gene: FGFR1; note = Location (start to end; relative to TSS): FGFR1_71_101; note = Orientation (relative to transcription): antisense; note = sgRNA Position: 38468560; note = Sequence Name: 56322-704_101_SL_seq_9475
ctgcggctgcaccggcgtcc

SEQ ID NO: 9476 - DNA, 20 bp, Homo sapiens
  source 1..20: mol_type = genomic DNA; note = Gene: FGFR1; note = Location (start to end; relative to TSS): FGFR1_27_57; note = Orientation (relative to transcription): antisense; note = sgRNA Position: 38468604; note = Sequence Name: 56322-704_101_SL_seq_9476
cgccgaggacgccgcgcctg

SEQ ID NO: 9477 - DNA, 20 bp, Homo sapiens
  source 1..20: mol_type = genomic DNA; note = Gene: FGFR1; note = Location (start to end; relative to TSS): FGFR1_69_99; note = Orientation (relative to transcription): sense; note = sgRNA Position: 38468542; note = Sequence Name: 56322-704_101_SL_seq_9477
gccggtgcagccgcagcgcg

SEQ ID NO: 9478 - DNA, 20 bp, Homo sapiens
  source 1..20: mol_type = genomic DNA; note = Gene: FGFR1; note = Location (start to end; relative to TSS): FGFR1_19_49; note = Orientation (relative to transcription): sense; note = sgRNA Position: 38468592; note = Sequence Name: 56322-704_101_SL_seq_9478
cacaggcgcggcgtcctcgg

SEQ ID NO: 9479 - DNA, 20 bp, Homo sapiens
  source 1..20: mol_type = genomic DNA; note = Gene: FGFR1; note = Location (start to end; relative to TSS): FGFR1_51_81; note = Orientation (relative to transcription): sense; note = sgRNA Position: 38468560; note = Sequence Name: 56322-704_101_SL_seq_9479
gctagcgggagccgggacgc

SEQ ID NO: 9480 - DNA, 20 bp, Homo sapiens
  source 1..20: mol_type = genomic DNA; note = Gene: FGFR2; note = Location (start to end; relative to TSS): FGFR2_51_81; note = Orientation (relative to transcription): sense; note = sgRNA Position: 121598369; note = Sequence Name: 56322-704_101_SL_seq_9480
gcgcggccgccacaaagctc

SEQ ID NO: 9481 - DNA, 20 bp, Homo sapiens
  source 1..20: mol_type = genomic DNA; note = Gene: FGFR2; note = Location (start to end; relative to TSS): FGFR2_85_115; note = Orientation (relative to transcription): antisense; note = sgRNA Position: 121598355; note = Sequence Name: 56322-704_101_SL_seq_9481
gtacgccgcatgcagccccg

SEQ ID NO: 9482 - DNA, 20 bp, Homo sapiens
  source 1..20: mol_type = genomic DNA; note = Gene: FGFR2; note = Location (start to end; relative to TSS): FGFR2_34_64; note = Orientation (relative to transcription): sense; note = sgRNA Position: 121598386; note = Sequence Name: 56322-704_101_SL_seq_9482
agcgggcgagggagcgcgcg

SEQ ID NO: 9483 - DNA, 20 bp, Homo sapiens
  source 1..20: mol_type = genomic DNA; note = Gene: FGFR2; note = Location (start to end; relative to TSS): FGFR2_66_96; note = Orientation (relative to transcription): antisense; note = sgRNA Position: 121598374; note = Sequence Name: 56322-704_101_SL_seq_9483
gcggcgcccgagctttgtgg

SEQ ID NO: 9484 - DNA, 20 bp, Homo sapiens
  source 1..20: mol_type = genomic DNA; note = Gene: FGFR2; note = Location (start to end; relative to TSS): FGFR2_23_53; note = Orientation (relative to transcription): sense; note = sgRNA Position: 121598397; note = Sequence Name: 56322-704_101_SL_seq_9484
ggcgggtgcggagcgggcga

SEQ ID NO: 9485 - DNA, 20 bp, Homo sapiens
  source 1..20: mol_type = genomic DNA; note = Gene: FGFR2; note = Location (start to end; relative to TSS): FGFR2_61_91; note = Orientation (relative to transcription): sense; note = sgRNA Position: 121598359; note = Sequence Name: 56322-704_101_SL_seq_9485
cacaaagctcgggcgccgcg

SEQ ID NO: 9486 - DNA, 20 bp, Homo sapiens
  source 1..20: mol_type = genomic DNA; note = Gene: FGFR2; note = Location (start to end; relative to TSS): FGFR2_18_48; note = Orientation (relative to transcription): antisense; note = sgRNA Position: 121598422; note = Sequence Name: 56322-704_101_SL_seq_9486
gcacccgccgcccgcccgct

SEQ ID NO: 9487 - DNA, 20 bp, Homo sapiens
  source 1..20: mol_type = genomic DNA; note = Gene: FGFR2; note = Location (start to end; relative to TSS): FGFR2_59_89; note = Orientation (relative to transcription): sense; note = sgRNA Position: 121598361; note = Sequence Name: 56322-704_101_SL_seq_9487
gccacaaagctcgggcgccg

SEQ ID NO: 9488 - DNA, 20 bp, Homo sapiens
  source 1..20: mol_type = genomic DNA; note = Gene: FGFR2; note = Location (start to end; relative to TSS): FGFR2_16_46; note = Orientation (relative to transcription): sense; note = sgRNA Position: 121598404; note = Sequence Name: 56322-704_101_SL_seq_9488
ggcgggcggcgggtgcggag

SEQ ID NO: 9489 - DNA, 20 bp, Homo sapiens
  source 1..20: mol_type = genomic DNA; note = Gene: FGFR2; note = Location (start to end; relative to TSS): FGFR2_51_81; note = Orientation (relative to transcription): sense; note = sgRNA Position: 121598369; note = Sequence Name: 56322-704_101_SL_seq_9489
gcgcggccgccacaaagctc

SEQ ID NO: 9490 - DNA, 20 bp, Homo sapiens
  source 1..20: mol_type = genomic DNA; note = Gene: FGFR3; note = Location (start to end; relative to TSS): FGFR3_43_73; note = Orientation (relative to transcription): sense; note = sgRNA Position: 1793362; note = Sequence Name: 56322-704_101_SL_seq_9490
tgccggtcgcacggacgcac

SEQ ID NO: 9491 - DNA, 20 bp, Homo sapiens
  source 1..20: mol_type = genomic DNA; note = Gene: FGFR3; note = Location (start to end; relative to TSS): FGFR3_86_116; note = Orientation (relative to transcription): antisense; note = sgRNA Position: 1793385; note = Sequence Name: 56322-704_101_SL_seq_9491
cagctcccgccccgtccctc

SEQ ID NO: 9492 - DNA, 20 bp, Homo sapiens
  source 1..20: mol_type = genomic DNA; note = Gene: FGFR3; note = Location (start to end; relative to TSS): FGFR3_46_76; note = Orientation (relative to transcription): sense; note = sgRNA Position: 1793365; note = Sequence Name: 56322-704_101_SL_seq_9492
cggtcgcacggacgcaccgg

SEQ ID NO: 9493 - DNA, 20 bp, Homo sapiens
  source 1..20: mol_type = genomic DNA; note = Gene: FGFR3; note = Location (start to end; relative to TSS): FGFR3_82_112; note = Orientation (relative to transcription): antisense; note = sgRNA Position: 1793381; note = Sequence Name: 56322-704_101_SL_seq_9493
tcccgccccgtccctccggc

SEQ ID NO: 9494 - DNA, 20 bp, Homo sapiens
  source 1..20: mol_type = genomic DNA; note = Gene: FGFR3; note = Location (start to end; relative to TSS): FGFR3_47_77; note = Orientation (relative to transcription): sense; note = sgRNA Position: 1793366; note = Sequence Name: 56322-704_101_SL_seq_9494
ggtcgcacggacgcaccggc

SEQ ID NO: 9495 - DNA, 20 bp, Homo sapiens
  source 1..20: mol_type = genomic DNA; note = Gene: FGFR3; note = Location (start to end; relative to TSS): FGFR3_79_109; note = Orientation (relative to transcription): antisense; note = sgRNA Position: 1793378; note = Sequence Name: 56322-704_101_SL_seq_9495
cgccccgtccctccggccgg

SEQ ID NO: 9496 - DNA, 20 bp, Homo sapiens
  source 1..20: mol_type = genomic DNA; note = Gene: FGFR3; note = Location (start to end; relative to TSS): FGFR3_34_64; note = Orientation (relative to transcription): sense; note = sgRNA Position: 1793353; note = Sequence Name: 56322-704_101_SL_seq_9496
gtcctgctctgccggtcgca

SEQ ID NO: 9497 - DNA, 20 bp, Homo sapiens
  source 1..20: mol_type = genomic DNA; note = Gene: FGFR3; note = Location (start to end; relative to TSS): FGFR3_71_101; note = Orientation (relative to transcription): antisense; note = sgRNA Position: 1793370; note = Sequence Name: 56322-704_101_SL_seq_9497
ccctccggccggcggcccgc

SEQ ID NO: 9498 - DNA, 20 bp, Homo sapiens
  source 1..20: mol_type = genomic DNA; note = Gene: FGFR3; note = Location (start to end; relative to TSS): FGFR3_26_56; note = Orientation (relative to transcription): sense; note = sgRNA Position: 1793345; note = Sequence Name: 56322-704_101_SL_seq_9498
gccgcgcggtcctgctctgc

SEQ ID NO: 9499 - DNA, 20 bp, Homo sapiens
  source 1..20: mol_type = genomic DNA; note = Gene: FGFR3; note = Location (start to end; relative to TSS): FGFR3_61_91; note = Orientation (relative to transcription): sense; note = sgRNA Position: 1793380; note = Sequence Name: 56322-704_101_SL_seq_9499
accggcgggccgccggccgg

SEQ ID NO: 9500 - DNA, 20 bp, Homo sapiens
  source 1..20: mol_type = genomic DNA; note = Gene: FGFR4; note = Location (start to end; relative to TSS): FGFR4_39_69; note = Orientation (relative to transcription): sense; note = sgRNA Position: 177086980; note = Sequence Name: 56322-704_101_SL_seq_9500
ccgcgtgcaggggtcgcggc

SEQ ID NO: 9501 - DNA, 20 bp, Homo sapiens
  source 1..20: mol_type = genomic DNA; note = Gene: FGFR4; note = Location (start to end; relative to TSS): FGFR4_73_103; note = Orientation (relative to transcription): sense; note = sgRNA Position: 177087014; note = Sequence Name: 56322-704_101_SL_seq_9501
agtgaggcggcggaggagcc

SEQ ID NO: 9502 - DNA, 20 bp, Homo sapiens
  source 1..20: mol_type = genomic DNA; note = Gene: FGFR4; note = Location (start to end; relative to TSS): FGFR4_35_65; note = Orientation (relative to transcription): sense; note = sgRNA Position: 177086976; note = Sequence Name: 56322-704_101_SL_seq_9502
cctgccgcgtgcaggggtcg

SEQ ID NO: 9503 - DNA, 20 bp, Homo sapiens
  source 1..20: mol_type = genomic DNA; note = Gene: FGFR4; note = Location (start to end; relative to TSS): FGFR4_66_96; note = Orientation (relative to transcription): sense; note = sgRNA Position: 177087007; note = Sequence Name: 56322-704_101_SL_seq_9503
agctgggagtgaggcggcgg

SEQ ID NO: 9504 - DNA, 20 bp, Homo sapiens
  source 1..20: mol_type = genomic DNA; note = Gene: FGFR4; note = Location (start to end; relative to TSS): FGFR4_28_58; note = Orientation (relative to transcription): sense; note = sgRNA Position: 177086969; note = Sequence Name: 56322-704_101_SL_seq_9504
tgcggaccctgccgcgtgca

SEQ ID NO: 9505 - DNA, 20 bp, Homo sapiens
  source 1..20: mol_type = genomic DNA; note = Gene: FGFR4; note = Location (start to end; relative to TSS): FGFR4_63_93; note = Orientation (relative to transcription): sense; note = sgRNA Position: 177087004; note = Sequence Name: 56322-704_101_SL_seq_9505
tggagctgggagtgaggcgg

SEQ ID NO: 9506 - DNA, 20 bp, Homo sapiens
  source 1..20: mol_type = genomic DNA; note = Gene: FGFR4; note = Location (start to end; relative to TSS): FGFR4_29_59; note = Orientation (relative to transcription): sense; note = sgRNA Position: 177086970; note = Sequence Name: 56322-704_101_SL_seq_9506
gcggaccctgccgcgtgcag

SEQ ID NO: 9507 - DNA, 20 bp, Homo sapiens
  source 1..20: mol_type = genomic DNA; note = Gene: FGFR4; note = Location (start to end; relative to TSS): FGFR4_60_90; note = Orientation (relative to transcription): sense; note = sgRNA Position: 177087001; note = Sequence Name: 56322-704_101_SL_seq_9507
ggctggagctgggagtgagg

SEQ ID NO: 9508 - DNA, 20 bp, Homo sapiens
  source 1..20: mol_type = genomic DNA; note = Gene: FGFR4; note = Location (start to end; relative to TSS): FGFR4_27_57; note = Orientation (relative to transcription): sense; note = sgRNA Position: 177086968; note = Sequence Name: 56322-704_101_SL_seq_9508
ctgcggaccctgccgcgtgc

SEQ ID NO: 9509 - DNA, 20 bp, Homo sapiens
  source 1..20: mol_type = genomic DNA; note = Gene: FGFR4; note = Location (start to end; relative to TSS): FGFR4_57_87; note = Orientation (relative to transcription): sense; note = sgRNA Position: 177086998; note = Sequence Name: 56322-704_101_SL_seq_9509
gccggctggagctgggagtg

SEQ ID NO: 9510 - DNA, 20 bp, Homo sapiens
  source 1..20: mol_type = genomic DNA; note = Gene: FGFRL1; note = Location (start to end; relative to TSS): FGFRL1_42_72; note = Orientation (relative to transcription): sense; note = sgRNA Position: 1011694; note = Sequence Name: 56322-704_101_SL_seq_9510
gcccctcgccccgccgcccc

SEQ ID NO: 9511 - DNA, 20 bp, Homo sapiens
  source 1..20: mol_type = genomic DNA; note = Gene: FGFRL1; note = Location (start to end; relative to TSS): FGFRL1_99_129; note = Orientation (relative to transcription): sense; note = sgRNA Position: 1011751; note = Sequence Name: 56322-704_101_SL_seq_9511
ccccgccgcctgcccggtcc

SEQ ID NO: 9512 - DNA, 20 bp, Homo sapiens
  source 1..20: mol_type = genomic DNA; note = Gene: FGFRL1; note = Location (start to end; relative to TSS): FGFRL1_52_82; note = Orientation (relative to transcription): antisense; note = sgRNA Position: 1011684; note = Sequence Name: 56322-704_101_SL_seq_9512
tcccggggcggcggggcgag

SEQ ID NO: 9513 - DNA, 20 bp, Homo sapiens
  source 1..20: mol_type = genomic DNA; note = Gene: FGFRL1; note = Location (start to end; relative to TSS): FGFRL1_93_123; note = Orientation (relative to transcription): sense; note = sgRNA Position: 1011745; note = Sequence Name: 56322-704_101_SL_seq_9513
actcgcccccgccgcctgcc

SEQ ID NO: 9514 - DNA, 20 bp, Homo sapiens
  source 1..20: mol_type = genomic DNA; note = Gene: FGFRL1; note = Location (start to end; relative to TSS): FGFRL1_30_60; note = Orientation (relative to transcription): antisense; note = sgRNA Position: 1011662; note = Sequence Name: 56322-704_101_SL_seq_9514
gcccggggcgccgcgccgcg

SEQ ID NO: 9515 - DNA, 20 bp, Homo sapiens
  source 1..20: mol_type = genomic DNA; note = Gene: FGFRL1; note = Location (start to end; relative to TSS): FGFRL1_64_94; note = Orientation (relative to transcription): antisense; note = sgRNA Position: 1011696; note = Sequence Name: 56322-704_101_SL_seq_9515
ccggggccgggatcccgggg

SEQ ID NO: 9516 - DNA, 20 bp, Homo sapiens
  source 1..20: mol_type = genomic DNA; note = Gene: FGFRL1; note = Location (start to end; relative to TSS): FGFRL1_15_45; note = Orientation (relative to transcription): antisense; note = sgRNA Position: 1011647; note = Sequence Name: 56322-704_101_SL_seq_9516
ccgcgaggcgtccttccctg

SEQ ID NO: 9517 - DNA, 20 bp, Homo sapiens
  source 1..20: mol_type = genomic DNA; note = Gene: FGFRL1; note = Location (start to end; relative to TSS): FGFRL1_52_82; note = Orientation (relative to transcription): antisense; note = sgRNA Position: 1011684; note = Sequence Name: 56322-704_101_SL_seq_9517
tcccggggcggcggggcgag

SEQ ID NO: 9518 - DNA, 20 bp, Homo sapiens
  source 1..20: mol_type = genomic DNA; note = Gene: FGFRL1; note = Location (start to end; relative to TSS): FGFRL1_13_43; note = Orientation (relative to transcription): antisense; note = sgRNA Position: 1011645; note = Sequence Name: 56322-704_101_SL_seq_9518
gcgaggcgtccttccctgcg

SEQ ID NO: 9519 - DNA, 20 bp, Homo sapiens
  source 1..20: mol_type = genomic DNA; note = Gene: FGFRL1; note = Location (start to end; relative to TSS): FGFRL1_49_79; note = Orientation (relative to transcription): sense; note = sgRNA Position: 1011701; note = Sequence Name: 56322-704_101_SL_seq_9519
gccccgccgccccgggatcc

SEQ ID NO: 9520 - DNA, 20 bp, Homo sapiens
  source 1..20: mol_type = genomic DNA; note = Gene: FLT1; note = Location (start to end; relative to TSS): FLT1_39_69; note = Orientation (relative to transcription): sense; note = sgRNA Position: 28495065; note = Sequence Name: 56322-704_101_SL_seq_9520
cggctcctccccggcagcgg

SEQ ID NO: 9521 - DNA, 20 bp, Homo sapiens
  source 1..20: mol_type = genomic DNA; note = Gene: FLT1; note = Location (start to end; relative to TSS): FLT1_82_112; note = Orientation (relative to transcription): sense; note = sgRNA Position: 28495022; note = Sequence Name: 56322-704_101_SL_seq_9521
ggctcgggtgcagcggccag

SEQ ID NO: 9522 - DNA, 20 bp, Homo sapiens
  source 1..20: mol_type = genomic DNA; note = Gene: FLT1; note = Location (start to end; relative to TSS): FLT1_42_72; note = Orientation (relative to transcription): sense; note = sgRNA Position: 28495062; note = Sequence Name: 56322-704_101_SL_seq_9522
ctcctccccggcagcggcgg

SEQ ID NO: 9523 - DNA, 20 bp, Homo sapiens
  source 1..20: mol_type = genomic DNA; note = Gene: FLT1; note = Location (start to end; relative to TSS): FLT1_75_105; note = Orientation (relative to transcription): sense; note = sgRNA Position: 28495029; note = Sequence Name: 56322-704_101_SL_seq_9523
gctccggggctcgggtgcag

SEQ ID NO: 9524 - DNA, 20 bp, Homo sapiens
  source 1..20: mol_type = genomic DNA; note = Gene: FLT1; note = Location (start to end; relative to TSS): FLT1_36_66; note = Orientation (relative to transcription): sense; note = sgRNA Position: 28495068; note = Sequence Name: 56322-704_101_SL_seq_9524
tctcggctcctccccggcag

SEQ ID NO: 9525 - DNA, 20 bp, Homo sapiens
  source 1..20: mol_type = genomic DNA; note = Gene: FLT1; note = Location (start to end; relative to TSS): FLT1_67_97; note = Orientation (relative to transcription): sense; note = sgRNA Position: 28495037; note = Sequence Name: 56322-704_101_SL_seq_9525
cggagcgggctccggggctc

SEQ ID NO: 9526 - DNA, 20 bp, Homo sapiens
  source 1..20: mol_type = genomic DNA; note = Gene: FLT1; note = Location (start to end; relative to TSS): FLT1_30_60; note = Orientation (relative to transcription): sense; note = sgRNA Position: 28495074; note = Sequence Name: 56322-704_101_SL_seq_9526
cactcctctcggctcctccc

SEQ ID NO: 9527 - DNA, 20 bp, Homo sapiens
  source 1..20: mol_type = genomic DNA; note = Gene: FLT1; note = Location (start to end; relative to TSS): FLT1_61_91; note = Orientation (relative to transcription): sense; note = sgRNA Position: 28495043; note = Sequence Name: 56322-704_101_SL_seq_9527
gcggctcggagcgggctccg

SEQ ID NO: 9528 - DNA, 20 bp, Homo sapiens
  source 1..20: mol_type = genomic DNA; note = Gene: FLT1; note = Location (start to end; relative to TSS): FLT1_19_49; note = Orientation (relative to transcription): sense; note = sgRNA Position: 28495085; note = Sequence Name: 56322-704_101_SL_seq_9528
cgccaggcggacactcctct

SEQ ID NO: 9529 - DNA, 20 bp, Homo sapiens
  source 1..20: mol_type = genomic DNA; note = Gene: FLT1; note = Location (start to end; relative to TSS): FLT1_52_82; note = Orientation (relative to transcription): sense; note = sgRNA Position: 28495052; note = Sequence Name: 56322-704_101_SL_seq_9529
gcagcggcggcggctcggag

SEQ ID NO: 9530 - DNA, 20 bp, Homo sapiens
  source 1..20: mol_type = genomic DNA; note = Gene: FLT3; note = Location (start to end; relative to TSS): FLT3_41_71; note = Orientation (relative to transcription): antisense; note = sgRNA Position: 28100531; note = Sequence Name: 56322-704_101_SL_seq_9530
ctccggagcccggggtcccc

SEQ ID NO: 9531 - DNA, 20 bp, Homo sapiens
  source 1..20: mol_type = genomic DNA; note = Gene: FLT3; note = Location (start to end; relative to TSS): FLT3_79_109; note = Orientation (relative to transcription): sense; note = sgRNA Position: 28100473; note = Sequence Name: 56322-704_101_SL_seq_9531
ggcggccagctgccgctgct

SEQ ID NO: 9532 - DNA, 20 bp, Homo sapiens
  source 1..20: mol_type = genomic DNA; note = Gene: FLT3; note = Location (start to end; relative to TSS): FLT3_32_62; note = Orientation (relative to transcription): antisense; note = sgRNA Position: 28100540; note = Sequence Name: 56322-704_101_SL_seq_9532
ccggggtccccaggccgcgc

SEQ ID NO: 9533 - DNA, 20 bp, Homo sapiens
  source 1..20: mol_type = genomic DNA; note = Gene: FLT3; note = Location (start to end; relative to TSS): FLT3_70_100; note = Orientation (relative to transcription): antisense; note = sgRNA Position: 28100502; note = Sequence Name: 56322-704_101_SL_seq_9533
ccgccgtcgcgcgccaacgc

SEQ ID NO: 9534 - DNA, 20 bp, Homo sapiens
  source 1..20: mol_type = genomic DNA; note = Gene: FLT3; note = Location (start to end; relative to TSS): FLT3_33_63; note = Orientation (relative to transcription): sense; note = sgRNA Position: 28100519; note = Sequence Name: 56322-704_101_SL_seq_9534
ctggggaccccgggctccgg

SEQ ID NO: 9535 - DNA, 20 bp, Homo sapiens
  source 1..20: mol_type = genomic DNA; note = Gene: FLT3; note = Location (start to end; relative to TSS): FLT3_65_95; note = Orientation (relative to transcription): antisense; note = sgRNA Position: 28100507; note = Sequence Name: 56322-704_101_SL_seq_9535
gtcgcgcgccaacgccggca

SEQ ID NO: 9536 - DNA, 20 bp, Homo sapiens
  source 1..20: mol_type = genomic DNA; note = Gene: FLT3; note = Location (start to end; relative to TSS): FLT3_30_60; note = Orientation (relative to transcription): sense; note = sgRNA Position: 28100522; note = Sequence Name: 56322-704_101_SL_seq_9536
ggcctggggaccccgggctc

SEQ ID NO: 9537 - DNA, 20 bp, Homo sapiens
  source 1..20: mol_type = genomic DNA; note = Gene: FLT3; note = Location (start to end; relative to TSS): FLT3_61_91; note = Orientation (relative to transcription): sense; note = sgRNA Position: 28100491; note = Sequence Name: 56322-704_101_SL_seq_9537
ccggcgttggcgcgcgacgg

SEQ ID NO: 9538 - DNA, 20 bp, Homo sapiens
  source 1..20: mol_type = genomic DNA; note = Gene: FLT3; note = Location (start to end; relative to TSS): FLT3_24_54; note = Orientation (relative to transcription): sense; note = sgRNA Position: 28100528; note = Sequence Name: 56322-704_101_SL_seq_9538
cggcgcggcctggggacccc

SEQ ID NO: 9539 - DNA, 20 bp, Homo sapiens
  source 1..20: mol_type = genomic DNA; note = Gene: FLT3; note = Location (start to end; relative to TSS): FLT3_58_88; note = Orientation (relative to transcription): sense; note = sgRNA Position: 28100494; note = Sequence Name: 56322-704_101_SL_seq_9539
atgccggcgttggcgcgcga

SEQ ID NO: 9540 - DNA, 20 bp, Homo sapiens
  source 1..20: mol_type = genomic DNA; note = Gene: FLT4; note = Location (start to end; relative to TSS): FLT4_33_63; note = Orientation (relative to transcription): sense; note = sgRNA Position: 180649543; note = Sequence Name: 56322-704_101_SL_seq_9540
cgcagcggccggagatgcag

SEQ ID NO: 9541 - DNA, 20 bp, Homo sapiens
  source 1..20: mol_type = genomic DNA; note = Gene: FLT4; note = Location (start to end; relative to TSS): FLT4_83_113; note = Orientation (relative to transcription): sense; note = sgRNA Position: 180649493; note = Sequence Name: 56322-704_101_SL_seq_9541
ctctgcctgggactcctgga

SEQ ID NO: 9542 - DNA, 20 bp, Homo sapiens
  source 1..20: mol_type = genomic DNA; note = Gene: FLT4; note = Location (start to end; relative to TSS): FLT4_34_64; note = Orientation (relative to transcription): sense; note = sgRNA Position: 180649542; note = Sequence Name: 56322-704_101_SL_seq_9542
gcagcggccggagatgcagc

SEQ ID NO: 9543 - DNA, 20 bp, Homo sapiens
  source 1..20: mol_type = genomic DNA; note = Gene: FLT4; note = Location (start to end; relative to TSS): FLT4_71_101; note = Orientation (relative to transcription): sense; note = sgRNA Position: 180649505; note = Sequence Name: 56322-704_101_SL_seq_9543
ctgcgactgtggctctgcct

SEQ ID NO: 9544 - DNA, 20 bp, Homo sapiens
  source 1..20: mol_type = genomic DNA; note = Gene: FLT4; note = Location (start to end; relative to TSS): FLT4_35_65; note = Orientation (relative to transcription): sense; note = sgRNA Position: 180649541; note = Sequence Name: 56322-704_101_SL_seq_9544
cagcggccggagatgcagcg

SEQ ID NO: 9545 - DNA, 20 bp, Homo sapiens
  source 1..20: mol_type = genomic DNA; note = Gene: FLT4; note = Location (start to end; relative to TSS): FLT4_69_99; note = Orientation (relative to transcription): antisense; note = sgRNA Position: 180649527; note = Sequence Name: 56322-704_101_SL_seq_9545
ccacagtcgcaggcacagcg

SEQ ID NO: 9546 - DNA, 20 bp, Homo sapiens
  source 1..20: mol_type = genomic DNA; note = Gene: FLT4; note = Location (start to end; relative to TSS): FLT4_22_52; note = Orientation (relative to transcription): antisense; note = sgRNA Position: 180649574; note = Sequence Name: 56322-704_101_SL_seq_9546
gcgcgtgggtccgacccgag

SEQ ID NO: 9547 - DNA, 20 bp, Homo sapiens
  source 1..20: mol_type = genomic DNA; note = Gene: FLT4; note = Location (start to end; relative to TSS): FLT4_60_90; note = Orientation (relative to transcription): sense; note = sgRNA Position: 180649516; note = Sequence Name: 56322-704_101_SL_seq_9547
ccgcgctgtgcctgcgactg

SEQ ID NO: 9548 - DNA, 20 bp, Homo sapiens
  source 1..20: mol_type = genomic DNA; note = Gene: FLT4; note = Location (start to end; relative to TSS): FLT4_18_48; note = Orientation (relative to transcription): sense; note = sgRNA Position: 180649558; note = Sequence Name: 56322-704_101_SL_seq_9548
cgggtcggacccacgcgcag

SEQ ID NO: 9549 - DNA, 20 bp, Homo sapiens
  source 1..20: mol_type = genomic DNA; note = Gene: FLT4; note = Location (start to end; relative to TSS): FLT4_50_80; note = Orientation (relative to transcription): antisense; note = sgRNA Position: 180649546; note = Sequence Name: 56322-704_101_SL_seq_9549
gcggcgccccgctgcatctc

SEQ ID NO: 9550 - DNA, 20 bp, Homo sapiens
  source 1..20: mol_type = genomic DNA; note = Gene: FSTL4; note = Location (start to end; relative to TSS): FSTL4_25_55; note = Orientation (relative to transcription): sense; note = sgRNA Position: 133612492; note = Sequence Name: 56322-704_101_SL_seq_9550
cagcgggcagcggcggctca

SEQ ID NO: 9551 - DNA, 20 bp, Homo sapiens
  source 1..20: mol_type = genomic DNA; note = Gene: FSTL4; note = Location (start to end; relative to TSS): FSTL4_77_107; note = Orientation (relative to transcription): antisense; note = sgRNA Position: 133612460; note = Sequence Name: 56322-704_101_SL_seq_9551
tcggcgggtcccgggctcgc

SEQ ID NO: 9552 - DNA, 20 bp, Homo sapiens
  source 1..20: mol_type = genomic DNA; note = Gene: FSTL4; note = Location (start to end; relative to TSS): FSTL4_18_48; note = Orientation (relative to transcription): sense; note = sgRNA Position: 133612499; note = Sequence Name: 56322-704_101_SL_seq_9552
ggcacagcagcgggcagcgg

SEQ ID NO: 9553 - DNA, 20 bp, Homo sapiens
  source 1..20: mol_type = genomic DNA; note = Gene: FSTL4; note = Location (start to end; relative to TSS): FSTL4_74_104; note = Orientation (relative to transcription): antisense; note = sgRNA Position: 133612463; note = Sequence Name: 56322-704_101_SL_seq_9553
gcgggtcccgggctcgctgg

SEQ ID NO: 9554 - DNA, 20 bp, Homo sapiens
  source 1..20: mol_type = genomic DNA; note = Gene: FSTL4; note = Location (start to end; relative to TSS): FSTL4_15_45; note = Orientation (relative to transcription): sense; note = sgRNA Position: 133612502; note = Sequence Name: 56322-704_101_SL_seq_9554
ggtggcacagcagcgggcag

SEQ ID NO: 9555 - DNA, 20 bp, Homo sapiens
  source 1..20: mol_type = genomic DNA; note = Gene: FSTL4; note = Location (start to end; relative to TSS): FSTL4_65_95; note = Orientation (relative to transcription): antisense; note = sgRNA Position: 133612472; note = Sequence Name: 56322-704_101_SL_seq_9555
gggctcgctggaggctgttg

SEQ ID NO: 9556 - DNA, 20 bp, Homo sapiens
  source 1..20: mol_type = genomic DNA; note = Gene: FSTL4; note = Location (start to end; relative to TSS): FSTL4_14_44; note = Orientation (relative to transcription): antisense; note = sgRNA Position: 133612523; note = Sequence Name: 56322-704_101_SL_seq_9556
ctgctgtgccaccgccgccg

SEQ ID NO: 9557 - DNA, 20 bp, Homo sapiens
  source 1..20: mol_type = genomic DNA; note = Gene: FSTL4; note = Location (start to end; relative to TSS): FSTL4_59_89; note = Orientation (relative to transcription): sense; note = sgRNA Position: 133612458; note = Sequence Name: 56322-704_101_SL_seq_9557
caacagcctccagcgagccc

SEQ ID NO: 9558 - DNA, 20 bp, Homo sapiens
  source 1..20: mol_type = genomic DNA; note = Gene: FSTL4; note = Location (start to end; relative to TSS): FSTL4_9_39; note = Orientation (relative to transcription): sense; note = sgRNA Position: 133612508; note = Sequence Name: 56322-704_101_SL_seq_9558
ggcggcggtggcacagcagc

SEQ ID NO: 9559 - DNA, 20 bp, Homo sapiens
  source 1..20: mol_type = genomic DNA; note = Gene: FSTL4; note = Location (start to end; relative to TSS): FSTL4_58_88; note = Orientation (relative to transcription): sense; note = sgRNA Position: 133612459; note = Sequence Name: 56322-704_101_SL_seq_9559
tcaacagcctccagcgagcc

SEQ ID NO: 9560 - DNA, 20 bp, Homo sapiens
  source 1..20: mol_type = genomic DNA; note = Gene: FSTL5; note = Location (start to end; relative to TSS): FSTL5_64_94; note = Orientation (relative to transcription): antisense; note = sgRNA Position: 162163932; note = Sequence Name: 56322-704_101_SL_seq_9560
aactggtccgctcgcgtctc

SEQ ID NO: 9561 - DNA, 20 bp, Homo sapiens
  source 1..20: mol_type = genomic DNA; note = Gene: FSTL5; note = Location (start to end; relative to TSS): FSTL5_96_126; note = Orientation (relative to transcription): antisense; note = sgRNA Position: 162163900; note = Sequence Name: 56322-704_101_SL_seq_9561
tgcaagagggcgttgccttc

SEQ ID NO: 9562 - DNA, 20 bp, Homo sapiens
  source 1..20: mol_type = genomic DNA; note = Gene: FSTL5; note = Location (start to end; relative to TSS): FSTL5_48_78; note = Orientation (relative to transcription): sense; note = sgRNA Position: 162163928; note = Sequence Name: 56322-704_101_SL_seq_9562
tgctgaacctgagacgcgag

SEQ ID NO: 9563 - DNA, 20 bp, Homo sapiens
  source 1..20: mol_type = genomic DNA; note = Gene: FSTL5; note = Location (start to end; relative to TSS): FSTL5_81_111; note = Orientation (relative to transcription): antisense; note = sgRNA Position: 162163915; note = Sequence Name: 56322-704_101_SL_seq_9563
ccttcaggtgctggagcaac

SEQ ID NO: 9564 - DNA, 20 bp, Homo sapiens
  source 1..20: mol_type = genomic DNA; note = Gene: FSTL5; note = Location (start to end; relative to TSS): FSTL5_42_72; note = Orientation (relative to transcription): antisense; note = sgRNA Position: 162163954; note = Sequence Name: 56322-704_101_SL_seq_9564
gttcagcaccgacagcacag

SEQ ID NO: 9565 - DNA, 20 bp, Homo sapiens
  source 1..20: mol_type = genomic DNA; note = Gene: FSTL5; note = Location (start to end; relative to TSS): FSTL5_72_102; note = Orientation (relative to transcription): sense; note = sgRNA Position: 162163904; note = Sequence Name: 56322-704_101_SL_seq_9565
ccagttgctccagcacctga

SEQ ID NO: 9566 - DNA, 20 bp, Homo sapiens
  source 1..20: mol_type = genomic DNA; note = Gene: FSTL5; note = Location (start to end; relative to TSS): FSTL5_25_55; note = Orientation (relative to transcription): sense; note = sgRNA Position: 162163951; note = Sequence Name: 56322-704_101_SL_seq_9566
ggtactgtccactgtgctgt

SEQ ID NO: 9567 - DNA, 20 bp, Homo sapiens
  source 1..20: mol_type = genomic DNA; note = Gene: FSTL5; note = Location (start to end; relative to TSS): FSTL5_64_94; note = Orientation (relative to transcription): antisense; note = sgRNA Position: 162163932; note = Sequence Name: 56322-704_101_SL_seq_9567
aactggtccgctcgcgtctc

SEQ ID NO: 9568 - DNA, 20 bp, Homo sapiens
  source 1..20: mol_type = genomic DNA; note = Gene: FSTL5; note = Location (start to end; relative to TSS): FSTL5_4_34; note = Orientation (relative to transcription): sense; note = sgRNA Position: 162163972; note = Sequence Name: 56322-704_101_SL_seq_9568
aaactggaggtgaaaggagc

SEQ ID NO: 9569 - DNA, 20 bp, Homo sapiens
  source 1..20: mol_type = genomic DNA; note = Gene: FSTL5; note = Location (start to end; relative to TSS): FSTL5_42_72; note = Orientation (relative to transcription): antisense; note = sgRNA Position: 162163954; note = Sequence Name: 56322-704_101_SL_seq_9569
gttcagcaccgacagcacag

SEQ ID NO: 9570 - DNA, 20 bp, Homo sapiens
  source 1..20: mol_type = genomic DNA; note = Gene: GP6; note = Location (start to end; relative to TSS): GP6_45_75; note = Orientation (relative to transcription): antisense; note = sgRNA Position: 55038215; note = Sequence Name: 56322-704_101_SL_seq_9570
ctcaccaagacagaagaggg

SEQ ID NO: 9571 - DNA, 20 bp, Homo sapiens
  source 1..20: mol_type = genomic DNA; note = Gene: GP6; note = Location (start to end; relative to TSS): GP6_93_123; note = Orientation (relative to transcription): sense; note = sgRNA Position: 55038147; note = Sequence Name: 56322-704_101_SL_seq_9571
aggcatggactgccagacaa

SEQ ID NO: 9572 - DNA, 20 bp, Homo sapiens
  source 1..20: mol_type = genomic DNA; note = Gene: GP6; note = Location (start to end; relative to TSS): GP6_44_74; note = Orientation (relative to transcription): sense; note = sgRNA Position: 55038196; note = Sequence Name: 56322-704_101_SL_seq_9572
ttctgtcttggtgagtcctg

SEQ ID NO: 9573 - DNA, 20 bp, Homo sapiens
  source 1..20: mol_type = genomic DNA; note = Gene: GP6; note = Location (start to end; relative to TSS): GP6_78_108; note = Orientation (relative to transcription): sense; note = sgRNA Position: 55038162; note = Sequence Name: 56322-704_101_SL_seq_9573
gaaatgctgaaggacaggca

SEQ ID NO: 9574 - DNA, 20 bp, Homo sapiens
  source 1..20: mol_type = genomic DNA; note = Gene: GP6; note = Location (start to end; relative to TSS): GP6_35_65; note = Orientation (relative to transcription): antisense; note = sgRNA Position: 55038225; note = Sequence Name: 56322-704_101_SL_seq_9574
cagaagagggcggtcgggga

SEQ ID NO: 9575 - DNA, 20 bp, Homo sapiens
  source 1..20: mol_type = genomic DNA; note = Gene: GP6; note = Location (start to end; relative to TSS): GP6_73_103; note = Orientation (relative to transcription): sense; note = sgRNA Position: 55038167; note = Sequence Name: 56322-704_101_SL_seq_9575
tctgggaaatgctgaaggac

SEQ ID NO: 9576 - DNA, 20 bp, Homo sapiens
  source 1..20: mol_type = genomic DNA; note = Gene: GP6; note = Location (start to end; relative to TSS): GP6_32_62; note = Orientation (relative to transcription): sense; note = sgRNA Position: 55038208; note = Sequence Name: 56322-704_101_SL_seq_9576
ccgaccgccctcttctgtct

SEQ ID NO: 9577 - DNA, 20 bp, Homo sapiens
  source 1..20: mol_type = genomic DNA; note = Gene: GP6; note = Location (start to end; relative to TSS): GP6_69_99; note = Orientation (relative to transcription): antisense; note = sgRNA Position: 55038191; note = Sequence Name: 56322-704_101_SL_seq_9577
atttcccagatctgaccctc

SEQ ID NO: 9578 - DNA, 20 bp, Homo sapiens
  source 1..20: mol_type = genomic DNA; note = Gene: GP6; note = Location (start to end; relative to TSS): GP6_27_57; note = Orientation (relative to transcription): antisense; note = sgRNA Position: 55038233; note = Sequence Name: 56322-704_101_SL_seq_9578
ggcggtcggggatggagaca

SEQ ID NO: 9579 - DNA, 20 bp, Homo sapiens
  source 1..20: mol_type = genomic DNA; note = Gene: GP6; note = Location (start to end; relative to TSS): GP6_68_98; note = Orientation (relative to transcription): sense; note = sgRNA Position: 55038172; note = Sequence Name: 56322-704_101_SL_seq_9579
tcagatctgggaaatgctga

SEQ ID NO: 9580 - DNA, 20 bp, Homo sapiens
  source 1..20: mol_type = genomic DNA; note = Gene: GPA33; note = Location (start to end; relative to TSS): GPA33_41_71; note = Orientation (relative to transcription): sense; note = sgRNA Position: 167090312; note = Sequence Name: 56322-704_101_SL_seq_9580
ccagtgacaggttaggttta

SEQ ID NO: 9581 - DNA, 20 bp, Homo sapiens
  source 1..20: mol_type = genomic DNA; note = Gene: GPA33; note = Location (start to end; relative to TSS): GPA33_89_119; note = Orientation (relative to transcription): antisense; note = sgRNA Position: 167090284; note = Sequence Name: 56322-704_101_SL_seq_9581
aggccacatcttccccacca

SEQ ID NO: 9582 - DNA, 20 bp, Homo sapiens
  source 1..20: mol_type = genomic DNA; note = Gene: GPA33; note = Location (start to end; relative to TSS): GPA33_35_65; note = Orientation (relative to transcription): antisense; note = sgRNA Position: 167090338; note = Sequence Name: 56322-704_101_SL_seq_9582
gtcactggcagcctccagac

SEQ ID NO: 9583 - DNA, 20 bp, Homo sapiens
  source 1..20: mol_type = genomic DNA; note = Gene: GPA33; note = Location (start to end; relative to TSS): GPA33_77_107; note = Orientation (relative to transcription): sense; note = sgRNA Position: 167090276; note = Sequence Name: 56322-704_101_SL_seq_9583
agaccatggtggggaagatg

SEQ ID NO: 9584 - DNA, 20 bp, Homo sapiens
  source 1..20: mol_type = genomic DNA; note = Gene: GPA33; note = Location (start to end; relative to TSS): GPA33_34_64; note = Orientation (relative to transcription): sense; note = sgRNA Position: 167090319; note = Sequence Name: 56322-704_101_SL_seq_9584
gaggctgccagtgacaggtt

SEQ ID NO: 9585 - DNA, 20 bp, Homo sapiens
  source 1..20: mol_type = genomic DNA; note = Gene: GPA33; note = Location (start to end; relative to TSS): GPA33_68_98; note = Orientation (relative to transcription): sense; note = sgRNA Position: 167090285; note = Sequence Name: 56322-704_101_SL_seq_9585
gaagaagcaagaccatggtg

SEQ ID NO: 9586 - DNA, 20 bp, Homo sapiens
  source 1..20: mol_type = genomic DNA; note = Gene: GPA33; note = Location (start to end; relative to TSS): GPA33_29_59; note = Orientation (relative to transcription): sense; note = sgRNA Position: 167090324; note = Sequence Name: 56322-704_101_SL_seq_9586
gtctggaggctgccagtgac

SEQ ID NO: 9587 - DNA, 20 bp, Homo sapiens
  source 1..20: mol_type = genomic DNA; note = Gene: GPA33; note = Location (start to end; relative to TSS): GPA33_67_97; note = Orientation (relative to transcription): sense; note = sgRNA Position: 167090286; note = Sequence Name: 56322-704_101_SL_seq_9587
agaagaagcaagaccatggt

SEQ ID NO: 9588 - DNA, 20 bp, Homo sapiens
  source 1..20: mol_type = genomic DNA; note = Gene: GPA33; note = Location (start to end; relative to TSS): GPA33_21_51; note = Orientation (relative to transcription): antisense; note = sgRNA Position: 167090352; note = Sequence Name: 56322-704_101_SL_seq_9588
ccagacaggtctgagctgtc

SEQ ID NO: 9589 - DNA, 20 bp, Homo sapiens
  source 1..20: mol_type = genomic DNA; note = Gene: GPA33; note = Location (start to end; relative to TSS): GPA33_66_96; note = Orientation (relative to transcription): sense; note = sgRNA Position: 167090287; note = Sequence Name: 56322-704_101_SL_seq_9589
gagaagaagcaagaccatgg

SEQ ID NO: 9590 - DNA, 20 bp, Homo sapiens
  source 1..20: mol_type = genomic DNA; note = Gene: HAPLN1; note = Location (start to end; relative to TSS): HAPLN1_43_73; note = Orientation (relative to transcription): antisense; note = sgRNA Position: 83720808; note = Sequence Name: 56322-704_101_SL_seq_9590
tgtcctgaaatccaggagtt

SEQ ID NO: 9591 - DNA, 20 bp, Homo sapiens
  source 1..20: mol_type = genomic DNA; note = Gene: HAPLN1; note = Location (start to end; relative to TSS): HAPLN1_91_121; note = Orientation (relative to transcription): antisense; note = sgRNA Position: 83720760; note = Sequence Name: 56322-704_101_SL_seq_9591
cacaaaggtataaccaaaag

SEQ ID NO: 9592 - DNA, 20 bp, Homo sapiens
  source 1..20: mol_type = genomic DNA; note = Gene: HAPLN1; note = Location (start to end; relative to TSS): HAPLN1_37_67; note = Orientation (relative to transcription): sense; note = sgRNA Position: 83720794; note = Sequence Name: 56322-704_101_SL_seq_9592
aactcctggatttcaggaca

SEQ ID NO: 9593 - DNA, 20 bp, Homo sapiens
  source 1..20: mol_type = genomic DNA; note = Gene: HAPLN1; note = Location (start to end; relative to TSS): HAPLN1_90_120; note = Orientation (relative to transcription): antisense; note = sgRNA Position: 83720761; note = Sequence Name: 56322-704_101_SL_seq_9593
acaaaggtataaccaaaaga

SEQ ID NO: 9594 - DNA, 20 bp, Homo sapiens
  source 1..20: mol_type = genomic DNA; note = Gene: HAPLN1; note = Location (start to end; relative to TSS): HAPLN1_23_53; note = Orientation (relative to transcription): sense; note = sgRNA Position: 83720808; note = Sequence Name: 56322-704_101_SL_seq_9594
cttgagagcatccgaactcc

SEQ ID NO: 9595 - DNA, 20 bp, Homo sapiens
  source 1..20: mol_type = genomic DNA; note = Gene: HAPLN1; note = Location (start to end; relative to TSS): HAPLN1_89_119; note = Orientation (relative to transcription): antisense; note = sgRNA Position: 83720762; note = Sequence Name: 56322-704_101_SL_seq_9595
caaaggtataaccaaaagag

SEQ ID NO: 9596 - DNA, 20 bp, Homo sapiens
  source 1..20: mol_type = genomic DNA; note = Gene: HAPLN1; note = Location (start to end; relative to TSS): HAPLN1_50_80; note = Orientation (relative to transcription): antisense; note = sgRNA Position: 83720801; note = Sequence Name: 56322-704_101_SL_seq_9596
tttaccttgtcctgaaatcc

SEQ ID NO: 9597 - DNA, 20 bp, Homo sapiens
  source 1..20: mol_type = genomic DNA; note = Gene: HAPLN1; note = Location (start to end; relative to TSS): HAPLN1_88_118; note = Orientation (relative to transcription): antisense; note = sgRNA Position: 83720763; note = Sequence Name: 56322-704_101_SL_seq_9597
aaaggtataaccaaaagagg

SEQ ID NO: 9598 - DNA, 20 bp, Homo sapiens
  source 1..20: mol_type = genomic DNA; note = Gene: HAPLN1; note = Location (start to end; relative to TSS): HAPLN1_17_47; note = Orientation (relative to transcription): antisense; note = sgRNA Position: 83720834; note = Sequence Name: 56322-704_101_SL_seq_9598
ctctcaagttctgcttaagt

SEQ ID NO: 9599 - DNA, 20 bp, Homo sapiens
  source 1..20: mol_type = genomic DNA; note = Gene: HAPLN1; note = Location (start to end; relative to TSS): HAPLN1_50_80; note = Orientation (relative to transcription): antisense; note = sgRNA Position: 83720801; note = Sequence Name: 56322-704_101_SL_seq_9599
tttaccttgtcctgaaatcc

SEQ ID NO: 9600 - DNA, 20 bp, Homo sapiens
  source 1..20: mol_type = genomic DNA; note = Gene: HAPLN2; note = Location (start to end; relative to TSS): HAPLN2_54_84; note = Orientation (relative to transcription): antisense; note = sgRNA Position: 156619475; note = Sequence Name: 56322-704_101_SL_seq_9600
ctttcaggtgggaactatcc

SEQ ID NO: 9601 - DNA, 20 bp, Homo sapiens
  source 1..20: mol_type = genomic DNA; note = Gene: HAPLN2; note = Location (start to end; relative to TSS): HAPLN2_109_139; note = Orientation (relative to transcription): sense; note = sgRNA Position: 156619550; note = Sequence Name: 56322-704_101_SL_seq_9601
gaggtgagtactctgttgtg

SEQ ID NO: 9602 - DNA, 20 bp, Homo sapiens
  source 1..20: mol_type = genomic DNA; note = Gene: HAPLN2; note = Location (start to end; relative to TSS): HAPLN2_59_89; note = Orientation (relative to transcription): sense; note = sgRNA Position: 156619500; note = Sequence Name: 56322-704_101_SL_seq_9602
acctgaaagtctgtttgcaa

SEQ ID NO: 9603 - DNA, 20 bp, Homo sapiens
  source 1..20: mol_type = genomic DNA; note = Gene: HAPLN2; note = Location (start to end; relative to TSS): HAPLN2_108_138; note = Orientation (relative to transcription): antisense; note = sgRNA Position: 156619529; note = Sequence Name: 56322-704_101_SL_seq_9603
gagtactcacctctgccctc

SEQ ID NO: 9604 - DNA, 20 bp, Homo sapiens
  source 1..20: mol_type = genomic DNA; note = Gene: HAPLN2; note = Location (start to end; relative to TSS): HAPLN2_29_59; note = Orientation (relative to transcription): antisense; note = sgRNA Position: 156619450; note = Sequence Name: 56322-704_101_SL_seq_9604
ttccagctgcttcaagaaac

SEQ ID NO: 9605 - DNA, 20 bp, Homo sapiens
  source 1..20: mol_type = genomic DNA; note = Gene: HAPLN2; note = Location (start to end; relative to TSS): HAPLN2_65_95; note = Orientation (relative to transcription): antisense; note = sgRNA Position: 156619486; note = Sequence Name: 56322-704_101_SL_seq_9605
ttgcaaacagactttcaggt

SEQ ID NO: 9606 - DNA, 20 bp, Homo sapiens
  source 1..20: mol_type = genomic DNA; note = Gene: HAPLN2; note = Location (start to end; relative to TSS): HAPLN2_27_57; note = Orientation (relative to transcription): sense; note = sgRNA Position: 156619468; note = Sequence Name: 56322-704_101_SL_seq_9606
cttgaagcagctggaagtcc

SEQ ID NO: 9607 - DNA, 20 bp, Homo sapiens
  source 1..20: mol_type = genomic DNA; note = Gene: HAPLN2; note = Location (start to end; relative to TSS): HAPLN2_59_89; note = Orientation (relative to transcription): sense; note = sgRNA Position: 156619500; note = Sequence Name: 56322-704_101_SL_seq_9607
acctgaaagtctgtttgcaa

SEQ ID NO: 9608 - DNA, 20 bp, Homo sapiens
  source 1..20: mol_type = genomic DNA; note = Gene: HAPLN2; note = Location (start to end; relative to TSS): HAPLN2_18_48; note = Orientation (relative to transcription): sense; note = sgRNA Position: 156619459; note = Sequence Name: 56322-704_101_SL_seq_9608
gtccggtttcttgaagcagc

SEQ ID NO: 9609 - DNA, 20 bp, Homo sapiens
  source 1..20: mol_type = genomic DNA; note = Gene: HAPLN2; note = Location (start to end; relative to TSS): HAPLN2_54_84; note = Orientation (relative to transcription): antisense; note = sgRNA Position: 156619475; note = Sequence Name: 56322-704_101_SL_seq_9609
ctttcaggtgggaactatcc

SEQ ID NO: 9610 - DNA, 20 bp, Homo sapiens
  source 1..20: mol_type = genomic DNA; note = Gene: HAPLN3; note = Location (start to end; relative to TSS): HAPLN3_48_78; note = Orientation (relative to transcription): antisense; note = sgRNA Position: 88895492; note = Sequence Name: 56322-704_101_SL_seq_9610
ctcgacggctagagctctcg

SEQ ID NO: 9611 - DNA, 20 bp, Homo sapiens
  source 1..20: mol_type = genomic DNA; note = Gene: HAPLN3; note = Location (start to end; relative to TSS): HAPLN3_79_109; note = Orientation (relative to transcription): sense; note = sgRNA Position: 88895441; note = Sequence Name: 56322-704_101_SL_seq_9611
tacgtggcttaggggtcgct

SEQ ID NO: 9612 - DNA, 20 bp, Homo sapiens
  source 1..20: mol_type = genomic DNA; note = Gene: HAPLN3; note = Location (start to end; relative to TSS): HAPLN3_47_77; note = Orientation (relative to transcription): antisense; note = sgRNA Position: 88895493; note = Sequence Name: 56322-704_101_SL_seq_9612
tcgacggctagagctctcgg

SEQ ID NO: 9613 - DNA, 20 bp, Homo sapiens
  source 1..20: mol_type = genomic DNA; note = Gene: HAPLN3; note = Location (start to end; relative to TSS): HAPLN3_77_107; note = Orientation (relative to transcription): antisense; note = sgRNA Position: 88895463; note = Sequence Name: 56322-704_101_SL_seq_9613
ctaagccacgtaccgtcccc

SEQ ID NO: 9614 - DNA, 20 bp, Homo sapiens
  source 1..20: mol_type = genomic DNA; note = Gene: HAPLN3; note = Location (start to end; relative to TSS): HAPLN3_40_70; note = Orientation (relative to transcription): sense; note = sgRNA Position: 88895480; note = Sequence Name: 56322-704_101_SL_seq_9614
cccgagagctctagccgtcg

SEQ ID NO: 9615 - DNA, 20 bp, Homo sapiens
  source 1..20: mol_type = genomic DNA; note = Gene: HAPLN3; note = Location (start to end; relative to TSS): HAPLN3_70_100; note = Orientation (relative to transcription): sense; note = sgRNA Position: 88895450; note = Sequence Name: 56322-704_101_SL_seq_9615
tggggacggtacgtggctta

SEQ ID NO: 9616 - DNA, 20 bp, Homo sapiens
  source 1..20: mol_type = genomic DNA; note = Gene: HAPLN3; note = Location (start to end; relative to TSS): HAPLN3_31_61; note = Orientation (relative to transcription): antisense; note = sgRNA Position: 88895509; note = Sequence Name: 56322-704_101_SL_seq_9616
tcgggggccgcgagctgtcc

SEQ ID NO: 9617 - DNA, 20 bp, Homo sapiens
  source 1..20: mol_type = genomic DNA; note = Gene: HAPLN3; note = Location (start to end; relative to TSS): HAPLN3_63_93; note = Orientation (relative to transcription): antisense; note = sgRNA Position: 88895477; note = Sequence Name: 56322-704_101_SL_seq_9617
gtccccaggcagctcctcga

SEQ ID NO: 9618 - DNA, 20 bp, Homo sapiens
  source 1..20: mol_type = genomic DNA; note = Gene: HAPLN3; note = Location (start to end; relative to TSS): HAPLN3_24_54; note = Orientation (relative to transcription): antisense; note = sgRNA Position: 88895516; note = Sequence Name: 56322-704_101_SL_seq_9618
ccgcgagctgtcccggtcca

SEQ ID NO: 9619 - DNA, 20 bp, Homo sapiens
  source 1..20: mol_type = genomic DNA; note = Gene: HAPLN3; note = Location (start to end; relative to TSS): HAPLN3_56_86; note = Orientation (relative to transcription): sense; note = sgRNA Position: 88895464; note = Sequence Name: 56322-704_101_SL_seq_9619
gtcgaggagctgcctgggga

SEQ ID NO: 9620 - DNA, 20 bp, Homo sapiens
  source 1..20: mol_type = genomic DNA; note = Gene: HAPLN4; note = Location (start to end; relative to TSS): HAPLN4_45_75; note = Orientation (relative to transcription): sense; note = sgRNA Position: 19262735; note = Sequence Name: 56322-704_101_SL_seq_9620
cgggggccgcgcgggcaaga

SEQ ID NO: 9621 - DNA, 20 bp, Homo sapiens
  source 1..20: mol_type = genomic DNA; note = Gene: HAPLN4; note = Location (start to end; relative to TSS): HAPLN4_96_126; note = Orientation (relative to transcription): sense; note = sgRNA Position: 19262684; note = Sequence Name: 56322-704_101_SL_seq_9621
gtgccccgtctccccaatct

SEQ ID NO: 9622 - DNA, 20 bp, Homo sapiens
  source 1..20: mol_type = genomic DNA; note = Gene: HAPLN4; note = Location (start to end; relative to TSS): HAPLN4_46_76; note = Orientation (relative to transcription): antisense; note = sgRNA Position: 19262754; note = Sequence Name: 56322-704_101_SL_seq_9622
cccgcgcggcccccgccgag

SEQ ID NO: 9623 - DNA, 20 bp, Homo sapiens
  source 1..20: mol_type = genomic DNA; note = Gene: HAPLN4; note = Location (start to end; relative to TSS): HAPLN4_96_126; note = Orientation (relative to transcription): sense; note = sgRNA Position: 19262684; note = Sequence Name: 56322-704_101_SL_seq_9623
gtgccccgtctccccaatct

SEQ ID NO: 9624 - DNA, 20 bp, Homo sapiens
  source 1..20: mol_type = genomic DNA; note = Gene: HAPLN4; note = Location (start to end; relative to TSS): HAPLN4_31_61; note = Orientation (relative to transcription): antisense; note = sgRNA Position: 19262769; note = Sequence Name: 56322-704_101_SL_seq_9624
ccgagcggcccctacgcacc

SEQ ID NO: 9625 - DNA, 20 bp, Homo sapiens
  source 1..20: mol_type = genomic DNA; note = Gene: HAPLN4; note = Location (start to end; relative to TSS): HAPLN4_61_91; note = Orientation (relative to transcription): sense; note = sgRNA Position: 19262719; note = Sequence Name: 56322-704_101_SL_seq_9625
aagatggtaagtggggctgc

SEQ ID NO: 9626 - DNA, 20 bp, Homo sapiens
  source 1..20: mol_type = genomic DNA; note = Gene: HAPLN4; note = Location (start to end; relative to TSS): HAPLN4_28_58; note = Orientation (relative to transcription): sense; note = sgRNA Position: 19262752; note = Sequence Name: 56322-704_101_SL_seq_9626
gcgtaggggccgctcggcgg

SEQ ID NO: 9627 - DNA, 20 bp, Homo sapiens
  source 1..20: mol_type = genomic DNA; note = Gene: HAPLN4; note = Location (start to end; relative to TSS): HAPLN4_60_90; note = Orientation (relative to transcription): antisense; note = sgRNA Position: 19262740; note = Sequence Name: 56322-704_101_SL_seq_9627
cacttaccatcttgcccgcg

SEQ ID NO: 9628 - DNA, 20 bp, Homo sapiens
  source 1..20: mol_type = genomic DNA; note = Gene: HAPLN4; note = Location (start to end; relative to TSS): HAPLN4_22_52; note = Orientation (relative to transcription): sense; note = sgRNA Position: 19262758; note = Sequence Name: 56322-704_101_SL_seq_9628
ccgggtgcgtaggggccgct

SEQ ID NO: 9629 - DNA, 20 bp, Homo sapiens
  source 1..20: mol_type = genomic DNA; note = Gene: HAPLN4; note = Location (start to end; relative to TSS): HAPLN4_52_82; note = Orientation (relative to transcription): sense; note = sgRNA Position: 19262728; note = Sequence Name: 56322-704_101_SL_seq_9629
cgcgcgggcaagatggtaag

SEQ ID NO: 9630 - DNA, 20 bp, Homo sapiens
  source 1..20: mol_type = genomic DNA; note = Gene: HAVCR1; note = Location (start to end; relative to TSS): HAVCR1_46_76; note = Orientation (relative to transcription): sense; note = sgRNA Position: 157059046; note = Sequence Name: 56322-704_101_SL_seq_9630
ttgcttattatatcaatcct

SEQ ID NO: 9631 - DNA, 20 bp, Homo sapiens
  source 1..20: mol_type = genomic DNA; note = Gene: HAVCR1; note = Location (start to end; relative to TSS): HAVCR1_116_146; note = Orientation (relative to transcription): sense; note = sgRNA Position: 157058976; note = Sequence Name: 56322-704_101_SL_seq_9631
tagaggtttgaagagaactc

SEQ ID NO: 9632 - DNA, 20 bp, Homo sapiens
  source 1..20: mol_type = genomic DNA; note = Gene: HAVCR1; note = Location (start to end; relative to TSS): HAVCR1_43_73; note = Orientation (relative to transcription): antisense; note = sgRNA Position: 157059069; note = Sequence Name: 56322-704_101_SL_seq_9632
ataataagcaaaaagggcca

SEQ ID NO: 9633 - DNA, 20 bp, Homo sapiens
  source 1..20: mol_type = genomic DNA; note = Gene: HAVCR1; note = Location (start to end; relative to TSS): HAVCR1_99_129; note = Orientation (relative to transcription): sense; note = sgRNA Position: 157058993; note = Sequence Name: 56322-704_101_SL_seq_9633
ttttacaactgaggaaatag

SEQ ID NO: 9634 - DNA, 20 bp, Homo sapiens
  source 1..20: mol_type = genomic DNA; note = Gene: HAVCR1; note = Location (start to end; relative to TSS): HAVCR1_49_79; note = Orientation (relative to transcription): sense; note = sgRNA Position: 157059043; note = Sequence Name: 56322-704_101_SL_seq_9634
cttattatatcaatccttgg

SEQ ID NO: 9635 - DNA, 20 bp, Homo sapiens
  source 1..20: mol_type = genomic DNA; note = Gene: HAVCR1; note = Location (start to end; relative to TSS): HAVCR1_90_120; note = Orientation (relative to transcription): sense; note = sgRNA Position: 157059002; note = Sequence Name: 56322-704_101_SL_seq_9635
ttagtgctattttacaactg

SEQ ID NO: 9636 - DNA, 20 bp, Homo sapiens
  source 1..20: mol_type = genomic DNA; note = Gene: HAVCR1; note = Location (start to end; relative to TSS): HAVCR1_33_63; note = Orientation (relative to transcription): antisense; note = sgRNA Position: 157059079; note = Sequence Name: 56322-704_101_SL_seq_9636
aaaagggccacggaagaact

SEQ ID NO: 9637 - DNA, 20 bp, Homo sapiens
  source 1..20: mol_type = genomic DNA; note = Gene: HAVCR1; note = Location (start to end; relative to TSS): HAVCR1_72_102; note = Orientation (relative to transcription): antisense; note = sgRNA Position: 157059040; note = Sequence Name: 56322-704_101_SL_seq_9637
gcttcctctatctcccacca

SEQ ID NO: 9638 - DNA, 20 bp, Homo sapiens
  source 1..20: mol_type = genomic DNA; note = Gene: HAVCR1; note = Location (start to end; relative to TSS): HAVCR1_17_47; note = Orientation (relative to transcription): sense; note = sgRNA Position: 157059075; note = Sequence Name: 56322-704_101_SL_seq_9638
tagttttccaagttcttccg

SEQ ID NO: 9639 - DNA, 20 bp, Homo sapiens
  source 1..20: mol_type = genomic DNA; note = Gene: HAVCR1; note = Location (start to end; relative to TSS): HAVCR1_49_79; note = Orientation (relative to transcription): sense; note = sgRNA Position: 157059043; note = Sequence Name: 56322-704_101_SL_seq_9639
cttattatatcaatccttgg

SEQ ID NO: 9640 - DNA, 20 bp, Homo sapiens
  source 1..20: mol_type = genomic DNA; note = Gene: HAVCR2; note = Location (start to end; relative to TSS): HAVCR2_60_90; note = Orientation (relative to transcription): antisense; note = sgRNA Position: 157108980; note = Sequence Name: 56322-704_101_SL_seq_9640
aaagggaagatgtgaaaaca

SEQ ID NO: 9641 - DNA, 20 bp, Homo sapiens
  source 1..20: mol_type = genomic DNA; note = Gene: HAVCR2; note = Location (start to end; relative to TSS): HAVCR2_91_121; note = Orientation (relative to transcription): antisense; note = sgRNA Position: 157108949; note = Sequence Name: 56322-704_101_SL_seq_9641
gtagtagcagcagcagcagc

SEQ ID NO: 9642 - DNA, 20 bp, Homo sapiens
  source 1..20: mol_type = genomic DNA; note = Gene: HAVCR2; note = Location (start to end; relative to TSS): HAVCR2_36_66; note = Orientation (relative to transcription): antisense; note = sgRNA Position: 157109004; note = Sequence Name: 56322-704_101_SL_seq_9642
gcttgcagaagaaaagtcag

SEQ ID NO: 9643 - DNA, 20 bp, Homo sapiens
  source 1..20: mol_type = genomic DNA; note = Gene: HAVCR2; note = Location (start to end; relative to TSS): HAVCR2_78_108; note = Orientation (relative to transcription): antisense; note = sgRNA Position: 157108962; note = Sequence Name: 56322-704_101_SL_seq_9643
cagcagcaggacacagtcaa

SEQ ID NO: 9644 - DNA, 20 bp, Homo sapiens
  source 1..20: mol_type = genomic DNA; note = Gene: HAVCR2; note = Location (start to end; relative to TSS): HAVCR2_1_31; note = Orientation (relative to transcription): sense; note = sgRNA Position: 157109019; note = Sequence Name: 56322-704_101_SL_seq_9644
gttaaaactgtgcctaacag

SEQ ID NO: 9645 - DNA, 20 bp, Homo sapiens
  source 1..20: mol_type = genomic DNA; note = Gene: HAVCR2; note = Location (start to end; relative to TSS): HAVCR2_77_107; note = Orientation (relative to transcription): antisense; note = sgRNA Position: 157108963; note = Sequence Name: 56322-704_101_SL_seq_9645
agcagcaggacacagtcaaa

SEQ ID NO: 9646 - DNA, 20 bp, Homo sapiens
  source 1..20: mol_type = genomic DNA; note = Gene: HAVCR2; note = Location (start to end; relative to TSS): HAVCR2_-1_29; note = Orientation (relative to transcription): antisense; note = sgRNA Position: 157109041; note = Sequence Name: 56322-704_101_SL_seq_9646
cacagttttaactctccaaa

SEQ ID NO: 9647 - DNA, 20 bp, Homo sapiens
  source 1..20: mol_type = genomic DNA; note = Gene: HAVCR2; note = Location (start to end; relative to TSS): HAVCR2_60_90; note = Orientation (relative to transcription): antisense; note = sgRNA Position: 157108980; note = Sequence Name: 56322-704_101_SL_seq_9647
aaagggaagatgtgaaaaca

SEQ ID NO: 9648 - DNA, 20 bp, Homo sapiens
  source 1..20: mol_type = genomic DNA; note = Gene: HAVCR2; note = Location (start to end; relative to TSS): HAVCR2_-6_24; note = Orientation (relative to transcription): antisense; note = sgRNA Position: 157109046; note = Sequence Name: 56322-704_101_SL_seq_9648
ttttaactctccaaatggac

SEQ ID NO: 9649 - DNA, 20 bp, Homo sapiens
  source 1..20: mol_type = genomic DNA; note = Gene: HAVCR2; note = Location (start to end; relative to TSS): HAVCR2_36_66; note = Orientation (relative to transcription): antisense; note = sgRNA Position: 157109004; note = Sequence Name: 56322-704_101_SL_seq_9649
gcttgcagaagaaaagtcag

SEQ ID NO: 9650 - DNA, 20 bp, Homo sapiens
  source 1..20: mol_type = genomic DNA; note = Gene: HEPACAM; note = Location (start to end; relative to TSS): HEPACAM_61_91; note = Orientation (relative to transcription): antisense; note = sgRNA Position: 124935982; note = Sequence Name: 56322-704_101_SL_seq_9650
ggccctggaggctctggaca

SEQ ID NO: 9651 - DNA, 20 bp, Homo sapiens
  source 1..20: mol_type = genomic DNA; note = Gene: HEPACAM; note = Location (start to end; relative to TSS): HEPACAM_96_126; note = Orientation (relative to transcription): sense; note = sgRNA Position: 124935927; note = Sequence Name: 56322-704_101_SL_seq_9651
taccttcttctgatccagac

SEQ ID NO: 9652 - DNA, 20 bp, Homo sapiens
  source 1..20: mol_type = genomic DNA; note = Gene: HEPACAM; note = Location (start to end; relative to TSS): HEPACAM_33_63; note = Orientation (relative to transcription): antisense; note = sgRNA Position: 124936010; note = Sequence Name: 56322-704_101_SL_seq_9652
ctttctctcttcattttggg

SEQ ID NO: 9653 - DNA, 20 bp, Homo sapiens
  source 1..20: mol_type = genomic DNA; note = Gene: HEPACAM; note = Location (start to end; relative to TSS): HEPACAM_76_106; note = Orientation (relative to transcription): antisense; note = sgRNA Position: 124935967; note = Sequence Name: 56322-704_101_SL_seq_9653
aggagcaaggcgcagggccc

SEQ ID NO: 9654 - DNA, 20 bp, Homo sapiens
  source 1..20: mol_type = genomic DNA; note = Gene: HEPACAM; note = Location (start to end; relative to TSS): HEPACAM_27_57; note = Orientation (relative to transcription): sense; note = sgRNA Position: 124935996; note = Sequence Name: 56322-704_101_SL_seq_9654
cccaaaatgaagagagaaag

SEQ ID NO: 9655 - DNA, 20 bp, Homo sapiens
  source 1..20: mol_type = genomic DNA; note = Gene: HEPACAM; note = Location (start to end; relative to TSS): HEPACAM_73_103; note = Orientation (relative to transcription): antisense; note = sgRNA Position: 124935970; note = Sequence Name: 56322-704_101_SL_seq_9655
agcaaggcgcagggccctgg

SEQ ID NO: 9656 - DNA, 20 bp, Homo sapiens
  source 1..20: mol_type = genomic DNA; note = Gene: HEPACAM; note = Location (start to end; relative to TSS): HEPACAM_26_56; note = Orientation (relative to transcription): sense; note = sgRNA Position: 124935997; note = Sequence Name: 56322-704_101_SL_seq_9656
acccaaaatgaagagagaaa

SEQ ID NO: 9657 - DNA, 20 bp, Homo sapiens
  source 1..20: mol_type = genomic DNA; note = Gene: HEPACAM; note = Location (start to end; relative to TSS): HEPACAM_62_92; note = Orientation (relative to transcription): antisense; note = sgRNA Position: 124935981; note = Sequence Name: 56322-704_101_SL_seq_9657
gggccctggaggctctggac

SEQ ID NO: 9658 - DNA, 20 bp, Homo sapiens
  source 1..20: mol_type = genomic DNA; note = Gene: HEPACAM; note = Location (start to end; relative to TSS): HEPACAM_25_55; note = Orientation (relative to transcription): sense; note = sgRNA Position: 124935998; note = Sequence Name: 56322-704_101_SL_seq_9658
cacccaaaatgaagagagaa

SEQ ID NO: 9659 - DNA, 20 bp, Homo sapiens
  source 1..20: mol_type = genomic DNA; note = Gene: HEPACAM; note = Location (start to end; relative to TSS): HEPACAM_61_91; note = Orientation (relative to transcription): antisense; note = sgRNA Position: 124935982; note = Sequence Name: 56322-704_101_SL_seq_9659
ggccctggaggctctggaca

SEQ ID NO: 9660 - DNA, 20 bp, Homo sapiens
  source 1..20: mol_type = genomic DNA; note = Gene: HEPACAM2; note = Location (start to end; relative to TSS): HEPACAM2_48_78; note = Orientation (relative to transcription): antisense; note = sgRNA Position: 93226417; note = Sequence Name: 56322-704_101_SL_seq_9660
accccaagtgtgtcaccgaa

SEQ ID NO: 9661 - DNA, 20 bp, Homo sapiens
  source 1..20: mol_type = genomic DNA; note = Gene: HEPACAM2; note = Location (start to end; relative to TSS): HEPACAM2_109_139; note = Orientation (relative to transcription): antisense; note = sgRNA Position: 93226356; note = Sequence Name: 56322-704_101_SL_seq_9661
gctaaaacacaattcacaca

SEQ ID NO: 9662 - DNA, 20 bp, Homo sapiens
  source 1..20: mol_type = genomic DNA; note = Gene: HEPACAM2; note = Location (start to end; relative to TSS): HEPACAM2_24_54; note = Orientation (relative to transcription): sense; note = sgRNA Position: 93226421; note = Sequence Name: 56322-704_101_SL_seq_9662
gatgctttcatggagccctt

SEQ ID NO: 9663 - DNA, 20 bp, Homo sapiens
  source 1..20: mol_type = genomic DNA; note = Gene: HEPACAM2; note = Location (start to end; relative to TSS): HEPACAM2_92_122; note = Orientation (relative to transcription): antisense; note = sgRNA Position: 93226373; note = Sequence Name: 56322-704_101_SL_seq_9663
acagggccttaccgaagaga

SEQ ID NO: 9664 - DNA, 20 bp, Homo sapiens
  source 1..20: mol_type = genomic DNA; note = Gene: HEPACAM2; note = Location (start to end; relative to TSS): HEPACAM2_38_68; note = Orientation (relative to transcription): sense; note = sgRNA Position: 93226407; note = Sequence Name: 56322-704_101_SL_seq_9664
gcccttcggtgacacacttg

SEQ ID NO: 9665 - DNA, 20 bp, Homo sapiens
  source 1..20: mol_type = genomic DNA; note = Gene: HEPACAM2; note = Location (start to end; relative to TSS): HEPACAM2_89_119; note = Orientation (relative to transcription): antisense; note = sgRNA Position: 93226376; note = Sequence Name: 56322-704_101_SL_seq_9665
gggccttaccgaagagaagg

SEQ ID NO: 9666 - DNA, 20 bp, Homo sapiens
  source 1..20: mol_type = genomic DNA; note = Gene: HEPACAM2; note = Location (start to end; relative to TSS): HEPACAM2_37_67; note = Orientation (relative to transcription): sense; note = sgRNA Position: 93226408; note = Sequence Name: 56322-704_101_SL_seq_9666
agcccttcggtgacacactt

SEQ ID NO: 9667 - DNA, 20 bp, Homo sapiens
  source 1..20: mol_type = genomic DNA; note = Gene: HEPACAM2; note = Location (start to end; relative to TSS): HEPACAM2_77_107; note = Orientation (relative to transcription): sense; note = sgRNA Position: 93226368; note = Sequence Name: 56322-704_101_SL_seq_9667
atacctccttctcttcggta

SEQ ID NO: 9668 - DNA, 20 bp, Homo sapiens
  source 1..20: mol_type = genomic DNA; note = Gene: HEPACAM2; note = Location (start to end; relative to TSS): HEPACAM2_36_66; note = Orientation (relative to transcription): sense; note = sgRNA Position: 93226409; note = Sequence Name: 56322-704_101_SL_seq_9668
gagcccttcggtgacacact

SEQ ID NO: 9669 - DNA, 20 bp, Homo sapiens
  source 1..20: mol_type = genomic DNA; note = Gene: HEPACAM2; note = Location (start to end; relative to TSS): HEPACAM2_72_102; note = Orientation (relative to transcription): sense; note = sgRNA Position: 93226373; note = Sequence Name: 56322-704_101_SL_seq_9669
aaaatatacctccttctctt

SEQ ID NO: 9670 - DNA, 20 bp, Homo sapiens
  source 1..20: mol_type = genomic DNA; note = Gene: HFE; note = Location (start to end; relative to TSS): HFE_46_76; note = Orientation (relative to transcription): sense; note = sgRNA Position: 26087501; note = Sequence Name: 56322-704_101_SL_seq_9670
tgcagaccgcggtcctgcag

SEQ ID NO: 9671 - DNA, 20 bp, Homo sapiens
  source 1..20: mol_type = genomic DNA; note = Gene: HFE; note = Location (start to end; relative to TSS): HFE_87_117; note = Orientation (relative to transcription): sense; note = sgRNA Position: 26087542; note = Sequence Name: 56322-704_101_SL_seq_9671
gagggctgcgggcgaactag

SEQ ID NO: 9672 - DNA, 20 bp, Homo sapiens
  source 1..20: mol_type = genomic DNA; note = Gene: HFE; note = Location (start to end; relative to TSS): HFE_45_75; note = Orientation (relative to transcription): sense; note = sgRNA Position: 26087500; note = Sequence Name: 56322-704_101_SL_seq_9672
ttgcagaccgcggtcctgca

SEQ ID NO: 9673 - DNA, 20 bp, Homo sapiens
  source 1..20: mol_type = genomic DNA; note = Gene: HFE; note = Location (start to end; relative to TSS): HFE_86_116; note = Orientation (relative to transcription): sense; note = sgRNA Position: 26087541; note = Sequence Name: 56322-704_101_SL_seq_9673
cgagggctgcgggcgaacta

SEQ ID NO: 9674 - DNA, 20 bp, Homo sapiens
  source 1..20: mol_type = genomic DNA; note = Gene: HFE; note = Location (start to end; relative to TSS): HFE_41_71; note = Orientation (relative to transcription): antisense; note = sgRNA Position: 26087476; note = Sequence Name: 56322-704_101_SL_seq_9674
cggtctgcaaaagcatcagg

SEQ ID NO: 9675 - DNA, 20 bp, Homo sapiens
  source 1..20: mol_type = genomic DNA; note = Gene: HFE; note = Location (start to end; relative to TSS): HFE_76_106; note = Orientation (relative to transcription): sense; note = sgRNA Position: 26087531; note = Sequence Name: 56322-704_101_SL_seq_9675
tgcgtgagtccgagggctgc

SEQ ID NO: 9676 - DNA, 20 bp, Homo sapiens
  source 1..20: mol_type = genomic DNA; note = Gene: HFE; note = Location (start to end; relative to TSS): HFE_44_74; note = Orientation (relative to transcription): antisense; note = sgRNA Position: 26087479; note = Sequence Name: 56322-704_101_SL_seq_9676
ccgcggtctgcaaaagcatc

SEQ ID NO: 9677 - DNA, 20 bp, Homo sapiens
  source 1..20: mol_type = genomic DNA; note = Gene: HFE; note = Location (start to end; relative to TSS): HFE_75_105; note = Orientation (relative to transcription): sense; note = sgRNA Position: 26087530; note = Sequence Name: 56322-704_101_SL_seq_9677
ctgcgtgagtccgagggctg

SEQ ID NO: 9678 - DNA, 20 bp, Homo sapiens
  source 1..20: mol_type = genomic DNA; note = Gene: HFE; note = Location (start to end; relative to TSS): HFE_18_48; note = Orientation (relative to transcription): antisense; note = sgRNA Position: 26087453; note = Sequence Name: 56322-704_101_SL_seq_9678
agaagcgccggcctggctcg

SEQ ID NO: 9679 - DNA, 20 bp, Homo sapiens
  source 1..20: mol_type = genomic DNA; note = Gene: HFE; note = Location (start to end; relative to TSS): HFE_61_91; note = Orientation (relative to transcription): antisense; note = sgRNA Position: 26087496; note = Sequence Name: 56322-704_101_SL_seq_9679
caagcgcccctgcaggaccg

SEQ ID NO: 9680 - DNA, 20 bp, Homo sapiens
  source 1..20: mol_type = genomic DNA; note = Gene: HHLA2; note = Location (start to end; relative to TSS): HHLA2_66_96; note = Orientation (relative to transcription): sense; note = sgRNA Position: 108296640; note = Sequence Name: 56322-704_101_SL_seq_9680
ttatacctagaacttaaaag

SEQ ID NO: 9681 - DNA, 20 bp, Homo sapiens
  source 1..20: mol_type = genomic DNA; note = Gene: HHLA2; note = Location (start to end; relative to TSS): HHLA2_146_176; note = Orientation (relative to transcription): antisense; note = sgRNA Position: 108296700; note = Sequence Name: 56322-704_101_SL_seq_9681
agtcactaattttttcctaa

SEQ ID NO: 9682 - DNA, 20 bp, Homo sapiens
  source 1..20: mol_type = genomic DNA; note = Gene: HHLA2; note = Location (start to end; relative to TSS): HHLA2_67_97; note = Orientation (relative to transcription): sense; note = sgRNA Position: 108296641; note = Sequence Name: 56322-704_101_SL_seq_9682
tatacctagaacttaaaagt

SEQ ID NO: 9683 - DNA, 20 bp, Homo sapiens
  source 1..20: mol_type = genomic DNA; note = Gene: HHLA2; note = Location (start to end; relative to TSS): HHLA2_122_152; note = Orientation (relative to transcription): sense; note = sgRNA Position: 108296696; note = Sequence Name: 56322-704_101_SL_seq_9683
tgacactttattttcccgtt

SEQ ID NO: 9684 - DNA, 20 bp, Homo sapiens
  source 1..20: mol_type = genomic DNA; note = Gene: HHLA2; note = Location (start to end; relative to TSS): HHLA2_26_56; note = Orientation (relative to transcription): sense; note = sgRNA Position: 108296600; note = Sequence Name: 56322-704_101_SL_seq_9684
atgaatttctaagtaaggta

SEQ ID NO: 9685 - DNA, 20 bp, Homo sapiens
  source 1..20: mol_type = genomic DNA; note = Gene: HHLA2; note = Location (start to end; relative to TSS): HHLA2_88_118; note = Orientation (relative to transcription): sense; note = sgRNA Position: 108296662; note = Sequence Name: 56322-704_101_SL_seq_9685
ggcatgaataaatcaaatat

SEQ ID NO: 9686 - DNA, 20 bp, Homo sapiens
  source 1..20: mol_type = genomic DNA; note = Gene: HHLA2; note = Location (start to end; relative to TSS): HHLA2_21_51; note = Orientation (relative to transcription): sense; note = sgRNA Position: 108296595; note = Sequence Name: 56322-704_101_SL_seq_9686
acggtatgaatttctaagta

SEQ ID NO: 9687 - DNA, 20 bp, Homo sapiens
  source 1..20: mol_type = genomic DNA; note = Gene: HHLA2; note = Location (start to end; relative to TSS): HHLA2_67_97; note = Orientation (relative to transcription): sense; note = sgRNA Position: 108296641; note = Sequence Name: 56322-704_101_SL_seq_9687
tatacctagaacttaaaagt

SEQ ID NO: 9688 - DNA, 20 bp, Homo sapiens
  source 1..20: mol_type = genomic DNA; note = Gene: HHLA2; note = Location (start to end; relative to TSS): HHLA2_2_32; note = Orientation (relative to transcription): sense; note = sgRNA Position: 108296576; note = Sequence Name: 56322-704_101_SL_seq_9688
ctacttagcatttgactaga

SEQ ID NO: 9689 - DNA, 20 bp, Homo sapiens
  source 1..20: mol_type = genomic DNA; note = Gene: HHLA2; note = Location (start to end; relative to TSS): HHLA2_66_96; note = Orientation (relative to transcription): sense; note = sgRNA Position: 108296640; note = Sequence Name: 56322-704_101_SL_seq_9689
ttatacctagaacttaaaag

SEQ ID NO: 9690 - DNA, 20 bp, Homo sapiens
  source 1..20: mol_type = genomic DNA; note = Gene: HLA-A; note = Location (start to end; relative to TSS): HLA-A_35_65; note = Orientation (relative to transcription): sense; note = sgRNA Position: 29942593; note = Sequence Name: 56322-704_101_SL_seq_9690
ccctcctcctgctactctcg

SEQ ID NO: 9691 - DNA, 20 bp, Homo sapiens
  source 1..20: mol_type = genomic DNA; note = Gene: HLA-A; note = Location (start to end; relative to TSS): HLA-A_73_103; note = Orientation (relative to transcription): sense; note = sgRNA Position: 29942631; note = Sequence Name: 56322-704_101_SL_seq_9691
cagacctgggcgggtgagtg

SEQ ID NO: 9692 - DNA, 20 bp, Homo sapiens
  source 1..20: mol_type = genomic DNA; note = Gene: HLA-A; note = Location (start to end; relative to TSS): HLA-A_36_66; note = Orientation (relative to transcription): sense; note = sgRNA Position: 29942594; note = Sequence Name: 56322-704_101_SL_seq_9692
cctcctcctgctactctcgg

SEQ ID NO: 9693 - DNA, 20 bp, Homo sapiens
  source 1..20: mol_type = genomic DNA; note = Gene: HLA-A; note = Location (start to end; relative to TSS): HLA-A_68_98; note = Orientation (relative to transcription): antisense; note = sgRNA Position: 29942606; note = Sequence Name: 56322-704_101_SL_seq_9693
ccaggtctgggtcagggcca

SEQ ID NO: 9694 - DNA, 20 bp, Homo sapiens
  source 1..20: mol_type = genomic DNA; note = Gene: HLA-A; note = Location (start to end; relative to TSS): HLA-A_34_64; note = Orientation (relative to transcription): sense; note = sgRNA Position: 29942592; note = Sequence Name: 56322-704_101_SL_seq_9694
accctcctcctgctactctc

SEQ ID NO: 9695 - DNA, 20 bp, Homo sapiens
  source 1..20: mol_type = genomic DNA; note = Gene: HLA-A; note = Location (start to end; relative to TSS): HLA-A_64_94; note = Orientation (relative to transcription): sense; note = sgRNA Position: 29942622; note = Sequence Name: 56322-704_101_SL_seq_9695
gccctgacccagacctgggc

SEQ ID NO: 9696 - DNA, 20 bp, Homo sapiens
  source 1..20: mol_type = genomic DNA; note = Gene: HLA-A; note = Location (start to end; relative to TSS): HLA-A_33_63; note = Orientation (relative to transcription): sense; note = sgRNA Position: 29942591; note = Sequence Name: 56322-704_101_SL_seq_9696
aaccctcctcctgctactct

SEQ ID NO: 9697 - DNA, 20 bp, Homo sapiens
  source 1..20: mol_type = genomic DNA; note = Gene: HLA-A; note = Location (start to end; relative to TSS): HLA-A_63_93; note = Orientation (relative to transcription): sense; note = sgRNA Position: 29942621; note = Sequence Name: 56322-704_101_SL_seq_9697
ggccctgacccagacctggg

SEQ ID NO: 9698 - DNA, 20 bp, Homo sapiens
  source 1..20: mol_type = genomic DNA; note = Gene: HLA-A; note = Location (start to end; relative to TSS): HLA-A_26_56; note = Orientation (relative to transcription): antisense; note = sgRNA Position: 29942564; note = Sequence Name: 56322-704_101_SL_seq_9698
gagggttcggggcgccatga

SEQ ID NO: 9699 - DNA, 20 bp, Homo sapiens
  source 1..20: mol_type = genomic DNA; note = Gene: HLA-A; note = Location (start to end; relative to TSS): HLA-A_59_89; note = Orientation (relative to transcription): sense; note = sgRNA Position: 29942617; note = Sequence Name: 56322-704_101_SL_seq_9699
ccctggccctgacccagacc

SEQ ID NO: 9700 - DNA, 20 bp, Homo sapiens
  source 1..20: mol_type = genomic DNA; note = Gene: HLA-B; note = Location (start to end; relative to TSS): HLA-B_39_69; note = Orientation (relative to transcription): antisense; note = sgRNA Position: 31357136; note = Sequence Name: 56322-704_101_SL_seq_9700
agagcagcaggaggacggtt

SEQ ID NO: 9701 - DNA, 20 bp, Homo sapiens
  source 1..20: mol_type = genomic DNA; note = Gene: HLA-B; note = Location (start to end; relative to TSS): HLA-B_74_104; note = Orientation (relative to transcription): antisense; note = sgRNA Position: 31357101; note = Sequence Name: 56322-704_101_SL_seq_9701
accggcccaggtctcggtca

SEQ ID NO: 9702 - DNA, 20 bp, Homo sapiens
  source 1..20: mol_type = genomic DNA; note = Gene: HLA-B; note = Location (start to end; relative to TSS): HLA-B_37_67; note = Orientation (relative to transcription): antisense; note = sgRNA Position: 31357138; note = Sequence Name: 56322-704_101_SL_seq_9702
agcagcaggaggacggttcg

SEQ ID NO: 9703 - DNA, 20 bp, Homo sapiens
  source 1..20: mol_type = genomic DNA; note = Gene: HLA-B; note = Location (start to end; relative to TSS): HLA-B_73_103; note = Orientation (relative to transcription): sense; note = sgRNA Position: 31357082; note = Sequence Name: 56322-704_101_SL_seq_9703
gagacctgggccggtgagtg

SEQ ID NO: 9704 - DNA, 20 bp, Homo sapiens
  source 1..20: mol_type = genomic DNA; note = Gene: HLA-B; note = Location (start to end; relative to TSS): HLA-B_38_68; note = Orientation (relative to transcription): antisense; note = sgRNA Position: 31357137; note = Sequence Name: 56322-704_101_SL_seq_9704
gagcagcaggaggacggttc

SEQ ID NO: 9705 - DNA, 20 bp, Homo sapiens
  source 1..20: mol_type = genomic DNA; note = Gene: HLA-B; note = Location (start to end; relative to TSS): HLA-B_69_99; note = Orientation (relative to transcription): antisense; note = sgRNA Position: 31357106; note = Sequence Name: 56322-704_101_SL_seq_9705
cccaggtctcggtcagggcc

SEQ ID NO: 9706 - DNA, 20 bp, Homo sapiens
  source 1..20: mol_type = genomic DNA; note = Gene: HLA-B; note = Location (start to end; relative to TSS): HLA-B_36_66; note = Orientation (relative to transcription): sense; note = sgRNA Position: 31357119; note = Sequence Name: 56322-704_101_SL_seq_9706
cgtcctcctgctgctctcgg

SEQ ID NO: 9707 - DNA, 20 bp, Homo sapiens
  source 1..20: mol_type = genomic DNA; note = Gene: HLA-B; note = Location (start to end; relative to TSS): HLA-B_68_98; note = Orientation (relative to transcription): antisense; note = sgRNA Position: 31357107; note = Sequence Name: 56322-704_101_SL_seq_9707
ccaggtctcggtcagggcca

SEQ ID NO: 9708 - DNA, 20 bp, Homo sapiens
  source 1..20: mol_type = genomic DNA; note = Gene: HLA-B; note = Location (start to end; relative to TSS): HLA-B_33_63; note = Orientation (relative to transcription): sense; note = sgRNA Position: 31357122; note = Sequence Name: 56322-704_101_SL_seq_9708
aaccgtcctcctgctgctct

SEQ ID NO: 9709 - DNA, 20 bp, Homo sapiens
  source 1..20: mol_type = genomic DNA; note = Gene: HLA-B; note = Location (start to end; relative to TSS): HLA-B_64_94; note = Orientation (relative to transcription): sense; note = sgRNA Position: 31357091; note = Sequence Name: 56322-704_101_SL_seq_9709
gccctgaccgagacctgggc

SEQ ID NO: 9710 - DNA, 20 bp, Homo sapiens
  source 1..20: mol_type = genomic DNA; note = Gene: HLA-C; note = Location (start to end; relative to TSS): HLA-C_33_63; note = Orientation (relative to transcription): sense; note = sgRNA Position: 31272035; note = Sequence Name: 56322-704_101_SL_seq_9710
agccctcctcctgctgctct

SEQ ID NO: 9711 - DNA, 20 bp, Homo sapiens
  source 1..20: mol_type = genomic DNA; note = Gene: HLA-C; note = Location (start to end; relative to TSS): HLA-C_80_110; note = Orientation (relative to transcription): antisense; note = sgRNA Position: 31272008; note = Sequence Name: 56322-704_101_SL_seq_9711
gcactcacaggcccaggtct

SEQ ID NO: 9712 - DNA, 20 bp, Homo sapiens
  source 1..20: mol_type = genomic DNA; note = Gene: HLA-C; note = Location (start to end; relative to TSS): HLA-C_34_64; note = Orientation (relative to transcription): sense; note = sgRNA Position: 31272034; note = Sequence Name: 56322-704_101_SL_seq_9712
gccctcctcctgctgctctc

SEQ ID NO: 9713 - DNA, 20 bp, Homo sapiens
  source 1..20: mol_type = genomic DNA; note = Gene: HLA-C; note = Location (start to end; relative to TSS): HLA-C_75_105; note = Orientation (relative to transcription): sense; note = sgRNA Position: 31271993; note = Sequence Name: 56322-704_101_SL_seq_9713
gacctgggcctgtgagtgcg

SEQ ID NO: 9714 - DNA, 20 bp, Homo sapiens
  source 1..20: mol_type = genomic DNA; note = Gene: HLA-C; note = Location (start to end; relative to TSS): HLA-C_37_67; note = Orientation (relative to transcription): sense; note = sgRNA Position: 31272031; note = Sequence Name: 56322-704_101_SL_seq_9714
ctcctcctgctgctctcggg

SEQ ID NO: 9715 - DNA, 20 bp, Homo sapiens
  source 1..20: mol_type = genomic DNA; note = Gene: HLA-C; note = Location (start to end; relative to TSS): HLA-C_74_104; note = Orientation (relative to transcription): antisense; note = sgRNA Position: 31272014; note = Sequence Name: 56322-704_101_SL_seq_9715
acaggcccaggtctcggtca

SEQ ID NO: 9716 - DNA, 20 bp, Homo sapiens
  source 1..20: mol_type = genomic DNA; note = Gene: HLA-C; note = Location (start to end; relative to TSS): HLA-C_38_68; note = Orientation (relative to transcription): antisense; note = sgRNA Position: 31272050; note = Sequence Name: 56322-704_101_SL_seq_9716
gagcagcaggaggagggctc

SEQ ID NO: 9717 - DNA, 20 bp, Homo sapiens
  source 1..20: mol_type = genomic DNA; note = Gene: HLA-C; note = Location (start to end; relative to TSS): HLA-C_73_103; note = Orientation (relative to transcription): sense; note = sgRNA Position: 31271995; note = Sequence Name: 56322-704_101_SL_seq_9717
gagacctgggcctgtgagtg

SEQ ID NO: 9718 - DNA, 20 bp, Homo sapiens
  source 1..20: mol_type = genomic DNA; note = Gene: HLA-C; note = Location (start to end; relative to TSS): HLA-C_39_69; note = Orientation (relative to transcription): antisense; note = sgRNA Position: 31272049; note = Sequence Name: 56322-704_101_SL_seq_9718
agagcagcaggaggagggct

SEQ ID NO: 9719 - DNA, 20 bp, Homo sapiens
  source 1..20: mol_type = genomic DNA; note = Gene: HLA-C; note = Location (start to end; relative to TSS): HLA-C_69_99; note = Orientation (relative to transcription): antisense; note = sgRNA Position: 31272019; note = Sequence Name: 56322-704_101_SL_seq_9719
cccaggtctcggtcagggcc

SEQ ID NO: 9720 - DNA, 20 bp, Homo sapiens
  source 1..20: mol_type = genomic DNA; note = Gene: HLA-DMA; note = Location (start to end; relative to TSS): HLA-DMA_29_59; note = Orientation (relative to transcription): sense; note = sgRNA Position: 32953044; note = Sequence Name: 56322-704_101_SL_seq_9720
ctacctactgtgtggcaaga

SEQ ID NO: 9721 - DNA, 20 bp, Homo sapiens
  source 1..20: mol_type = genomic DNA; note = Gene: HLA-DMA; note = Location (start to end; relative to TSS): HLA-DMA_107_137; note = Orientation (relative to transcription): antisense; note = sgRNA Position: 32952986; note = Sequence Name: 56322-704_101_SL_seq_9721
tggggtagcagccacagaag

SEQ ID NO: 9722 - DNA, 20 bp, Homo sapiens
  source 1..20: mol_type = genomic DNA; note = Gene: HLA-DMA; note = Location (start to end; relative to TSS): HLA-DMA_34_64; note = Orientation (relative to transcription): sense; note = sgRNA Position: 32953039; note = Sequence Name: 56322-704_101_SL_seq_9722
tactgtgtggcaagaaggta

SEQ ID NO: 9723 - DNA, 20 bp, Homo sapiens
  source 1..20: mol_type = genomic DNA; note = Gene: HLA-DMA; note = Location (start to end; relative to TSS): HLA-DMA_106_136; note = Orientation (relative to transcription): sense; note = sgRNA Position: 32952967; note = Sequence Name: 56322-704_101_SL_seq_9723
gtggctgctaccccactcct

SEQ ID NO: 9724 - DNA, 20 bp, Homo sapiens
  source 1..20: mol_type = genomic DNA; note = Gene: HLA-DMA; note = Location (start to end; relative to TSS): HLA-DMA_35_65; note = Orientation (relative to transcription): sense; note = sgRNA Position: 32953038; note = Sequence Name: 56322-704_101_SL_seq_9724
actgtgtggcaagaaggtat

SEQ ID NO: 9725 - DNA, 20 bp, Homo sapiens
  source 1..20: mol_type = genomic DNA; note = Gene: HLA-DMA; note = Location (start to end; relative to TSS): HLA-DMA_87_117; note = Orientation (relative to transcription): sense; note = sgRNA Position: 32952986; note = Sequence Name: 56322-704_101_SL_seq_9725
tacagatgttaccacttctg

SEQ ID NO: 9726 - DNA, 20 bp, Homo sapiens
  source 1..20: mol_type = genomic DNA; note = Gene: HLA-DMA; note = Location (start to end; relative to TSS): HLA-DMA_37_67; note = Orientation (relative to transcription): antisense; note = sgRNA Position: 32953056; note = Sequence Name: 56322-704_101_SL_seq_9726
cttcttgccacacagtaggt

SEQ ID NO: 9727 - DNA, 20 bp, Homo sapiens
  source 1..20: mol_type = genomic DNA; note = Gene: HLA-DMA; note = Location (start to end; relative to TSS): HLA-DMA_79_109; note = Orientation (relative to transcription): antisense; note = sgRNA Position: 32953014; note = Sequence Name: 56322-704_101_SL_seq_9727
tctgtagcagcgcagctcct

SEQ ID NO: 9728 - DNA, 20 bp, Homo sapiens
  source 1..20: mol_type = genomic DNA; note = Gene: HLA-DMA; note = Location (start to end; relative to TSS): HLA-DMA_21_51; note = Orientation (relative to transcription): sense; note = sgRNA Position: 32953052; note = Sequence Name: 56322-704_101_SL_seq_9728
ggtagctcctacctactgtg

SEQ ID NO: 9729 - DNA, 20 bp, Homo sapiens
  source 1..20: mol_type = genomic DNA; note = Gene: HLA-DMA; note = Location (start to end; relative to TSS): HLA-DMA_53_83; note = Orientation (relative to transcription): sense; note = sgRNA Position: 32953020; note = Sequence Name: 56322-704_101_SL_seq_9729
atgggtcatgaacagaacca

SEQ ID NO: 9730 - DNA, 20 bp, Homo sapiens
  source 1..20: mol_type = genomic DNA; note = Gene: HLA-DMB; note = Location (start to end; relative to TSS): HLA-DMB_43_73; note = Orientation (relative to transcription): sense; note = sgRNA Position: 32940961; note = Sequence Name: 56322-704_101_SL_seq_9730
atccccacatcactcatttg

SEQ ID NO: 9731 - DNA, 20 bp, Homo sapiens
  source 1..20: mol_type = genomic DNA; note = Gene: HLA-DMB; note = Location (start to end; relative to TSS): HLA-DMB_102_132; note = Orientation (relative to transcription): sense; note = sgRNA Position: 32940902; note = Sequence Name: 56322-704_101_SL_seq_9731
tgtctggagatcatctaccc

SEQ ID NO: 9732 - DNA, 20 bp, Homo sapiens
  source 1..20: mol_type = genomic DNA; note = Gene: HLA-DMB; note = Location (start to end; relative to TSS): HLA-DMB_44_74; note = Orientation (relative to transcription): sense; note = sgRNA Position: 32940960; note = Sequence Name: 56322-704_101_SL_seq_9732
tccccacatcactcatttgg

SEQ ID NO: 9733 - DNA, 20 bp, Homo sapiens
  source 1..20: mol_type = genomic DNA; note = Gene: HLA-DMB; note = Location (start to end; relative to TSS): HLA-DMB_86_116; note = Orientation (relative to transcription): antisense; note = sgRNA Position: 32940938; note = Sequence Name: 56322-704_101_SL_seq_9733
gagcagaatactatattgcc

SEQ ID NO: 9734 - DNA, 20 bp, Homo sapiens
  source 1..20: mol_type = genomic DNA; note = Gene: HLA-DMB; note = Location (start to end; relative to TSS): HLA-DMB_45_75; note = Orientation (relative to transcription): sense; note = sgRNA Position: 32940959; note = Sequence Name: 56322-704_101_SL_seq_9734
ccccacatcactcatttggg

SEQ ID NO: 9735 - DNA, 20 bp, Homo sapiens
  source 1..20: mol_type = genomic DNA; note = Gene: HLA-DMB; note = Location (start to end; relative to TSS): HLA-DMB_85_115; note = Orientation (relative to transcription): antisense; note = sgRNA Position: 32940939; note = Sequence Name: 56322-704_101_SL_seq_9735
agcagaatactatattgccc

SEQ ID NO: 9736 - DNA, 20 bp, Homo sapiens
  source 1..20: mol_type = genomic DNA; note = Gene: HLA-DMB; note = Location (start to end; relative to TSS): HLA-DMB_19_49; note = Orientation (relative to transcription): sense; note = sgRNA Position: 32940985; note = Sequence Name: 56322-704_101_SL_seq_9736
agatttaatatctaggggct

SEQ ID NO: 9737 - DNA, 20 bp, Homo sapiens
  source 1..20: mol_type = genomic DNA; note = Gene: HLA-DMB; note = Location (start to end; relative to TSS): HLA-DMB_52_82; note = Orientation (relative to transcription): sense; note = sgRNA Position: 32940952; note = Sequence Name: 56322-704_101_SL_seq_9737
tcactcatttggggggtcaa

SEQ ID NO: 9738 - DNA, 20 bp, Homo sapiens
  source 1..20: mol_type = genomic DNA; note = Gene: HLA-DMB; note = Location (start to end; relative to TSS): HLA-DMB_18_48; note = Orientation (relative to transcription): sense; note = sgRNA Position: 32940986; note = Sequence Name: 56322-704_101_SL_seq_9738
cagatttaatatctaggggc

SEQ ID NO: 9739 - DNA, 20 bp, Homo sapiens
  source 1..20: mol_type = genomic DNA; note = Gene: HLA-DMB; note = Location (start to end; relative to TSS): HLA-DMB_51_81; note = Orientation (relative to transcription): sense; note = sgRNA Position: 32940953; note = Sequence Name: 56322-704_101_SL_seq_9739
atcactcatttggggggtca

SEQ ID NO: 9740 - DNA, 20 bp, Homo sapiens
  source 1..20: mol_type = genomic DNA; note = Gene: HLA-DOA; note = Location (start to end; relative to TSS): HLA-DOA_60_90; note = Orientation (relative to transcription): antisense; note = sgRNA Position: 33009527; note = Sequence Name: 56322-704_101_SL_seq_9740
caggaccagccctgctctga

SEQ ID NO: 9741 - DNA, 20 bp, Homo sapiens
  source 1..20: mol_type = genomic DNA; note = Gene: HLA-DOA; note = Location (start to end; relative to TSS): HLA-DOA_93_123; note = Orientation (relative to transcription): antisense; note = sgRNA Position: 33009494; note = Sequence Name: 56322-704_101_SL_seq_9741
cgggctcaggagggtcatca

SEQ ID NO: 9742 - DNA, 20 bp, Homo sapiens
  source 1..20: mol_type = genomic DNA; note = Gene: HLA-DOA; note = Location (start to end; relative to TSS): HLA-DOA_61_91; note = Orientation (relative to transcription): antisense; note = sgRNA Position: 33009526; note = Sequence Name: 56322-704_101_SL_seq_9742
ccaggaccagccctgctctg

SEQ ID NO: 9743 - DNA, 20 bp, Homo sapiens
  source 1..20: mol_type = genomic DNA; note = Gene: HLA-DOA; note = Location (start to end; relative to TSS): HLA-DOA_91_121; note = Orientation (relative to transcription): sense; note = sgRNA Position: 33009476; note = Sequence Name: 56322-704_101_SL_seq_9743
gaccctcctgagcccgcagg

SEQ ID NO: 9744 - DNA, 20 bp, Homo sapiens
  source 1..20: mol_type = genomic DNA; note = Gene: HLA-DOA; note = Location (start to end; relative to TSS): HLA-DOA_14_44; note = Orientation (relative to transcription): antisense; note = sgRNA Position: 33009573; note = Sequence Name: 56322-704_101_SL_seq_9744
caaatcagtctcagtccgtg

SEQ ID NO: 9745 - DNA, 20 bp, Homo sapiens
  source 1..20: mol_type = genomic DNA; note = Gene: HLA-DOA; note = Location (start to end; relative to TSS): HLA-DOA_61_91; note = Orientation (relative to transcription): antisense; note = sgRNA Position: 33009526; note = Sequence Name: 56322-704_101_SL_seq_9745
ccaggaccagccctgctctg

SEQ ID NO: 9746 - DNA, 20 bp, Homo sapiens
  source 1..20: mol_type = genomic DNA; note = Gene: HLA-DOA; note = Location (start to end; relative to TSS): HLA-DOA_9_39; note = Orientation (relative to transcription): antisense; note = sgRNA Position: 33009578; note = Sequence Name: 56322-704_101_SL_seq_9746
cagtctcagtccgtgtggtg

SEQ ID NO: 9747 - DNA, 20 bp, Homo sapiens
  source 1..20: mol_type = genomic DNA; note = Gene: HLA-DOA; note = Location (start to end; relative to TSS): HLA-DOA_60_90; note = Orientation (relative to transcription): antisense; note = sgRNA Position: 33009527; note = Sequence Name: 56322-704_101_SL_seq_9747
caggaccagccctgctctga

SEQ ID NO: 9748 - DNA, 20 bp, Homo sapiens
  source 1..20: mol_type = genomic DNA; note = Gene: HLA-DOA; note = Location (start to end; relative to TSS): HLA-DOA_4_34; note = Orientation (relative to transcription): antisense; note = sgRNA Position: 33009583; note = Sequence Name: 56322-704_101_SL_seq_9748
tcagtccgtgtggtgaggac

SEQ ID NO: 9749 - DNA, 20 bp, Homo sapiens
  source 1..20: mol_type = genomic DNA; note = Gene: HLA-DOA; note = Location (start to end; relative to TSS): HLA-DOA_46_76; note = Orientation (relative to transcription): antisense; note = sgRNA Position: 33009541; note = Sequence Name: 56322-704_101_SL_seq_9749
ctctgagggccattacactc

SEQ ID NO: 9750 - DNA, 20 bp, Homo sapiens
  source 1..20: mol_type = genomic DNA; note = Gene: HLA-DOB; note = Location (start to end; relative to TSS): HLA-DOB_24_54; note = Orientation (relative to transcription): sense; note = sgRNA Position: 32816954; note = Sequence Name: 56322-704_101_SL_seq_9750
tttttttcctttctccagaa

SEQ ID NO: 9751 - DNA, 20 bp, Homo sapiens
  source 1..20: mol_type = genomic DNA; note = Gene: HLA-DOB; note = Location (start to end; relative to TSS): HLA-DOB_112_142; note = Orientation (relative to transcription): sense; note = sgRNA Position: 32816866; note = Sequence Name: 56322-704_101_SL_seq_9751
actcaaggcacagactctcc

SEQ ID NO: 9752 - DNA, 20 bp, Homo sapiens
  source 1..20: mol_type = genomic DNA; note = Gene: HLA-DOB; note = Location (start to end; relative to TSS): HLA-DOB_36_66; note = Orientation (relative to transcription): sense; note = sgRNA Position: 32816942; note = Sequence Name: 56322-704_101_SL_seq_9752
ctccagaatgggttctgggt

SEQ ID NO: 9753 - DNA, 20 bp, Homo sapiens
  source 1..20: mol_type = genomic DNA; note = Gene: HLA-DOB; note = Location (start to end; relative to TSS): HLA-DOB_102_132; note = Orientation (relative to transcription): antisense; note = sgRNA Position: 32816896; note = Sequence Name: 56322-704_101_SL_seq_9753
gagtcatggaggaatccagt

SEQ ID NO: 9754 - DNA, 20 bp, Homo sapiens
  source 1..20: mol_type = genomic DNA; note = Gene: HLA-DOB; note = Location (start to end; relative to TSS): HLA-DOB_40_70; note = Orientation (relative to transcription): antisense; note = sgRNA Position: 32816958; note = Sequence Name: 56322-704_101_SL_seq_9754
ccagaacccattctggagaa

SEQ ID NO: 9755 - DNA, 20 bp, Homo sapiens
  source 1..20: mol_type = genomic DNA; note = Gene: HLA-DOB; note = Location (start to end; relative to TSS): HLA-DOB_101_131; note = Orientation (relative to transcription): antisense; note = sgRNA Position: 32816897; note = Sequence Name: 56322-704_101_SL_seq_9755
agtcatggaggaatccagtc

SEQ ID NO: 9756 - DNA, 20 bp, Homo sapiens
  source 1..20: mol_type = genomic DNA; note = Gene: HLA-DOB; note = Location (start to end; relative to TSS): HLA-DOB_47_77; note = Orientation (relative to transcription): antisense; note = sgRNA Position: 32816951; note = Sequence Name: 56322-704_101_SL_seq_9756
gacccacccagaacccattc

SEQ ID NO: 9757 - DNA, 20 bp, Homo sapiens
  source 1..20: mol_type = genomic DNA; note = Gene: HLA-DOB; note = Location (start to end; relative to TSS): HLA-DOB_97_127; note = Orientation (relative to transcription): sense; note = sgRNA Position: 32816881; note = Sequence Name: 56322-704_101_SL_seq_9757
ctggattcctccatgactca

SEQ ID NO: 9758 - DNA, 20 bp, Homo sapiens
  source 1..20: mol_type = genomic DNA; note = Gene: HLA-DOB; note = Location (start to end; relative to TSS): HLA-DOB_45_75; note = Orientation (relative to transcription): sense; note = sgRNA Position: 32816933; note = Sequence Name: 56322-704_101_SL_seq_9758
gggttctgggtgggtcccct

SEQ ID NO: 9759 - DNA, 20 bp, Homo sapiens
  source 1..20: mol_type = genomic DNA; note = Gene: HLA-DOB; note = Location (start to end; relative to TSS): HLA-DOB_78_108; note = Orientation (relative to transcription): sense; note = sgRNA Position: 32816900; note = Sequence Name: 56322-704_101_SL_seq_9759
gctagtgaatctgacccgac

SEQ ID NO: 9760 - DNA, 20 bp, Homo sapiens
  source 1..20: mol_type = genomic DNA; note = Gene: HLA-DPA1; note = Location (start to end; relative to TSS): HLA-DPA1_32_62; note = Orientation (relative to transcription): antisense; note = sgRNA Position: 33073601; note = Sequence Name: 56322-704_101_SL_seq_9760
taattgatgactgtgagcac

SEQ ID NO: 9761 - DNA, 20 bp, Homo sapiens
  source 1..20: mol_type = genomic DNA; note = Gene: HLA-DPA1; note = Location (start to end; relative to TSS): HLA-DPA1_118_148; note = Orientation (relative to transcription): antisense; note = sgRNA Position: 33073515; note = Sequence Name: 56322-704_101_SL_seq_9761
tcagcaggaaagccaaggag

SEQ ID NO: 9762 - DNA, 20 bp, Homo sapiens
  source 1..20: mol_type = genomic DNA; note = Gene: HLA-DPA1; note = Location (start to end; relative to TSS): HLA-DPA1_59_89; note = Orientation (relative to transcription): antisense; note = sgRNA Position: 33073574; note = Sequence Name: 56322-704_101_SL_seq_9762
tcttcagggcgcatgttgtg

SEQ ID NO: 9763 - DNA, 20 bp, Homo sapiens
  source 1..20: mol_type = genomic DNA; note = Gene: HLA-DPA1; note = Location (start to end; relative to TSS): HLA-DPA1_117_147; note = Orientation (relative to transcription): antisense; note = sgRNA Position: 33073516; note = Sequence Name: 56322-704_101_SL_seq_9763
cagcaggaaagccaaggaga

SEQ ID NO: 9764 - DNA, 20 bp, Homo sapiens
  source 1..20: mol_type = genomic DNA; note = Gene: HLA-DPA1; note = Location (start to end; relative to TSS): HLA-DPA1_19_49; note = Orientation (relative to transcription): antisense; note = sgRNA Position: 33073614; note = Sequence Name: 56322-704_101_SL_seq_9764
tgagcacaggaacagtgatg

SEQ ID NO: 9765 - DNA, 20 bp, Homo sapiens
  source 1..20: mol_type = genomic DNA; note = Gene: HLA-DPA1; note = Location (start to end; relative to TSS): HLA-DPA1_97_127; note = Orientation (relative to transcription): sense; note = sgRNA Position: 33073516; note = Sequence Name: 56322-704_101_SL_seq_9765
gatcttgagagccctctcct

SEQ ID NO: 9766 - DNA, 20 bp, Homo sapiens
  source 1..20: mol_type = genomic DNA; note = Gene: HLA-DPA1; note = Location (start to end; relative to TSS): HLA-DPA1_11_41; note = Orientation (relative to transcription): antisense; note = sgRNA Position: 33073622; note = Sequence Name: 56322-704_101_SL_seq_9766
ggaacagtgatgaggaactg

SEQ ID NO: 9767 - DNA, 20 bp, Homo sapiens
  source 1..20: mol_type = genomic DNA; note = Gene: HLA-DPA1; note = Location (start to end; relative to TSS): HLA-DPA1_91_121; note = Orientation (relative to transcription): antisense; note = sgRNA Position: 33073542; note = Sequence Name: 56322-704_101_SL_seq_9767
tcaagatcacagctctgata

SEQ ID NO: 9768 - DNA, 20 bp, Homo sapiens
  source 1..20: mol_type = genomic DNA; note = Gene: HLA-DPA1; note = Location (start to end; relative to TSS): HLA-DPA1_3_33; note = Orientation (relative to transcription): antisense; note = sgRNA Position: 33073630; note = Sequence Name: 56322-704_101_SL_seq_9768
gatgaggaactgaggccgag

SEQ ID NO: 9769 - DNA, 20 bp, Homo sapiens
  source 1..20: mol_type = genomic DNA; note = Gene: HLA-DPA1; note = Location (start to end; relative to TSS): HLA-DPA1_59_89; note = Orientation (relative to transcription): antisense; note = sgRNA Position: 33073574; note = Sequence Name: 56322-704_101_SL_seq_9769
tcttcagggcgcatgttgtg

SEQ ID NO: 9770 - DNA, 20 bp, Homo sapiens
  source 1..20: mol_type = genomic DNA; note = Gene: HLA-DPB1; note = Location (start to end; relative to TSS): HLA-DPB1_44_74; note = Orientation (relative to transcription): antisense; note = sgRNA Position: 33076040; note = Sequence Name: 56322-704_101_SL_seq_9770
ctgcagaaccatcatggagc

SEQ ID NO: 9771 - DNA, 20 bp, Homo sapiens
  source 1..20: mol_type = genomic DNA; note = Gene: HLA-DPB1; note = Location (start to end; relative to TSS): HLA-DPB1_105_135; note = Orientation (relative to transcription): sense; note = sgRNA Position: 33076121; note = Sequence Name: 56322-704_101_SL_seq_9771
gctgctcacatctgtggtcc

SEQ ID NO: 9772 - DNA, 20 bp, Homo sapiens
  source 1..20: mol_type = genomic DNA; note = Gene: HLA-DPB1; note = Location (start to end; relative to TSS): HLA-DPB1_38_68; note = Orientation (relative to transcription): antisense; note = sgRNA Position: 33076034; note = Sequence Name: 56322-704_101_SL_seq_9772
aaccatcatggagctggaaa

SEQ ID NO: 9773 - DNA, 20 bp, Homo sapiens
  source 1..20: mol_type = genomic DNA; note = Gene: HLA-DPB1; note = Location (start to end; relative to TSS): HLA-DPB1_99_129; note = Orientation (relative to transcription): sense; note = sgRNA Position: 33076115; note = Sequence Name: 56322-704_101_SL_seq_9773
gatggtgctgctcacatctg

SEQ ID NO: 9774 - DNA, 20 bp, Homo sapiens
  source 1..20: mol_type = genomic DNA; note = Gene: HLA-DPB1; note = Location (start to end; relative to TSS): HLA-DPB1_34_64; note = Orientation (relative to transcription): antisense; note = sgRNA Position: 33076030; note = Sequence Name: 56322-704_101_SL_seq_9774
atcatggagctggaaaagga

SEQ ID NO: 9775 - DNA, 20 bp, Homo sapiens
  source 1..20: mol_type = genomic DNA; note = Gene: HLA-DPB1; note = Location (start to end; relative to TSS): HLA-DPB1_81_111; note = Orientation (relative to transcription): sense; note = sgRNA Position: 33076097; note = Sequence Name: 56322-704_101_SL_seq_9775
ggctctgacggcgttactga

SEQ ID NO: 9776 - DNA, 20 bp, Homo sapiens
  source 1..20: mol_type = genomic DNA; note = Gene: HLA-DPB1; note = Location (start to end; relative to TSS): HLA-DPB1_36_66; note = Orientation (relative to transcription): sense; note = sgRNA Position: 33076052; note = Sequence Name: 56322-704_101_SL_seq_9776
cagctccatgatggttctgc

SEQ ID NO: 9777 - DNA, 20 bp, Homo sapiens
  source 1..20: mol_type = genomic DNA; note = Gene: HLA-DPB1; note = Location (start to end; relative to TSS): HLA-DPB1_69_99; note = Orientation (relative to transcription): sense; note = sgRNA Position: 33076085; note = Sequence Name: 56322-704_101_SL_seq_9777
cccccggacagtggctctga

SEQ ID NO: 9778 - DNA, 20 bp, Homo sapiens
  source 1..20: mol_type = genomic DNA; note = Gene: HLA-DPB1; note = Location (start to end; relative to TSS): HLA-DPB1_27_57; note = Orientation (relative to transcription): sense; note = sgRNA Position: 33076043; note = Sequence Name: 56322-704_101_SL_seq_9778
atccttttccagctccatga

SEQ ID NO: 9779 - DNA, 20 bp, Homo sapiens
  source 1..20: mol_type = genomic DNA; note = Gene: HLA-DPB1; note = Location (start to end; relative to TSS): HLA-DPB1_60_90; note = Orientation (relative to transcription): sense; note = sgRNA Position: 33076076; note = Sequence Name: 56322-704_101_SL_seq_9779
ttctgcggccccccggacag

SEQ ID NO: 9780 - DNA, 20 bp, Homo sapiens
  source 1..20: mol_type = genomic DNA; note = Gene: HLA-DQA1; note = Location (start to end; relative to TSS): HLA-DQA1_24_54; note = Orientation (relative to transcription): antisense; note = sgRNA Position: 32637436; note = Sequence Name: 56322-704_101_SL_seq_9780
cccaaggcagcctcagcagt

SEQ ID NO: 9781 - DNA, 20 bp, Homo sapiens
  source 1..20: mol_type = genomic DNA; note = Gene: HLA-DQA1; note = Location (start to end; relative to TSS): HLA-DQA1_96_126; note = Orientation (relative to transcription): antisense; note = sgRNA Position: 32637508; note = Sequence Name: 56322-704_101_SL_seq_9781
tccacaggggctcatcacgg

SEQ ID NO: 9782 - DNA, 20 bp, Homo sapiens
  source 1..20: mol_type = genomic DNA; note = Gene: HLA-DQA1; note = Location (start to end; relative to TSS): HLA-DQA1_40_70; note = Orientation (relative to transcription): antisense; note = sgRNA Position: 32637452; note = Sequence Name: 56322-704_101_SL_seq_9782
ttaggatcatcctcttccca

SEQ ID NO: 9783 - DNA, 20 bp, Homo sapiens
  source 1..20: mol_type = genomic DNA; note = Gene: HLA-DQA1; note = Location (start to end; relative to TSS): HLA-DQA1_89_119; note = Orientation (relative to transcription): sense; note = sgRNA Position: 32637521; note = Sequence Name: 56322-704_101_SL_seq_9783
accgtgatgagcccctgtgg

SEQ ID NO: 9784 - DNA, 20 bp, Homo sapiens
  source 1..20: mol_type = genomic DNA; note = Gene: HLA-DQA1; note = Location (start to end; relative to TSS): HLA-DQA1_50_80; note = Orientation (relative to transcription): sense; note = sgRNA Position: 32637482; note = Sequence Name: 56322-704_101_SL_seq_9784
ctaaacaaagctctgctgct

SEQ ID NO: 9785 - DNA, 20 bp, Homo sapiens
  source 1..20: mol_type = genomic DNA; note = Gene: HLA-DQA1; note = Location (start to end; relative to TSS): HLA-DQA1_86_116; note = Orientation (relative to transcription): sense; note = sgRNA Position: 32637518; note = Sequence Name: 56322-704_101_SL_seq_9785
accaccgtgatgagcccctg

SEQ ID NO: 9786 - DNA, 20 bp, Homo sapiens
  source 1..20: mol_type = genomic DNA; note = Gene: HLA-DQA1; note = Location (start to end; relative to TSS): HLA-DQA1_21_51; note = Orientation (relative to transcription): sense; note = sgRNA Position: 32637453; note = Sequence Name: 56322-704_101_SL_seq_9786
gctgaggctgccttgggaag

SEQ ID NO: 9787 - DNA, 20 bp, Homo sapiens
  source 1..20: mol_type = genomic DNA; note = Gene: HLA-DQA1; note = Location (start to end; relative to TSS): HLA-DQA1_51_81; note = Orientation (relative to transcription): sense; note = sgRNA Position: 32637483; note = Sequence Name: 56322-704_101_SL_seq_9787
taaacaaagctctgctgctg

SEQ ID NO: 9788 - DNA, 20 bp, Homo sapiens
  source 1..20: mol_type = genomic DNA; note = Gene: HLA-DQA1; note = Location (start to end; relative to TSS): HLA-DQA1_15_45; note = Orientation (relative to transcription): sense; note = sgRNA Position: 32637447; note = Sequence Name: 56322-704_101_SL_seq_9788
ccaactgctgaggctgcctt

SEQ ID NO: 9789 - DNA, 20 bp, Homo sapiens
  source 1..20: mol_type = genomic DNA; note = Gene: HLA-DQA1; note = Location (start to end; relative to TSS): HLA-DQA1_49_79; note = Orientation (relative to transcription): sense; note = sgRNA Position: 32637481; note = Sequence Name: 56322-704_101_SL_seq_9789
cctaaacaaagctctgctgc

SEQ ID NO: 9790 - DNA, 20 bp, Homo sapiens
  source 1..20: mol_type = genomic DNA; note = Gene: HLA-DQA2; note = Location (start to end; relative to TSS): HLA-DQA2_40_70; note = Orientation (relative to transcription): antisense; note = sgRNA Position: 32741437; note = Sequence Name: 56322-704_101_SL_seq_9790
ttaggatcatcttcttccca

SEQ ID NO: 9791 - DNA, 20 bp, Homo sapiens
  source 1..20: mol_type = genomic DNA; note = Gene: HLA-DQA2; note = Location (start to end; relative to TSS): HLA-DQA2_86_116; note = Orientation (relative to transcription): sense; note = sgRNA Position: 32741503; note = Sequence Name: 56322-704_101_SL_seq_9791
actgccgtgatgagcccctg

SEQ ID NO: 9792 - DNA, 20 bp, Homo sapiens
  source 1..20: mol_type = genomic DNA; note = Gene: HLA-DQA2; note = Location (start to end; relative to TSS): HLA-DQA2_49_79; note = Orientation (relative to transcription): sense; note = sgRNA Position: 32741466; note = Sequence Name: 56322-704_101_SL_seq_9792
cctaaacaaagctctgctgc

SEQ ID NO: 9793 - DNA, 20 bp, Homo sapiens
  source 1..20: mol_type = genomic DNA; note = Gene: HLA-DQA2; note = Location (start to end; relative to TSS): HLA-DQA2_85_115; note = Orientation (relative to transcription): antisense; note = sgRNA Position: 32741482; note = Sequence Name: 56322-704_101_SL_seq_9793
tcatcacggcagtcagggcg

SEQ ID NO: 9794 - DNA, 20 bp, Homo sapiens
  source 1..20: mol_type = genomic DNA; note = Gene: HLA-DQA2; note = Location (start to end; relative to TSS): HLA-DQA2_51_81; note = Orientation (relative to transcription): sense; note = sgRNA Position: 32741468; note = Sequence Name: 56322-704_101_SL_seq_9794
taaacaaagctctgctgctg

SEQ ID NO: 9795 - DNA, 20 bp, Homo sapiens
  source 1..20: mol_type = genomic DNA; note = Gene: HLA-DQA2; note = Location (start to end; relative to TSS): HLA-DQA2_84_114; note = Orientation (relative to transcription): antisense; note = sgRNA Position: 32741481; note = Sequence Name: 56322-704_101_SL_seq_9795
catcacggcagtcagggcga

SEQ ID NO: 9796 - DNA, 20 bp, Homo sapiens
  source 1..20: mol_type = genomic DNA; note = Gene: HLA-DQA2; note = Location (start to end; relative to TSS): HLA-DQA2_15_45; note = Orientation (relative to transcription): sense; note = sgRNA Position: 32741432; note = Sequence Name: 56322-704_101_SL_seq_9796
gcaactgctgaggctgcctt

SEQ ID NO: 9797 - DNA, 20 bp, Homo sapiens
  source 1..20: mol_type = genomic DNA; note = Gene: HLA-DQA2; note = Location (start to end; relative to TSS): HLA-DQA2_50_80; note = Orientation (relative to transcription): sense; note = sgRNA Position: 32741467; note = Sequence Name: 56322-704_101_SL_seq_9797
ctaaacaaagctctgctgct

SEQ ID NO: 9798 - DNA, 20 bp, Homo sapiens
  source 1..20: mol_type = genomic DNA; note = Gene: HLA-DQA2; note = Location (start to end; relative to TSS): HLA-DQA2_14_44; note = Orientation (relative to transcription): sense; note = sgRNA Position: 32741431; note = Sequence Name: 56322-704_101_SL_seq_9798
agcaactgctgaggctgcct

SEQ ID NO: 9799 - DNA, 20 bp, Homo sapiens
  source 1..20: mol_type = genomic DNA; note = Gene: HLA-DQA2; note = Location (start to end; relative to TSS): HLA-DQA2_49_79; note = Orientation (relative to transcription): sense; note = sgRNA Position: 32741466; note = Sequence Name: 56322-704_101_SL_seq_9799
cctaaacaaagctctgctgc

SEQ ID NO: 9800 - DNA, 20 bp, Homo sapiens
  source 1..20: mol_type = genomic DNA; note = Gene: HLA-DQB1; note = Location (start to end; relative to TSS): HLA-DQB1_35_65; note = Orientation (relative to transcription): sense; note = sgRNA Position: 32666598; note = Sequence Name: 56322-704_101_SL_seq_9800
ctcagttatgtcttggaaga

SEQ ID NO: 9801 - DNA, 20 bp, Homo sapiens
  source 1..20: mol_type = genomic DNA; note = Gene: HLA-DQB1; note = Location (start to end; relative to TSS): HLA-DQB1_79_109; note = Orientation (relative to transcription): antisense; note = sgRNA Position: 32666574; note = Sequence Name: 56322-704_101_SL_seq_9801
agttgctacccgaaggtctc

SEQ ID NO: 9802 - DNA, 20 bp, Homo sapiens
  source 1..20: mol_type = genomic DNA; note = Gene: HLA-DQB1; note = Location (start to end; relative to TSS): HLA-DQB1_37_67; note = Orientation (relative to transcription): antisense; note = sgRNA Position: 32666616; note = Sequence Name: 56322-704_101_SL_seq_9802
ccaagacataactgagacga

SEQ ID NO: 9803 - DNA, 20 bp, Homo sapiens
  source 1..20: mol_type = genomic DNA; note = Gene: HLA-DQB1; note = Location (start to end; relative to TSS): HLA-DQB1_78_108; note = Orientation (relative to transcription): antisense; note = sgRNA Position: 32666575; note = Sequence Name: 56322-704_101_SL_seq_9803
gttgctacccgaaggtctcc

SEQ ID NO: 9804 - DNA, 20 bp, Homo sapiens
  source 1..20: mol_type = genomic DNA; note = Gene: HLA-DQB1; note = Location (start to end; relative to TSS): HLA-DQB1_43_73; note = Orientation (relative to transcription): sense; note = sgRNA Position: 32666590; note = Sequence Name: 56322-704_101_SL_seq_9804
tgtcttggaagaaggctttg

SEQ ID NO: 9805 - DNA, 20 bp, Homo sapiens
  source 1..20: mol_type = genomic DNA; note = Gene: HLA-DQB1; note = Location (start to end; relative to TSS): HLA-DQB1_77_107; note = Orientation (relative to transcription): antisense; note = sgRNA Position: 32666576; note = Sequence Name: 56322-704_101_SL_seq_9805
ttgctacccgaaggtctccg

SEQ ID NO: 9806 - DNA, 20 bp, Homo sapiens
  source 1..20: mol_type = genomic DNA; note = Gene: HLA-DQB1; note = Location (start to end; relative to TSS): HLA-DQB1_25_55; note = Orientation (relative to transcription): antisense; note = sgRNA Position: 32666628; note = Sequence Name: 56322-704_101_SL_seq_9806
tgagacgaagggaaaagcag

SEQ ID NO: 9807 - DNA, 20 bp, Homo sapiens
  source 1..20: mol_type = genomic DNA; note = Gene: HLA-DQB1; note = Location (start to end; relative to TSS): HLA-DQB1_62_92; note = Orientation (relative to transcription): sense; note = sgRNA Position: 32666571; note = Sequence Name: 56322-704_101_SL_seq_9807
gcggatccccggagaccttc

SEQ ID NO: 9808 - DNA, 20 bp, Homo sapiens
  source 1..20: mol_type = genomic DNA; note = Gene: HLA-DQB1; note = Location (start to end; relative to TSS): HLA-DQB1_28_58; note = Orientation (relative to transcription): sense; note = sgRNA Position: 32666605; note = Sequence Name: 56322-704_101_SL_seq_9808
ccttcgtctcagttatgtct

SEQ ID NO: 9809 - DNA, 20 bp, Homo sapiens
  source 1..20: mol_type = genomic DNA; note = Gene: HLA-DQB1; note = Location (start to end; relative to TSS): HLA-DQB1_61_91; note = Orientation (relative to transcription): sense; note = sgRNA Position: 32666572; note = Sequence Name: 56322-704_101_SL_seq_9809
tgcggatccccggagacctt

SEQ ID NO: 9810 - DNA, 20 bp, Homo sapiens
  source 1..20: mol_type = genomic DNA; note = Gene: HLA-DQB2; note = Location (start to end; relative to TSS): HLA-DQB2_51_81; note = Orientation (relative to transcription): sense; note = sgRNA Position: 32763457; note = Sequence Name: 56322-704_101_SL_seq_9810
aagatggctctgcagatccc

SEQ ID NO: 9811 - DNA, 20 bp, Homo sapiens
  source 1..20: mol_type = genomic DNA; note = Gene: HLA-DQB2; note = Location (start to end; relative to TSS): HLA-DQB2_107_137; note = Orientation (relative to transcription): sense; note = sgRNA Position: 32763401; note = Sequence Name: 56322-704_101_SL_seq_9811
ggtgatgctgagcaccccag

SEQ ID NO: 9812 - DNA, 20 bp, Homo sapiens
  source 1..20: mol_type = genomic DNA; note = Gene: HLA-DQB2; note = Location (start to end; relative to TSS): HLA-DQB2_37_67; note = Orientation (relative to transcription): antisense; note = sgRNA Position: 32763491; note = Sequence Name: 56322-704_101_SL_seq_9812
ccaagacgtaagtgagacca

SEQ ID NO: 9813 - DNA, 20 bp, Homo sapiens
  source 1..20: mol_type = genomic DNA; note = Gene: HLA-DQB2; note = Location (start to end; relative to TSS): HLA-DQB2_106_136; note = Orientation (relative to transcription): antisense; note = sgRNA Position: 32763422; note = Sequence Name: 56322-704_101_SL_seq_9813
gctcagcatcaccagcatca

SEQ ID NO: 9814 - DNA, 20 bp, Homo sapiens
  source 1..20: mol_type = genomic DNA; note = Gene: HLA-DQB2; note = Location (start to end; relative to TSS): HLA-DQB2_35_65; note = Orientation (relative to transcription): sense; note = sgRNA Position: 32763473; note = Sequence Name: 56322-704_101_SL_seq_9814
ctcacttacgtcttggaaga

SEQ ID NO: 9815 - DNA, 20 bp, Homo sapiens
  source 1..20: mol_type = genomic DNA; note = Gene: HLA-DQB2; note = Location (start to end; relative to TSS): HLA-DQB2_86_116; note = Orientation (relative to transcription): sense; note = sgRNA Position: 32763422; note = Sequence Name: 56322-704_101_SL_seq_9815
agcagctgtgaccgtgatgc

SEQ ID NO: 9816 - DNA, 20 bp, Homo sapiens
  source 1..20: mol_type = genomic DNA; note = Gene: HLA-DQB2; note = Location (start to end; relative to TSS): HLA-DQB2_25_55; note = Orientation (relative to transcription): antisense; note = sgRNA Position: 32763503; note = Sequence Name: 56322-704_101_SL_seq_9816
tgagaccaaggaaaaagcag

SEQ ID NO: 9817 - DNA, 20 bp, Homo sapiens
  source 1..20: mol_type = genomic DNA; note = Gene: HLA-DQB2; note = Location (start to end; relative to TSS): HLA-DQB2_78_108; note = Orientation (relative to transcription): antisense; note = sgRNA Position: 32763450; note = Sequence Name: 56322-704_101_SL_seq_9817
gctgctgcccaaaagcctcc

SEQ ID NO: 9818 - DNA, 20 bp, Homo sapiens
  source 1..20: mol_type = genomic DNA; note = Gene: HLA-DQB2; note = Location (start to end; relative to TSS): HLA-DQB2_28_58; note = Orientation (relative to transcription): sense; note = sgRNA Position: 32763480; note = Sequence Name: 56322-704_101_SL_seq_9818
ccttggtctcacttacgtct

SEQ ID NO: 9819 - DNA, 20 bp, Homo sapiens
  source 1..20: mol_type = genomic DNA; note = Gene: HLA-DQB2; note = Location (start to end; relative to TSS): HLA-DQB2_77_107; note = Orientation (relative to transcription): antisense; note = sgRNA Position: 32763451; note = Sequence Name: 56322-704_101_SL_seq_9819
ctgctgcccaaaagcctcca

SEQ ID NO: 9820 - DNA, 20 bp, Homo sapiens
  source 1..20: mol_type = genomic DNA; note = Gene: HLA-DRA; note = Location (start to end; relative to TSS): HLA-DRA_40_70; note = Orientation (relative to transcription): antisense; note = sgRNA Position: 32439933; note = Sequence Name: 56322-704_101_SL_seq_9820
ttcttcttgggcgctctgtt

SEQ ID NO: 9821 - DNA, 20 bp, Homo sapiens
  source 1..20: mol_type = genomic DNA; note = Gene: HLA-DRA; note = Location (start to end; relative to TSS): HLA-DRA_96_126; note = Orientation (relative to transcription): sense; note = sgRNA Position: 32440009; note = Sequence Name: 56322-704_101_SL_seq_9821
agctgtgctgatgagcgctc

SEQ ID NO: 9822 - DNA, 20 bp, Homo sapiens
  source 1..20: mol_type = genomic DNA; note = Gene: HLA-DRA; note = Location (start to end; relative to TSS): HLA-DRA_41_71; note = Orientation (relative to transcription): antisense; note = sgRNA Position: 32439934; note = Sequence Name: 56322-704_101_SL_seq_9822
tttcttcttgggcgctctgt

SEQ ID NO: 9823 - DNA, 20 bp, Homo sapiens
  source 1..20: mol_type = genomic DNA; note = Gene: HLA-DRA; note = Location (start to end; relative to TSS): HLA-DRA_82_112; note = Orientation (relative to transcription): antisense; note = sgRNA Position: 32439975; note = Sequence Name: 56322-704_101_SL_seq_9823
atgatgaaaaatcctagcac

SEQ ID NO: 9824 - DNA, 20 bp, Homo sapiens
  source 1..20: mol_type = genomic DNA; note = Gene: HLA-DRA; note = Location (start to end; relative to TSS): HLA-DRA_46_76; note = Orientation (relative to transcription): sense; note = sgRNA Position: 32439959; note = Sequence Name: 56322-704_101_SL_seq_9824
aagaagaaaatggccataag

SEQ ID NO: 9825 - DNA, 20 bp, Homo sapiens
  source 1..20: mol_type = genomic DNA; note = Gene: HLA-DRA; note = Location (start to end; relative to TSS): HLA-DRA_81_111; note = Orientation (relative to transcription): antisense; note = sgRNA Position: 32439974; note = Sequence Name: 56322-704_101_SL_seq_9825
tgatgaaaaatcctagcaca

SEQ ID NO: 9826 - DNA, 20 bp, Homo sapiens
  source 1..20: mol_type = genomic DNA; note = Gene: HLA-DRA; note = Location (start to end; relative to TSS): HLA-DRA_23_53; note = Orientation (relative to transcription): antisense; note = sgRNA Position: 32439916; note = Sequence Name: 56322-704_101_SL_seq_9826
gttgggagtcagtagagctc

SEQ ID NO: 9827 - DNA, 20 bp, Homo sapiens
  source 1..20: mol_type = genomic DNA; note = Gene: HLA-DRA; note = Location (start to end; relative to TSS): HLA-DRA_68_98; note = Orientation (relative to transcription): antisense; note = sgRNA Position: 32439961; note = Sequence Name: 56322-704_101_SL_seq_9827
tagcacagggactccactta

SEQ ID NO: 9828 - DNA, 20 bp, Homo sapiens
  source 1..20: mol_type = genomic DNA; note = Gene: HLA-DRA; note = Location (start to end; relative to TSS): HLA-DRA_24_54; note = Orientation (relative to transcription): antisense; note = sgRNA Position: 32439917; note = Sequence Name: 56322-704_101_SL_seq_9828
tgttgggagtcagtagagct

SEQ ID NO: 9829 - DNA, 20 bp, Homo sapiens
  source 1..20: mol_type = genomic DNA; note = Gene: HLA-DRA; note = Location (start to end; relative to TSS): HLA-DRA_61_91; note = Orientation (relative to transcription): sense; note = sgRNA Position: 32439974; note = Sequence Name: 56322-704_101_SL_seq_9829
ataagtggagtccctgtgct

SEQ ID NO: 9830 - DNA, 20 bp, Homo sapiens
  source 1..20: mol_type = genomic DNA; note = Gene: HLA-DRB1; note = Location (start to end; relative to TSS): HLA-DRB1_53_83; note = Orientation (relative to transcription): antisense; note = sgRNA Position: 32589791; note = Sequence Name: 56322-704_101_SL_seq_9830
gaagcaggcaagtctcactc

SEQ ID NO: 9831 - DNA, 20 bp, Homo sapiens
  source 1..20: mol_type = genomic DNA; note = Gene: HLA-DRB1; note = Location (start to end; relative to TSS): HLA-DRB1_83_113; note = Orientation (relative to transcription): antisense; note = sgRNA Position: 32589761; note = Sequence Name: 56322-704_101_SL_seq_9831
ctggagaacaggacaggacc

SEQ ID NO: 9832 - DNA, 20 bp, Homo sapiens
  source 1..20: mol_type = genomic DNA; note = Gene: HLA-DRB1; note = Location (start to end; relative to TSS): HLA-DRB1_52_82; note = Orientation (relative to transcription): antisense; note = sgRNA Position: 32589792; note = Sequence Name: 56322-704_101_SL_seq_9832
aagcaggcaagtctcactca

SEQ ID NO: 9833 - DNA, 20 bp, Homo sapiens
  source 1..20: mol_type = genomic DNA; note = Gene: HLA-DRB1; note = Location (start to end; relative to TSS): HLA-DRB1_82_112; note = Orientation (relative to transcription): antisense; note = sgRNA Position: 32589762; note = Sequence Name: 56322-704_101_SL_seq_9833
tggagaacaggacaggacca

SEQ ID NO: 9834 - DNA, 20 bp, Homo sapiens
  source 1..20: mol_type = genomic DNA; note = Gene: HLA-DRB1; note = Location (start to end; relative to TSS): HLA-DRB1_49_79; note = Orientation (relative to transcription): sense; note = sgRNA Position: 32589775; note = Sequence Name: 56322-704_101_SL_seq_9834
gtgagacttgcctgcttctc

SEQ ID NO: 9835 - DNA, 20 bp, Homo sapiens
  source 1..20: mol_type = genomic DNA; note = Gene: HLA-DRB1; note = Location (start to end; relative to TSS): HLA-DRB1_79_109; note = Orientation (relative to transcription): sense; note = sgRNA Position: 32589745; note = Sequence Name: 56322-704_101_SL_seq_9835
tcctgtcctgttctccagca

SEQ ID NO: 9836 - DNA, 20 bp, Homo sapiens
  source 1..20: mol_type = genomic DNA; note = Gene: HLA-DRB1; note = Location (start to end; relative to TSS): HLA-DRB1_13_43; note = Orientation (relative to transcription): antisense; note = sgRNA Position: 32589831; note = Sequence Name: 56322-704_101_SL_seq_9836
ccacccacattccaagttat

SEQ ID NO: 9837 - DNA, 20 bp, Homo sapiens
  source 1..20: mol_type = genomic DNA; note = Gene: HLA-DRB1; note = Location (start to end; relative to TSS): HLA-DRB1_52_82; note = Orientation (relative to transcription): antisense; note = sgRNA Position: 32589792; note = Sequence Name: 56322-704_101_SL_seq_9837
aagcaggcaagtctcactca

SEQ ID NO: 9838 - DNA, 20 bp, Homo sapiens
  source 1..20: mol_type = genomic DNA; note = Gene: HLA-DRB1; note = Location (start to end; relative to TSS): HLA-DRB1_12_42; note = Orientation (relative to transcription): antisense; note = sgRNA Position: 32589832; note = Sequence Name: 56322-704_101_SL_seq_9838
cacccacattccaagttata

SEQ ID NO: 9839 - DNA, 20 bp, Homo sapiens
  source 1..20: mol_type = genomic DNA; note = Gene: HLA-DRB1; note = Location (start to end; relative to TSS): HLA-DRB1_49_79; note = Orientation (relative to transcription): sense; note = sgRNA Position: 32589775; note = Sequence Name: 56322-704_101_SL_seq_9839
gtgagacttgcctgcttctc

SEQ ID NO: 9840 - DNA, 20 bp, Homo sapiens
  source 1..20: mol_type = genomic DNA; note = Gene: HLA-DRB5; note = Location (start to end; relative to TSS): HLA-DRB5_40_70; note = Orientation (relative to transcription): antisense; note = sgRNA Position: 32530243; note = Sequence Name: 56322-704_101_SL_seq_9840
ctggagaacaggacaggacc

SEQ ID NO: 9841 - DNA, 20 bp, Homo sapiens
  source 1..20: mol_type = genomic DNA; note = Gene: HLA-DRB5; note = Location (start to end; relative to TSS): HLA-DRB5_93_123; note = Orientation (relative to transcription): sense; note = sgRNA Position: 32530170; note = Sequence Name: 56322-704_101_SL_seq_9841
aaagctgacagtgacactga

SEQ ID NO: 9842 - DNA, 20 bp, Homo sapiens
  source 1..20: mol_type = genomic DNA; note = Gene: HLA-DRB5; note = Location (start to end; relative to TSS): HLA-DRB5_31_61; note = Orientation (relative to transcription): antisense; note = sgRNA Position: 32530252; note = Sequence Name: 56322-704_101_SL_seq_9842
aggacaggaccaggggccag

SEQ ID NO: 9843 - DNA, 20 bp, Homo sapiens
  source 1..20: mol_type = genomic DNA; note = Gene: HLA-DRB5; note = Location (start to end; relative to TSS): HLA-DRB5_92_122; note = Orientation (relative to transcription): antisense; note = sgRNA Position: 32530191; note = Sequence Name: 56322-704_101_SL_seq_9843
cactgtcagctttgccatgt

SEQ ID NO: 9844 - DNA, 20 bp, Homo sapiens
  source 1..20: mol_type = genomic DNA; note = Gene: HLA-DRB5; note = Location (start to end; relative to TSS): HLA-DRB5_36_66; note = Orientation (relative to transcription): sense; note = sgRNA Position: 32530227; note = Sequence Name: 56322-704_101_SL_seq_9844
tcctgtcctgttctccagca

SEQ ID NO: 9845 - DNA, 20 bp, Homo sapiens
  source 1..20: mol_type = genomic DNA; note = Gene: HLA-DRB5; note = Location (start to end; relative to TSS): HLA-DRB5_82_112; note = Orientation (relative to transcription): antisense; note = sgRNA Position: 32530201; note = Sequence Name: 56322-704_101_SL_seq_9845
tttgccatgtaggaacctcc

SEQ ID NO: 9846 - DNA, 20 bp, Homo sapiens
  source 1..20: mol_type = genomic DNA; note = Gene: HLA-DRB5; note = Location (start to end; relative to TSS): HLA-DRB5_38_68; note = Orientation (relative to transcription): antisense; note = sgRNA Position: 32530245; note = Sequence Name: 56322-704_101_SL_seq_9846
ggagaacaggacaggaccag

SEQ ID NO: 9847 - DNA, 20 bp, Homo sapiens
  source 1..20: mol_type = genomic DNA; note = Gene: HLA-DRB5; note = Location (start to end; relative to TSS): HLA-DRB5_81_111; note = Orientation (relative to transcription): antisense; note = sgRNA Position: 32530202; note = Sequence Name: 56322-704_101_SL_seq_9847
ttgccatgtaggaacctcca

SEQ ID NO: 9848 - DNA, 20 bp, Homo sapiens
  source 1..20: mol_type = genomic DNA; note = Gene: HLA-DRB5; note = Location (start to end; relative to TSS): HLA-DRB5_39_69; note = Orientation (relative to transcription): antisense; note = sgRNA Position: 32530244; note = Sequence Name: 56322-704_101_SL_seq_9848
tggagaacaggacaggacca

SEQ ID NO: 9849 - DNA, 20 bp, Homo sapiens
  source 1..20: mol_type = genomic DNA; note = Gene: HLA-DRB5; note = Location (start to end; relative to TSS): HLA-DRB5_69_99; note = Orientation (relative to transcription): sense; note = sgRNA Position: 32530194; note = Sequence Name: 56322-704_101_SL_seq_9849
gctccctggaggttcctaca

SEQ ID NO: 9850 - DNA, 20 bp, Homo sapiens
  source 1..20: mol_type = genomic DNA; note = Gene: HLA-E; note = Location (start to end; relative to TSS): HLA-E_40_70; note = Orientation (relative to transcription): antisense; note = sgRNA Position: 30489555; note = Sequence Name: 56322-704_101_SL_seq_9850
gggcctccgagaggagtaaa

SEQ ID NO: 9851 - DNA, 20 bp, Homo sapiens
  source 1..20: mol_type = genomic DNA; note = Gene: HLA-E; note = Location (start to end; relative to TSS): HLA-E_71_101; note = Orientation (relative to transcription): sense; note = sgRNA Position: 30489606; note = Sequence Name: 56322-704_101_SL_seq_9851
tgggcgggtgagtgcggggt

SEQ ID NO: 9852 - DNA, 20 bp, Homo sapiens
  source 1..20: mol_type = genomic DNA; note = Gene: HLA-E; note = Location (start to end; relative to TSS): HLA-E_37_67; note = Orientation (relative to transcription): antisense; note = sgRNA Position: 30489552; note = Sequence Name: 56322-704_101_SL_seq_9852
cctccgagaggagtaaaagg

SEQ ID NO: 9853 - DNA, 20 bp, Homo sapiens
  source 1..20: mol_type = genomic DNA; note = Gene: HLA-E; note = Location (start to end; relative to TSS): HLA-E_67_97; note = Orientation (relative to transcription): sense; note = sgRNA Position: 30489602; note = Sequence Name: 56322-704_101_SL_seq_9853
gacctgggcgggtgagtgcg

SEQ ID NO: 9854 - DNA, 20 bp, Homo sapiens
  source 1..20: mol_type = genomic DNA; note = Gene: HLA-E; note = Location (start to end; relative to TSS): HLA-E_34_64; note = Orientation (relative to transcription): sense; note = sgRNA Position: 30489569; note = Sequence Name: 56322-704_101_SL_seq_9854
tttactcctctcggaggccc

SEQ ID NO: 9855 - DNA, 20 bp, Homo sapiens
  source 1..20: mol_type = genomic DNA; note = Gene: HLA-E; note = Location (start to end; relative to TSS): HLA-E_65_95; note = Orientation (relative to transcription): sense; note = sgRNA Position: 30489600; note = Sequence Name: 56322-704_101_SL_seq_9855
cagacctgggcgggtgagtg

SEQ ID NO: 9856 - DNA, 20 bp, Homo sapiens
  source 1..20: mol_type = genomic DNA; note = Gene: HLA-E; note = Location (start to end; relative to TSS): HLA-E_28_58; note = Orientation (relative to transcription): sense; note = sgRNA Position: 30489563; note = Sequence Name: 56322-704_101_SL_seq_9856
cctccttttactcctctcgg

SEQ ID NO: 9857 - DNA, 20 bp, Homo sapiens
  source 1..20: mol_type = genomic DNA; note = Gene: HLA-E; note = Location (start to end; relative to TSS): HLA-E_60_90; note = Orientation (relative to transcription): antisense; note = sgRNA Position: 30489575; note = Sequence Name: 56322-704_101_SL_seq_9857
ccaggtctgggtaagggcca

SEQ ID NO: 9858 - DNA, 20 bp, Homo sapiens
  source 1..20: mol_type = genomic DNA; note = Gene: HLA-E; note = Location (start to end; relative to TSS): HLA-E_25_55; note = Orientation (relative to transcription): sense; note = sgRNA Position: 30489560; note = Sequence Name: 56322-704_101_SL_seq_9858
aaccctccttttactcctct

SEQ ID NO: 9859 - DNA, 20 bp, Homo sapiens
  source 1..20: mol_type = genomic DNA; note = Gene: HLA-E; note = Location (start to end; relative to TSS): HLA-E_55_85; note = Orientation (relative to transcription): sense; note = sgRNA Position: 30489590; note = Sequence Name: 56322-704_101_SL_seq_9859
ggcccttacccagacctggg

SEQ ID NO: 9860 - DNA, 20 bp, Homo sapiens
  source 1..20: mol_type = genomic DNA; note = Gene: HLA-F; note = Location (start to end; relative to TSS): HLA-F_47_77; note = Orientation (relative to transcription): antisense; note = sgRNA Position: 29723487; note = Sequence Name: 56322-704_101_SL_seq_9860
gggcccctgagagcagcagg

SEQ ID NO: 9861 - DNA, 20 bp, Homo sapiens
  source 1..20: mol_type = genomic DNA; note = Gene: HLA-F; note = Location (start to end; relative to TSS): HLA-F_79_109; note = Orientation (relative to transcription): antisense; note = sgRNA Position: 29723519; note = Sequence Name: 56322-704_101_SL_seq_9861
gcactcacccgcccaagtat

SEQ ID NO: 9862 - DNA, 20 bp, Homo sapiens
  source 1..20: mol_type = genomic DNA; note = Gene: HLA-F; note = Location (start to end; relative to TSS): HLA-F_44_74; note = Orientation (relative to transcription): antisense; note = sgRNA Position: 29723484; note = Sequence Name: 56322-704_101_SL_seq_9862
cccctgagagcagcaggagg

SEQ ID NO: 9863 - DNA, 20 bp, Homo sapiens
  source 1..20: mol_type = genomic DNA; note = Gene: HLA-F; note = Location (start to end; relative to TSS): HLA-F_74_104; note = Orientation (relative to transcription): sense; note = sgRNA Position: 29723534; note = Sequence Name: 56322-704_101_SL_seq_9863
tacttgggcgggtgagtgcg

SEQ ID NO: 9864 - DNA, 20 bp, Homo sapiens
  source 1..20: mol_type = genomic DNA; note = Gene: HLA-F; note = Location (start to end; relative to TSS): HLA-F_41_71; note = Orientation (relative to transcription): sense; note = sgRNA Position: 29723501; note = Sequence Name: 56322-704_101_SL_seq_9864
cctgctgctctcaggggccc

SEQ ID NO: 9865 - DNA, 20 bp, Homo sapiens
  source 1..20: mol_type = genomic DNA; note = Gene: HLA-F; note = Location (start to end; relative to TSS): HLA-F_72_102; note = Orientation (relative to transcription): sense; note = sgRNA Position: 29723532; note = Sequence Name: 56322-704_101_SL_seq_9865
gatacttgggcgggtgagtg

SEQ ID NO: 9866 - DNA, 20 bp, Homo sapiens
  source 1..20: mol_type = genomic DNA; note = Gene: HLA-F; note = Location (start to end; relative to TSS): HLA-F_38_68; note = Orientation (relative to transcription): antisense; note = sgRNA Position: 29723478; note = Sequence Name: 56322-704_101_SL_seq_9866
agagcagcaggaggaggctt

SEQ ID NO: 9867 - DNA, 20 bp, Homo sapiens
  source 1..20: mol_type = genomic DNA; note = Gene: HLA-F; note = Location (start to end; relative to TSS): HLA-F_68_98; note = Orientation (relative to transcription): antisense; note = sgRNA Position: 29723508; note = Sequence Name: 56322-704_101_SL_seq_9867
cccaagtatcggtcagggcc

SEQ ID NO: 9868 - DNA, 20 bp, Homo sapiens
  source 1..20: mol_type = genomic DNA; note = Gene: HLA-F; note = Location (start to end; relative to TSS): HLA-F_33_63; note = Orientation (relative to transcription): sense; note = sgRNA Position: 29723493; note = Sequence Name: 56322-704_101_SL_seq_9868
agcctcctcctgctgctctc

SEQ ID NO: 9869 - DNA, 20 bp, Homo sapiens
  source 1..20: mol_type = genomic DNA; note = Gene: HLA-F; note = Location (start to end; relative to TSS): HLA-F_63_93; note = Orientation (relative to transcription): sense; note = sgRNA Position: 29723523; note = Sequence Name: 56322-704_101_SL_seq_9869
gccctgaccgatacttgggc

SEQ ID NO: 9870 - DNA, 20 bp, Homo sapiens
  source 1..20: mol_type = genomic DNA; note = Gene: HLA-G; note = Location (start to end; relative to TSS): HLA-G_43_73; note = Orientation (relative to transcription): antisense; note = sgRNA Position: 29827874; note = Sequence Name: 56322-704_101_SL_seq_9870
cccccgagagcagcaggaag

SEQ ID NO: 9871 - DNA, 20 bp, Homo sapiens
  source 1..20: mol_type = genomic DNA; note = Gene: HLA-G; note = Location (start to end; relative to TSS): HLA-G_73_103; note = Orientation (relative to transcription): sense; note = sgRNA Position: 29827924; note = Sequence Name: 56322-704_101_SL_seq_9871
gacctgggcgggtgagtgcg

SEQ ID NO: 9872 - DNA, 20 bp, Homo sapiens
  source 1..20: mol_type = genomic DNA; note = Gene: HLA-G; note = Location (start to end; relative to TSS): HLA-G_42_72; note = Orientation (relative to transcription): antisense; note = sgRNA Position: 29827873; note = Sequence Name: 56322-704_101_SL_seq_9872
ccccgagagcagcaggaaga

SEQ ID NO: 9873 - DNA, 20 bp, Homo sapiens
  source 1..20: mol_type = genomic DNA; note = Gene: HLA-G; note = Location (start to end; relative to TSS): HLA-G_72_102; note = Orientation (relative to transcription): antisense; note = sgRNA Position: 29827903; note = Sequence Name: 56322-704_101_SL_seq_9873
acccgcccaggtctcggtca

SEQ ID NO: 9874 - DNA, 20 bp, Homo sapiens
  source 1..20: mol_type = genomic DNA; note = Gene: HLA-G; note = Location (start to end; relative to TSS): HLA-G_34_64; note = Orientation (relative to transcription): sense; note = sgRNA Position: 29827885; note = Sequence Name: 56322-704_101_SL_seq_9874
cctcttcctgctgctctcgg

SEQ ID NO: 9875 - DNA, 20 bp, Homo sapiens
  source 1..20: mol_type = genomic DNA; note = Gene: HLA-G; note = Location (start to end; relative to TSS): HLA-G_67_97; note = Orientation (relative to transcription): antisense; note = sgRNA Position: 29827898; note = Sequence Name: 56322-704_101_SL_seq_9875
cccaggtctcggtcagggtc

SEQ ID NO: 9876 - DNA, 20 bp, Homo sapiens
  source 1..20: mol_type = genomic DNA; note = Gene: HLA-G; note = Location (start to end; relative to TSS): HLA-G_33_63; note = Orientation (relative to transcription): sense; note = sgRNA Position: 29827884; note = Sequence Name: 56322-704_101_SL_seq_9876
ccctcttcctgctgctctcg

SEQ ID NO: 9877 - DNA, 20 bp, Homo sapiens
  source 1..20: mol_type = genomic DNA; note = Gene: HLA-G; note = Location (start to end; relative to TSS): HLA-G_66_96; note = Orientation (relative to transcription): antisense; note = sgRNA Position: 29827897; note = Sequence Name: 56322-704_101_SL_seq_9877
ccaggtctcggtcagggtca

SEQ ID NO: 9878 - DNA, 20 bp, Homo sapiens
  source 1..20: mol_type = genomic DNA; note = Gene: HLA-G; note = Location (start to end; relative to TSS): HLA-G_32_62; note = Orientation (relative to transcription): sense; note = sgRNA Position: 29827883; note = Sequence Name: 56322-704_101_SL_seq_9878
accctcttcctgctgctctc

SEQ ID NO: 9879 - DNA, 20 bp, Homo sapiens
  source 1..20: mol_type = genomic DNA; note = Gene: HLA-G; note = Location (start to end; relative to TSS): HLA-G_62_92; note = Orientation (relative to transcription): sense; note = sgRNA Position: 29827913; note = Sequence Name: 56322-704_101_SL_seq_9879
accctgaccgagacctgggc

SEQ ID NO: 9880 - DNA, 20 bp, Homo sapiens
  source 1..20: mol_type = genomic DNA; note = Gene: HMCN1; note = Location (start to end; relative to TSS): HMCN1_54_84; note = Orientation (relative to transcription): antisense; note = sgRNA Position: 185734451; note = Sequence Name: 56322-704_101_SL_seq_9880
gctctgagcctgcggcgccg

SEQ ID NO: 9881 - DNA, 20 bp, Homo sapiens
  source 1..20: mol_type = genomic DNA; note = Gene: HMCN1; note = Location (start to end; relative to TSS): HMCN1_92_122; note = Orientation (relative to transcription): sense; note = sgRNA Position: 185734509; note = Sequence Name: 56322-704_101_SL_seq_9881
cgccgcccgcactccgccac

SEQ ID NO: 9882 - DNA, 20 bp, Homo sapiens
  source 1..20: mol_type = genomic DNA; note = Gene: HMCN1; note = Location (start to end; relative to TSS): HMCN1_37_67; note = Orientation (relative to transcription): sense; note = sgRNA Position: 185734454; note = Sequence Name: 56322-704_101_SL_seq_9882
gattcgggccgcggcgccgc

SEQ ID NO: 9883 - DNA, 20 bp, Homo sapiens
  source 1..20: mol_type = genomic DNA; note = Gene: HMCN1; note = Location (start to end; relative to TSS): HMCN1_79_109; note = Orientation (relative to transcription): antisense; note = sgRNA Position: 185734476; note = Sequence Name: 56322-704_101_SL_seq_9883
gcgtcgggtccatgccccgg

SEQ ID NO: 9884 - DNA, 20 bp, Homo sapiens
  source 1..20: mol_type = genomic DNA; note = Gene: HMCN1; note = Location (start to end; relative to TSS): HMCN1_9_39; note = Orientation (relative to transcription): antisense; note = sgRNA Position: 185734406; note = Sequence Name: 56322-704_101_SL_seq_9884
gccgccgctgctctccgcct

SEQ ID NO: 9885 - DNA, 20 bp, Homo sapiens
  source 1..20: mol_type = genomic DNA; note = Gene: HMCN1; note = Location (start to end; relative to TSS): HMCN1_62_92; note = Orientation (relative to transcription): antisense; note = sgRNA Position: 185734459; note = Sequence Name: 56322-704_101_SL_seq_9885
cgggggcagctctgagcctg

SEQ ID NO: 9886 - DNA, 20 bp, Homo sapiens
  source 1..20: mol_type = genomic DNA; note = Gene: HMCN1; note = Location (start to end; relative to TSS): HMCN1_8_38; note = Orientation (relative to transcription): sense; note = sgRNA Position: 185734425; note = Sequence Name: 56322-704_101_SL_seq_9886
gagagcagcggcggcggcga

SEQ ID NO: 9887 - DNA, 20 bp, Homo sapiens
  source 1..20: mol_type = genomic DNA; note = Gene: HMCN1; note = Location (start to end; relative to TSS): HMCN1_54_84; note = Orientation (relative to transcription): antisense; note = sgRNA Position: 185734451; note = Sequence Name: 56322-704_101_SL_seq_9887
gctctgagcctgcggcgccg

SEQ ID NO: 9888 - DNA, 20 bp, Homo sapiens
  source 1..20: mol_type = genomic DNA; note = Gene: HMCN1; note = Location (start to end; relative to TSS): HMCN1_7_37; note = Orientation (relative to transcription): sense; note = sgRNA Position: 185734424; note = Sequence Name: 56322-704_101_SL_seq_9888
ggagagcagcggcggcggcg

SEQ ID NO: 9889 - DNA, 20 bp, Homo sapiens
  source 1..20: mol_type = genomic DNA; note = Gene: HMCN1; note = Location (start to end; relative to TSS): HMCN1_37_67; note = Orientation (relative to transcription): sense; note = sgRNA Position: 185734454; note = Sequence Name: 56322-704_101_SL_seq_9889
gattcgggccgcggcgccgc

SEQ ID NO: 9890 - DNA, 20 bp, Homo sapiens
  source 1..20: mol_type = genomic DNA; note = Gene: HMCN2; note = Location (start to end; relative to TSS): HMCN2_43_73; note = Orientation (relative to transcription): antisense; note = sgRNA Position: 130265809; note = Sequence Name: 56322-704_101_SL_seq_9890
gccggccgccccggtgcaca

SEQ ID NO: 9891 - DNA, 20 bp, Homo sapiens
  source 1..20: mol_type = genomic DNA; note = Gene: HMCN2; note = Location (start to end; relative to TSS): HMCN2_84_114; note = Orientation (relative to transcription): antisense; note = sgRNA Position: 130265850; note = Sequence Name: 56322-704_101_SL_seq_9891
tctggctgcgggtgctgcgg

SEQ ID NO: 9892 - DNA, 20 bp, Homo sapiens
  source 1..20: mol_type = genomic DNA; note = Gene: HMCN2; note = Location (start to end; relative to TSS): HMCN2_33_63; note = Orientation (relative to transcription): antisense; note = sgRNA Position: 130265799; note = Sequence Name: 56322-704_101_SL_seq_9892
ccggtgcacacggcggctgc

SEQ ID NO: 9893 - DNA, 20 bp, Homo sapiens
  source 1..20: mol_type = genomic DNA; note = Gene: HMCN2; note = Location (start to end; relative to TSS): HMCN2_81_111; note = Orientation (relative to transcription): antisense; note = sgRNA Position: 130265847; note = Sequence Name: 56322-704_101_SL_seq_9893
ggctgcgggtgctgcggtgg

SEQ ID NO: 9894 - DNA, 20 bp, Homo sapiens
  source 1..20: mol_type = genomic DNA; note = Gene: HMCN2; note = Location (start to end; relative to TSS): HMCN2_29_59; note = Orientation (relative to transcription): sense; note = sgRNA Position: 130265815; note = Sequence Name: 56322-704_101_SL_seq_9894
agccgccgtgtgcaccgggg

SEQ ID NO: 9895 - DNA, 20 bp, Homo sapiens
  source 1..20: mol_type = genomic DNA; note = Gene: HMCN2; note = Location (start to end; relative to TSS): HMCN2_75_105; note = Orientation (relative to transcription): antisense; note = sgRNA Position: 130265841; note = Sequence Name: 56322-704_101_SL_seq_9895
gggtgctgcggtggaggcgc

SEQ ID NO: 9896 - DNA, 20 bp, Homo sapiens
  source 1..20: mol_type = genomic DNA; note = Gene: HMCN2; note = Location (start to end; relative to TSS): HMCN2_26_56; note = Orientation (relative to transcription): sense; note = sgRNA Position: 130265812; note = Sequence Name: 56322-704_101_SL_seq_9896
tgcagccgccgtgtgcaccg

SEQ ID NO: 9897 - DNA, 20 bp, Homo sapiens
  source 1..20: mol_type = genomic DNA; note = Gene: HMCN2; note = Location (start to end; relative to TSS): HMCN2_71_101; note = Orientation (relative to transcription): antisense; note = sgRNA Position: 130265837; note = Sequence Name: 56322-704_101_SL_seq_9897
gctgcggtggaggcgcaggt

SEQ ID NO: 9898 - DNA, 20 bp, Homo sapiens
  source 1..20: mol_type = genomic DNA; note = Gene: HMCN2; note = Location (start to end; relative to TSS): HMCN2_24_54; note = Orientation (relative to transcription): sense; note = sgRNA Position: 130265810; note = Sequence Name: 56322-704_101_SL_seq_9898
cctgcagccgccgtgtgcac

SEQ ID NO: 9899 - DNA, 20 bp, Homo sapiens
  source 1..20: mol_type = genomic DNA; note = Gene: HMCN2; note = Location (start to end; relative to TSS): HMCN2_61_91; note = Orientation (relative to transcription): antisense; note = sgRNA Position: 130265827; note = Sequence Name: 56322-704_101_SL_seq_9899
aggcgcaggtcggagctagc

SEQ ID NO: 9900 - DNA, 20 bp, Homo sapiens
  source 1..20: mol_type = genomic DNA; note = Gene: HSPG2; note = Location (start to end; relative to TSS): HSPG2_49_79; note = Orientation (relative to transcription): sense; note = sgRNA Position: 21937237; note = Sequence Name: 56322-704_101_SL_seq_9900
ggagcgagcgagcgagagag

SEQ ID NO: 9901 - DNA, 20 bp, Homo sapiens
  source 1..20: mol_type = genomic DNA; note = Gene: HSPG2; note = Location (start to end; relative to TSS): HSPG2_82_112; note = Orientation (relative to transcription): sense; note = sgRNA Position: 21937204; note = Sequence Name: 56322-704_101_SL_seq_9901
gccatggggtggcgggcggc

SEQ ID NO: 9902 - DNA, 20 bp, Homo sapiens
  source 1..20: mol_type = genomic DNA; note = Gene: HSPG2; note = Location (start to end; relative to TSS): HSPG2_28_58; note = Orientation (relative to transcription): sense; note = sgRNA Position: 21937258; note = Sequence Name: 56322-704_101_SL_seq_9902
gcggcgcggagcgggcggcg

SEQ ID NO: 9903 - DNA, 20 bp, Homo sapiens
  source 1..20: mol_type = genomic DNA; note = Gene: HSPG2; note = Location (start to end; relative to TSS): HSPG2_68_98; note = Orientation (relative to transcription): sense; note = sgRNA Position: 21937218; note = Sequence Name: 56322-704_101_SL_seq_9903
gcggcgcgggccgggccatg

SEQ ID NO: 9904 - DNA, 20 bp, Homo sapiens
  source 1..20: mol_type = genomic DNA; note = Gene: HSPG2; note = Location (start to end; relative to TSS): HSPG2_23_53; note = Orientation (relative to transcription): sense; note = sgRNA Position: 21937263; note = Sequence Name: 56322-704_101_SL_seq_9904
tgcgggcggcgcggagcggg

SEQ ID NO: 9905 - DNA, 20 bp, Homo sapiens
  source 1..20: mol_type = genomic DNA; note = Gene: HSPG2; note = Location (start to end; relative to TSS): HSPG2_55_85; note = Orientation (relative to transcription): sense; note = sgRNA Position: 21937231; note = Sequence Name: 56322-704_101_SL_seq_9905
agcgagcgagagagcggcgc

SEQ ID NO: 9906 - DNA, 20 bp, Homo sapiens
  source 1..20: mol_type = genomic DNA; note = Gene: HSPG2; note = Location (start to end; relative to TSS): HSPG2_16_46; note = Orientation (relative to transcription): antisense; note = sgRNA Position: 21937290; note = Sequence Name: 56322-704_101_SL_seq_9906
gcccgcagccgcccgctcgc

SEQ ID NO: 9907 - DNA, 20 bp, Homo sapiens
  source 1..20: mol_type = genomic DNA; note = Gene: HSPG2; note = Location (start to end; relative to TSS): HSPG2_54_84; note = Orientation (relative to transcription): sense; note = sgRNA Position: 21937232; note = Sequence Name: 56322-704_101_SL_seq_9907
gagcgagcgagagagcggcg

SEQ ID NO: 9908 - DNA, 20 bp, Homo sapiens
  source 1..20: mol_type = genomic DNA; note = Gene: HSPG2; note = Location (start to end; relative to TSS): HSPG2_14_44; note = Orientation (relative to transcription): sense; note = sgRNA Position: 21937272; note = Sequence Name: 56322-704_101_SL_seq_9908
gcgggcggctgcgggcggcg

SEQ ID NO: 9909 - DNA, 20 bp, Homo sapiens
  source 1..20: mol_type = genomic DNA; note = Gene: HSPG2; note = Location (start to end; relative to TSS): HSPG2_49_79; note = Orientation (relative to transcription): sense; note = sgRNA Position: 21937237; note = Sequence Name: 56322-704_101_SL_seq_9909
ggagcgagcgagcgagagag

SEQ ID NO: 9910 - DNA, 20 bp, Homo sapiens
  source 1..20: mol_type = genomic DNA; note = Gene: ICAM1; note = Location (start to end; relative to TSS): ICAM1_51_81; note = Orientation (relative to transcription): sense; note = sgRNA Position: 10271197; note = Sequence Name: 56322-704_101_SL_seq_9910
gcccgcgctgcccgcactcc

SEQ ID NO: 9911 - DNA, 20 bp, Homo sapiens
  source 1..20: mol_type = genomic DNA; note = Gene: ICAM1; note = Location (start to end; relative to TSS): ICAM1_85_115; note = Orientation (relative to transcription): sense; note = sgRNA Position: 10271231; note = Sequence Name: 56322-704_101_SL_seq_9911
gctctgttcccaggtgagtc

SEQ ID NO: 9912 - DNA, 20 bp, Homo sapiens
  source 1..20: mol_type = genomic DNA; note = Gene: ICAM1; note = Location (start to end; relative to TSS): ICAM1_46_76; note = Orientation (relative to transcription): antisense; note = sgRNA Position: 10271172; note = Sequence Name: 56322-704_101_SL_seq_9912
agcgcgggccgggggctgct

SEQ ID NO: 9913 - DNA, 20 bp, Homo sapiens
  source 1..20: mol_type = genomic DNA; note = Gene: ICAM1; note = Location (start to end; relative to TSS): ICAM1_76_106; note = Orientation (relative to transcription): sense; note = sgRNA Position: 10271222; note = Sequence Name: 56322-704_101_SL_seq_9913
ctgctcggggctctgttccc

SEQ ID NO: 9914 - DNA, 20 bp, Homo sapiens
  source 1..20: mol_type = genomic DNA; note = Gene: ICAM1; note = Location (start to end; relative to TSS): ICAM1_33_63; note = Orientation (relative to transcription): antisense; note = sgRNA Position: 10271159; note = Sequence Name: 56322-704_101_SL_seq_9914
ggctgctgggagccatagcg

SEQ ID NO: 9915 - DNA, 20 bp, Homo sapiens
  source 1..20: mol_type = genomic DNA; note = Gene: ICAM1; note = Location (start to end; relative to TSS): ICAM1_63_93; note = Orientation (relative to transcription): sense; note = sgRNA Position: 10271209; note = Sequence Name: 56322-704_101_SL_seq_9915
cgcactcctggtcctgctcg

SEQ ID NO: 9916 - DNA, 20 bp, Homo sapiens
  source 1..20: mol_type = genomic DNA; note = Gene: ICAM1; note = Location (start to end; relative to TSS): ICAM1_29_59; note = Orientation (relative to transcription): sense; note = sgRNA Position: 10271175; note = Sequence Name: 56322-704_101_SL_seq_9916
ctatggctcccagcagcccc

SEQ ID NO: 9917 - DNA, 20 bp, Homo sapiens
  source 1..20: mol_type = genomic DNA; note = Gene: ICAM1; note = Location (start to end; relative to TSS): ICAM1_62_92; note = Orientation (relative to transcription): antisense; note = sgRNA Position: 10271188; note = Sequence Name: 56322-704_101_SL_seq_9917
gaccaggagtgcgggcagcg

SEQ ID NO: 9918 - DNA, 20 bp, Homo sapiens
  source 1..20: mol_type = genomic DNA; note = Gene: ICAM1; note = Location (start to end; relative to TSS): ICAM1_27_57; note = Orientation (relative to transcription): antisense; note = sgRNA Position: 10271153; note = Sequence Name: 56322-704_101_SL_seq_9918
tgggagccatagcgaggctg

SEQ ID NO: 9919 - DNA, 20 bp, Homo sapiens
  source 1..20: mol_type = genomic DNA; note = Gene: ICAM1; note = Location (start to end; relative to TSS): ICAM1_61_91; note = Orientation (relative to transcription): antisense; note = sgRNA Position: 10271187; note = Sequence Name: 56322-704_101_SL_seq_9919
accaggagtgcgggcagcgc

SEQ ID NO: 9920 - DNA, 20 bp, Homo sapiens
  source 1..20: mol_type = genomic DNA; note = Gene: ICAM2; note = Location (start to end; relative to TSS): ICAM2_62_92; note = Orientation (relative to transcription): antisense; note = sgRNA Position: 64020567; note = Sequence Name: 56322-704_101_SL_seq_9920
tgggatcccgggcaggaaat

SEQ ID NO: 9921 - DNA, 20 bp, Homo sapiens
  source 1..20: mol_type = genomic DNA; note = Gene: ICAM2; note = Location (start to end; relative to TSS): ICAM2_92_122; note = Orientation (relative to transcription): antisense; note = sgRNA Position: 64020537; note = Sequence Name: 56322-704_101_SL_seq_9921
tacccctgtgggctccaaga

SEQ ID NO: 9922 - DNA, 20 bp, Homo sapiens
  source 1..20: mol_type = genomic DNA; note = Gene: ICAM2; note = Location (start to end; relative to TSS): ICAM2_54_84; note = Orientation (relative to transcription): antisense; note = sgRNA Position: 64020575; note = Sequence Name: 56322-704_101_SL_seq_9922
cgggcaggaaattggtgaca

SEQ ID NO: 9923 - DNA, 20 bp, Homo sapiens
  source 1..20: mol_type = genomic DNA; note = Gene: ICAM2; note = Location (start to end; relative to TSS): ICAM2_86_116; note = Orientation (relative to transcription): sense; note = sgRNA Position: 64020523; note = Sequence Name: 56322-704_101_SL_seq_9923
tcttggagcccacaggggta

SEQ ID NO: 9924 - DNA, 20 bp, Homo sapiens
  source 1..20: mol_type = genomic DNA; note = Gene: ICAM2; note = Location (start to end; relative to TSS): ICAM2_46_76; note = Orientation (relative to transcription): antisense; note = sgRNA Position: 64020583; note = Sequence Name: 56322-704_101_SL_seq_9924
aaattggtgacaaggtgaca

SEQ ID NO: 9925 - DNA, 20 bp, Homo sapiens
  source 1..20: mol_type = genomic DNA; note = Gene: ICAM2; note = Location (start to end; relative to TSS): ICAM2_80_110; note = Orientation (relative to transcription): sense; note = sgRNA Position: 64020529; note = Sequence Name: 56322-704_101_SL_seq_9925
tacccttcttggagcccaca

SEQ ID NO: 9926 - DNA, 20 bp, Homo sapiens
  source 1..20: mol_type = genomic DNA; note = Gene: ICAM2; note = Location (start to end; relative to TSS): ICAM2_47_77; note = Orientation (relative to transcription): sense; note = sgRNA Position: 64020562; note = Sequence Name: 56322-704_101_SL_seq_9926
ttgtcaccaatttcctgccc

SEQ ID NO: 9927 - DNA, 20 bp, Homo sapiens
  source 1..20: mol_type = genomic DNA; note = Gene: ICAM2; note = Location (start to end; relative to TSS): ICAM2_79_109; note = Orientation (relative to transcription): sense; note = sgRNA Position: 64020530; note = Sequence Name: 56322-704_101_SL_seq_9927
ctacccttcttggagcccac

SEQ ID NO: 9928 - DNA, 20 bp, Homo sapiens
  source 1..20: mol_type = genomic DNA; note = Gene: ICAM2; note = Location (start to end; relative to TSS): ICAM2_17_47; note = Orientation (relative to transcription): antisense; note = sgRNA Position: 64020612; note = Sequence Name: 56322-704_101_SL_seq_9928
tgtcacagctgcccagttca

SEQ ID NO: 9929 - DNA, 20 bp, Homo sapiens
  source 1..20: mol_type = genomic DNA; note = Gene: ICAM2; note = Location (start to end; relative to TSS): ICAM2_47_77; note = Orientation (relative to transcription): sense; note = sgRNA Position: 64020562; note = Sequence Name: 56322-704_101_SL_seq_9929
ttgtcaccaatttcctgccc

SEQ ID NO: 9930 - DNA, 20 bp, Homo sapiens
  source 1..20: mol_type = genomic DNA; note = Gene: ICAM3; note = Location (start to end; relative to TSS): ICAM3_30_60; note = Orientation (relative to transcription): antisense; note = sgRNA Position: 10339590; note = Sequence Name: 56322-704_101_SL_seq_9930
gcaggccctgggccacaaca

SEQ ID NO: 9931 - DNA, 20 bp, Homo sapiens
  source 1..20: mol_type = genomic DNA; note = Gene: ICAM3; note = Location (start to end; relative to TSS): ICAM3_79_109; note = Orientation (relative to transcription): sense; note = sgRNA Position: 10339521; note = Sequence Name: 56322-704_101_SL_seq_9931
tgagaccagtcaagccgggg

SEQ ID NO: 9932 - DNA, 20 bp, Homo sapiens
  source 1..20: mol_type = genomic DNA; note = Gene: ICAM3; note = Location (start to end; relative to TSS): ICAM3_34_64; note = Orientation (relative to transcription): sense; note = sgRNA Position: 10339566; note = Sequence Name: 56322-704_101_SL_seq_9932
cagggcctgctggactctgc

SEQ ID NO: 9933 - DNA, 20 bp, Homo sapiens
  source 1..20: mol_type = genomic DNA; note = Gene: ICAM3; note = Location (start to end; relative to TSS): ICAM3_76_106; note = Orientation (relative to transcription): sense; note = sgRNA Position: 10339524; note = Sequence Name: 56322-704_101_SL_seq_9933
aggtgagaccagtcaagccg

SEQ ID NO: 9934 - DNA, 20 bp, Homo sapiens
  source 1..20: mol_type = genomic DNA; note = Gene: ICAM3; note = Location (start to end; relative to TSS): ICAM3_26_56; note = Orientation (relative to transcription): antisense; note = sgRNA Position: 10339594; note = Sequence Name: 56322-704_101_SL_seq_9934
gccctgggccacaacacgga

SEQ ID NO: 9935 - DNA, 20 bp, Homo sapiens
  source 1..20: mol_type = genomic DNA; note = Gene: ICAM3; note = Location (start to end; relative to TSS): ICAM3_75_105; note = Orientation (relative to transcription): sense; note = sgRNA Position: 10339525; note = Sequence Name: 56322-704_101_SL_seq_9935
caggtgagaccagtcaagcc

SEQ ID NO: 9936 - DNA, 20 bp, Homo sapiens
  source 1..20: mol_type = genomic DNA; note = Gene: ICAM3; note = Location (start to end; relative to TSS): ICAM3_18_48; note = Orientation (relative to transcription): antisense; note = sgRNA Position: 10339602; note = Sequence Name: 56322-704_101_SL_seq_9936
ccacaacacggatggtacca

SEQ ID NO: 9937 - DNA, 20 bp, Homo sapiens
  source 1..20: mol_type = genomic DNA; note = Gene: ICAM3; note = Location (start to end; relative to TSS): ICAM3_74_104; note = Orientation (relative to transcription): sense; note = sgRNA Position: 10339526; note = Sequence Name: 56322-704_101_SL_seq_9937
ccaggtgagaccagtcaagc

SEQ ID NO: 9938 - DNA, 20 bp, Homo sapiens
  source 1..20: mol_type = genomic DNA; note = Gene: ICAM3; note = Location (start to end; relative to TSS): ICAM3_24_54; note = Orientation (relative to transcription): sense; note = sgRNA Position: 10339576; note = Sequence Name: 56322-704_101_SL_seq_9938
tgttgtggcccagggcctgc

SEQ ID NO: 9939 - DNA, 20 bp, Homo sapiens
  source 1..20: mol_type = genomic DNA; note = Gene: ICAM3; note = Location (start to end; relative to TSS): ICAM3_56_86; note = Orientation (relative to transcription): sense; note = sgRNA Position: 10339544; note = Sequence Name: 56322-704_101_SL_seq_9939
gtctgctgtctgctgacccc

SEQ ID NO: 9940 - DNA, 20 bp, Homo sapiens
  source 1..20: mol_type = genomic DNA; note = Gene: ICAM4; note = Location (start to end; relative to TSS): ICAM4_31_61; note = Orientation (relative to transcription): sense; note = sgRNA Position: 10287012; note = Sequence Name: 56322-704_101_SL_seq_9940
tagtccgggctttttgccat

SEQ ID NO: 9941 - DNA, 20 bp, Homo sapiens
  source 1..20: mol_type = genomic DNA; note = Gene: ICAM4; note = Location (start to end; relative to TSS): ICAM4_88_118; note = Orientation (relative to transcription): sense; note = sgRNA Position: 10287069; note = Sequence Name: 56322-704_101_SL_seq_9941
gcggccgcctacccgggagt

SEQ ID NO: 9942 - DNA, 20 bp, Homo sapiens
  source 1..20: mol_type = genomic DNA; note = Gene: ICAM4; note = Location (start to end; relative to TSS): ICAM4_32_62; note = Orientation (relative to transcription): sense; note = sgRNA Position: 10287013; note = Sequence Name: 56322-704_101_SL_seq_9942
agtccgggctttttgccatg

SEQ ID NO: 9943 - DNA, 20 bp, Homo sapiens
  source 1..20: mol_type = genomic DNA; note = Gene: ICAM4; note = Location (start to end; relative to TSS): ICAM4_82_112; note = Orientation (relative to transcription): sense; note = sgRNA Position: 10287063; note = Sequence Name: 56322-704_101_SL_seq_9943
tttttggcggccgcctaccc

SEQ ID NO: 9944 - DNA, 20 bp, Homo sapiens
  source 1..20: mol_type = genomic DNA; note = Gene: ICAM4; note = Location (start to end; relative to TSS): ICAM4_36_66; note = Orientation (relative to transcription): antisense; note = sgRNA Position: 10286997; note = Sequence Name: 56322-704_101_SL_seq_9944
tggcaaaaagcccggactaa

SEQ ID NO: 9945 - DNA, 20 bp, Homo sapiens
  source 1..20: mol_type = genomic DNA; note = Gene: ICAM4; note = Location (start to end; relative to TSS): ICAM4_81_111; note = Orientation (relative to transcription): sense; note = sgRNA Position: 10287062; note = Sequence Name: 56322-704_101_SL_seq_9945
ttttttggcggccgcctacc

SEQ ID NO: 9946 - DNA, 20 bp, Homo sapiens
  source 1..20: mol_type = genomic DNA; note = Gene: ICAM4; note = Location (start to end; relative to TSS): ICAM4_35_65; note = Orientation (relative to transcription): antisense; note = sgRNA Position: 10286996; note = Sequence Name: 56322-704_101_SL_seq_9946
ggcaaaaagcccggactaag

SEQ ID NO: 9947 - DNA, 20 bp, Homo sapiens
  source 1..20: mol_type = genomic DNA; note = Gene: ICAM4; note = Location (start to end; relative to TSS): ICAM4_73_103; note = Orientation (relative to transcription): antisense; note = sgRNA Position: 10287034; note = Sequence Name: 56322-704_101_SL_seq_9947
aaaaaaaacagcagcgacag

SEQ ID NO: 9948 - DNA, 20 bp, Homo sapiens
  source 1..20: mol_type = genomic DNA; note = Gene: ICAM4; note = Location (start to end; relative to TSS): ICAM4_30_60; note = Orientation (relative to transcription): sense; note = sgRNA Position: 10287011; note = Sequence Name: 56322-704_101_SL_seq_9948
ttagtccgggctttttgcca

SEQ ID NO: 9949 - DNA, 20 bp, Homo sapiens
  source 1..20: mol_type = genomic DNA; note = Gene: ICAM4; note = Location (start to end; relative to TSS): ICAM4_69_99; note = Orientation (relative to transcription): sense; note = sgRNA Position: 10287050; note = Sequence Name: 56322-704_101_SL_seq_9949
gtcgctgctgttttttttgg

SEQ ID NO: 9950 - DNA, 20 bp, Homo sapiens
  source 1..20: mol_type = genomic DNA; note = Gene: ICAM5; note = Location (start to end; relative to TSS): ICAM5_45_75; note = Orientation (relative to transcription): antisense; note = sgRNA Position: 10290003; note = Sequence Name: 56322-704_101_SL_seq_9950
ggcgaggagagcgcgagccg

SEQ ID NO: 9951 - DNA, 20 bp, Homo sapiens
  source 1..20: mol_type = genomic DNA; note = Gene: ICAM5; note = Location (start to end; relative to TSS): ICAM5_79_109; note = Orientation (relative to transcription): antisense; note = sgRNA Position: 10290037; note = Sequence Name: 56322-704_101_SL_seq_9951
gccctggcatcgccgcggcg

SEQ ID NO: 9952 - DNA, 20 bp, Homo sapiens
  source 1..20: mol_type = genomic DNA; note = Gene: ICAM5; note = Location (start to end; relative to TSS): ICAM5_38_68; note = Orientation (relative to transcription): antisense; note = sgRNA Position: 10289996; note = Sequence Name: 56322-704_101_SL_seq_9952
agagcgcgagccgaggagct

SEQ ID NO: 9953 - DNA, 20 bp, Homo sapiens
  source 1..20: mol_type = genomic DNA; note = Gene: ICAM5; note = Location (start to end; relative to TSS): ICAM5_68_98; note = Orientation (relative to transcription): sense; note = sgRNA Position: 10290046; note = Sequence Name: 56322-704_101_SL_seq_9953
ttccccgccgcggcgatgcc

SEQ ID NO: 9954 - DNA, 20 bp, Homo sapiens
  source 1..20: mol_type = genomic DNA; note = Gene: ICAM5; note = Location (start to end; relative to TSS): ICAM5_31_61; note = Orientation (relative to transcription): antisense; note = sgRNA Position: 10289989; note = Sequence Name: 56322-704_101_SL_seq_9954
gagccgaggagctgggctag

SEQ ID NO: 9955 - DNA, 20 bp, Homo sapiens
  source 1..20: mol_type = genomic DNA; note = Gene: ICAM5; note = Location (start to end; relative to TSS): ICAM5_66_96; note = Orientation (relative to transcription): antisense; note = sgRNA Position: 10290024; note = Sequence Name: 56322-704_101_SL_seq_9955
cgcggcggggaaagcacagg

SEQ ID NO: 9956 - DNA, 20 bp, Homo sapiens
  source 1..20: mol_type = genomic DNA; note = Gene: ICAM5; note = Location (start to end; relative to TSS): ICAM5_19_49; note = Orientation (relative to transcription): sense; note = sgRNA Position: 10289997; note = Sequence Name: 56322-704_101_SL_seq_9956
cgtcctctagcccagctcct

SEQ ID NO: 9957 - DNA, 20 bp, Homo sapiens
  source 1..20: mol_type = genomic DNA; note = Gene: ICAM5; note = Location (start to end; relative to TSS): ICAM5_61_91; note = Orientation (relative to transcription): antisense; note = sgRNA Position: 10290019; note = Sequence Name: 56322-704_101_SL_seq_9957
cggggaaagcacaggaggcg

SEQ ID NO: 9958 - DNA, 20 bp, Homo sapiens
  source 1..20: mol_type = genomic DNA; note = Gene: ICAM5; note = Location (start to end; relative to TSS): ICAM5_27_57; note = Orientation (relative to transcription): antisense; note = sgRNA Position: 10289985; note = Sequence Name: 56322-704_101_SL_seq_9958
cgaggagctgggctagagga

SEQ ID NO: 9959 - DNA, 20 bp, Homo sapiens
  source 1..20: mol_type = genomic DNA; note = Gene: ICAM5; note = Location (start to end; relative to TSS): ICAM5_58_88; note = Orientation (relative to transcription): sense; note = sgRNA Position: 10290036; note = Sequence Name: 56322-704_101_SL_seq_9959
ctcctgtgctttccccgccg

SEQ ID NO: 9960 - DNA, 20 bp, Homo sapiens
  source 1..20: mol_type = genomic DNA; note = Gene: ICOSLG; note = Location (start to end; relative to TSS): ICOSLG_42_72; note = Orientation (relative to transcription): antisense; note = sgRNA Position: 44240897; note = Sequence Name: 56322-704_101_SL_seq_9960
acttgggccgcgggagacct

SEQ ID NO: 9961 - DNA, 20 bp, Homo sapiens
  source 1..20: mol_type = genomic DNA; note = Gene: ICOSLG; note = Location (start to end; relative to TSS): ICOSLG_73_103; note = Orientation (relative to transcription): antisense; note = sgRNA Position: 44240866; note = Sequence Name: 56322-704_101_SL_seq_9961
ctcggggcgcggagacctcg

SEQ ID NO: 9962 - DNA, 20 bp, Homo sapiens
  source 1..20: mol_type = genomic DNA; note = Gene: ICOSLG; note = Location (start to end; relative to TSS): ICOSLG_25_55; note = Orientation (relative to transcription): antisense; note = sgRNA Position: 44240914; note = Sequence Name: 56322-704_101_SL_seq_9962
cctcggagaggagcaacctc

SEQ ID NO: 9963 - DNA, 20 bp, Homo sapiens
  source 1..20: mol_type = genomic DNA; note = Gene: ICOSLG; note = Location (start to end; relative to TSS): ICOSLG_65_95; note = Orientation (relative to transcription): sense; note = sgRNA Position: 44240854; note = Sequence Name: 56322-704_101_SL_seq_9963
cccgaggtctccgcgccccg

SEQ ID NO: 9964 - DNA, 20 bp, Homo sapiens
  source 1..20: mol_type = genomic DNA; note = Gene: ICOSLG; note = Location (start to end; relative to TSS): ICOSLG_24_54; note = Orientation (relative to transcription): antisense; note = sgRNA Position: 44240915; note = Sequence Name: 56322-704_101_SL_seq_9964
ctcggagaggagcaacctcg

SEQ ID NO: 9965 - DNA, 20 bp, Homo sapiens
  source 1..20: mol_type = genomic DNA; note = Gene: ICOSLG; note = Location (start to end; relative to TSS): ICOSLG_58_88; note = Orientation (relative to transcription): antisense; note = sgRNA Position: 44240881; note = Sequence Name: 56322-704_101_SL_seq_9965
cctcggggcgcggagaactt

SEQ ID NO: 9966 - DNA, 20 bp, Homo sapiens
  source 1..20: mol_type = genomic DNA; note = Gene: ICOSLG; note = Location (start to end; relative to TSS): ICOSLG_18_48; note = Orientation (relative to transcription): antisense; note = sgRNA Position: 44240921; note = Sequence Name: 56322-704_101_SL_seq_9966
gaggagcaacctcggggcgc

SEQ ID NO: 9967 - DNA, 20 bp, Homo sapiens
  source 1..20: mol_type = genomic DNA; note = Gene: ICOSLG; note = Location (start to end; relative to TSS): ICOSLG_51_81; note = Orientation (relative to transcription): antisense; note = sgRNA Position: 44240888; note = Sequence Name: 56322-704_101_SL_seq_9967
gcgcggagaacttgggccgc

SEQ ID NO: 9968 - DNA, 20 bp, Homo sapiens
  source 1..20: mol_type = genomic DNA; note = Gene: ICOSLG; note = Location (start to end; relative to TSS): ICOSLG_19_49; note = Orientation (relative to transcription): antisense; note = sgRNA Position: 44240920; note = Sequence Name: 56322-704_101_SL_seq_9968
agaggagcaacctcggggcg

SEQ ID NO: 9969 - DNA, 20 bp, Homo sapiens
  source 1..20: mol_type = genomic DNA; note = Gene: ICOSLG; note = Location (start to end; relative to TSS): ICOSLG_49_79; note = Orientation (relative to transcription): sense; note = sgRNA Position: 44240870; note = Sequence Name: 56322-704_101_SL_seq_9969
cccaagttctccgcgccccg

SEQ ID NO: 9970 - DNA, 20 bp, Homo sapiens
  source 1..20: mol_type = genomic DNA; note = Gene: IGDCC3; note = Location (start to end; relative to TSS): IGDCC3_52_82; note = Orientation (relative to transcription): antisense; note = sgRNA Position: 65377946; note = Sequence Name: 56322-704_101_SL_seq_9970
tgcctgctcagcagcgcggg

SEQ ID NO: 9971 - DNA, 20 bp, Homo sapiens
  source 1..20: mol_type = genomic DNA; note = Gene: IGDCC3; note = Location (start to end; relative to TSS): IGDCC3_87_117; note = Orientation (relative to transcription): antisense; note = sgRNA Position: 65377911; note = Sequence Name: 56322-704_101_SL_seq_9971
gggccgagcccaggcggtgg

SEQ ID NO: 9972 - DNA, 20 bp, Homo sapiens
  source 1..20: mol_type = genomic DNA; note = Gene: IGDCC3; note = Location (start to end; relative to TSS): IGDCC3_53_83; note = Orientation (relative to transcription): antisense; note = sgRNA Position: 65377945; note = Sequence Name: 56322-704_101_SL_seq_9972
atgcctgctcagcagcgcgg

SEQ ID NO: 9973 - DNA, 20 bp, Homo sapiens
  source 1..20: mol_type = genomic DNA; note = Gene: IGDCC3; note = Location (start to end; relative to TSS): IGDCC3_85_115; note = Orientation (relative to transcription): sense; note = sgRNA Position: 65377893; note = Sequence Name: 56322-704_101_SL_seq_9973
cgcctgggctcggccccggc

SEQ ID NO: 9974 - DNA, 20 bp, Homo sapiens
  source 1..20: mol_type = genomic DNA; note = Gene: IGDCC3; note = Location (start to end; relative to TSS): IGDCC3_48_78; note = Orientation (relative to transcription): sense; note = sgRNA Position: 65377930; note = Sequence Name: 56322-704_101_SL_seq_9974
cgcgctgctgagcaggcatg

SEQ ID NO: 9975 - DNA, 20 bp, Homo sapiens
  source 1..20: mol_type = genomic DNA; note = Gene: IGDCC3; note = Location (start to end; relative to TSS): IGDCC3_81_111; note = Orientation (relative to transcription): sense; note = sgRNA Position: 65377897; note = Sequence Name: 56322-704_101_SL_seq_9975
ccaccgcctgggctcggccc

SEQ ID NO: 9976 - DNA, 20 bp, Homo sapiens
  source 1..20: mol_type = genomic DNA; note = Gene: IGDCC3; note = Location (start to end; relative to TSS): IGDCC3_41_71; note = Orientation (relative to transcription): sense; note = sgRNA Position: 65377937; note = Sequence Name: 56322-704_101_SL_seq_9976
cgccccccgcgctgctgagc

SEQ ID NO: 9977 - DNA, 20 bp, Homo sapiens
  source 1..20: mol_type = genomic DNA; note = Gene: IGDCC3; note = Location (start to end; relative to TSS): IGDCC3_80_110; note = Orientation (relative to transcription): antisense; note = sgRNA Position: 65377918; note = Sequence Name: 56322-704_101_SL_seq_9977
gcccaggcggtgggggactg

SEQ ID NO: 9978 - DNA, 20 bp, Homo sapiens
  source 1..20: mol_type = genomic DNA; note = Gene: IGDCC3; note = Location (start to end; relative to TSS): IGDCC3_45_75; note = Orientation (relative to transcription): antisense; note = sgRNA Position: 65377953; note = Sequence Name: 56322-704_101_SL_seq_9978
tcagcagcgcggggggcgca

SEQ ID NO: 9979 - DNA, 20 bp, Homo sapiens
  source 1..20: mol_type = genomic DNA; note = Gene: IGDCC3; note = Location (start to end; relative to TSS): IGDCC3_75_105; note = Orientation (relative to transcription): sense; note = sgRNA Position: 65377903; note = Sequence Name: 56322-704_101_SL_seq_9979
agtcccccaccgcctgggct

SEQ ID NO: 9980 - DNA, 20 bp, Homo sapiens
  source 1..20: mol_type = genomic DNA; note = Gene: IGDCC4; note = Location (start to end; relative to TSS): IGDCC4_25_55; note = Orientation (relative to transcription): antisense; note = sgRNA Position: 65422918; note = Sequence Name: 56322-704_101_SL_seq_9980
ccgtgcttcggccgccgccg

SEQ ID NO: 9981 - DNA, 20 bp, Homo sapiens
  source 1..20: mol_type = genomic DNA; note = Gene: IGDCC4; note = Location (start to end; relative to TSS): IGDCC4_67_97; note = Orientation (relative to transcription): sense; note = sgRNA Position: 65422856; note = Sequence Name: 56322-704_101_SL_seq_9981
gcccagccccatggcgcggg

SEQ ID NO: 9982 - DNA, 20 bp, Homo sapiens
  source 1..20: mol_type = genomic DNA; note = Gene: IGDCC4; note = Location (start to end; relative to TSS): IGDCC4_23_53; note = Orientation (relative to transcription): antisense; note = sgRNA Position: 65422920; note = Sequence Name: 56322-704_101_SL_seq_9982
gtgcttcggccgccgccgcg

SEQ ID NO: 9983 - DNA, 20 bp, Homo sapiens
  source 1..20: mol_type = genomic DNA; note = Gene: IGDCC4; note = Location (start to end; relative to TSS): IGDCC4_66_96; note = Orientation (relative to transcription): sense; note = sgRNA Position: 65422857; note = Sequence Name: 56322-704_101_SL_seq_9983
agcccagccccatggcgcgg

SEQ ID NO: 9984 - DNA, 20 bp, Homo sapiens
  source 1..20: mol_type = genomic DNA; note = Gene: IGDCC4; note = Location (start to end; relative to TSS): IGDCC4_18_48; note = Orientation (relative to transcription): sense; note = sgRNA Position: 65422905; note = Sequence Name: 56322-704_101_SL_seq_9984
gcggcggcggccgaagcacg

SEQ ID NO: 9985 - DNA, 20 bp, Homo sapiens
  source 1..20: mol_type = genomic DNA; note = Gene: IGDCC4; note = Location (start to end; relative to TSS): IGDCC4_65_95; note = Orientation (relative to transcription): sense; note = sgRNA Position: 65422858; note = Sequence Name: 56322-704_101_SL_seq_9985
gagcccagccccatggcgcg

SEQ ID NO: 9986 - DNA, 20 bp, Homo sapiens
  source 1..20: mol_type = genomic DNA; note = Gene: IGDCC4; note = Location (start to end; relative to TSS): IGDCC4_21_51; note = Orientation (relative to transcription): antisense; note = sgRNA Position: 65422922; note = Sequence Name: 56322-704_101_SL_seq_9986
gcttcggccgccgccgcggg

SEQ ID NO: 9987 - DNA, 20 bp, Homo sapiens
  source 1..20: mol_type = genomic DNA; note = Gene: IGDCC4; note = Location (start to end; relative to TSS): IGDCC4_63_93; note = Orientation (relative to transcription): sense; note = sgRNA Position: 65422860; note = Sequence Name: 56322-704_101_SL_seq_9987
ccgagcccagccccatggcg

SEQ ID NO: 9988 - DNA, 20 bp, Homo sapiens
  source 1..20: mol_type = genomic DNA; note = Gene: IGDCC4; note = Location (start to end; relative to TSS): IGDCC4_22_52; note = Orientation (relative to transcription): antisense; note = sgRNA Position: 65422921; note = Sequence Name: 56322-704_101_SL_seq_9988
tgcttcggccgccgccgcgg

SEQ ID NO: 9989 - DNA, 20 bp, Homo sapiens
  source 1..20: mol_type = genomic DNA; note = Gene: IGDCC4; note = Location (start to end; relative to TSS): IGDCC4_58_88; note = Orientation (relative to transcription): sense; note = sgRNA Position: 65422865; note = Sequence Name: 56322-704_101_SL_seq_9989
gcggcccgagcccagcccca

SEQ ID NO: 9990 - DNA, 20 bp, Homo sapiens
  source 1..20: mol_type = genomic DNA; note = Gene: IGFBP7; note = Location (start to end; relative to TSS): IGFBP7_28_58; note = Orientation (relative to transcription): antisense; note = sgRNA Position: 57110353; note = Sequence Name: 56322-704_101_SL_seq_9990
gcgacggccgctccatggcg

SEQ ID NO: 9991 - DNA, 20 bp, Homo sapiens
  source 1..20: mol_type = genomic DNA; note = Gene: IGFBP7; note = Location (start to end; relative to TSS): IGFBP7_91_121; note = Orientation (relative to transcription): sense; note = sgRNA Position: 57110270; note = Sequence Name: 56322-704_101_SL_seq_9991
cctctcctcttcctcctctt

SEQ ID NO: 9992 - DNA, 20 bp, Homo sapiens
  source 1..20: mol_type = genomic DNA; note = Gene: IGFBP7; note = Location (start to end; relative to TSS): IGFBP7_29_59; note = Orientation (relative to transcription): antisense; note = sgRNA Position: 57110352; note = Sequence Name: 56322-704_101_SL_seq_9992
agcgacggccgctccatggc

SEQ ID NO: 9993 - DNA, 20 bp, Homo sapiens
  source 1..20: mol_type = genomic DNA; note = Gene: IGFBP7; note = Location (start to end; relative to TSS): IGFBP7_88_118; note = Orientation (relative to transcription): antisense; note = sgRNA Position: 57110293; note = Sequence Name: 56322-704_101_SL_seq_9993
aagaggagaggggcaggagc

SEQ ID NO: 9994 - DNA, 20 bp, Homo sapiens
  source 1..20: mol_type = genomic DNA; note = Gene: IGFBP7; note = Location (start to end; relative to TSS): IGFBP7_30_60; note = Orientation (relative to transcription): antisense; note = sgRNA Position: 57110351; note = Sequence Name: 56322-704_101_SL_seq_9994
cagcgacggccgctccatgg

SEQ ID NO: 9995 - DNA, 20 bp, Homo sapiens
  source 1..20: mol_type = genomic DNA; note = Gene: IGFBP7; note = Location (start to end; relative to TSS): IGFBP7_72_102; note = Orientation (relative to transcription): antisense; note = sgRNA Position: 57110309; note = Sequence Name: 56322-704_101_SL_seq_9995
gagcaggagcagcagcccag

SEQ ID NO: 9996 - DNA, 20 bp, Homo sapiens
  source 1..20: mol_type = genomic DNA; note = Gene: IGFBP7; note = Location (start to end; relative to TSS): IGFBP7_23_53; note = Orientation (relative to transcription): antisense; note = sgRNA Position: 57110358; note = Sequence Name: 56322-704_101_SL_seq_9996
ggccgctccatggcggggtg

SEQ ID NO: 9997 - DNA, 20 bp, Homo sapiens
  source 1..20: mol_type = genomic DNA; note = Gene: IGFBP7; note = Location (start to end; relative to TSS): IGFBP7_64_94; note = Orientation (relative to transcription): antisense; note = sgRNA Position: 57110317; note = Sequence Name: 56322-704_101_SL_seq_9997
gcagcagcccagcggcgccg

SEQ ID NO: 9998 - DNA, 20 bp, Homo sapiens
  source 1..20: mol_type = genomic DNA; note = Gene: IGFBP7; note = Location (start to end; relative to TSS): IGFBP7_20_50; note = Orientation (relative to transcription): antisense; note = sgRNA Position: 57110361; note = Sequence Name: 56322-704_101_SL_seq_9998
cgctccatggcggggtgcgg

SEQ ID NO: 9999 - DNA, 20 bp, Homo sapiens
  source 1..20: mol_type = genomic DNA; note = Gene: IGFBP7; note = Location (start to end; relative to TSS): IGFBP7_57_87; note = Orientation (relative to transcription): antisense; note = sgRNA Position: 57110324; note = Sequence Name: 56322-704_101_SL_seq_9999
cccagcggcgccgaggagca

SEQ ID NO: 10000 - DNA, 20 bp, Homo sapiens
  source 1..20: mol_type = genomic DNA; note = Gene: IGFBPL1; note = Location (start to end; relative to TSS): IGFBPL1_55_85; note = Orientation (relative to transcription): antisense; note = sgRNA Position: 38424395; note = Sequence Name: 56322-704_101_SL_seq_10000
agcagcagcagaagcagcag

SEQ ID NO: 10001 - DNA, 20 bp, Homo sapiens
  source 1..20: mol_type = genomic DNA; note = Gene: IGFBPL1; note = Location (start to end; relative to TSS): IGFBPL1_93_123; note = Orientation (relative to transcription): sense; note = sgRNA Position: 38424337; note = Sequence Name: 56322-704_101_SL_seq_10001
gagccttgggatccgcgacg

SEQ ID NO: 10002 - DNA, 20 bp, Homo sapiens
  source 1..20: mol_type = genomic DNA; note = Gene: IGFBPL1; note = Location (start to end; relative to TSS): IGFBPL1_18_48; note = Orientation (relative to transcription): antisense; note = sgRNA Position: 38424432; note = Sequence Name: 56322-704_101_SL_seq_10002
agcgcggcatggcttgctcc

SEQ ID NO: 10003 - DNA, 20 bp, Homo sapiens
  source 1..20: mol_type = genomic DNA; note = Gene: IGFBPL1; note = Location (start to end; relative to TSS): IGFBPL1_91_121; note = Orientation (relative to transcription): antisense; note = sgRNA Position: 38424359; note = Sequence Name: 56322-704_101_SL_seq_10003
atcccaaggctcggggacag

SEQ ID NO: 10004 - DNA, 20 bp, Homo sapiens
  source 1..20: mol_type = genomic DNA; note = Gene: IGFBPL1; note = Location (start to end; relative to TSS): IGFBPL1_19_49; note = Orientation (relative to transcription): antisense; note = sgRNA Position: 38424431; note = Sequence Name: 56322-704_101_SL_seq_10004
aagcgcggcatggcttgctc

SEQ ID NO: 10005 - DNA, 20 bp, Homo sapiens
  source 1..20: mol_type = genomic DNA; note = Gene: IGFBPL1; note = Location (start to end; relative to TSS): IGFBPL1_88_118; note = Orientation (relative to transcription): antisense; note = sgRNA Position: 38424362; note = Sequence Name: 56322-704_101_SL_seq_10005
ccaaggctcggggacagcgg

SEQ ID NO: 10006 - DNA, 20 bp, Homo sapiens
  source 1..20: mol_type = genomic DNA; note = Gene: IGFBPL1; note = Location (start to end; relative to TSS): IGFBPL1_11_41; note = Orientation (relative to transcription): antisense; note = sgRNA Position: 38424439; note = Sequence Name: 56322-704_101_SL_seq_10006
catggcttgctccgggacag

SEQ ID NO: 10007 - DNA, 20 bp, Homo sapiens
  source 1..20: mol_type = genomic DNA; note = Gene: IGFBPL1; note = Location (start to end; relative to TSS): IGFBPL1_79_109; note = Orientation (relative to transcription): antisense; note = sgRNA Position: 38424371; note = Sequence Name: 56322-704_101_SL_seq_10007
ggggacagcggcggcagcag

SEQ ID NO: 10008 - DNA, 20 bp, Homo sapiens
  source 1..20: mol_type = genomic DNA; note = Gene: IGFBPL1; note = Location (start to end; relative to TSS): IGFBPL1_8_38; note = Orientation (relative to transcription): antisense; note = sgRNA Position: 38424442; note = Sequence Name: 56322-704_101_SL_seq_10008
ggcttgctccgggacagcgg

SEQ ID NO: 10009 - DNA, 20 bp, Homo sapiens
  source 1..20: mol_type = genomic DNA; note = Gene: IGFBPL1; note = Location (start to end; relative to TSS): IGFBPL1_55_85; note = Orientation (relative to transcription): antisense; note = sgRNA Position: 38424395; note = Sequence Name: 56322-704_101_SL_seq_10009
agcagcagcagaagcagcag

SEQ ID NO: 10010 - DNA, 20 bp, Homo sapiens
  source 1..20: mol_type = genomic DNA; note = Gene: IGFN1; note = Location (start to end; relative to TSS): IGFN1_36_66; note = Orientation (relative to transcription): sense; note = sgRNA Position: 201190886; note = Sequence Name: 56322-704_101_SL_seq_10010
gggagcagacaggaagcggg

SEQ ID NO: 10011 - DNA, 20 bp, Homo sapiens
  source 1..20: mol_type = genomic DNA; note = Gene: IGFN1; note = Location (start to end; relative to TSS): IGFN1_80_110; note = Orientation (relative to transcription): antisense; note = sgRNA Position: 201190910; note = Sequence Name: 56322-704_101_SL_seq_10011
ggtgtgagcacccacttacc

SEQ ID NO: 10012 - DNA, 20 bp, Homo sapiens
  source 1..20: mol_type = genomic DNA; note = Gene: IGFN1; note = Location (start to end; relative to TSS): IGFN1_33_63; note = Orientation (relative to transcription): sense; note = sgRNA Position: 201190883; note = Sequence Name: 56322-704_101_SL_seq_10012
agagggagcagacaggaagc

SEQ ID NO: 10013 - DNA, 20 bp, Homo sapiens
  source 1..20: mol_type = genomic DNA; note = Gene: IGFN1; note = Location (start to end; relative to TSS): IGFN1_79_109; note = Orientation (relative to transcription): antisense; note = sgRNA Position: 201190909; note = Sequence Name: 56322-704_101_SL_seq_10013
gtgtgagcacccacttacct

SEQ ID NO: 10014 - DNA, 20 bp, Homo sapiens
  source 1..20: mol_type = genomic DNA; note = Gene: IGFN1; note = Location (start to end; relative to TSS): IGFN1_32_62; note = Orientation (relative to transcription): sense; note = sgRNA Position: 201190882; note = Sequence Name: 56322-704_101_SL_seq_10014
aagagggagcagacaggaag

SEQ ID NO: 10015 - DNA, 20 bp, Homo sapiens
  source 1..20: mol_type = genomic DNA; note = Gene: IGFN1; note = Location (start to end; relative to TSS): IGFN1_74_104; note = Orientation (relative to transcription): sense; note = sgRNA Position: 201190924; note = Sequence Name: 56322-704_101_SL_seq_10015
ggtaagtgggtgctcacacc

SEQ ID NO: 10016 - DNA, 20 bp, Homo sapiens
  source 1..20: mol_type = genomic DNA; note = Gene: IGFN1; note = Location (start to end; relative to TSS): IGFN1_26_56; note = Orientation (relative to transcription): sense; note = sgRNA Position: 201190876; note = Sequence Name: 56322-704_101_SL_seq_10016
acggggaagagggagcagac

SEQ ID NO: 10017 - DNA, 20 bp, Homo sapiens
  source 1..20: mol_type = genomic DNA; note = Gene: IGFN1; note = Location (start to end; relative to TSS): IGFN1_60_90; note = Orientation (relative to transcription): sense; note = sgRNA Position: 201190910; note = Sequence Name: 56322-704_101_SL_seq_10017
cagctgtacacccaggtaag

SEQ ID NO: 10018 - DNA, 20 bp, Homo sapiens
  source 1..20: mol_type = genomic DNA; note = Gene: IGFN1; note = Location (start to end; relative to TSS): IGFN1_16_46; note = Orientation (relative to transcription): sense; note = sgRNA Position: 201190866; note = Sequence Name: 56322-704_101_SL_seq_10018
gcagctggaaacggggaaga

SEQ ID NO: 10019 - DNA, 20 bp, Homo sapiens
  source 1..20: mol_type = genomic DNA; note = Gene: IGFN1; note = Location (start to end; relative to TSS): IGFN1_53_83; note = Orientation (relative to transcription): sense; note = sgRNA Position: 201190903; note = Sequence Name: 56322-704_101_SL_seq_10019
gggaggtcagctgtacaccc

SEQ ID NO: 10020 - DNA, 20 bp, Homo sapiens
  source 1..20: mol_type = genomic DNA; note = Gene: IGLL1; note = Location (start to end; relative to TSS): IGLL1_40_70; note = Orientation (relative to transcription): antisense; note = sgRNA Position: 23580246; note = Sequence Name: 56322-704_101_SL_seq_10020
agtgtgggctccctagagag

SEQ ID NO: 10021 - DNA, 20 bp, Homo sapiens
  source 1..20: mol_type = genomic DNA; note = Gene: IGLL1; note = Location (start to end; relative to TSS): IGLL1_75_105; note = Orientation (relative to transcription): sense; note = sgRNA Position: 23580191; note = Sequence Name: 56322-704_101_SL_seq_10021
tctgaccctgagggccgatg

SEQ ID NO: 10022 - DNA, 20 bp, Homo sapiens
  source 1..20: mol_type = genomic DNA; note = Gene: IGLL1; note = Location (start to end; relative to TSS): IGLL1_32_62; note = Orientation (relative to transcription): antisense; note = sgRNA Position: 23580254; note = Sequence Name: 56322-704_101_SL_seq_10022
ctccctagagagtggtgccc

SEQ ID NO: 10023 - DNA, 20 bp, Homo sapiens
  source 1..20: mol_type = genomic DNA; note = Gene: IGLL1; note = Location (start to end; relative to TSS): IGLL1_65_95; note = Orientation (relative to transcription): sense; note = sgRNA Position: 23580201; note = Sequence Name: 56322-704_101_SL_seq_10023
cacaaggacctctgaccctg

SEQ ID NO: 10024 - DNA, 20 bp, Homo sapiens
  source 1..20: mol_type = genomic DNA; note = Gene: IGLL1; note = Location (start to end; relative to TSS): IGLL1_21_51; note = Orientation (relative to transcription): sense; note = sgRNA Position: 23580245; note = Sequence Name: 56322-704_101_SL_seq_10024
gaccagggcaccactctcta

SEQ ID NO: 10025 - DNA, 20 bp, Homo sapiens
  source 1..20: mol_type = genomic DNA; note = Gene: IGLL1; note = Location (start to end; relative to TSS): IGLL1_56_86; note = Orientation (relative to transcription): antisense; note = sgRNA Position: 23580230; note = Sequence Name: 56322-704_101_SL_seq_10025
ttgtggcctgacttgcagtg

SEQ ID NO: 10026 - DNA, 20 bp, Homo sapiens
  source 1..20: mol_type = genomic DNA; note = Gene: IGLL1; note = Location (start to end; relative to TSS): IGLL1_20_50; note = Orientation (relative to transcription): sense; note = sgRNA Position: 23580246; note = Sequence Name: 56322-704_101_SL_seq_10026
ggaccagggcaccactctct

SEQ ID NO: 10027 - DNA, 20 bp, Homo sapiens
  source 1..20: mol_type = genomic DNA; note = Gene: IGLL1; note = Location (start to end; relative to TSS): IGLL1_55_85; note = Orientation (relative to transcription): antisense; note = sgRNA Position: 23580231; note = Sequence Name: 56322-704_101_SL_seq_10027
tgtggcctgacttgcagtgt

SEQ ID NO: 10028 - DNA, 20 bp, Homo sapiens
  source 1..20: mol_type = genomic DNA; note = Gene: IGLL1; note = Location (start to end; relative to TSS): IGLL1_19_49; note = Orientation (relative to transcription): antisense; note = sgRNA Position: 23580267; note = Sequence Name: 56322-704_101_SL_seq_10028
ggtgccctggtccctctcgc

SEQ ID NO: 10029 - DNA, 20 bp, Homo sapiens
  source 1..20: mol_type = genomic DNA; note = Gene: IGLL1; note = Location (start to end; relative to TSS): IGLL1_49_79; note = Orientation (relative to transcription): sense; note = sgRNA Position: 23580217; note = Sequence Name: 56322-704_101_SL_seq_10029
acactgcaagtcaggccaca

SEQ ID NO: 10030 - DNA, 20 bp, Homo sapiens
  source 1..20: mol_type = genomic DNA; note = Gene: IGLL5; note = Location (start to end; relative to TSS): IGLL5_33_63; note = Orientation (relative to transcription): sense; note = sgRNA Position: 22887875; note = Sequence Name: 56322-704_101_SL_seq_10030
atccccaggggtgacagcca

SEQ ID NO: 10031 - DNA, 20 bp, Homo sapiens
  source 1..20: mol_type = genomic DNA; note = Gene: IGLL5; note = Location (start to end; relative to TSS): IGLL5_63_93; note = Orientation (relative to transcription): sense; note = sgRNA Position: 22887905; note = Sequence Name: 56322-704_101_SL_seq_10031
aagggcctgggctagggaca

SEQ ID NO: 10032 - DNA, 20 bp, Homo sapiens
  source 1..20: mol_type = genomic DNA; note = Gene: IGLL5; note = Location (start to end; relative to TSS): IGLL5_30_60; note = Orientation (relative to transcription): antisense; note = sgRNA Position: 22887852; note = Sequence Name: 56322-704_101_SL_seq_10032
cccctggggatctctcccag

SEQ ID NO: 10033 - DNA, 20 bp, Homo sapiens
  source 1..20: mol_type = genomic DNA; note = Gene: IGLL5; note = Location (start to end; relative to TSS): IGLL5_62_92; note = Orientation (relative to transcription): sense; note = sgRNA Position: 22887904; note = Sequence Name: 56322-704_101_SL_seq_10033
gaagggcctgggctagggac

SEQ ID NO: 10034 - DNA, 20 bp, Homo sapiens
  source 1..20: mol_type = genomic DNA; note = Gene: IGLL5; note = Location (start to end; relative to TSS): IGLL5_21_51; note = Orientation (relative to transcription): sense; note = sgRNA Position: 22887863; note = Sequence Name: 56322-704_101_SL_seq_10034
cctctgggagagatccccag

SEQ ID NO: 10035 - DNA, 20 bp, Homo sapiens
  source 1..20: mol_type = genomic DNA; note = Gene: IGLL5; note = Location (start to end; relative to TSS): IGLL5_56_86; note = Orientation (relative to transcription): sense; note = sgRNA Position: 22887898; note = Sequence Name: 56322-704_101_SL_seq_10035
accctggaagggcctgggct

SEQ ID NO: 10036 - DNA, 20 bp, Homo sapiens
  source 1..20: mol_type = genomic DNA; note = Gene: IGLL5; note = Location (start to end; relative to TSS): IGLL5_20_50; note = Orientation (relative to transcription): sense; note = sgRNA Position: 22887862; note = Sequence Name: 56322-704_101_SL_seq_10036
ccctctgggagagatcccca

SEQ ID NO: 10037 - DNA, 20 bp, Homo sapiens
  source 1..20: mol_type = genomic DNA; note = Gene: IGLL5; note = Location (start to end; relative to TSS): IGLL5_51_81; note = Orientation (relative to transcription): sense; note = sgRNA Position: 22887893; note = Sequence Name: 56322-704_101_SL_seq_10037
catggaccctggaagggcct

SEQ ID NO: 10038 - DNA, 20 bp, Homo sapiens
  source 1..20: mol_type = genomic DNA; note = Gene: IGLL5; note = Location (start to end; relative to TSS): IGLL5_19_49; note = Orientation (relative to transcription): sense; note = sgRNA Position: 22887861; note = Sequence Name: 56322-704_101_SL_seq_10038
cccctctgggagagatcccc

SEQ ID NO: 10039 - DNA, 20 bp, Homo sapiens
  source 1..20: mol_type = genomic DNA; note = Gene: IGLL5; note = Location (start to end; relative to TSS): IGLL5_50_80; note = Orientation (relative to transcription): sense; note = sgRNA Position: 22887892; note = Sequence Name: 56322-704_101_SL_seq_10039
ccatggaccctggaagggcc

SEQ ID NO: 10040 - DNA, 20 bp, Homo sapiens
  source 1..20: mol_type = genomic DNA; note = Gene: IGLON5; note = Location (start to end; relative to TSS): IGLON5_43_73; note = Orientation (relative to transcription): antisense; note = sgRNA Position: 51311693; note = Sequence Name: 56322-704_101_SL_seq_10040
ggggctgggggggcgcgacg

SEQ ID NO: 10041 - DNA, 20 bp, Homo sapiens
  source 1..20: mol_type = genomic DNA; note = Gene: IGLON5; note = Location (start to end; relative to TSS): IGLON5_79_109; note = Orientation (relative to transcription): sense; note = sgRNA Position: 51311749; note = Sequence Name: 56322-704_101_SL_seq_10041
ccgggccggtgcagcgcagg

SEQ ID NO: 10042 - DNA, 20 bp, Homo sapiens
  source 1..20: mol_type = genomic DNA; note = Gene: IGLON5; note = Location (start to end; relative to TSS): IGLON5_19_49; note = Orientation (relative to transcription): antisense; note = sgRNA Position: 51311669; note = Sequence Name: 56322-704_101_SL_seq_10042
ggctggagctgctgcagacc

SEQ ID NO: 10043 - DNA, 20 bp, Homo sapiens
  source 1..20: mol_type = genomic DNA; note = Gene: IGLON5; note = Location (start to end; relative to TSS): IGLON5_65_95; note = Orientation (relative to transcription): sense; note = sgRNA Position: 51311735; note = Sequence Name: 56322-704_101_SL_seq_10043
gcccccgccgccccccgggc

SEQ ID NO: 10044 - DNA, 20 bp, Homo sapiens
  source 1..20: mol_type = genomic DNA; note = Gene: IGLON5; note = Location (start to end; relative to TSS): IGLON5_18_48; note = Orientation (relative to transcription): antisense; note = sgRNA Position: 51311668; note = Sequence Name: 56322-704_101_SL_seq_10044
gctggagctgctgcagaccc

SEQ ID NO: 10045 - DNA, 20 bp, Homo sapiens
  source 1..20: mol_type = genomic DNA; note = Gene: IGLON5; note = Location (start to end; relative to TSS): IGLON5_61_91; note = Orientation (relative to transcription): sense; note = sgRNA Position: 51311731; note = Sequence Name: 56322-704_101_SL_seq_10045
ccccgcccccgccgcccccc

SEQ ID NO: 10046 - DNA, 20 bp, Homo sapiens
  source 1..20: mol_type = genomic DNA; note = Gene: IGLON5; note = Location (start to end; relative to TSS): IGLON5_17_47; note = Orientation (relative to transcription): antisense; note = sgRNA Position: 51311667; note = Sequence Name: 56322-704_101_SL_seq_10046
ctggagctgctgcagacccg

SEQ ID NO: 10047 - DNA, 20 bp, Homo sapiens
  source 1..20: mol_type = genomic DNA; note = Gene: IGLON5; note = Location (start to end; relative to TSS): IGLON5_54_84; note = Orientation (relative to transcription): antisense; note = sgRNA Position: 51311704; note = Sequence Name: 56322-704_101_SL_seq_10047
ggcggggggagggggctggg

SEQ ID NO: 10048 - DNA, 20 bp, Homo sapiens
  source 1..20: mol_type = genomic DNA; note = Gene: IGLON5; note = Location (start to end; relative to TSS): IGLON5_14_44; note = Orientation (relative to transcription): antisense; note = sgRNA Position: 51311664; note = Sequence Name: 56322-704_101_SL_seq_10048
gagctgctgcagacccgggg

SEQ ID NO: 10049 - DNA, 20 bp, Homo sapiens
  source 1..20: mol_type = genomic DNA; note = Gene: IGLON5; note = Location (start to end; relative to TSS): IGLON5_53_83; note = Orientation (relative to transcription): antisense; note = sgRNA Position: 51311703; note = Sequence Name: 56322-704_101_SL_seq_10049
gcggggggagggggctgggg

SEQ ID NO: 10050 - DNA, 20 bp, Homo sapiens
  source 1..20: mol_type = genomic DNA; note = Gene: IGSF1; note = Location (start to end; relative to TSS): IGSF1_44_74; note = Orientation (relative to transcription): sense; note = sgRNA Position: 131289238; note = Sequence Name: 56322-704_101_SL_seq_10050
cactggagaatctccaacat

SEQ ID NO: 10051 - DNA, 20 bp, Homo sapiens
  source 1..20: mol_type = genomic DNA; note = Gene: IGSF1; note = Location (start to end; relative to TSS): IGSF1_96_126; note = Orientation (relative to transcription): sense; note = sgRNA Position: 131289186; note = Sequence Name: 56322-704_101_SL_seq_10051
caaatgagcgcatagttcag

SEQ ID NO: 10052 - DNA, 20 bp, Homo sapiens
  source 1..20: mol_type = genomic DNA; note = Gene: IGSF1; note = Location (start to end; relative to TSS): IGSF1_49_79; note = Orientation (relative to transcription): sense; note = sgRNA Position: 131289233; note = Sequence Name: 56322-704_101_SL_seq_10052
gagaatctccaacatcggag

SEQ ID NO: 10053 - DNA, 20 bp, Homo sapiens
  source 1..20: mol_type = genomic DNA; note = Gene: IGSF1; note = Location (start to end; relative to TSS): IGSF1_92_122; note = Orientation (relative to transcription): antisense; note = sgRNA Position: 131289210; note = Sequence Name: 56322-704_101_SL_seq_10053
cgctcatttgtaggtactta

SEQ ID NO: 10054 - DNA, 20 bp, Homo sapiens
  source 1..20: mol_type = genomic DNA; note = Gene: IGSF1; note = Location (start to end; relative to TSS): IGSF1_24_54; note = Orientation (relative to transcription): antisense; note = sgRNA Position: 131289278; note = Sequence Name: 56322-704_101_SL_seq_10054
tccagatgcagcaaactgcc

SEQ ID NO: 10055 - DNA, 20 bp, Homo sapiens
  source 1..20: mol_type = genomic DNA; note = Gene: IGSF1; note = Location (start to end; relative to TSS): IGSF1_82_112; note = Orientation (relative to transcription): antisense; note = sgRNA Position: 131289220; note = Sequence Name: 56322-704_101_SL_seq_10055
taggtacttacggtagttga

SEQ ID NO: 10056 - DNA, 20 bp, Homo sapiens
  source 1..20: mol_type = genomic DNA; note = Gene: IGSF1; note = Location (start to end; relative to TSS): IGSF1_27_57; note = Orientation (relative to transcription): sense; note = sgRNA Position: 131289255; note = Sequence Name: 56322-704_101_SL_seq_10056
ctgcatctggaggagctcac

SEQ ID NO: 10057 - DNA, 20 bp, Homo sapiens
  source 1..20: mol_type = genomic DNA; note = Gene: IGSF1; note = Location (start to end; relative to TSS): IGSF1_66_96; note = Orientation (relative to transcription): antisense; note = sgRNA Position: 131289236; note = Sequence Name: 56322-704_101_SL_seq_10057
ttgaaggcccgctccgatgt

SEQ ID NO: 10058 - DNA, 20 bp, Homo sapiens
  source 1..20: mol_type = genomic DNA; note = Gene: IGSF1; note = Location (start to end; relative to TSS): IGSF1_17_47; note = Orientation (relative to transcription): sense; note = sgRNA Position: 131289265; note = Sequence Name: 56322-704_101_SL_seq_10058
gggcagtttgctgcatctgg

SEQ ID NO: 10059 - DNA, 20 bp, Homo sapiens
  source 1..20: mol_type = genomic DNA; note = Gene: IGSF1; note = Location (start to end; relative to TSS): IGSF1_49_79; note = Orientation (relative to transcription): sense; note = sgRNA Position: 131289233; note = Sequence Name: 56322-704_101_SL_seq_10059
gagaatctccaacatcggag

SEQ ID NO: 10060 - DNA, 20 bp, Homo sapiens
  source 1..20: mol_type = genomic DNA; note = Gene: IGSF10; note = Location (start to end; relative to TSS): IGSF10_32_62; note = Orientation (relative to transcription): antisense; note = sgRNA Position: 151461025; note = Sequence Name: 56322-704_101_SL_seq_10060
gctcagctgctggggtcgtg

SEQ ID NO: 10061 - DNA, 20 bp, Homo sapiens
  source 1..20: mol_type = genomic DNA; note = Gene: IGSF10; note = Location (start to end; relative to TSS): IGSF10_69_99; note = Orientation (relative to transcription): sense; note = sgRNA Position: 151460968; note = Sequence Name: 56322-704_101_SL_seq_10061
cccgggcagctcgagcccat

SEQ ID NO: 10062 - DNA, 20 bp, Homo sapiens
  source 1..20: mol_type = genomic DNA; note = Gene: IGSF10; note = Location (start to end; relative to TSS): IGSF10_26_56; note = Orientation (relative to transcription): antisense; note = sgRNA Position: 151461031; note = Sequence Name: 56322-704_101_SL_seq_10062
ctgctggggtcgtgcggagc

SEQ ID NO: 10063 - DNA, 20 bp, Homo sapiens
  source 1..20: mol_type = genomic DNA; note = Gene: IGSF10; note = Location (start to end; relative to TSS): IGSF10_67_97; note = Orientation (relative to transcription): antisense; note = sgRNA Position: 151460990; note = Sequence Name: 56322-704_101_SL_seq_10063
gagctgcccgggctaggtcc

SEQ ID NO: 10064 - DNA, 20 bp, Homo sapiens
  source 1..20: mol_type = genomic DNA; note = Gene: IGSF10; note = Location (start to end; relative to TSS): IGSF10_27_57; note = Orientation (relative to transcription): sense; note = sgRNA Position: 151461010; note = Sequence Name: 56322-704_101_SL_seq_10064
acgaccccagcagctgagcc

SEQ ID NO: 10065 - DNA, 20 bp, Homo sapiens
  source 1..20: mol_type = genomic DNA; note = Gene: IGSF10; note = Location (start to end; relative to TSS): IGSF10_66_96; note = Orientation (relative to transcription): antisense; note = sgRNA Position: 151460991; note = Sequence Name: 56322-704_101_SL_seq_10065
agctgcccgggctaggtccc

SEQ ID NO: 10066 - DNA, 20 bp, Homo sapiens
  source 1..20: mol_type = genomic DNA; note = Gene: IGSF10; note = Location (start to end; relative to TSS): IGSF10_28_58; note = Orientation (relative to transcription): sense; note = sgRNA Position: 151461009; note = Sequence Name: 56322-704_101_SL_seq_10066
cgaccccagcagctgagccc

SEQ ID NO: 10067 - DNA, 20 bp, Homo sapiens
  source 1..20: mol_type = genomic DNA; note = Gene: IGSF10; note = Location (start to end; relative to TSS): IGSF10_61_91; note = Orientation (relative to transcription): antisense; note = sgRNA Position: 151460996; note = Sequence Name: 56322-704_101_SL_seq_10067
cccgggctaggtcccgggct

SEQ ID NO: 10068 - DNA, 20 bp, Homo sapiens
  source 1..20: mol_type = genomic DNA; note = Gene: IGSF10; note = Location (start to end; relative to TSS): IGSF10_21_51; note = Orientation (relative to transcription): antisense; note = sgRNA Position: 151461036; note = Sequence Name: 56322-704_101_SL_seq_10068
ggggtcgtgcggagctggtc

SEQ ID NO: 10069 - DNA, 20 bp, Homo sapiens
  source 1..20: mol_type = genomic DNA; note = Gene: IGSF10; note = Location (start to end; relative to TSS): IGSF10_51_81; note = Orientation (relative to transcription): sense; note = sgRNA Position: 151460986; note = Sequence Name: 56322-704_101_SL_seq_10069
accgagcccgggacctagcc

SEQ ID NO: 10070 - DNA, 20 bp, Homo sapiens
  source 1..20: mol_type = genomic DNA; note = Gene: IGSF11; note = Location (start to end; relative to TSS): IGSF11_46_76; note = Orientation (relative to transcription): antisense; note = sgRNA Position: 119034796; note = Sequence Name: 56322-704_101_SL_seq_10070
ggacgctgagctgtgaccag

SEQ ID NO: 10071 - DNA, 20 bp, Homo sapiens
  source 1..20: mol_type = genomic DNA; note = Gene: IGSF11; note = Location (start to end; relative to TSS): IGSF11_105_135; note = Orientation (relative to transcription): sense; note = sgRNA Position: 119034717; note = Sequence Name: 56322-704_101_SL_seq_10071
ctgacagtcccagctctgcg

SEQ ID NO: 10072 - DNA, 20 bp, Homo sapiens
  source 1..20: mol_type = genomic DNA; note = Gene: IGSF11; note = Location (start to end; relative to TSS): IGSF11_47_77; note = Orientation (relative to transcription): sense; note = sgRNA Position: 119034775; note = Sequence Name: 56322-704_101_SL_seq_10072
cagctcagcgtccgcggagc

SEQ ID NO: 10073 - DNA, 20 bp, Homo sapiens
  source 1..20: mol_type = genomic DNA; note = Gene: IGSF11; note = Location (start to end; relative to TSS): IGSF11_81_111; note = Orientation (relative to transcription): sense; note = sgRNA Position: 119034741; note = Sequence Name: 56322-704_101_SL_seq_10073
gctgcacttggctcgtctgt

SEQ ID NO: 10074 - DNA, 20 bp, Homo sapiens
  source 1..20: mol_type = genomic DNA; note = Gene: IGSF11; note = Location (start to end; relative to TSS): IGSF11_48_78; note = Orientation (relative to transcription): sense; note = sgRNA Position: 119034774; note = Sequence Name: 56322-704_101_SL_seq_10074
agctcagcgtccgcggagcc

SEQ ID NO: 10075 - DNA, 20 bp, Homo sapiens
  source 1..20: mol_type = genomic DNA; note = Gene: IGSF11; note = Location (start to end; relative to TSS): IGSF11_80_110; note = Orientation (relative to transcription): sense; note = sgRNA Position: 119034742; note = Sequence Name: 56322-704_101_SL_seq_10075
agctgcacttggctcgtctg

SEQ ID NO: 10076 - DNA, 20 bp, Homo sapiens
  source 1..20: mol_type = genomic DNA; note = Gene: IGSF11; note = Location (start to end; relative to TSS): IGSF11_41_71; note = Orientation (relative to transcription): sense; note = sgRNA Position: 119034781; note = Sequence Name: 56322-704_101_SL_seq_10076
tggtcacagctcagcgtccg

SEQ ID NO: 10077 - DNA, 20 bp, Homo sapiens
  source 1..20: mol_type = genomic DNA; note = Gene: IGSF11; note = Location (start to end; relative to TSS): IGSF11_75_105; note = Orientation (relative to transcription): antisense; note = sgRNA Position: 119034767; note = Sequence Name: 56322-704_101_SL_seq_10077
agtgcagctgcagcgccgcc

SEQ ID NO: 10078 - DNA, 20 bp, Homo sapiens
  source 1..20: mol_type = genomic DNA; note = Gene: IGSF11; note = Location (start to end; relative to TSS): IGSF11_21_51; note = Orientation (relative to transcription): sense; note = sgRNA Position: 119034801; note = Sequence Name: 56322-704_101_SL_seq_10078
tggcgagcccggaacgcctc

SEQ ID NO: 10079 - DNA, 20 bp, Homo sapiens
  source 1..20: mol_type = genomic DNA; note = Gene: IGSF11; note = Location (start to end; relative to TSS): IGSF11_51_81; note = Orientation (relative to transcription): sense; note = sgRNA Position: 119034771; note = Sequence Name: 56322-704_101_SL_seq_10079
tcagcgtccgcggagccggg

SEQ ID NO: 10080 - DNA, 20 bp, Homo sapiens
  source 1..20: mol_type = genomic DNA; note = Gene: IGSF21; note = Location (start to end; relative to TSS): IGSF21_40_70; note = Orientation (relative to transcription): sense; note = sgRNA Position: 18107864; note = Sequence Name: 56322-704_101_SL_seq_10080
gtgggcaccgcgcgcagcta

SEQ ID NO: 10081 - DNA, 20 bp, Homo sapiens
  source 1..20: mol_type = genomic DNA; note = Gene: IGSF21; note = Location (start to end; relative to TSS): IGSF21_81_111; note = Orientation (relative to transcription): antisense; note = sgRNA Position: 18107885; note = Sequence Name: 56322-704_101_SL_seq_10081
ggcgtcctcggggctcgccg

SEQ ID NO: 10082 - DNA, 20 bp, Homo sapiens
  source 1..20: mol_type = genomic DNA; note = Gene: IGSF21; note = Location (start to end; relative to TSS): IGSF21_39_69; note = Orientation (relative to transcription): sense; note = sgRNA Position: 18107863; note = Sequence Name: 56322-704_101_SL_seq_10082
ggtgggcaccgcgcgcagct

SEQ ID NO: 10083 - DNA, 20 bp, Homo sapiens
  source 1..20: mol_type = genomic DNA; note = Gene: IGSF21; note = Location (start to end; relative to TSS): IGSF21_74_104; note = Orientation (relative to transcription): antisense; note = sgRNA Position: 18107878; note = Sequence Name: 56322-704_101_SL_seq_10083
tcggggctcgccgcggttct

SEQ ID NO: 10084 - DNA, 20 bp, Homo sapiens
  source 1..20: mol_type = genomic DNA; note = Gene: IGSF21; note = Location (start to end; relative to TSS): IGSF21_18_48; note = Orientation (relative to transcription): sense; note = sgRNA Position: 18107842; note = Sequence Name: 56322-704_101_SL_seq_10084
gccgatcggactctgggccg

SEQ ID NO: 10085 - DNA, 20 bp, Homo sapiens
  source 1..20: mol_type = genomic DNA; note = Gene: IGSF21; note = Location (start to end; relative to TSS): IGSF21_67_97; note = Orientation (relative to transcription): sense; note = sgRNA Position: 18107891; note = Sequence Name: 56322-704_101_SL_seq_10085
gagaaccgcggcgagccccg

SEQ ID NO: 10086 - DNA, 20 bp, Homo sapiens
  source 1..20: mol_type = genomic DNA; note = Gene: IGSF21; note = Location (start to end; relative to TSS): IGSF21_22_52; note = Orientation (relative to transcription): sense; note = sgRNA Position: 18107846; note = Sequence Name: 56322-704_101_SL_seq_10086
atcggactctgggccgcggt

SEQ ID NO: 10087 - DNA, 20 bp, Homo sapiens
  source 1..20: mol_type = genomic DNA; note = Gene: IGSF21; note = Location (start to end; relative to TSS): IGSF21_56_86; note = Orientation (relative to transcription): antisense; note = sgRNA Position: 18107860; note = Sequence Name: 56322-704_101_SL_seq_10087
ctcggctccctagctgcgcg

SEQ ID NO: 10088 - DNA, 20 bp, Homo sapiens
  source 1..20: mol_type = genomic DNA; note = Gene: IGSF21; note = Location (start to end; relative to TSS): IGSF21_21_51; note = Orientation (relative to transcription): sense; note = sgRNA Position: 18107845; note = Sequence Name: 56322-704_101_SL_seq_10088
gatcggactctgggccgcgg

SEQ ID NO: 10089 - DNA, 20 bp, Homo sapiens
  source 1..20: mol_type = genomic DNA; note = Gene: IGSF21; note = Location (start to end; relative to TSS): IGSF21_55_85; note = Orientation (relative to transcription): sense; note = sgRNA Position: 18107879; note = Sequence Name: 56322-704_101_SL_seq_10089
agctagggagccgagaaccg

SEQ ID NO: 10090 - DNA, 20 bp, Homo sapiens
  source 1..20: mol_type = genomic DNA; note = Gene: IGSF22; note = Location (start to end; relative to TSS): IGSF22_43_73; note = Orientation (relative to transcription): antisense; note = sgRNA Position: 18726141; note = Sequence Name: 56322-704_101_SL_seq_10090
ttggaggctcagctagtgcc

SEQ ID NO: 10091 - DNA, 20 bp, Homo sapiens
  source 1..20: mol_type = genomic DNA; note = Gene: IGSF22; note = Location (start to end; relative to TSS): IGSF22_85_115; note = Orientation (relative to transcription): sense; note = sgRNA Position: 18726079; note = Sequence Name: 56322-704_101_SL_seq_10091
gagggactggtcagtgctga

SEQ ID NO: 10092 - DNA, 20 bp, Homo sapiens
  source 1..20: mol_type = genomic DNA; note = Gene: IGSF22; note = Location (start to end; relative to TSS): IGSF22_42_72; note = Orientation (relative to transcription): sense; note = sgRNA Position: 18726122; note = Sequence Name: 56322-704_101_SL_seq_10092
tagctgagcctccaaagccg

SEQ ID NO: 10093 - DNA, 20 bp, Homo sapiens
  source 1..20: mol_type = genomic DNA; note = Gene: IGSF22; note = Location (start to end; relative to TSS): IGSF22_72_102; note = Orientation (relative to transcription): sense; note = sgRNA Position: 18726092; note = Sequence Name: 56322-704_101_SL_seq_10093
attcgagtgttgggagggac

SEQ ID NO: 10094 - DNA, 20 bp, Homo sapiens
  source 1..20: mol_type = genomic DNA; note = Gene: IGSF22; note = Location (start to end; relative to TSS): IGSF22_35_65; note = Orientation (relative to transcription): antisense; note = sgRNA Position: 18726149; note = Sequence Name: 56322-704_101_SL_seq_10094
tcagctagtgcctggactgt

SEQ ID NO: 10095 - DNA, 20 bp, Homo sapiens
  source 1..20: mol_type = genomic DNA; note = Gene: IGSF22; note = Location (start to end; relative to TSS): IGSF22_67_97; note = Orientation (relative to transcription): sense; note = sgRNA Position: 18726097; note = Sequence Name: 56322-704_101_SL_seq_10095
acagcattcgagtgttggga

SEQ ID NO: 10096 - DNA, 20 bp, Homo sapiens
  source 1..20: mol_type = genomic DNA; note = Gene: IGSF22; note = Location (start to end; relative to TSS): IGSF22_34_64; note = Orientation (relative to transcription): antisense; note = sgRNA Position: 18726150; note = Sequence Name: 56322-704_101_SL_seq_10096
cagctagtgcctggactgta

SEQ ID NO: 10097 - DNA, 20 bp, Homo sapiens
  source 1..20: mol_type = genomic DNA; note = Gene: IGSF22; note = Location (start to end; relative to TSS): IGSF22_66_96; note = Orientation (relative to transcription): sense; note = sgRNA Position: 18726098; note = Sequence Name: 56322-704_101_SL_seq_10097
cacagcattcgagtgttggg

SEQ ID NO: 10098 - DNA, 20 bp, Homo sapiens
  source 1..20: mol_type = genomic DNA; note = Gene: IGSF22; note = Location (start to end; relative to TSS): IGSF22_31_61; note = Orientation (relative to transcription): antisense; note = sgRNA Position: 18726153; note = Sequence Name: 56322-704_101_SL_seq_10098
ctagtgcctggactgtaggg

SEQ ID NO: 10099 - DNA, 20 bp, Homo sapiens
  source 1..20: mol_type = genomic DNA; note = Gene: IGSF22; note = Location (start to end; relative to TSS): IGSF22_62_92; note = Orientation (relative to transcription): sense; note = sgRNA Position: 18726102; note = Sequence Name: 56322-704_101_SL_seq_10099
tggacacagcattcgagtgt

SEQ ID NO: 10100 - DNA, 20 bp, Homo sapiens
  source 1..20: mol_type = genomic DNA; note = Gene: IGSF23; note = Location (start to end; relative to TSS): IGSF23_44_74; note = Orientation (relative to transcription): sense; note = sgRNA Position: 44613633; note = Sequence Name: 56322-704_101_SL_seq_10100
atctcccggcggggattgta

SEQ ID NO: 10101 - DNA, 20 bp, Homo sapiens
  source 1..20: mol_type = genomic DNA; note = Gene: IGSF23; note = Location (start to end; relative to TSS): IGSF23_105_135; note = Orientation (relative to transcription): antisense; note = sgRNA Position: 44613674; note = Sequence Name: 56322-704_101_SL_seq_10101
tgggacagggttcctgggaa

SEQ ID NO: 10102 - DNA, 20 bp, Homo sapiens
  source 1..20: mol_type = genomic DNA; note = Gene: IGSF23; note = Location (start to end; relative to TSS): IGSF23_30_60; note = Orientation (relative to transcription): sense; note = sgRNA Position: 44613619; note = Sequence Name: 56322-704_101_SL_seq_10102
ctgcttctccctccatctcc

SEQ ID NO: 10103 - DNA, 20 bp, Homo sapiens
  source 1..20: mol_type = genomic DNA; note = Gene: IGSF23; note = Location (start to end; relative to TSS): IGSF23_104_134; note = Orientation (relative to transcription): antisense; note = sgRNA Position: 44613673; note = Sequence Name: 56322-704_101_SL_seq_10103
gggacagggttcctgggaag

SEQ ID NO: 10104 - DNA, 20 bp, Homo sapiens
  source 1..20: mol_type = genomic DNA; note = Gene: IGSF23; note = Location (start to end; relative to TSS): IGSF23_33_63; note = Orientation (relative to transcription): sense; note = sgRNA Position: 44613622; note = Sequence Name: 56322-704_101_SL_seq_10104
cttctccctccatctcccgg

SEQ ID NO: 10105 - DNA, 20 bp, Homo sapiens
  source 1..20: mol_type = genomic DNA; note = Gene: IGSF23; note = Location (start to end; relative to TSS): IGSF23_103_133; note = Orientation (relative to transcription): antisense; note = sgRNA Position: 44613672; note = Sequence Name: 56322-704_101_SL_seq_10105
ggacagggttcctgggaagg

SEQ ID NO: 10106 - DNA, 20 bp, Homo sapiens
  source 1..20: mol_type = genomic DNA; note = Gene: IGSF23; note = Location (start to end; relative to TSS): IGSF23_34_64; note = Orientation (relative to transcription): sense; note = sgRNA Position: 44613623; note = Sequence Name: 56322-704_101_SL_seq_10106
ttctccctccatctcccggc

SEQ ID NO: 10107 - DNA, 20 bp, Homo sapiens
  source 1..20: mol_type = genomic DNA; note = Gene: IGSF23; note = Location (start to end; relative to TSS): IGSF23_102_132; note = Orientation (relative to transcription): sense; note = sgRNA Position: 44613691; note = Sequence Name: 56322-704_101_SL_seq_10107
ccaggaaccctgtcccagcc

SEQ ID NO: 10108 - DNA, 20 bp, Homo sapiens
  source 1..20: mol_type = genomic DNA; note = Gene: IGSF23; note = Location (start to end; relative to TSS): IGSF23_35_65; note = Orientation (relative to transcription): sense; note = sgRNA Position: 44613624; note = Sequence Name: 56322-704_101_SL_seq_10108
tctccctccatctcccggcg

SEQ ID NO: 10109 - DNA, 20 bp, Homo sapiens
  source 1..20: mol_type = genomic DNA; note = Gene: IGSF23; note = Location (start to end; relative to TSS): IGSF23_95_125; note = Orientation (relative to transcription): antisense; note = sgRNA Position: 44613664; note = Sequence Name: 56322-704_101_SL_seq_10109
ttcctgggaagggggctctg

SEQ ID NO: 10110 - DNA, 20 bp, Homo sapiens
  source 1..20: mol_type = genomic DNA; note = Gene: IGSF3; note = Location (start to end; relative to TSS): IGSF3_47_77; note = Orientation (relative to transcription): antisense; note = sgRNA Position: 116667682; note = Sequence Name: 56322-704_101_SL_seq_10110
ccatccaggcgcacgcctca

SEQ ID NO: 10111 - DNA, 20 bp, Homo sapiens
  source 1..20: mol_type = genomic DNA; note = Gene: IGSF3; note = Location (start to end; relative to TSS): IGSF3_81_111; note = Orientation (relative to transcription): sense; note = sgRNA Position: 116667628; note = Sequence Name: 56322-704_101_SL_seq_10111
gcgcggagggagagggccag

SEQ ID NO: 10112 - DNA, 20 bp, Homo sapiens
  source 1..20: mol_type = genomic DNA; note = Gene: IGSF3; note = Location (start to end; relative to TSS): IGSF3_46_76; note = Orientation (relative to transcription): antisense; note = sgRNA Position: 116667683; note = Sequence Name: 56322-704_101_SL_seq_10112
catccaggcgcacgcctcag

SEQ ID NO: 10113 - DNA, 20 bp, Homo sapiens
  source 1..20: mol_type = genomic DNA; note = Gene: IGSF3; note = Location (start to end; relative to TSS): IGSF3_80_110; note = Orientation (relative to transcription): sense; note = sgRNA Position: 116667629; note = Sequence Name: 56322-704_101_SL_seq_10113
cgcgcggagggagagggcca

SEQ ID NO: 10114 - DNA, 20 bp, Homo sapiens
  source 1..20: mol_type = genomic DNA; note = Gene: IGSF3; note = Location (start to end; relative to TSS): IGSF3_38_68; note = Orientation (relative to transcription): sense; note = sgRNA Position: 116667671; note = Sequence Name: 56322-704_101_SL_seq_10114
ccctgaggcgtgcgcctgga

SEQ ID NO: 10115 - DNA, 20 bp, Homo sapiens
  source 1..20: mol_type = genomic DNA; note = Gene: IGSF3; note = Location (start to end; relative to TSS): IGSF3_68_98; note = Orientation (relative to transcription): sense; note = sgRNA Position: 116667641; note = Sequence Name: 56322-704_101_SL_seq_10115
gacggtccgacgcgcgcgga

SEQ ID NO: 10116 - DNA, 20 bp, Homo sapiens
  source 1..20: mol_type = genomic DNA; note = Gene: IGSF3; note = Location (start to end; relative to TSS): IGSF3_34_64; note = Orientation (relative to transcription): sense; note = sgRNA Position: 116667675; note = Sequence Name: 56322-704_101_SL_seq_10116
cgtcccctgaggcgtgcgcc

SEQ ID NO: 10117 - DNA, 20 bp, Homo sapiens
  source 1..20: mol_type = genomic DNA; note = Gene: IGSF3; note = Location (start to end; relative to TSS): IGSF3_64_94; note = Orientation (relative to transcription): sense; note = sgRNA Position: 116667645; note = Sequence Name: 56322-704_101_SL_seq_10117
gaaggacggtccgacgcgcg

SEQ ID NO: 10118 - DNA, 20 bp, Homo sapiens
  source 1..20: mol_type = genomic DNA; note = Gene: IGSF3; note = Location (start to end; relative to TSS): IGSF3_23_53; note = Orientation (relative to transcription): sense; note = sgRNA Position: 116667686; note = Sequence Name: 56322-704_101_SL_seq_10118
aggaagcggcgcgtcccctg

SEQ ID NO: 10119 - DNA, 20 bp, Homo sapiens
  source 1..20: mol_type = genomic DNA; note = Gene: IGSF3; note = Location (start to end; relative to TSS): IGSF3_61_91; note = Orientation (relative to transcription): antisense; note = sgRNA Position: 116667668; note = Sequence Name: 56322-704_101_SL_seq_10119
gaccgtccttcagtccatcc

SEQ ID NO: 10120 - DNA, 20 bp, Homo sapiens
  source 1..20: mol_type = genomic DNA; note = Gene: IGSF5; note = Location (start to end; relative to TSS): IGSF5_41_71; note = Orientation (relative to transcription): antisense; note = sgRNA Position: 39745230; note = Sequence Name: 56322-704_101_SL_seq_10120
cattccccaccacccttgcc

SEQ ID NO: 10121 - DNA, 20 bp, Homo sapiens
  source 1..20: mol_type = genomic DNA; note = Gene: IGSF5; note = Location (start to end; relative to TSS): IGSF5_90_120; note = Orientation (relative to transcription): sense; note = sgRNA Position: 39745299; note = Sequence Name: 56322-704_101_SL_seq_10121
cctaaattaggagggacgcc

SEQ ID NO: 10122 - DNA, 20 bp, Homo sapiens
  source 1..20: mol_type = genomic DNA; note = Gene: IGSF5; note = Location (start to end; relative to TSS): IGSF5_27_57; note = Orientation (relative to transcription): sense; note = sgRNA Position: 39745236; note = Sequence Name: 56322-704_101_SL_seq_10122
ggggccctggcaagggtggt

SEQ ID NO: 10123 - DNA, 20 bp, Homo sapiens
  source 1..20: mol_type = genomic DNA; note = Gene: IGSF5; note = Location (start to end; relative to TSS): IGSF5_82_112; note = Orientation (relative to transcription): sense; note = sgRNA Position: 39745291; note = Sequence Name: 56322-704_101_SL_seq_10123
gctgtatacctaaattagga

SEQ ID NO: 10124 - DNA, 20 bp, Homo sapiens
  source 1..20: mol_type = genomic DNA; note = Gene: IGSF5; note = Location (start to end; relative to TSS): IGSF5_19_49; note = Orientation (relative to transcription): sense; note = sgRNA Position: 39745228; note = Sequence Name: 56322-704_101_SL_seq_10124
acaaacttggggccctggca

SEQ ID NO: 10125 - DNA, 20 bp, Homo sapiens
  source 1..20: mol_type = genomic DNA; note = Gene: IGSF5; note = Location (start to end; relative to TSS): IGSF5_81_111; note = Orientation (relative to transcription): sense; note = sgRNA Position: 39745290; note = Sequence Name: 56322-704_101_SL_seq_10125
agctgtatacctaaattagg

SEQ ID NO: 10126 - DNA, 20 bp, Homo sapiens
  source 1..20: mol_type = genomic DNA; note = Gene: IGSF5; note = Location (start to end; relative to TSS): IGSF5_20_50; note = Orientation (relative to transcription): sense; note = sgRNA Position: 39745229; note = Sequence Name: 56322-704_101_SL_seq_10126
caaacttggggccctggcaa

SEQ ID NO: 10127 - DNA, 20 bp, Homo sapiens
  source 1..20: mol_type = genomic DNA; note = Gene: IGSF5; note = Location (start to end; relative to TSS): IGSF5_78_108; note = Orientation (relative to transcription): sense; note = sgRNA Position: 39745287; note = Sequence Name: 56322-704_101_SL_seq_10127
aagagctgtatacctaaatt

SEQ ID NO: 10128 - DNA, 20 bp, Homo sapiens
  source 1..20: mol_type = genomic DNA; note = Gene: IGSF5; note = Location (start to end; relative to TSS): IGSF5_23_53; note = Orientation (relative to transcription): sense; note = sgRNA Position: 39745232; note = Sequence Name: 56322-704_101_SL_seq_10128
acttggggccctggcaaggg

SEQ ID NO: 10129 - DNA, 20 bp, Homo sapiens
  source 1..20: mol_type = genomic DNA; note = Gene: IGSF5; note = Location (start to end; relative to TSS): IGSF5_67_97; note = Orientation (relative to transcription): antisense; note = sgRNA Position: 39745256; note = Sequence Name: 56322-704_101_SL_seq_10129
cttgacatgagcagttatgc

SEQ ID NO: 10130 - DNA, 20 bp, Homo sapiens
  source 1..20: mol_type = genomic DNA; note = Gene: IGSF6; note = Location (start to end; relative to TSS): IGSF6_47_77; note = Orientation (relative to transcription): sense; note = sgRNA Position: 21652537; note = Sequence Name: 56322-704_101_SL_seq_10130
aatctcattctattttgtgt

SEQ ID NO: 10131 - DNA, 20 bp, Homo sapiens
  source 1..20: mol_type = genomic DNA; note = Gene: IGSF6; note = Location (start to end; relative to TSS): IGSF6_134_164; note = Orientation (relative to transcription): antisense; note = sgRNA Position: 21652470; note = Sequence Name: 56322-704_101_SL_seq_10131
gcttaaaatataaatgcatt

SEQ ID NO: 10132 - DNA, 20 bp, Homo sapiens
  source 1..20: mol_type = genomic DNA; note = Gene: IGSF6; note = Location (start to end; relative to TSS): IGSF6_52_82; note = Orientation (relative to transcription): sense; note = sgRNA Position: 21652532; note = Sequence Name: 56322-704_101_SL_seq_10132
cattctattttgtgtcggta

SEQ ID NO: 10133 - DNA, 20 bp, Homo sapiens
  source 1..20: mol_type = genomic DNA; note = Gene: IGSF6; note = Location (start to end; relative to TSS): IGSF6_100_130; note = Orientation (relative to transcription): antisense; note = sgRNA Position: 21652504; note = Sequence Name: 56322-704_101_SL_seq_10133
agttgatttaaataaaatga

SEQ ID NO: 10134 - DNA, 20 bp, Homo sapiens
  source 1..20: mol_type = genomic DNA; note = Gene: IGSF6; note = Location (start to end; relative to TSS): IGSF6_54_84; note = Orientation (relative to transcription): antisense; note = sgRNA Position: 21652550; note = Sequence Name: 56322-704_101_SL_seq_10134
gacacaaaatagaatgagat

SEQ ID NO: 10135 - DNA, 20 bp, Homo sapiens
  source 1..20: mol_type = genomic DNA; note = Gene: IGSF6; note = Location (start to end; relative to TSS): IGSF6_97_127; note = Orientation (relative to transcription): antisense; note = sgRNA Position: 21652507; note = Sequence Name: 56322-704_101_SL_seq_10135
tgatttaaataaaatgaagg

SEQ ID NO: 10136 - DNA, 20 bp, Homo sapiens
  source 1..20: mol_type = genomic DNA; note = Gene: IGSF6; note = Location (start to end; relative to TSS): IGSF6_-4_26; note = Orientation (relative to transcription): antisense; note = sgRNA Position: 21652608; note = Sequence Name: 56322-704_101_SL_seq_10136
gtccccatttctgtgtatgc

SEQ ID NO: 10137 - DNA, 20 bp, Homo sapiens
  source 1..20: mol_type = genomic DNA; note = Gene: IGSF6; note = Location (start to end; relative to TSS): IGSF6_52_82; note = Orientation (relative to transcription): sense; note = sgRNA Position: 21652532; note = Sequence Name: 56322-704_101_SL_seq_10137
cattctattttgtgtcggta

SEQ ID NO: 10138 - DNA, 20 bp, Homo sapiens
  source 1..20: mol_type = genomic DNA; note = Gene: IGSF6; note = Location (start to end; relative to TSS): IGSF6_-5_25; note = Orientation (relative to transcription): antisense; note = sgRNA Position: 21652609; note = Sequence Name: 56322-704_101_SL_seq_10138
tccccatttctgtgtatgcc

SEQ ID NO: 10139 - DNA, 20 bp, Homo sapiens
  source 1..20: mol_type = genomic DNA; note = Gene: IGSF6; note = Location (start to end; relative to TSS): IGSF6_47_77; note = Orientation (relative to transcription): sense; note = sgRNA Position: 21652537; note = Sequence Name: 56322-704_101_SL_seq_10139
aatctcattctattttgtgt

SEQ ID NO: 10140 - DNA, 20 bp, Homo sapiens
  source 1..20: mol_type = genomic DNA; note = Gene: IGSF8; note = Location (start to end; relative to TSS): IGSF8_41_71; note = Orientation (relative to transcription): sense; note = sgRNA Position: 160098554; note = Sequence Name: 56322-704_101_SL_seq_10140
ccgcttcctgccctcaacct

SEQ ID NO: 10141 - DNA, 20 bp, Homo sapiens
  source 1..20: mol_type = genomic DNA; note = Gene: IGSF8; note = Location (start to end; relative to TSS): IGSF8_82_112; note = Orientation (relative to transcription): antisense; note = sgRNA Position: 160098533; note = Sequence Name: 56322-704_101_SL_seq_10141
ttctggggggccggaagggt

SEQ ID NO: 10142 - DNA, 20 bp, Homo sapiens
  source 1..20: mol_type = genomic DNA; note = Gene: IGSF8; note = Location (start to end; relative to TSS): IGSF8_40_70; note = Orientation (relative to transcription): antisense; note = sgRNA Position: 160098575; note = Sequence Name: 56322-704_101_SL_seq_10142
gggcaggaagcggggcagcg

SEQ ID NO: 10143 - DNA, 20 bp, Homo sapiens
  source 1..20: mol_type = genomic DNA; note = Gene: IGSF8; note = Location (start to end; relative to TSS): IGSF8_81_111; note = Orientation (relative to transcription): antisense; note = sgRNA Position: 160098534; note = Sequence Name: 56322-704_101_SL_seq_10143
tctggggggccggaagggtg

SEQ ID NO: 10144 - DNA, 20 bp, Homo sapiens
  source 1..20: mol_type = genomic DNA; note = Gene: IGSF8; note = Location (start to end; relative to TSS): IGSF8_48_78; note = Orientation (relative to transcription): antisense; note = sgRNA Position: 160098567; note = Sequence Name: 56322-704_101_SL_seq_10144
caggttgagggcaggaagcg

SEQ ID NO: 10145 - DNA, 20 bp, Homo sapiens
  source 1..20: mol_type = genomic DNA; note = Gene: IGSF8; note = Location (start to end; relative to TSS): IGSF8_80_110; note = Orientation (relative to transcription): antisense; note = sgRNA Position: 160098535; note = Sequence Name: 56322-704_101_SL_seq_10145
ctggggggccggaagggtgg

SEQ ID NO: 10146 - DNA, 20 bp, Homo sapiens
  source 1..20: mol_type = genomic DNA; note = Gene: IGSF8; note = Location (start to end; relative to TSS): IGSF8_34_64; note = Orientation (relative to transcription): antisense; note = sgRNA Position: 160098581; note = Sequence Name: 56322-704_101_SL_seq_10146
gaagcggggcagcgaggcgt

SEQ ID NO: 10147 - DNA, 20 bp, Homo sapiens
  source 1..20: mol_type = genomic DNA; note = Gene: IGSF8; note = Location (start to end; relative to TSS): IGSF8_79_109; note = Orientation (relative to transcription): antisense; note = sgRNA Position: 160098536; note = Sequence Name: 56322-704_101_SL_seq_10147
tggggggccggaagggtggg

SEQ ID NO: 10148 - DNA, 20 bp, Homo sapiens
  source 1..20: mol_type = genomic DNA; note = Gene: IGSF8; note = Location (start to end; relative to TSS): IGSF8_35_65; note = Orientation (relative to transcription): antisense; note = sgRNA Position: 160098580; note = Sequence Name: 56322-704_101_SL_seq_10148
ggaagcggggcagcgaggcg

SEQ ID NO: 10149 - DNA, 20 bp, Homo sapiens
  source 1..20: mol_type = genomic DNA; note = Gene: IGSF8; note = Location (start to end; relative to TSS): IGSF8_67_97; note = Orientation (relative to transcription): antisense; note = sgRNA Position: 160098548; note = Sequence Name: 56322-704_101_SL_seq_10149
agggtggggggcgcatgccc

SEQ ID NO: 10150 - DNA, 20 bp, Homo sapiens
  source 1..20: mol_type = genomic DNA; note = Gene: IGSF9; note = Location (start to end; relative to TSS): IGSF9_21_51; note = Orientation (relative to transcription): sense; note = sgRNA Position: 159945568; note = Sequence Name: 56322-704_101_SL_seq_10150
ggtgcggagcaggtgaggga

SEQ ID NO: 10151 - DNA, 20 bp, Homo sapiens
  source 1..20: mol_type = genomic DNA; note = Gene: IGSF9; note = Location (start to end; relative to TSS): IGSF9_73_103; note = Orientation (relative to transcription): sense; note = sgRNA Position: 159945516; note = Sequence Name: 56322-704_101_SL_seq_10151
ctggtagtgcggagttatgg

SEQ ID NO: 10152 - DNA, 20 bp, Homo sapiens
  source 1..20: mol_type = genomic DNA; note = Gene: IGSF9; note = Location (start to end; relative to TSS): IGSF9_22_52; note = Orientation (relative to transcription): sense; note = sgRNA Position: 159945567; note = Sequence Name: 56322-704_101_SL_seq_10152
gtgcggagcaggtgagggag

SEQ ID NO: 10153 - DNA, 20 bp, Homo sapiens
  source 1..20: mol_type = genomic DNA; note = Gene: IGSF9; note = Location (start to end; relative to TSS): IGSF9_72_102; note = Orientation (relative to transcription): sense; note = sgRNA Position: 159945517; note = Sequence Name: 56322-704_101_SL_seq_10153
gctggtagtgcggagttatg

SEQ ID NO: 10154 - DNA, 20 bp, Homo sapiens
  source 1..20: mol_type = genomic DNA; note = Gene: IGSF9; note = Location (start to end; relative to TSS): IGSF9_23_53; note = Orientation (relative to transcription): sense; note = sgRNA Position: 159945566; note = Sequence Name: 56322-704_101_SL_seq_10154
tgcggagcaggtgagggagg

SEQ ID NO: 10155 - DNA, 20 bp, Homo sapiens
  source 1..20: mol_type = genomic DNA; note = Gene: IGSF9; note = Location (start to end; relative to TSS): IGSF9_71_101; note = Orientation (relative to transcription): sense; note = sgRNA Position: 159945518; note = Sequence Name: 56322-704_101_SL_seq_10155
tgctggtagtgcggagttat

SEQ ID NO: 10156 - DNA, 20 bp, Homo sapiens
  source 1..20: mol_type = genomic DNA; note = Gene: IGSF9; note = Location (start to end; relative to TSS): IGSF9_24_54; note = Orientation (relative to transcription): antisense; note = sgRNA Position: 159945585; note = Sequence Name: 56322-704_101_SL_seq_10156
ctcacctgctccgcaccgct

SEQ ID NO: 10157 - DNA, 20 bp, Homo sapiens
  source 1..20: mol_type = genomic DNA; note = Gene: IGSF9; note = Location (start to end; relative to TSS): IGSF9_62_92; note = Orientation (relative to transcription): sense; note = sgRNA Position: 159945527; note = Sequence Name: 56322-704_101_SL_seq_10157
aagtggtggtgctggtagtg

SEQ ID NO: 10158 - DNA, 20 bp, Homo sapiens
  source 1..20: mol_type = genomic DNA; note = Gene: IGSF9; note = Location (start to end; relative to TSS): IGSF9_20_50; note = Orientation (relative to transcription): sense; note = sgRNA Position: 159945569; note = Sequence Name: 56322-704_101_SL_seq_10158
cggtgcggagcaggtgaggg

SEQ ID NO: 10159 - DNA, 20 bp, Homo sapiens
  source 1..20: mol_type = genomic DNA; note = Gene: IGSF9; note = Location (start to end; relative to TSS): IGSF9_54_84; note = Orientation (relative to transcription): sense; note = sgRNA Position: 159945535; note = Sequence Name: 56322-704_101_SL_seq_10159
aggtatagaagtggtggtgc

SEQ ID NO: 10160 - DNA, 20 bp, Homo sapiens
  source 1..20: mol_type = genomic DNA; note = Gene: IGSF9B; note = Location (start to end; relative to TSS): IGSF9B_45_75; note = Orientation (relative to transcription): antisense; note = sgRNA Position: 133956919; note = Sequence Name: 56322-704_101_SL_seq_10160
catccctcctaggctccgct

SEQ ID NO: 10161 - DNA, 20 bp, Homo sapiens
  source 1..20: mol_type = genomic DNA; note = Gene: IGSF9B; note = Location (start to end; relative to TSS): IGSF9B_77_107; note = Orientation (relative to transcription): antisense; note = sgRNA Position: 133956887; note = Sequence Name: 56322-704_101_SL_seq_10161
cggtgctcctgcagcccggg

SEQ ID NO: 10162 - DNA, 20 bp, Homo sapiens
  source 1..20: mol_type = genomic DNA; note = Gene: IGSF9B; note = Location (start to end; relative to TSS): IGSF9B_40_70; note = Orientation (relative to transcription): antisense; note = sgRNA Position: 133956924; note = Sequence Name: 56322-704_101_SL_seq_10162
ctcctaggctccgctcggct

SEQ ID NO: 10163 - DNA, 20 bp, Homo sapiens
  source 1..20: mol_type = genomic DNA; note = Gene: IGSF9B; note = Location (start to end; relative to TSS): IGSF9B_76_106; note = Orientation (relative to transcription): sense; note = sgRNA Position: 133956868; note = Sequence Name: 56322-704_101_SL_seq_10163
gctgcaggagcaccggcgcg

SEQ ID NO: 10164 - DNA, 20 bp, Homo sapiens
  source 1..20: mol_type = genomic DNA; note = Gene: IGSF9B; note = Location (start to end; relative to TSS): IGSF9B_33_63; note = Orientation (relative to transcription): sense; note = sgRNA Position: 133956911; note = Sequence Name: 56322-704_101_SL_seq_10164
gagccgagcggagcctagga

SEQ ID NO: 10165 - DNA, 20 bp, Homo sapiens
  source 1..20: mol_type = genomic DNA; note = Gene: IGSF9B; note = Location (start to end; relative to TSS): IGSF9B_74_104; note = Orientation (relative to transcription): sense; note = sgRNA Position: 133956870; note = Sequence Name: 56322-704_101_SL_seq_10165
gggctgcaggagcaccggcg

SEQ ID NO: 10166 - DNA, 20 bp, Homo sapiens
  source 1..20: mol_type = genomic DNA; note = Gene: IGSF9B; note = Location (start to end; relative to TSS): IGSF9B_37_67; note = Orientation (relative to transcription): sense; note = sgRNA Position: 133956907; note = Sequence Name: 56322-704_101_SL_seq_10166
cgagcggagcctaggaggga

SEQ ID NO: 10167 - DNA, 20 bp, Homo sapiens
  source 1..20: mol_type = genomic DNA; note = Gene: IGSF9B; note = Location (start to end; relative to TSS): IGSF9B_69_99; note = Orientation (relative to transcription): sense; note = sgRNA Position: 133956875; note = Sequence Name: 56322-704_101_SL_seq_10167
cacccgggctgcaggagcac

SEQ ID NO: 10168 - DNA, 20 bp, Homo sapiens
  source 1..20: mol_type = genomic DNA; note = Gene: IGSF9B; note = Location (start to end; relative to TSS): IGSF9B_19_49; note = Orientation (relative to transcription): antisense; note = sgRNA Position: 133956945; note = Sequence Name: 56322-704_101_SL_seq_10168
ggcgcgcgcctccccggccc

SEQ ID NO: 10169 - DNA, 20 bp, Homo sapiens
  source 1..20: mol_type = genomic DNA; note = Gene: IGSF9B; note = Location (start to end; relative to TSS): IGSF9B_53_83; note = Orientation (relative to transcription): sense; note = sgRNA Position: 133956891; note = Sequence Name: 56322-704_101_SL_seq_10169
gggatggagagctggccacc

SEQ ID NO: 10170 - DNA, 20 bp, Homo sapiens
  source 1..20: mol_type = genomic DNA; note = Gene: IL11RA; note = Location (start to end; relative to TSS): IL11RA_40_70; note = Orientation (relative to transcription): antisense; note = sgRNA Position: 34652231; note = Sequence Name: 56322-704_101_SL_seq_10170
acaccaggcctcaccttccg

SEQ ID NO: 10171 - DNA, 20 bp, Homo sapiens
  source 1..20: mol_type = genomic DNA; note = Gene: IL11RA; note = Location (start to end; relative to TSS): IL11RA_91_121; note = Orientation (relative to transcription): sense; note = sgRNA Position: 34652302; note = Sequence Name: 56322-704_101_SL_seq_10171
tgatgtatgatctgaaaggc

SEQ ID NO: 10172 - DNA, 20 bp, Homo sapiens
  source 1..20: mol_type = genomic DNA; note = Gene: IL11RA; note = Location (start to end; relative to TSS): IL11RA_52_82; note = Orientation (relative to transcription): sense; note = sgRNA Position: 34652263; note = Sequence Name: 56322-704_101_SL_seq_10172
gtagacgccaaagtcttgtc

SEQ ID NO: 10173 - DNA, 20 bp, Homo sapiens
  source 1..20: mol_type = genomic DNA; note = Gene: IL11RA; note = Location (start to end; relative to TSS): IL11RA_87_117; note = Orientation (relative to transcription): sense; note = sgRNA Position: 34652298; note = Sequence Name: 56322-704_101_SL_seq_10173
agggtgatgtatgatctgaa

SEQ ID NO: 10174 - DNA, 20 bp, Homo sapiens
  source 1..20: mol_type = genomic DNA; note = Gene: IL11RA; note = Location (start to end; relative to TSS): IL11RA_28_58; note = Orientation (relative to transcription): sense; note = sgRNA Position: 34652239; note = Sequence Name: 56322-704_101_SL_seq_10174
cggccgcggaaggtgaggcc

SEQ ID NO: 10175 - DNA, 20 bp, Homo sapiens
  source 1..20: mol_type = genomic DNA; note = Gene: IL11RA; note = Location (start to end; relative to TSS): IL11RA_58_88; note = Orientation (relative to transcription): sense; note = sgRNA Position: 34652269; note = Sequence Name: 56322-704_101_SL_seq_10175
gccaaagtcttgtcaggagt

SEQ ID NO: 10176 - DNA, 20 bp, Homo sapiens
  source 1..20: mol_type = genomic DNA; note = Gene: IL11RA; note = Location (start to end; relative to TSS): IL11RA_23_53; note = Orientation (relative to transcription): sense; note = sgRNA Position: 34652234; note = Sequence Name: 56322-704_101_SL_seq_10176
ggcagcggccgcggaaggtg

SEQ ID NO: 10177 - DNA, 20 bp, Homo sapiens
  source 1..20: mol_type = genomic DNA; note = Gene: IL11RA; note = Location (start to end; relative to TSS): IL11RA_55_85; note = Orientation (relative to transcription): antisense; note = sgRNA Position: 34652246; note = Sequence Name: 56322-704_101_SL_seq_10177
aagactttggcgtctacacc

SEQ ID NO: 10178 - DNA, 20 bp, Homo sapiens
  source 1..20: mol_type = genomic DNA; note = Gene: IL11RA; note = Location (start to end; relative to TSS): IL11RA_18_48; note = Orientation (relative to transcription): sense; note = sgRNA Position: 34652229; note = Sequence Name: 56322-704_101_SL_seq_10178
ctggcggcagcggccgcgga

SEQ ID NO: 10179 - DNA, 20 bp, Homo sapiens
  source 1..20: mol_type = genomic DNA; note = Gene: IL11RA; note = Location (start to end; relative to TSS): IL11RA_52_82; note = Orientation (relative to transcription): sense; note = sgRNA Position: 34652263; note = Sequence Name: 56322-704_101_SL_seq_10179
gtagacgccaaagtcttgtc

SEQ ID NO: 10180 - DNA, 20 bp, Homo sapiens
  source 1..20: mol_type = genomic DNA; note = Gene: IL12B; note = Location (start to end; relative to TSS): IL12B_47_77; note = Orientation (relative to transcription): antisense; note = sgRNA Position: 159330436; note = Sequence Name: 56322-704_101_SL_seq_10180
gggaagtgcttaccttgctc

SEQ ID NO: 10181 - DNA, 20 bp, Homo sapiens
  source 1..20: mol_type = genomic DNA; note = Gene: IL12B; note = Location (start to end; relative to TSS): IL12B_82_112; note = Orientation (relative to transcription): antisense; note = sgRNA Position: 159330401; note = Sequence Name: 56322-704_101_SL_seq_10181
gcaggcccacagggagggga

SEQ ID NO: 10182 - DNA, 20 bp, Homo sapiens
  source 1..20: mol_type = genomic DNA; note = Gene: IL12B; note = Location (start to end; relative to TSS): IL12B_46_76; note = Orientation (relative to transcription): antisense; note = sgRNA Position: 159330437; note = Sequence Name: 56322-704_101_SL_seq_10182
ggaagtgcttaccttgctct

SEQ ID NO: 10183 - DNA, 20 bp, Homo sapiens
  source 1..20: mol_type = genomic DNA; note = Gene: IL12B; note = Location (start to end; relative to TSS): IL12B_79_109; note = Orientation (relative to transcription): antisense; note = sgRNA Position: 159330404; note = Sequence Name: 56322-704_101_SL_seq_10183
ggcccacagggaggggaggg

SEQ ID NO: 10184 - DNA, 20 bp, Homo sapiens
  source 1..20: mol_type = genomic DNA; note = Gene: IL12B; note = Location (start to end; relative to TSS): IL12B_42_72; note = Orientation (relative to transcription): antisense; note = sgRNA Position: 159330441; note = Sequence Name: 56322-704_101_SL_seq_10184
gtgcttaccttgctctgggc

SEQ ID NO: 10185 - DNA, 20 bp, Homo sapiens
  source 1..20: mol_type = genomic DNA; note = Gene: IL12B; note = Location (start to end; relative to TSS): IL12B_73_103; note = Orientation (relative to transcription): antisense; note = sgRNA Position: 159330410; note = Sequence Name: 56322-704_101_SL_seq_10185
cagggaggggagggaggtag

SEQ ID NO: 10186 - DNA, 20 bp, Homo sapiens
  source 1..20: mol_type = genomic DNA; note = Gene: IL12B; note = Location (start to end; relative to TSS): IL12B_38_68; note = Orientation (relative to transcription): antisense; note = sgRNA Position: 159330445; note = Sequence Name: 56322-704_101_SL_seq_10186
ttaccttgctctgggcagga

SEQ ID NO: 10187 - DNA, 20 bp, Homo sapiens
  source 1..20: mol_type = genomic DNA; note = Gene: IL12B; note = Location (start to end; relative to TSS): IL12B_68_98; note = Orientation (relative to transcription): sense; note = sgRNA Position: 159330395; note = Sequence Name: 56322-704_101_SL_seq_10187
tacctccctcccctccctgt

SEQ ID NO: 10188 - DNA, 20 bp, Homo sapiens
  source 1..20: mol_type = genomic DNA; note = Gene: IL12B; note = Location (start to end; relative to TSS): IL12B_26_56; note = Orientation (relative to transcription): antisense; note = sgRNA Position: 159330457; note = Sequence Name: 56322-704_101_SL_seq_10188
gggcaggacggagagtccaa

SEQ ID NO: 10189 - DNA, 20 bp, Homo sapiens
  source 1..20: mol_type = genomic DNA; note = Gene: IL12B; note = Location (start to end; relative to TSS): IL12B_67_97; note = Orientation (relative to transcription): sense; note = sgRNA Position: 159330396; note = Sequence Name: 56322-704_101_SL_seq_10189
ctacctccctcccctccctg

SEQ ID NO: 10190 - DNA, 20 bp, Homo sapiens
  source 1..20: mol_type = genomic DNA; note = Gene: IL18BP; note = Location (start to end; relative to TSS): IL18BP_45_75; note = Orientation (relative to transcription): sense; note = sgRNA Position: 71998980; note = Sequence Name: 56322-704_101_SL_seq_10190
agctcctagagggaagcttc

SEQ ID NO: 10191 - DNA, 20 bp, Homo sapiens
  source 1..20: mol_type = genomic DNA; note = Gene: IL18BP; note = Location (start to end; relative to TSS): IL18BP_91_121; note = Orientation (relative to transcription): sense; note = sgRNA Position: 71999026; note = Sequence Name: 56322-704_101_SL_seq_10191
ttaggagccaggtaggagtc

SEQ ID NO: 10192 - DNA, 20 bp, Homo sapiens
  source 1..20: mol_type = genomic DNA; note = Gene: IL18BP; note = Location (start to end; relative to TSS): IL18BP_50_80; note = Orientation (relative to transcription): sense; note = sgRNA Position: 71998985; note = Sequence Name: 56322-704_101_SL_seq_10192
ctagagggaagcttctggaa

SEQ ID NO: 10193 - DNA, 20 bp, Homo sapiens
  source 1..20: mol_type = genomic DNA; note = Gene: IL18BP; note = Location (start to end; relative to TSS): IL18BP_84_114; note = Orientation (relative to transcription): sense; note = sgRNA Position: 71999019; note = Sequence Name: 56322-704_101_SL_seq_10193
ggacctcttaggagccaggt

SEQ ID NO: 10194 - DNA, 20 bp, Homo sapiens
  source 1..20: mol_type = genomic DNA; note = Gene: IL18BP; note = Location (start to end; relative to TSS): IL18BP_35_65; note = Orientation (relative to transcription): sense; note = sgRNA Position: 71998970; note = Sequence Name: 56322-704_101_SL_seq_10194
tgagtcttggagctcctaga

SEQ ID NO: 10195 - DNA, 20 bp, Homo sapiens
  source 1..20: mol_type = genomic DNA; note = Gene: IL18BP; note = Location (start to end; relative to TSS): IL18BP_80_110; note = Orientation (relative to transcription): sense; note = sgRNA Position: 71999015; note = Sequence Name: 56322-704_101_SL_seq_10195
ttcaggacctcttaggagcc

SEQ ID NO: 10196 - DNA, 20 bp, Homo sapiens
  source 1..20: mol_type = genomic DNA; note = Gene: IL18BP; note = Location (start to end; relative to TSS): IL18BP_34_64; note = Orientation (relative to transcription): sense; note = sgRNA Position: 71998969; note = Sequence Name: 56322-704_101_SL_seq_10196
ttgagtcttggagctcctag

SEQ ID NO: 10197 - DNA, 20 bp, Homo sapiens
  source 1..20: mol_type = genomic DNA; note = Gene: IL18BP; note = Location (start to end; relative to TSS): IL18BP_73_103; note = Orientation (relative to transcription): sense; note = sgRNA Position: 71999008; note = Sequence Name: 56322-704_101_SL_seq_10197
aaggctcttcaggacctctt

SEQ ID NO: 10198 - DNA, 20 bp, Homo sapiens
  source 1..20: mol_type = genomic DNA; note = Gene: IL18BP; note = Location (start to end; relative to TSS): IL18BP_22_52; note = Orientation (relative to transcription): sense; note = sgRNA Position: 71998957; note = Sequence Name: 56322-704_101_SL_seq_10198
gacacagctaacttgagtct

SEQ ID NO: 10199 - DNA, 20 bp, Homo sapiens
  source 1..20: mol_type = genomic DNA; note = Gene: IL18BP; note = Location (start to end; relative to TSS): IL18BP_54_84; note = Orientation (relative to transcription): sense; note = sgRNA Position: 71998989; note = Sequence Name: 56322-704_101_SL_seq_10199
agggaagcttctggaaagga

SEQ ID NO: 10200 - DNA, 20 bp, Homo sapiens
  source 1..20: mol_type = genomic DNA; note = Gene: IL18R1; note = Location (start to end; relative to TSS): IL18R1_38_68; note = Orientation (relative to transcription): sense; note = sgRNA Position: 102355860; note = Sequence Name: 56322-704_101_SL_seq_10200
ccacgccgtccgcgggaaaa

SEQ ID NO: 10201 - DNA, 20 bp, Homo sapiens
  source 1..20: mol_type = genomic DNA; note = Gene: IL18R1; note = Location (start to end; relative to TSS): IL18R1_96_126; note = Orientation (relative to transcription): antisense; note = sgRNA Position: 102355898; note = Sequence Name: 56322-704_101_SL_seq_10201
tactggatcgcggggtccaa

SEQ ID NO: 10202 - DNA, 20 bp, Homo sapiens
  source 1..20: mol_type = genomic DNA; note = Gene: IL18R1; note = Location (start to end; relative to TSS): IL18R1_30_60; note = Orientation (relative to transcription): sense; note = sgRNA Position: 102355852; note = Sequence Name: 56322-704_101_SL_seq_10202
cctggggcccacgccgtccg

SEQ ID NO: 10203 - DNA, 20 bp, Homo sapiens
  source 1..20: mol_type = genomic DNA; note = Gene: IL18R1; note = Location (start to end; relative to TSS): IL18R1_94_124; note = Orientation (relative to transcription): sense; note = sgRNA Position: 102355916; note = Sequence Name: 56322-704_101_SL_seq_10203
accccgcgatccagtagctc

SEQ ID NO: 10204 - DNA, 20 bp, Homo sapiens
  source 1..20: mol_type = genomic DNA; note = Gene: IL18R1; note = Location (start to end; relative to TSS): IL18R1_31_61; note = Orientation (relative to transcription): sense; note = sgRNA Position: 102355853; note = Sequence Name: 56322-704_101_SL_seq_10204
ctggggcccacgccgtccgc

SEQ ID NO: 10205 - DNA, 20 bp, Homo sapiens
  source 1..20: mol_type = genomic DNA; note = Gene: IL18R1; note = Location (start to end; relative to TSS): IL18R1_86_116; note = Orientation (relative to transcription): antisense; note = sgRNA Position: 102355888; note = Sequence Name: 56322-704_101_SL_seq_10205
cggggtccaaaggttgctgc

SEQ ID NO: 10206 - DNA, 20 bp, Homo sapiens
  source 1..20: mol_type = genomic DNA; note = Gene: IL18R1; note = Location (start to end; relative to TSS): IL18R1_32_62; note = Orientation (relative to transcription): antisense; note = sgRNA Position: 102355834; note = Sequence Name: 56322-704_101_SL_seq_10206
cggcgtgggccccaggcgtc

SEQ ID NO: 10207 - DNA, 20 bp, Homo sapiens
  source 1..20: mol_type = genomic DNA; note = Gene: IL18R1; note = Location (start to end; relative to TSS): IL18R1_71_101; note = Orientation (relative to transcription): sense; note = sgRNA Position: 102355893; note = Sequence Name: 56322-704_101_SL_seq_10207
ggttttccagcagcaacctt

SEQ ID NO: 10208 - DNA, 20 bp, Homo sapiens
  source 1..20: mol_type = genomic DNA; note = Gene: IL18R1; note = Location (start to end; relative to TSS): IL18R1_37_67; note = Orientation (relative to transcription): sense; note = sgRNA Position: 102355859; note = Sequence Name: 56322-704_101_SL_seq_10208
cccacgccgtccgcgggaaa

SEQ ID NO: 10209 - DNA, 20 bp, Homo sapiens
  source 1..20: mol_type = genomic DNA; note = Gene: IL18R1; note = Location (start to end; relative to TSS): IL18R1_71_101; note = Orientation (relative to transcription): sense; note = sgRNA Position: 102355893; note = Sequence Name: 56322-704_101_SL_seq_10209
ggttttccagcagcaacctt

SEQ ID NO: 10210 - DNA, 20 bp, Homo sapiens
  source 1..20: mol_type = genomic DNA; note = Gene: IL18RAP; note = Location (start to end; relative to TSS): IL18RAP_60_90; note = Orientation (relative to transcription): sense; note = sgRNA Position: 102423246; note = Sequence Name: 56322-704_101_SL_seq_10210
tggcaaaggaatgaagttat

SEQ ID NO: 10211 - DNA, 20 bp, Homo sapiens
  source 1..20: mol_type = genomic DNA; note = Gene: IL18RAP; note = Location (start to end; relative to TSS): IL18RAP_99_129; note = Orientation (relative to transcription): sense; note = sgRNA Position: 102423285; note = Sequence Name: 56322-704_101_SL_seq_10211
cgggagaacaatgctctgtt

SEQ ID NO: 10212 - DNA, 20 bp, Homo sapiens
  source 1..20: mol_type = genomic DNA; note = Gene: IL18RAP; note = Location (start to end; relative to TSS): IL18RAP_46_76; note = Orientation (relative to transcription): sense; note = sgRNA Position: 102423232; note = Sequence Name: 56322-704_101_SL_seq_10212
aaaacactctactctggcaa

SEQ ID NO: 10213 - DNA, 20 bp, Homo sapiens
  source 1..20: mol_type = genomic DNA; note = Gene: IL18RAP; note = Location (start to end; relative to TSS): IL18RAP_79_109; note = Orientation (relative to transcription): sense; note = sgRNA Position: 102423265; note = Sequence Name: 56322-704_101_SL_seq_10213
ttggagtgatgacaggaaca

SEQ ID NO: 10214 - DNA, 20 bp, Homo sapiens
  source 1..20: mol_type = genomic DNA; note = Gene: IL18RAP; note = Location (start to end; relative to TSS): IL18RAP_40_70; note = Orientation (relative to transcription): sense; note = sgRNA Position: 102423226; note = Sequence Name: 56322-704_101_SL_seq_10214
aatctcaaaacactctactc

SEQ ID NO: 10215 - DNA, 20 bp, Homo sapiens
  source 1..20: mol_type = genomic DNA; note = Gene: IL18RAP; note = Location (start to end; relative to TSS): IL18RAP_72_102; note = Orientation (relative to transcription): sense; note = sgRNA Position: 102423258; note = Sequence Name: 56322-704_101_SL_seq_10215
gaagttattggagtgatgac

SEQ ID NO: 10216 - DNA, 20 bp, Homo sapiens
  source 1..20: mol_type = genomic DNA; note = Gene: IL18RAP; note = Location (start to end; relative to TSS): IL18RAP_7_37; note = Orientation (relative to transcription): sense; note = sgRNA Position: 102423193; note = Sequence Name: 56322-704_101_SL_seq_10216
agaaatgaaggggatactca

SEQ ID NO: 10217 - DNA, 20 bp, Homo sapiens
  source 1..20: mol_type = genomic DNA; note = Gene: IL18RAP; note = Location (start to end; relative to TSS): IL18RAP_46_76; note = Orientation (relative to transcription): sense; note = sgRNA Position: 102423232; note = Sequence Name: 56322-704_101_SL_seq_10217
aaaacactctactctggcaa

SEQ ID NO: 10218 - DNA, 20 bp, Homo sapiens
  source 1..20: mol_type = genomic DNA; note = Gene: IL18RAP; note = Location (start to end; relative to TSS): IL18RAP_6_36; note = Orientation (relative to transcription): sense; note = sgRNA Position: 102423192; note = Sequence Name: 56322-704_101_SL_seq_10218
cagaaatgaaggggatactc

SEQ ID NO: 10219 - DNA, 20 bp, Homo sapiens
  source 1..20: mol_type = genomic DNA; note = Gene: IL18RAP; note = Location (start to end; relative to TSS): IL18RAP_40_70; note = Orientation (relative to transcription): sense; note = sgRNA Position: 102423226; note = Sequence Name: 56322-704_101_SL_seq_10219
aatctcaaaacactctactc

SEQ ID NO: 10220 - DNA, 20 bp, Homo sapiens
  source 1..20: mol_type = genomic DNA; note = Gene: IL1R1; note = Location (start to end; relative to TSS): IL1R1_47_77; note = Orientation (relative to transcription): sense; note = sgRNA Position: 102142819; note = Sequence Name: 56322-704_101_SL_seq_10220
agcgcgcggcgccggccggg

SEQ ID NO: 10221 - DNA, 20 bp, Homo sapiens
  source 1..20: mol_type = genomic DNA; note = Gene: IL1R1; note = Location (start to end; relative to TSS): IL1R1_81_111; note = Orientation (relative to transcription): antisense; note = sgRNA Position: 102142833; note = Sequence Name: 56322-704_101_SL_seq_10221
cgcccggcccggccgctctc

SEQ ID NO: 10222 - DNA, 20 bp, Homo sapiens
  source 1..20: mol_type = genomic DNA; note = Gene: IL1R1; note = Location (start to end; relative to TSS): IL1R1_41_71; note = Orientation (relative to transcription): antisense; note = sgRNA Position: 102142793; note = Sequence Name: 56322-704_101_SL_seq_10222
cgcgcgctccgagtcggctc

SEQ ID NO: 10223 - DNA, 20 bp, Homo sapiens
  source 1..20: mol_type = genomic DNA; note = Gene: IL1R1; note = Location (start to end; relative to TSS): IL1R1_71_101; note = Orientation (relative to transcription): antisense; note = sgRNA Position: 102142823; note = Sequence Name: 56322-704_101_SL_seq_10223
ggccgctctccggctcctcc

SEQ ID NO: 10224 - DNA, 20 bp, Homo sapiens
  source 1..20: mol_type = genomic DNA; note = Gene: IL1R1; note = Location (start to end; relative to TSS): IL1R1_33_63; note = Orientation (relative to transcription): sense; note = sgRNA Position: 102142805; note = Sequence Name: 56322-704_101_SL_seq_10224
cggagccgactcggagcgcg

SEQ ID NO: 10225 - DNA, 20 bp, Homo sapiens
  source 1..20: mol_type = genomic DNA; note = Gene: IL1R1; note = Location (start to end; relative to TSS): IL1R1_65_95; note = Orientation (relative to transcription): sense; note = sgRNA Position: 102142837; note = Sequence Name: 56322-704_101_SL_seq_10225
ggaggagccggagagcggcc

SEQ ID NO: 10226 - DNA, 20 bp, Homo sapiens
  source 1..20: mol_type = genomic DNA; note = Gene: IL1R1; note = Location (start to end; relative to TSS): IL1R1_24_54; note = Orientation (relative to transcription): sense; note = sgRNA Position: 102142796; note = Sequence Name: 56322-704_101_SL_seq_10226
gccggcggccggagccgact

SEQ ID NO: 10227 - DNA, 20 bp, Homo sapiens
  source 1..20: mol_type = genomic DNA; note = Gene: IL1R1; note = Location (start to end; relative to TSS): IL1R1_60_90; note = Orientation (relative to transcription): sense; note = sgRNA Position: 102142832; note = Sequence Name: 56322-704_101_SL_seq_10227
ggccgggaggagccggagag

SEQ ID NO: 10228 - DNA, 20 bp, Homo sapiens
  source 1..20: mol_type = genomic DNA; note = Gene: IL1R1; note = Location (start to end; relative to TSS): IL1R1_9_39; note = Orientation (relative to transcription): sense; note = sgRNA Position: 102142781; note = Sequence Name: 56322-704_101_SL_seq_10228
cgggcgcagcttgtggccgg

SEQ ID NO: 10229 - DNA, 20 bp, Homo sapiens
  source 1..20: mol_type = genomic DNA; note = Gene: IL1R1; note = Location (start to end; relative to TSS): IL1R1_41_71; note = Orientation (relative to transcription): antisense; note = sgRNA Position: 102142793; note = Sequence Name: 56322-704_101_SL_seq_10229
cgcgcgctccgagtcggctc

SEQ ID NO: 10230 - DNA, 20 bp, Homo sapiens
  source 1..20: mol_type = genomic DNA; note = Gene: IL1R2; note = Location (start to end; relative to TSS): IL1R2_27_57; note = Orientation (relative to transcription): antisense; note = sgRNA Position: 101991993; note = Sequence Name: 56322-704_101_SL_seq_10230
tgttgctgctcacctgggga

SEQ ID NO: 10231 - DNA, 20 bp, Homo sapiens
  source 1..20: mol_type = genomic DNA; note = Gene: IL1R2; note = Location (start to end; relative to TSS): IL1R2_120_150; note = Orientation (relative to transcription): sense; note = sgRNA Position: 101992106; note = Sequence Name: 56322-704_101_SL_seq_10231
gagagagagagagagagaga

SEQ ID NO: 10232 - DNA, 20 bp, Homo sapiens
  source 1..20: mol_type = genomic DNA; note = Gene: IL1R2; note = Location (start to end; relative to TSS): IL1R2_31_61; note = Orientation (relative to transcription): antisense; note = sgRNA Position: 101991997; note = Sequence Name: 56322-704_101_SL_seq_10232
accttgttgctgctcacctg

SEQ ID NO: 10233 - DNA, 20 bp, Homo sapiens
  source 1..20: mol_type = genomic DNA; note = Gene: IL1R2; note = Location (start to end; relative to TSS): IL1R2_119_149; note = Orientation (relative to transcription): sense; note = sgRNA Position: 101992105; note = Sequence Name: 56322-704_101_SL_seq_10233
agagagagagagagagagag

SEQ ID NO: 10234 - DNA, 20 bp, Homo sapiens
  source 1..20: mol_type = genomic DNA; note = Gene: IL1R2; note = Location (start to end; relative to TSS): IL1R2_32_62; note = Orientation (relative to transcription): antisense; note = sgRNA Position: 101991998; note = Sequence Name: 56322-704_101_SL_seq_10234
caccttgttgctgctcacct

SEQ ID NO: 10235 - DNA, 20 bp, Homo sapiens
  source 1..20: mol_type = genomic DNA; note = Gene: IL1R2; note = Location (start to end; relative to TSS): IL1R2_82_112; note = Orientation (relative to transcription): sense; note = sgRNA Position: 101992068; note = Sequence Name: 56322-704_101_SL_seq_10235
gagagagagaaagagagaga

SEQ ID NO: 10236 - DNA, 20 bp, Homo sapiens
  source 1..20: mol_type = genomic DNA; note = Gene: IL1R2; note = Location (start to end; relative to TSS): IL1R2_19_49; note = Orientation (relative to transcription): antisense; note = sgRNA Position: 101991985; note = Sequence Name: 56322-704_101_SL_seq_10236
ctcacctggggaaggctgcc

SEQ ID NO: 10237 - DNA, 20 bp, Homo sapiens
  source 1..20: mol_type = genomic DNA; note = Gene: IL1R2; note = Location (start to end; relative to TSS): IL1R2_81_111; note = Orientation (relative to transcription): sense; note = sgRNA Position: 101992067; note = Sequence Name: 56322-704_101_SL_seq_10237
agagagagagaaagagagag

SEQ ID NO: 10238 - DNA, 20 bp, Homo sapiens
  source 1..20: mol_type = genomic DNA; note = Gene: IL1R2; note = Location (start to end; relative to TSS): IL1R2_21_51; note = Orientation (relative to transcription): sense; note = sgRNA Position: 101992007; note = Sequence Name: 56322-704_101_SL_seq_10238
tccccaggtgagcagcaaca

SEQ ID NO: 10239 - DNA, 20 bp, Homo sapiens
  source 1..20: mol_type = genomic DNA; note = Gene: IL1R2; note = Location (start to end; relative to TSS): IL1R2_56_86; note = Orientation (relative to transcription): sense; note = sgRNA Position: 101992042; note = Sequence Name: 56322-704_101_SL_seq_10239
gagctgcaggtaagaggctt

SEQ ID NO: 10240 - DNA, 20 bp, Homo sapiens
  source 1..20: mol_type = genomic DNA; note = Gene: IL1RAP; note = Location (start to end; relative to TSS): IL1RAP_41_71; note = Orientation (relative to transcription): antisense; note = sgRNA Position: 190514132; note = Sequence Name: 56322-704_101_SL_seq_10240
ttccgcgcctctggccaaag

SEQ ID NO: 10241 - DNA, 20 bp, Homo sapiens
  source 1..20: mol_type = genomic DNA; note = Gene: IL1RAP; note = Location (start to end; relative to TSS): IL1RAP_89_119; note = Orientation (relative to transcription): antisense; note = sgRNA Position: 190514180; note = Sequence Name: 56322-704_101_SL_seq_10241
gcagcaaaagcagccgggat

SEQ ID NO: 10242 - DNA, 20 bp, Homo sapiens
  source 1..20: mol_type = genomic DNA; note = Gene: IL1RAP; note = Location (start to end; relative to TSS): IL1RAP_25_55; note = Orientation (relative to transcription): sense; note = sgRNA Position: 190514136; note = Sequence Name: 56322-704_101_SL_seq_10242
ccggggtccgctttggccag

SEQ ID NO: 10243 - DNA, 20 bp, Homo sapiens
  source 1..20: mol_type = genomic DNA; note = Gene: IL1RAP; note = Location (start to end; relative to TSS): IL1RAP_75_105; note = Orientation (relative to transcription): antisense; note = sgRNA Position: 190514166; note = Sequence Name: 56322-704_101_SL_seq_10243
cgggatgggtgcagtgtcgc

SEQ ID NO: 10244 - DNA, 20 bp, Homo sapiens
  source 1..20: mol_type = genomic DNA; note = Gene: IL1RAP; note = Location (start to end; relative to TSS): IL1RAP_26_56; note = Orientation (relative to transcription): antisense; note = sgRNA Position: 190514117; note = Sequence Name: 56322-704_101_SL_seq_10244
caaagcggaccccggagacc

SEQ ID NO: 10245 - DNA, 20 bp, Homo sapiens
  source 1..20: mol_type = genomic DNA; note = Gene: IL1RAP; note = Location (start to end; relative to TSS): IL1RAP_74_104; note = Orientation (relative to transcription): antisense; note = sgRNA Position: 190514165; note = Sequence Name: 56322-704_101_SL_seq_10245
gggatgggtgcagtgtcgcc

SEQ ID NO: 10246 - DNA, 20 bp, Homo sapiens
  source 1..20: mol_type = genomic DNA; note = Gene: IL1RAP; note = Location (start to end; relative to TSS): IL1RAP_18_48; note = Orientation (relative to transcription): sense; note = sgRNA Position: 190514129; note = Sequence Name: 56322-704_101_SL_seq_10246
caggtctccggggtccgctt

SEQ ID NO: 10247 - DNA, 20 bp, Homo sapiens
  source 1..20: mol_type = genomic DNA; note = Gene: IL1RAP; note = Location (start to end; relative to TSS): IL1RAP_67_97; note = Orientation (relative to transcription): sense; note = sgRNA Position: 190514178; note = Sequence Name: 56322-704_101_SL_seq_10247
cggcgacactgcacccatcc

SEQ ID NO: 10248 - DNA, 20 bp, Homo sapiens
  source 1..20: mol_type = genomic DNA; note = Gene: IL1RAP; note = Location (start to end; relative to TSS): IL1RAP_19_49; note = Orientation (relative to transcription): antisense; note = sgRNA Position: 190514110; note = Sequence Name: 56322-704_101_SL_seq_10248
gaccccggagacctggatcc

SEQ ID NO: 10249 - DNA, 20 bp, Homo sapiens
  source 1..20: mol_type = genomic DNA; note = Gene: IL1RAP; note = Location (start to end; relative to TSS): IL1RAP_50_80; note = Orientation (relative to transcription): antisense; note = sgRNA Position: 190514141; note = Sequence Name: 56322-704_101_SL_seq_10249
actgcttccttccgcgcctc

SEQ ID NO: 10250 - DNA, 20 bp, Homo sapiens
  source 1..20: mol_type = genomic DNA; note = Gene: IL1RAPL1; note = Location (start to end; relative to TSS): IL1RAPL1_43_73; note = Orientation (relative to transcription): sense; note = sgRNA Position: 28587515; note = Sequence Name: 56322-704_101_SL_seq_10250
atacataggattctttctta

SEQ ID NO: 10251 - DNA, 20 bp, Homo sapiens
  source 1..20: mol_type = genomic DNA; note = Gene: IL1RAPL1; note = Location (start to end; relative to TSS): IL1RAPL1_75_105; note = Orientation (relative to transcription): sense; note = sgRNA Position: 28587547; note = Sequence Name: 56322-704_101_SL_seq_10251
ggatctggaaattttacttg

SEQ ID NO: 10252 - DNA, 20 bp, Homo sapiens
  source 1..20: mol_type = genomic DNA; note = Gene: IL1RAPL1; note = Location (start to end; relative to TSS): IL1RAPL1_29_59; note = Orientation (relative to transcription): sense; note = sgRNA Position: 28587501; note = Sequence Name: 56322-704_101_SL_seq_10252
gatacttgtgaaatatacat

SEQ ID NO: 10253 - DNA, 20 bp, Homo sapiens
  source 1..20: mol_type = genomic DNA; note = Gene: IL1RAPL1; note = Location (start to end; relative to TSS): IL1RAPL1_74_104; note = Orientation (relative to transcription): sense; note = sgRNA Position: 28587546; note = Sequence Name: 56322-704_101_SL_seq_10253
cggatctggaaattttactt

SEQ ID NO: 10254 - DNA, 20 bp, Homo sapiens
  source 1..20: mol_type = genomic DNA; note = Gene: IL1RAPL1; note = Location (start to end; relative to TSS): IL1RAPL1_17_47; note = Orientation (relative to transcription): antisense; note = sgRNA Position: 28587469; note = Sequence Name: 56322-704_101_SL_seq_10254
tcccgcaataacagatccga

SEQ ID NO: 10255 - DNA, 20 bp, Homo sapiens
  source 1..20: mol_type = genomic DNA; note = Gene: IL1RAPL1; note = Location (start to end; relative to TSS): IL1RAPL1_73_103; note = Orientation (relative to transcription): sense; note = sgRNA Position: 28587545; note = Sequence Name: 56322-704_101_SL_seq_10255
ccggatctggaaattttact

SEQ ID NO: 10256 - DNA, 20 bp, Homo sapiens
  source 1..20: mol_type = genomic DNA; note = Gene: IL1RAPL1; note = Location (start to end; relative to TSS): IL1RAPL1_16_46; note = Orientation (relative to transcription): antisense; note = sgRNA Position: 28587468; note = Sequence Name: 56322-704_101_SL_seq_10256
cccgcaataacagatccgac

SEQ ID NO: 10257 - DNA, 20 bp, Homo sapiens
  source 1..20: mol_type = genomic DNA; note = Gene: IL1RAPL1; note = Location (start to end; relative to TSS): IL1RAPL1_60_90; note = Orientation (relative to transcription): sense; note = sgRNA Position: 28587532; note = Sequence Name: 56322-704_101_SL_seq_10257
ttatggctgcatcccggatc

SEQ ID NO: 10258 - DNA, 20 bp, Homo sapiens
  source 1..20: mol_type = genomic DNA; note = Gene: IL1RAPL1; note = Location (start to end; relative to TSS): IL1RAPL1_15_45; note = Orientation (relative to transcription): antisense; note = sgRNA Position: 28587467; note = Sequence Name: 56322-704_101_SL_seq_10258
ccgcaataacagatccgacg

SEQ ID NO: 10259 - DNA, 20 bp, Homo sapiens
  source 1..20: mol_type = genomic DNA; note = Gene: IL1RAPL1; note = Location (start to end; relative to TSS): IL1RAPL1_54_84; note = Orientation (relative to transcription): sense; note = sgRNA Position: 28587526; note = Sequence Name: 56322-704_101_SL_seq_10259
tctttcttatggctgcatcc

SEQ ID NO: 10260 - DNA, 20 bp, Homo sapiens
  source 1..20: mol_type = genomic DNA; note = Gene: IL1RAPL2; note = Location (start to end; relative to TSS): IL1RAPL2_54_84; note = Orientation (relative to transcription): antisense; note = sgRNA Position: 104566259; note = Sequence Name: 56322-704_101_SL_seq_10260
agtgcgggtgggagggtagt

SEQ ID NO: 10261 - DNA, 20 bp, Homo sapiens
  source 1..20: mol_type = genomic DNA; note = Gene: IL1RAPL2; note = Location (start to end; relative to TSS): IL1RAPL2_99_129; note = Orientation (relative to transcription): sense; note = sgRNA Position: 104566324; note = Sequence Name: 56322-704_101_SL_seq_10261
ggcaggatgtgaggcgagcc

SEQ ID NO: 10262 - DNA, 20 bp, Homo sapiens
  source 1..20: mol_type = genomic DNA; note = Gene: IL1RAPL2; note = Location (start to end; relative to TSS): IL1RAPL2_55_85; note = Orientation (relative to transcription): antisense; note = sgRNA Position: 104566260; note = Sequence Name: 56322-704_101_SL_seq_10262
gagtgcgggtgggagggtag

SEQ ID NO: 10263 - DNA, 20 bp, Homo sapiens
  source 1..20: mol_type = genomic DNA; note = Gene: IL1RAPL2; note = Location (start to end; relative to TSS): IL1RAPL2_90_120; note = Orientation (relative to transcription): sense; note = sgRNA Position: 104566315; note = Sequence Name: 56322-704_101_SL_seq_10263
agcagcggtggcaggatgtg

SEQ ID NO: 10264 - DNA, 20 bp, Homo sapiens
  source 1..20: mol_type = genomic DNA; note = Gene: IL1RAPL2; note = Location (start to end; relative to TSS): IL1RAPL2_50_80; note = Orientation (relative to transcription): sense; note = sgRNA Position: 104566275; note = Sequence Name: 56322-704_101_SL_seq_10264
taccctcccacccgcactcc

SEQ ID NO: 10265 - DNA, 20 bp, Homo sapiens
  source 1..20: mol_type = genomic DNA; note = Gene: IL1RAPL2; note = Location (start to end; relative to TSS): IL1RAPL2_82_112; note = Orientation (relative to transcription): sense; note = sgRNA Position: 104566307; note = Sequence Name: 56322-704_101_SL_seq_10265
gaggcggcagcagcggtggc

SEQ ID NO: 10266 - DNA, 20 bp, Homo sapiens
  source 1..20: mol_type = genomic DNA; note = Gene: IL1RAPL2; note = Location (start to end; relative to TSS): IL1RAPL2_17_47; note = Orientation (relative to transcription): sense; note = sgRNA Position: 104566242; note = Sequence Name: 56322-704_101_SL_seq_10266
agcgacaaaaacgcagctct

SEQ ID NO: 10267 - DNA, 20 bp, Homo sapiens
  source 1..20: mol_type = genomic DNA; note = Gene: IL1RAPL2; note = Location (start to end; relative to TSS): IL1RAPL2_54_84; note = Orientation (relative to transcription): antisense; note = sgRNA Position: 104566259; note = Sequence Name: 56322-704_101_SL_seq_10267
agtgcgggtgggagggtagt

SEQ ID NO: 10268 - DNA, 20 bp, Homo sapiens
  source 1..20: mol_type = genomic DNA; note = Gene: IL1RAPL2; note = Location (start to end; relative to TSS): IL1RAPL2_16_46; note = Orientation (relative to transcription): antisense; note = sgRNA Position: 104566221; note = Sequence Name: 56322-704_101_SL_seq_10268
cgtttttgtcgctaacagtt

SEQ ID NO: 10269 - DNA, 20 bp, Homo sapiens
  source 1..20: mol_type = genomic DNA; note = Gene: IL1RAPL2; note = Location (start to end; relative to TSS): IL1RAPL2_50_80; note = Orientation (relative to transcription): sense; note = sgRNA Position: 104566275; note = Sequence Name: 56322-704_101_SL_seq_10269
taccctcccacccgcactcc

SEQ ID NO: 10270 - DNA, 20 bp, Homo sapiens
  source 1..20: mol_type = genomic DNA; note = Gene: IL1RL1; note = Location (start to end; relative to TSS): IL1RL1_37_67; note = Orientation (relative to transcription): sense; note = sgRNA Position: 102311626; note = Sequence Name: 56322-704_101_SL_seq_10270
tacaacccaatgagggtaag

SEQ ID NO: 10271 - DNA, 20 bp, Homo sapiens
  source 1..20: mol_type = genomic DNA; note = Gene: IL1RL1; note = Location (start to end; relative to TSS): IL1RL1_76_106; note = Orientation (relative to transcription): sense; note = sgRNA Position: 102311665; note = Sequence Name: 56322-704_101_SL_seq_10271
aaaaatacttttatctcaaa

SEQ ID NO: 10272 - DNA, 20 bp, Homo sapiens
  source 1..20: mol_type = genomic DNA; note = Gene: IL1RL1; note = Location (start to end; relative to TSS): IL1RL1_30_60; note = Orientation (relative to transcription): sense; note = sgRNA Position: 102311619; note = Sequence Name: 56322-704_101_SL_seq_10272
actcaagtacaacccaatga

SEQ ID NO: 10273 - DNA, 20 bp, Homo sapiens
  source 1..20: mol_type = genomic DNA; note = Gene: IL1RL1; note = Location (start to end; relative to TSS): IL1RL1_75_105; note = Orientation (relative to transcription): sense; note = sgRNA Position: 102311664; note = Sequence Name: 56322-704_101_SL_seq_10273
caaaaatacttttatctcaa

SEQ ID NO: 10274 - DNA, 20 bp, Homo sapiens
  source 1..20: mol_type = genomic DNA; note = Gene: IL1RL1; note = Location (start to end; relative to TSS): IL1RL1_29_59; note = Orientation (relative to transcription): sense; note = sgRNA Position: 102311618; note = Sequence Name: 56322-704_101_SL_seq_10274
aactcaagtacaacccaatg

SEQ ID NO: 10275 - DNA, 20 bp, Homo sapiens
  source 1..20: mol_type = genomic DNA; note = Gene: IL1RL1; note = Location (start to end; relative to TSS): IL1RL1_75_105; note = Orientation (relative to transcription): sense; note = sgRNA Position: 102311664; note = Sequence Name: 56322-704_101_SL_seq_10275
caaaaatacttttatctcaa

SEQ ID NO: 10276 - DNA, 20 bp, Homo sapiens
  source 1..20: mol_type = genomic DNA; note = Gene: IL1RL1; note = Location (start to end; relative to TSS): IL1RL1_-1_29; note = Orientation (relative to transcription): sense; note = sgRNA Position: 102311588; note = Sequence Name: 56322-704_101_SL_seq_10276
aaactgtgggcagaaagttg

SEQ ID NO: 10277 - DNA, 20 bp, Homo sapiens
  source 1..20: mol_type = genomic DNA; note = Gene: IL1RL1; note = Location (start to end; relative to TSS): IL1RL1_44_74; note = Orientation (relative to transcription): sense; note = sgRNA Position: 102311633; note = Sequence Name: 56322-704_101_SL_seq_10277
caatgagggtaagtggcttt

SEQ ID NO: 10278 - DNA, 20 bp, Homo sapiens
  source 1..20: mol_type = genomic DNA; note = Gene: IL1RL1; note = Location (start to end; relative to TSS): IL1RL1_-14_16; note = Orientation (relative to transcription): sense; note = sgRNA Position: 102311575; note = Sequence Name: 56322-704_101_SL_seq_10278
tttctgagttgtgaaactgt

SEQ ID NO: 10279 - DNA, 20 bp, Homo sapiens
  source 1..20: mol_type = genomic DNA; note = Gene: IL1RL1; note = Location (start to end; relative to TSS): IL1RL1_45_75; note = Orientation (relative to transcription): sense; note = sgRNA Position: 102311634; note = Sequence Name: 56322-704_101_SL_seq_10279
aatgagggtaagtggctttg

SEQ ID NO: 10280 - DNA, 20 bp, Homo sapiens
  source 1..20: mol_type = genomic DNA; note = Gene: IL1RL2; note = Location (start to end; relative to TSS): IL1RL2_43_73; note = Orientation (relative to transcription): sense; note = sgRNA Position: 102187092; note = Sequence Name: 56322-704_101_SL_seq_10280
tcctgcaggcaggtagacac

SEQ ID NO: 10281 - DNA, 20 bp, Homo sapiens
  source 1..20: mol_type = genomic DNA; note = Gene: IL1RL2; note = Location (start to end; relative to TSS): IL1RL2_75_105; note = Orientation (relative to transcription): sense; note = sgRNA Position: 102187124; note = Sequence Name: 56322-704_101_SL_seq_10281
ctggctgagccaggcatggg

SEQ ID NO: 10282 - DNA, 20 bp, Homo sapiens
  source 1..20: mol_type = genomic DNA; note = Gene: IL1RL2; note = Location (start to end; relative to TSS): IL1RL2_38_68; note = Orientation (relative to transcription): antisense; note = sgRNA Position: 102187067; note = Sequence Name: 56322-704_101_SL_seq_10282
cctgcaggattgaagcgcgc

SEQ ID NO: 10283 - DNA, 20 bp, Homo sapiens
  source 1..20: mol_type = genomic DNA; note = Gene: IL1RL2; note = Location (start to end; relative to TSS): IL1RL2_72_102; note = Orientation (relative to transcription): sense; note = sgRNA Position: 102187121; note = Sequence Name: 56322-704_101_SL_seq_10283
agtctggctgagccaggcat

SEQ ID NO: 10284 - DNA, 20 bp, Homo sapiens
  source 1..20: mol_type = genomic DNA; note = Gene: IL1RL2; note = Location (start to end; relative to TSS): IL1RL2_29_59; note = Orientation (relative to transcription): antisense; note = sgRNA Position: 102187058; note = Sequence Name: 56322-704_101_SL_seq_10284
ttgaagcgcgcaggacctcg

SEQ ID NO: 10285 - DNA, 20 bp, Homo sapiens
  source 1..20: mol_type = genomic DNA; note = Gene: IL1RL2; note = Location (start to end; relative to TSS): IL1RL2_71_101; note = Orientation (relative to transcription): antisense; note = sgRNA Position: 102187100; note = Sequence Name: 56322-704_101_SL_seq_10285
gctcagccagactcccggcc

SEQ ID NO: 10286 - DNA, 20 bp, Homo sapiens
  source 1..20: mol_type = genomic DNA; note = Gene: IL1RL2; note = Location (start to end; relative to TSS): IL1RL2_33_63; note = Orientation (relative to transcription): sense; note = sgRNA Position: 102187082; note = Sequence Name: 56322-704_101_SL_seq_10286
cgcgcttcaatcctgcaggc

SEQ ID NO: 10287 - DNA, 20 bp, Homo sapiens
  source 1..20: mol_type = genomic DNA; note = Gene: IL1RL2; note = Location (start to end; relative to TSS): IL1RL2_66_96; note = Orientation (relative to transcription): sense; note = sgRNA Position: 102187115; note = Sequence Name: 56322-704_101_SL_seq_10287
gccgggagtctggctgagcc

SEQ ID NO: 10288 - DNA, 20 bp, Homo sapiens
  source 1..20: mol_type = genomic DNA; note = Gene: IL1RL2; note = Location (start to end; relative to TSS): IL1RL2_22_52; note = Orientation (relative to transcription): antisense; note = sgRNA Position: 102187051; note = Sequence Name: 56322-704_101_SL_seq_10288
gcgcaggacctcgtggagag

SEQ ID NO: 10289 - DNA, 20 bp, Homo sapiens
  source 1..20: mol_type = genomic DNA; note = Gene: IL1RL2; note = Location (start to end; relative to TSS): IL1RL2_53_83; note = Orientation (relative to transcription): antisense; note = sgRNA Position: 102187082; note = Sequence Name: 56322-704_101_SL_seq_10289
cccggtgtctacctgcctgc

SEQ ID NO: 10290 - DNA, 20 bp, Homo sapiens
  source 1..20: mol_type = genomic DNA; note = Gene: IL6R; note = Location (start to end; relative to TSS): IL6R_55_85; note = Orientation (relative to transcription): sense; note = sgRNA Position: 154405424; note = Sequence Name: 56322-704_101_SL_seq_10290
ctgacactgagccgggccag

SEQ ID NO: 10291 - DNA, 20 bp, Homo sapiens
  source 1..20: mol_type = genomic DNA; note = Gene: IL6R; note = Location (start to end; relative to TSS): IL6R_87_117; note = Orientation (relative to transcription): sense; note = sgRNA Position: 154405456; note = Sequence Name: 56322-704_101_SL_seq_10291
cgagcgcggcgcggggccga

SEQ ID NO: 10292 - DNA, 20 bp, Homo sapiens
  source 1..20: mol_type = genomic DNA; note = Gene: IL6R; note = Location (start to end; relative to TSS): IL6R_47_77; note = Orientation (relative to transcription): sense; note = sgRNA Position: 154405416; note = Sequence Name: 56322-704_101_SL_seq_10292
aagtcgcactgacactgagc

SEQ ID NO: 10293 - DNA, 20 bp, Homo sapiens
  source 1..20: mol_type = genomic DNA; note = Gene: IL6R; note = Location (start to end; relative to TSS): IL6R_80_110; note = Orientation (relative to transcription): antisense; note = sgRNA Position: 154405429; note = Sequence Name: 56322-704_101_SL_seq_10293
gcgctcggctcctctccctc

SEQ ID NO: 10294 - DNA, 20 bp, Homo sapiens
  source 1..20: mol_type = genomic DNA; note = Gene: IL6R; note = Location (start to end; relative to TSS): IL6R_48_78; note = Orientation (relative to transcription): sense; note = sgRNA Position: 154405417; note = Sequence Name: 56322-704_101_SL_seq_10294
agtcgcactgacactgagcc

SEQ ID NO: 10295 - DNA, 20 bp, Homo sapiens
  source 1..20: mol_type = genomic DNA; note = Gene: IL6R; note = Location (start to end; relative to TSS): IL6R_78_108; note = Orientation (relative to transcription): sense; note = sgRNA Position: 154405447; note = Sequence Name: 56322-704_101_SL_seq_10295
gagaggagccgagcgcggcg

SEQ ID NO: 10296 - DNA, 20 bp, Homo sapiens
  source 1..20: mol_type = genomic DNA; note = Gene: IL6R; note = Location (start to end; relative to TSS): IL6R_23_53; note = Orientation (relative to transcription): sense; note = sgRNA Position: 154405392; note = Sequence Name: 56322-704_101_SL_seq_10296
cgctctgagtcatgtgcgag

SEQ ID NO: 10297 - DNA, 20 bp, Homo sapiens
  source 1..20: mol_type = genomic DNA; note = Gene: IL6R; note = Location (start to end; relative to TSS): IL6R_55_85; note = Orientation (relative to transcription): sense; note = sgRNA Position: 154405424; note = Sequence Name: 56322-704_101_SL_seq_10297
ctgacactgagccgggccag

SEQ ID NO: 10298 - DNA, 20 bp, Homo sapiens
  source 1..20: mol_type = genomic DNA; note = Gene: IL6R; note = Location (start to end; relative to TSS): IL6R_9_39; note = Orientation (relative to transcription): antisense; note = sgRNA Position: 154405358; note = Sequence Name: 56322-704_101_SL_seq_10298
gcggacggtcctggcaacgc

SEQ ID NO: 10299 - DNA, 20 bp, Homo sapiens
  source 1..20: mol_type = genomic DNA; note = Gene: IL6R; note = Location (start to end; relative to TSS): IL6R_47_77; note = Orientation (relative to transcription): sense; note = sgRNA Position: 154405416; note = Sequence Name: 56322-704_101_SL_seq_10299
aagtcgcactgacactgagc

SEQ ID NO: 10300 - DNA, 20 bp, Homo sapiens
  source 1..20: mol_type = genomic DNA; note = Gene: ISLR; note = Location (start to end; relative to TSS): ISLR_39_69; note = Orientation (relative to transcription): sense; note = sgRNA Position: 74173775; note = Sequence Name: 56322-704_101_SL_seq_10300
tgctggaaggagggagtgcg

SEQ ID NO: 10301 - DNA, 20 bp, Homo sapiens
  source 1..20: mol_type = genomic DNA; note = Gene: ISLR; note = Location (start to end; relative to TSS): ISLR_81_111; note = Orientation (relative to transcription): sense; note = sgRNA Position: 74173817; note = Sequence Name: 56322-704_101_SL_seq_10301
tgccgcctcctctcagtgga

SEQ ID NO: 10302 - DNA, 20 bp, Homo sapiens
  source 1..20: mol_type = genomic DNA; note = Gene: ISLR; note = Location (start to end; relative to TSS): ISLR_30_60; note = Orientation (relative to transcription): sense; note = sgRNA Position: 74173766; note = Sequence Name: 56322-704_101_SL_seq_10302
cagttgttttgctggaagga

SEQ ID NO: 10303 - DNA, 20 bp, Homo sapiens
  source 1..20: mol_type = genomic DNA; note = Gene: ISLR; note = Location (start to end; relative to TSS): ISLR_77_107; note = Orientation (relative to transcription): sense; note = sgRNA Position: 74173813; note = Sequence Name: 56322-704_101_SL_seq_10303
tccctgccgcctcctctcag

SEQ ID NO: 10304 - DNA, 20 bp, Homo sapiens
  source 1..20: mol_type = genomic DNA; note = Gene: ISLR; note = Location (start to end; relative to TSS): ISLR_29_59; note = Orientation (relative to transcription): sense; note = sgRNA Position: 74173765; note = Sequence Name: 56322-704_101_SL_seq_10304
gcagttgttttgctggaagg

SEQ ID NO: 10305 - DNA, 20 bp, Homo sapiens
  source 1..20: mol_type = genomic DNA; note = Gene: ISLR; note = Location (start to end; relative to TSS): ISLR_76_106; note = Orientation (relative to transcription): antisense; note = sgRNA Position: 74173792; note = Sequence Name: 56322-704_101_SL_seq_10305
gaggcggcagggaggagccc

SEQ ID NO: 10306 - DNA, 20 bp, Homo sapiens
  source 1..20: mol_type = genomic DNA; note = Gene: ISLR; note = Location (start to end; relative to TSS): ISLR_26_56; note = Orientation (relative to transcription): sense; note = sgRNA Position: 74173762; note = Sequence Name: 56322-704_101_SL_seq_10306
gaagcagttgttttgctgga

SEQ ID NO: 10307 - DNA, 20 bp, Homo sapiens
  source 1..20: mol_type = genomic DNA; note = Gene: ISLR; note = Location (start to end; relative to TSS): ISLR_75_105; note = Orientation (relative to transcription): antisense; note = sgRNA Position: 74173791; note = Sequence Name: 56322-704_101_SL_seq_10307
aggcggcagggaggagcccg

SEQ ID NO: 10308 - DNA, 20 bp, Homo sapiens
  source 1..20: mol_type = genomic DNA; note = Gene: ISLR; note = Location (start to end; relative to TSS): ISLR_20_50; note = Orientation (relative to transcription): antisense; note = sgRNA Position: 74173736; note = Sequence Name: 56322-704_101_SL_seq_10308
actgcttctctgcagcaaca

SEQ ID NO: 10309 - DNA, 20 bp, Homo sapiens
  source 1..20: mol_type = genomic DNA; note = Gene: ISLR; note = Location (start to end; relative to TSS): ISLR_50_80; note = Orientation (relative to transcription): sense; note = sgRNA Position: 74173786; note = Sequence Name: 56322-704_101_SL_seq_10309
gggagtgcgcgggctgcccc

SEQ ID NO: 10310 - DNA, 20 bp, Homo sapiens
  source 1..20: mol_type = genomic DNA; note = Gene: ISLR2; note = Location (start to end; relative to TSS): ISLR2_61_91; note = Orientation (relative to transcription): sense; note = sgRNA Position: 74130673; note = Sequence Name: 56322-704_101_SL_seq_10310
gaggagaacggtaagtgtcc

SEQ ID NO: 10311 - DNA, 20 bp, Homo sapiens
  source 1..20: mol_type = genomic DNA; note = Gene: ISLR2; note = Location (start to end; relative to TSS): ISLR2_101_131; note = Orientation (relative to transcription): sense; note = sgRNA Position: 74130713; note = Sequence Name: 56322-704_101_SL_seq_10311
aaaatgcgtgtgaatgtagc

SEQ ID NO: 10312 - DNA, 20 bp, Homo sapiens
  source 1..20: mol_type = genomic DNA; note = Gene: ISLR2; note = Location (start to end; relative to TSS): ISLR2_42_72; note = Orientation (relative to transcription): sense; note = sgRNA Position: 74130654; note = Sequence Name: 56322-704_101_SL_seq_10312
tgtgtgtatgcgtgtgcgag

SEQ ID NO: 10313 - DNA, 20 bp, Homo sapiens
  source 1..20: mol_type = genomic DNA; note = Gene: ISLR2; note = Location (start to end; relative to TSS): ISLR2_89_119; note = Orientation (relative to transcription): antisense; note = sgRNA Position: 74130681; note = Sequence Name: 56322-704_101_SL_seq_10313
ttcacgggcacacctgcacc

SEQ ID NO: 10314 - DNA, 20 bp, Homo sapiens
  source 1..20: mol_type = genomic DNA; note = Gene: ISLR2; note = Location (start to end; relative to TSS): ISLR2_49_79; note = Orientation (relative to transcription): sense; note = sgRNA Position: 74130661; note = Sequence Name: 56322-704_101_SL_seq_10314
atgcgtgtgcgagaggagaa

SEQ ID NO: 10315 - DNA, 20 bp, Homo sapiens
  source 1..20: mol_type = genomic DNA; note = Gene: ISLR2; note = Location (start to end; relative to TSS): ISLR2_88_118; note = Orientation (relative to transcription): antisense; note = sgRNA Position: 74130680; note = Sequence Name: 56322-704_101_SL_seq_10315
tcacgggcacacctgcaccc

SEQ ID NO: 10316 - DNA, 20 bp, Homo sapiens
  source 1..20: mol_type = genomic DNA; note = Gene: ISLR2; note = Location (start to end; relative to TSS): ISLR2_5_35; note = Orientation (relative to transcription): sense; note = sgRNA Position: 74130617; note = Sequence Name: 56322-704_101_SL_seq_10316
ctggcgggacaggcgcgtga

SEQ ID NO: 10317 - DNA, 20 bp, Homo sapiens
  source 1..20: mol_type = genomic DNA; note = Gene: ISLR2; note = Location (start to end; relative to TSS): ISLR2_49_79; note = Orientation (relative to transcription): sense; note = sgRNA Position: 74130661; note = Sequence Name: 56322-704_101_SL_seq_10317
atgcgtgtgcgagaggagaa

SEQ ID NO: 10318 - DNA, 20 bp, Homo sapiens
  source 1..20: mol_type = genomic DNA; note = Gene: ISLR2; note = Location (start to end; relative to TSS): ISLR2_4_34; note = Orientation (relative to transcription): sense; note = sgRNA Position: 74130616; note = Sequence Name: 56322-704_101_SL_seq_10318
gctggcgggacaggcgcgtg

SEQ ID NO: 10319 - DNA, 20 bp, Homo sapiens
  source 1..20: mol_type = genomic DNA; note = Gene: ISLR2; note = Location (start to end; relative to TSS): ISLR2_42_72; note = Orientation (relative to transcription): sense; note = sgRNA Position: 74130654; note = Sequence Name: 56322-704_101_SL_seq_10319
tgtgtgtatgcgtgtgcgag

SEQ ID NO: 10320 - DNA, 20 bp, Homo sapiens
  source 1..20: mol_type = genomic DNA; note = Gene: JAM2; note = Location (start to end; relative to TSS): JAM2_23_53; note = Orientation (relative to transcription): sense; note = sgRNA Position: 25639307; note = Sequence Name: 56322-704_101_SL_seq_10320
aggagttggggcaaaacagg

SEQ ID NO: 10321 - DNA, 20 bp, Homo sapiens
  source 1..20: mol_type = genomic DNA; note = Gene: JAM2; note = Location (start to end; relative to TSS): JAM2_76_106; note = Orientation (relative to transcription): antisense; note = sgRNA Position: 25639340; note = Sequence Name: 56322-704_101_SL_seq_10321
gattgggtgtctcggggacg

SEQ ID NO: 10322 - DNA, 20 bp, Homo sapiens
  source 1..20: mol_type = genomic DNA; note = Gene: JAM2; note = Location (start to end; relative to TSS): JAM2_20_50; note = Orientation (relative to transcription): sense; note = sgRNA Position: 25639304; note = Sequence Name: 56322-704_101_SL_seq_10322
gaaaggagttggggcaaaac

SEQ ID NO: 10323 - DNA, 20 bp, Homo sapiens
  source 1..20: mol_type = genomic DNA; note = Gene: JAM2; note = Location (start to end; relative to TSS): JAM2_66_96; note = Orientation (relative to transcription): antisense; note = sgRNA Position: 25639330; note = Sequence Name: 56322-704_101_SL_seq_10323
ctcggggacggggatgtatg

SEQ ID NO: 10324 - DNA, 20 bp, Homo sapiens
  source 1..20: mol_type = genomic DNA; note = Gene: JAM2; note = Location (start to end; relative to TSS): JAM2_16_46; note = Orientation (relative to transcription): antisense; note = sgRNA Position: 25639280; note = Sequence Name: 56322-704_101_SL_seq_10324
aactcctttcttcccctcgt

SEQ ID NO: 10325 - DNA, 20 bp, Homo sapiens
  source 1..20: mol_type = genomic DNA; note = Gene: JAM2; note = Location (start to end; relative to TSS): JAM2_65_95; note = Orientation (relative to transcription): antisense; note = sgRNA Position: 25639329; note = Sequence Name: 56322-704_101_SL_seq_10325
tcggggacggggatgtatgc

SEQ ID NO: 10326 - DNA, 20 bp, Homo sapiens
  source 1..20: mol_type = genomic DNA; note = Gene: JAM2; note = Location (start to end; relative to TSS): JAM2_11_41; note = Orientation (relative to transcription): sense; note = sgRNA Position: 25639295; note = Sequence Name: 56322-704_101_SL_seq_10326
cgaggggaagaaaggagttg

SEQ ID NO: 10327 - DNA, 20 bp, Homo sapiens
  source 1..20: mol_type = genomic DNA; note = Gene: JAM2; note = Location (start to end; relative to TSS): JAM2_61_91; note = Orientation (relative to transcription): antisense; note = sgRNA Position: 25639325; note = Sequence Name: 56322-704_101_SL_seq_10327
ggacggggatgtatgcgggt

SEQ ID NO: 10328 - DNA, 20 bp, Homo sapiens
  source 1..20: mol_type = genomic DNA; note = Gene: JAM2; note = Location (start to end; relative to TSS): JAM2_10_40; note = Orientation (relative to transcription): sense; note = sgRNA Position: 25639294; note = Sequence Name: 56322-704_101_SL_seq_10328
acgaggggaagaaaggagtt

SEQ ID NO: 10329 - DNA, 20 bp, Homo sapiens
  source 1..20: mol_type = genomic DNA; note = Gene: JAM2; note = Location (start to end; relative to TSS): JAM2_60_90; note = Orientation (relative to transcription): antisense; note = sgRNA Position: 25639324; note = Sequence Name: 56322-704_101_SL_seq_10329
gacggggatgtatgcgggta

SEQ ID NO: 10330 - DNA, 20 bp, Homo sapiens
  source 1..20: mol_type = genomic DNA; note = Gene: JAM3; note = Location (start to end; relative to TSS): JAM3_57_87; note = Orientation (relative to transcription): sense; note = sgRNA Position: 134069155; note = Sequence Name: 56322-704_101_SL_seq_10330
ttcctgctgctgcttttcag

SEQ ID NO: 10331 - DNA, 20 bp, Homo sapiens
  source 1..20: mol_type = genomic DNA; note = Gene: JAM3; note = Location (start to end; relative to TSS): JAM3_91_121; note = Orientation (relative to transcription): sense; note = sgRNA Position: 134069189; note = Sequence Name: 56322-704_101_SL_seq_10331
gtttccgctgttgggagact

SEQ ID NO: 10332 - DNA, 20 bp, Homo sapiens
  source 1..20: mol_type = genomic DNA; note = Gene: JAM3; note = Location (start to end; relative to TSS): JAM3_22_52; note = Orientation (relative to transcription): sense; note = sgRNA Position: 134069120; note = Sequence Name: 56322-704_101_SL_seq_10332
cgcgactccggctctgcgct

SEQ ID NO: 10333 - DNA, 20 bp, Homo sapiens
  source 1..20: mol_type = genomic DNA; note = Gene: JAM3; note = Location (start to end; relative to TSS): JAM3_83_113; note = Orientation (relative to transcription): sense; note = sgRNA Position: 134069181; note = Sequence Name: 56322-704_101_SL_seq_10333
gtttgcgcgtttccgctgtt

SEQ ID NO: 10334 - DNA, 20 bp, Homo sapiens
  source 1..20: mol_type = genomic DNA; note = Gene: JAM3; note = Location (start to end; relative to TSS): JAM3_10_40; note = Orientation (relative to transcription): sense; note = sgRNA Position: 134069108; note = Sequence Name: 56322-704_101_SL_seq_10334
tgaggcggccaccgcgactc

SEQ ID NO: 10335 - DNA, 20 bp, Homo sapiens
  source 1..20: mol_type = genomic DNA; note = Gene: JAM3; note = Location (start to end; relative to TSS): JAM3_82_112; note = Orientation (relative to transcription): sense; note = sgRNA Position: 134069180; note = Sequence Name: 56322-704_101_SL_seq_10335
agtttgcgcgtttccgctgt

SEQ ID NO: 10336 - DNA, 20 bp, Homo sapiens
  source 1..20: mol_type = genomic DNA; note = Gene: JAM3; note = Location (start to end; relative to TSS): JAM3_5_35; note = Orientation (relative to transcription): antisense; note = sgRNA Position: 134069083; note = Sequence Name: 56322-704_101_SL_seq_10336
gccgcctcagcgccatgtcg

SEQ ID NO: 10337 - DNA, 20 bp, Homo sapiens
  source 1..20: mol_type = genomic DNA; note = Gene: JAM3; note = Location (start to end; relative to TSS): JAM3_68_98; note = Orientation (relative to transcription): antisense; note = sgRNA Position: 134069146; note = Sequence Name: 56322-704_101_SL_seq_10337
cacccctgaaaagcagcagc

SEQ ID NO: 10338 - DNA, 20 bp, Homo sapiens
  source 1..20: mol_type = genomic DNA; note = Gene: JAM3; note = Location (start to end; relative to TSS): JAM3_4_34; note = Orientation (relative to transcription): antisense; note = sgRNA Position: 134069082; note = Sequence Name: 56322-704_101_SL_seq_10338
ccgcctcagcgccatgtcga

SEQ ID NO: 10339 - DNA, 20 bp, Homo sapiens
  source 1..20: mol_type = genomic DNA; note = Gene: JAM3; note = Location (start to end; relative to TSS): JAM3_57_87; note = Orientation (relative to transcription): sense; note = sgRNA Position: 134069155; note = Sequence Name: 56322-704_101_SL_seq_10339
ttcctgctgctgcttttcag

SEQ ID NO: 10340 - DNA, 20 bp, Homo sapiens
  source 1..20: mol_type = genomic DNA; note = Gene: JAML; note = Location (start to end; relative to TSS): JAML_24_54; note = Orientation (relative to transcription): sense; note = sgRNA Position: 118224963; note = Sequence Name: 56322-704_101_SL_seq_10340
tttcagtgcattgcctcccc

SEQ ID NO: 10341 - DNA, 20 bp, Homo sapiens
  source 1..20: mol_type = genomic DNA; note = Gene: JAML; note = Location (start to end; relative to TSS): JAML_132_162; note = Orientation (relative to transcription): antisense; note = sgRNA Position: 118224875; note = Sequence Name: 56322-704_101_SL_seq_10341
attcaaccagccttcaggac

SEQ ID NO: 10342 - DNA, 20 bp, Homo sapiens
  source 1..20: mol_type = genomic DNA; note = Gene: JAML; note = Location (start to end; relative to TSS): JAML_25_55; note = Orientation (relative to transcription): sense; note = sgRNA Position: 118224962; note = Sequence Name: 56322-704_101_SL_seq_10342
ttcagtgcattgcctcccct

SEQ ID NO: 10343 - DNA, 20 bp, Homo sapiens
  source 1..20: mol_type = genomic DNA; note = Gene: JAML; note = Location (start to end; relative to TSS): JAML_126_156; note = Orientation (relative to transcription): sense; note = sgRNA Position: 118224861; note = Sequence Name: 56322-704_101_SL_seq_10343
gtcctgaaggctggttgaat

SEQ ID NO: 10344 - DNA, 20 bp, Homo sapiens
  source 1..20: mol_type = genomic DNA; note = Gene: JAML; note = Location (start to end; relative to TSS): JAML_41_71; note = Orientation (relative to transcription): sense; note = sgRNA Position: 118224946; note = Sequence Name: 56322-704_101_SL_seq_10344
ccctgggtgctcttcatctt

SEQ ID NO: 10345 - DNA, 20 bp, Homo sapiens
  source 1..20: mol_type = genomic DNA; note = Gene: JAML; note = Location (start to end; relative to TSS): JAML_117_147; note = Orientation (relative to transcription): sense; note = sgRNA Position: 118224870; note = Sequence Name: 56322-704_101_SL_seq_10345
agtgtgccagtcctgaaggc

SEQ ID NO: 10346 - DNA, 20 bp, Homo sapiens
  source 1..20: mol_type = genomic DNA; note = Gene: JAML; note = Location (start to end; relative to TSS): JAML_46_76; note = Orientation (relative to transcription): antisense; note = sgRNA Position: 118224961; note = Sequence Name: 56322-704_101_SL_seq_10346
agatgaagagcacccagggg

SEQ ID NO: 10347 - DNA, 20 bp, Homo sapiens
  source 1..20: mol_type = genomic DNA; note = Gene: JAML; note = Location (start to end; relative to TSS): JAML_113_143; note = Orientation (relative to transcription): sense; note = sgRNA Position: 118224874; note = Sequence Name: 56322-704_101_SL_seq_10347
cagaagtgtgccagtcctga

SEQ ID NO: 10348 - DNA, 20 bp, Homo sapiens
  source 1..20: mol_type = genomic DNA; note = Gene: JAML; note = Location (start to end; relative to TSS): JAML_49_79; note = Orientation (relative to transcription): antisense; note = sgRNA Position: 118224958; note = Sequence Name: 56322-704_101_SL_seq_10348
ccaagatgaagagcacccag

SEQ ID NO: 10349 - DNA, 20 bp, Homo sapiens
  source 1..20: mol_type = genomic DNA; note = Gene: JAML; note = Location (start to end; relative to TSS): JAML_99_129; note = Orientation (relative to transcription): antisense; note = sgRNA Position: 118224908; note = Sequence Name: 56322-704_101_SL_seq_10349
tgtgagaaaagttcaaaaaa

SEQ ID NO: 10350 - DNA, 20 bp, Homo sapiens
  source 1..20: mol_type = genomic DNA; note = Gene: KALRN; note = Location (start to end; relative to TSS): KALRN_28_58; note = Orientation (relative to transcription): sense; note = sgRNA Position: 124033423; note = Sequence Name: 56322-704_101_SL_seq_10350
tgccgctgctgggggacagc

SEQ ID NO: 10351 - DNA, 20 bp, Homo sapiens
  source 1..20: mol_type = genomic DNA; note = Gene: KALRN; note = Location (start to end; relative to TSS): KALRN_85_115; note = Orientation (relative to transcription): sense; note = sgRNA Position: 124033480; note = Sequence Name: 56322-704_101_SL_seq_10351
ggccccagccagacagcagg

SEQ ID NO: 10352 - DNA, 20 bp, Homo sapiens
  source 1..20: mol_type = genomic DNA; note = Gene: KALRN; note = Location (start to end; relative to TSS): KALRN_27_57; note = Orientation (relative to transcription): sense; note = sgRNA Position: 124033422; note = Sequence Name: 56322-704_101_SL_seq_10352
ctgccgctgctgggggacag

SEQ ID NO: 10353 - DNA, 20 bp, Homo sapiens
  source 1..20: mol_type = genomic DNA; note = Gene: KALRN; note = Location (start to end; relative to TSS): KALRN_82_112; note = Orientation (relative to transcription): sense; note = sgRNA Position: 124033477; note = Sequence Name: 56322-704_101_SL_seq_10353
cccggccccagccagacagc

SEQ ID NO: 10354 - DNA, 20 bp, Homo sapiens
  source 1..20: mol_type = genomic DNA; note = Gene: KALRN; note = Location (start to end; relative to TSS): KALRN_20_50; note = Orientation (relative to transcription): sense; note = sgRNA Position: 124033415; note = Sequence Name: 56322-704_101_SL_seq_10354
gagccagctgccgctgctgg

SEQ ID NO: 10355 - DNA, 20 bp, Homo sapiens
  source 1..20: mol_type = genomic DNA; note = Gene: KALRN; note = Location (start to end; relative to TSS): KALRN_62_92; note = Orientation (relative to transcription): antisense; note = sgRNA Position: 124033437; note = Sequence Name: 56322-704_101_SL_seq_10355
ggccggggtgcgggctgcct

SEQ ID NO: 10356 - DNA, 20 bp, Homo sapiens
  source 1..20: mol_type = genomic DNA; note = Gene: KALRN; note = Location (start to end; relative to TSS): KALRN_19_49; note = Orientation (relative to transcription): sense; note = sgRNA Position: 124033414; note = Sequence Name: 56322-704_101_SL_seq_10356
agagccagctgccgctgctg

SEQ ID NO: 10357 - DNA, 20 bp, Homo sapiens
  source 1..20: mol_type = genomic DNA; note = Gene: KALRN; note = Location (start to end; relative to TSS): KALRN_58_88; note = Orientation (relative to transcription): sense; note = sgRNA Position: 124033453; note = Sequence Name: 56322-704_101_SL_seq_10357
gcagcccgcaccccggcccc

SEQ ID NO: 10358 - DNA, 20 bp, Homo sapiens
  source 1..20: mol_type = genomic DNA; note = Gene: KALRN; note = Location (start to end; relative to TSS): KALRN_18_48; note = Orientation (relative to transcription): sense; note = sgRNA Position: 124033413; note = Sequence Name: 56322-704_101_SL_seq_10358
gagagccagctgccgctgct

SEQ ID NO: 10359 - DNA, 20 bp, Homo sapiens
  source 1..20: mol_type = genomic DNA; note = Gene: KALRN; note = Location (start to end; relative to TSS): KALRN_51_81; note = Orientation (relative to transcription): sense; note = sgRNA Position: 124033446; note = Sequence Name: 56322-704_101_SL_seq_10359
cgcccaggcagcccgcaccc

SEQ ID NO: 10360 - DNA, 20 bp, Homo sapiens
  source 1..20: mol_type = genomic DNA; note = Gene: KAZALD1; note = Location (start to end; relative to TSS): KAZALD1_70_100; note = Orientation (relative to transcription): antisense; note = sgRNA Position: 101062065; note = Sequence Name: 56322-704_101_SL_seq_10360
tgattcgagtccgaaagaaa

SEQ ID NO: 10361 - DNA, 20 bp, Homo sapiens
  source 1..20: mol_type = genomic DNA; note = Gene: KAZALD1; note = Location (start to end; relative to TSS): KAZALD1_131_161; note = Orientation (relative to transcription): sense; note = sgRNA Position: 101062146; note = Sequence Name: 56322-704_101_SL_seq_10361
gccccaggccataagcgagg

SEQ ID NO: 10362 - DNA, 20 bp, Homo sapiens
  source 1..20: mol_type = genomic DNA; note = Gene: KAZALD1; note = Location (start to end; relative to TSS): KAZALD1_64_94; note = Orientation (relative to transcription): sense; note = sgRNA Position: 101062079; note = Sequence Name: 56322-704_101_SL_seq_10362
tttctttcggactcgaatca

SEQ ID NO: 10363 - DNA, 20 bp, Homo sapiens
  source 1..20: mol_type = genomic DNA; note = Gene: KAZALD1; note = Location (start to end; relative to TSS): KAZALD1_128_158; note = Orientation (relative to transcription): sense; note = sgRNA Position: 101062143; note = Sequence Name: 56322-704_101_SL_seq_10363
tgtgccccaggccataagcg

SEQ ID NO: 10364 - DNA, 20 bp, Homo sapiens
  source 1..20: mol_type = genomic DNA; note = Gene: KAZALD1; note = Location (start to end; relative to TSS): KAZALD1_50_80; note = Orientation (relative to transcription): antisense; note = sgRNA Position: 101062045; note = Sequence Name: 56322-704_101_SL_seq_10364
aggttatggaaagaaagcag

SEQ ID NO: 10365 - DNA, 20 bp, Homo sapiens
  source 1..20: mol_type = genomic DNA; note = Gene: KAZALD1; note = Location (start to end; relative to TSS): KAZALD1_96_126; note = Orientation (relative to transcription): sense; note = sgRNA Position: 101062111; note = Sequence Name: 56322-704_101_SL_seq_10365
agggtctagttccggacact

SEQ ID NO: 10366 - DNA, 20 bp, Homo sapiens
  source 1..20: mol_type = genomic DNA; note = Gene: KAZALD1; note = Location (start to end; relative to TSS): KAZALD1_51_81; note = Orientation (relative to transcription): sense; note = sgRNA Position: 101062066; note = Sequence Name: 56322-704_101_SL_seq_10366
ctttccataaccttttcttt

SEQ ID NO: 10367 - DNA, 20 bp, Homo sapiens
  source 1..20: mol_type = genomic DNA; note = Gene: KAZALD1; note = Location (start to end; relative to TSS): KAZALD1_88_118; note = Orientation (relative to transcription): sense; note = sgRNA Position: 101062103; note = Sequence Name: 56322-704_101_SL_seq_10367
tgctgcgaagggtctagttc

SEQ ID NO: 10368 - DNA, 20 bp, Homo sapiens
  source 1..20: mol_type = genomic DNA; note = Gene: KAZALD1; note = Location (start to end; relative to TSS): KAZALD1_6_36; note = Orientation (relative to transcription): antisense; note = sgRNA Position: 101062001; note = Sequence Name: 56322-704_101_SL_seq_10368
gccacctctgctccgtcctg

SEQ ID NO: 10369 - DNA, 20 bp, Homo sapiens
  source 1..20: mol_type = genomic DNA; note = Gene: KAZALD1; note = Location (start to end; relative to TSS): KAZALD1_50_80; note = Orientation (relative to transcription): antisense; note = sgRNA Position: 101062045; note = Sequence Name: 56322-704_101_SL_seq_10369
aggttatggaaagaaagcag

SEQ ID NO: 10370 - DNA, 20 bp, Homo sapiens
  source 1..20: mol_type = genomic DNA; note = Gene: KDR; note = Location (start to end; relative to TSS): KDR_35_65; note = Orientation (relative to transcription): sense; note = sgRNA Position: 55125536; note = Sequence Name: 56322-704_101_SL_seq_10370
tgcgtttcctctgcctgcgc

SEQ ID NO: 10371 - DNA, 20 bp, Homo sapiens
  source 1..20: mol_type = genomic DNA; note = Gene: KDR; note = Location (start to end; relative to TSS): KDR_76_106; note = Orientation (relative to transcription): sense; note = sgRNA Position: 55125495; note = Sequence Name: 56322-704_101_SL_seq_10371
agaaagtccgtctggcagcc

SEQ ID NO: 10372 - DNA, 20 bp, Homo sapiens
  source 1..20: mol_type = genomic DNA; note = Gene: KDR; note = Location (start to end; relative to TSS): KDR_36_66; note = Orientation (relative to transcription): sense; note = sgRNA Position: 55125535; note = Sequence Name: 56322-704_101_SL_seq_10372
gcgtttcctctgcctgcgcc

SEQ ID NO: 10373 - DNA, 20 bp, Homo sapiens
  source 1..20: mol_type = genomic DNA; note = Gene: KDR; note = Location (start to end; relative to TSS): KDR_68_98; note = Orientation (relative to transcription): sense; note = sgRNA Position: 55125503; note = Sequence Name: 56322-704_101_SL_seq_10373
cgcgccgcagaaagtccgtc

SEQ ID NO: 10374 - DNA, 20 bp, Homo sapiens
  source 1..20: mol_type = genomic DNA; note = Gene: KDR; note = Location (start to end; relative to TSS): KDR_17_47; note = Orientation (relative to transcription): antisense; note = sgRNA Position: 55125574; note = Sequence Name: 56322-704_101_SL_seq_10374
ccacacattgaccgctctcc

SEQ ID NO: 10375 - DNA, 20 bp, Homo sapiens
  source 1..20: mol_type = genomic DNA; note = Gene: KDR; note = Location (start to end; relative to TSS): KDR_63_93; note = Orientation (relative to transcription): antisense; note = sgRNA Position: 55125528; note = Sequence Name: 56322-704_101_SL_seq_10375
tgcggcgcgcaagtgatgcc

SEQ ID NO: 10376 - DNA, 20 bp, Homo sapiens
  source 1..20: mol_type = genomic DNA; note = Gene: KDR; note = Location (start to end; relative to TSS): KDR_16_46; note = Orientation (relative to transcription): antisense; note = sgRNA Position: 55125575; note = Sequence Name: 56322-704_101_SL_seq_10376
cacacattgaccgctctccc

SEQ ID NO: 10377 - DNA, 20 bp, Homo sapiens
  source 1..20: mol_type = genomic DNA; note = Gene: KDR; note = Location (start to end; relative to TSS): KDR_57_87; note = Orientation (relative to transcription): antisense; note = sgRNA Position: 55125534; note = Sequence Name: 56322-704_101_SL_seq_10377
gcgcaagtgatgcccggcgc

SEQ ID NO: 10378 - DNA, 20 bp, Homo sapiens
  source 1..20: mol_type = genomic DNA; note = Gene: KDR; note = Location (start to end; relative to TSS): KDR_15_45; note = Orientation (relative to transcription): antisense; note = sgRNA Position: 55125576; note = Sequence Name: 56322-704_101_SL_seq_10378
acacattgaccgctctcccg

SEQ ID NO: 10379 - DNA, 20 bp, Homo sapiens
  source 1..20: mol_type = genomic DNA; note = Gene: KDR; note = Location (start to end; relative to TSS): KDR_51_81; note = Orientation (relative to transcription): antisense; note = sgRNA Position: 55125540; note = Sequence Name: 56322-704_101_SL_seq_10379
gtgatgcccggcgcaggcag

SEQ ID NO: 10380 - DNA, 20 bp, Homo sapiens
  source 1..20: mol_type = genomic DNA; note = Gene: KIR2DL1; note = Location (start to end; relative to TSS): KIR2DL1_47_77; note = Orientation (relative to transcription): antisense; note = sgRNA Position: 54769846; note = Sequence Name: 56322-704_101_SL_seq_10380
caagagcgacatggtgctgc

SEQ ID NO: 10381 - DNA, 20 bp, Homo sapiens
  source 1..20: mol_type = genomic DNA; note = Gene: KIR2DL1; note = Location (start to end; relative to TSS): KIR2DL1_88_118; note = Orientation (relative to transcription): sense; note = sgRNA Position: 54769907; note = Sequence Name: 56322-704_101_SL_seq_10381
tcctggaaagcaatagaggg

SEQ ID NO: 10382 - DNA, 20 bp, Homo sapiens
  source 1..20: mol_type = genomic DNA; note = Gene: KIR2DL1; note = Location (start to end; relative to TSS): KIR2DL1_51_81; note = Orientation (relative to transcription): sense; note = sgRNA Position: 54769870; note = Sequence Name: 56322-704_101_SL_seq_10382
gtcgctcttggtcgtcagca

SEQ ID NO: 10383 - DNA, 20 bp, Homo sapiens
  source 1..20: mol_type = genomic DNA; note = Gene: KIR2DL1; note = Location (start to end; relative to TSS): KIR2DL1_85_115; note = Orientation (relative to transcription): sense; note = sgRNA Position: 54769904; note = Sequence Name: 56322-704_101_SL_seq_10383
gagtcctggaaagcaataga

SEQ ID NO: 10384 - DNA, 20 bp, Homo sapiens
  source 1..20: mol_type = genomic DNA; note = Gene: KIR2DL1; note = Location (start to end; relative to TSS): KIR2DL1_39_69; note = Orientation (relative to transcription): sense; note = sgRNA Position: 54769858; note = Sequence Name: 56322-704_101_SL_seq_10384
cggcagcaccatgtcgctct

SEQ ID NO: 10385 - DNA, 20 bp, Homo sapiens
  source 1..20: mol_type = genomic DNA; note = Gene: KIR2DL1; note = Location (start to end; relative to TSS): KIR2DL1_84_114; note = Orientation (relative to transcription): sense; note = sgRNA Position: 54769903; note = Sequence Name: 56322-704_101_SL_seq_10385
tgagtcctggaaagcaatag

SEQ ID NO: 10386 - DNA, 20 bp, Homo sapiens
  source 1..20: mol_type = genomic DNA; note = Gene: KIR2DL1; note = Location (start to end; relative to TSS): KIR2DL1_37_67; note = Orientation (relative to transcription): antisense; note = sgRNA Position: 54769836; note = Sequence Name: 56322-704_101_SL_seq_10386
atggtgctgccggagcagac

SEQ ID NO: 10387 - DNA, 20 bp, Homo sapiens
  source 1..20: mol_type = genomic DNA; note = Gene: KIR2DL1; note = Location (start to end; relative to TSS): KIR2DL1_71_101; note = Orientation (relative to transcription): sense; note = sgRNA Position: 54769890; note = Sequence Name: 56322-704_101_SL_seq_10387
tggcgtgtgttggtgagtcc

SEQ ID NO: 10388 - DNA, 20 bp, Homo sapiens
  source 1..20: mol_type = genomic DNA; note = Gene: KIR2DL1; note = Location (start to end; relative to TSS): KIR2DL1_19_49; note = Orientation (relative to transcription): sense; note = sgRNA Position: 54769838; note = Sequence Name: 56322-704_101_SL_seq_10388
tcgcggctgcctgtctgctc

SEQ ID NO: 10389 - DNA, 20 bp, Homo sapiens
  source 1..20: mol_type = genomic DNA; note = Gene: KIR2DL1; note = Location (start to end; relative to TSS): KIR2DL1_51_81; note = Orientation (relative to transcription): sense; note = sgRNA Position: 54769870; note = Sequence Name: 56322-704_101_SL_seq_10389
gtcgctcttggtcgtcagca

SEQ ID NO: 10390 - DNA, 20 bp, Homo sapiens
  source 1..20: mol_type = genomic DNA; note = Gene: KIR2DL3; note = Location (start to end; relative to TSS): KIR2DL3_50_80; note = Orientation (relative to transcription): sense; note = sgRNA Position: 54738589; note = Sequence Name: 56322-704_101_SL_seq_10390
gtgtgttggtgagtcctgga

SEQ ID NO: 10391 - DNA, 20 bp, Homo sapiens
  source 1..20: mol_type = genomic DNA; note = Gene: KIR2DL3; note = Location (start to end; relative to TSS): KIR2DL3_84_114; note = Orientation (relative to transcription): sense; note = sgRNA Position: 54738623; note = Sequence Name: 56322-704_101_SL_seq_10391
gggagtgcggggatggagat

SEQ ID NO: 10392 - DNA, 20 bp, Homo sapiens
  source 1..20: mol_type = genomic DNA; note = Gene: KIR2DL3; note = Location (start to end; relative to TSS): KIR2DL3_46_76; note = Orientation (relative to transcription): sense; note = sgRNA Position: 54738585; note = Sequence Name: 56322-704_101_SL_seq_10392
tggtgtgtgttggtgagtcc

SEQ ID NO: 10393 - DNA, 20 bp, Homo sapiens
  source 1..20: mol_type = genomic DNA; note = Gene: KIR2DL3; note = Location (start to end; relative to TSS): KIR2DL3_77_107; note = Orientation (relative to transcription): sense; note = sgRNA Position: 54738616; note = Sequence Name: 56322-704_101_SL_seq_10393
cgagggagggagtgcgggga

SEQ ID NO: 10394 - DNA, 20 bp, Homo sapiens
  source 1..20: mol_type = genomic DNA; note = Gene: KIR2DL3; note = Location (start to end; relative to TSS): KIR2DL3_36_66; note = Orientation (relative to transcription): sense; note = sgRNA Position: 54738575; note = Sequence Name: 56322-704_101_SL_seq_10394
gtcgtcagcatggtgtgtgt

SEQ ID NO: 10395 - DNA, 20 bp, Homo sapiens
  source 1..20: mol_type = genomic DNA; note = Gene: KIR2DL3; note = Location (start to end; relative to TSS): KIR2DL3_71_101; note = Orientation (relative to transcription): sense; note = sgRNA Position: 54738610; note = Sequence Name: 56322-704_101_SL_seq_10395
gggcatcgagggagggagtg

SEQ ID NO: 10396 - DNA, 20 bp, Homo sapiens
  source 1..20: mol_type = genomic DNA; note = Gene: KIR2DL3; note = Location (start to end; relative to TSS): KIR2DL3_31_61; note = Orientation (relative to transcription): antisense; note = sgRNA Position: 54738550; note = Sequence Name: 56322-704_101_SL_seq_10396
gctgacgaccatgagcgaca

SEQ ID NO: 10397 - DNA, 20 bp, Homo sapiens
  source 1..20: mol_type = genomic DNA; note = Gene: KIR2DL3; note = Location (start to end; relative to TSS): KIR2DL3_63_93; note = Orientation (relative to transcription): sense; note = sgRNA Position: 54738602; note = Sequence Name: 56322-704_101_SL_seq_10397
tcctggaagggcatcgaggg

SEQ ID NO: 10398 - DNA, 20 bp, Homo sapiens
  source 1..20: mol_type = genomic DNA; note = Gene: KIR2DL3; note = Location (start to end; relative to TSS): KIR2DL3_26_56; note = Orientation (relative to transcription): sense; note = sgRNA Position: 54738565; note = Sequence Name: 56322-704_101_SL_seq_10398
gtcgctcatggtcgtcagca

SEQ ID NO: 10399 - DNA, 20 bp, Homo sapiens
  source 1..20: mol_type = genomic DNA; note = Gene: KIR2DL3; note = Location (start to end; relative to TSS): KIR2DL3_59_89; note = Orientation (relative to transcription): sense; note = sgRNA Position: 54738598; note = Sequence Name: 56322-704_101_SL_seq_10399
tgagtcctggaagggcatcg

SEQ ID NO: 10400 - DNA, 20 bp, Homo sapiens
  source 1..20: mol_type = genomic DNA; note = Gene: KIR2DL4; note = Location (start to end; relative to TSS): KIR2DL4_41_71; note = Orientation (relative to transcription): sense; note = sgRNA Position: 54803677; note = Sequence Name: 56322-704_101_SL_seq_10400
gtcacccacggtcatcatcc

SEQ ID NO: 10401 - DNA, 20 bp, Homo sapiens
  source 1..20: mol_type = genomic DNA; note = Gene: KIR2DL4; note = Location (start to end; relative to TSS): KIR2DL4_80_110; note = Orientation (relative to transcription): sense; note = sgRNA Position: 54803716; note = Sequence Name: 56322-704_101_SL_seq_10401
ctggaagggaaggagcacca

SEQ ID NO: 10402 - DNA, 20 bp, Homo sapiens
  source 1..20: mol_type = genomic DNA; note = Gene: KIR2DL4; note = Location (start to end; relative to TSS): KIR2DL4_46_76; note = Orientation (relative to transcription): antisense; note = sgRNA Position: 54803662; note = Sequence Name: 56322-704_101_SL_seq_10402
gatgatgaccgtgggtgaca

SEQ ID NO: 10403 - DNA, 20 bp, Homo sapiens
  source 1..20: mol_type = genomic DNA; note = Gene: KIR2DL4; note = Location (start to end; relative to TSS): KIR2DL4_79_109; note = Orientation (relative to transcription): sense; note = sgRNA Position: 54803715; note = Sequence Name: 56322-704_101_SL_seq_10403
cctggaagggaaggagcacc

SEQ ID NO: 10404 - DNA, 20 bp, Homo sapiens
  source 1..20: mol_type = genomic DNA; note = Gene: KIR2DL4; note = Location (start to end; relative to TSS): KIR2DL4_40_70; note = Orientation (relative to transcription): antisense; note = sgRNA Position: 54803656; note = Sequence Name: 56322-704_101_SL_seq_10404
gaccgtgggtgacatggaca

SEQ ID NO: 10405 - DNA, 20 bp, Homo sapiens
  source 1..20: mol_type = genomic DNA; note = Gene: KIR2DL4; note = Location (start to end; relative to TSS): KIR2DL4_70_100; note = Orientation (relative to transcription): sense; note = sgRNA Position: 54803706; note = Sequence Name: 56322-704_101_SL_seq_10405
ttggtgagtcctggaaggga

SEQ ID NO: 10406 - DNA, 20 bp, Homo sapiens
  source 1..20: mol_type = genomic DNA; note = Gene: KIR2DL4; note = Location (start to end; relative to TSS): KIR2DL4_29_59; note = Orientation (relative to transcription): sense; note = sgRNA Position: 54803665; note = Sequence Name: 56322-704_101_SL_seq_10406
caccatgtccatgtcaccca

SEQ ID NO: 10407 - DNA, 20 bp, Homo sapiens
  source 1..20: mol_type = genomic DNA; note = Gene: KIR2DL4; note = Location (start to end; relative to TSS): KIR2DL4_61_91; note = Orientation (relative to transcription): sense; note = sgRNA Position: 54803697; note = Sequence Name: 56322-704_101_SL_seq_10407
tggcatgtcttggtgagtcc

SEQ ID NO: 10408 - DNA, 20 bp, Homo sapiens
  source 1..20: mol_type = genomic DNA; note = Gene: KIR2DL4; note = Location (start to end; relative to TSS): KIR2DL4_21_51; note = Orientation (relative to transcription): antisense; note = sgRNA Position: 54803637; note = Sequence Name: 56322-704_101_SL_seq_10408
atggtgcagcttctgctgcc

SEQ ID NO: 10409 - DNA, 20 bp, Homo sapiens
  source 1..20: mol_type = genomic DNA; note = Gene: KIR2DL4; note = Location (start to end; relative to TSS): KIR2DL4_51_81; note = Orientation (relative to transcription): sense; note = sgRNA Position: 54803687; note = Sequence Name: 56322-704_101_SL_seq_10409
gtcatcatcctggcatgtct

SEQ ID NO: 10410 - DNA, 20 bp, Homo sapiens
  source 1..20: mol_type = genomic DNA; note = Gene: KIR2DL5B; note = Location (start to end; relative to TSS): KIR2DL5B_53_83; note = Orientation (relative to transcription): antisense; note = sgRNA Position: 54816496; note = Sequence Name: 56322-704_101_SL_seq_10410
catgagcgacatggtgctgc

SEQ ID NO: 10411 - DNA, 20 bp, Homo sapiens
  source 1..20: mol_type = genomic DNA; note = Gene: KIR2DL5B; note = Location (start to end; relative to TSS): KIR2DL5B_90_120; note = Orientation (relative to transcription): sense; note = sgRNA Position: 54816553; note = Sequence Name: 56322-704_101_SL_seq_10411
tgagtcctggaagggaatcg

SEQ ID NO: 10412 - DNA, 20 bp, Homo sapiens
  source 1..20: mol_type = genomic DNA; note = Gene: KIR2DL5B; note = Location (start to end; relative to TSS): KIR2DL5B_40_70; note = Orientation (relative to transcription): antisense; note = sgRNA Position: 54816483; note = Sequence Name: 56322-704_101_SL_seq_10412
gtgctgccggtgcagacagg

SEQ ID NO: 10413 - DNA, 20 bp, Homo sapiens
  source 1..20: mol_type = genomic DNA; note = Gene: KIR2DL5B; note = Location (start to end; relative to TSS): KIR2DL5B_82_112; note = Orientation (relative to transcription): sense; note = sgRNA Position: 54816545; note = Sequence Name: 56322-704_101_SL_seq_10413
tgtgttggtgagtcctggaa

SEQ ID NO: 10414 - DNA, 20 bp, Homo sapiens
  source 1..20: mol_type = genomic DNA; note = Gene: KIR2DL5B; note = Location (start to end; relative to TSS): KIR2DL5B_43_73; note = Orientation (relative to transcription): antisense; note = sgRNA Position: 54816486; note = Sequence Name: 56322-704_101_SL_seq_10414
atggtgctgccggtgcagac

SEQ ID NO: 10415 - DNA, 20 bp, Homo sapiens
  source 1..20: mol_type = genomic DNA; note = Gene: KIR2DL5B; note = Location (start to end; relative to TSS): KIR2DL5B_81_111; note = Orientation (relative to transcription): sense; note = sgRNA Position: 54816544; note = Sequence Name: 56322-704_101_SL_seq_10415
gtgtgttggtgagtcctgga

SEQ ID NO: 10416 - DNA, 20 bp, Homo sapiens
  source 1..20: mol_type = genomic DNA; note = Gene: KIR2DL5B; note = Location (start to end; relative to TSS): KIR2DL5B_45_75; note = Orientation (relative to transcription): sense; note = sgRNA Position: 54816508; note = Sequence Name: 56322-704_101_SL_seq_10416
cggcagcaccatgtcgctca

SEQ ID NO: 10417 - DNA, 20 bp, Homo sapiens
  source 1..20: mol_type = genomic DNA; note = Gene: KIR2DL5B; note = Location (start to end; relative to TSS): KIR2DL5B_77_107; note = Orientation (relative to transcription): sense; note = sgRNA Position: 54816540; note = Sequence Name: 56322-704_101_SL_seq_10417
tggcgtgtgttggtgagtcc

SEQ ID NO: 10418 - DNA, 20 bp, Homo sapiens
  source 1..20: mol_type = genomic DNA; note = Gene: KIR2DL5B; note = Location (start to end; relative to TSS): KIR2DL5B_25_55; note = Orientation (relative to transcription): sense; note = sgRNA Position: 54816488; note = Sequence Name: 56322-704_101_SL_seq_10418
gcgcagccgcctgtctgcac

SEQ ID NO: 10419 - DNA, 20 bp, Homo sapiens
  source 1..20: mol_type = genomic DNA; note = Gene: KIR2DL5B; note = Location (start to end; relative to TSS): KIR2DL5B_57_87; note = Orientation (relative to transcription): sense; note = sgRNA Position: 54816520; note = Sequence Name: 56322-704_101_SL_seq_10419
gtcgctcatggtcgtcagca

SEQ ID NO: 10420 - DNA, 20 bp, Homo sapiens
  source 1..20: mol_type = genomic DNA; note = Gene: KIR2DP1; note = Location (start to end; relative to TSS): KIR2DP1_82_112; note = Orientation (relative to transcription): antisense; note = sgRNA Position: 54754843; note = Sequence Name: 56322-704_101_SL_seq_10420
aagagcggaacacggcttcc

SEQ ID NO: 10421 - DNA, 20 bp, Homo sapiens
  source 1..20: mol_type = genomic DNA; note = Gene: KIR2DP1; note = Location (start to end; relative to TSS): KIR2DP1_114_144; note = Orientation (relative to transcription): antisense; note = sgRNA Position: 54754875; note = Sequence Name: 56322-704_101_SL_seq_10421
taccttgcatgaggcccagt

SEQ ID NO: 10422 - DNA, 20 bp, Homo sapiens
  source 1..20: mol_type = genomic DNA; note = Gene: KIR2DP1; note = Location (start to end; relative to TSS): KIR2DP1_55_85; note = Orientation (relative to transcription): sense; note = sgRNA Position: 54754836; note = Sequence Name: 56322-704_101_SL_seq_10422
ttctagtgagaacaatttcc

SEQ ID NO: 10423 - DNA, 20 bp, Homo sapiens
  source 1..20: mol_type = genomic DNA; note = Gene: KIR2DP1; note = Location (start to end; relative to TSS): KIR2DP1_90_120; note = Orientation (relative to transcription): antisense; note = sgRNA Position: 54754851; note = Sequence Name: 56322-704_101_SL_seq_10423
gctcgctcaagagcggaaca

SEQ ID NO: 10424 - DNA, 20 bp, Homo sapiens
  source 1..20: mol_type = genomic DNA; note = Gene: KIR2DP1; note = Location (start to end; relative to TSS): KIR2DP1_18_48; note = Orientation (relative to transcription): sense; note = sgRNA Position: 54754799; note = Sequence Name: 56322-704_101_SL_seq_10424
ttttgagttggtcatagtga

SEQ ID NO: 10425 - DNA, 20 bp, Homo sapiens
  source 1..20: mol_type = genomic DNA; note = Gene: KIR2DP1; note = Location (start to end; relative to TSS): KIR2DP1_82_112; note = Orientation (relative to transcription): antisense; note = sgRNA Position: 54754843; note = Sequence Name: 56322-704_101_SL_seq_10425
aagagcggaacacggcttcc

SEQ ID NO: 10426 - DNA, 20 bp, Homo sapiens
  source 1..20: mol_type = genomic DNA; note = Gene: KIR2DP1; note = Location (start to end; relative to TSS): KIR2DP1_6_36; note = Orientation (relative to transcription): sense; note = sgRNA Position: 54754787; note = Sequence Name: 56322-704_101_SL_seq_10426
atctgagacgtgttttgagt

SEQ ID NO: 10427 - DNA, 20 bp, Homo sapiens
  source 1..20: mol_type = genomic DNA; note = Gene: KIR2DP1; note = Location (start to end; relative to TSS): KIR2DP1_55_85; note = Orientation (relative to transcription): sense; note = sgRNA Position: 54754836; note = Sequence Name: 56322-704_101_SL_seq_10427
ttctagtgagaacaatttcc

SEQ ID NO: 10428 - DNA, 20 bp, Homo sapiens
  source 1..20: mol_type = genomic DNA; note = Gene: KIR2DP1; note = Location (start to end; relative to TSS): KIR2DP1_-17_13; note = Orientation (relative to transcription): sense; note = sgRNA Position: 54754764; note = Sequence Name: 56322-704_101_SL_seq_10428
gcatctcgtgttcaggaggt

SEQ ID NO: 10429 - DNA, 20 bp, Homo sapiens
  source 1..20: mol_type = genomic DNA; note = Gene: KIR2DP1; note = Location (start to end; relative to TSS): KIR2DP1_26_56; note = Orientation (relative to transcription): sense; note = sgRNA Position: 54754807; note = Sequence Name: 56322-704_101_SL_seq_10429
tggtcatagtgaaggacgct

SEQ ID NO: 10430 - DNA, 20 bp, Homo sapiens
  source 1..20: mol_type = genomic DNA; note = Gene: KIR2DS4; note = Location (start to end; relative to TSS): KIR2DS4_48_78; note = Orientation (relative to transcription): antisense; note = sgRNA Position: 54832760; note = Sequence Name: 56322-704_101_SL_seq_10430
catgagcgacatggtgctgc

SEQ ID NO: 10431 - DNA, 20 bp, Homo sapiens
  source 1..20: mol_type = genomic DNA; note = Gene: KIR2DS4; note = Location (start to end; relative to TSS): KIR2DS4_85_115; note = Orientation (relative to transcription): sense; note = sgRNA Position: 54832817; note = Sequence Name: 56322-704_101_SL_seq_10431
tgagtcctggaagggaatag

SEQ ID NO: 10432 - DNA, 20 bp, Homo sapiens
  source 1..20: mol_type = genomic DNA; note = Gene: KIR2DS4; note = Location (start to end; relative to TSS): KIR2DS4_40_70; note = Orientation (relative to transcription): sense; note = sgRNA Position: 54832772; note = Sequence Name: 56322-704_101_SL_seq_10432
cggcagcaccatgtcgctca

SEQ ID NO: 10433 - DNA, 20 bp, Homo sapiens
  source 1..20: mol_type = genomic DNA; note = Gene: KIR2DS4; note = Location (start to end; relative to TSS): KIR2DS4_77_107; note = Orientation (relative to transcription): sense; note = sgRNA Position: 54832809; note = Sequence Name: 56322-704_101_SL_seq_10433
tgtgttggtgagtcctggaa

SEQ ID NO: 10434 - DNA, 20 bp, Homo sapiens
  source 1..20: mol_type = genomic DNA; note = Gene: KIR2DS4; note = Location (start to end; relative to TSS): KIR2DS4_38_68; note = Orientation (relative to transcription): antisense; note = sgRNA Position: 54832750; note = Sequence Name: 56322-704_101_SL_seq_10434
atggtgctgccggtgcagac

SEQ ID NO: 10435 - DNA, 20 bp, Homo sapiens
  source 1..20: mol_type = genomic DNA; note = Gene: KIR2DS4; note = Location (start to end; relative to TSS): KIR2DS4_76_106; note = Orientation (relative to transcription): sense; note = sgRNA Position: 54832808; note = Sequence Name: 56322-704_101_SL_seq_10435
gtgtgttggtgagtcctgga

SEQ ID NO: 10436 - DNA, 20 bp, Homo sapiens
  source 1..20: mol_type = genomic DNA; note = Gene: KIR2DS4; note = Location (start to end; relative to TSS): KIR2DS4_35_65; note = Orientation (relative to transcription): antisense; note = sgRNA Position: 54832747; note = Sequence Name: 56322-704_101_SL_seq_10436
gtgctgccggtgcagacagg

SEQ ID NO: 10437 - DNA, 20 bp, Homo sapiens
  source 1..20: mol_type = genomic DNA; note = Gene: KIR2DS4; note = Location (start to end; relative to TSS): KIR2DS4_72_102; note = Orientation (relative to transcription): sense; note = sgRNA Position: 54832804; note = Sequence Name: 56322-704_101_SL_seq_10437
tggcgtgtgttggtgagtcc

SEQ ID NO: 10438 - DNA, 20 bp, Homo sapiens
  source 1..20: mol_type = genomic DNA; note = Gene: KIR2DS4; note = Location (start to end; relative to TSS): KIR2DS4_20_50; note = Orientation (relative to transcription): sense; note = sgRNA Position: 54832752; note = Sequence Name: 56322-704_101_SL_seq_10438
gcgcggccgcctgtctgcac

SEQ ID NO: 10439 - DNA, 20 bp, Homo sapiens
  source 1..20: mol_type = genomic DNA; note = Gene: KIR2DS4; note = Location (start to end; relative to TSS): KIR2DS4_52_82; note = Orientation (relative to transcription): sense; note = sgRNA Position: 54832784; note = Sequence Name: 56322-704_101_SL_seq_10439
gtcgctcatggtcatcatca

SEQ ID NO: 10440 - DNA, 20 bp, Homo sapiens
  source 1..20: mol_type = genomic DNA; note = Gene: KIR3DL2; note = Location (start to end; relative to TSS): KIR3DL2_46_76; note = Orientation (relative to transcription): sense; note = sgRNA Position: 54850515; note = Sequence Name: 56322-704_101_SL_seq_10440
tggcgtgcgttggtgagtcc

SEQ ID NO: 10441 - DNA, 20 bp, Homo sapiens
  source 1..20: mol_type = genomic DNA; note = Gene: KIR3DL2; note = Location (start to end; relative to TSS): KIR3DL2_77_107; note = Orientation (relative to transcription): sense; note = sgRNA Position: 54850546; note = Sequence Name: 56322-704_101_SL_seq_10441
agagggagggagagtgggga

SEQ ID NO: 10442 - DNA, 20 bp, Homo sapiens
  source 1..20: mol_type = genomic DNA; note = Gene: KIR3DL2; note = Location (start to end; relative to TSS): KIR3DL2_36_66; note = Orientation (relative to transcription): sense; note = sgRNA Position: 54850505; note = Sequence Name: 56322-704_101_SL_seq_10442
gtcgtcagcatggcgtgcgt

SEQ ID NO: 10443 - DNA, 20 bp, Homo sapiens
  source 1..20: mol_type = genomic DNA; note = Gene: KIR3DL2; note = Location (start to end; relative to TSS): KIR3DL2_72_102; note = Orientation (relative to transcription): sense; note = sgRNA Position: 54850541; note = Sequence Name: 56322-704_101_SL_seq_10443
ggaatagagggagggagagt

SEQ ID NO: 10444 - DNA, 20 bp, Homo sapiens
  source 1..20: mol_type = genomic DNA; note = Gene: KIR3DL2; note = Location (start to end; relative to TSS): KIR3DL2_31_61; note = Orientation (relative to transcription): antisense; note = sgRNA Position: 54850480; note = Sequence Name: 56322-704_101_SL_seq_10444
gctgacgaccgtgagcgaca

SEQ ID NO: 10445 - DNA, 20 bp, Homo sapiens
  source 1..20: mol_type = genomic DNA; note = Gene: KIR3DL2; note = Location (start to end; relative to TSS): KIR3DL2_63_93; note = Orientation (relative to transcription): sense; note = sgRNA Position: 54850532; note = Sequence Name: 56322-704_101_SL_seq_10445
tcctggaagggaatagaggg

SEQ ID NO: 10446 - DNA, 20 bp, Homo sapiens
  source 1..20: mol_type = genomic DNA; note = Gene: KIR3DL2; note = Location (start to end; relative to TSS): KIR3DL2_22_52; note = Orientation (relative to transcription): antisense; note = sgRNA Position: 54850471; note = Sequence Name: 56322-704_101_SL_seq_10446
cgtgagcgacatggtgctgc

SEQ ID NO: 10447 - DNA, 20 bp, Homo sapiens
  source 1..20: mol_type = genomic DNA; note = Gene: KIR3DL2; note = Location (start to end; relative to TSS): KIR3DL2_60_90; note = Orientation (relative to transcription): sense; note = sgRNA Position: 54850529; note = Sequence Name: 56322-704_101_SL_seq_10447
gagtcctggaagggaataga

SEQ ID NO: 10448 - DNA, 20 bp, Homo sapiens
  source 1..20: mol_type = genomic DNA; note = Gene: KIR3DL2; note = Location (start to end; relative to TSS): KIR3DL2_26_56; note = Orientation (relative to transcription): sense; note = sgRNA Position: 54850495; note = Sequence Name: 56322-704_101_SL_seq_10448
gtcgctcacggtcgtcagca

SEQ ID NO: 10449 - DNA, 20 bp, Homo sapiens
  source 1..20: mol_type = genomic DNA; note = Gene: KIR3DL2; note = Location (start to end; relative to TSS): KIR3DL2_59_89; note = Orientation (relative to transcription): sense; note = sgRNA Position: 54850528; note = Sequence Name: 56322-704_101_SL_seq_10449
tgagtcctggaagggaatag

SEQ ID NO: 10450 - DNA, 20 bp, Homo sapiens
  source 1..20: mol_type = genomic DNA; note = Gene: KIR3DL3; note = Location (start to end; relative to TSS): KIR3DL3_44_74; note = Orientation (relative to transcription): antisense; note = sgRNA Position: 54724492; note = Sequence Name: 56322-704_101_SL_seq_10450
catgagcgacatggtgctgc

SEQ ID NO: 10451 - DNA, 20 bp, Homo sapiens
  source 1..20: mol_type = genomic DNA; note = Gene: KIR3DL3; note = Location (start to end; relative to TSS): KIR3DL3_82_112; note = Orientation (relative to transcription): sense; note = sgRNA Position: 54724550; note = Sequence Name: 56322-704_101_SL_seq_10451
gagtcctggaagggaatcga

SEQ ID NO: 10452 - DNA, 20 bp, Homo sapiens
  source 1..20: mol_type = genomic DNA; note = Gene: KIR3DL3; note = Location (start to end; relative to TSS): KIR3DL3_48_78; note = Orientation (relative to transcription): sense; note = sgRNA Position: 54724516; note = Sequence Name: 56322-704_101_SL_seq_10452
gtcgctcatggtcgtcagca

SEQ ID NO: 10453 - DNA, 20 bp, Homo sapiens
  source 1..20: mol_type = genomic DNA; note = Gene: KIR3DL3; note = Location (start to end; relative to TSS): KIR3DL3_81_111; note = Orientation (relative to transcription): sense; note = sgRNA Position: 54724549; note = Sequence Name: 56322-704_101_SL_seq_10453
tgagtcctggaagggaatcg

SEQ ID NO: 10454 - DNA, 20 bp, Homo sapiens
  source 1..20: mol_type = genomic DNA; note = Gene: KIR3DL3; note = Location (start to end; relative to TSS): KIR3DL3_31_61; note = Orientation (relative to transcription): antisense; note = sgRNA Position: 54724479; note = Sequence Name: 56322-704_101_SL_seq_10454
gtgctgccggtgcagacagg

SEQ ID NO: 10455 - DNA, 20 bp, Homo sapiens
  source 1..20: mol_type = genomic DNA; note = Gene: KIR3DL3; note = Location (start to end; relative to TSS): KIR3DL3_73_103; note = Orientation (relative to transcription): sense; note = sgRNA Position: 54724541; note = Sequence Name: 56322-704_101_SL_seq_10455
tgtgttggtgagtcctggaa

SEQ ID NO: 10456 - DNA, 20 bp, Homo sapiens
  source 1..20: mol_type = genomic DNA; note = Gene: KIR3DL3; note = Location (start to end; relative to TSS): KIR3DL3_34_64; note = Orientation (relative to transcription): antisense; note = sgRNA Position: 54724482; note = Sequence Name: 56322-704_101_SL_seq_10456
atggtgctgccggtgcagac

SEQ ID NO: 10457 - DNA, 20 bp, Homo sapiens
  source 1..20: mol_type = genomic DNA; note = Gene: KIR3DL3; note = Location (start to end; relative to TSS): KIR3DL3_72_102; note = Orientation (relative to transcription): sense; note = sgRNA Position: 54724540; note = Sequence Name: 56322-704_101_SL_seq_10457
gtgtgttggtgagtcctgga

SEQ ID NO: 10458 - DNA, 20 bp, Homo sapiens
  source 1..20: mol_type = genomic DNA; note = Gene: KIR3DL3; note = Location (start to end; relative to TSS): KIR3DL3_36_66; note = Orientation (relative to transcription): sense; note = sgRNA Position: 54724504; note = Sequence Name: 56322-704_101_SL_seq_10458
cggcagcaccatgtcgctca

SEQ ID NO: 10459 - DNA, 20 bp, Homo sapiens
  source 1..20: mol_type = genomic DNA; note = Gene: KIR3DL3; note = Location (start to end; relative to TSS): KIR3DL3_68_98; note = Orientation (relative to transcription): sense; note = sgRNA Position: 54724536; note = Sequence Name: 56322-704_101_SL_seq_10459
tggcgtgtgttggtgagtcc

SEQ ID NO: 10460 - DNA, 20 bp, Homo sapiens
  source 1..20: mol_type = genomic DNA; note = Gene: KIR3DP1; note = Location (start to end; relative to TSS): KIR3DP1_49_79; note = Orientation (relative to transcription): sense; note = sgRNA Position: 54786436; note = Sequence Name: 56322-704_101_SL_seq_10460
gtgccacatcctcctctcta

SEQ ID NO: 10461 - DNA, 20 bp, Homo sapiens
  source 1..20: mol_type = genomic DNA; note = Gene: KIR3DP1; note = Location (start to end; relative to TSS): KIR3DP1_79_109; note = Orientation (relative to transcription): sense; note = sgRNA Position: 54786466; note = Sequence Name: 56322-704_101_SL_seq_10461
tccttctcccccaggtggtc

SEQ ID NO: 10462 - DNA, 20 bp, Homo sapiens
  source 1..20: mol_type = genomic DNA; note = Gene: KIR3DP1; note = Location (start to end; relative to TSS): KIR3DP1_24_54; note = Orientation (relative to transcription): sense; note = sgRNA Position: 54786411; note = Sequence Name: 56322-704_101_SL_seq_10462
tcctggaaaggaatagaggg

SEQ ID NO: 10463 - DNA, 20 bp, Homo sapiens
  source 1..20: mol_type = genomic DNA; note = Gene: KIR3DP1; note = Location (start to end; relative to TSS): KIR3DP1_70_100; note = Orientation (relative to transcription): antisense; note = sgRNA Position: 54786437; note = Sequence Name: 56322-704_101_SL_seq_10463
aaggaggcgccaccttagag

SEQ ID NO: 10464 - DNA, 20 bp, Homo sapiens
  source 1..20: mol_type = genomic DNA; note = Gene: KIR3DP1; note = Location (start to end; relative to TSS): KIR3DP1_25_55; note = Orientation (relative to transcription): sense; note = sgRNA Position: 54786412; note = Sequence Name: 56322-704_101_SL_seq_10464
cctggaaaggaatagaggga

SEQ ID NO: 10465 - DNA, 20 bp, Homo sapiens
  source 1..20: mol_type = genomic DNA; note = Gene: KIR3DP1; note = Location (start to end; relative to TSS): KIR3DP1_67_97; note = Orientation (relative to transcription): antisense; note = sgRNA Position: 54786434; note = Sequence Name: 56322-704_101_SL_seq_10465
gaggcgccaccttagagagg

SEQ ID NO: 10466 - DNA, 20 bp, Homo sapiens
  source 1..20: mol_type = genomic DNA; note = Gene: KIR3DP1; note = Location (start to end; relative to TSS): KIR3DP1_20_50; note = Orientation (relative to transcription): sense; note = sgRNA Position: 54786407; note = Sequence Name: 56322-704_101_SL_seq_10466
tgagtcctggaaaggaatag

SEQ ID NO: 10467 - DNA, 20 bp, Homo sapiens
  source 1..20: mol_type = genomic DNA; note = Gene: KIR3DP1; note = Location (start to end; relative to TSS): KIR3DP1_61_91; note = Orientation (relative to transcription): antisense; note = sgRNA Position: 54786428; note = Sequence Name: 56322-704_101_SL_seq_10467
ccaccttagagaggaggatg

SEQ ID NO: 10468 - DNA, 20 bp, Homo sapiens
  source 1..20: mol_type = genomic DNA; note = Gene: KIR3DP1; note = Location (start to end; relative to TSS): KIR3DP1_21_51; note = Orientation (relative to transcription): sense; note = sgRNA Position: 54786408; note = Sequence Name: 56322-704_101_SL_seq_10468
gagtcctggaaaggaataga

SEQ ID NO: 10469 - DNA, 20 bp, Homo sapiens
  source 1..20: mol_type = genomic DNA; note = Gene: KIR3DP1; note = Location (start to end; relative to TSS): KIR3DP1_52_82; note = Orientation (relative to transcription): sense; note = sgRNA Position: 54786439; note = Sequence Name: 56322-704_101_SL_seq_10469
ccacatcctcctctctaagg

SEQ ID NO: 10470 - DNA, 20 bp, Homo sapiens
  source 1..20: mol_type = genomic DNA; note = Gene: KIR3DX1; note = Location (start to end; relative to TSS): KIR3DX1_31_61; note = Orientation (relative to transcription): antisense; note = sgRNA Position: 54532823; note = Sequence Name: 56322-704_101_SL_seq_10470
ggacttacccagacacagga

SEQ ID NO: 10471 - DNA, 20 bp, Homo sapiens
  source 1..20: mol_type = genomic DNA; note = Gene: KIR3DX1; note = Location (start to end; relative to TSS): KIR3DX1_103_133; note = Orientation (relative to transcription): antisense; note = sgRNA Position: 54532895; note = Sequence Name: 56322-704_101_SL_seq_10471
acctgggttgtggagaggcc

SEQ ID NO: 10472 - DNA, 20 bp, Homo sapiens
  source 1..20: mol_type = genomic DNA; note = Gene: KIR3DX1; note = Location (start to end; relative to TSS): KIR3DX1_30_60; note = Orientation (relative to transcription): sense; note = sgRNA Position: 54532842; note = Sequence Name: 56322-704_101_SL_seq_10472
tgtctgggtaagtcctggaa

SEQ ID NO: 10473 - DNA, 20 bp, Homo sapiens
  source 1..20: mol_type = genomic DNA; note = Gene: KIR3DX1; note = Location (start to end; relative to TSS): KIR3DX1_101_131; note = Orientation (relative to transcription): sense; note = sgRNA Position: 54532913; note = Sequence Name: 56322-704_101_SL_seq_10473
tctccacaacccaggtctgg

SEQ ID NO: 10474 - DNA, 20 bp, Homo sapiens
  source 1..20: mol_type = genomic DNA; note = Gene: KIR3DX1; note = Location (start to end; relative to TSS): KIR3DX1_29_59; note = Orientation (relative to transcription): sense; note = sgRNA Position: 54532841; note = Sequence Name: 56322-704_101_SL_seq_10474
gtgtctgggtaagtcctgga

SEQ ID NO: 10475 - DNA, 20 bp, Homo sapiens
  source 1..20: mol_type = genomic DNA; note = Gene: KIR3DX1; note = Location (start to end; relative to TSS): KIR3DX1_98_128; note = Orientation (relative to transcription): sense; note = sgRNA Position: 54532910; note = Sequence Name: 56322-704_101_SL_seq_10475
gcctctccacaacccaggtc

SEQ ID NO: 10476 - DNA, 20 bp, Homo sapiens
  source 1..20: mol_type = genomic DNA; note = Gene: KIR3DX1; note = Location (start to end; relative to TSS): KIR3DX1_25_55; note = Orientation (relative to transcription): sense; note = sgRNA Position: 54532837; note = Sequence Name: 56322-704_101_SL_seq_10476
tcctgtgtctgggtaagtcc

SEQ ID NO: 10477 - DNA, 20 bp, Homo sapiens
  source 1..20: mol_type = genomic DNA; note = Gene: KIR3DX1; note = Location (start to end; relative to TSS): KIR3DX1_93_123; note = Orientation (relative to transcription): sense; note = sgRNA Position: 54532905; note = Sequence Name: 56322-704_101_SL_seq_10477
acctggcctctccacaaccc

SEQ ID NO: 10478 - DNA, 20 bp, Homo sapiens
  source 1..20: mol_type = genomic DNA; note = Gene: KIR3DX1; note = Location (start to end; relative to TSS): KIR3DX1_19_49; note = Orientation (relative to transcription): antisense; note = sgRNA Position: 54532811; note = Sequence Name: 56322-704_101_SL_seq_10478
acacaggacggtgatgagtt

SEQ ID NO: 10479 - DNA, 20 bp, Homo sapiens
  source 1..20: mol_type = genomic DNA; note = Gene: KIR3DX1; note = Location (start to end; relative to TSS): KIR3DX1_49_79; note = Orientation (relative to transcription): sense; note = sgRNA Position: 54532861; note = Sequence Name: 56322-704_101_SL_seq_10479
agggaaaggaggacacggtt

SEQ ID NO: 10480 - DNA, 20 bp, Homo sapiens
  source 1..20: mol_type = genomic DNA; note = Gene: KIRREL1; note = Location (start to end; relative to TSS): KIRREL1_53_83; note = Orientation (relative to transcription): sense; note = sgRNA Position: 157993724; note = Sequence Name: 56322-704_101_SL_seq_10480
ctctccgatactttctccca

SEQ ID NO: 10481 - DNA, 20 bp, Homo sapiens
  source 1..20: mol_type = genomic DNA; note = Gene: KIRREL1; note = Location (start to end; relative to TSS): KIRREL1_91_121; note = Orientation (relative to transcription): antisense; note = sgRNA Position: 157993742; note = Sequence Name: 56322-704_101_SL_seq_10481
agcgtccgggggtgggctgg

SEQ ID NO: 10482 - DNA, 20 bp, Homo sapiens
  source 1..20: mol_type = genomic DNA; note = Gene: KIRREL1; note = Location (start to end; relative to TSS): KIRREL1_55_85; note = Orientation (relative to transcription): antisense; note = sgRNA Position: 157993706; note = Sequence Name: 56322-704_101_SL_seq_10482
agaaagtatcggagagagtg

SEQ ID NO: 10483 - DNA, 20 bp, Homo sapiens
  source 1..20: mol_type = genomic DNA; note = Gene: KIRREL1; note = Location (start to end; relative to TSS): KIRREL1_85_115; note = Orientation (relative to transcription): sense; note = sgRNA Position: 157993756; note = Sequence Name: 56322-704_101_SL_seq_10483
ccagcccacccccggacgct

SEQ ID NO: 10484 - DNA, 20 bp, Homo sapiens
  source 1..20: mol_type = genomic DNA; note = Gene: KIRREL1; note = Location (start to end; relative to TSS): KIRREL1_40_70; note = Orientation (relative to transcription): antisense; note = sgRNA Position: 157993691; note = Sequence Name: 56322-704_101_SL_seq_10484
gagtgaggatccagacgagg

SEQ ID NO: 10485 - DNA, 20 bp, Homo sapiens
  source 1..20: mol_type = genomic DNA; note = Gene: KIRREL1; note = Location (start to end; relative to TSS): KIRREL1_78_108; note = Orientation (relative to transcription): antisense; note = sgRNA Position: 157993729; note = Sequence Name: 56322-704_101_SL_seq_10485
gggctgggggcccttacctt

SEQ ID NO: 10486 - DNA, 20 bp, Homo sapiens
  source 1..20: mol_type = genomic DNA; note = Gene: KIRREL1; note = Location (start to end; relative to TSS): KIRREL1_43_73; note = Orientation (relative to transcription): antisense; note = sgRNA Position: 157993694; note = Sequence Name: 56322-704_101_SL_seq_10486
agagagtgaggatccagacg

SEQ ID NO: 10487 - DNA, 20 bp, Homo sapiens
  source 1..20: mol_type = genomic DNA; note = Gene: KIRREL1; note = Location (start to end; relative to TSS): KIRREL1_77_107; note = Orientation (relative to transcription): sense; note = sgRNA Position: 157993748; note = Sequence Name: 56322-704_101_SL_seq_10487
aagggcccccagcccacccc

SEQ ID NO: 10488 - DNA, 20 bp, Homo sapiens
  source 1..20: mol_type = genomic DNA; note = Gene: KIRREL1; note = Location (start to end; relative to TSS): KIRREL1_21_51; note = Orientation (relative to transcription): sense; note = sgRNA Position: 157993692; note = Sequence Name: 56322-704_101_SL_seq_10488
gcatgctgagcctcctcgtc

SEQ ID NO: 10489 - DNA, 20 bp, Homo sapiens
  source 1..20: mol_type = genomic DNA; note = Gene: KIRREL1; note = Location (start to end; relative to TSS): KIRREL1_53_83; note = Orientation (relative to transcription): sense; note = sgRNA Position: 157993724; note = Sequence Name: 56322-704_101_SL_seq_10489
ctctccgatactttctccca

SEQ ID NO: 10490 - DNA, 20 bp, Homo sapiens
  source 1..20: mol_type = genomic DNA; note = Gene: KIRREL2; note = Location (start to end; relative to TSS): KIRREL2_45_75; note = Orientation (relative to transcription): sense; note = sgRNA Position: 35856982; note = Sequence Name: 56322-704_101_SL_seq_10490
gagcagacttggaggactcc

SEQ ID NO: 10491 - DNA, 20 bp, Homo sapiens
  source 1..20: mol_type = genomic DNA; note = Gene: KIRREL2; note = Location (start to end; relative to TSS): KIRREL2_82_112; note = Orientation (relative to transcription): sense; note = sgRNA Position: 35857019; note = Sequence Name: 56322-704_101_SL_seq_10491
gggcgaagagtcgagcgtga

SEQ ID NO: 10492 - DNA, 20 bp, Homo sapiens
  source 1..20: mol_type = genomic DNA; note = Gene: KIRREL2; note = Location (start to end; relative to TSS): KIRREL2_34_64; note = Orientation (relative to transcription): sense; note = sgRNA Position: 35856971; note = Sequence Name: 56322-704_101_SL_seq_10492
aggctgcggatgagcagact

SEQ ID NO: 10493 - DNA, 20 bp, Homo sapiens
  source 1..20: mol_type = genomic DNA; note = Gene: KIRREL2; note = Location (start to end; relative to TSS): KIRREL2_77_107; note = Orientation (relative to transcription): antisense; note = sgRNA Position: 35856994; note = Sequence Name: 56322-704_101_SL_seq_10493
tcttcgcccagcctagtctc

SEQ ID NO: 10494 - DNA, 20 bp, Homo sapiens
  source 1..20: mol_type = genomic DNA; note = Gene: KIRREL2; note = Location (start to end; relative to TSS): KIRREL2_37_67; note = Orientation (relative to transcription): sense; note = sgRNA Position: 35856974; note = Sequence Name: 56322-704_101_SL_seq_10494
ctgcggatgagcagacttgg

SEQ ID NO: 10495 - DNA, 20 bp, Homo sapiens
  source 1..20: mol_type = genomic DNA; note = Gene: KIRREL2; note = Location (start to end; relative to TSS): KIRREL2_72_102; note = Orientation (relative to transcription): antisense; note = sgRNA Position: 35856989; note = Sequence Name: 56322-704_101_SL_seq_10495
gcccagcctagtctctggcc

SEQ ID NO: 10496 - DNA, 20 bp, Homo sapiens
  source 1..20: mol_type = genomic DNA; note = Gene: KIRREL2; note = Location (start to end; relative to TSS): KIRREL2_11_41; note = Orientation (relative to transcription): antisense; note = sgRNA Position: 35856928; note = Sequence Name: 56322-704_101_SL_seq_10496
tgaaacgcctgccagttccg

SEQ ID NO: 10497 - DNA, 20 bp, Homo sapiens
  source 1..20: mol_type = genomic DNA; note = Gene: KIRREL2; note = Location (start to end; relative to TSS): KIRREL2_45_75; note = Orientation (relative to transcription): sense; note = sgRNA Position: 35856982; note = Sequence Name: 56322-704_101_SL_seq_10497
gagcagacttggaggactcc

SEQ ID NO: 10498 - DNA, 20 bp, Homo sapiens
  source 1..20: mol_type = genomic DNA; note = Gene: KIRREL2; note = Location (start to end; relative to TSS): KIRREL2_5_35; note = Orientation (relative to transcription): antisense; note = sgRNA Position: 35856922; note = Sequence Name: 56322-704_101_SL_seq_10498
gcctgccagttccgcggcct

SEQ ID NO: 10499 - DNA, 20 bp, Homo sapiens
  source 1..20: mol_type = genomic DNA; note = Gene: KIRREL2; note = Location (start to end; relative to TSS): KIRREL2_37_67; note = Orientation (relative to transcription): sense; note = sgRNA Position: 35856974; note = Sequence Name: 56322-704_101_SL_seq_10499
ctgcggatgagcagacttgg

SEQ ID NO: 10500 - DNA, 20 bp, Homo sapiens
  source 1..20: mol_type = genomic DNA; note = Gene: KIRREL3; note = Location (start to end; relative to TSS): KIRREL3_38_68; note = Orientation (relative to transcription): sense; note = sgRNA Position: 127000708; note = Sequence Name: 56322-704_101_SL_seq_10500
ttcccgaggcggctaagaac

SEQ ID NO: 10501 - DNA, 20 bp, Homo sapiens
  source 1..20: mol_type = genomic DNA; note = Gene: KIRREL3; note = Location (start to end; relative to TSS): KIRREL3_100_130; note = Orientation (relative to transcription): sense; note = sgRNA Position: 127000646; note = Sequence Name: 56322-704_101_SL_seq_10501
agagaccgaagccacccgga

SEQ ID NO: 10502 - DNA, 20 bp, Homo sapiens
  source 1..20: mol_type = genomic DNA; note = Gene: KIRREL3; note = Location (start to end; relative to TSS): KIRREL3_27_57; note = Orientation (relative to transcription): sense; note = sgRNA Position: 127000719; note = Sequence Name: 56322-704_101_SL_seq_10502
acaatcccggcttcccgagg

SEQ ID NO: 10503 - DNA, 20 bp, Homo sapiens
  source 1..20: mol_type = genomic DNA; note = Gene: KIRREL3; note = Location (start to end; relative to TSS): KIRREL3_99_129; note = Orientation (relative to transcription): sense; note = sgRNA Position: 127000647; note = Sequence Name: 56322-704_101_SL_seq_10503
aagagaccgaagccacccgg

SEQ ID NO: 10504 - DNA, 20 bp, Homo sapiens
  source 1..20: mol_type = genomic DNA; note = Gene: KIRREL3; note = Location (start to end; relative to TSS): KIRREL3_41_71; note = Orientation (relative to transcription): antisense; note = sgRNA Position: 127000725; note = Sequence Name: 56322-704_101_SL_seq_10504
cttagccgcctcgggaagcc

SEQ ID NO: 10505 - DNA, 20 bp, Homo sapiens
  source 1..20: mol_type = genomic DNA; note = Gene: KIRREL3; note = Location (start to end; relative to TSS): KIRREL3_96_126; note = Orientation (relative to transcription): sense; note = sgRNA Position: 127000650; note = Sequence Name: 56322-704_101_SL_seq_10505
acaaagagaccgaagccacc

SEQ ID NO: 10506 - DNA, 20 bp, Homo sapiens
  source 1..20: mol_type = genomic DNA; note = Gene: KIRREL3; note = Location (start to end; relative to TSS): KIRREL3_42_72; note = Orientation (relative to transcription): antisense; note = sgRNA Position: 127000724; note = Sequence Name: 56322-704_101_SL_seq_10506
tcttagccgcctcgggaagc

SEQ ID NO: 10507 - DNA, 20 bp, Homo sapiens
  source 1..20: mol_type = genomic DNA; note = Gene: KIRREL3; note = Location (start to end; relative to TSS): KIRREL3_72_102; note = Orientation (relative to transcription): sense; note = sgRNA Position: 127000674; note = Sequence Name: 56322-704_101_SL_seq_10507
ggctggctgcagatacccag

SEQ ID NO: 10508 - DNA, 20 bp, Homo sapiens
  source 1..20: mol_type = genomic DNA; note = Gene: KIRREL3; note = Location (start to end; relative to TSS): KIRREL3_24_54; note = Orientation (relative to transcription): sense; note = sgRNA Position: 127000722; note = Sequence Name: 56322-704_101_SL_seq_10508
ctgacaatcccggcttcccg

SEQ ID NO: 10509 - DNA, 20 bp, Homo sapiens
  source 1..20: mol_type = genomic DNA; note = Gene: KIRREL3; note = Location (start to end; relative to TSS): KIRREL3_55_85; note = Orientation (relative to transcription): sense; note = sgRNA Position: 127000691; note = Sequence Name: 56322-704_101_SL_seq_10509
aacaggcagtttgtgtcggc

SEQ ID NO: 10510 - DNA, 20 bp, Homo sapiens
  source 1..20: mol_type = genomic DNA; note = Gene: KIT; note = Location (start to end; relative to TSS): KIT_27_57; note = Orientation (relative to transcription): antisense; note = sgRNA Position: 54657990; note = Sequence Name: 56322-704_101_SL_seq_10510
ctgcgatgggatccgagctc

SEQ ID NO: 10511 - DNA, 20 bp, Homo sapiens
  source 1..20: mol_type = genomic DNA; note = Gene: KIT; note = Location (start to end; relative to TSS): KIT_107_137; note = Orientation (relative to transcription): sense; note = sgRNA Position: 54658090; note = Sequence Name: 56322-704_101_SL_seq_10511
tccagacaggtgggacaccg

SEQ ID NO: 10512 - DNA, 20 bp, Homo sapiens
  source 1..20: mol_type = genomic DNA; note = Gene: KIT; note = Location (start to end; relative to TSS): KIT_34_64; note = Orientation (relative to transcription): sense; note = sgRNA Position: 54658017; note = Sequence Name: 56322-704_101_SL_seq_10512
atcgcagctaccgcgatgag

SEQ ID NO: 10513 - DNA, 20 bp, Homo sapiens
  source 1..20: mol_type = genomic DNA; note = Gene: KIT; note = Location (start to end; relative to TSS): KIT_102_132; note = Orientation (relative to transcription): antisense; note = sgRNA Position: 54658065; note = Sequence Name: 56322-704_101_SL_seq_10513
ctgtctggacgcgaagcagt

SEQ ID NO: 10514 - DNA, 20 bp, Homo sapiens
  source 1..20: mol_type = genomic DNA; note = Gene: KIT; note = Location (start to end; relative to TSS): KIT_40_70; note = Orientation (relative to transcription): antisense; note = sgRNA Position: 54658003; note = Sequence Name: 56322-704_101_SL_seq_10514
ctcatcgcggtagctgcgat

SEQ ID NO: 10515 - DNA, 20 bp, Homo sapiens
  source 1..20: mol_type = genomic DNA; note = Gene: KIT; note = Location (start to end; relative to TSS): KIT_98_128; note = Orientation (relative to transcription): sense; note = sgRNA Position: 54658081; note = Sequence Name: 56322-704_101_SL_seq_10515
tgcttcgcgtccagacaggt

SEQ ID NO: 10516 - DNA, 20 bp, Homo sapiens
  source 1..20: mol_type = genomic DNA; note = Gene: KIT; note = Location (start to end; relative to TSS): KIT_41_71; note = Orientation (relative to transcription): antisense; note = sgRNA Position: 54658004; note = Sequence Name: 56322-704_101_SL_seq_10516
tctcatcgcggtagctgcga

SEQ ID NO: 10517 - DNA, 20 bp, Homo sapiens
  source 1..20: mol_type = genomic DNA; note = Gene: KIT; note = Location (start to end; relative to TSS): KIT_97_127; note = Orientation (relative to transcription): sense; note = sgRNA Position: 54658080; note = Sequence Name: 56322-704_101_SL_seq_10517
ctgcttcgcgtccagacagg

SEQ ID NO: 10518 - DNA, 20 bp, Homo sapiens
  source 1..20: mol_type = genomic DNA; note = Gene: KIT; note = Location (start to end; relative to TSS): KIT_43_73; note = Orientation (relative to transcription): sense; note = sgRNA Position: 54658026; note = Sequence Name: 56322-704_101_SL_seq_10518
accgcgatgagaggcgctcg

SEQ ID NO: 10519 - DNA, 20 bp, Homo sapiens
  source 1..20: mol_type = genomic DNA; note = Gene: KIT; note = Location (start to end; relative to TSS): KIT_94_124; note = Orientation (relative to transcription): sense; note = sgRNA Position: 54658077; note = Sequence Name: 56322-704_101_SL_seq_10519
ctactgcttcgcgtccagac

SEQ ID NO: 10520 - DNA, 20 bp, Homo sapiens
  source 1..20: mol_type = genomic DNA; note = Gene: L1CAM; note = Location (start to end; relative to TSS): L1CAM_43_73; note = Orientation (relative to transcription): sense; note = sgRNA Position: 153886106; note = Sequence Name: 56322-704_101_SL_seq_10520
tccgaggccggcgtgcgcgg

SEQ ID NO: 10521 - DNA, 20 bp, Homo sapiens
  source 1..20: mol_type = genomic DNA; note = Gene: L1CAM; note = Location (start to end; relative to TSS): L1CAM_84_114; note = Orientation (relative to transcription): sense; note = sgRNA Position: 153886065; note = Sequence Name: 56322-704_101_SL_seq_10521
cggtggccgcagcgcaggta

SEQ ID NO: 10522 - DNA, 20 bp, Homo sapiens
  source 1..20: mol_type = genomic DNA; note = Gene: L1CAM; note = Location (start to end; relative to TSS): L1CAM_40_70; note = Orientation (relative to transcription): sense; note = sgRNA Position: 153886109; note = Sequence Name: 56322-704_101_SL_seq_10522
gggtccgaggccggcgtgcg

SEQ ID NO: 10523 - DNA, 20 bp, Homo sapiens
  source 1..20: mol_type = genomic DNA; note = Gene: L1CAM; note = Location (start to end; relative to TSS): L1CAM_79_109; note = Orientation (relative to transcription): sense; note = sgRNA Position: 153886070; note = Sequence Name: 56322-704_101_SL_seq_10523
ccgagcggtggccgcagcgc

SEQ ID NO: 10524 - DNA, 20 bp, Homo sapiens
  source 1..20: mol_type = genomic DNA; note = Gene: L1CAM; note = Location (start to end; relative to TSS): L1CAM_27_57; note = Orientation (relative to transcription): sense; note = sgRNA Position: 153886122; note = Sequence Name: 56322-704_101_SL_seq_10524
gcgctcgggcggcgggtccg

SEQ ID NO: 10525 - DNA, 20 bp, Homo sapiens
  source 1..20: mol_type = genomic DNA; note = Gene: L1CAM; note = Location (start to end; relative to TSS): L1CAM_59_89; note = Orientation (relative to transcription): antisense; note = sgRNA Position: 153886110; note = Sequence Name: 56322-704_101_SL_seq_10525
cgcccagcctccgcgcacgc

SEQ ID NO: 10526 - DNA, 20 bp, Homo sapiens
  source 1..20: mol_type = genomic DNA; note = Gene: L1CAM; note = Location (start to end; relative to TSS): L1CAM_20_50; note = Orientation (relative to transcription): sense; note = sgRNA Position: 153886129; note = Sequence Name: 56322-704_101_SL_seq_10526
cgcagacgcgctcgggcggc

SEQ ID NO: 10527 - DNA, 20 bp, Homo sapiens
  source 1..20: mol_type = genomic DNA; note = Gene: L1CAM; note = Location (start to end; relative to TSS): L1CAM_52_82; note = Orientation (relative to transcription): sense; note = sgRNA Position: 153886097; note = Sequence Name: 56322-704_101_SL_seq_10527
ggcgtgcgcggaggctgggc

SEQ ID NO: 10528 - DNA, 20 bp, Homo sapiens
  source 1..20: mol_type = genomic DNA; note = Gene: L1CAM; note = Location (start to end; relative to TSS): L1CAM_19_49; note = Orientation (relative to transcription): sense; note = sgRNA Position: 153886130; note = Sequence Name: 56322-704_101_SL_seq_10528
tcgcagacgcgctcgggcgg

SEQ ID NO: 10529 - DNA, 20 bp, Homo sapiens
  source 1..20: mol_type = genomic DNA; note = Gene: L1CAM; note = Location (start to end; relative to TSS): L1CAM_51_81; note = Orientation (relative to transcription): sense; note = sgRNA Position: 153886098; note = Sequence Name: 56322-704_101_SL_seq_10529
cggcgtgcgcggaggctggg

SEQ ID NO: 10530 - DNA, 20 bp, Homo sapiens
  source 1..20: mol_type = genomic DNA; note = Gene: LAG3; note = Location (start to end; relative to TSS): LAG3_51_81; note = Orientation (relative to transcription): sense; note = sgRNA Position: 6772597; note = Sequence Name: 56322-704_101_SL_seq_10530
acggccctgctctgttccct

SEQ ID NO: 10531 - DNA, 20 bp, Homo sapiens
  source 1..20: mol_type = genomic DNA; note = Gene: LAG3; note = Location (start to end; relative to TSS): LAG3_87_117; note = Orientation (relative to transcription): antisense; note = sgRNA Position: 6772613; note = Sequence Name: 56322-704_101_SL_seq_10531
agcctgaggaggtgggggcg

SEQ ID NO: 10532 - DNA, 20 bp, Homo sapiens
  source 1..20: mol_type = genomic DNA; note = Gene: LAG3; note = Location (start to end; relative to TSS): LAG3_32_62; note = Orientation (relative to transcription): sense; note = sgRNA Position: 6772578; note = Sequence Name: 56322-704_101_SL_seq_10532
gctctgtctgctctccgcca

SEQ ID NO: 10533 - DNA, 20 bp, Homo sapiens
  source 1..20: mol_type = genomic DNA; note = Gene: LAG3; note = Location (start to end; relative to TSS): LAG3_86_116; note = Orientation (relative to transcription): antisense; note = sgRNA Position: 6772612; note = Sequence Name: 56322-704_101_SL_seq_10533
gcctgaggaggtgggggcgg

SEQ ID NO: 10534 - DNA, 20 bp, Homo sapiens
  source 1..20: mol_type = genomic DNA; note = Gene: LAG3; note = Location (start to end; relative to TSS): LAG3_21_51; note = Orientation (relative to transcription): antisense; note = sgRNA Position: 6772547; note = Sequence Name: 56322-704_101_SL_seq_10534
agcaaagtggccgtcgtggc

SEQ ID NO: 10535 - DNA, 20 bp, Homo sapiens
  source 1..20: mol_type = genomic DNA; note = Gene: LAG3; note = Location (start to end; relative to TSS): LAG3_77_107; note = Orientation (relative to transcription): antisense; note = sgRNA Position: 6772603; note = Sequence Name: 56322-704_101_SL_seq_10535
ggtgggggcgggggtgtccc

SEQ ID NO: 10536 - DNA, 20 bp, Homo sapiens
  source 1..20: mol_type = genomic DNA; note = Gene: LAG3; note = Location (start to end; relative to TSS): LAG3_20_50; note = Orientation (relative to transcription): antisense; note = sgRNA Position: 6772546; note = Sequence Name: 56322-704_101_SL_seq_10536
gcaaagtggccgtcgtggct

SEQ ID NO: 10537 - DNA, 20 bp, Homo sapiens
  source 1..20: mol_type = genomic DNA; note = Gene: LAG3; note = Location (start to end; relative to TSS): LAG3_76_106; note = Orientation (relative to transcription): antisense; note = sgRNA Position: 6772602; note = Sequence Name: 56322-704_101_SL_seq_10537
gtgggggcgggggtgtccca

SEQ ID NO: 10538 - DNA, 20 bp, Homo sapiens
  source 1..20: mol_type = genomic DNA; note = Gene: LAG3; note = Location (start to end; relative to TSS): LAG3_5_35; note = Orientation (relative to transcription): antisense; note = sgRNA Position: 6772531; note = Sequence Name: 56322-704_101_SL_seq_10538
tggctgggatgccgttctgc

SEQ ID NO: 10539 - DNA, 20 bp, Homo sapiens
  source 1..20: mol_type = genomic DNA; note = Gene: LAG3; note = Location (start to end; relative to TSS): LAG3_51_81; note = Orientation (relative to transcription): sense; note = sgRNA Position: 6772597; note = Sequence Name: 56322-704_101_SL_seq_10539
acggccctgctctgttccct

SEQ ID NO: 10540 - DNA, 20 bp, Homo sapiens
  source 1..20: mol_type = genomic DNA; note = Gene: LAIR1; note = Location (start to end; relative to TSS): LAIR1_47_77; note = Orientation (relative to transcription): antisense; note = sgRNA Position: 54364880; note = Sequence Name: 56322-704_101_SL_seq_10540
tgcagcagacacaagcagac

SEQ ID NO: 10541 - DNA, 20 bp, Homo sapiens
  source 1..20: mol_type = genomic DNA; note = Gene: LAIR1; note = Location (start to end; relative to TSS): LAIR1_94_124; note = Orientation (relative to transcription): antisense; note = sgRNA Position: 54364833; note = Sequence Name: 56322-704_101_SL_seq_10541
cagcagtgcagcctggcctg

SEQ ID NO: 10542 - DNA, 20 bp, Homo sapiens
  source 1..20: mol_type = genomic DNA; note = Gene: LAIR1; note = Location (start to end; relative to TSS): LAIR1_31_61; note = Orientation (relative to transcription): antisense; note = sgRNA Position: 54364896; note = Sequence Name: 56322-704_101_SL_seq_10542
agacaggatgtgctgcccgg

SEQ ID NO: 10543 - DNA, 20 bp, Homo sapiens
  source 1..20: mol_type = genomic DNA; note = Gene: LAIR1; note = Location (start to end; relative to TSS): LAIR1_87_117; note = Orientation (relative to transcription): sense; note = sgRNA Position: 54364820; note = Sequence Name: 56322-704_101_SL_seq_10543
tcaggccaggctgcactgct

SEQ ID NO: 10544 - DNA, 20 bp, Homo sapiens
  source 1..20: mol_type = genomic DNA; note = Gene: LAIR1; note = Location (start to end; relative to TSS): LAIR1_32_62; note = Orientation (relative to transcription): antisense; note = sgRNA Position: 54364895; note = Sequence Name: 56322-704_101_SL_seq_10544
cagacaggatgtgctgcccg

SEQ ID NO: 10545 - DNA, 20 bp, Homo sapiens
  source 1..20: mol_type = genomic DNA; note = Gene: LAIR1; note = Location (start to end; relative to TSS): LAIR1_79_109; note = Orientation (relative to transcription): antisense; note = sgRNA Position: 54364848; note = Sequence Name: 56322-704_101_SL_seq_10545
gcctgaggcgcaccaatgca

SEQ ID NO: 10546 - DNA, 20 bp, Homo sapiens
  source 1..20: mol_type = genomic DNA; note = Gene: LAIR1; note = Location (start to end; relative to TSS): LAIR1_33_63; note = Orientation (relative to transcription): antisense; note = sgRNA Position: 54364894; note = Sequence Name: 56322-704_101_SL_seq_10546
gcagacaggatgtgctgccc

SEQ ID NO: 10547 - DNA, 20 bp, Homo sapiens
  source 1..20: mol_type = genomic DNA; note = Gene: LAIR1; note = Location (start to end; relative to TSS): LAIR1_74_104; note = Orientation (relative to transcription): sense; note = sgRNA Position: 54364833; note = Sequence Name: 56322-704_101_SL_seq_10547
gcattggtgcgcctcaggcc

SEQ ID NO: 10548 - DNA, 20 bp, Homo sapiens
  source 1..20: mol_type = genomic DNA; note = Gene: LAIR1; note = Location (start to end; relative to TSS): LAIR1_34_64; note = Orientation (relative to transcription): antisense; note = sgRNA Position: 54364893; note = Sequence Name: 56322-704_101_SL_seq_10548
agcagacaggatgtgctgcc

SEQ ID NO: 10549 - DNA, 20 bp, Homo sapiens
  source 1..20: mol_type = genomic DNA; note = Gene: LAIR1; note = Location (start to end; relative to TSS): LAIR1_69_99; note = Orientation (relative to transcription): sense; note = sgRNA Position: 54364838; note = Sequence Name: 56322-704_101_SL_seq_10549
tccttgcattggtgcgcctc

SEQ ID NO: 10550 - DNA, 20 bp, Homo sapiens
  source 1..20: mol_type = genomic DNA; note = Gene: LAIR2; note = Location (start to end; relative to TSS): LAIR2_37_67; note = Orientation (relative to transcription): antisense; note = sgRNA Position: 54502874; note = Sequence Name: 56322-704_101_SL_seq_10550
cacaagcagacaggatgtgc

SEQ ID NO: 10551 - DNA, 20 bp, Homo sapiens
  source 1..20: mol_type = genomic DNA; note = Gene: LAIR2; note = Location (start to end; relative to TSS): LAIR2_94_124; note = Orientation (relative to transcription): antisense; note = sgRNA Position: 54502931; note = Sequence Name: 56322-704_101_SL_seq_10551
cccaggagagcagtgaggtg

SEQ ID NO: 10552 - DNA, 20 bp, Homo sapiens
  source 1..20: mol_type = genomic DNA; note = Gene: LAIR2; note = Location (start to end; relative to TSS): LAIR2_33_63; note = Orientation (relative to transcription): antisense; note = sgRNA Position: 54502870; note = Sequence Name: 56322-704_101_SL_seq_10552
agcagacaggatgtgctggc

SEQ ID NO: 10553 - DNA, 20 bp, Homo sapiens
  source 1..20: mol_type = genomic DNA; note = Gene: LAIR2; note = Location (start to end; relative to TSS): LAIR2_91_121; note = Orientation (relative to transcription): sense; note = sgRNA Position: 54502948; note = Sequence Name: 56322-704_101_SL_seq_10553
ctcactgctctcctgggcct

SEQ ID NO: 10554 - DNA, 20 bp, Homo sapiens
  source 1..20: mol_type = genomic DNA; note = Gene: LAIR2; note = Location (start to end; relative to TSS): LAIR2_32_62; note = Orientation (relative to transcription): antisense; note = sgRNA Position: 54502869; note = Sequence Name: 56322-704_101_SL_seq_10554
gcagacaggatgtgctggcc

SEQ ID NO: 10555 - DNA, 20 bp, Homo sapiens
  source 1..20: mol_type = genomic DNA; note = Gene: LAIR2; note = Location (start to end; relative to TSS): LAIR2_86_116; note = Orientation (relative to transcription): antisense; note = sgRNA Position: 54502923; note = Sequence Name: 56322-704_101_SL_seq_10555
agcagtgaggtgtggagaca

SEQ ID NO: 10556 - DNA, 20 bp, Homo sapiens
  source 1..20: mol_type = genomic DNA; note = Gene: LAIR2; note = Location (start to end; relative to TSS): LAIR2_30_60; note = Orientation (relative to transcription): antisense; note = sgRNA Position: 54502867; note = Sequence Name: 56322-704_101_SL_seq_10556
agacaggatgtgctggccgg

SEQ ID NO: 10557 - DNA, 20 bp, Homo sapiens
  source 1..20: mol_type = genomic DNA; note = Gene: LAIR2; note = Location (start to end; relative to TSS): LAIR2_85_115; note = Orientation (relative to transcription): sense; note = sgRNA Position: 54502942; note = Sequence Name: 56322-704_101_SL_seq_10557
ccacacctcactgctctcct

SEQ ID NO: 10558 - DNA, 20 bp, Homo sapiens
  source 1..20: mol_type = genomic DNA; note = Gene: LAIR2; note = Location (start to end; relative to TSS): LAIR2_31_61; note = Orientation (relative to transcription): antisense; note = sgRNA Position: 54502868; note = Sequence Name: 56322-704_101_SL_seq_10558
cagacaggatgtgctggccg

SEQ ID NO: 10559 - DNA, 20 bp, Homo sapiens
  source 1..20: mol_type = genomic DNA; note = Gene: LAIR2; note = Location (start to end; relative to TSS): LAIR2_80_110; note = Orientation (relative to transcription): antisense; note = sgRNA Position: 54502917; note = Sequence Name: 56322-704_101_SL_seq_10559
gaggtgtggagacatggccc

SEQ ID NO: 10560 - DNA, 20 bp, Homo sapiens
  source 1..20: mol_type = genomic DNA; note = Gene: LEPR; note = Location (start to end; relative to TSS): LEPR_32_62; note = Orientation (relative to transcription): sense; note = sgRNA Position: 65420726; note = Sequence Name: 56322-704_101_SL_seq_10560
ccccagttcgggagacatgg

SEQ ID NO: 10561 - DNA, 20 bp, Homo sapiens
  source 1..20: mol_type = genomic DNA; note = Gene: LEPR; note = Location (start to end; relative to TSS): LEPR_79_109; note = Orientation (relative to transcription): sense; note = sgRNA Position: 65420773; note = Sequence Name: 56322-704_101_SL_seq_10561
cggctcgcttgtcgtgtggt

SEQ ID NO: 10562 - DNA, 20 bp, Homo sapiens
  source 1..20: mol_type = genomic DNA; note = Gene: LEPR; note = Location (start to end; relative to TSS): LEPR_25_55; note = Orientation (relative to transcription): antisense; note = sgRNA Position: 65420699; note = Sequence Name: 56322-704_101_SL_seq_10562
actggggccgcggctgcttc

SEQ ID NO: 10563 - DNA, 20 bp, Homo sapiens
  source 1..20: mol_type = genomic DNA; note = Gene: LEPR; note = Location (start to end; relative to TSS): LEPR_78_108; note = Orientation (relative to transcription): sense; note = sgRNA Position: 65420772; note = Sequence Name: 56322-704_101_SL_seq_10563
ccggctcgcttgtcgtgtgg

SEQ ID NO: 10564 - DNA, 20 bp, Homo sapiens
  source 1..20: mol_type = genomic DNA; note = Gene: LEPR; note = Location (start to end; relative to TSS): LEPR_29_59; note = Orientation (relative to transcription): sense; note = sgRNA Position: 65420723; note = Sequence Name: 56322-704_101_SL_seq_10564
cggccccagttcgggagaca

SEQ ID NO: 10565 - DNA, 20 bp, Homo sapiens
  source 1..20: mol_type = genomic DNA; note = Gene: LEPR; note = Location (start to end; relative to TSS): LEPR_75_105; note = Orientation (relative to transcription): sense; note = sgRNA Position: 65420769; note = Sequence Name: 56322-704_101_SL_seq_10565
tccccggctcgcttgtcgtg

SEQ ID NO: 10566 - DNA, 20 bp, Homo sapiens
  source 1..20: mol_type = genomic DNA; note = Gene: LEPR; note = Location (start to end; relative to TSS): LEPR_20_50; note = Orientation (relative to transcription): sense; note = sgRNA Position: 65420714; note = Sequence Name: 56322-704_101_SL_seq_10566
aagcagccgcggccccagtt

SEQ ID NO: 10567 - DNA, 20 bp, Homo sapiens
  source 1..20: mol_type = genomic DNA; note = Gene: LEPR; note = Location (start to end; relative to TSS): LEPR_59_89; note = Orientation (relative to transcription): sense; note = sgRNA Position: 65420753; note = Sequence Name: 56322-704_101_SL_seq_10567
taaaggtacatcgcggtccc

SEQ ID NO: 10568 - DNA, 20 bp, Homo sapiens
  source 1..20: mol_type = genomic DNA; note = Gene: LEPR; note = Location (start to end; relative to TSS): LEPR_21_51; note = Orientation (relative to transcription): sense; note = sgRNA Position: 65420715; note = Sequence Name: 56322-704_101_SL_seq_10568
agcagccgcggccccagttc

SEQ ID NO: 10569 - DNA, 20 bp, Homo sapiens
  source 1..20: mol_type = genomic DNA; note = Gene: LEPR; note = Location (start to end; relative to TSS): LEPR_52_82; note = Orientation (relative to transcription): sense; note = sgRNA Position: 65420746; note = Sequence Name: 56322-704_101_SL_seq_10569
cgggcgttaaaggtacatcg

SEQ ID NO: 10570 - DNA, 20 bp, Homo sapiens
  source 1..20: mol_type = genomic DNA; note = Gene: LILRA1; note = Location (start to end; relative to TSS): LILRA1_75_105; note = Orientation (relative to transcription): sense; note = sgRNA Position: 54593733; note = Sequence Name: 56322-704_101_SL_seq_10570
tctgcctgcagcatggacct

SEQ ID NO: 10571 - DNA, 20 bp, Homo sapiens
  source 1..20: mol_type = genomic DNA; note = Gene: LILRA1; note = Location (start to end; relative to TSS): LILRA1_105_135; note = Orientation (relative to transcription): sense; note = sgRNA Position: 54593763; note = Sequence Name: 56322-704_101_SL_seq_10571
tgaagcatctccagggctgg

SEQ ID NO: 10572 - DNA, 20 bp, Homo sapiens
  source 1..20: mol_type = genomic DNA; note = Gene: LILRA1; note = Location (start to end; relative to TSS): LILRA1_68_98; note = Orientation (relative to transcription): sense; note = sgRNA Position: 54593726; note = Sequence Name: 56322-704_101_SL_seq_10572
atctgagtctgcctgcagca

SEQ ID NO: 10573 - DNA, 20 bp, Homo sapiens
  source 1..20: mol_type = genomic DNA; note = Gene: LILRA1; note = Location (start to end; relative to TSS): LILRA1_98_128; note = Orientation (relative to transcription): sense; note = sgRNA Position: 54593756; note = Sequence Name: 56322-704_101_SL_seq_10573
tcttccctgaagcatctcca

SEQ ID NO: 10574 - DNA, 20 bp, Homo sapiens
  source 1..20: mol_type = genomic DNA; note = Gene: LILRA1; note = Location (start to end; relative to TSS): LILRA1_38_68; note = Orientation (relative to transcription): antisense; note = sgRNA Position: 54593676; note = Sequence Name: 56322-704_101_SL_seq_10574
cgcatctggctgtgtagctc

SEQ ID NO: 10575 - DNA, 20 bp, Homo sapiens
  source 1..20: mol_type = genomic DNA; note = Gene: LILRA1; note = Location (start to end; relative to TSS): LILRA1_75_105; note = Orientation (relative to transcription): sense; note = sgRNA Position: 54593733; note = Sequence Name: 56322-704_101_SL_seq_10575
tctgcctgcagcatggacct

SEQ ID NO: 10576 - DNA, 20 bp, Homo sapiens
  source 1..20: mol_type = genomic DNA; note = Gene: LILRA1; note = Location (start to end; relative to TSS): LILRA1_23_53; note = Orientation (relative to transcription): antisense; note = sgRNA Position: 54593661; note = Sequence Name: 56322-704_101_SL_seq_10576
agctcaggttgagctgcgtg

SEQ ID NO: 10577 - DNA, 20 bp, Homo sapiens
  source 1..20: mol_type = genomic DNA; note = Gene: LILRA1; note = Location (start to end; relative to TSS): LILRA1_68_98; note = Orientation (relative to transcription): sense; note = sgRNA Position: 54593726; note = Sequence Name: 56322-704_101_SL_seq_10577
atctgagtctgcctgcagca

SEQ ID NO: 10578 - DNA, 20 bp, Homo sapiens
  source 1..20: mol_type = genomic DNA; note = Gene: LILRA1; note = Location (start to end; relative to TSS): LILRA1_8_38; note = Orientation (relative to transcription): antisense; note = sgRNA Position: 54593646; note = Sequence Name: 56322-704_101_SL_seq_10578
gcgtgtggcagtgagcacag

SEQ ID NO: 10579 - DNA, 20 bp, Homo sapiens
  source 1..20: mol_type = genomic DNA; note = Gene: LILRA1; note = Location (start to end; relative to TSS): LILRA1_38_68; note = Orientation (relative to transcription): antisense; note = sgRNA Position: 54593676; note = Sequence Name: 56322-704_101_SL_seq_10579
cgcatctggctgtgtagctc

SEQ ID NO: 10580 - DNA, 20 bp, Homo sapiens
  source 1..20: mol_type = genomic DNA; note = Gene: LILRA2; note = Location (start to end; relative to TSS): LILRA2_55_85; note = Orientation (relative to transcription): antisense; note = sgRNA Position: 54573851; note = Sequence Name: 56322-704_101_SL_seq_10580
ccactgccctgctctgcgga

SEQ ID NO: 10581 - DNA, 20 bp, Homo sapiens
  source 1..20: mol_type = genomic DNA; note = Gene: LILRA2; note = Location (start to end; relative to TSS): LILRA2_92_122; note = Orientation (relative to transcription): sense; note = sgRNA Position: 54573908; note = Sequence Name: 56322-704_101_SL_seq_10581
ctcacggtcctgatctgtct

SEQ ID NO: 10582 - DNA, 20 bp, Homo sapiens
  source 1..20: mol_type = genomic DNA; note = Gene: LILRA2; note = Location (start to end; relative to TSS): LILRA2_37_67; note = Orientation (relative to transcription): antisense; note = sgRNA Position: 54573833; note = Sequence Name: 56322-704_101_SL_seq_10582
gatggatgagccctcagtgc

SEQ ID NO: 10583 - DNA, 20 bp, Homo sapiens
  source 1..20: mol_type = genomic DNA; note = Gene: LILRA2; note = Location (start to end; relative to TSS): LILRA2_87_117; note = Orientation (relative to transcription): antisense; note = sgRNA Position: 54573883; note = Sequence Name: 56322-704_101_SL_seq_10583
gaccgtgaggatgggggtca

SEQ ID NO: 10584 - DNA, 20 bp, Homo sapiens
  source 1..20: mol_type = genomic DNA; note = Gene: LILRA2; note = Location (start to end; relative to TSS): LILRA2_33_63; note = Orientation (relative to transcription): antisense; note = sgRNA Position: 54573829; note = Sequence Name: 56322-704_101_SL_seq_10584
gatgagccctcagtgctggc

SEQ ID NO: 10585 - DNA, 20 bp, Homo sapiens
  source 1..20: mol_type = genomic DNA; note = Gene: LILRA2; note = Location (start to end; relative to TSS): LILRA2_76_106; note = Orientation (relative to transcription): sense; note = sgRNA Position: 54573892; note = Sequence Name: 56322-704_101_SL_seq_10585
cgccatgacccccatcctca

SEQ ID NO: 10586 - DNA, 20 bp, Homo sapiens
  source 1..20: mol_type = genomic DNA; note = Gene: LILRA2; note = Location (start to end; relative to TSS): LILRA2_18_48; note = Orientation (relative to transcription): sense; note = sgRNA Position: 54573834; note = Sequence Name: 56322-704_101_SL_seq_10586
ctctgtcctgccagcactga

SEQ ID NO: 10587 - DNA, 20 bp, Homo sapiens
  source 1..20: mol_type = genomic DNA; note = Gene: LILRA2; note = Location (start to end; relative to TSS): LILRA2_59_89; note = Orientation (relative to transcription): antisense; note = sgRNA Position: 54573855; note = Sequence Name: 56322-704_101_SL_seq_10587
cctcccactgccctgctctg

SEQ ID NO: 10588 - DNA, 20 bp, Homo sapiens
  source 1..20: mol_type = genomic DNA; note = Gene: LILRA2; note = Location (start to end; relative to TSS): LILRA2_17_47; note = Orientation (relative to transcription): sense; note = sgRNA Position: 54573833; note = Sequence Name: 56322-704_101_SL_seq_10588
tctctgtcctgccagcactg

SEQ ID NO: 10589 - DNA, 20 bp, Homo sapiens
  source 1..20: mol_type = genomic DNA; note = Gene: LILRA2; note = Location (start to end; relative to TSS): LILRA2_55_85; note = Orientation (relative to transcription): antisense; note = sgRNA Position: 54573851; note = Sequence Name: 56322-704_101_SL_seq_10589
ccactgccctgctctgcgga

SEQ ID NO: 10590 - DNA, 20 bp, Homo sapiens
  source 1..20: mol_type = genomic DNA; note = Gene: LILRA4; note = Location (start to end; relative to TSS): LILRA4_25_55; note = Orientation (relative to transcription): sense; note = sgRNA Position: 54339113; note = Sequence Name: 56322-704_101_SL_seq_10590
ctgcctgcacagccagggcc

SEQ ID NO: 10591 - DNA, 20 bp, Homo sapiens
  source 1..20: mol_type = genomic DNA; note = Gene: LILRA4; note = Location (start to end; relative to TSS): LILRA4_88_118; note = Orientation (relative to transcription): sense; note = sgRNA Position: 54339050; note = Sequence Name: 56322-704_101_SL_seq_10591
ttctttggtgagatcttaag

SEQ ID NO: 10592 - DNA, 20 bp, Homo sapiens
  source 1..20: mol_type = genomic DNA; note = Gene: LILRA4; note = Location (start to end; relative to TSS): LILRA4_28_58; note = Orientation (relative to transcription): sense; note = sgRNA Position: 54339110; note = Sequence Name: 56322-704_101_SL_seq_10592
cctgcacagccagggccagg

SEQ ID NO: 10593 - DNA, 20 bp, Homo sapiens
  source 1..20: mol_type = genomic DNA; note = Gene: LILRA4; note = Location (start to end; relative to TSS): LILRA4_75_105; note = Orientation (relative to transcription): antisense; note = sgRNA Position: 54339083; note = Sequence Name: 56322-704_101_SL_seq_10593
agagcaggcttgtgagaatg

SEQ ID NO: 10594 - DNA, 20 bp, Homo sapiens
  source 1..20: mol_type = genomic DNA; note = Gene: LILRA4; note = Location (start to end; relative to TSS): LILRA4_19_49; note = Orientation (relative to transcription): sense; note = sgRNA Position: 54339119; note = Sequence Name: 56322-704_101_SL_seq_10594
ccacacctgcctgcacagcc

SEQ ID NO: 10595 - DNA, 20 bp, Homo sapiens
  source 1..20: mol_type = genomic DNA; note = Gene: LILRA4; note = Location (start to end; relative to TSS): LILRA4_74_104; note = Orientation (relative to transcription): antisense; note = sgRNA Position: 54339084; note = Sequence Name: 56322-704_101_SL_seq_10595
gagcaggcttgtgagaatga

SEQ ID NO: 10596 - DNA, 20 bp, Homo sapiens
  source 1..20: mol_type = genomic DNA; note = Gene: LILRA4; note = Location (start to end; relative to TSS): LILRA4_20_50; note = Orientation (relative to transcription): sense; note = sgRNA Position: 54339118; note = Sequence Name: 56322-704_101_SL_seq_10596
cacacctgcctgcacagcca

SEQ ID NO: 10597 - DNA, 20 bp, Homo sapiens
  source 1..20: mol_type = genomic DNA; note = Gene: LILRA4; note = Location (start to end; relative to TSS): LILRA4_68_98; note = Orientation (relative to transcription): antisense; note = sgRNA Position: 54339090; note = Sequence Name: 56322-704_101_SL_seq_10597
gcttgtgagaatgagggtca

SEQ ID NO: 10598 - DNA, 20 bp, Homo sapiens
  source 1..20: mol_type = genomic DNA; note = Gene: LILRA4; note = Location (start to end; relative to TSS): LILRA4_22_52; note = Orientation (relative to transcription): antisense; note = sgRNA Position: 54339136; note = Sequence Name: 56322-704_101_SL_seq_10598
tgtgcaggcaggtgtggcca

SEQ ID NO: 10599 - DNA, 20 bp, Homo sapiens
  source 1..20: mol_type = genomic DNA; note = Gene: LILRA4; note = Location (start to end; relative to TSS): LILRA4_52_82; note = Orientation (relative to transcription): antisense; note = sgRNA Position: 54339106; note = Sequence Name: 56322-704_101_SL_seq_10599
gtcatggcatctcctcctcc

SEQ ID NO: 10600 - DNA, 20 bp, Homo sapiens
  source 1..20: mol_type = genomic DNA; note = Gene: LILRA5; note = Location (start to end; relative to TSS): LILRA5_39_69; note = Orientation (relative to transcription): antisense; note = sgRNA Position: 54313123; note = Sequence Name: 56322-704_101_SL_seq_10600
gacacctggctgtgtagccc

SEQ ID NO: 10601 - DNA, 20 bp, Homo sapiens
  source 1..20: mol_type = genomic DNA; note = Gene: LILRA5; note = Location (start to end; relative to TSS): LILRA5_99_129; note = Orientation (relative to transcription): sense; note = sgRNA Position: 54313043; note = Sequence Name: 56322-704_101_SL_seq_10601
tcttccctgaagcatctcca

SEQ ID NO: 10602 - DNA, 20 bp, Homo sapiens
  source 1..20: mol_type = genomic DNA; note = Gene: LILRA5; note = Location (start to end; relative to TSS): LILRA5_24_54; note = Orientation (relative to transcription): antisense; note = sgRNA Position: 54313138; note = Sequence Name: 56322-704_101_SL_seq_10602
agcccaggctgagctgcatg

SEQ ID NO: 10603 - DNA, 20 bp, Homo sapiens
  source 1..20: mol_type = genomic DNA; note = Gene: LILRA5; note = Location (start to end; relative to TSS): LILRA5_98_128; note = Orientation (relative to transcription): sense; note = sgRNA Position: 54313044; note = Sequence Name: 56322-704_101_SL_seq_10603
atcttccctgaagcatctcc

SEQ ID NO: 10604 - DNA, 20 bp, Homo sapiens
  source 1..20: mol_type = genomic DNA; note = Gene: LILRA5; note = Location (start to end; relative to TSS): LILRA5_26_56; note = Orientation (relative to transcription): sense; note = sgRNA Position: 54313116; note = Sequence Name: 56322-704_101_SL_seq_10604
tcagcctgggctacacagcc

SEQ ID NO: 10605 - DNA, 20 bp, Homo sapiens
  source 1..20: mol_type = genomic DNA; note = Gene: LILRA5; note = Location (start to end; relative to TSS): LILRA5_89_119; note = Orientation (relative to transcription): antisense; note = sgRNA Position: 54313073; note = Sequence Name: 56322-704_101_SL_seq_10605
aagatgcaggtccatgccac

SEQ ID NO: 10606 - DNA, 20 bp, Homo sapiens
  source 1..20: mol_type = genomic DNA; note = Gene: LILRA5; note = Location (start to end; relative to TSS): LILRA5_13_43; note = Orientation (relative to transcription): sense; note = sgRNA Position: 54313129; note = Sequence Name: 56322-704_101_SL_seq_10606
tgccacatgcagctcagcct

SEQ ID NO: 10607 - DNA, 20 bp, Homo sapiens
  source 1..20: mol_type = genomic DNA; note = Gene: LILRA5; note = Location (start to end; relative to TSS): LILRA5_69_99; note = Orientation (relative to transcription): sense; note = sgRNA Position: 54313073; note = Sequence Name: 56322-704_101_SL_seq_10607
atctgagtctgcctgtggca

SEQ ID NO: 10608 - DNA, 20 bp, Homo sapiens
  source 1..20: mol_type = genomic DNA; note = Gene: LILRA5; note = Location (start to end; relative to TSS): LILRA5_12_42; note = Orientation (relative to transcription): sense; note = sgRNA Position: 54313130; note = Sequence Name: 56322-704_101_SL_seq_10608
ttgccacatgcagctcagcc

SEQ ID NO: 10609 - DNA, 20 bp, Homo sapiens
  source 1..20: mol_type = genomic DNA; note = Gene: LILRA5; note = Location (start to end; relative to TSS): LILRA5_64_94; note = Orientation (relative to transcription): sense; note = sgRNA Position: 54313078; note = Sequence Name: 56322-704_101_SL_seq_10609
tgctgatctgagtctgcctg

SEQ ID NO: 10610 - DNA, 20 bp, Homo sapiens
  source 1..20: mol_type = genomic DNA; note = Gene: LILRA6; note = Location (start to end; relative to TSS): LILRA6_43_73; note = Orientation (relative to transcription): sense; note = sgRNA Position: 54242723; note = Sequence Name: 56322-704_101_SL_seq_10610
ctcgcagccctgctctgcct

SEQ ID NO: 10611 - DNA, 20 bp, Homo sapiens
  source 1..20: mol_type = genomic DNA; note = Gene: LILRA6; note = Location (start to end; relative to TSS): LILRA6_111_141; note = Orientation (relative to transcription): sense; note = sgRNA Position: 54242655; note = Sequence Name: 56322-704_101_SL_seq_10611
cccaccccacacacaagccc

SEQ ID NO: 10612 - DNA, 20 bp, Homo sapiens
  source 1..20: mol_type = genomic DNA; note = Gene: LILRA6; note = Location (start to end; relative to TSS): LILRA6_44_74; note = Orientation (relative to transcription): antisense; note = sgRNA Position: 54242742; note = Sequence Name: 56322-704_101_SL_seq_10612
gagcagggctgcgagggtgg

SEQ ID NO: 10613 - DNA, 20 bp, Homo sapiens
  source 1..20: mol_type = genomic DNA; note = Gene: LILRA6; note = Location (start to end; relative to TSS): LILRA6_85_115; note = Orientation (relative to transcription): sense; note = sgRNA Position: 54242681; note = Sequence Name: 56322-704_101_SL_seq_10613
gggggagatctgagtcttgg

SEQ ID NO: 10614 - DNA, 20 bp, Homo sapiens
  source 1..20: mol_type = genomic DNA; note = Gene: LILRA6; note = Location (start to end; relative to TSS): LILRA6_45_75; note = Orientation (relative to transcription): antisense; note = sgRNA Position: 54242741; note = Sequence Name: 56322-704_101_SL_seq_10614
agagcagggctgcgagggtg

SEQ ID NO: 10615 - DNA, 20 bp, Homo sapiens
  source 1..20: mol_type = genomic DNA; note = Gene: LILRA6; note = Location (start to end; relative to TSS): LILRA6_82_112; note = Orientation (relative to transcription): sense; note = sgRNA Position: 54242684; note = Sequence Name: 56322-704_101_SL_seq_10615
ggagggggagatctgagtct

SEQ ID NO: 10616 - DNA, 20 bp, Homo sapiens
  source 1..20: mol_type = genomic DNA; note = Gene: LILRA6; note = Location (start to end; relative to TSS): LILRA6_38_68; note = Orientation (relative to transcription): antisense; note = sgRNA Position: 54242748; note = Sequence Name: 56322-704_101_SL_seq_10616
ggctgcgagggtgggggtca

SEQ ID NO: 10617 - DNA, 20 bp, Homo sapiens
  source 1..20: mol_type = genomic DNA; note = Gene: LILRA6; note = Location (start to end; relative to TSS): LILRA6_69_99; note = Orientation (relative to transcription): antisense; note = sgRNA Position: 54242717; note = Sequence Name: 56322-704_101_SL_seq_10617
cccatcttgaaatctcacct

SEQ ID NO: 10618 - DNA, 20 bp, Homo sapiens
  source 1..20: mol_type = genomic DNA; note = Gene: LILRA6; note = Location (start to end; relative to TSS): LILRA6_25_55; note = Orientation (relative to transcription): antisense; note = sgRNA Position: 54242761; note = Sequence Name: 56322-704_101_SL_seq_10618
ggggtcatggcgtctcctcc

SEQ ID NO: 10619 - DNA, 20 bp, Homo sapiens
  source 1..20: mol_type = genomic DNA; note = Gene: LILRA6; note = Location (start to end; relative to TSS): LILRA6_60_90; note = Orientation (relative to transcription): sense; note = sgRNA Position: 54242706; note = Sequence Name: 56322-704_101_SL_seq_10619
cctaggtgagatttcaagat

SEQ ID NO: 10620 - DNA, 20 bp, Homo sapiens
  source 1..20: mol_type = genomic DNA; note = Gene: LILRB1; note = Location (start to end; relative to TSS): LILRB1_23_53; note = Orientation (relative to transcription): antisense; note = sgRNA Position: 54630513; note = Sequence Name: 56322-704_101_SL_seq_10620
cgcccaggctgagctgcgtg

SEQ ID NO: 10621 - DNA, 20 bp, Homo sapiens
  source 1..20: mol_type = genomic DNA; note = Gene: LILRB1; note = Location (start to end; relative to TSS): LILRB1_98_128; note = Orientation (relative to transcription): sense; note = sgRNA Position: 54630608; note = Sequence Name: 56322-704_101_SL_seq_10621
tcttccctgaagcatctcca

SEQ ID NO: 10622 - DNA, 20 bp, Homo sapiens
  source 1..20: mol_type = genomic DNA; note = Gene: LILRB1; note = Location (start to end; relative to TSS): LILRB1_38_68; note = Orientation (relative to transcription): antisense; note = sgRNA Position: 54630528; note = Sequence Name: 56322-704_101_SL_seq_10622
cgcatctggctgtgccgccc

SEQ ID NO: 10623 - DNA, 20 bp, Homo sapiens
  source 1..20: mol_type = genomic DNA; note = Gene: LILRB1; note = Location (start to end; relative to TSS): LILRB1_88_118; note = Orientation (relative to transcription): antisense; note = sgRNA Position: 54630578; note = Sequence Name: 56322-704_101_SL_seq_10623
aagacccaggtccatgctgc

SEQ ID NO: 10624 - DNA, 20 bp, Homo sapiens
  source 1..20: mol_type = genomic DNA; note = Gene: LILRB1; note = Location (start to end; relative to TSS): LILRB1_15_45; note = Orientation (relative to transcription): sense; note = sgRNA Position: 54630525; note = Sequence Name: 56322-704_101_SL_seq_10624
cacacgcagctcagcctggg

SEQ ID NO: 10625 - DNA, 20 bp, Homo sapiens
  source 1..20: mol_type = genomic DNA; note = Gene: LILRB1; note = Location (start to end; relative to TSS): LILRB1_75_105; note = Orientation (relative to transcription): sense; note = sgRNA Position: 54630585; note = Sequence Name: 56322-704_101_SL_seq_10625
tctgcctgcagcatggacct

SEQ ID NO: 10626 - DNA, 20 bp, Homo sapiens
  source 1..20: mol_type = genomic DNA; note = Gene: LILRB1; note = Location (start to end; relative to TSS): LILRB1_12_42; note = Orientation (relative to transcription): sense; note = sgRNA Position: 54630522; note = Sequence Name: 56322-704_101_SL_seq_10626
tgccacacgcagctcagcct

SEQ ID NO: 10627 - DNA, 20 bp, Homo sapiens
  source 1..20: mol_type = genomic DNA; note = Gene: LILRB1; note = Location (start to end; relative to TSS): LILRB1_74_104; note = Orientation (relative to transcription): sense; note = sgRNA Position: 54630584; note = Sequence Name: 56322-704_101_SL_seq_10627
gtctgcctgcagcatggacc

SEQ ID NO: 10628 - DNA, 20 bp, Homo sapiens
  source 1..20: mol_type = genomic DNA; note = Gene: LILRB1; note = Location (start to end; relative to TSS): LILRB1_11_41; note = Orientation (relative to transcription): sense; note = sgRNA Position: 54630521; note = Sequence Name: 56322-704_101_SL_seq_10628
ctgccacacgcagctcagcc

SEQ ID NO: 10629 - DNA, 20 bp, Homo sapiens
  source 1..20: mol_type = genomic DNA; note = Gene: LILRB1; note = Location (start to end; relative to TSS): LILRB1_68_98; note = Orientation (relative to transcription): sense; note = sgRNA Position: 54630578; note = Sequence Name: 56322-704_101_SL_seq_10629
atctgagtctgcctgcagca

SEQ ID NO: 10630 - DNA, 20 bp, Homo sapiens
  source 1..20: mol_type = genomic DNA; note = Gene: LILRB2; note = Location (start to end; relative to TSS): LILRB2_39_69; note = Orientation (relative to transcription): antisense; note = sgRNA Position: 54281067; note = Sequence Name: 56322-704_101_SL_seq_10630
cgcctctggctgtgctgtcc

SEQ ID NO: 10631 - DNA, 20 bp, Homo sapiens
  source 1..20: mol_type = genomic DNA; note = Gene: LILRB2; note = Location (start to end; relative to TSS): LILRB2_89_119; note = Orientation (relative to transcription): antisense; note = sgRNA Position: 54281017; note = Sequence Name: 56322-704_101_SL_seq_10631
aagacccaggtccatgctgc

SEQ ID NO: 10632 - DNA, 20 bp, Homo sapiens
  source 1..20: mol_type = genomic DNA; note = Gene: LILRB2; note = Location (start to end; relative to TSS): LILRB2_28_58; note = Orientation (relative to transcription): sense; note = sgRNA Position: 54281058; note = Sequence Name: 56322-704_101_SL_seq_10632
aacctggacagcacagccag

SEQ ID NO: 10633 - DNA, 20 bp, Homo sapiens
  source 1..20: mol_type = genomic DNA; note = Gene: LILRB2; note = Location (start to end; relative to TSS): LILRB2_76_106; note = Orientation (relative to transcription): sense; note = sgRNA Position: 54281010; note = Sequence Name: 56322-704_101_SL_seq_10633
tctgcctgcagcatggacct

SEQ ID NO: 10634 - DNA, 20 bp, Homo sapiens
  source 1..20: mol_type = genomic DNA; note = Gene: LILRB2; note = Location (start to end; relative to TSS): LILRB2_24_54; note = Orientation (relative to transcription): antisense; note = sgRNA Position: 54281082; note = Sequence Name: 56322-704_101_SL_seq_10634
tgtccaggttgagctgtgtg

SEQ ID NO: 10635 - DNA, 20 bp, Homo sapiens
  source 1..20: mol_type = genomic DNA; note = Gene: LILRB2; note = Location (start to end; relative to TSS): LILRB2_75_105; note = Orientation (relative to transcription): sense; note = sgRNA Position: 54281011; note = Sequence Name: 56322-704_101_SL_seq_10635
gtctgcctgcagcatggacc

SEQ ID NO: 10636 - DNA, 20 bp, Homo sapiens
  source 1..20: mol_type = genomic DNA; note = Gene: LILRB2; note = Location (start to end; relative to TSS): LILRB2_12_42; note = Orientation (relative to transcription): sense; note = sgRNA Position: 54281074; note = Sequence Name: 56322-704_101_SL_seq_10636
ctgccacacacagctcaacc

SEQ ID NO: 10637 - DNA, 20 bp, Homo sapiens
  source 1..20: mol_type = genomic DNA; note = Gene: LILRB2; note = Location (start to end; relative to TSS): LILRB2_69_99; note = Orientation (relative to transcription): sense; note = sgRNA Position: 54281017; note = Sequence Name: 56322-704_101_SL_seq_10637
atctgagtctgcctgcagca

SEQ ID NO: 10638 - DNA, 20 bp, Homo sapiens
  source 1..20: mol_type = genomic DNA; note = Gene: LILRB2; note = Location (start to end; relative to TSS): LILRB2_9_39; note = Orientation (relative to transcription): antisense; note = sgRNA Position: 54281097; note = Sequence Name: 56322-704_101_SL_seq_10638
gtgtgtggcagtgagcacag

SEQ ID NO: 10639 - DNA, 20 bp, Homo sapiens
  source 1..20: mol_type = genomic DNA; note = Gene: LILRB2; note = Location (start to end; relative to TSS): LILRB2_39_69; note = Orientation (relative to transcription): antisense; note = sgRNA Position: 54281067; note = Sequence Name: 56322-704_101_SL_seq_10639
cgcctctggctgtgctgtcc

SEQ ID NO: 10640 - DNA, 20 bp, Homo sapiens
  source 1..20: mol_type = genomic DNA; note = Gene: LILRB3; note = Location (start to end; relative to TSS): LILRB3_52_82; note = Orientation (relative to transcription): sense; note = sgRNA Position: 54222931; note = Sequence Name: 56322-704_101_SL_seq_10640
ccttggtgagatttcaagat

SEQ ID NO: 10641 - DNA, 20 bp, Homo sapiens
  source 1..20: mol_type = genomic DNA; note = Gene: LILRB3; note = Location (start to end; relative to TSS): LILRB3_103_133; note = Orientation (relative to transcription): sense; note = sgRNA Position: 54222880; note = Sequence Name: 56322-704_101_SL_seq_10641
cccaccccacacacaagccc

SEQ ID NO: 10642 - DNA, 20 bp, Homo sapiens
  source 1..20: mol_type = genomic DNA; note = Gene: LILRB3; note = Location (start to end; relative to TSS): LILRB3_53_83; note = Orientation (relative to transcription): sense; note = sgRNA Position: 54222930; note = Sequence Name: 56322-704_101_SL_seq_10642
cttggtgagatttcaagatg

SEQ ID NO: 10643 - DNA, 20 bp, Homo sapiens
  source 1..20: mol_type = genomic DNA; note = Gene: LILRB3; note = Location (start to end; relative to TSS): LILRB3_95_125; note = Orientation (relative to transcription): antisense; note = sgRNA Position: 54222908; note = Sequence Name: 56322-704_101_SL_seq_10643
ggtggggttcctccaagact

SEQ ID NO: 10644 - DNA, 20 bp, Homo sapiens
  source 1..20: mol_type = genomic DNA; note = Gene: LILRB3; note = Location (start to end; relative to TSS): LILRB3_35_65; note = Orientation (relative to transcription): sense; note = sgRNA Position: 54222948; note = Sequence Name: 56322-704_101_SL_seq_10644
ctcacagccctgctctgcct

SEQ ID NO: 10645 - DNA, 20 bp, Homo sapiens
  source 1..20: mol_type = genomic DNA; note = Gene: LILRB3; note = Location (start to end; relative to TSS): LILRB3_74_104; note = Orientation (relative to transcription): sense; note = sgRNA Position: 54222909; note = Sequence Name: 56322-704_101_SL_seq_10645
ggagggggagatccgagtct

SEQ ID NO: 10646 - DNA, 20 bp, Homo sapiens
  source 1..20: mol_type = genomic DNA; note = Gene: LILRB3; note = Location (start to end; relative to TSS): LILRB3_30_60; note = Orientation (relative to transcription): antisense; note = sgRNA Position: 54222973; note = Sequence Name: 56322-704_101_SL_seq_10646
ggctgtgagggcgggcgtca

SEQ ID NO: 10647 - DNA, 20 bp, Homo sapiens
  source 1..20: mol_type = genomic DNA; note = Gene: LILRB3; note = Location (start to end; relative to TSS): LILRB3_61_91; note = Orientation (relative to transcription): antisense; note = sgRNA Position: 54222942; note = Sequence Name: 56322-704_101_SL_seq_10647
cccatcttgaaatctcacca

SEQ ID NO: 10648 - DNA, 20 bp, Homo sapiens
  source 1..20: mol_type = genomic DNA; note = Gene: LILRB3; note = Location (start to end; relative to TSS): LILRB3_17_47; note = Orientation (relative to transcription): antisense; note = sgRNA Position: 54222986; note = Sequence Name: 56322-704_101_SL_seq_10648
ggcgtcatggcgtctcctcc

SEQ ID NO: 10649 - DNA, 20 bp, Homo sapiens
  source 1..20: mol_type = genomic DNA; note = Gene: LILRB3; note = Location (start to end; relative to TSS): LILRB3_52_82; note = Orientation (relative to transcription): sense; note = sgRNA Position: 54222931; note = Sequence Name: 56322-704_101_SL_seq_10649
ccttggtgagatttcaagat

SEQ ID NO: 10650 - DNA, 20 bp, Homo sapiens
  source 1..20: mol_type = genomic DNA; note = Gene: LILRB4; note = Location (start to end; relative to TSS): LILRB4_47_77; note = Orientation (relative to transcription): antisense; note = sgRNA Position: 54663038; note = Sequence Name: 56322-704_101_SL_seq_10650
agccgtgaaggtggggatca

SEQ ID NO: 10651 - DNA, 20 bp, Homo sapiens
  source 1..20: mol_type = genomic DNA; note = Gene: LILRB4; note = Location (start to end; relative to TSS): LILRB4_78_108; note = Orientation (relative to transcription): antisense; note = sgRNA Position: 54663069; note = Sequence Name: 56322-704_101_SL_seq_10651
cccctctttaaatctcaccg

SEQ ID NO: 10652 - DNA, 20 bp, Homo sapiens
  source 1..20: mol_type = genomic DNA; note = Gene: LILRB4; note = Location (start to end; relative to TSS): LILRB4_36_66; note = Orientation (relative to transcription): sense; note = sgRNA Position: 54663047; note = Sequence Name: 56322-704_101_SL_seq_10652
cgccatgatccccaccttca

SEQ ID NO: 10653 - DNA, 20 bp, Homo sapiens
  source 1..20: mol_type = genomic DNA; note = Gene: LILRB4; note = Location (start to end; relative to TSS): LILRB4_70_100; note = Orientation (relative to transcription): sense; note = sgRNA Position: 54663081; note = Sequence Name: 56322-704_101_SL_seq_10653
ctcggtgagatttaaagagg

SEQ ID NO: 10654 - DNA, 20 bp, Homo sapiens
  source 1..20: mol_type = genomic DNA; note = Gene: LILRB4; note = Location (start to end; relative to TSS): LILRB4_33_63; note = Orientation (relative to transcription): antisense; note = sgRNA Position: 54663024; note = Sequence Name: 56322-704_101_SL_seq_10654
ggatcatggcgtctcctccc

SEQ ID NO: 10655 - DNA, 20 bp, Homo sapiens
  source 1..20: mol_type = genomic DNA; note = Gene: LILRB4; note = Location (start to end; relative to TSS): LILRB4_69_99; note = Orientation (relative to transcription): sense; note = sgRNA Position: 54663080; note = Sequence Name: 56322-704_101_SL_seq_10655
cctcggtgagatttaaagag

SEQ ID NO: 10656 - DNA, 20 bp, Homo sapiens
  source 1..20: mol_type = genomic DNA; note = Gene: LILRB4; note = Location (start to end; relative to TSS): LILRB4_32_62; note = Orientation (relative to transcription): antisense; note = sgRNA Position: 54663023; note = Sequence Name: 56322-704_101_SL_seq_10656
gatcatggcgtctcctccca

SEQ ID NO: 10657 - DNA, 20 bp, Homo sapiens
  source 1..20: mol_type = genomic DNA; note = Gene: LILRB4; note = Location (start to end; relative to TSS): LILRB4_68_98; note = Orientation (relative to transcription): sense; note = sgRNA Position: 54663079; note = Sequence Name: 56322-704_101_SL_seq_10657
gcctcggtgagatttaaaga

SEQ ID NO: 10658 - DNA, 20 bp, Homo sapiens
  source 1..20: mol_type = genomic DNA; note = Gene: LILRB4; note = Location (start to end; relative to TSS): LILRB4_31_61; note = Orientation (relative to transcription): antisense; note = sgRNA Position: 54663022; note = Sequence Name: 56322-704_101_SL_seq_10658
atcatggcgtctcctcccag

SEQ ID NO: 10659 - DNA, 20 bp, Homo sapiens
  source 1..20: mol_type = genomic DNA; note = Gene: LILRB4; note = Location (start to end; relative to TSS): LILRB4_67_97; note = Orientation (relative to transcription): sense; note = sgRNA Position: 54663078; note = Sequence Name: 56322-704_101_SL_seq_10659
tgcctcggtgagatttaaag

SEQ ID NO: 10660 - DNA, 20 bp, Homo sapiens
  source 1..20: mol_type = genomic DNA; note = Gene: LILRB5; note = Location (start to end; relative to TSS): LILRB5_38_68; note = Orientation (relative to transcription): sense; note = sgRNA Position: 54257211; note = Sequence Name: 56322-704_101_SL_seq_10660
gcctgcacagctgagtccag

SEQ ID NO: 10661 - DNA, 20 bp, Homo sapiens
  source 1..20: mol_type = genomic DNA; note = Gene: LILRB5; note = Location (start to end; relative to TSS): LILRB5_86_116; note = Orientation (relative to transcription): antisense; note = sgRNA Position: 54257183; note = Sequence Name: 56322-704_101_SL_seq_10661
aaatcaggactgagagggtg

SEQ ID NO: 10662 - DNA, 20 bp, Homo sapiens
  source 1..20: mol_type = genomic DNA; note = Gene: LILRB5; note = Location (start to end; relative to TSS): LILRB5_39_69; note = Orientation (relative to transcription): sense; note = sgRNA Position: 54257210; note = Sequence Name: 56322-704_101_SL_seq_10662
cctgcacagctgagtccagt

SEQ ID NO: 10663 - DNA, 20 bp, Homo sapiens
  source 1..20: mol_type = genomic DNA; note = Gene: LILRB5; note = Location (start to end; relative to TSS): LILRB5_85_115; note = Orientation (relative to transcription): antisense; note = sgRNA Position: 54257184; note = Sequence Name: 56322-704_101_SL_seq_10663
aatcaggactgagagggtga

SEQ ID NO: 10664 - DNA, 20 bp, Homo sapiens
  source 1..20: mol_type = genomic DNA; note = Gene: LILRB5; note = Location (start to end; relative to TSS): LILRB5_45_75; note = Orientation (relative to transcription): antisense; note = sgRNA Position: 54257224; note = Sequence Name: 56322-704_101_SL_seq_10664
actggactcagctgtgcagg

SEQ ID NO: 10665 - DNA, 20 bp, Homo sapiens
  source 1..20: mol_type = genomic DNA; note = Gene: LILRB5; note = Location (start to end; relative to TSS): LILRB5_84_114; note = Orientation (relative to transcription): sense; note = sgRNA Position: 54257165; note = Sequence Name: 56322-704_101_SL_seq_10665
ctctcagtcctgatttgcct

SEQ ID NO: 10666 - DNA, 20 bp, Homo sapiens
  source 1..20: mol_type = genomic DNA; note = Gene: LILRB5; note = Location (start to end; relative to TSS): LILRB5_26_56; note = Orientation (relative to transcription): antisense; note = sgRNA Position: 54257243; note = Sequence Name: 56322-704_101_SL_seq_10666
gcggatgagaccacggtgcc

SEQ ID NO: 10667 - DNA, 20 bp, Homo sapiens
  source 1..20: mol_type = genomic DNA; note = Gene: LILRB5; note = Location (start to end; relative to TSS): LILRB5_79_109; note = Orientation (relative to transcription): antisense; note = sgRNA Position: 54257190; note = Sequence Name: 56322-704_101_SL_seq_10667
gactgagagggtgagggtca

SEQ ID NO: 10668 - DNA, 20 bp, Homo sapiens
  source 1..20: mol_type = genomic DNA; note = Gene: LILRB5; note = Location (start to end; relative to TSS): LILRB5_22_52; note = Orientation (relative to transcription): antisense; note = sgRNA Position: 54257247; note = Sequence Name: 56322-704_101_SL_seq_10668
atgagaccacggtgcctggc

SEQ ID NO: 10669 - DNA, 20 bp, Homo sapiens
  source 1..20: mol_type = genomic DNA; note = Gene: LILRB5; note = Location (start to end; relative to TSS): LILRB5_63_93; note = Orientation (relative to transcription): antisense; note = sgRNA Position: 54257206; note = Sequence Name: 56322-704_101_SL_seq_10669
gtcatggcgtcagctcccac

SEQ ID NO: 10670 - DNA, 20 bp, Homo sapiens
  source 1..20: mol_type = genomic DNA; note = Gene: LINGO1; note = Location (start to end; relative to TSS): LINGO1_48_78; note = Orientation (relative to transcription): antisense; note = sgRNA Position: 77632860; note = Sequence Name: 56322-704_101_SL_seq_10670
gcccgctccggctcccgcgc

SEQ ID NO: 10671 - DNA, 20 bp, Homo sapiens
  source 1..20: mol_type = genomic DNA; note = Gene: LINGO1; note = Location (start to end; relative to TSS): LINGO1_88_118; note = Orientation (relative to transcription): sense; note = sgRNA Position: 77632800; note = Sequence Name: 56322-704_101_SL_seq_10671
gcggcggtgggtcctggtcc

SEQ ID NO: 10672 - DNA, 20 bp, Homo sapiens
  source 1..20: mol_type = genomic DNA; note = Gene: LINGO1; note = Location (start to end; relative to TSS): LINGO1_41_71; note = Orientation (relative to transcription): sense; note = sgRNA Position: 77632847; note = Sequence Name: 56322-704_101_SL_seq_10672
ggcgcgggagccggagcggg

SEQ ID NO: 10673 - DNA, 20 bp, Homo sapiens
  source 1..20: mol_type = genomic DNA; note = Gene: LINGO1; note = Location (start to end; relative to TSS): LINGO1_82_112; note = Orientation (relative to transcription): sense; note = sgRNA Position: 77632806; note = Sequence Name: 56322-704_101_SL_seq_10673
gcggcggcggcggtgggtcc

SEQ ID NO: 10674 - DNA, 20 bp, Homo sapiens
  source 1..20: mol_type = genomic DNA; note = Gene: LINGO1; note = Location (start to end; relative to TSS): LINGO1_37_67; note = Orientation (relative to transcription): sense; note = sgRNA Position: 77632851; note = Sequence Name: 56322-704_101_SL_seq_10674
agccggcgcgggagccggag

SEQ ID NO: 10675 - DNA, 20 bp, Homo sapiens
  source 1..20: mol_type = genomic DNA; note = Gene: LINGO1; note = Location (start to end; relative to TSS): LINGO1_76_106; note = Orientation (relative to transcription): sense; note = sgRNA Position: 77632812; note = Sequence Name: 56322-704_101_SL_seq_10675
caggcggcggcggcggcggt

SEQ ID NO: 10676 - DNA, 20 bp, Homo sapiens
  source 1..20: mol_type = genomic DNA; note = Gene: LINGO1; note = Location (start to end; relative to TSS): LINGO1_25_55; note = Orientation (relative to transcription): sense; note = sgRNA Position: 77632863; note = Sequence Name: 56322-704_101_SL_seq_10676
agcccgagcgggagccggcg

SEQ ID NO: 10677 - DNA, 20 bp, Homo sapiens
  source 1..20: mol_type = genomic DNA; note = Gene: LINGO1; note = Location (start to end; relative to TSS): LINGO1_60_90; note = Orientation (relative to transcription): antisense; note = sgRNA Position: 77632848; note = Sequence Name: 56322-704_101_SL_seq_10677
ctgtcgcccgccgcccgctc

SEQ ID NO: 10678 - DNA, 20 bp, Homo sapiens
  source 1..20: mol_type = genomic DNA; note = Gene: LINGO1; note = Location (start to end; relative to TSS): LINGO1_18_48; note = Orientation (relative to transcription): antisense; note = sgRNA Position: 77632890; note = Sequence Name: 56322-704_101_SL_seq_10678
tcgggctccgcgctctgcag

SEQ ID NO: 10679 - DNA, 20 bp, Homo sapiens
  source 1..20: mol_type = genomic DNA; note = Gene: LINGO1; note = Location (start to end; relative to TSS): LINGO1_48_78; note = Orientation (relative to transcription): antisense; note = sgRNA Position: 77632860; note = Sequence Name: 56322-704_101_SL_seq_10679
gcccgctccggctcccgcgc

SEQ ID NO: 10680 - DNA, 20 bp, Homo sapiens
  source 1..20: mol_type = genomic DNA; note = Gene: LINGO2; note = Location (start to end; relative to TSS): LINGO2_47_77; note = Orientation (relative to transcription): antisense; note = sgRNA Position: 29213550; note = Sequence Name: 56322-704_101_SL_seq_10680
aaggcgggacgcaggatagc

SEQ ID NO: 10681 - DNA, 20 bp, Homo sapiens
  source 1..20: mol_type = genomic DNA; note = Gene: LINGO2; note = Location (start to end; relative to TSS): LINGO2_88_118; note = Orientation (relative to transcription): antisense; note = sgRNA Position: 29213509; note = Sequence Name: 56322-704_101_SL_seq_10681
ggcggcggcgccaggtgagg

SEQ ID NO: 10682 - DNA, 20 bp, Homo sapiens
  source 1..20: mol_type = genomic DNA; note = Gene: LINGO2; note = Location (start to end; relative to TSS): LINGO2_41_71; note = Orientation (relative to transcription): antisense; note = sgRNA Position: 29213556; note = Sequence Name: 56322-704_101_SL_seq_10682
ggacgcaggatagccggctg

SEQ ID NO: 10683 - DNA, 20 bp, Homo sapiens
  source 1..20: mol_type = genomic DNA; note = Gene: LINGO2; note = Location (start to end; relative to TSS): LINGO2_80_110; note = Orientation (relative to transcription): antisense; note = sgRNA Position: 29213517; note = Sequence Name: 56322-704_101_SL_seq_10683
cgccaggtgaggaggctttg

SEQ ID NO: 10684 - DNA, 20 bp, Homo sapiens
  source 1..20: mol_type = genomic DNA; note = Gene: LINGO2; note = Location (start to end; relative to TSS): LINGO2_42_72; note = Orientation (relative to transcription): antisense; note = sgRNA Position: 29213555; note = Sequence Name: 56322-704_101_SL_seq_10684
gggacgcaggatagccggct

SEQ ID NO: 10685 - DNA, 20 bp, Homo sapiens
  source 1..20: mol_type = genomic DNA; note = Gene: LINGO2; note = Location (start to end; relative to TSS): LINGO2_77_107; note = Orientation (relative to transcription): antisense; note = sgRNA Position: 29213520; note = Sequence Name: 56322-704_101_SL_seq_10685
caggtgaggaggctttgagg

SEQ ID NO: 10686 - DNA, 20 bp, Homo sapiens
  source 1..20: mol_type = genomic DNA; note = Gene: LINGO2; note = Location (start to end; relative to TSS): LINGO2_43_73; note = Orientation (relative to transcription): antisense; note = sgRNA Position: 29213554; note = Sequence Name: 56322-704_101_SL_seq_10686
cgggacgcaggatagccggc

SEQ ID NO: 10687 - DNA, 20 bp, Homo sapiens
  source 1..20: mol_type = genomic DNA; note = Gene: LINGO2; note = Location (start to end; relative to TSS): LINGO2_74_104; note = Orientation (relative to transcription): antisense; note = sgRNA Position: 29213523; note = Sequence Name: 56322-704_101_SL_seq_10687
gtgaggaggctttgaggagg

SEQ ID NO: 10688 - DNA, 20 bp, Homo sapiens
  source 1..20: mol_type = genomic DNA; note = Gene: LINGO2; note = Location (start to end; relative to TSS): LINGO2_19_49; note = Orientation (relative to transcription): sense; note = sgRNA Position: 29213558; note = Sequence Name: 56322-704_101_SL_seq_10688
cccggctgccaagccccagc

SEQ ID NO: 10689 - DNA, 20 bp, Homo sapiens
  source 1..20: mol_type = genomic DNA; note = Gene: LINGO2; note = Location (start to end; relative to TSS): LINGO2_55_85; note = Orientation (relative to transcription): antisense; note = sgRNA Position: 29213542; note = Sequence Name: 56322-704_101_SL_seq_10689
gcggctgcaaggcgggacgc

SEQ ID NO: 10690 - DNA, 20 bp, Homo sapiens
  source 1..20: mol_type = genomic DNA; note = Gene: LINGO3; note = Location (start to end; relative to TSS): LINGO3_50_80; note = Orientation (relative to transcription): antisense; note = sgRNA Position: 2308100; note = Sequence Name: 56322-704_101_SL_seq_10690
gctccgccgcggacacggcg

SEQ ID NO: 10691 - DNA, 20 bp, Homo sapiens
  source 1..20: mol_type = genomic DNA; note = Gene: LINGO3; note = Location (start to end; relative to TSS): LINGO3_97_127; note = Orientation (relative to transcription): sense; note = sgRNA Position: 2308033; note = Sequence Name: 56322-704_101_SL_seq_10691
tggggcgcgcccgcagacct

SEQ ID NO: 10692 - DNA, 20 bp, Homo sapiens
  source 1..20: mol_type = genomic DNA; note = Gene: LINGO3; note = Location (start to end; relative to TSS): LINGO3_49_79; note = Orientation (relative to transcription): sense; note = sgRNA Position: 2308081; note = Sequence Name: 56322-704_101_SL_seq_10692
tgtccgcggcggagccgccc

SEQ ID NO: 10693 - DNA, 20 bp, Homo sapiens
  source 1..20: mol_type = genomic DNA; note = Gene: LINGO3; note = Location (start to end; relative to TSS): LINGO3_79_109; note = Orientation (relative to transcription): sense; note = sgRNA Position: 2308051; note = Sequence Name: 56322-704_101_SL_seq_10693
ccgtgccggggcccggcgtg

SEQ ID NO: 10694 - DNA, 20 bp, Homo sapiens
  source 1..20: mol_type = genomic DNA; note = Gene: LINGO3; note = Location (start to end; relative to TSS): LINGO3_43_73; note = Orientation (relative to transcription): antisense; note = sgRNA Position: 2308107; note = Sequence Name: 56322-704_101_SL_seq_10694
cgcggacacggcgcgggctg

SEQ ID NO: 10695 - DNA, 20 bp, Homo sapiens
  source 1..20: mol_type = genomic DNA; note = Gene: LINGO3; note = Location (start to end; relative to TSS): LINGO3_75_105; note = Orientation (relative to transcription): antisense; note = sgRNA Position: 2308075; note = Sequence Name: 56322-704_101_SL_seq_10695
cccggcacggccactcacct

SEQ ID NO: 10696 - DNA, 20 bp, Homo sapiens
  source 1..20: mol_type = genomic DNA; note = Gene: LINGO3; note = Location (start to end; relative to TSS): LINGO3_38_68; note = Orientation (relative to transcription): sense; note = sgRNA Position: 2308092; note = Sequence Name: 56322-704_101_SL_seq_10696
agcccgcgccgtgtccgcgg

SEQ ID NO: 10697 - DNA, 20 bp, Homo sapiens
  source 1..20: mol_type = genomic DNA; note = Gene: LINGO3; note = Location (start to end; relative to TSS): LINGO3_72_102; note = Orientation (relative to transcription): antisense; note = sgRNA Position: 2308078; note = Sequence Name: 56322-704_101_SL_seq_10697
ggcacggccactcacctggg

SEQ ID NO: 10698 - DNA, 20 bp, Homo sapiens
  source 1..20: mol_type = genomic DNA; note = Gene: LINGO3; note = Location (start to end; relative to TSS): LINGO3_35_65; note = Orientation (relative to transcription): sense; note = sgRNA Position: 2308095; note = Sequence Name: 56322-704_101_SL_seq_10698
cgcagcccgcgccgtgtccg

SEQ ID NO: 10699 - DNA, 20 bp, Homo sapiens
  source 1..20: mol_type = genomic DNA; note = Gene: LINGO3; note = Location (start to end; relative to TSS): LINGO3_65_95; note = Orientation (relative to transcription): sense; note = sgRNA Position: 2308065; note = Sequence Name: 56322-704_101_SL_seq_10699
gcccaggtgagtggccgtgc

SEQ ID NO: 10700 - DNA, 20 bp, Homo sapiens
  source 1..20: mol_type = genomic DNA; note = Gene: LINGO4; note = Location (start to end; relative to TSS): LINGO4_47_77; note = Orientation (relative to transcription): sense; note = sgRNA Position: 151805348; note = Sequence Name: 56322-704_101_SL_seq_10700
agccgggcagccaggcagcg

SEQ ID NO: 10701 - DNA, 20 bp, Homo sapiens
  source 1..20: mol_type = genomic DNA; note = Gene: LINGO4; note = Location (start to end; relative to TSS): LINGO4_82_112; note = Orientation (relative to transcription): sense; note = sgRNA Position: 151805313; note = Sequence Name: 56322-704_101_SL_seq_10701
agggaaggtgcaggggcctg

SEQ ID NO: 10702 - DNA, 20 bp, Homo sapiens
  source 1..20: mol_type = genomic DNA; note = Gene: LINGO4; note = Location (start to end; relative to TSS): LINGO4_39_69; note = Orientation (relative to transcription): sense; note = sgRNA Position: 151805356; note = Sequence Name: 56322-704_101_SL_seq_10702
caggcagcagccgggcagcc

SEQ ID NO: 10703 - DNA, 20 bp, Homo sapiens
  source 1..20: mol_type = genomic DNA; note = Gene: LINGO4; note = Location (start to end; relative to TSS): LINGO4_73_103; note = Orientation (relative to transcription): sense; note = sgRNA Position: 151805322; note = Sequence Name: 56322-704_101_SL_seq_10703
gaggcacacagggaaggtgc

SEQ ID NO: 10704 - DNA, 20 bp, Homo sapiens
  source 1..20: mol_type = genomic DNA; note = Gene: LINGO4; note = Location (start to end; relative to TSS): LINGO4_31_61; note = Orientation (relative to transcription): sense; note = sgRNA Position: 151805364; note = Sequence Name: 56322-704_101_SL_seq_10704
agcagcggcaggcagcagcc

SEQ ID NO: 10705 - DNA, 20 bp, Homo sapiens
  source 1..20: mol_type = genomic DNA; note = Gene: LINGO4; note = Location (start to end; relative to TSS): LINGO4_62_92; note = Orientation (relative to transcription): sense; note = sgRNA Position: 151805333; note = Sequence Name: 56322-704_101_SL_seq_10705
cagcgggggttgaggcacac

SEQ ID NO: 10706 - DNA, 20 bp, Homo sapiens
  source 1..20: mol_type = genomic DNA; note = Gene: LINGO4; note = Location (start to end; relative to TSS): LINGO4_20_50; note = Orientation (relative to transcription): sense; note = sgRNA Position: 151805375; note = Sequence Name: 56322-704_101_SL_seq_10706
acagcagcagcagcagcggc

SEQ ID NO: 10707 - DNA, 20 bp, Homo sapiens
  source 1..20: mol_type = genomic DNA; note = Gene: LINGO4; note = Location (start to end; relative to TSS): LINGO4_54_84; note = Orientation (relative to transcription): sense; note = sgRNA Position: 151805341; note = Sequence Name: 56322-704_101_SL_seq_10707
cagccaggcagcgggggttg

SEQ ID NO: 10708 - DNA, 20 bp, Homo sapiens
  source 1..20: mol_type = genomic DNA; note = Gene: LINGO4; note = Location (start to end; relative to TSS): LINGO4_18_48; note = Orientation (relative to transcription): antisense; note = sgRNA Position: 151805397; note = Sequence Name: 56322-704_101_SL_seq_10708
tgctgctgctgttgctgctg

SEQ ID NO: 10709 - DNA, 20 bp, Homo sapiens
  source 1..20: mol_type = genomic DNA; note = Gene: LINGO4; note = Location (start to end; relative to TSS): LINGO4_48_78; note = Orientation (relative to transcription): sense; note = sgRNA Position: 151805347; note = Sequence Name: 56322-704_101_SL_seq_10709
gccgggcagccaggcagcgg

SEQ ID NO: 10710 - DNA, 20 bp, Homo sapiens
  source 1..20: mol_type = genomic DNA; note = Gene: LRFN1; note = Location (start to end; relative to TSS): LRFN1_50_80; note = Orientation (relative to transcription): sense; note = sgRNA Position: 39320789; note = Sequence Name: 56322-704_101_SL_seq_10710
ccccccgggctgggtgagcg

SEQ ID NO: 10711 - DNA, 20 bp, Homo sapiens
  source 1..20: mol_type = genomic DNA; note = Gene: LRFN1; note = Location (start to end; relative to TSS): LRFN1_92_122; note = Orientation (relative to transcription): antisense; note = sgRNA Position: 39320767; note = Sequence Name: 56322-704_101_SL_seq_10711
cgcccccgcccgccgctccc

SEQ ID NO: 10712 - DNA, 20 bp, Homo sapiens
  source 1..20: mol_type = genomic DNA; note = Gene: LRFN1; note = Location (start to end; relative to TSS): LRFN1_51_81; note = Orientation (relative to transcription): antisense; note = sgRNA Position: 39320808; note = Sequence Name: 56322-704_101_SL_seq_10712
acccagcccgggggggcccc

SEQ ID NO: 10713 - DNA, 20 bp, Homo sapiens
  source 1..20: mol_type = genomic DNA; note = Gene: LRFN1; note = Location (start to end; relative to TSS): LRFN1_87_117; note = Orientation (relative to transcription): sense; note = sgRNA Position: 39320752; note = Sequence Name: 56322-704_101_SL_seq_10713
ggagcggcgggcgggggcgc

SEQ ID NO: 10714 - DNA, 20 bp, Homo sapiens
  source 1..20: mol_type = genomic DNA; note = Gene: LRFN1; note = Location (start to end; relative to TSS): LRFN1_36_66; note = Orientation (relative to transcription): sense; note = sgRNA Position: 39320803; note = Sequence Name: 56322-704_101_SL_seq_10714
gccgggcccggggccccccc

SEQ ID NO: 10715 - DNA, 20 bp, Homo sapiens
  source 1..20: mol_type = genomic DNA; note = Gene: LRFN1; note = Location (start to end; relative to TSS): LRFN1_66_96; note = Orientation (relative to transcription): sense; note = sgRNA Position: 39320773; note = Sequence Name: 56322-704_101_SL_seq_10715
agcgcggcctgcagcggccc

SEQ ID NO: 10716 - DNA, 20 bp, Homo sapiens
  source 1..20: mol_type = genomic DNA; note = Gene: LRFN1; note = Location (start to end; relative to TSS): LRFN1_14_44; note = Orientation (relative to transcription): sense; note = sgRNA Position: 39320825; note = Sequence Name: 56322-704_101_SL_seq_10716
ggagcgaggcagcggcggcg

SEQ ID NO: 10717 - DNA, 20 bp, Homo sapiens
  source 1..20: mol_type = genomic DNA; note = Gene: LRFN1; note = Location (start to end; relative to TSS): LRFN1_51_81; note = Orientation (relative to transcription): antisense; note = sgRNA Position: 39320808; note = Sequence Name: 56322-704_101_SL_seq_10717
acccagcccgggggggcccc

SEQ ID NO: 10718 - DNA, 20 bp, Homo sapiens
  source 1..20: mol_type = genomic DNA; note = Gene: LRFN1; note = Location (start to end; relative to TSS): LRFN1_11_41; note = Orientation (relative to transcription): antisense; note = sgRNA Position: 39320848; note = Sequence Name: 56322-704_101_SL_seq_10718
tgcctcgctccgcgccatgg

SEQ ID NO: 10719 - DNA, 20 bp, Homo sapiens
  source 1..20: mol_type = genomic DNA; note = Gene: LRFN1; note = Location (start to end; relative to TSS): LRFN1_50_80; note = Orientation (relative to transcription): sense; note = sgRNA Position: 39320789; note = Sequence Name: 56322-704_101_SL_seq_10719
ccccccgggctgggtgagcg

SEQ ID NO: 10720 - DNA, 20 bp, Homo sapiens
  source 1..20: mol_type = genomic DNA; note = Gene: LRFN2; note = Location (start to end; relative to TSS): LRFN2_53_83; note = Orientation (relative to transcription): sense; note = sgRNA Position: 40587287; note = Sequence Name: 56322-704_101_SL_seq_10720
tccaagatgcccgaggttcc

SEQ ID NO: 10721 - DNA, 20 bp, Homo sapiens
  source 1..20: mol_type = genomic DNA; note = Gene: LRFN2; note = Location (start to end; relative to TSS): LRFN2_91_121; note = Orientation (relative to transcription): sense; note = sgRNA Position: 40587249; note = Sequence Name: 56322-704_101_SL_seq_10721
ttcgatccggaaaatcctac

SEQ ID NO: 10722 - DNA, 20 bp, Homo sapiens
  source 1..20: mol_type = genomic DNA; note = Gene: LRFN2; note = Location (start to end; relative to TSS): LRFN2_54_84; note = Orientation (relative to transcription): antisense; note = sgRNA Position: 40587306; note = Sequence Name: 56322-704_101_SL_seq_10722
ctcgggcatcttggaatgtg

SEQ ID NO: 10723 - DNA, 20 bp, Homo sapiens
  source 1..20: mol_type = genomic DNA; note = Gene: LRFN2; note = Location (start to end; relative to TSS): LRFN2_90_120; note = Orientation (relative to transcription): antisense; note = sgRNA Position: 40587270; note = Sequence Name: 56322-704_101_SL_seq_10723
tttccggatcgaagaacccc

SEQ ID NO: 10724 - DNA, 20 bp, Homo sapiens
  source 1..20: mol_type = genomic DNA; note = Gene: LRFN2; note = Location (start to end; relative to TSS): LRFN2_46_76; note = Orientation (relative to transcription): sense; note = sgRNA Position: 40587294; note = Sequence Name: 56322-704_101_SL_seq_10724
cccacattccaagatgcccg

SEQ ID NO: 10725 - DNA, 20 bp, Homo sapiens
  source 1..20: mol_type = genomic DNA; note = Gene: LRFN2; note = Location (start to end; relative to TSS): LRFN2_78_108; note = Orientation (relative to transcription): sense; note = sgRNA Position: 40587262; note = Sequence Name: 56322-704_101_SL_seq_10725
atgcctggggttcttcgatc

SEQ ID NO: 10726 - DNA, 20 bp, Homo sapiens
  source 1..20: mol_type = genomic DNA; note = Gene: LRFN2; note = Location (start to end; relative to TSS): LRFN2_26_56; note = Orientation (relative to transcription): antisense; note = sgRNA Position: 40587334; note = Sequence Name: 56322-704_101_SL_seq_10726
tcaagttcagacgagcctgc

SEQ ID NO: 10727 - DNA, 20 bp, Homo sapiens
  source 1..20: mol_type = genomic DNA; note = Gene: LRFN2; note = Location (start to end; relative to TSS): LRFN2_56_86; note = Orientation (relative to transcription): antisense; note = sgRNA Position: 40587304; note = Sequence Name: 56322-704_101_SL_seq_10727
acctcgggcatcttggaatg

SEQ ID NO: 10728 - DNA, 20 bp, Homo sapiens
  source 1..20: mol_type = genomic DNA; note = Gene: LRFN2; note = Location (start to end; relative to TSS): LRFN2_25_55; note = Orientation (relative to transcription): antisense; note = sgRNA Position: 40587335; note = Sequence Name: 56322-704_101_SL_seq_10728
caagttcagacgagcctgcc

SEQ ID NO: 10729 - DNA, 20 bp, Homo sapiens
  source 1..20: mol_type = genomic DNA; note = Gene: LRFN2; note = Location (start to end; relative to TSS): LRFN2_55_85; note = Orientation (relative to transcription): antisense; note = sgRNA Position: 40587305; note = Sequence Name: 56322-704_101_SL_seq_10729
cctcgggcatcttggaatgt

SEQ ID NO: 10730 - DNA, 20 bp, Homo sapiens
  source 1..20: mol_type = genomic DNA; note = Gene: LRFN3; note = Location (start to end; relative to TSS): LRFN3_32_62; note = Orientation (relative to transcription): sense; note = sgRNA Position: 35936432; note = Sequence Name: 56322-704_101_SL_seq_10730
gccgcgggagcgcctggacc

SEQ ID NO: 10731 - DNA, 20 bp, Homo sapiens
  source 1..20: mol_type = genomic DNA; note = Gene: LRFN3; note = Location (start to end; relative to TSS): LRFN3_81_111; note = Orientation (relative to transcription): sense; note = sgRNA Position: 35936481; note = Sequence Name: 56322-704_101_SL_seq_10731
ccccgcctcggccccggcgg

SEQ ID NO: 10732 - DNA, 20 bp, Homo sapiens
  source 1..20: mol_type = genomic DNA; note = Gene: LRFN3; note = Location (start to end; relative to TSS): LRFN3_30_60; note = Orientation (relative to transcription): antisense; note = sgRNA Position: 35936410; note = Sequence Name: 56322-704_101_SL_seq_10732
cgctcccgcggcctcctcgc

SEQ ID NO: 10733 - DNA, 20 bp, Homo sapiens
  source 1..20: mol_type = genomic DNA; note = Gene: LRFN3; note = Location (start to end; relative to TSS): LRFN3_80_110; note = Orientation (relative to transcription): sense; note = sgRNA Position: 35936480; note = Sequence Name: 56322-704_101_SL_seq_10733
cccccgcctcggccccggcg

SEQ ID NO: 10734 - DNA, 20 bp, Homo sapiens
  source 1..20: mol_type = genomic DNA; note = Gene: LRFN3; note = Location (start to end; relative to TSS): LRFN3_26_56; note = Orientation (relative to transcription): sense; note = sgRNA Position: 35936426; note = Sequence Name: 56322-704_101_SL_seq_10734
gaggaggccgcgggagcgcc

SEQ ID NO: 10735 - DNA, 20 bp, Homo sapiens
  source 1..20: mol_type = genomic DNA; note = Gene: LRFN3; note = Location (start to end; relative to TSS): LRFN3_78_108; note = Orientation (relative to transcription): sense; note = sgRNA Position: 35936478; note = Sequence Name: 56322-704_101_SL_seq_10735
ggcccccgcctcggccccgg

SEQ ID NO: 10736 - DNA, 20 bp, Homo sapiens
  source 1..20: mol_type = genomic DNA; note = Gene: LRFN3; note = Location (start to end; relative to TSS): LRFN3_21_51; note = Orientation (relative to transcription): antisense; note = sgRNA Position: 35936401; note = Sequence Name: 56322-704_101_SL_seq_10736
ggcctcctcgccggcaaccc

SEQ ID NO: 10737 - DNA, 20 bp, Homo sapiens
  source 1..20: mol_type = genomic DNA; note = Gene: LRFN3; note = Location (start to end; relative to TSS): LRFN3_69_99; note = Orientation (relative to transcription): sense; note = sgRNA Position: 35936469; note = Sequence Name: 56322-704_101_SL_seq_10737
cccccgcccggcccccgcct

SEQ ID NO: 10738 - DNA, 20 bp, Homo sapiens
  source 1..20: mol_type = genomic DNA; note = Gene: LRFN3; note = Location (start to end; relative to TSS): LRFN3_20_50; note = Orientation (relative to transcription): antisense; note = sgRNA Position: 35936400; note = Sequence Name: 56322-704_101_SL_seq_10738
gcctcctcgccggcaaccca

SEQ ID NO: 10739 - DNA, 20 bp, Homo sapiens
  source 1..20: mol_type = genomic DNA; note = Gene: LRFN3; note = Location (start to end; relative to TSS): LRFN3_59_89; note = Orientation (relative to transcription): antisense; note = sgRNA Position: 35936439; note = Sequence Name: 56322-704_101_SL_seq_10739
ggggccgggctgggcgggcc

SEQ ID NO: 10740 - DNA, 20 bp, Homo sapiens
  source 1..20: mol_type = genomic DNA; note = Gene: LRFN4; note = Location (start to end; relative to TSS): LRFN4_32_62; note = Orientation (relative to transcription): antisense; note = sgRNA Position: 66857102; note = Sequence Name: 56322-704_101_SL_seq_10740
tttcccggcgcggttagcgg

SEQ ID NO: 10741 - DNA, 20 bp, Homo sapiens
  source 1..20: mol_type = genomic DNA; note = Gene: LRFN4; note = Location (start to end; relative to TSS): LRFN4_67_97; note = Orientation (relative to transcription): antisense; note = sgRNA Position: 66857137; note = Sequence Name: 56322-704_101_SL_seq_10741
gcccgcggccccggctcgct

SEQ ID NO: 10742 - DNA, 20 bp, Homo sapiens
  source 1..20: mol_type = genomic DNA; note = Gene: LRFN4; note = Location (start to end; relative to TSS): LRFN4_29_59; note = Orientation (relative to transcription): antisense; note = sgRNA Position: 66857099; note = Sequence Name: 56322-704_101_SL_seq_10742
cccggcgcggttagcggtgg

SEQ ID NO: 10743 - DNA, 20 bp, Homo sapiens
  source 1..20: mol_type = genomic DNA; note = Gene: LRFN4; note = Location (start to end; relative to TSS): LRFN4_60_90; note = Orientation (relative to transcription): antisense; note = sgRNA Position: 66857130; note = Sequence Name: 56322-704_101_SL_seq_10743
gccccggctcgctcggttcc

SEQ ID NO: 10744 - DNA, 20 bp, Homo sapiens
  source 1..20: mol_type = genomic DNA; note = Gene: LRFN4; note = Location (start to end; relative to TSS): LRFN4_26_56; note = Orientation (relative to transcription): antisense; note = sgRNA Position: 66857096; note = Sequence Name: 56322-704_101_SL_seq_10744
ggcgcggttagcggtggcgg

SEQ ID NO: 10745 - DNA, 20 bp, Homo sapiens
  source 1..20: mol_type = genomic DNA; note = Gene: LRFN4; note = Location (start to end; relative to TSS): LRFN4_57_87; note = Orientation (relative to transcription): sense; note = sgRNA Position: 66857147; note = Sequence Name: 56322-704_101_SL_seq_10745
accgagcgagccggggccgc

SEQ ID NO: 10746 - DNA, 20 bp, Homo sapiens
  source 1..20: mol_type = genomic DNA; note = Gene: LRFN4; note = Location (start to end; relative to TSS): LRFN4_20_50; note = Orientation (relative to transcription): sense; note = sgRNA Position: 66857110; note = Sequence Name: 56322-704_101_SL_seq_10746
ccgccaccgctaaccgcgcc

SEQ ID NO: 10747 - DNA, 20 bp, Homo sapiens
  source 1..20: mol_type = genomic DNA; note = Gene: LRFN4; note = Location (start to end; relative to TSS): LRFN4_50_80; note = Orientation (relative to transcription): sense; note = sgRNA Position: 66857140; note = Sequence Name: 56322-704_101_SL_seq_10747
gccgggaaccgagcgagccg

SEQ ID NO: 10748 - DNA, 20 bp, Homo sapiens
  source 1..20: mol_type = genomic DNA; note = Gene: LRFN4; note = Location (start to end; relative to TSS): LRFN4_19_49; note = Orientation (relative to transcription): antisense; note = sgRNA Position: 66857089; note = Sequence Name: 56322-704_101_SL_seq_10748
ttagcggtggcggcggcgac

SEQ ID NO: 10749 - DNA, 20 bp, Homo sapiens
  source 1..20: mol_type = genomic DNA; note = Gene: LRFN4; note = Location (start to end; relative to TSS): LRFN4_49_79; note = Orientation (relative to transcription): sense; note = sgRNA Position: 66857139; note = Sequence Name: 56322-704_101_SL_seq_10749
tgccgggaaccgagcgagcc

SEQ ID NO: 10750 - DNA, 20 bp, Homo sapiens
  source 1..20: mol_type = genomic DNA; note = Gene: LRFN5; note = Location (start to end; relative to TSS): LRFN5_41_71; note = Orientation (relative to transcription): antisense; note = sgRNA Position: 41606923; note = Sequence Name: 56322-704_101_SL_seq_10750
acggcggcctcctggccgcg

SEQ ID NO: 10751 - DNA, 20 bp, Homo sapiens
  source 1..20: mol_type = genomic DNA; note = Gene: LRFN5; note = Location (start to end; relative to TSS): LRFN5_86_116; note = Orientation (relative to transcription): sense; note = sgRNA Position: 41606988; note = Sequence Name: 56322-704_101_SL_seq_10751
tcccgggtccgccccggccg

SEQ ID NO: 10752 - DNA, 20 bp, Homo sapiens
  source 1..20: mol_type = genomic DNA; note = Gene: LRFN5; note = Location (start to end; relative to TSS): LRFN5_49_79; note = Orientation (relative to transcription): antisense; note = sgRNA Position: 41606931; note = Sequence Name: 56322-704_101_SL_seq_10752
tgtgggcaacggcggcctcc

SEQ ID NO: 10753 - DNA, 20 bp, Homo sapiens
  source 1..20: mol_type = genomic DNA; note = Gene: LRFN5; note = Location (start to end; relative to TSS): LRFN5_80_110; note = Orientation (relative to transcription): sense; note = sgRNA Position: 41606982; note = Sequence Name: 56322-704_101_SL_seq_10753
cccagctcccgggtccgccc

SEQ ID NO: 10754 - DNA, 20 bp, Homo sapiens
  source 1..20: mol_type = genomic DNA; note = Gene: LRFN5; note = Location (start to end; relative to TSS): LRFN5_25_55; note = Orientation (relative to transcription): sense; note = sgRNA Position: 41606927; note = Sequence Name: 56322-704_101_SL_seq_10754
ctcagttccacgcggccagg

SEQ ID NO: 10755 - DNA, 20 bp, Homo sapiens
  source 1..20: mol_type = genomic DNA; note = Gene: LRFN5; note = Location (start to end; relative to TSS): LRFN5_57_87; note = Orientation (relative to transcription): antisense; note = sgRNA Position: 41606939; note = Sequence Name: 56322-704_101_SL_seq_10755
gcgtcgcgtgtgggcaacgg

SEQ ID NO: 10756 - DNA, 20 bp, Homo sapiens
  source 1..20: mol_type = genomic DNA; note = Gene: LRFN5; note = Location (start to end; relative to TSS): LRFN5_22_52; note = Orientation (relative to transcription): sense; note = sgRNA Position: 41606924; note = Sequence Name: 56322-704_101_SL_seq_10756
gggctcagttccacgcggcc

SEQ ID NO: 10757 - DNA, 20 bp, Homo sapiens
  source 1..20: mol_type = genomic DNA; note = Gene: LRFN5; note = Location (start to end; relative to TSS): LRFN5_53_83; note = Orientation (relative to transcription): sense; note = sgRNA Position: 41606955; note = Sequence Name: 56322-704_101_SL_seq_10757
gttgcccacacgcgacgctt

SEQ ID NO: 10758 - DNA, 20 bp, Homo sapiens
  source 1..20: mol_type = genomic DNA; note = Gene: LRFN5; note = Location (start to end; relative to TSS): LRFN5_17_47; note = Orientation (relative to transcription): sense; note = sgRNA Position: 41606919; note = Sequence Name: 56322-704_101_SL_seq_10758
gcgcagggctcagttccacg

SEQ ID NO: 10759 - DNA, 20 bp, Homo sapiens
  source 1..20: mol_type = genomic DNA; note = Gene: LRFN5; note = Location (start to end; relative to TSS): LRFN5_49_79; note = Orientation (relative to transcription): antisense; note = sgRNA Position: 41606931; note = Sequence Name: 56322-704_101_SL_seq_10759
tgtgggcaacggcggcctcc

SEQ ID NO: 10760 - DNA, 20 bp, Homo sapiens
  source 1..20: mol_type = genomic DNA; note = Gene: LRIG1; note = Location (start to end; relative to TSS): LRIG1_58_88; note = Orientation (relative to transcription): antisense; note = sgRNA Position: 66500960; note = Sequence Name: 56322-704_101_SL_seq_10760
gcgcagcctcgggttccgca

SEQ ID NO: 10761 - DNA, 20 bp, Homo sapiens
  source 1..20: mol_type = genomic DNA; note = Gene: LRIG1; note = Location (start to end; relative to TSS): LRIG1_90_120; note = Orientation (relative to transcription): sense; note = sgRNA Position: 66500908; note = Sequence Name: 56322-704_101_SL_seq_10761
gccgcggcgtggggacagcg

SEQ ID NO: 10762 - DNA, 20 bp, Homo sapiens
  source 1..20: mol_type = genomic DNA; note = Gene: LRIG1; note = Location (start to end; relative to TSS): LRIG1_43_73; note = Orientation (relative to transcription): sense; note = sgRNA Position: 66500955; note = Sequence Name: 56322-704_101_SL_seq_10762
gaggagccgtgcggaacccg

SEQ ID NO: 10763 - DNA, 20 bp, Homo sapiens
  source 1..20: mol_type = genomic DNA; note = Gene: LRIG1; note = Location (start to end; relative to TSS): LRIG1_79_109; note = Orientation (relative to transcription): sense; note = sgRNA Position: 66500919; note = Sequence Name: 56322-704_101_SL_seq_10763
cgcgctctctggccgcggcg

SEQ ID NO: 10764 - DNA, 20 bp, Homo sapiens
  source 1..20: mol_type = genomic DNA; note = Gene: LRIG1; note = Location (start to end; relative to TSS): LRIG1_34_64; note = Orientation (relative to transcription): sense; note = sgRNA Position: 66500964; note = Sequence Name: 56322-704_101_SL_seq_10764
tgctgcgcggaggagccgtg

SEQ ID NO: 10765 - DNA, 20 bp, Homo sapiens
  source 1..20: mol_type = genomic DNA; note = Gene: LRIG1; note = Location (start to end; relative to TSS): LRIG1_74_104; note = Orientation (relative to transcription): sense; note = sgRNA Position: 66500924; note = Sequence Name: 56322-704_101_SL_seq_10765
gcgcgcgcgctctctggccg

SEQ ID NO: 10766 - DNA, 20 bp, Homo sapiens
  source 1..20: mol_type = genomic DNA; note = Gene: LRIG1; note = Location (start to end; relative to TSS): LRIG1_21_51; note = Orientation (relative to transcription): sense; note = sgRNA Position: 66500977; note = Sequence Name: 56322-704_101_SL_seq_10766
tcggcgggactcttgctgcg

SEQ ID NO: 10767 - DNA, 20 bp, Homo sapiens
  source 1..20: mol_type = genomic DNA; note = Gene: LRIG1; note = Location (start to end; relative to TSS): LRIG1_68_98; note = Orientation (relative to transcription): antisense; note = sgRNA Position: 66500950; note = Sequence Name: 56322-704_101_SL_seq_10767
gcgcgcgcgcgcgcagcctc

SEQ ID NO: 10768 - DNA, 20 bp, Homo sapiens
  source 1..20: mol_type = genomic DNA; note = Gene: LRIG1; note = Location (start to end; relative to TSS): LRIG1_24_54; note = Orientation (relative to transcription): sense; note = sgRNA Position: 66500974; note = Sequence Name: 56322-704_101_SL_seq_10768
gcgggactcttgctgcgcgg

SEQ ID NO: 10769 - DNA, 20 bp, Homo sapiens
  source 1..20: mol_type = genomic DNA; note = Gene: LRIG1; note = Location (start to end; relative to TSS): LRIG1_58_88; note = Orientation (relative to transcription): antisense; note = sgRNA Position: 66500960; note = Sequence Name: 56322-704_101_SL_seq_10769
gcgcagcctcgggttccgca

SEQ ID NO: 10770 - DNA, 20 bp, Homo sapiens
  source 1..20: mol_type = genomic DNA; note = Gene: LRIG2; note = Location (start to end; relative to TSS): LRIG2_42_72; note = Orientation (relative to transcription): antisense; note = sgRNA Position: 113073246; note = Sequence Name: 56322-704_101_SL_seq_10770
gcagacgcagcgcgacagcg

SEQ ID NO: 10771 - DNA, 20 bp, Homo sapiens
  source 1..20: mol_type = genomic DNA; note = Gene: LRIG2; note = Location (start to end; relative to TSS): LRIG2_72_102; note = Orientation (relative to transcription): sense; note = sgRNA Position: 113073296; note = Sequence Name: 56322-704_101_SL_seq_10771
gatggtacagccttcagccg

SEQ ID NO: 10772 - DNA, 20 bp, Homo sapiens
  source 1..20: mol_type = genomic DNA; note = Gene: LRIG2; note = Location (start to end; relative to TSS): LRIG2_35_65; note = Orientation (relative to transcription): antisense; note = sgRNA Position: 113073239; note = Sequence Name: 56322-704_101_SL_seq_10772
cagcgcgacagcggggtcga

SEQ ID NO: 10773 - DNA, 20 bp, Homo sapiens
  source 1..20: mol_type = genomic DNA; note = Gene: LRIG2; note = Location (start to end; relative to TSS): LRIG2_71_101; note = Orientation (relative to transcription): sense; note = sgRNA Position: 113073295; note = Sequence Name: 56322-704_101_SL_seq_10773
agatggtacagccttcagcc

SEQ ID NO: 10774 - DNA, 20 bp, Homo sapiens
  source 1..20: mol_type = genomic DNA; note = Gene: LRIG2; note = Location (start to end; relative to TSS): LRIG2_30_60; note = Orientation (relative to transcription): antisense; note = sgRNA Position: 113073234; note = Sequence Name: 56322-704_101_SL_seq_10774
cgacagcggggtcgacggcc

SEQ ID NO: 10775 - DNA, 20 bp, Homo sapiens
  source 1..20: mol_type = genomic DNA; note = Gene: LRIG2; note = Location (start to end; relative to TSS): LRIG2_70_100; note = Orientation (relative to transcription): sense; note = sgRNA Position: 113073294; note = Sequence Name: 56322-704_101_SL_seq_10775
tagatggtacagccttcagc

SEQ ID NO: 10776 - DNA, 20 bp, Homo sapiens
  source 1..20: mol_type = genomic DNA; note = Gene: LRIG2; note = Location (start to end; relative to TSS): LRIG2_29_59; note = Orientation (relative to transcription): antisense; note = sgRNA Position: 113073233; note = Sequence Name: 56322-704_101_SL_seq_10776
gacagcggggtcgacggcct

SEQ ID NO: 10777 - DNA, 20 bp, Homo sapiens
  source 1..20: mol_type = genomic DNA; note = Gene: LRIG2; note = Location (start to end; relative to TSS): LRIG2_66_96; note = Orientation (relative to transcription): antisense; note = sgRNA Position: 113073270; note = Sequence Name: 56322-704_101_SL_seq_10777
gtaccatctaaaggcatgca

SEQ ID NO: 10778 - DNA, 20 bp, Homo sapiens
  source 1..20: mol_type = genomic DNA; note = Gene: LRIG2; note = Location (start to end; relative to TSS): LRIG2_21_51; note = Orientation (relative to transcription): antisense; note = sgRNA Position: 113073225; note = Sequence Name: 56322-704_101_SL_seq_10778
ggtcgacggcctgggacaca

SEQ ID NO: 10779 - DNA, 20 bp, Homo sapiens
  source 1..20: mol_type = genomic DNA; note = Gene: LRIG2; note = Location (start to end; relative to TSS): LRIG2_54_84; note = Orientation (relative to transcription): sense; note = sgRNA Position: 113073278; note = Sequence Name: 56322-704_101_SL_seq_10779
gctccttgcatgcctttaga

SEQ ID NO: 10780 - DNA, 20 bp, Homo sapiens
  source 1..20: mol_type = genomic DNA; note = Gene: LRIG3; note = Location (start to end; relative to TSS): LRIG3_62_92; note = Orientation (relative to transcription): sense; note = sgRNA Position: 58920418; note = Sequence Name: 56322-704_101_SL_seq_10780
tcggtttccctcctgctgtt

SEQ ID NO: 10781 - DNA, 20 bp, Homo sapiens
  source 1..20: mol_type = genomic DNA; note = Gene: LRIG3; note = Location (start to end; relative to TSS): LRIG3_111_141; note = Orientation (relative to transcription): sense; note = sgRNA Position: 58920369; note = Sequence Name: 56322-704_101_SL_seq_10781
agtaaaagaaggaattgacc

SEQ ID NO: 10782 - DNA, 20 bp, Homo sapiens
  source 1..20: mol_type = genomic DNA; note = Gene: LRIG3; note = Location (start to end; relative to TSS): LRIG3_64_94; note = Orientation (relative to transcription): sense; note = sgRNA Position: 58920416; note = Sequence Name: 56322-704_101_SL_seq_10782
ggtttccctcctgctgtttg

SEQ ID NO: 10783 - DNA, 20 bp, Homo sapiens
  source 1..20: mol_type = genomic DNA; note = Gene: LRIG3; note = Location (start to end; relative to TSS): LRIG3_110_140; note = Orientation (relative to transcription): sense; note = sgRNA Position: 58920370; note = Sequence Name: 56322-704_101_SL_seq_10783
gagtaaaagaaggaattgac

SEQ ID NO: 10784 - DNA, 20 bp, Homo sapiens
  source 1..20: mol_type = genomic DNA; note = Gene: LRIG3; note = Location (start to end; relative to TSS): LRIG3_65_95; note = Orientation (relative to transcription): sense; note = sgRNA Position: 58920415; note = Sequence Name: 56322-704_101_SL_seq_10784
gtttccctcctgctgtttgg

SEQ ID NO: 10785 - DNA, 20 bp, Homo sapiens
  source 1..20: mol_type = genomic DNA; note = Gene: LRIG3; note = Location (start to end; relative to TSS): LRIG3_100_130; note = Orientation (relative to transcription): sense; note = sgRNA Position: 58920380; note = Sequence Name: 56322-704_101_SL_seq_10785
tcgccgccgggagtaaaaga

SEQ ID NO: 10786 - DNA, 20 bp, Homo sapiens
  source 1..20: mol_type = genomic DNA; note = Gene: LRIG3; note = Location (start to end; relative to TSS): LRIG3_30_60; note = Orientation (relative to transcription): sense; note = sgRNA Position: 58920450; note = Sequence Name: 56322-704_101_SL_seq_10786
agctgcaactctgttgcagt

SEQ ID NO: 10787 - DNA, 20 bp, Homo sapiens
  source 1..20: mol_type = genomic DNA; note = Gene: LRIG3; note = Location (start to end; relative to TSS): LRIG3_64_94; note = Orientation (relative to transcription): sense; note = sgRNA Position: 58920416; note = Sequence Name: 56322-704_101_SL_seq_10787
ggtttccctcctgctgtttg

SEQ ID NO: 10788 - DNA, 20 bp, Homo sapiens
  source 1..20: mol_type = genomic DNA; note = Gene: LRIG3; note = Location (start to end; relative to TSS): LRIG3_26_56; note = Orientation (relative to transcription): antisense; note = sgRNA Position: 58920474; note = Sequence Name: 56322-704_101_SL_seq_10788
agttgcagcttgagcagcgt

SEQ ID NO: 10789 - DNA, 20 bp, Homo sapiens
  source 1..20: mol_type = genomic DNA; note = Gene: LRIG3; note = Location (start to end; relative to TSS): LRIG3_62_92; note = Orientation (relative to transcription): sense; note = sgRNA Position: 58920418; note = Sequence Name: 56322-704_101_SL_seq_10789
tcggtttccctcctgctgtt

SEQ ID NO: 10790 - DNA, 20 bp, Homo sapiens
  source 1..20: mol_type = genomic DNA; note = Gene: LRIT1; note = Location (start to end; relative to TSS): LRIT1_38_68; note = Orientation (relative to transcription): sense; note = sgRNA Position: 84241484; note = Sequence Name: 56322-704_101_SL_seq_10790
ccggtgggacggagcggtcc

SEQ ID NO: 10791 - DNA, 20 bp, Homo sapiens
  source 1..20: mol_type = genomic DNA; note = Gene: LRIT1; note = Location (start to end; relative to TSS): LRIT1_83_113; note = Orientation (relative to transcription): sense; note = sgRNA Position: 84241439; note = Sequence Name: 56322-704_101_SL_seq_10791
agaggagccaggagccatga

SEQ ID NO: 10792 - DNA, 20 bp, Homo sapiens
  source 1..20: mol_type = genomic DNA; note = Gene: LRIT1; note = Location (start to end; relative to TSS): LRIT1_44_74; note = Orientation (relative to transcription): sense; note = sgRNA Position: 84241478; note = Sequence Name: 56322-704_101_SL_seq_10792
ggacggagcggtccagggac

SEQ ID NO: 10793 - DNA, 20 bp, Homo sapiens
  source 1..20: mol_type = genomic DNA; note = Gene: LRIT1; note = Location (start to end; relative to TSS): LRIT1_82_112; note = Orientation (relative to transcription): sense; note = sgRNA Position: 84241440; note = Sequence Name: 56322-704_101_SL_seq_10793
gagaggagccaggagccatg

SEQ ID NO: 10794 - DNA, 20 bp, Homo sapiens
  source 1..20: mol_type = genomic DNA; note = Gene: LRIT1; note = Location (start to end; relative to TSS): LRIT1_39_69; note = Orientation (relative to transcription): sense; note = sgRNA Position: 84241483; note = Sequence Name: 56322-704_101_SL_seq_10794
cggtgggacggagcggtcca

SEQ ID NO: 10795 - DNA, 20 bp, Homo sapiens
  source 1..20: mol_type = genomic DNA; note = Gene: LRIT1; note = Location (start to end; relative to TSS): LRIT1_77_107; note = Orientation (relative to transcription): antisense; note = sgRNA Position: 84241465; note = Sequence Name: 56322-704_101_SL_seq_10795
gctcctctctggcccaggca

SEQ ID NO: 10796 - DNA, 20 bp, Homo sapiens
  source 1..20: mol_type = genomic DNA; note = Gene: LRIT1; note = Location (start to end; relative to TSS): LRIT1_32_62; note = Orientation (relative to transcription): sense; note = sgRNA Position: 84241490; note = Sequence Name: 56322-704_101_SL_seq_10796
gctgggccggtgggacggag

SEQ ID NO: 10797 - DNA, 20 bp, Homo sapiens
  source 1..20: mol_type = genomic DNA; note = Gene: LRIT1; note = Location (start to end; relative to TSS): LRIT1_76_106; note = Orientation (relative to transcription): antisense; note = sgRNA Position: 84241466; note = Sequence Name: 56322-704_101_SL_seq_10797
ctcctctctggcccaggcag

SEQ ID NO: 10798 - DNA, 20 bp, Homo sapiens
  source 1..20: mol_type = genomic DNA; note = Gene: LRIT1; note = Location (start to end; relative to TSS): LRIT1_22_52; note = Orientation (relative to transcription): sense; note = sgRNA Position: 84241500; note = Sequence Name: 56322-704_101_SL_seq_10798
tgctgagcttgctgggccgg

SEQ ID NO: 10799 - DNA, 20 bp, Homo sapiens
  source 1..20: mol_type = genomic DNA; note = Gene: LRIT1; note = Location (start to end; relative to TSS): LRIT1_55_85; note = Orientation (relative to transcription): sense; note = sgRNA Position: 84241467; note = Sequence Name: 56322-704_101_SL_seq_10799
tccagggacaggcccctgcc

SEQ ID NO: 10800 - DNA, 20 bp, Homo sapiens
  source 1..20: mol_type = genomic DNA; note = Gene: LRIT2; note = Location (start to end; relative to TSS): LRIT2_88_118; note = Orientation (relative to transcription): antisense; note = sgRNA Position: 84225452; note = Sequence Name: 56322-704_101_SL_seq_10800
gtgcatcctggcagacagaa

SEQ ID NO: 10801 - DNA, 20 bp, Homo sapiens
  source 1..20: mol_type = genomic DNA; note = Gene: LRIT2; note = Location (start to end; relative to TSS): LRIT2_132_162; note = Orientation (relative to transcription): sense; note = sgRNA Position: 84225388; note = Sequence Name: 56322-704_101_SL_seq_10801
tctgctggccagatgttaga

SEQ ID NO: 10802 - DNA, 20 bp, Homo sapiens
  source 1..20: mol_type = genomic DNA; note = Gene: LRIT2; note = Location (start to end; relative to TSS): LRIT2_90_120; note = Orientation (relative to transcription): sense; note = sgRNA Position: 84225430; note = Sequence Name: 56322-704_101_SL_seq_10802
gccaggatgcacttgctcag

SEQ ID NO: 10803 - DNA, 20 bp, Homo sapiens
  source 1..20: mol_type = genomic DNA; note = Gene: LRIT2; note = Location (start to end; relative to TSS): LRIT2_131_161; note = Orientation (relative to transcription): sense; note = sgRNA Position: 84225389; note = Sequence Name: 56322-704_101_SL_seq_10803
ctctgctggccagatgttag

SEQ ID NO: 10804 - DNA, 20 bp, Homo sapiens
  source 1..20: mol_type = genomic DNA; note = Gene: LRIT2; note = Location (start to end; relative to TSS): LRIT2_73_103; note = Orientation (relative to transcription): sense; note = sgRNA Position: 84225447; note = Sequence Name: 56322-704_101_SL_seq_10804
gctcagcctttctgtctgcc

SEQ ID NO: 10805 - DNA, 20 bp, Homo sapiens
  source 1..20: mol_type = genomic DNA; note = Gene: LRIT2; note = Location (start to end; relative to TSS): LRIT2_117_147; note = Orientation (relative to transcription): sense; note = sgRNA Position: 84225403; note = Sequence Name: 56322-704_101_SL_seq_10805
ttttggcaggtgcgctctgc

SEQ ID NO: 10806 - DNA, 20 bp, Homo sapiens
  source 1..20: mol_type = genomic DNA; note = Gene: LRIT2; note = Location (start to end; relative to TSS): LRIT2_48_78; note = Orientation (relative to transcription): antisense; note = sgRNA Position: 84225492; note = Sequence Name: 56322-704_101_SL_seq_10806
ccagaaagaccagaactaac

SEQ ID NO: 10807 - DNA, 20 bp, Homo sapiens
  source 1..20: mol_type = genomic DNA; note = Gene: LRIT2; note = Location (start to end; relative to TSS): LRIT2_88_118; note = Orientation (relative to transcription): antisense; note = sgRNA Position: 84225452; note = Sequence Name: 56322-704_101_SL_seq_10807
gtgcatcctggcagacagaa

SEQ ID NO: 10808 - DNA, 20 bp, Homo sapiens
  source 1..20: mol_type = genomic DNA; note = Gene: LRIT2; note = Location (start to end; relative to TSS): LRIT2_30_60; note = Orientation (relative to transcription): sense; note = sgRNA Position: 84225490; note = Sequence Name: 56322-704_101_SL_seq_10808
tcattacttcctgttagttc

SEQ ID NO: 10809 - DNA, 20 bp, Homo sapiens
  source 1..20: mol_type = genomic DNA; note = Gene: LRIT2; note = Location (start to end; relative to TSS): LRIT2_73_103; note = Orientation (relative to transcription): sense; note = sgRNA Position: 84225447; note = Sequence Name: 56322-704_101_SL_seq_10809
gctcagcctttctgtctgcc

SEQ ID NO: 10810 - DNA, 20 bp, Homo sapiens
  source 1..20: mol_type = genomic DNA; note = Gene: LRIT3; note = Location (start to end; relative to TSS): LRIT3_59_89; note = Orientation (relative to transcription): sense; note = sgRNA Position: 109848192; note = Sequence Name: 56322-704_101_SL_seq_10810
ttgtttaaataacctctaaa

SEQ ID NO: 10811 - DNA, 20 bp, Homo sapiens
  source 1..20: mol_type = genomic DNA; note = Gene: LRIT3; note = Location (start to end; relative to TSS): LRIT3_115_145; note = Orientation (relative to transcription): sense; note = sgRNA Position: 109848248; note = Sequence Name: 56322-704_101_SL_seq_10811
ccttagctttttggaaggag

SEQ ID NO: 10812 - DNA, 20 bp, Homo sapiens
  source 1..20: mol_type = genomic DNA; note = Gene: LRIT3; note = Location (start to end; relative to TSS): LRIT3_32_62; note = Orientation (relative to transcription): antisense; note = sgRNA Position: 109848145; note = Sequence Name: 56322-704_101_SL_seq_10812
aatcctaagcattcagaacc

SEQ ID NO: 10813 - DNA, 20 bp, Homo sapiens
  source 1..20: mol_type = genomic DNA; note = Gene: LRIT3; note = Location (start to end; relative to TSS): LRIT3_110_140; note = Orientation (relative to transcription): sense; note = sgRNA Position: 109848243; note = Sequence Name: 56322-704_101_SL_seq_10813
attgtccttagctttttgga

SEQ ID NO: 10814 - DNA, 20 bp, Homo sapiens
  source 1..20: mol_type = genomic DNA; note = Gene: LRIT3; note = Location (start to end; relative to TSS): LRIT3_26_56; note = Orientation (relative to transcription): sense; note = sgRNA Position: 109848159; note = Sequence Name: 56322-704_101_SL_seq_10814
ggttctgaatgcttaggatt

SEQ ID NO: 10815 - DNA, 20 bp, Homo sapiens
  source 1..20: mol_type = genomic DNA; note = Gene: LRIT3; note = Location (start to end; relative to TSS): LRIT3_80_110; note = Orientation (relative to transcription): antisense; note = sgRNA Position: 109848193; note = Sequence Name: 56322-704_101_SL_seq_10815
agatgcattgctccttttag

SEQ ID NO: 10816 - DNA, 20 bp, Homo sapiens
  source 1..20: mol_type = genomic DNA; note = Gene: LRIT3; note = Location (start to end; relative to TSS): LRIT3_23_53; note = Orientation (relative to transcription): antisense; note = sgRNA Position: 109848136; note = Sequence Name: 56322-704_101_SL_seq_10816
cattcagaacctggtatgcc

SEQ ID NO: 10817 - DNA, 20 bp, Homo sapiens
  source 1..20: mol_type = genomic DNA; note = Gene: LRIT3; note = Location (start to end; relative to TSS): LRIT3_64_94; note = Orientation (relative to transcription): antisense; note = sgRNA Position: 109848177; note = Sequence Name: 56322-704_101_SL_seq_10817
ttagaggttatttaaacaaa

SEQ ID NO: 10818 - DNA, 20 bp, Homo sapiens
  source 1..20: mol_type = genomic DNA; note = Gene: LRIT3; note = Location (start to end; relative to TSS): LRIT3_20_50; note = Orientation (relative to transcription): sense; note = sgRNA Position: 109848153; note = Sequence Name: 56322-704_101_SL_seq_10818
ataccaggttctgaatgctt

SEQ ID NO: 10819 - DNA, 20 bp, Homo sapiens
  source 1..20: mol_type = genomic DNA; note = Gene: LRIT3; note = Location (start to end; relative to TSS): LRIT3_59_89; note = Orientation (relative to transcription): sense; note = sgRNA Position: 109848192; note = Sequence Name: 56322-704_101_SL_seq_10819
ttgtttaaataacctctaaa

SEQ ID NO: 10820 - DNA, 20 bp, Homo sapiens
  source 1..20: mol_type = genomic DNA; note = Gene: LRRC24; note = Location (start to end; relative to TSS): LRRC24_30_60; note = Orientation (relative to transcription): antisense; note = sgRNA Position: 144526999; note = Sequence Name: 56322-704_101_SL_seq_10820
ctcccccgccgtgcaggtgg

SEQ ID NO: 10821 - DNA, 20 bp, Homo sapiens
  source 1..20: mol_type = genomic DNA; note = Gene: LRRC24; note = Location (start to end; relative to TSS): LRRC24_74_104; note = Orientation (relative to transcription): sense; note = sgRNA Position: 144526935; note = Sequence Name: 56322-704_101_SL_seq_10821
acgcccgacccaaggtcacc

SEQ ID NO: 10822 - DNA, 20 bp, Homo sapiens
  source 1..20: mol_type = genomic DNA; note = Gene: LRRC24; note = Location (start to end; relative to TSS): LRRC24_26_56; note = Orientation (relative to transcription): antisense; note = sgRNA Position: 144527003; note = Sequence Name: 56322-704_101_SL_seq_10822
cccgccgtgcaggtggcggc

SEQ ID NO: 10823 - DNA, 20 bp, Homo sapiens
  source 1..20: mol_type = genomic DNA; note = Gene: LRRC24; note = Location (start to end; relative to TSS): LRRC24_66_96; note = Orientation (relative to transcription): sense; note = sgRNA Position: 144526943; note = Sequence Name: 56322-704_101_SL_seq_10823
gtgaggggacgcccgaccca

SEQ ID NO: 10824 - DNA, 20 bp, Homo sapiens
  source 1..20: mol_type = genomic DNA; note = Gene: LRRC24; note = Location (start to end; relative to TSS): LRRC24_25_55; note = Orientation (relative to transcription): antisense; note = sgRNA Position: 144527004; note = Sequence Name: 56322-704_101_SL_seq_10824
ccgccgtgcaggtggcggcc

SEQ ID NO: 10825 - DNA, 20 bp, Homo sapiens
  source 1..20: mol_type = genomic DNA; note = Gene: LRRC24; note = Location (start to end; relative to TSS): LRRC24_60_90; note = Orientation (relative to transcription): antisense; note = sgRNA Position: 144526969; note = Sequence Name: 56322-704_101_SL_seq_10825
cccctcacctgacgctcccg

SEQ ID NO: 10826 - DNA, 20 bp, Homo sapiens
  source 1..20: mol_type = genomic DNA; note = Gene: LRRC24; note = Location (start to end; relative to TSS): LRRC24_18_48; note = Orientation (relative to transcription): sense; note = sgRNA Position: 144526991; note = Sequence Name: 56322-704_101_SL_seq_10826
cggccgccacctgcacggcg

SEQ ID NO: 10827 - DNA, 20 bp, Homo sapiens
  source 1..20: mol_type = genomic DNA; note = Gene: LRRC24; note = Location (start to end; relative to TSS): LRRC24_50_80; note = Orientation (relative to transcription): sense; note = sgRNA Position: 144526959; note = Sequence Name: 56322-704_101_SL_seq_10827
gccgcgggagcgtcaggtga

SEQ ID NO: 10828 - DNA, 20 bp, Homo sapiens
  source 1..20: mol_type = genomic DNA; note = Gene: LRRC24; note = Location (start to end; relative to TSS): LRRC24_19_49; note = Orientation (relative to transcription): sense; note = sgRNA Position: 144526990; note = Sequence Name: 56322-704_101_SL_seq_10828
ggccgccacctgcacggcgg

SEQ ID NO: 10829 - DNA, 20 bp, Homo sapiens
  source 1..20: mol_type = genomic DNA; note = Gene: LRRC24; note = Location (start to end; relative to TSS): LRRC24_49_79; note = Orientation (relative to transcription): sense; note = sgRNA Position: 144526960; note = Sequence Name: 56322-704_101_SL_seq_10829
cgccgcgggagcgtcaggtg

SEQ ID NO: 10830 - DNA, 20 bp, Homo sapiens
  source 1..20: mol_type = genomic DNA; note = Gene: LRRC4; note = Location (start to end; relative to TSS): LRRC4_33_63; note = Orientation (relative to transcription): antisense; note = sgRNA Position: 128031400; note = Sequence Name: 56322-704_101_SL_seq_10830
tgcgctccctctcccggcgt

SEQ ID NO: 10831 - DNA, 20 bp, Homo sapiens
  source 1..20: mol_type = genomic DNA; note = Gene: LRRC4; note = Location (start to end; relative to TSS): LRRC4_78_108; note = Orientation (relative to transcription): sense; note = sgRNA Position: 128031335; note = Sequence Name: 56322-704_101_SL_seq_10831
gggcgcccccgcactccctc

SEQ ID NO: 10832 - DNA, 20 bp, Homo sapiens
  source 1..20: mol_type = genomic DNA; note = Gene: LRRC4; note = Location (start to end; relative to TSS): LRRC4_23_53; note = Orientation (relative to transcription): antisense; note = sgRNA Position: 128031410; note = Sequence Name: 56322-704_101_SL_seq_10832
ctcccggcgtcggccgctcc

SEQ ID NO: 10833 - DNA, 20 bp, Homo sapiens
  source 1..20: mol_type = genomic DNA; note = Gene: LRRC4; note = Location (start to end; relative to TSS): LRRC4_73_103; note = Orientation (relative to transcription): antisense; note = sgRNA Position: 128031360; note = Sequence Name: 56322-704_101_SL_seq_10833
ggggcgccccgaagccgccc

SEQ ID NO: 10834 - DNA, 20 bp, Homo sapiens
  source 1..20: mol_type = genomic DNA; note = Gene: LRRC4; note = Location (start to end; relative to TSS): LRRC4_24_54; note = Orientation (relative to transcription): antisense; note = sgRNA Position: 128031409; note = Sequence Name: 56322-704_101_SL_seq_10834
tctcccggcgtcggccgctc

SEQ ID NO: 10835 - DNA, 20 bp, Homo sapiens
  source 1..20: mol_type = genomic DNA; note = Gene: LRRC4; note = Location (start to end; relative to TSS): LRRC4_60_90; note = Orientation (relative to transcription): antisense; note = sgRNA Position: 128031373; note = Sequence Name: 56322-704_101_SL_seq_10835
gccgcccaggccgcactcgc

SEQ ID NO: 10836 - DNA, 20 bp, Homo sapiens
  source 1..20: mol_type = genomic DNA; note = Gene: LRRC4; note = Location (start to end; relative to TSS): LRRC4_18_48; note = Orientation (relative to transcription): sense; note = sgRNA Position: 128031395; note = Sequence Name: 56322-704_101_SL_seq_10836
gagcggccgacgccgggaga

SEQ ID NO: 10837 - DNA, 20 bp, Homo sapiens
  source 1..20: mol_type = genomic DNA; note = Gene: LRRC4; note = Location (start to end; relative to TSS): LRRC4_58_88; note = Orientation (relative to transcription): sense; note = sgRNA Position: 128031355; note = Sequence Name: 56322-704_101_SL_seq_10837
gtgcggcctgggcggcttcg

SEQ ID NO: 10838 - DNA, 20 bp, Homo sapiens
  source 1..20: mol_type = genomic DNA; note = Gene: LRRC4; note = Location (start to end; relative to TSS): LRRC4_19_49; note = Orientation (relative to transcription): antisense; note = sgRNA Position: 128031414; note = Sequence Name: 56322-704_101_SL_seq_10838
cggcgtcggccgctccgggc

SEQ ID NO: 10839 - DNA, 20 bp, Homo sapiens
  source 1..20: mol_type = genomic DNA; note = Gene: LRRC4; note = Location (start to end; relative to TSS): LRRC4_50_80; note = Orientation (relative to transcription): sense; note = sgRNA Position: 128031363; note = Sequence Name: 56322-704_101_SL_seq_10839
tccagcgagtgcggcctggg

SEQ ID NO: 10840 - DNA, 20 bp, Homo sapiens
  source 1..20: mol_type = genomic DNA; note = Gene: LRRC4B; note = Location (start to end; relative to TSS): LRRC4B_35_65; note = Orientation (relative to transcription): sense; note = sgRNA Position: 50568376; note = Sequence Name: 56322-704_101_SL_seq_10840
gctgccgcaccgtccgaggc

SEQ ID NO: 10841 - DNA, 20 bp, Homo sapiens
  source 1..20: mol_type = genomic DNA; note = Gene: LRRC4B; note = Location (start to end; relative to TSS): LRRC4B_65_95; note = Orientation (relative to transcription): sense; note = sgRNA Position: 50568346; note = Sequence Name: 56322-704_101_SL_seq_10841
gccggggccggggcctgggg

SEQ ID NO: 10842 - DNA, 20 bp, Homo sapiens
  source 1..20: mol_type = genomic DNA; note = Gene: LRRC4B; note = Location (start to end; relative to TSS): LRRC4B_34_64; note = Orientation (relative to transcription): sense; note = sgRNA Position: 50568377; note = Sequence Name: 56322-704_101_SL_seq_10842
cgctgccgcaccgtccgagg

SEQ ID NO: 10843 - DNA, 20 bp, Homo sapiens
  source 1..20: mol_type = genomic DNA; note = Gene: LRRC4B; note = Location (start to end; relative to TSS): LRRC4B_64_94; note = Orientation (relative to transcription): sense; note = sgRNA Position: 50568347; note = Sequence Name: 56322-704_101_SL_seq_10843
ggccggggccggggcctggg

SEQ ID NO: 10844 - DNA, 20 bp, Homo sapiens
  source 1..20: mol_type = genomic DNA; note = Gene: LRRC4B; note = Location (start to end; relative to TSS): LRRC4B_31_61; note = Orientation (relative to transcription): sense; note = sgRNA Position: 50568380; note = Sequence Name: 56322-704_101_SL_seq_10844
ggtcgctgccgcaccgtccg

SEQ ID NO: 10845 - DNA, 20 bp, Homo sapiens
  source 1..20: mol_type = genomic DNA; note = Gene: LRRC4B; note = Location (start to end; relative to TSS): LRRC4B_63_93; note = Orientation (relative to transcription): sense; note = sgRNA Position: 50568348; note = Sequence Name: 56322-704_101_SL_seq_10845
gggccggggccggggcctgg

SEQ ID NO: 10846 - DNA, 20 bp, Homo sapiens
  source 1..20: mol_type = genomic DNA; note = Gene: LRRC4B; note = Location (start to end; relative to TSS): LRRC4B_22_52; note = Orientation (relative to transcription): antisense; note = sgRNA Position: 50568409; note = Sequence Name: 56322-704_101_SL_seq_10846
cgaccgagagcagccgagag

SEQ ID NO: 10847 - DNA, 20 bp, Homo sapiens
  source 1..20: mol_type = genomic DNA; note = Gene: LRRC4B; note = Location (start to end; relative to TSS): LRRC4B_57_87; note = Orientation (relative to transcription): antisense; note = sgRNA Position: 50568374; note = Sequence Name: 56322-704_101_SL_seq_10847
cccggccccggcccccgcct

SEQ ID NO: 10848 - DNA, 20 bp, Homo sapiens
  source 1..20: mol_type = genomic DNA; note = Gene: LRRC4B; note = Location (start to end; relative to TSS): LRRC4B_19_49; note = Orientation (relative to transcription): antisense; note = sgRNA Position: 50568412; note = Sequence Name: 56322-704_101_SL_seq_10848
ccgagagcagccgagagcgg

SEQ ID NO: 10849 - DNA, 20 bp, Homo sapiens
  source 1..20: mol_type = genomic DNA; note = Gene: LRRC4B; note = Location (start to end; relative to TSS): LRRC4B_53_83; note = Orientation (relative to transcription): antisense; note = sgRNA Position: 50568378; note = Sequence Name: 56322-704_101_SL_seq_10849
gccccggcccccgcctcgga

SEQ ID NO: 10850 - DNA, 20 bp, Homo sapiens
  source 1..20: mol_type = genomic DNA; note = Gene: LRRC4C; note = Location (start to end; relative to TSS): LRRC4C_34_64; note = Orientation (relative to transcription): sense; note = sgRNA Position: 41459594; note = Sequence Name: 56322-704_101_SL_seq_10850
tctcttggacacgtttttgc

SEQ ID NO: 10851 - DNA, 20 bp, Homo sapiens
  source 1..20: mol_type = genomic DNA; note = Gene: LRRC4C; note = Location (start to end; relative to TSS): LRRC4C_137_167; note = Orientation (relative to transcription): sense; note = sgRNA Position: 41459491; note = Sequence Name: 56322-704_101_SL_seq_10851
aaagaaaatagagtagtgca

SEQ ID NO: 10852 - DNA, 20 bp, Homo sapiens
  source 1..20: mol_type = genomic DNA; note = Gene: LRRC4C; note = Location (start to end; relative to TSS): LRRC4C_40_70; note = Orientation (relative to transcription): sense; note = sgRNA Position: 41459588; note = Sequence Name: 56322-704_101_SL_seq_10852
ggacacgtttttgctggtgc

SEQ ID NO: 10853 - DNA, 20 bp, Homo sapiens
  source 1..20: mol_type = genomic DNA; note = Gene: LRRC4C; note = Location (start to end; relative to TSS): LRRC4C_114_144; note = Orientation (relative to transcription): antisense; note = sgRNA Position: 41459534; note = Sequence Name: 56322-704_101_SL_seq_10853
tatttttttttaagtcatat

SEQ ID NO: 10854 - DNA, 20 bp, Homo sapiens
  source 1..20: mol_type = genomic DNA; note = Gene: LRRC4C; note = Location (start to end; relative to TSS): LRRC4C_56_86; note = Orientation (relative to transcription): sense; note = sgRNA Position: 41459572; note = Sequence Name: 56322-704_101_SL_seq_10854
gtgctggaagatcagataca

SEQ ID NO: 10855 - DNA, 20 bp, Homo sapiens
  source 1..20: mol_type = genomic DNA; note = Gene: LRRC4C; note = Location (start to end; relative to TSS): LRRC4C_90_120; note = Orientation (relative to transcription): antisense; note = sgRNA Position: 41459558; note = Sequence Name: 56322-704_101_SL_seq_10855
gaaaaataatcagttttcaa

SEQ ID NO: 10856 - DNA, 20 bp, Homo sapiens
  source 1..20: mol_type = genomic DNA; note = Gene: LRRC4C; note = Location (start to end; relative to TSS): LRRC4C_19_49; note = Orientation (relative to transcription): sense; note = sgRNA Position: 41459609; note = Sequence Name: 56322-704_101_SL_seq_10856
tactttttggcggagtctct

SEQ ID NO: 10857 - DNA, 20 bp, Homo sapiens
  source 1..20: mol_type = genomic DNA; note = Gene: LRRC4C; note = Location (start to end; relative to TSS): LRRC4C_56_86; note = Orientation (relative to transcription): sense; note = sgRNA Position: 41459572; note = Sequence Name: 56322-704_101_SL_seq_10857
gtgctggaagatcagataca

SEQ ID NO: 10858 - DNA, 20 bp, Homo sapiens
  source 1..20: mol_type = genomic DNA; note = Gene: LRRC4C; note = Location (start to end; relative to TSS): LRRC4C_9_39; note = Orientation (relative to transcription): sense; note = sgRNA Position: 41459619; note = Sequence Name: 56322-704_101_SL_seq_10858
gtttttggcttactttttgg

SEQ ID NO: 10859 - DNA, 20 bp, Homo sapiens
  source 1..20: mol_type = genomic DNA; note = Gene: LRRC4C; note = Location (start to end; relative to TSS): LRRC4C_40_70; note = Orientation (relative to transcription): sense; note = sgRNA Position: 41459588; note = Sequence Name: 56322-704_101_SL_seq_10859
ggacacgtttttgctggtgc

SEQ ID NO: 10860 - DNA, 20 bp, Homo sapiens
  source 1..20: mol_type = genomic DNA; note = Gene: LRRN1; note = Location (start to end; relative to TSS): LRRN1_39_69; note = Orientation (relative to transcription): antisense; note = sgRNA Position: 3799476; note = Sequence Name: 56322-704_101_SL_seq_10860
acgggcctcgcctcgttcac

SEQ ID NO: 10861 - DNA, 20 bp, Homo sapiens
  source 1..20: mol_type = genomic DNA; note = Gene: LRRN1; note = Location (start to end; relative to TSS): LRRN1_70_100; note = Orientation (relative to transcription): sense; note = sgRNA Position: 3799527; note = Sequence Name: 56322-704_101_SL_seq_10861
cgcccgcctggcggggagag

SEQ ID NO: 10862 - DNA, 20 bp, Homo sapiens
  source 1..20: mol_type = genomic DNA; note = Gene: LRRN1; note = Location (start to end; relative to TSS): LRRN1_28_58; note = Orientation (relative to transcription): antisense; note = sgRNA Position: 3799465; note = Sequence Name: 56322-704_101_SL_seq_10862
ctcgttcaccggctcgttgc

SEQ ID NO: 10863 - DNA, 20 bp, Homo sapiens
  source 1..20: mol_type = genomic DNA; note = Gene: LRRN1; note = Location (start to end; relative to TSS): LRRN1_63_93; note = Orientation (relative to transcription): sense; note = sgRNA Position: 3799520; note = Sequence Name: 56322-704_101_SL_seq_10863
ctgcaagcgcccgcctggcg

SEQ ID NO: 10864 - DNA, 20 bp, Homo sapiens
  source 1..20: mol_type = genomic DNA; note = Gene: LRRN1; note = Location (start to end; relative to TSS): LRRN1_25_55; note = Orientation (relative to transcription): sense; note = sgRNA Position: 3799482; note = Sequence Name: 56322-704_101_SL_seq_10864
acgagccggtgaacgaggcg

SEQ ID NO: 10865 - DNA, 20 bp, Homo sapiens
  source 1..20: mol_type = genomic DNA; note = Gene: LRRN1; note = Location (start to end; relative to TSS): LRRN1_61_91; note = Orientation (relative to transcription): sense; note = sgRNA Position: 3799518; note = Sequence Name: 56322-704_101_SL_seq_10865
ggctgcaagcgcccgcctgg

SEQ ID NO: 10866 - DNA, 20 bp, Homo sapiens
  source 1..20: mol_type = genomic DNA; note = Gene: LRRN1; note = Location (start to end; relative to TSS): LRRN1_19_49; note = Orientation (relative to transcription): antisense; note = sgRNA Position: 3799456; note = Sequence Name: 56322-704_101_SL_seq_10866
cggctcgttgccggcgcccg

SEQ ID NO: 10867 - DNA, 20 bp, Homo sapiens
  source 1..20: mol_type = genomic DNA; note = Gene: LRRN1; note = Location (start to end; relative to TSS): LRRN1_58_88; note = Orientation (relative to transcription): antisense; note = sgRNA Position: 3799495; note = Sequence Name: 56322-704_101_SL_seq_10867
cgcttgcagccgcgggcgca

SEQ ID NO: 10868 - DNA, 20 bp, Homo sapiens
  source 1..20: mol_type = genomic DNA; note = Gene: LRRN1; note = Location (start to end; relative to TSS): LRRN1_20_50; note = Orientation (relative to transcription): sense; note = sgRNA Position: 3799477; note = Sequence Name: 56322-704_101_SL_seq_10868
cggcaacgagccggtgaacg

SEQ ID NO: 10869 - DNA, 20 bp, Homo sapiens
  source 1..20: mol_type = genomic DNA; note = Gene: LRRN1; note = Location (start to end; relative to TSS): LRRN1_57_87; note = Orientation (relative to transcription): antisense; note = sgRNA Position: 3799494; note = Sequence Name: 56322-704_101_SL_seq_10869
gcttgcagccgcgggcgcac

SEQ ID NO: 10870 - DNA, 20 bp, Homo sapiens
  source 1..20: mol_type = genomic DNA; note = Gene: LRRN2; note = Location (start to end; relative to TSS): LRRN2_44_74; note = Orientation (relative to transcription): sense; note = sgRNA Position: 204685670; note = Sequence Name: 56322-704_101_SL_seq_10870
aagaggggcgcgcgtggagg

SEQ ID NO: 10871 - DNA, 20 bp, Homo sapiens
  source 1..20: mol_type = genomic DNA; note = Gene: LRRN2; note = Location (start to end; relative to TSS): LRRN2_94_124; note = Orientation (relative to transcription): antisense; note = sgRNA Position: 204685640; note = Sequence Name: 56322-704_101_SL_seq_10871
cgttcgcaggtgcccggagc

SEQ ID NO: 10872 - DNA, 20 bp, Homo sapiens
  source 1..20: mol_type = genomic DNA; note = Gene: LRRN2; note = Location (start to end; relative to TSS): LRRN2_41_71; note = Orientation (relative to transcription): sense; note = sgRNA Position: 204685673; note = Sequence Name: 56322-704_101_SL_seq_10872
gggaagaggggcgcgcgtgg

SEQ ID NO: 10873 - DNA, 20 bp, Homo sapiens
  source 1..20: mol_type = genomic DNA; note = Gene: LRRN2; note = Location (start to end; relative to TSS): LRRN2_90_120; note = Orientation (relative to transcription): sense; note = sgRNA Position: 204685624; note = Sequence Name: 56322-704_101_SL_seq_10873
tccgggcacctgcgaacgcg

SEQ ID NO: 10874 - DNA, 20 bp, Homo sapiens
  source 1..20: mol_type = genomic DNA; note = Gene: LRRN2; note = Location (start to end; relative to TSS): LRRN2_42_72; note = Orientation (relative to transcription): sense; note = sgRNA Position: 204685672; note = Sequence Name: 56322-704_101_SL_seq_10874
ggaagaggggcgcgcgtgga

SEQ ID NO: 10875 - DNA, 20 bp, Homo sapiens
  source 1..20: mol_type = genomic DNA; note = Gene: LRRN2; note = Location (start to end; relative to TSS): LRRN2_85_115; note = Orientation (relative to transcription): antisense; note = sgRNA Position: 204685649; note = Sequence Name: 56322-704_101_SL_seq_10875
gtgcccggagcaggccctcg

SEQ ID NO: 10876 - DNA, 20 bp, Homo sapiens
  source 1..20: mol_type = genomic DNA; note = Gene: LRRN2; note = Location (start to end; relative to TSS): LRRN2_43_73; note = Orientation (relative to transcription): sense; note = sgRNA Position: 204685671; note = Sequence Name: 56322-704_101_SL_seq_10876
gaagaggggcgcgcgtggag

SEQ ID NO: 10877 - DNA, 20 bp, Homo sapiens
  source 1..20: mol_type = genomic DNA; note = Gene: LRRN2; note = Location (start to end; relative to TSS): LRRN2_73_103; note = Orientation (relative to transcription): sense; note = sgRNA Position: 204685641; note = Sequence Name: 56322-704_101_SL_seq_10877
gcgccgcgagggcctgctcc

SEQ ID NO: 10878 - DNA, 20 bp, Homo sapiens
  source 1..20: mol_type = genomic DNA; note = Gene: LRRN2; note = Location (start to end; relative to TSS): LRRN2_20_50; note = Orientation (relative to transcription): sense; note = sgRNA Position: 204685694; note = Sequence Name: 56322-704_101_SL_seq_10878
gaggagggcgagcgcgaagc

SEQ ID NO: 10879 - DNA, 20 bp, Homo sapiens
  source 1..20: mol_type = genomic DNA; note = Gene: LRRN2; note = Location (start to end; relative to TSS): LRRN2_61_91; note = Orientation (relative to transcription): sense; note = sgRNA Position: 204685653; note = Sequence Name: 56322-704_101_SL_seq_10879
agggggtgccgggcgccgcg

SEQ ID NO: 10880 - DNA, 20 bp, Homo sapiens
  source 1..20: mol_type = genomic DNA; note = Gene: LRRN3; note = Location (start to end; relative to TSS): LRRN3_40_70; note = Orientation (relative to transcription): antisense; note = sgRNA Position: 111091173; note = Sequence Name: 56322-704_101_SL_seq_10880
atttttccttgtttccatgg

SEQ ID NO: 10881 - DNA, 20 bp, Homo sapiens
  source 1..20: mol_type = genomic DNA; note = Gene: LRRN3; note = Location (start to end; relative to TSS): LRRN3_108_138; note = Orientation (relative to transcription): antisense; note = sgRNA Position: 111091241; note = Sequence Name: 56322-704_101_SL_seq_10881
aactctttttctcagtcggc

SEQ ID NO: 10882 - DNA, 20 bp, Homo sapiens
  source 1..20: mol_type = genomic DNA; note = Gene: LRRN3; note = Location (start to end; relative to TSS): LRRN3_47_77; note = Orientation (relative to transcription): sense; note = sgRNA Position: 111091200; note = Sequence Name: 56322-704_101_SL_seq_10882
gaaaaataaagccagctcac

SEQ ID NO: 10883 - DNA, 20 bp, Homo sapiens
  source 1..20: mol_type = genomic DNA; note = Gene: LRRN3; note = Location (start to end; relative to TSS): LRRN3_104_134; note = Orientation (relative to transcription): sense; note = sgRNA Position: 111091257; note = Sequence Name: 56322-704_101_SL_seq_10883
cgactgagaaaaagagttcc

SEQ ID NO: 10884 - DNA, 20 bp, Homo sapiens
  source 1..20: mol_type = genomic DNA; note = Gene: LRRN3; note = Location (start to end; relative to TSS): LRRN3_43_73; note = Orientation (relative to transcription): antisense; note = sgRNA Position: 111091176; note = Sequence Name: 56322-704_101_SL_seq_10884
tttatttttccttgtttcca

SEQ ID NO: 10885 - DNA, 20 bp, Homo sapiens
  source 1..20: mol_type = genomic DNA; note = Gene: LRRN3; note = Location (start to end; relative to TSS): LRRN3_102_132; note = Orientation (relative to transcription): antisense; note = sgRNA Position: 111091235; note = Sequence Name: 56322-704_101_SL_seq_10885
ttttctcagtcggcaggctg

SEQ ID NO: 10886 - DNA, 20 bp, Homo sapiens
  source 1..20: mol_type = genomic DNA; note = Gene: LRRN3; note = Location (start to end; relative to TSS): LRRN3_33_63; note = Orientation (relative to transcription): antisense; note = sgRNA Position: 111091166; note = Sequence Name: 56322-704_101_SL_seq_10886
cttgtttccatggtggttag

SEQ ID NO: 10887 - DNA, 20 bp, Homo sapiens
  source 1..20: mol_type = genomic DNA; note = Gene: LRRN3; note = Location (start to end; relative to TSS): LRRN3_67_97; note = Orientation (relative to transcription): antisense; note = sgRNA Position: 111091200; note = Sequence Name: 56322-704_101_SL_seq_10887
tgaagagagatcctgtgagc

SEQ ID NO: 10888 - DNA, 20 bp, Homo sapiens
  source 1..20: mol_type = genomic DNA; note = Gene: LRRN3; note = Location (start to end; relative to TSS): LRRN3_25_55; note = Orientation (relative to transcription): sense; note = sgRNA Position: 111091178; note = Sequence Name: 56322-704_101_SL_seq_10888
cactaaccaccatggaaaca

SEQ ID NO: 10889 - DNA, 20 bp, Homo sapiens
  source 1..20: mol_type = genomic DNA; note = Gene: LRRN3; note = Location (start to end; relative to TSS): LRRN3_62_92; note = Orientation (relative to transcription): sense; note = sgRNA Position: 111091215; note = Sequence Name: 56322-704_101_SL_seq_10889
ctcacaggatctctcttcac

SEQ ID NO: 10890 - DNA, 20 bp, Homo sapiens
  source 1..20: mol_type = genomic DNA; note = Gene: LSAMP; note = Location (start to end; relative to TSS): LSAMP_44_74; note = Orientation (relative to transcription): sense; note = sgRNA Position: 116445419; note = Sequence Name: 56322-704_101_SL_seq_10890
gcccgcccgcccgccagcct

SEQ ID NO: 10891 - DNA, 20 bp, Homo sapiens
  source 1..20: mol_type = genomic DNA; note = Gene: LSAMP; note = Location (start to end; relative to TSS): LSAMP_135_165; note = Orientation (relative to transcription): sense; note = sgRNA Position: 116445328; note = Sequence Name: 56322-704_101_SL_seq_10891
caaacaagaaccctttcctt

SEQ ID NO: 10892 - DNA, 20 bp, Homo sapiens
  source 1..20: mol_type = genomic DNA; note = Gene: LSAMP; note = Location (start to end; relative to TSS): LSAMP_48_78; note = Orientation (relative to transcription): antisense; note = sgRNA Position: 116445435; note = Sequence Name: 56322-704_101_SL_seq_10892
gctggcgggcgggcgggcga

SEQ ID NO: 10893 - DNA, 20 bp, Homo sapiens
  source 1..20: mol_type = genomic DNA; note = Gene: LSAMP; note = Location (start to end; relative to TSS): LSAMP_128_158; note = Orientation (relative to transcription): antisense; note = sgRNA Position: 116445355; note = Sequence Name: 56322-704_101_SL_seq_10893
ttgtttggtctctctgtgac

SEQ ID NO: 10894 - DNA, 20 bp, Homo sapiens
  source 1..20: mol_type = genomic DNA; note = Gene: LSAMP; note = Location (start to end; relative to TSS): LSAMP_51_81; note = Orientation (relative to transcription): sense; note = sgRNA Position: 116445412; note = Sequence Name: 56322-704_101_SL_seq_10894
cgcccgccagcctgggaaag

SEQ ID NO: 10895 - DNA, 20 bp, Homo sapiens
  source 1..20: mol_type = genomic DNA; note = Gene: LSAMP; note = Location (start to end; relative to TSS): LSAMP_91_121; note = Orientation (relative to transcription): sense; note = sgRNA Position: 116445372; note = Sequence Name: 56322-704_101_SL_seq_10895
ctcagctcagacactggcag

SEQ ID NO: 10896 - DNA, 20 bp, Homo sapiens
  source 1..20: mol_type = genomic DNA; note = Gene: LSAMP; note = Location (start to end; relative to TSS): LSAMP_52_82; note = Orientation (relative to transcription): sense; note = sgRNA Position: 116445411; note = Sequence Name: 56322-704_101_SL_seq_10896
gcccgccagcctgggaaagt

SEQ ID NO: 10897 - DNA, 20 bp, Homo sapiens
  source 1..20: mol_type = genomic DNA; note = Gene: LSAMP; note = Location (start to end; relative to TSS): LSAMP_85_115; note = Orientation (relative to transcription): sense; note = sgRNA Position: 116445378; note = Sequence Name: 56322-704_101_SL_seq_10897
aaggagctcagctcagacac

SEQ ID NO: 10898 - DNA, 20 bp, Homo sapiens
  source 1..20: mol_type = genomic DNA; note = Gene: LSAMP; note = Location (start to end; relative to TSS): LSAMP_14_44; note = Orientation (relative to transcription): sense; note = sgRNA Position: 116445449; note = Sequence Name: 56322-704_101_SL_seq_10898
ctcactggcaggcttggtgc

SEQ ID NO: 10899 - DNA, 20 bp, Homo sapiens
  source 1..20: mol_type = genomic DNA; note = Gene: LSAMP; note = Location (start to end; relative to TSS): LSAMP_44_74; note = Orientation (relative to transcription): sense; note = sgRNA Position: 116445419; note = Sequence Name: 56322-704_101_SL_seq_10899
gcccgcccgcccgccagcct

SEQ ID NO: 10900 - DNA, 20 bp, Homo sapiens
  source 1..20: mol_type = genomic DNA; note = Gene: LSR; note = Location (start to end; relative to TSS): LSR_46_76; note = Orientation (relative to transcription): antisense; note = sgRNA Position: 35249054; note = Sequence Name: 56322-704_101_SL_seq_10900
cgggtgggagcccagccctc

SEQ ID NO: 10901 - DNA, 20 bp, Homo sapiens
  source 1..20: mol_type = genomic DNA; note = Gene: LSR; note = Location (start to end; relative to TSS): LSR_99_129; note = Orientation (relative to transcription): sense; note = sgRNA Position: 35249127; note = Sequence Name: 56322-704_101_SL_seq_10901
ctgcttagcacctggtgcac

SEQ ID NO: 10902 - DNA, 20 bp, Homo sapiens
  source 1..20: mol_type = genomic DNA; note = Gene: LSR; note = Location (start to end; relative to TSS): LSR_48_78; note = Orientation (relative to transcription): sense; note = sgRNA Position: 35249076; note = Sequence Name: 56322-704_101_SL_seq_10902
ggctcccacccggccgccgc

SEQ ID NO: 10903 - DNA, 20 bp, Homo sapiens
  source 1..20: mol_type = genomic DNA; note = Gene: LSR; note = Location (start to end; relative to TSS): LSR_91_121; note = Orientation (relative to transcription): sense; note = sgRNA Position: 35249119; note = Sequence Name: 56322-704_101_SL_seq_10903
tgtggcttctgcttagcacc

SEQ ID NO: 10904 - DNA, 20 bp, Homo sapiens
  source 1..20: mol_type = genomic DNA; note = Gene: LSR; note = Location (start to end; relative to TSS): LSR_34_64; note = Orientation (relative to transcription): antisense; note = sgRNA Position: 35249042; note = Sequence Name: 56322-704_101_SL_seq_10904
cagccctctggagagcccgc

SEQ ID NO: 10905 - DNA, 20 bp, Homo sapiens
  source 1..20: mol_type = genomic DNA; note = Gene: LSR; note = Location (start to end; relative to TSS): LSR_65_95; note = Orientation (relative to transcription): antisense; note = sgRNA Position: 35249073; note = Sequence Name: 56322-704_101_SL_seq_10905
cgtcccggcctgcggcggcc

SEQ ID NO: 10906 - DNA, 20 bp, Homo sapiens
  source 1..20: mol_type = genomic DNA; note = Gene: LSR; note = Location (start to end; relative to TSS): LSR_21_51; note = Orientation (relative to transcription): sense; note = sgRNA Position: 35249049; note = Sequence Name: 56322-704_101_SL_seq_10906
ttggccggcgggctctccag

SEQ ID NO: 10907 - DNA, 20 bp, Homo sapiens
  source 1..20: mol_type = genomic DNA; note = Gene: LSR; note = Location (start to end; relative to TSS): LSR_52_82; note = Orientation (relative to transcription): sense; note = sgRNA Position: 35249080; note = Sequence Name: 56322-704_101_SL_seq_10907
cccacccggccgccgcaggc

SEQ ID NO: 10908 - DNA, 20 bp, Homo sapiens
  source 1..20: mol_type = genomic DNA; note = Gene: LSR; note = Location (start to end; relative to TSS): LSR_16_46; note = Orientation (relative to transcription): antisense; note = sgRNA Position: 35249024; note = Sequence Name: 56322-704_101_SL_seq_10908
gccggccaacagcgccatcg

SEQ ID NO: 10909 - DNA, 20 bp, Homo sapiens
  source 1..20: mol_type = genomic DNA; note = Gene: LSR; note = Location (start to end; relative to TSS): LSR_46_76; note = Orientation (relative to transcription): antisense; note = sgRNA Position: 35249054; note = Sequence Name: 56322-704_101_SL_seq_10909
cgggtgggagcccagccctc

SEQ ID NO: 10910 - DNA, 20 bp, Homo sapiens
  source 1..20: mol_type = genomic DNA; note = Gene: LY6G6F; note = Location (start to end; relative to TSS): LY6G6F_44_74; note = Orientation (relative to transcription): sense; note = sgRNA Position: 31706936; note = Sequence Name: 56322-704_101_SL_seq_10910
ttcctcctcctgttcctatg

SEQ ID NO: 10911 - DNA, 20 bp, Homo sapiens
  source 1..20: mol_type = genomic DNA; note = Gene: LY6G6F; note = Location (start to end; relative to TSS): LY6G6F_76_106; note = Orientation (relative to transcription): sense; note = sgRNA Position: 31706968; note = Sequence Name: 56322-704_101_SL_seq_10911
ggctgcaggtaaggggcaag

SEQ ID NO: 10912 - DNA, 20 bp, Homo sapiens
  source 1..20: mol_type = genomic DNA; note = Gene: LY6G6F; note = Location (start to end; relative to TSS): LY6G6F_39_69; note = Orientation (relative to transcription): antisense; note = sgRNA Position: 31706911; note = Sequence Name: 56322-704_101_SL_seq_10912
gaggaggaataagactgcca

SEQ ID NO: 10913 - DNA, 20 bp, Homo sapiens
  source 1..20: mol_type = genomic DNA; note = Gene: LY6G6F; note = Location (start to end; relative to TSS): LY6G6F_69_99; note = Orientation (relative to transcription): sense; note = sgRNA Position: 31706961; note = Sequence Name: 56322-704_101_SL_seq_10913
ctccccaggctgcaggtaag

SEQ ID NO: 10914 - DNA, 20 bp, Homo sapiens
  source 1..20: mol_type = genomic DNA; note = Gene: LY6G6F; note = Location (start to end; relative to TSS): LY6G6F_38_68; note = Orientation (relative to transcription): antisense; note = sgRNA Position: 31706910; note = Sequence Name: 56322-704_101_SL_seq_10914
aggaggaataagactgccat

SEQ ID NO: 10915 - DNA, 20 bp, Homo sapiens
  source 1..20: mol_type = genomic DNA; note = Gene: LY6G6F; note = Location (start to end; relative to TSS): LY6G6F_68_98; note = Orientation (relative to transcription): sense; note = sgRNA Position: 31706960; note = Sequence Name: 56322-704_101_SL_seq_10915
actccccaggctgcaggtaa

SEQ ID NO: 10916 - DNA, 20 bp, Homo sapiens
  source 1..20: mol_type = genomic DNA; note = Gene: LY6G6F; note = Location (start to end; relative to TSS): LY6G6F_37_67; note = Orientation (relative to transcription): antisense; note = sgRNA Position: 31706909; note = Sequence Name: 56322-704_101_SL_seq_10916
ggaggaataagactgccatg

SEQ ID NO: 10917 - DNA, 20 bp, Homo sapiens
  source 1..20: mol_type = genomic DNA; note = Gene: LY6G6F; note = Location (start to end; relative to TSS): LY6G6F_67_97; note = Orientation (relative to transcription): antisense; note = sgRNA Position: 31706939; note = Sequence Name: 56322-704_101_SL_seq_10917
cagcctggggagttccacat

SEQ ID NO: 10918 - DNA, 20 bp, Homo sapiens
  source 1..20: mol_type = genomic DNA; note = Gene: LY6G6F; note = Location (start to end; relative to TSS): LY6G6F_13_43; note = Orientation (relative to transcription): sense; note = sgRNA Position: 31706905; note = Sequence Name: 56322-704_101_SL_seq_10918
aacttggcaggctctcccca

SEQ ID NO: 10919 - DNA, 20 bp, Homo sapiens
  source 1..20: mol_type = genomic DNA; note = Gene: LY6G6F; note = Location (start to end; relative to TSS): LY6G6F_44_74; note = Orientation (relative to transcription): sense; note = sgRNA Position: 31706936; note = Sequence Name: 56322-704_101_SL_seq_10919
ttcctcctcctgttcctatg

SEQ ID NO: 10920 - DNA, 20 bp, Homo sapiens
  source 1..20: mol_type = genomic DNA; note = Gene: LY9; note = Location (start to end; relative to TSS): LY9_48_78; note = Orientation (relative to transcription): sense; note = sgRNA Position: 160796248; note = Sequence Name: 56322-704_101_SL_seq_10920
ctttctccagtaagccacag

SEQ ID NO: 10921 - DNA, 20 bp, Homo sapiens
  source 1..20: mol_type = genomic DNA; note = Gene: LY9; note = Location (start to end; relative to TSS): LY9_114_144; note = Orientation (relative to transcription): antisense; note = sgRNA Position: 160796294; note = Sequence Name: 56322-704_101_SL_seq_10921
catgagcaggaagaggagag

SEQ ID NO: 10922 - DNA, 20 bp, Homo sapiens
  source 1..20: mol_type = genomic DNA; note = Gene: LY9; note = Location (start to end; relative to TSS): LY9_50_80; note = Orientation (relative to transcription): antisense; note = sgRNA Position: 160796230; note = Sequence Name: 56322-704_101_SL_seq_10922
ggcttactggagaaaggccc

SEQ ID NO: 10923 - DNA, 20 bp, Homo sapiens
  source 1..20: mol_type = genomic DNA; note = Gene: LY9; note = Location (start to end; relative to TSS): LY9_107_137; note = Orientation (relative to transcription): sense; note = sgRNA Position: 160796307; note = Sequence Name: 56322-704_101_SL_seq_10923
tctctcctcttcctgctcat

SEQ ID NO: 10924 - DNA, 20 bp, Homo sapiens
  source 1..20: mol_type = genomic DNA; note = Gene: LY9; note = Location (start to end; relative to TSS): LY9_23_53; note = Orientation (relative to transcription): antisense; note = sgRNA Position: 160796203; note = Sequence Name: 56322-704_101_SL_seq_10924
cagtcatctgtgtgactctt

SEQ ID NO: 10925 - DNA, 20 bp, Homo sapiens
  source 1..20: mol_type = genomic DNA; note = Gene: LY9; note = Location (start to end; relative to TSS): LY9_56_86; note = Orientation (relative to transcription): antisense; note = sgRNA Position: 160796236; note = Sequence Name: 56322-704_101_SL_seq_10925
ctctgtggcttactggagaa

SEQ ID NO: 10926 - DNA, 20 bp, Homo sapiens
  source 1..20: mol_type = genomic DNA; note = Gene: LY9; note = Location (start to end; relative to TSS): LY9_16_46; note = Orientation (relative to transcription): sense; note = sgRNA Position: 160796216; note = Sequence Name: 56322-704_101_SL_seq_10926
aaagagtcacacagatgact

SEQ ID NO: 10927 - DNA, 20 bp, Homo sapiens
  source 1..20: mol_type = genomic DNA; note = Gene: LY9; note = Location (start to end; relative to TSS): LY9_50_80; note = Orientation (relative to transcription): antisense; note = sgRNA Position: 160796230; note = Sequence Name: 56322-704_101_SL_seq_10927
ggcttactggagaaaggccc

SEQ ID NO: 10928 - DNA, 20 bp, Homo sapiens
  source 1..20: mol_type = genomic DNA; note = Gene: LY9; note = Location (start to end; relative to TSS): LY9_15_45; note = Orientation (relative to transcription): sense; note = sgRNA Position: 160796215; note = Sequence Name: 56322-704_101_SL_seq_10928
caaagagtcacacagatgac

SEQ ID NO: 10929 - DNA, 20 bp, Homo sapiens
  source 1..20: mol_type = genomic DNA; note = Gene: LY9; note = Location (start to end; relative to TSS): LY9_48_78; note = Orientation (relative to transcription): sense; note = sgRNA Position: 160796248; note = Sequence Name: 56322-704_101_SL_seq_10929
ctttctccagtaagccacag

SEQ ID NO: 10930 - DNA, 20 bp, Homo sapiens
  source 1..20: mol_type = genomic DNA; note = Gene: MADCAM1; note = Location (start to end; relative to TSS): MADCAM1_35_65; note = Orientation (relative to transcription): sense; note = sgRNA Position: 496547; note = Sequence Name: 56322-704_101_SL_seq_10930
gggcttctggggctcctcct

SEQ ID NO: 10931 - DNA, 20 bp, Homo sapiens
  source 1..20: mol_type = genomic DNA; note = Gene: MADCAM1; note = Location (start to end; relative to TSS): MADCAM1_80_110; note = Orientation (relative to transcription): sense; note = sgRNA Position: 496592; note = Sequence Name: 56322-704_101_SL_seq_10931
agagaggagtgagttaggag

SEQ ID NO: 10932 - DNA, 20 bp, Homo sapiens
  source 1..20: mol_type = genomic DNA; note = Gene: MADCAM1; note = Location (start to end; relative to TSS): MADCAM1_44_74; note = Orientation (relative to transcription): sense; note = sgRNA Position: 496556; note = Sequence Name: 56322-704_101_SL_seq_10932
gggctcctcctcggtgagaa

SEQ ID NO: 10933 - DNA, 20 bp, Homo sapiens
  source 1..20: mol_type = genomic DNA; note = Gene: MADCAM1; note = Location (start to end; relative to TSS): MADCAM1_79_109; note = Orientation (relative to transcription): sense; note = sgRNA Position: 496591; note = Sequence Name: 56322-704_101_SL_seq_10933
gagagaggagtgagttagga

SEQ ID NO: 10934 - DNA, 20 bp, Homo sapiens
  source 1..20: mol_type = genomic DNA; note = Gene: MADCAM1; note = Location (start to end; relative to TSS): MADCAM1_45_75; note = Orientation (relative to transcription): sense; note = sgRNA Position: 496557; note = Sequence Name: 56322-704_101_SL_seq_10934
ggctcctcctcggtgagaag

SEQ ID NO: 10935 - DNA, 20 bp, Homo sapiens
  source 1..20: mol_type = genomic DNA; note = Gene: MADCAM1; note = Location (start to end; relative to TSS): MADCAM1_78_108; note = Orientation (relative to transcription): sense; note = sgRNA Position: 496590; note = Sequence Name: 56322-704_101_SL_seq_10935
ggagagaggagtgagttagg

SEQ ID NO: 10936 - DNA, 20 bp, Homo sapiens
  source 1..20: mol_type = genomic DNA; note = Gene: MADCAM1; note = Location (start to end; relative to TSS): MADCAM1_43_73; note = Orientation (relative to transcription): sense; note = sgRNA Position: 496555; note = Sequence Name: 56322-704_101_SL_seq_10936
ggggctcctcctcggtgaga

SEQ ID NO: 10937 - DNA, 20 bp, Homo sapiens
  source 1..20: mol_type = genomic DNA; note = Gene: MADCAM1; note = Location (start to end; relative to TSS): MADCAM1_75_105; note = Orientation (relative to transcription): sense; note = sgRNA Position: 496587; note = Sequence Name: 56322-704_101_SL_seq_10937
gcgggagagaggagtgagtt

SEQ ID NO: 10938 - DNA, 20 bp, Homo sapiens
  source 1..20: mol_type = genomic DNA; note = Gene: MADCAM1; note = Location (start to end; relative to TSS): MADCAM1_24_54; note = Orientation (relative to transcription): sense; note = sgRNA Position: 496536; note = Sequence Name: 56322-704_101_SL_seq_10938
tcctgctggcggggcttctg

SEQ ID NO: 10939 - DNA, 20 bp, Homo sapiens
  source 1..20: mol_type = genomic DNA; note = Gene: MADCAM1; note = Location (start to end; relative to TSS): MADCAM1_57_87; note = Orientation (relative to transcription): sense; note = sgRNA Position: 496569; note = Sequence Name: 56322-704_101_SL_seq_10939
gtgagaaggggagggggcgc

SEQ ID NO: 10940 - DNA, 20 bp, Homo sapiens
  source 1..20: mol_type = genomic DNA; note = Gene: MAG; note = Location (start to end; relative to TSS): MAG_33_63; note = Orientation (relative to transcription): sense; note = sgRNA Position: 35292220; note = Sequence Name: 56322-704_101_SL_seq_10940
aagtgagtatggtggcaggg

SEQ ID NO: 10941 - DNA, 20 bp, Homo sapiens
  source 1..20: mol_type = genomic DNA; note = Gene: MAG; note = Location (start to end; relative to TSS): MAG_67_97; note = Orientation (relative to transcription): sense; note = sgRNA Position: 35292254; note = Sequence Name: 56322-704_101_SL_seq_10941
ggagcagggcaccggggcag

SEQ ID NO: 10942 - DNA, 20 bp, Homo sapiens
  source 1..20: mol_type = genomic DNA; note = Gene: MAG; note = Location (start to end; relative to TSS): MAG_25_55; note = Orientation (relative to transcription): sense; note = sgRNA Position: 35292212; note = Sequence Name: 56322-704_101_SL_seq_10942
ctgagtccaagtgagtatgg

SEQ ID NO: 10943 - DNA, 20 bp, Homo sapiens
  source 1..20: mol_type = genomic DNA; note = Gene: MAG; note = Location (start to end; relative to TSS): MAG_65_95; note = Orientation (relative to transcription): antisense; note = sgRNA Position: 35292232; note = Sequence Name: 56322-704_101_SL_seq_10943
gtgccctgctccccttgccc

SEQ ID NO: 10944 - DNA, 20 bp, Homo sapiens
  source 1..20: mol_type = genomic DNA; note = Gene: MAG; note = Location (start to end; relative to TSS): MAG_29_59; note = Orientation (relative to transcription): sense; note = sgRNA Position: 35292216; note = Sequence Name: 56322-704_101_SL_seq_10944
gtccaagtgagtatggtggc

SEQ ID NO: 10945 - DNA, 20 bp, Homo sapiens
  source 1..20: mol_type = genomic DNA; note = Gene: MAG; note = Location (start to end; relative to TSS): MAG_61_91; note = Orientation (relative to transcription): sense; note = sgRNA Position: 35292248; note = Sequence Name: 56322-704_101_SL_seq_10945
gcaaggggagcagggcaccg

SEQ ID NO: 10946 - DNA, 20 bp, Homo sapiens
  source 1..20: mol_type = genomic DNA; note = Gene: MAG; note = Location (start to end; relative to TSS): MAG_30_60; note = Orientation (relative to transcription): sense; note = sgRNA Position: 35292217; note = Sequence Name: 56322-704_101_SL_seq_10946
tccaagtgagtatggtggca

SEQ ID NO: 10947 - DNA, 20 bp, Homo sapiens
  source 1..20: mol_type = genomic DNA; note = Gene: MAG; note = Location (start to end; relative to TSS): MAG_60_90; note = Orientation (relative to transcription): sense; note = sgRNA Position: 35292247; note = Sequence Name: 56322-704_101_SL_seq_10947
ggcaaggggagcagggcacc

SEQ ID NO: 10948 - DNA, 20 bp, Homo sapiens
  source 1..20: mol_type = genomic DNA; note = Gene: MAG; note = Location (start to end; relative to TSS): MAG_22_52; note = Orientation (relative to transcription): sense; note = sgRNA Position: 35292209; note = Sequence Name: 56322-704_101_SL_seq_10948
caactgagtccaagtgagta

SEQ ID NO: 10949 - DNA, 20 bp, Homo sapiens
  source 1..20: mol_type = genomic DNA; note = Gene: MAG; note = Location (start to end; relative to TSS): MAG_53_83; note = Orientation (relative to transcription): sense; note = sgRNA Position: 35292240; note = Sequence Name: 56322-704_101_SL_seq_10949
aggccagggcaaggggagca

SEQ ID NO: 10950 - DNA, 20 bp, Homo sapiens
  source 1..20: mol_type = genomic DNA; note = Gene: MALT1; note = Location (start to end; relative to TSS): MALT1_51_81; note = Orientation (relative to transcription): antisense; note = sgRNA Position: 58671522; note = Sequence Name: 56322-704_101_SL_seq_10950
gaagaacaaatctggcagcg

SEQ ID NO: 10951 - DNA, 20 bp, Homo sapiens
  source 1..20: mol_type = genomic DNA; note = Gene: MALT1; note = Location (start to end; relative to TSS): MALT1_82_112; note = Orientation (relative to transcription): antisense; note = sgRNA Position: 58671553; note = Sequence Name: 56322-704_101_SL_seq_10951
cgctcgcctccgagccgcgg

SEQ ID NO: 10952 - DNA, 20 bp, Homo sapiens
  source 1..20: mol_type = genomic DNA; note = Gene: MALT1; note = Location (start to end; relative to TSS): MALT1_46_76; note = Orientation (relative to transcription): antisense; note = sgRNA Position: 58671517; note = Sequence Name: 56322-704_101_SL_seq_10952
acaaatctggcagcgcggca

SEQ ID NO: 10953 - DNA, 20 bp, Homo sapiens
  source 1..20: mol_type = genomic DNA; note = Gene: MALT1; note = Location (start to end; relative to TSS): MALT1_76_106; note = Orientation (relative to transcription): antisense; note = sgRNA Position: 58671547; note = Sequence Name: 56322-704_101_SL_seq_10953
cctccgagccgcggaggcag

SEQ ID NO: 10954 - DNA, 20 bp, Homo sapiens
  source 1..20: mol_type = genomic DNA; note = Gene: MALT1; note = Location (start to end; relative to TSS): MALT1_36_66; note = Orientation (relative to transcription): antisense; note = sgRNA Position: 58671507; note = Sequence Name: 56322-704_101_SL_seq_10954
cagcgcggcacggccctcag

SEQ ID NO: 10955 - DNA, 20 bp, Homo sapiens
  source 1..20: mol_type = genomic DNA; note = Gene: MALT1; note = Location (start to end; relative to TSS): MALT1_67_97; note = Orientation (relative to transcription): sense; note = sgRNA Position: 58671558; note = Sequence Name: 56322-704_101_SL_seq_10955
cccctgcctccgcggctcgg

SEQ ID NO: 10956 - DNA, 20 bp, Homo sapiens
  source 1..20: mol_type = genomic DNA; note = Gene: MALT1; note = Location (start to end; relative to TSS): MALT1_14_44; note = Orientation (relative to transcription): sense; note = sgRNA Position: 58671505; note = Sequence Name: 56322-704_101_SL_seq_10956
agcggagcttcctcctctga

SEQ ID NO: 10957 - DNA, 20 bp, Homo sapiens
  source 1..20: mol_type = genomic DNA; note = Gene: MALT1; note = Location (start to end; relative to TSS): MALT1_51_81; note = Orientation (relative to transcription): antisense; note = sgRNA Position: 58671522; note = Sequence Name: 56322-704_101_SL_seq_10957
gaagaacaaatctggcagcg

SEQ ID NO: 10958 - DNA, 20 bp, Homo sapiens
  source 1..20: mol_type = genomic DNA; note = Gene: MALT1; note = Location (start to end; relative to TSS): MALT1_13_43; note = Orientation (relative to transcription): sense; note = sgRNA Position: 58671504; note = Sequence Name: 56322-704_101_SL_seq_10958
gagcggagcttcctcctctg

SEQ ID NO: 10959 - DNA, 20 bp, Homo sapiens
  source 1..20: mol_type = genomic DNA; note = Gene: MALT1; note = Location (start to end; relative to TSS): MALT1_46_76; note = Orientation (relative to transcription): antisense; note = sgRNA Position: 58671517; note = Sequence Name: 56322-704_101_SL_seq_10959
acaaatctggcagcgcggca

SEQ ID NO: 10960 - DNA, 20 bp, Homo sapiens
  source 1..20: mol_type = genomic DNA; note = Gene: MCAM; note = Location (start to end; relative to TSS): MCAM_39_69; note = Orientation (relative to transcription): antisense; note = sgRNA Position: 119317087; note = Sequence Name: 56322-704_101_SL_seq_10960
aagaaggcgcagaccagcct

SEQ ID NO: 10961 - DNA, 20 bp, Homo sapiens
  source 1..20: mol_type = genomic DNA; note = Gene: MCAM; note = Location (start to end; relative to TSS): MCAM_82_112; note = Orientation (relative to transcription): sense; note = sgRNA Position: 119317024; note = Sequence Name: 56322-704_101_SL_seq_10961
tcgcgggtgagttcgctcgc

SEQ ID NO: 10962 - DNA, 20 bp, Homo sapiens
  source 1..20: mol_type = genomic DNA; note = Gene: MCAM; note = Location (start to end; relative to TSS): MCAM_40_70; note = Orientation (relative to transcription): antisense; note = sgRNA Position: 119317086; note = Sequence Name: 56322-704_101_SL_seq_10962
caagaaggcgcagaccagcc

SEQ ID NO: 10963 - DNA, 20 bp, Homo sapiens
  source 1..20: mol_type = genomic DNA; note = Gene: MCAM; note = Location (start to end; relative to TSS): MCAM_70_100; note = Orientation (relative to transcription): antisense; note = sgRNA Position: 119317056; note = Sequence Name: 56322-704_101_SL_seq_10963
gacgcgaggacagcagcagc

SEQ ID NO: 10964 - DNA, 20 bp, Homo sapiens
  source 1..20: mol_type = genomic DNA; note = Gene: MCAM; note = Location (start to end; relative to TSS): MCAM_21_51; note = Orientation (relative to transcription): antisense; note = sgRNA Position: 119317105; note = Sequence Name: 56322-704_101_SL_seq_10964
ctgggaagccccatgcttcc

SEQ ID NO: 10965 - DNA, 20 bp, Homo sapiens
  source 1..20: mol_type = genomic DNA; note = Gene: MCAM; note = Location (start to end; relative to TSS): MCAM_66_96; note = Orientation (relative to transcription): sense; note = sgRNA Position: 119317040; note = Sequence Name: 56322-704_101_SL_seq_10965
tgctgctgtcctcgcgtcgc

SEQ ID NO: 10966 - DNA, 20 bp, Homo sapiens
  source 1..20: mol_type = genomic DNA; note = Gene: MCAM; note = Location (start to end; relative to TSS): MCAM_17_47; note = Orientation (relative to transcription): antisense; note = sgRNA Position: 119317109; note = Sequence Name: 56322-704_101_SL_seq_10966
gaagccccatgcttcccggc

SEQ ID NO: 10967 - DNA, 20 bp, Homo sapiens
  source 1..20: mol_type = genomic DNA; note = Gene: MCAM; note = Location (start to end; relative to TSS): MCAM_65_95; note = Orientation (relative to transcription): sense; note = sgRNA Position: 119317041; note = Sequence Name: 56322-704_101_SL_seq_10967
ctgctgctgtcctcgcgtcg

SEQ ID NO: 10968 - DNA, 20 bp, Homo sapiens
  source 1..20: mol_type = genomic DNA; note = Gene: MCAM; note = Location (start to end; relative to TSS): MCAM_14_44; note = Orientation (relative to transcription): antisense; note = sgRNA Position: 119317112; note = Sequence Name: 56322-704_101_SL_seq_10968
gccccatgcttcccggccgg

SEQ ID NO: 10969 - DNA, 20 bp, Homo sapiens
  source 1..20: mol_type = genomic DNA; note = Gene: MCAM; note = Location (start to end; relative to TSS): MCAM_55_85; note = Orientation (relative to transcription): antisense; note = sgRNA Position: 119317071; note = Sequence Name: 56322-704_101_SL_seq_10969
gcagcaggcggcgagcaaga

SEQ ID NO: 10970 - DNA, 20 bp, Homo sapiens
  source 1..20: mol_type = genomic DNA; note = Gene: MDGA1; note = Location (start to end; relative to TSS): MDGA1_51_81; note = Orientation (relative to transcription): antisense; note = sgRNA Position: 37697828; note = Sequence Name: 56322-704_101_SL_seq_10970
tccggggcgcggcggccgct

SEQ ID NO: 10971 - DNA, 20 bp, Homo sapiens
  source 1..20: mol_type = genomic DNA; note = Gene: MDGA1; note = Location (start to end; relative to TSS): MDGA1_96_126; note = Orientation (relative to transcription): sense; note = sgRNA Position: 37697763; note = Sequence Name: 56322-704_101_SL_seq_10971
cgcaggccaaggccgccggg

SEQ ID NO: 10972 - DNA, 20 bp, Homo sapiens
  source 1..20: mol_type = genomic DNA; note = Gene: MDGA1; note = Location (start to end; relative to TSS): MDGA1_27_57; note = Orientation (relative to transcription): sense; note = sgRNA Position: 37697832; note = Sequence Name: 56322-704_101_SL_seq_10972
tcccgcggcccggagccgag

SEQ ID NO: 10973 - DNA, 20 bp, Homo sapiens
  source 1..20: mol_type = genomic DNA; note = Gene: MDGA1; note = Location (start to end; relative to TSS): MDGA1_85_115; note = Orientation (relative to transcription): sense; note = sgRNA Position: 37697774; note = Sequence Name: 56322-704_101_SL_seq_10973
ctctgggcccccgcaggcca

SEQ ID NO: 10974 - DNA, 20 bp, Homo sapiens
  source 1..20: mol_type = genomic DNA; note = Gene: MDGA1; note = Location (start to end; relative to TSS): MDGA1_41_71; note = Orientation (relative to transcription): sense; note = sgRNA Position: 37697818; note = Sequence Name: 56322-704_101_SL_seq_10974
gccgagcggccgccgcgccc

SEQ ID NO: 10975 - DNA, 20 bp, Homo sapiens
  source 1..20: mol_type = genomic DNA; note = Gene: MDGA1; note = Location (start to end; relative to TSS): MDGA1_79_109; note = Orientation (relative to transcription): sense; note = sgRNA Position: 37697780; note = Sequence Name: 56322-704_101_SL_seq_10975
cgcccgctctgggcccccgc

SEQ ID NO: 10976 - DNA, 20 bp, Homo sapiens
  source 1..20: mol_type = genomic DNA; note = Gene: MDGA1; note = Location (start to end; relative to TSS): MDGA1_12_42; note = Orientation (relative to transcription): sense; note = sgRNA Position: 37697847; note = Sequence Name: 56322-704_101_SL_seq_10976
gagcgagcggagcgctcccg

SEQ ID NO: 10977 - DNA, 20 bp, Homo sapiens
  source 1..20: mol_type = genomic DNA; note = Gene: MDGA1; note = Location (start to end; relative to TSS): MDGA1_51_81; note = Orientation (relative to transcription): antisense; note = sgRNA Position: 37697828; note = Sequence Name: 56322-704_101_SL_seq_10977
tccggggcgcggcggccgct

SEQ ID NO: 10978 - DNA, 20 bp, Homo sapiens
  source 1..20: mol_type = genomic DNA; note = Gene: MDGA1; note = Location (start to end; relative to TSS): MDGA1_11_41; note = Orientation (relative to transcription): antisense; note = sgRNA Position: 37697868; note = Sequence Name: 56322-704_101_SL_seq_10978
gctccgctcgctcagcaact

SEQ ID NO: 10979 - DNA, 20 bp, Homo sapiens
  source 1..20: mol_type = genomic DNA; note = Gene: MDGA1; note = Location (start to end; relative to TSS): MDGA1_41_71; note = Orientation (relative to transcription): sense; note = sgRNA Position: 37697818; note = Sequence Name: 56322-704_101_SL_seq_10979
gccgagcggccgccgcgccc

SEQ ID NO: 10980 - DNA, 20 bp, Homo sapiens
  source 1..20: mol_type = genomic DNA; note = Gene: MDGA2; note = Location (start to end; relative to TSS): MDGA2_48_78; note = Orientation (relative to transcription): antisense; note = sgRNA Position: 47675553; note = Sequence Name: 56322-704_101_SL_seq_10980
tggccggccgcaccaattcc

SEQ ID NO: 10981 - DNA, 20 bp, Homo sapiens
  source 1..20: mol_type = genomic DNA; note = Gene: MDGA2; note = Location (start to end; relative to TSS): MDGA2_86_116; note = Orientation (relative to transcription): sense; note = sgRNA Position: 47675495; note = Sequence Name: 56322-704_101_SL_seq_10981
ctaaaggctattttggagag

SEQ ID NO: 10982 - DNA, 20 bp, Homo sapiens
  source 1..20: mol_type = genomic DNA; note = Gene: MDGA2; note = Location (start to end; relative to TSS): MDGA2_36_66; note = Orientation (relative to transcription): sense; note = sgRNA Position: 47675545; note = Sequence Name: 56322-704_101_SL_seq_10982
gctccgggaattggtgcggc

SEQ ID NO: 10983 - DNA, 20 bp, Homo sapiens
  source 1..20: mol_type = genomic DNA; note = Gene: MDGA2; note = Location (start to end; relative to TSS): MDGA2_70_100; note = Orientation (relative to transcription): sense; note = sgRNA Position: 47675511; note = Sequence Name: 56322-704_101_SL_seq_10983
ctacgctggccgggcgctaa

SEQ ID NO: 10984 - DNA, 20 bp, Homo sapiens
  source 1..20: mol_type = genomic DNA; note = Gene: MDGA2; note = Location (start to end; relative to TSS): MDGA2_32_62; note = Orientation (relative to transcription): sense; note = sgRNA Position: 47675549; note = Sequence Name: 56322-704_101_SL_seq_10984
ttcggctccgggaattggtg

SEQ ID NO: 10985 - DNA, 20 bp, Homo sapiens
  source 1..20: mol_type = genomic DNA; note = Gene: MDGA2; note = Location (start to end; relative to TSS): MDGA2_68_98; note = Orientation (relative to transcription): antisense; note = sgRNA Position: 47675533; note = Sequence Name: 56322-704_101_SL_seq_10985
cggccagcgtagaggtgctc

SEQ ID NO: 10986 - DNA, 20 bp, Homo sapiens
  source 1..20: mol_type = genomic DNA; note = Gene: MDGA2; note = Location (start to end; relative to TSS): MDGA2_21_51; note = Orientation (relative to transcription): sense; note = sgRNA Position: 47675560; note = Sequence Name: 56322-704_101_SL_seq_10986
tggactctgctttcggctcc

SEQ ID NO: 10987 - DNA, 20 bp, Homo sapiens
  source 1..20: mol_type = genomic DNA; note = Gene: MDGA2; note = Location (start to end; relative to TSS): MDGA2_64_94; note = Orientation (relative to transcription): antisense; note = sgRNA Position: 47675537; note = Sequence Name: 56322-704_101_SL_seq_10987
cagcgtagaggtgctctggc

SEQ ID NO: 10988 - DNA, 20 bp, Homo sapiens
  source 1..20: mol_type = genomic DNA; note = Gene: MDGA2; note = Location (start to end; relative to TSS): MDGA2_20_50; note = Orientation (relative to transcription): sense; note = sgRNA Position: 47675561; note = Sequence Name: 56322-704_101_SL_seq_10988
ctggactctgctttcggctc

SEQ ID NO: 10989 - DNA, 20 bp, Homo sapiens
  source 1..20: mol_type = genomic DNA; note = Gene: MDGA2; note = Location (start to end; relative to TSS): MDGA2_61_91; note = Orientation (relative to transcription): sense; note = sgRNA Position: 47675520; note = Sequence Name: 56322-704_101_SL_seq_10989
agagcacctctacgctggcc

SEQ ID NO: 10990 - DNA, 20 bp, Homo sapiens
  source 1..20: mol_type = genomic DNA; note = Gene: MERTK; note = Location (start to end; relative to TSS): MERTK_27_57; note = Orientation (relative to transcription): sense; note = sgRNA Position: 111898660; note = Sequence Name: 56322-704_101_SL_seq_10990
gcttcgctggcgcgcttggc

SEQ ID NO: 10991 - DNA, 20 bp, Homo sapiens
  source 1..20: mol_type = genomic DNA; note = Gene: MERTK; note = Location (start to end; relative to TSS): MERTK_96_126; note = Orientation (relative to transcription): sense; note = sgRNA Position: 111898729; note = Sequence Name: 56322-704_101_SL_seq_10991
aaattacagatccgcagccc

SEQ ID NO: 10992 - DNA, 20 bp, Homo sapiens
  source 1..20: mol_type = genomic DNA; note = Gene: MERTK; note = Location (start to end; relative to TSS): MERTK_25_55; note = Orientation (relative to transcription): antisense; note = sgRNA Position: 111898638; note = Sequence Name: 56322-704_101_SL_seq_10992
cgccagcgaagctccctgtc

SEQ ID NO: 10993 - DNA, 20 bp, Homo sapiens
  source 1..20: mol_type = genomic DNA; note = Gene: MERTK; note = Location (start to end; relative to TSS): MERTK_93_123; note = Orientation (relative to transcription): antisense; note = sgRNA Position: 111898706; note = Sequence Name: 56322-704_101_SL_seq_10993
atctgtaatttctctccgga

SEQ ID NO: 10994 - DNA, 20 bp, Homo sapiens
  source 1..20: mol_type = genomic DNA; note = Gene: MERTK; note = Location (start to end; relative to TSS): MERTK_21_51; note = Orientation (relative to transcription): antisense; note = sgRNA Position: 111898634; note = Sequence Name: 56322-704_101_SL_seq_10994
agcgaagctccctgtccggg

SEQ ID NO: 10995 - DNA, 20 bp, Homo sapiens
  source 1..20: mol_type = genomic DNA; note = Gene: MERTK; note = Location (start to end; relative to TSS): MERTK_89_119; note = Orientation (relative to transcription): antisense; note = sgRNA Position: 111898702; note = Sequence Name: 56322-704_101_SL_seq_10995
gtaatttctctccggacgga

SEQ ID NO: 10996 - DNA, 20 bp, Homo sapiens
  source 1..20: mol_type = genomic DNA; note = Gene: MERTK; note = Location (start to end; relative to TSS): MERTK_23_53; note = Orientation (relative to transcription): sense; note = sgRNA Position: 111898656; note = Sequence Name: 56322-704_101_SL_seq_10996
gggagcttcgctggcgcgct

SEQ ID NO: 10997 - DNA, 20 bp, Homo sapiens
  source 1..20: mol_type = genomic DNA; note = Gene: MERTK; note = Location (start to end; relative to TSS): MERTK_69_99; note = Orientation (relative to transcription): sense; note = sgRNA Position: 111898702; note = Sequence Name: 56322-704_101_SL_seq_10997
cgtccatctgtccatccgtc

SEQ ID NO: 10998 - DNA, 20 bp, Homo sapiens
  source 1..20: mol_type = genomic DNA; note = Gene: MERTK; note = Location (start to end; relative to TSS): MERTK_24_54; note = Orientation (relative to transcription): antisense; note = sgRNA Position: 111898637; note = Sequence Name: 56322-704_101_SL_seq_10998
gccagcgaagctccctgtcc

SEQ ID NO: 10999 - DNA, 20 bp, Homo sapiens
  source 1..20: mol_type = genomic DNA; note = Gene: MERTK; note = Location (start to end; relative to TSS): MERTK_55_85; note = Orientation (relative to transcription): antisense; note = sgRNA Position: 111898668; note = Sequence Name: 56322-704_101_SL_seq_10999
tcccgaacctgtcctgtcgc

SEQ ID NO: 11000 - DNA, 20 bp, Homo sapiens
  source 1..20: mol_type = genomic DNA; note = Gene: MFAP3; note = Location (start to end; relative to TSS): MFAP3_29_59; note = Orientation (relative to transcription): sense; note = sgRNA Position: 154039022; note = Sequence Name: 56322-704_101_SL_seq_11000
cggtcgggtaggtgacggct

SEQ ID NO: 11001 - DNA, 20 bp, Homo sapiens
  source 1..20: mol_type = genomic DNA; note = Gene: MFAP3; note = Location (start to end; relative to TSS): MFAP3_91_121; note = Orientation (relative to transcription): sense; note = sgRNA Position: 154039084; note = Sequence Name: 56322-704_101_SL_seq_11001
gtgagtcgtagcctgtggct

SEQ ID NO: 11002 - DNA, 20 bp, Homo sapiens
  source 1..20: mol_type = genomic DNA; note = Gene: MFAP3; note = Location (start to end; relative to TSS): MFAP3_34_64; note = Orientation (relative to transcription): sense; note = sgRNA Position: 154039027; note = Sequence Name: 56322-704_101_SL_seq_11002
gggtaggtgacggcttggtt

SEQ ID NO: 11003 - DNA, 20 bp, Homo sapiens
  source 1..20: mol_type = genomic DNA; note = Gene: MFAP3; note = Location (start to end; relative to TSS): MFAP3_86_116; note = Orientation (relative to transcription): sense; note = sgRNA Position: 154039079; note = Sequence Name: 56322-704_101_SL_seq_11003
gaggcgtgagtcgtagcctg

SEQ ID NO: 11004 - DNA, 20 bp, Homo sapiens
  source 1..20: mol_type = genomic DNA; note = Gene: MFAP3; note = Location (start to end; relative to TSS): MFAP3_20_50; note = Orientation (relative to transcription): antisense; note = sgRNA Position: 154038993; note = Sequence Name: 56322-704_101_SL_seq_11004
gaccgccgtctagctccttc

SEQ ID NO: 11005 - DNA, 20 bp, Homo sapiens
  source 1..20: mol_type = genomic DNA; note = Gene: MFAP3; note = Location (start to end; relative to TSS): MFAP3_67_97; note = Orientation (relative to transcription): sense; note = sgRNA Position: 154039060; note = Sequence Name: 56322-704_101_SL_seq_11005
ggggactactaggagcgccg

SEQ ID NO: 11006 - DNA, 20 bp, Homo sapiens
  source 1..20: mol_type = genomic DNA; note = Gene: MFAP3; note = Location (start to end; relative to TSS): MFAP3_24_54; note = Orientation (relative to transcription): sense; note = sgRNA Position: 154039017; note = Sequence Name: 56322-704_101_SL_seq_11006
gacggcggtcgggtaggtga

SEQ ID NO: 11007 - DNA, 20 bp, Homo sapiens
  source 1..20: mol_type = genomic DNA; note = Gene: MFAP3; note = Location (start to end; relative to TSS): MFAP3_57_87; note = Orientation (relative to transcription): sense; note = sgRNA Position: 154039050; note = Sequence Name: 56322-704_101_SL_seq_11007
gtcgctgcgaggggactact

SEQ ID NO: 11008 - DNA, 20 bp, Homo sapiens
  source 1..20: mol_type = genomic DNA; note = Gene: MFAP3; note = Location (start to end; relative to TSS): MFAP3_18_48; note = Orientation (relative to transcription): sense; note = sgRNA Position: 154039011; note = Sequence Name: 56322-704_101_SL_seq_11008
gagctagacggcggtcgggt

SEQ ID NO: 11009 - DNA, 20 bp, Homo sapiens
  source 1..20: mol_type = genomic DNA; note = Gene: MFAP3; note = Location (start to end; relative to TSS): MFAP3_48_78; note = Orientation (relative to transcription): sense; note = sgRNA Position: 154039041; note = Sequence Name: 56322-704_101_SL_seq_11009
ttggttggggtcgctgcgag

SEQ ID NO: 11010 - DNA, 20 bp, Homo sapiens
  source 1..20: mol_type = genomic DNA; note = Gene: MFAP3L; note = Location (start to end; relative to TSS): MFAP3L_47_77; note = Orientation (relative to transcription): sense; note = sgRNA Position: 170026324; note = Sequence Name: 56322-704_101_SL_seq_11010
agtaggcgctaccgggcgtc

SEQ ID NO: 11011 - DNA, 20 bp, Homo sapiens
  source 1..20: mol_type = genomic DNA; note = Gene: MFAP3L; note = Location (start to end; relative to TSS): MFAP3L_88_118; note = Orientation (relative to transcription): sense; note = sgRNA Position: 170026283; note = Sequence Name: 56322-704_101_SL_seq_11011
ggccgctgtcgggctggcca

SEQ ID NO: 11012 - DNA, 20 bp, Homo sapiens
  source 1..20: mol_type = genomic DNA; note = Gene: MFAP3L; note = Location (start to end; relative to TSS): MFAP3L_40_70; note = Orientation (relative to transcription): sense; note = sgRNA Position: 170026331; note = Sequence Name: 56322-704_101_SL_seq_11012
cgcccgcagtaggcgctacc

SEQ ID NO: 11013 - DNA, 20 bp, Homo sapiens
  source 1..20: mol_type = genomic DNA; note = Gene: MFAP3L; note = Location (start to end; relative to TSS): MFAP3L_82_112; note = Orientation (relative to transcription): sense; note = sgRNA Position: 170026289; note = Sequence Name: 56322-704_101_SL_seq_11013
cgcagcggccgctgtcgggc

SEQ ID NO: 11014 - DNA, 20 bp, Homo sapiens
  source 1..20: mol_type = genomic DNA; note = Gene: MFAP3L; note = Location (start to end; relative to TSS): MFAP3L_39_69; note = Orientation (relative to transcription): sense; note = sgRNA Position: 170026332; note = Sequence Name: 56322-704_101_SL_seq_11014
tcgcccgcagtaggcgctac

SEQ ID NO: 11015 - DNA, 20 bp, Homo sapiens
  source 1..20: mol_type = genomic DNA; note = Gene: MFAP3L; note = Location (start to end; relative to TSS): MFAP3L_78_108; note = Orientation (relative to transcription): sense; note = sgRNA Position: 170026293; note = Sequence Name: 56322-704_101_SL_seq_11015
gcggcgcagcggccgctgtc

SEQ ID NO: 11016 - DNA, 20 bp, Homo sapiens
  source 1..20: mol_type = genomic DNA; note = Gene: MFAP3L; note = Location (start to end; relative to TSS): MFAP3L_34_64; note = Orientation (relative to transcription): antisense; note = sgRNA Position: 170026357; note = Sequence Name: 56322-704_101_SL_seq_11016
tgcgggcgagccgcctccgc

SEQ ID NO: 11017 - DNA, 20 bp, Homo sapiens
  source 1..20: mol_type = genomic DNA; note = Gene: MFAP3L; note = Location (start to end; relative to TSS): MFAP3L_77_107; note = Orientation (relative to transcription): sense; note = sgRNA Position: 170026294; note = Sequence Name: 56322-704_101_SL_seq_11017
tgcggcgcagcggccgctgt

SEQ ID NO: 11018 - DNA, 20 bp, Homo sapiens
  source 1..20: mol_type = genomic DNA; note = Gene: MFAP3L; note = Location (start to end; relative to TSS): MFAP3L_30_60; note = Orientation (relative to transcription): sense; note = sgRNA Position: 170026341; note = Sequence Name: 56322-704_101_SL_seq_11018
ggaggcggctcgcccgcagt

SEQ ID NO: 11019 - DNA, 20 bp, Homo sapiens
  source 1..20: mol_type = genomic DNA; note = Gene: MFAP3L; note = Location (start to end; relative to TSS): MFAP3L_75_105; note = Orientation (relative to transcription): antisense; note = sgRNA Position: 170026316; note = Sequence Name: 56322-704_101_SL_seq_11019
cgctgcgccgcactctgcgc

SEQ ID NO: 11020 - DNA, 20 bp, Homo sapiens
  source 1..20: mol_type = genomic DNA; note = Gene: MICA; note = Location (start to end; relative to TSS): MICA_50_80; note = Orientation (relative to transcription): antisense; note = sgRNA Position: 31403651; note = Sequence Name: 56322-704_101_SL_seq_11020
ccagccagaagcagaaagac

SEQ ID NO: 11021 - DNA, 20 bp, Homo sapiens
  source 1..20: mol_type = genomic DNA; note = Gene: MICA; note = Location (start to end; relative to TSS): MICA_84_114; note = Orientation (relative to transcription): sense; note = sgRNA Position: 31403705; note = Sequence Name: 56322-704_101_SL_seq_11021
cgggagctgctgctggtgag

SEQ ID NO: 11022 - DNA, 20 bp, Homo sapiens
  source 1..20: mol_type = genomic DNA; note = Gene: MICA; note = Location (start to end; relative to TSS): MICA_49_79; note = Orientation (relative to transcription): antisense; note = sgRNA Position: 31403650; note = Sequence Name: 56322-704_101_SL_seq_11022
cagccagaagcagaaagacc

SEQ ID NO: 11023 - DNA, 20 bp, Homo sapiens
  source 1..20: mol_type = genomic DNA; note = Gene: MICA; note = Location (start to end; relative to TSS): MICA_80_110; note = Orientation (relative to transcription): antisense; note = sgRNA Position: 31403681; note = Sequence Name: 56322-704_101_SL_seq_11023
gcagctcccggaggtgcaaa

SEQ ID NO: 11024 - DNA, 20 bp, Homo sapiens
  source 1..20: mol_type = genomic DNA; note = Gene: MICA; note = Location (start to end; relative to TSS): MICA_41_71; note = Orientation (relative to transcription): sense; note = sgRNA Position: 31403662; note = Sequence Name: 56322-704_101_SL_seq_11024
ccggtctttctgcttctggc

SEQ ID NO: 11025 - DNA, 20 bp, Homo sapiens
  source 1..20: mol_type = genomic DNA; note = Gene: MICA; note = Location (start to end; relative to TSS): MICA_79_109; note = Orientation (relative to transcription): antisense; note = sgRNA Position: 31403680; note = Sequence Name: 56322-704_101_SL_seq_11025
cagctcccggaggtgcaaaa

SEQ ID NO: 11026 - DNA, 20 bp, Homo sapiens
  source 1..20: mol_type = genomic DNA; note = Gene: MICA; note = Location (start to end; relative to TSS): MICA_36_66; note = Orientation (relative to transcription): antisense; note = sgRNA Position: 31403637; note = Sequence Name: 56322-704_101_SL_seq_11026
aaagaccgggcccagcccca

SEQ ID NO: 11027 - DNA, 20 bp, Homo sapiens
  source 1..20: mol_type = genomic DNA; note = Gene: MICA; note = Location (start to end; relative to TSS): MICA_77_107; note = Orientation (relative to transcription): sense; note = sgRNA Position: 31403698; note = Sequence Name: 56322-704_101_SL_seq_11027
gcacctccgggagctgctgc

SEQ ID NO: 11028 - DNA, 20 bp, Homo sapiens
  source 1..20: mol_type = genomic DNA; note = Gene: MICA; note = Location (start to end; relative to TSS): MICA_22_52; note = Orientation (relative to transcription): sense; note = sgRNA Position: 31403643; note = Sequence Name: 56322-704_101_SL_seq_11028
cggggccatggggctgggcc

SEQ ID NO: 11029 - DNA, 20 bp, Homo sapiens
  source 1..20: mol_type = genomic DNA; note = Gene: MICA; note = Location (start to end; relative to TSS): MICA_64_94; note = Orientation (relative to transcription): sense; note = sgRNA Position: 31403685; note = Sequence Name: 56322-704_101_SL_seq_11029
catcttcccttttgcacctc

SEQ ID NO: 11030 - DNA, 20 bp, Homo sapiens
  source 1..20: mol_type = genomic DNA; note = Gene: MICB; note = Location (start to end; relative to TSS): MICB_32_62; note = Orientation (relative to transcription): sense; note = sgRNA Position: 31498203; note = Sequence Name: 56322-704_101_SL_seq_11030
taggggccatggggctgggc

SEQ ID NO: 11031 - DNA, 20 bp, Homo sapiens
  source 1..20: mol_type = genomic DNA; note = Gene: MICB; note = Location (start to end; relative to TSS): MICB_86_116; note = Orientation (relative to transcription): antisense; note = sgRNA Position: 31498237; note = Sequence Name: 56322-704_101_SL_seq_11031
tgccgggggtgcaaaaggga

SEQ ID NO: 11032 - DNA, 20 bp, Homo sapiens
  source 1..20: mol_type = genomic DNA; note = Gene: MICB; note = Location (start to end; relative to TSS): MICB_21_51; note = Orientation (relative to transcription): sense; note = sgRNA Position: 31498192; note = Sequence Name: 56322-704_101_SL_seq_11032
aggtggcgacgtaggggcca

SEQ ID NO: 11033 - DNA, 20 bp, Homo sapiens
  source 1..20: mol_type = genomic DNA; note = Gene: MICB; note = Location (start to end; relative to TSS): MICB_80_110; note = Orientation (relative to transcription): antisense; note = sgRNA Position: 31498231; note = Sequence Name: 56322-704_101_SL_seq_11033
gggtgcaaaagggaaggcga

SEQ ID NO: 11034 - DNA, 20 bp, Homo sapiens
  source 1..20: mol_type = genomic DNA; note = Gene: MICB; note = Location (start to end; relative to TSS): MICB_22_52; note = Orientation (relative to transcription): sense; note = sgRNA Position: 31498193; note = Sequence Name: 56322-704_101_SL_seq_11034
ggtggcgacgtaggggccat

SEQ ID NO: 11035 - DNA, 20 bp, Homo sapiens
  source 1..20: mol_type = genomic DNA; note = Gene: MICB; note = Location (start to end; relative to TSS): MICB_75_105; note = Orientation (relative to transcription): sense; note = sgRNA Position: 31498246; note = Sequence Name: 56322-704_101_SL_seq_11035
cgccttcccttttgcacccc

SEQ ID NO: 11036 - DNA, 20 bp, Homo sapiens
  source 1..20: mol_type = genomic DNA; note = Gene: MICB; note = Location (start to end; relative to TSS): MICB_23_53; note = Orientation (relative to transcription): sense; note = sgRNA Position: 31498194; note = Sequence Name: 56322-704_101_SL_seq_11036
gtggcgacgtaggggccatg

SEQ ID NO: 11037 - DNA, 20 bp, Homo sapiens
  source 1..20: mol_type = genomic DNA; note = Gene: MICB; note = Location (start to end; relative to TSS): MICB_66_96; note = Orientation (relative to transcription): antisense; note = sgRNA Position: 31498217; note = Sequence Name: 56322-704_101_SL_seq_11037
aggcgacggccagaaacagc

SEQ ID NO: 11038 - DNA, 20 bp, Homo sapiens
  source 1..20: mol_type = genomic DNA; note = Gene: MICB; note = Location (start to end; relative to TSS): MICB_28_58; note = Orientation (relative to transcription): sense; note = sgRNA Position: 31498199; note = Sequence Name: 56322-704_101_SL_seq_11038
gacgtaggggccatggggct

SEQ ID NO: 11039 - DNA, 20 bp, Homo sapiens
  source 1..20: mol_type = genomic DNA; note = Gene: MICB; note = Location (start to end; relative to TSS): MICB_60_90; note = Orientation (relative to transcription): antisense; note = sgRNA Position: 31498211; note = Sequence Name: 56322-704_101_SL_seq_11039
cggccagaaacagcaggacc

SEQ ID NO: 11040 - DNA, 20 bp, Homo sapiens
  source 1..20: mol_type = genomic DNA; note = Gene: MILR1; note = Location (start to end; relative to TSS): MILR1_43_73; note = Orientation (relative to transcription): sense; note = sgRNA Position: 64449184; note = Sequence Name: 56322-704_101_SL_seq_11040
gaatgtggagccatttgaac

SEQ ID NO: 11041 - DNA, 20 bp, Homo sapiens
  source 1..20: mol_type = genomic DNA; note = Gene: MILR1; note = Location (start to end; relative to TSS): MILR1_115_145; note = Orientation (relative to transcription): antisense; note = sgRNA Position: 64449236; note = Sequence Name: 56322-704_101_SL_seq_11041
cgagcctcagaatgataagg

SEQ ID NO: 11042 - DNA, 20 bp, Homo sapiens
  source 1..20: mol_type = genomic DNA; note = Gene: MILR1; note = Location (start to end; relative to TSS): MILR1_30_60; note = Orientation (relative to transcription): antisense; note = sgRNA Position: 64449151; note = Sequence Name: 56322-704_101_SL_seq_11042
ctcccagttgaagtccaaga

SEQ ID NO: 11043 - DNA, 20 bp, Homo sapiens
  source 1..20: mol_type = genomic DNA; note = Gene: MILR1; note = Location (start to end; relative to TSS): MILR1_114_144; note = Orientation (relative to transcription): antisense; note = sgRNA Position: 64449235; note = Sequence Name: 56322-704_101_SL_seq_11043
gagcctcagaatgataaggg

SEQ ID NO: 11044 - DNA, 20 bp, Homo sapiens
  source 1..20: mol_type = genomic DNA; note = Gene: MILR1; note = Location (start to end; relative to TSS): MILR1_29_59; note = Orientation (relative to transcription): antisense; note = sgRNA Position: 64449150; note = Sequence Name: 56322-704_101_SL_seq_11044
tcccagttgaagtccaagac

SEQ ID NO: 11045 - DNA, 20 bp, Homo sapiens
  source 1..20: mol_type = genomic DNA; note = Gene: MILR1; note = Location (start to end; relative to TSS): MILR1_102_132; note = Orientation (relative to transcription): sense; note = sgRNA Position: 64449243; note = Sequence Name: 56322-704_101_SL_seq_11045
aagccccccttatcattctg

SEQ ID NO: 11046 - DNA, 20 bp, Homo sapiens
  source 1..20: mol_type = genomic DNA; note = Gene: MILR1; note = Location (start to end; relative to TSS): MILR1_28_58; note = Orientation (relative to transcription): antisense; note = sgRNA Position: 64449149; note = Sequence Name: 56322-704_101_SL_seq_11046
cccagttgaagtccaagacg

SEQ ID NO: 11047 - DNA, 20 bp, Homo sapiens
  source 1..20: mol_type = genomic DNA; note = Gene: MILR1; note = Location (start to end; relative to TSS): MILR1_77_107; note = Orientation (relative to transcription): antisense; note = sgRNA Position: 64449198; note = Sequence Name: 56322-704_101_SL_seq_11047
aagaaaatatgctccagaag

SEQ ID NO: 11048 - DNA, 20 bp, Homo sapiens
  source 1..20: mol_type = genomic DNA; note = Gene: MILR1; note = Location (start to end; relative to TSS): MILR1_19_49; note = Orientation (relative to transcription): sense; note = sgRNA Position: 64449160; note = Sequence Name: 56322-704_101_SL_seq_11048
ccccgtcttggacttcaact

SEQ ID NO: 11049 - DNA, 20 bp, Homo sapiens
  source 1..20: mol_type = genomic DNA; note = Gene: MILR1; note = Location (start to end; relative to TSS): MILR1_62_92; note = Orientation (relative to transcription): antisense; note = sgRNA Position: 64449183; note = Sequence Name: 56322-704_101_SL_seq_11049
agaagaggagcctgttcaaa

SEQ ID NO: 11050 - DNA, 20 bp, Homo sapiens
  source 1..20: mol_type = genomic DNA; note = Gene: MMP23A; note = Location (start to end; relative to TSS): MMP23A_36_66; note = Orientation (relative to transcription): antisense; note = sgRNA Position: 1699980; note = Sequence Name: 56322-704_101_SL_seq_11050
ggcccgggacccgggtgggg

SEQ ID NO: 11051 - DNA, 20 bp, Homo sapiens
  source 1..20: mol_type = genomic DNA; note = Gene: MMP23A; note = Location (start to end; relative to TSS): MMP23A_66_96; note = Orientation (relative to transcription): antisense; note = sgRNA Position: 1700010; note = Sequence Name: 56322-704_101_SL_seq_11051
gcgtgtagcggcgtctgcgg

SEQ ID NO: 11052 - DNA, 20 bp, Homo sapiens
  source 1..20: mol_type = genomic DNA; note = Gene: MMP23A; note = Location (start to end; relative to TSS): MMP23A_33_63; note = Orientation (relative to transcription): sense; note = sgRNA Position: 1699997; note = Sequence Name: 56322-704_101_SL_seq_11052
cacccgggtcccgggcccac

SEQ ID NO: 11053 - DNA, 20 bp, Homo sapiens
  source 1..20: mol_type = genomic DNA; note = Gene: MMP23A; note = Location (start to end; relative to TSS): MMP23A_65_95; note = Orientation (relative to transcription): antisense; note = sgRNA Position: 1700009; note = Sequence Name: 56322-704_101_SL_seq_11053
cgtgtagcggcgtctgcggg

SEQ ID NO: 11054 - DNA, 20 bp, Homo sapiens
  source 1..20: mol_type = genomic DNA; note = Gene: MMP23A; note = Location (start to end; relative to TSS): MMP23A_24_54; note = Orientation (relative to transcription): antisense; note = sgRNA Position: 1699968; note = Sequence Name: 56322-704_101_SL_seq_11054
gggtgggggggaccgccgag

SEQ ID NO: 11055 - DNA, 20 bp, Homo sapiens
  source 1..20: mol_type = genomic DNA; note = Gene: MMP23A; note = Location (start to end; relative to TSS): MMP23A_58_88; note = Orientation (relative to transcription): antisense; note = sgRNA Position: 1700002; note = Sequence Name: 56322-704_101_SL_seq_11055
cggcgtctgcggggggccag

SEQ ID NO: 11056 - DNA, 20 bp, Homo sapiens
  source 1..20: mol_type = genomic DNA; note = Gene: MMP23A; note = Location (start to end; relative to TSS): MMP23A_25_55; note = Orientation (relative to transcription): sense; note = sgRNA Position: 1699989; note = Sequence Name: 56322-704_101_SL_seq_11056
gtcccccccacccgggtccc

SEQ ID NO: 11057 - DNA, 20 bp, Homo sapiens
  source 1..20: mol_type = genomic DNA; note = Gene: MMP23A; note = Location (start to end; relative to TSS): MMP23A_57_87; note = Orientation (relative to transcription): antisense; note = sgRNA Position: 1700001; note = Sequence Name: 56322-704_101_SL_seq_11057
ggcgtctgcggggggccagt

SEQ ID NO: 11058 - DNA, 20 bp, Homo sapiens
  source 1..20: mol_type = genomic DNA; note = Gene: MMP23A; note = Location (start to end; relative to TSS): MMP23A_18_48; note = Orientation (relative to transcription): sense; note = sgRNA Position: 1699982; note = Sequence Name: 56322-704_101_SL_seq_11058
ctcggcggtcccccccaccc

SEQ ID NO: 11059 - DNA, 20 bp, Homo sapiens
  source 1..20: mol_type = genomic DNA; note = Gene: MMP23A; note = Location (start to end; relative to TSS): MMP23A_51_81; note = Orientation (relative to transcription): antisense; note = sgRNA Position: 1699995; note = Sequence Name: 56322-704_101_SL_seq_11059
tgcggggggccagtgggccc

SEQ ID NO: 11060 - DNA, 20 bp, Homo sapiens
  source 1..20: mol_type = genomic DNA; note = Gene: MMP23B; note = Location (start to end; relative to TSS): MMP23B_25_55; note = Orientation (relative to transcription): sense; note = sgRNA Position: 1632224; note = Sequence Name: 56322-704_101_SL_seq_11060
agcaagtctgccatgggccg

SEQ ID NO: 11061 - DNA, 20 bp, Homo sapiens
  source 1..20: mol_type = genomic DNA; note = Gene: MMP23B; note = Location (start to end; relative to TSS): MMP23B_66_96; note = Orientation (relative to transcription): antisense; note = sgRNA Position: 1632245; note = Sequence Name: 56322-704_101_SL_seq_11061
ctgcccccggggcctccgag

SEQ ID NO: 11062 - DNA, 20 bp, Homo sapiens
  source 1..20: mol_type = genomic DNA; note = Gene: MMP23B; note = Location (start to end; relative to TSS): MMP23B_27_57; note = Orientation (relative to transcription): sense; note = sgRNA Position: 1632226; note = Sequence Name: 56322-704_101_SL_seq_11062
caagtctgccatgggccgcg

SEQ ID NO: 11063 - DNA, 20 bp, Homo sapiens
  source 1..20: mol_type = genomic DNA; note = Gene: MMP23B; note = Location (start to end; relative to TSS): MMP23B_59_89; note = Orientation (relative to transcription): antisense; note = sgRNA Position: 1632238; note = Sequence Name: 56322-704_101_SL_seq_11063
cggggcctccgaggggacac

SEQ ID NO: 11064 - DNA, 20 bp, Homo sapiens
  source 1..20: mol_type = genomic DNA; note = Gene: MMP23B; note = Location (start to end; relative to TSS): MMP23B_18_48; note = Orientation (relative to transcription): sense; note = sgRNA Position: 1632217; note = Sequence Name: 56322-704_101_SL_seq_11064
gccccacagcaagtctgcca

SEQ ID NO: 11065 - DNA, 20 bp, Homo sapiens
  source 1..20: mol_type = genomic DNA; note = Gene: MMP23B; note = Location (start to end; relative to TSS): MMP23B_53_83; note = Orientation (relative to transcription): sense; note = sgRNA Position: 1632252; note = Sequence Name: 56322-704_101_SL_seq_11065
gtgtcccctcggaggccccg

SEQ ID NO: 11066 - DNA, 20 bp, Homo sapiens
  source 1..20: mol_type = genomic DNA; note = Gene: MMP23B; note = Location (start to end; relative to TSS): MMP23B_19_49; note = Orientation (relative to transcription): sense; note = sgRNA Position: 1632218; note = Sequence Name: 56322-704_101_SL_seq_11066
ccccacagcaagtctgccat

SEQ ID NO: 11067 - DNA, 20 bp, Homo sapiens
  source 1..20: mol_type = genomic DNA; note = Gene: MMP23B; note = Location (start to end; relative to TSS): MMP23B_52_82; note = Orientation (relative to transcription): sense; note = sgRNA Position: 1632251; note = Sequence Name: 56322-704_101_SL_seq_11067
cgtgtcccctcggaggcccc

SEQ ID NO: 11068 - DNA, 20 bp, Homo sapiens
  source 1..20: mol_type = genomic DNA; note = Gene: MMP23B; note = Location (start to end; relative to TSS): MMP23B_21_51; note = Orientation (relative to transcription): antisense; note = sgRNA Position: 1632200; note = Sequence Name: 56322-704_101_SL_seq_11068
cagacttgctgtggggctca

SEQ ID NO: 11069 - DNA, 20 bp, Homo sapiens
  source 1..20: mol_type = genomic DNA; note = Gene: MMP23B; note = Location (start to end; relative to TSS): MMP23B_51_81; note = Orientation (relative to transcription): antisense; note = sgRNA Position: 1632230; note = Sequence Name: 56322-704_101_SL_seq_11069
ccgaggggacacgggccccg

SEQ ID NO: 11070 - DNA, 20 bp, Homo sapiens
  source 1..20: mol_type = genomic DNA; note = Gene: MOG; note = Location (start to end; relative to TSS): MOG_42_72; note = Orientation (relative to transcription): sense; note = sgRNA Position: 29657160; note = Sequence Name: 56322-704_101_SL_seq_11070
gcaccccaagggcctccact

SEQ ID NO: 11071 - DNA, 20 bp, Homo sapiens
  source 1..20: mol_type = genomic DNA; note = Gene: MOG; note = Location (start to end; relative to TSS): MOG_74_104; note = Orientation (relative to transcription): antisense; note = sgRNA Position: 29657172; note = Sequence Name: 56322-704_101_SL_seq_11071
agagcccccgcagcaaggtc

SEQ ID NO: 11072 - DNA, 20 bp, Homo sapiens
  source 1..20: mol_type = genomic DNA; note = Gene: MOG; note = Location (start to end; relative to TSS): MOG_31_61; note = Orientation (relative to transcription): sense; note = sgRNA Position: 29657149; note = Sequence Name: 56322-704_101_SL_seq_11072
taaggggacatgcaccccaa

SEQ ID NO: 11073 - DNA, 20 bp, Homo sapiens
  source 1..20: mol_type = genomic DNA; note = Gene: MOG; note = Location (start to end; relative to TSS): MOG_61_91; note = Orientation (relative to transcription): sense; note = sgRNA Position: 29657179; note = Sequence Name: 56322-704_101_SL_seq_11073
ttggcctgaccttgctgcgg

SEQ ID NO: 11074 - DNA, 20 bp, Homo sapiens
  source 1..20: mol_type = genomic DNA; note = Gene: MOG; note = Location (start to end; relative to TSS): MOG_30_60; note = Orientation (relative to transcription): sense; note = sgRNA Position: 29657148; note = Sequence Name: 56322-704_101_SL_seq_11074
gtaaggggacatgcacccca

SEQ ID NO: 11075 - DNA, 20 bp, Homo sapiens
  source 1..20: mol_type = genomic DNA; note = Gene: MOG; note = Location (start to end; relative to TSS): MOG_60_90; note = Orientation (relative to transcription): sense; note = sgRNA Position: 29657178; note = Sequence Name: 56322-704_101_SL_seq_11075
cttggcctgaccttgctgcg

SEQ ID NO: 11076 - DNA, 20 bp, Homo sapiens
  source 1..20: mol_type = genomic DNA; note = Gene: MOG; note = Location (start to end; relative to TSS): MOG_22_52; note = Orientation (relative to transcription): antisense; note = sgRNA Position: 29657120; note = Sequence Name: 56322-704_101_SL_seq_11076
ccttactgctgaaaagccca

SEQ ID NO: 11077 - DNA, 20 bp, Homo sapiens
  source 1..20: mol_type = genomic DNA; note = Gene: MOG; note = Location (start to end; relative to TSS): MOG_55_85; note = Orientation (relative to transcription): antisense; note = sgRNA Position: 29657153; note = Sequence Name: 56322-704_101_SL_seq_11077
caggccaagtggaggccctt

SEQ ID NO: 11078 - DNA, 20 bp, Homo sapiens
  source 1..20: mol_type = genomic DNA; note = Gene: MOG; note = Location (start to end; relative to TSS): MOG_21_51; note = Orientation (relative to transcription): antisense; note = sgRNA Position: 29657119; note = Sequence Name: 56322-704_101_SL_seq_11078
cttactgctgaaaagcccaa

SEQ ID NO: 11079 - DNA, 20 bp, Homo sapiens
  source 1..20: mol_type = genomic DNA; note = Gene: MOG; note = Location (start to end; relative to TSS): MOG_54_84; note = Orientation (relative to transcription): antisense; note = sgRNA Position: 29657152; note = Sequence Name: 56322-704_101_SL_seq_11079
aggccaagtggaggcccttg

SEQ ID NO: 11080 - DNA, 20 bp, Homo sapiens
  source 1..20: mol_type = genomic DNA; note = Gene: MPZ; note = Location (start to end; relative to TSS): MPZ_39_69; note = Orientation (relative to transcription): antisense; note = sgRNA Position: 161309925; note = Sequence Name: 56322-704_101_SL_seq_11080
ctggggcaggggcaggggcc

SEQ ID NO: 11081 - DNA, 20 bp, Homo sapiens
  source 1..20: mol_type = genomic DNA; note = Gene: MPZ; note = Location (start to end; relative to TSS): MPZ_75_105; note = Orientation (relative to transcription): sense; note = sgRNA Position: 161309869; note = Sequence Name: 56322-704_101_SL_seq_11081
atccagccccagccctatcc

SEQ ID NO: 11082 - DNA, 20 bp, Homo sapiens
  source 1..20: mol_type = genomic DNA; note = Gene: MPZ; note = Location (start to end; relative to TSS): MPZ_36_66; note = Orientation (relative to transcription): sense; note = sgRNA Position: 161309908; note = Sequence Name: 56322-704_101_SL_seq_11082
ccctgcccctgccccagcta

SEQ ID NO: 11083 - DNA, 20 bp, Homo sapiens
  source 1..20: mol_type = genomic DNA; note = Gene: MPZ; note = Location (start to end; relative to TSS): MPZ_70_100; note = Orientation (relative to transcription): antisense; note = sgRNA Position: 161309894; note = Sequence Name: 56322-704_101_SL_seq_11083
gggctggatgagggagcccc

SEQ ID NO: 11084 - DNA, 20 bp, Homo sapiens
  source 1..20: mol_type = genomic DNA; note = Gene: MPZ; note = Location (start to end; relative to TSS): MPZ_28_58; note = Orientation (relative to transcription): antisense; note = sgRNA Position: 161309936; note = Sequence Name: 56322-704_101_SL_seq_11084
gcaggggcccggagcatctg

SEQ ID NO: 11085 - DNA, 20 bp, Homo sapiens
  source 1..20: mol_type = genomic DNA; note = Gene: MPZ; note = Location (start to end; relative to TSS): MPZ_58_88; note = Orientation (relative to transcription): antisense; note = sgRNA Position: 161309906; note = Sequence Name: 56322-704_101_SL_seq_11085
ggagccccaggagccatagc

SEQ ID NO: 11086 - DNA, 20 bp, Homo sapiens
  source 1..20: mol_type = genomic DNA; note = Gene: MPZ; note = Location (start to end; relative to TSS): MPZ_27_57; note = Orientation (relative to transcription): antisense; note = sgRNA Position: 161309937; note = Sequence Name: 56322-704_101_SL_seq_11086
caggggcccggagcatctgt

SEQ ID NO: 11087 - DNA, 20 bp, Homo sapiens
  source 1..20: mol_type = genomic DNA; note = Gene: MPZ; note = Location (start to end; relative to TSS): MPZ_57_87; note = Orientation (relative to transcription): antisense; note = sgRNA Position: 161309907; note = Sequence Name: 56322-704_101_SL_seq_11087
gagccccaggagccatagct

SEQ ID NO: 11088 - DNA, 20 bp, Homo sapiens
  source 1..20: mol_type = genomic DNA; note = Gene: MPZ; note = Location (start to end; relative to TSS): MPZ_26_56; note = Orientation (relative to transcription): antisense; note = sgRNA Position: 161309938; note = Sequence Name: 56322-704_101_SL_seq_11088
aggggcccggagcatctgtg

SEQ ID NO: 11089 - DNA, 20 bp, Homo sapiens
  source 1..20: mol_type = genomic DNA; note = Gene: MPZ; note = Location (start to end; relative to TSS): MPZ_56_86; note = Orientation (relative to transcription): antisense; note = sgRNA Position: 161309908; note = Sequence Name: 56322-704_101_SL_seq_11089
agccccaggagccatagctg

SEQ ID NO: 11090 - DNA, 20 bp, Homo sapiens
  source 1..20: mol_type = genomic DNA; note = Gene: MPZL1; note = Location (start to end; relative to TSS): MPZL1_36_66; note = Orientation (relative to transcription): sense; note = sgRNA Position: 167722044; note = Sequence Name: 56322-704_101_SL_seq_11090
gtggaggtgccacccggcgc

SEQ ID NO: 11091 - DNA, 20 bp, Homo sapiens
  source 1..20: mol_type = genomic DNA; note = Gene: MPZL1; note = Location (start to end; relative to TSS): MPZL1_87_117; note = Orientation (relative to transcription): sense; note = sgRNA Position: 167722095; note = Sequence Name: 56322-704_101_SL_seq_11091
aagccgagccaacctcagcg

SEQ ID NO: 11092 - DNA, 20 bp, Homo sapiens
  source 1..20: mol_type = genomic DNA; note = Gene: MPZL1; note = Location (start to end; relative to TSS): MPZL1_35_65; note = Orientation (relative to transcription): sense; note = sgRNA Position: 167722043; note = Sequence Name: 56322-704_101_SL_seq_11092
cgtggaggtgccacccggcg

SEQ ID NO: 11093 - DNA, 20 bp, Homo sapiens
  source 1..20: mol_type = genomic DNA; note = Gene: MPZL1; note = Location (start to end; relative to TSS): MPZL1_86_116; note = Orientation (relative to transcription): sense; note = sgRNA Position: 167722094; note = Sequence Name: 56322-704_101_SL_seq_11093
caagccgagccaacctcagc

SEQ ID NO: 11094 - DNA, 20 bp, Homo sapiens
  source 1..20: mol_type = genomic DNA; note = Gene: MPZL1; note = Location (start to end; relative to TSS): MPZL1_30_60; note = Orientation (relative to transcription): sense; note = sgRNA Position: 167722038; note = Sequence Name: 56322-704_101_SL_seq_11094
cgcggcgtggaggtgccacc

SEQ ID NO: 11095 - DNA, 20 bp, Homo sapiens
  source 1..20: mol_type = genomic DNA; note = Gene: MPZL1; note = Location (start to end; relative to TSS): MPZL1_85_115; note = Orientation (relative to transcription): sense; note = sgRNA Position: 167722093; note = Sequence Name: 56322-704_101_SL_seq_11095
ccaagccgagccaacctcag

SEQ ID NO: 11096 - DNA, 20 bp, Homo sapiens
  source 1..20: mol_type = genomic DNA; note = Gene: MPZL1; note = Location (start to end; relative to TSS): MPZL1_26_56; note = Orientation (relative to transcription): antisense; note = sgRNA Position: 167722014; note = Sequence Name: 56322-704_101_SL_seq_11096
ccacgccgcgctccccactc

SEQ ID NO: 11097 - DNA, 20 bp, Homo sapiens
  source 1..20: mol_type = genomic DNA; note = Gene: MPZL1; note = Location (start to end; relative to TSS): MPZL1_57_87; note = Orientation (relative to transcription): antisense; note = sgRNA Position: 167722045; note = Sequence Name: 56322-704_101_SL_seq_11097
atctctccgccacccgcgcc

SEQ ID NO: 11098 - DNA, 20 bp, Homo sapiens
  source 1..20: mol_type = genomic DNA; note = Gene: MPZL1; note = Location (start to end; relative to TSS): MPZL1_20_50; note = Orientation (relative to transcription): sense; note = sgRNA Position: 167722028; note = Sequence Name: 56322-704_101_SL_seq_11098
gagtggggagcgcggcgtgg

SEQ ID NO: 11099 - DNA, 20 bp, Homo sapiens
  source 1..20: mol_type = genomic DNA; note = Gene: MPZL1; note = Location (start to end; relative to TSS): MPZL1_54_84; note = Orientation (relative to transcription): antisense; note = sgRNA Position: 167722042; note = Sequence Name: 56322-704_101_SL_seq_11099
tctccgccacccgcgccggg

SEQ ID NO: 11100 - DNA, 20 bp, Homo sapiens
  source 1..20: mol_type = genomic DNA; note = Gene: MPZL2; note = Location (start to end; relative to TSS): MPZL2_45_75; note = Orientation (relative to transcription): sense; note = sgRNA Position: 118264228; note = Sequence Name: 56322-704_101_SL_seq_11100
ggtgcttgctcctcccggag

SEQ ID NO: 11101 - DNA, 20 bp, Homo sapiens
  source 1..20: mol_type = genomic DNA; note = Gene: MPZL2; note = Location (start to end; relative to TSS): MPZL2_77_107; note = Orientation (relative to transcription): antisense; note = sgRNA Position: 118264216; note = Sequence Name: 56322-704_101_SL_seq_11101
agggctccaacaccctgcca

SEQ ID NO: 11102 - DNA, 20 bp, Homo sapiens
  source 1..20: mol_type = genomic DNA; note = Gene: MPZL2; note = Location (start to end; relative to TSS): MPZL2_40_70; note = Orientation (relative to transcription): sense; note = sgRNA Position: 118264233; note = Sequence Name: 56322-704_101_SL_seq_11102
aacgcggtgcttgctcctcc

SEQ ID NO: 11103 - DNA, 20 bp, Homo sapiens
  source 1..20: mol_type = genomic DNA; note = Gene: MPZL2; note = Location (start to end; relative to TSS): MPZL2_71_101; note = Orientation (relative to transcription): sense; note = sgRNA Position: 118264202; note = Sequence Name: 56322-704_101_SL_seq_11103
tggcagggtgttggagccct

SEQ ID NO: 11104 - DNA, 20 bp, Homo sapiens
  source 1..20: mol_type = genomic DNA; note = Gene: MPZL2; note = Location (start to end; relative to TSS): MPZL2_24_54; note = Orientation (relative to transcription): sense; note = sgRNA Position: 118264249; note = Sequence Name: 56322-704_101_SL_seq_11104
ctcctctctctgggaaaacg

SEQ ID NO: 11105 - DNA, 20 bp, Homo sapiens
  source 1..20: mol_type = genomic DNA; note = Gene: MPZL2; note = Location (start to end; relative to TSS): MPZL2_56_86; note = Orientation (relative to transcription): sense; note = sgRNA Position: 118264217; note = Sequence Name: 56322-704_101_SL_seq_11105
ctcccggagtggccttggca

SEQ ID NO: 11106 - DNA, 20 bp, Homo sapiens
  source 1..20: mol_type = genomic DNA; note = Gene: MPZL2; note = Location (start to end; relative to TSS): MPZL2_15_45; note = Orientation (relative to transcription): sense; note = sgRNA Position: 118264258; note = Sequence Name: 56322-704_101_SL_seq_11106
caactcaaactcctctctct

SEQ ID NO: 11107 - DNA, 20 bp, Homo sapiens
  source 1..20: mol_type = genomic DNA; note = Gene: MPZL2; note = Location (start to end; relative to TSS): MPZL2_55_85; note = Orientation (relative to transcription): sense; note = sgRNA Position: 118264218; note = Sequence Name: 56322-704_101_SL_seq_11107
cctcccggagtggccttggc

SEQ ID NO: 11108 - DNA, 20 bp, Homo sapiens
  source 1..20: mol_type = genomic DNA; note = Gene: MPZL2; note = Location (start to end; relative to TSS): MPZL2_14_44; note = Orientation (relative to transcription): sense; note = sgRNA Position: 118264259; note = Sequence Name: 56322-704_101_SL_seq_11108
tcaactcaaactcctctctc

SEQ ID NO: 11109 - DNA, 20 bp, Homo sapiens
  source 1..20: mol_type = genomic DNA; note = Gene: MPZL2; note = Location (start to end; relative to TSS): MPZL2_45_75; note = Orientation (relative to transcription): sense; note = sgRNA Position: 118264228; note = Sequence Name: 56322-704_101_SL_seq_11109
ggtgcttgctcctcccggag

SEQ ID NO: 11110 - DNA, 20 bp, Homo sapiens
  source 1..20: mol_type = genomic DNA; note = Gene: MPZL3; note = Location (start to end; relative to TSS): MPZL3_39_69; note = Orientation (relative to transcription): sense; note = sgRNA Position: 118252302; note = Sequence Name: 56322-704_101_SL_seq_11110
gcaagcatctgaagagctgc

SEQ ID NO: 11111 - DNA, 20 bp, Homo sapiens
  source 1..20: mol_type = genomic DNA; note = Gene: MPZL3; note = Location (start to end; relative to TSS): MPZL3_114_144; note = Orientation (relative to transcription): sense; note = sgRNA Position: 118252227; note = Sequence Name: 56322-704_101_SL_seq_11111
ctgggcgtcctgttcttcca

SEQ ID NO: 11112 - DNA, 20 bp, Homo sapiens
  source 1..20: mol_type = genomic DNA; note = Gene: MPZL3; note = Location (start to end; relative to TSS): MPZL3_40_70; note = Orientation (relative to transcription): sense; note = sgRNA Position: 118252301; note = Sequence Name: 56322-704_101_SL_seq_11112
caagcatctgaagagctgcc

SEQ ID NO: 11113 - DNA, 20 bp, Homo sapiens
  source 1..20: mol_type = genomic DNA; note = Gene: MPZL3; note = Location (start to end; relative to TSS): MPZL3_98_128; note = Orientation (relative to transcription): antisense; note = sgRNA Position: 118252263; note = Sequence Name: 56322-704_101_SL_seq_11113
gagggaagagagcgcagcca

SEQ ID NO: 11114 - DNA, 20 bp, Homo sapiens
  source 1..20: mol_type = genomic DNA; note = Gene: MPZL3; note = Location (start to end; relative to TSS): MPZL3_26_56; note = Orientation (relative to transcription): antisense; note = sgRNA Position: 118252335; note = Sequence Name: 56322-704_101_SL_seq_11114
cacaccttgtttacagctcc

SEQ ID NO: 11115 - DNA, 20 bp, Homo sapiens
  source 1..20: mol_type = genomic DNA; note = Gene: MPZL3; note = Location (start to end; relative to TSS): MPZL3_96_126; note = Orientation (relative to transcription): sense; note = sgRNA Position: 118252245; note = Sequence Name: 56322-704_101_SL_seq_11115
tgcgctctcttccctctgct

SEQ ID NO: 11116 - DNA, 20 bp, Homo sapiens
  source 1..20: mol_type = genomic DNA; note = Gene: MPZL3; note = Location (start to end; relative to TSS): MPZL3_14_44; note = Orientation (relative to transcription): antisense; note = sgRNA Position: 118252347; note = Sequence Name: 56322-704_101_SL_seq_11116
acagctcccggtaacgacac

SEQ ID NO: 11117 - DNA, 20 bp, Homo sapiens
  source 1..20: mol_type = genomic DNA; note = Gene: MPZL3; note = Location (start to end; relative to TSS): MPZL3_72_102; note = Orientation (relative to transcription): sense; note = sgRNA Position: 118252269; note = Sequence Name: 56322-704_101_SL_seq_11117
agaggagcagctggaagccg

SEQ ID NO: 11118 - DNA, 20 bp, Homo sapiens
  source 1..20: mol_type = genomic DNA; note = Gene: MPZL3; note = Location (start to end; relative to TSS): MPZL3_13_43; note = Orientation (relative to transcription): sense; note = sgRNA Position: 118252328; note = Sequence Name: 56322-704_101_SL_seq_11118
gttaccgggagctgtaaaca

SEQ ID NO: 11119 - DNA, 20 bp, Homo sapiens
  source 1..20: mol_type = genomic DNA; note = Gene: MPZL3; note = Location (start to end; relative to TSS): MPZL3_67_97; note = Orientation (relative to transcription): antisense; note = sgRNA Position: 118252294; note = Sequence Name: 56322-704_101_SL_seq_11119
tgctcctctctgctgcatcc

SEQ ID NO: 11120 - DNA, 20 bp, Homo sapiens
  source 1..20: mol_type = genomic DNA; note = Gene: MR1; note = Location (start to end; relative to TSS): MR1_45_75; note = Orientation (relative to transcription): antisense; note = sgRNA Position: 181034034; note = Sequence Name: 56322-704_101_SL_seq_11120
acacaatgatgagaggtaac

SEQ ID NO: 11121 - DNA, 20 bp, Homo sapiens
  source 1..20: mol_type = genomic DNA; note = Gene: MR1; note = Location (start to end; relative to TSS): MR1_100_130; note = Orientation (relative to transcription): antisense; note = sgRNA Position: 181034089; note = Sequence Name: 56322-704_101_SL_seq_11121
gttaggagagaagaggacgt

SEQ ID NO: 11122 - DNA, 20 bp, Homo sapiens
  source 1..20: mol_type = genomic DNA; note = Gene: MR1; note = Location (start to end; relative to TSS): MR1_52_82; note = Orientation (relative to transcription): antisense; note = sgRNA Position: 181034041; note = Sequence Name: 56322-704_101_SL_seq_11122
accattaacacaatgatgag

SEQ ID NO: 11123 - DNA, 20 bp, Homo sapiens
  source 1..20: mol_type = genomic DNA; note = Gene: MR1; note = Location (start to end; relative to TSS): MR1_90_120; note = Orientation (relative to transcription): antisense; note = sgRNA Position: 181034079; note = Sequence Name: 56322-704_101_SL_seq_11123
aagaggacgtgggatactca

SEQ ID NO: 11124 - DNA, 20 bp, Homo sapiens
  source 1..20: mol_type = genomic DNA; note = Gene: MR1; note = Location (start to end; relative to TSS): MR1_9_39; note = Orientation (relative to transcription): sense; note = sgRNA Position: 181034018; note = Sequence Name: 56322-704_101_SL_seq_11124
aaggactatgggggaactga

SEQ ID NO: 11125 - DNA, 20 bp, Homo sapiens
  source 1..20: mol_type = genomic DNA; note = Gene: MR1; note = Location (start to end; relative to TSS): MR1_89_119; note = Orientation (relative to transcription): antisense; note = sgRNA Position: 181034078; note = Sequence Name: 56322-704_101_SL_seq_11125
agaggacgtgggatactcac

SEQ ID NO: 11126 - DNA, 20 bp, Homo sapiens
  source 1..20: mol_type = genomic DNA; note = Gene: MR1; note = Location (start to end; relative to TSS): MR1_0_30; note = Orientation (relative to transcription): sense; note = sgRNA Position: 181034009; note = Sequence Name: 56322-704_101_SL_seq_11126
cggaaagagaaggactatgg

SEQ ID NO: 11127 - DNA, 20 bp, Homo sapiens
  source 1..20: mol_type = genomic DNA; note = Gene: MR1; note = Location (start to end; relative to TSS): MR1_52_82; note = Orientation (relative to transcription): antisense; note = sgRNA Position: 181034041; note = Sequence Name: 56322-704_101_SL_seq_11127
accattaacacaatgatgag

SEQ ID NO: 11128 - DNA, 20 bp, Homo sapiens
  source 1..20: mol_type = genomic DNA; note = Gene: MR1; note = Location (start to end; relative to TSS): MR1_-1_29; note = Orientation (relative to transcription): sense; note = sgRNA Position: 181034008; note = Sequence Name: 56322-704_101_SL_seq_11128
ccggaaagagaaggactatg

SEQ ID NO: 11129 - DNA, 20 bp, Homo sapiens
  source 1..20: mol_type = genomic DNA; note = Gene: MR1; note = Location (start to end; relative to TSS): MR1_45_75; note = Orientation (relative to transcription): antisense; note = sgRNA Position: 181034034; note = Sequence Name: 56322-704_101_SL_seq_11129
acacaatgatgagaggtaac

SEQ ID NO: 11130 - DNA, 20 bp, Homo sapiens
  source 1..20: mol_type = genomic DNA; note = Gene: MUSK; note = Location (start to end; relative to TSS): MUSK_65_95; note = Orientation (relative to transcription): antisense; note = sgRNA Position: 110668862; note = Sequence Name: 56322-704_101_SL_seq_11130
agttccttctggacaacgca

SEQ ID NO: 11131 - DNA, 20 bp, Homo sapiens
  source 1..20: mol_type = genomic DNA; note = Gene: MUSK; note = Location (start to end; relative to TSS): MUSK_102_132; note = Orientation (relative to transcription): antisense; note = sgRNA Position: 110668899; note = Sequence Name: 56322-704_101_SL_seq_11131
agctctctcatgattaatcc

SEQ ID NO: 11132 - DNA, 20 bp, Homo sapiens
  source 1..20: mol_type = genomic DNA; note = Gene: MUSK; note = Location (start to end; relative to TSS): MUSK_58_88; note = Orientation (relative to transcription): antisense; note = sgRNA Position: 110668855; note = Sequence Name: 56322-704_101_SL_seq_11132
tctggacaacgcaaggaaaa

SEQ ID NO: 11133 - DNA, 20 bp, Homo sapiens
  source 1..20: mol_type = genomic DNA; note = Gene: MUSK; note = Location (start to end; relative to TSS): MUSK_92_122; note = Orientation (relative to transcription): antisense; note = sgRNA Position: 110668889; note = Sequence Name: 56322-704_101_SL_seq_11133
tgattaatccaggctcacgc

SEQ ID NO: 11134 - DNA, 20 bp, Homo sapiens
  source 1..20: mol_type = genomic DNA; note = Gene: MUSK; note = Location (start to end; relative to TSS): MUSK_24_54; note = Orientation (relative to transcription): sense; note = sgRNA Position: 110668841; note = Sequence Name: 56322-704_101_SL_seq_11134
atgctttaaaatgtaaactg

SEQ ID NO: 11135 - DNA, 20 bp, Homo sapiens
  source 1..20: mol_type = genomic DNA; note = Gene: MUSK; note = Location (start to end; relative to TSS): MUSK_75_105; note = Orientation (relative to transcription): sense; note = sgRNA Position: 110668892; note = Sequence Name: 56322-704_101_SL_seq_11135
aacttcgtcctgcgtgagcc

SEQ ID NO: 11136 - DNA, 20 bp, Homo sapiens
  source 1..20: mol_type = genomic DNA; note = Gene: MUSK; note = Location (start to end; relative to TSS): MUSK_17_47; note = Orientation (relative to transcription): antisense; note = sgRNA Position: 110668814; note = Sequence Name: 56322-704_101_SL_seq_11136
aaagcatactttgttgcaaa

SEQ ID NO: 11137 - DNA, 20 bp, Homo sapiens
  source 1..20: mol_type = genomic DNA; note = Gene: MUSK; note = Location (start to end; relative to TSS): MUSK_65_95; note = Orientation (relative to transcription): antisense; note = sgRNA Position: 110668862; note = Sequence Name: 56322-704_101_SL_seq_11137
agttccttctggacaacgca

SEQ ID NO: 11138 - DNA, 20 bp, Homo sapiens
  source 1..20: mol_type = genomic DNA; note = Gene: MUSK; note = Location (start to end; relative to TSS): MUSK_16_46; note = Orientation (relative to transcription): antisense; note = sgRNA Position: 110668813; note = Sequence Name: 56322-704_101_SL_seq_11138
aagcatactttgttgcaaaa

SEQ ID NO: 11139 - DNA, 20 bp, Homo sapiens
  source 1..20: mol_type = genomic DNA; note = Gene: MUSK; note = Location (start to end; relative to TSS): MUSK_58_88; note = Orientation (relative to transcription): antisense; note = sgRNA Position: 110668855; note = Sequence Name: 56322-704_101_SL_seq_11139
tctggacaacgcaaggaaaa

SEQ ID NO: 11140 - DNA, 20 bp, Homo sapiens
  source 1..20: mol_type = genomic DNA; note = Gene: MXRA5; note = Location (start to end; relative to TSS): MXRA5_31_61; note = Orientation (relative to transcription): antisense; note = sgRNA Position: 3346617; note = Sequence Name: 56322-704_101_SL_seq_11140
gccggggccatgcccttccc

SEQ ID NO: 11141 - DNA, 20 bp, Homo sapiens
  source 1..20: mol_type = genomic DNA; note = Gene: MXRA5; note = Location (start to end; relative to TSS): MXRA5_64_94; note = Orientation (relative to transcription): antisense; note = sgRNA Position: 3346584; note = Sequence Name: 56322-704_101_SL_seq_11141
gagccggggcgcgcgagtca

SEQ ID NO: 11142 - DNA, 20 bp, Homo sapiens
  source 1..20: mol_type = genomic DNA; note = Gene: MXRA5; note = Location (start to end; relative to TSS): MXRA5_30_60; note = Orientation (relative to transcription): antisense; note = sgRNA Position: 3346618; note = Sequence Name: 56322-704_101_SL_seq_11142
ccggggccatgcccttcccg

SEQ ID NO: 11143 - DNA, 20 bp, Homo sapiens
  source 1..20: mol_type = genomic DNA; note = Gene: MXRA5; note = Location (start to end; relative to TSS): MXRA5_60_90; note = Orientation (relative to transcription): sense; note = sgRNA Position: 3346568; note = Sequence Name: 56322-704_101_SL_seq_11143
actcgcgcgccccggctcgg

SEQ ID NO: 11144 - DNA, 20 bp, Homo sapiens
  source 1..20: mol_type = genomic DNA; note = Gene: MXRA5; note = Location (start to end; relative to TSS): MXRA5_23_53; note = Orientation (relative to transcription): antisense; note = sgRNA Position: 3346625; note = Sequence Name: 56322-704_101_SL_seq_11144
catgcccttcccggggccgg

SEQ ID NO: 11145 - DNA, 20 bp, Homo sapiens
  source 1..20: mol_type = genomic DNA; note = Gene: MXRA5; note = Location (start to end; relative to TSS): MXRA5_57_87; note = Orientation (relative to transcription): sense; note = sgRNA Position: 3346571; note = Sequence Name: 56322-704_101_SL_seq_11145
gtgactcgcgcgccccggct

SEQ ID NO: 11146 - DNA, 20 bp, Homo sapiens
  source 1..20: mol_type = genomic DNA; note = Gene: MXRA5; note = Location (start to end; relative to TSS): MXRA5_21_51; note = Orientation (relative to transcription): sense; note = sgRNA Position: 3346607; note = Sequence Name: 56322-704_101_SL_seq_11146
ccccgggaagggcatggccc

SEQ ID NO: 11147 - DNA, 20 bp, Homo sapiens
  source 1..20: mol_type = genomic DNA; note = Gene: MXRA5; note = Location (start to end; relative to TSS): MXRA5_52_82; note = Orientation (relative to transcription): sense; note = sgRNA Position: 3346576; note = Sequence Name: 56322-704_101_SL_seq_11147
cggccgtgactcgcgcgccc

SEQ ID NO: 11148 - DNA, 20 bp, Homo sapiens
  source 1..20: mol_type = genomic DNA; note = Gene: MXRA5; note = Location (start to end; relative to TSS): MXRA5_18_48; note = Orientation (relative to transcription): antisense; note = sgRNA Position: 3346630; note = Sequence Name: 56322-704_101_SL_seq_11148
ccttcccggggccgggggtg

SEQ ID NO: 11149 - DNA, 20 bp, Homo sapiens
  source 1..20: mol_type = genomic DNA; note = Gene: MXRA5; note = Location (start to end; relative to TSS): MXRA5_48_78; note = Orientation (relative to transcription): antisense; note = sgRNA Position: 3346600; note = Sequence Name: 56322-704_101_SL_seq_11149
gtcacggccgggagtttgcc

SEQ ID NO: 11150 - DNA, 20 bp, Homo sapiens
  source 1..20: mol_type = genomic DNA; note = Gene: MXRA8; note = Location (start to end; relative to TSS): MXRA8_50_80; note = Orientation (relative to transcription): antisense; note = sgRNA Position: 1358501; note = Sequence Name: 56322-704_101_SL_seq_11150
gattcgggatggcagcgcca

SEQ ID NO: 11151 - DNA, 20 bp, Homo sapiens
  source 1..20: mol_type = genomic DNA; note = Gene: MXRA8; note = Location (start to end; relative to TSS): MXRA8_91_121; note = Orientation (relative to transcription): sense; note = sgRNA Position: 1358440; note = Sequence Name: 56322-704_101_SL_seq_11151
agtgagtgtggggccctggg

SEQ ID NO: 11152 - DNA, 20 bp, Homo sapiens
  source 1..20: mol_type = genomic DNA; note = Gene: MXRA8; note = Location (start to end; relative to TSS): MXRA8_18_48; note = Orientation (relative to transcription): sense; note = sgRNA Position: 1358513; note = Sequence Name: 56322-704_101_SL_seq_11152
caaagcctggggctgggcgg

SEQ ID NO: 11153 - DNA, 20 bp, Homo sapiens
  source 1..20: mol_type = genomic DNA; note = Gene: MXRA8; note = Location (start to end; relative to TSS): MXRA8_66_96; note = Orientation (relative to transcription): antisense; note = sgRNA Position: 1358485; note = Sequence Name: 56322-704_101_SL_seq_11153
caagtttccaaagcaggatt

SEQ ID NO: 11154 - DNA, 20 bp, Homo sapiens
  source 1..20: mol_type = genomic DNA; note = Gene: MXRA8; note = Location (start to end; relative to TSS): MXRA8_17_47; note = Orientation (relative to transcription): antisense; note = sgRNA Position: 1358534; note = Sequence Name: 56322-704_101_SL_seq_11154
gccccaggctttgtcccact

SEQ ID NO: 11155 - DNA, 20 bp, Homo sapiens
  source 1..20: mol_type = genomic DNA; note = Gene: MXRA8; note = Location (start to end; relative to TSS): MXRA8_65_95; note = Orientation (relative to transcription): antisense; note = sgRNA Position: 1358486; note = Sequence Name: 56322-704_101_SL_seq_11155
aagtttccaaagcaggattc

SEQ ID NO: 11156 - DNA, 20 bp, Homo sapiens
  source 1..20: mol_type = genomic DNA; note = Gene: MXRA8; note = Location (start to end; relative to TSS): MXRA8_16_46; note = Orientation (relative to transcription): sense; note = sgRNA Position: 1358515; note = Sequence Name: 56322-704_101_SL_seq_11156
gacaaagcctggggctgggc

SEQ ID NO: 11157 - DNA, 20 bp, Homo sapiens
  source 1..20: mol_type = genomic DNA; note = Gene: MXRA8; note = Location (start to end; relative to TSS): MXRA8_61_91; note = Orientation (relative to transcription): antisense; note = sgRNA Position: 1358490; note = Sequence Name: 56322-704_101_SL_seq_11157
ttccaaagcaggattcggga

SEQ ID NO: 11158 - DNA, 20 bp, Homo sapiens
  source 1..20: mol_type = genomic DNA; note = Gene: MXRA8; note = Location (start to end; relative to TSS): MXRA8_15_45; note = Orientation (relative to transcription): sense; note = sgRNA Position: 1358516; note = Sequence Name: 56322-704_101_SL_seq_11158
ggacaaagcctggggctggg

SEQ ID NO: 11159 - DNA, 20 bp, Homo sapiens
  source 1..20: mol_type = genomic DNA; note = Gene: MXRA8; note = Location (start to end; relative to TSS): MXRA8_50_80; note = Orientation (relative to transcription): antisense; note = sgRNA Position: 1358501; note = Sequence Name: 56322-704_101_SL_seq_11159
gattcgggatggcagcgcca

SEQ ID NO: 11160 - DNA, 20 bp, Homo sapiens
  source 1..20: mol_type = genomic DNA; note = Gene: MYBPC1; note = Location (start to end; relative to TSS): MYBPC1_35_65; note = Orientation (relative to transcription): sense; note = sgRNA Position: 101595032; note = Sequence Name: 56322-704_101_SL_seq_11160
gtcaactagtcgtggaggga

SEQ ID NO: 11161 - DNA, 20 bp, Homo sapiens
  source 1..20: mol_type = genomic DNA; note = Gene: MYBPC1; note = Location (start to end; relative to TSS): MYBPC1_109_139; note = Orientation (relative to transcription): antisense; note = sgRNA Position: 101595086; note = Sequence Name: 56322-704_101_SL_seq_11161
gtcttaccctctttcttagt

SEQ ID NO: 11162 - DNA, 20 bp, Homo sapiens
  source 1..20: mol_type = genomic DNA; note = Gene: MYBPC1; note = Location (start to end; relative to TSS): MYBPC1_30_60; note = Orientation (relative to transcription): antisense; note = sgRNA Position: 101595007; note = Sequence Name: 56322-704_101_SL_seq_11162
ctagttgacagaaaccccac

SEQ ID NO: 11163 - DNA, 20 bp, Homo sapiens
  source 1..20: mol_type = genomic DNA; note = Gene: MYBPC1; note = Location (start to end; relative to TSS): MYBPC1_98_128; note = Orientation (relative to transcription): antisense; note = sgRNA Position: 101595075; note = Sequence Name: 56322-704_101_SL_seq_11163
tttcttagtgggttctggca

SEQ ID NO: 11164 - DNA, 20 bp, Homo sapiens
  source 1..20: mol_type = genomic DNA; note = Gene: MYBPC1; note = Location (start to end; relative to TSS): MYBPC1_27_57; note = Orientation (relative to transcription): sense; note = sgRNA Position: 101595024; note = Sequence Name: 56322-704_101_SL_seq_11164
gggtttctgtcaactagtcg

SEQ ID NO: 11165 - DNA, 20 bp, Homo sapiens
  source 1..20: mol_type = genomic DNA; note = Gene: MYBPC1; note = Location (start to end; relative to TSS): MYBPC1_94_124; note = Orientation (relative to transcription): sense; note = sgRNA Position: 101595091; note = Sequence Name: 56322-704_101_SL_seq_11165
ccagaacccactaagaaaga

SEQ ID NO: 11166 - DNA, 20 bp, Homo sapiens
  source 1..20: mol_type = genomic DNA; note = Gene: MYBPC1; note = Location (start to end; relative to TSS): MYBPC1_26_56; note = Orientation (relative to transcription): antisense; note = sgRNA Position: 101595003; note = Sequence Name: 56322-704_101_SL_seq_11166
ttgacagaaaccccacaggc

SEQ ID NO: 11167 - DNA, 20 bp, Homo sapiens
  source 1..20: mol_type = genomic DNA; note = Gene: MYBPC1; note = Location (start to end; relative to TSS): MYBPC1_93_123; note = Orientation (relative to transcription): sense; note = sgRNA Position: 101595090; note = Sequence Name: 56322-704_101_SL_seq_11167
gccagaacccactaagaaag

SEQ ID NO: 11168 - DNA, 20 bp, Homo sapiens
  source 1..20: mol_type = genomic DNA; note = Gene: MYBPC1; note = Location (start to end; relative to TSS): MYBPC1_31_61; note = Orientation (relative to transcription): sense; note = sgRNA Position: 101595028; note = Sequence Name: 56322-704_101_SL_seq_11168
ttctgtcaactagtcgtgga

SEQ ID NO: 11169 - DNA, 20 bp, Homo sapiens
  source 1..20: mol_type = genomic DNA; note = Gene: MYBPC1; note = Location (start to end; relative to TSS): MYBPC1_66_96; note = Orientation (relative to transcription): sense; note = sgRNA Position: 101595063; note = Sequence Name: 56322-704_101_SL_seq_11169
taaagaataacatcttattg

SEQ ID NO: 11170 - DNA, 20 bp, Homo sapiens
  source 1..20: mol_type = genomic DNA; note = Gene: MYBPC2; note = Location (start to end; relative to TSS): MYBPC2_50_80; note = Orientation (relative to transcription): sense; note = sgRNA Position: 50432968; note = Sequence Name: 56322-704_101_SL_seq_11170
gacatgcctgaggcaaaacc

SEQ ID NO: 11171 - DNA, 20 bp, Homo sapiens
  source 1..20: mol_type = genomic DNA; note = Gene: MYBPC2; note = Location (start to end; relative to TSS): MYBPC2_87_117; note = Orientation (relative to transcription): antisense; note = sgRNA Position: 50432985; note = Sequence Name: 56322-704_101_SL_seq_11171
cccacacagggagggggtcc

SEQ ID NO: 11172 - DNA, 20 bp, Homo sapiens
  source 1..20: mol_type = genomic DNA; note = Gene: MYBPC2; note = Location (start to end; relative to TSS): MYBPC2_53_83; note = Orientation (relative to transcription): sense; note = sgRNA Position: 50432971; note = Sequence Name: 56322-704_101_SL_seq_11172
atgcctgaggcaaaaccagg

SEQ ID NO: 11173 - DNA, 20 bp, Homo sapiens
  source 1..20: mol_type = genomic DNA; note = Gene: MYBPC2; note = Location (start to end; relative to TSS): MYBPC2_85_115; note = Orientation (relative to transcription): sense; note = sgRNA Position: 50433003; note = Sequence Name: 56322-704_101_SL_seq_11173
cccctccctgtgtggggatg

SEQ ID NO: 11174 - DNA, 20 bp, Homo sapiens
  source 1..20: mol_type = genomic DNA; note = Gene: MYBPC2; note = Location (start to end; relative to TSS): MYBPC2_54_84; note = Orientation (relative to transcription): antisense; note = sgRNA Position: 50432952; note = Sequence Name: 56322-704_101_SL_seq_11174
ttttgcctcaggcatgtcgg

SEQ ID NO: 11175 - DNA, 20 bp, Homo sapiens
  source 1..20: mol_type = genomic DNA; note = Gene: MYBPC2; note = Location (start to end; relative to TSS): MYBPC2_85_115; note = Orientation (relative to transcription): sense; note = sgRNA Position: 50433003; note = Sequence Name: 56322-704_101_SL_seq_11175
cccctccctgtgtggggatg

SEQ ID NO: 11176 - DNA, 20 bp, Homo sapiens
  source 1..20: mol_type = genomic DNA; note = Gene: MYBPC2; note = Location (start to end; relative to TSS): MYBPC2_40_70; note = Orientation (relative to transcription): sense; note = sgRNA Position: 50432958; note = Sequence Name: 56322-704_101_SL_seq_11176
gaggtcccccgacatgcctg

SEQ ID NO: 11177 - DNA, 20 bp, Homo sapiens
  source 1..20: mol_type = genomic DNA; note = Gene: MYBPC2; note = Location (start to end; relative to TSS): MYBPC2_77_107; note = Orientation (relative to transcription): sense; note = sgRNA Position: 50432995; note = Sequence Name: 56322-704_101_SL_seq_11177
gccaggaccccctccctgtg

SEQ ID NO: 11178 - DNA, 20 bp, Homo sapiens
  source 1..20: mol_type = genomic DNA; note = Gene: MYBPC2; note = Location (start to end; relative to TSS): MYBPC2_13_43; note = Orientation (relative to transcription): antisense; note = sgRNA Position: 50432911; note = Sequence Name: 56322-704_101_SL_seq_11178
gaccgcagccgcgtcccgct

SEQ ID NO: 11179 - DNA, 20 bp, Homo sapiens
  source 1..20: mol_type = genomic DNA; note = Gene: MYBPC2; note = Location (start to end; relative to TSS): MYBPC2_50_80; note = Orientation (relative to transcription): sense; note = sgRNA Position: 50432968; note = Sequence Name: 56322-704_101_SL_seq_11179
gacatgcctgaggcaaaacc

SEQ ID NO: 11180 - DNA, 20 bp, Homo sapiens
  source 1..20: mol_type = genomic DNA; note = Gene: MYBPC3; note = Location (start to end; relative to TSS): MYBPC3_38_68; note = Orientation (relative to transcription): sense; note = sgRNA Position: 47352640; note = Sequence Name: 56322-704_101_SL_seq_11180
tctctcaggatgcctgagcc

SEQ ID NO: 11181 - DNA, 20 bp, Homo sapiens
  source 1..20: mol_type = genomic DNA; note = Gene: MYBPC3; note = Location (start to end; relative to TSS): MYBPC3_71_101; note = Orientation (relative to transcription): sense; note = sgRNA Position: 47352607; note = Sequence Name: 56322-704_101_SL_seq_11181
ggtagctttaggactggggt

SEQ ID NO: 11182 - DNA, 20 bp, Homo sapiens
  source 1..20: mol_type = genomic DNA; note = Gene: MYBPC3; note = Location (start to end; relative to TSS): MYBPC3_37_67; note = Orientation (relative to transcription): sense; note = sgRNA Position: 47352641; note = Sequence Name: 56322-704_101_SL_seq_11182
gtctctcaggatgcctgagc

SEQ ID NO: 11183 - DNA, 20 bp, Homo sapiens
  source 1..20: mol_type = genomic DNA; note = Gene: MYBPC3; note = Location (start to end; relative to TSS): MYBPC3_67_97; note = Orientation (relative to transcription): sense; note = sgRNA Position: 47352611; note = Sequence Name: 56322-704_101_SL_seq_11183
gccaggtagctttaggactg

SEQ ID NO: 11184 - DNA, 20 bp, Homo sapiens
  source 1..20: mol_type = genomic DNA; note = Gene: MYBPC3; note = Location (start to end; relative to TSS): MYBPC3_35_65; note = Orientation (relative to transcription): antisense; note = sgRNA Position: 47352663; note = Sequence Name: 56322-704_101_SL_seq_11184
atcctgagagacgtcacacc

SEQ ID NO: 11185 - DNA, 20 bp, Homo sapiens
  source 1..20: mol_type = genomic DNA; note = Gene: MYBPC3; note = Location (start to end; relative to TSS): MYBPC3_65_95; note = Orientation (relative to transcription): antisense; note = sgRNA Position: 47352633; note = Sequence Name: 56322-704_101_SL_seq_11185
aagctacctggcttcttccc

SEQ ID NO: 11186 - DNA, 20 bp, Homo sapiens
  source 1..20: mol_type = genomic DNA; note = Gene: MYBPC3; note = Location (start to end; relative to TSS): MYBPC3_24_54; note = Orientation (relative to transcription): antisense; note = sgRNA Position: 47352674; note = Sequence Name: 56322-704_101_SL_seq_11186
cgtcacaccaggcacgaagc

SEQ ID NO: 11187 - DNA, 20 bp, Homo sapiens
  source 1..20: mol_type = genomic DNA; note = Gene: MYBPC3; note = Location (start to end; relative to TSS): MYBPC3_59_89; note = Orientation (relative to transcription): antisense; note = sgRNA Position: 47352639; note = Sequence Name: 56322-704_101_SL_seq_11187
cctggcttcttccccggctc

SEQ ID NO: 11188 - DNA, 20 bp, Homo sapiens
  source 1..20: mol_type = genomic DNA; note = Gene: MYBPC3; note = Location (start to end; relative to TSS): MYBPC3_18_48; note = Orientation (relative to transcription): antisense; note = sgRNA Position: 47352680; note = Sequence Name: 56322-704_101_SL_seq_11188
accaggcacgaagcaggcac

SEQ ID NO: 11189 - DNA, 20 bp, Homo sapiens
  source 1..20: mol_type = genomic DNA; note = Gene: MYBPC3; note = Location (start to end; relative to TSS): MYBPC3_50_80; note = Orientation (relative to transcription): sense; note = sgRNA Position: 47352628; note = Sequence Name: 56322-704_101_SL_seq_11189
cctgagccggggaagaagcc

SEQ ID NO: 11190 - DNA, 20 bp, Homo sapiens
  source 1..20: mol_type = genomic DNA; note = Gene: MYBPH; note = Location (start to end; relative to TSS): MYBPH_32_62; note = Orientation (relative to transcription): antisense; note = sgRNA Position: 203175790; note = Sequence Name: 56322-704_101_SL_seq_11190
ggccagggtggagtgtgcag

SEQ ID NO: 11191 - DNA, 20 bp, Homo sapiens
  source 1..20: mol_type = genomic DNA; note = Gene: MYBPH; note = Location (start to end; relative to TSS): MYBPH_65_95; note = Orientation (relative to transcription): sense; note = sgRNA Position: 203175737; note = Sequence Name: 56322-704_101_SL_seq_11191
gatggaaaaaaacacctccg

SEQ ID NO: 11192 - DNA, 20 bp, Homo sapiens
  source 1..20: mol_type = genomic DNA; note = Gene: MYBPH; note = Location (start to end; relative to TSS): MYBPH_18_48; note = Orientation (relative to transcription): antisense; note = sgRNA Position: 203175804; note = Sequence Name: 56322-704_101_SL_seq_11192
gtgcaggggtcagccgttgg

SEQ ID NO: 11193 - DNA, 20 bp, Homo sapiens
  source 1..20: mol_type = genomic DNA; note = Gene: MYBPH; note = Location (start to end; relative to TSS): MYBPH_56_86; note = Orientation (relative to transcription): antisense; note = sgRNA Position: 203175766; note = Sequence Name: 56322-704_101_SL_seq_11193
ccatcattgctggactggct

SEQ ID NO: 11194 - DNA, 20 bp, Homo sapiens
  source 1..20: mol_type = genomic DNA; note = Gene: MYBPH; note = Location (start to end; relative to TSS): MYBPH_19_49; note = Orientation (relative to transcription): antisense; note = sgRNA Position: 203175803; note = Sequence Name: 56322-704_101_SL_seq_11194
tgtgcaggggtcagccgttg

SEQ ID NO: 11195 - DNA, 20 bp, Homo sapiens
  source 1..20: mol_type = genomic DNA; note = Gene: MYBPH; note = Location (start to end; relative to TSS): MYBPH_55_85; note = Orientation (relative to transcription): antisense; note = sgRNA Position: 203175767; note = Sequence Name: 56322-704_101_SL_seq_11195
catcattgctggactggctg

SEQ ID NO: 11196 - DNA, 20 bp, Homo sapiens
  source 1..20: mol_type = genomic DNA; note = Gene: MYBPH; note = Location (start to end; relative to TSS): MYBPH_20_50; note = Orientation (relative to transcription): antisense; note = sgRNA Position: 203175802; note = Sequence Name: 56322-704_101_SL_seq_11196
gtgtgcaggggtcagccgtt

SEQ ID NO: 11197 - DNA, 20 bp, Homo sapiens
  source 1..20: mol_type = genomic DNA; note = Gene: MYBPH; note = Location (start to end; relative to TSS): MYBPH_54_84; note = Orientation (relative to transcription): antisense; note = sgRNA Position: 203175768; note = Sequence Name: 56322-704_101_SL_seq_11197
atcattgctggactggctgg

SEQ ID NO: 11198 - DNA, 20 bp, Homo sapiens
  source 1..20: mol_type = genomic DNA; note = Gene: MYBPH; note = Location (start to end; relative to TSS): MYBPH_21_51; note = Orientation (relative to transcription): sense; note = sgRNA Position: 203175781; note = Sequence Name: 56322-704_101_SL_seq_11198
gacccctgcacactccaccc

SEQ ID NO: 11199 - DNA, 20 bp, Homo sapiens
  source 1..20: mol_type = genomic DNA; note = Gene: MYBPH; note = Location (start to end; relative to TSS): MYBPH_53_83; note = Orientation (relative to transcription): antisense; note = sgRNA Position: 203175769; note = Sequence Name: 56322-704_101_SL_seq_11199
tcattgctggactggctggg

SEQ ID NO: 11200 - DNA, 20 bp, Homo sapiens
  source 1..20: mol_type = genomic DNA; note = Gene: MYBPHL; note = Location (start to end; relative to TSS): MYBPHL_39_69; note = Orientation (relative to transcription): antisense; note = sgRNA Position: 109306968; note = Sequence Name: 56322-704_101_SL_seq_11200
ttggatcctgcggccacctc

SEQ ID NO: 11201 - DNA, 20 bp, Homo sapiens
  source 1..20: mol_type = genomic DNA; note = Gene: MYBPHL; note = Location (start to end; relative to TSS): MYBPHL_83_113; note = Orientation (relative to transcription): antisense; note = sgRNA Position: 109306924; note = Sequence Name: 56322-704_101_SL_seq_11201
ggggtggttcagcatccgct

SEQ ID NO: 11202 - DNA, 20 bp, Homo sapiens
  source 1..20: mol_type = genomic DNA; note = Gene: MYBPHL; note = Location (start to end; relative to TSS): MYBPHL_38_68; note = Orientation (relative to transcription): sense; note = sgRNA Position: 109306949; note = Sequence Name: 56322-704_101_SL_seq_11202
ggccgcaggatccaagctga

SEQ ID NO: 11203 - DNA, 20 bp, Homo sapiens
  source 1..20: mol_type = genomic DNA; note = Gene: MYBPHL; note = Location (start to end; relative to TSS): MYBPHL_79_109; note = Orientation (relative to transcription): antisense; note = sgRNA Position: 109306928; note = Sequence Name: 56322-704_101_SL_seq_11203
tggttcagcatccgctgggc

SEQ ID NO: 11204 - DNA, 20 bp, Homo sapiens
  source 1..20: mol_type = genomic DNA; note = Gene: MYBPHL; note = Location (start to end; relative to TSS): MYBPHL_31_61; note = Orientation (relative to transcription): antisense; note = sgRNA Position: 109306976; note = Sequence Name: 56322-704_101_SL_seq_11204
tgcggccacctccggagctg

SEQ ID NO: 11205 - DNA, 20 bp, Homo sapiens
  source 1..20: mol_type = genomic DNA; note = Gene: MYBPHL; note = Location (start to end; relative to TSS): MYBPHL_77_107; note = Orientation (relative to transcription): sense; note = sgRNA Position: 109306910; note = Sequence Name: 56322-704_101_SL_seq_11205
agcggatgctgaaccacccc

SEQ ID NO: 11206 - DNA, 20 bp, Homo sapiens
  source 1..20: mol_type = genomic DNA; note = Gene: MYBPHL; note = Location (start to end; relative to TSS): MYBPHL_24_54; note = Orientation (relative to transcription): sense; note = sgRNA Position: 109306963; note = Sequence Name: 56322-704_101_SL_seq_11206
acagctccggaggtggccgc

SEQ ID NO: 11207 - DNA, 20 bp, Homo sapiens
  source 1..20: mol_type = genomic DNA; note = Gene: MYBPHL; note = Location (start to end; relative to TSS): MYBPHL_58_88; note = Orientation (relative to transcription): antisense; note = sgRNA Position: 109306949; note = Sequence Name: 56322-704_101_SL_seq_11207
ggcttctttcaccttcagct

SEQ ID NO: 11208 - DNA, 20 bp, Homo sapiens
  source 1..20: mol_type = genomic DNA; note = Gene: MYBPHL; note = Location (start to end; relative to TSS): MYBPHL_17_47; note = Orientation (relative to transcription): sense; note = sgRNA Position: 109306970; note = Sequence Name: 56322-704_101_SL_seq_11208
ggcagccacagctccggagg

SEQ ID NO: 11209 - DNA, 20 bp, Homo sapiens
  source 1..20: mol_type = genomic DNA; note = Gene: MYBPHL; note = Location (start to end; relative to TSS): MYBPHL_49_79; note = Orientation (relative to transcription): antisense; note = sgRNA Position: 109306958; note = Sequence Name: 56322-704_101_SL_seq_11209
caccttcagcttggatcctg

SEQ ID NO: 11210 - DNA, 20 bp, Homo sapiens
  source 1..20: mol_type = genomic DNA; note = Gene: MYLK; note = Location (start to end; relative to TSS): MYLK_51_81; note = Orientation (relative to transcription): antisense; note = sgRNA Position: 123884277; note = Sequence Name: 56322-704_101_SL_seq_11210
cggccgcaggcgcacagcgc

SEQ ID NO: 11211 - DNA, 20 bp, Homo sapiens
  source 1..20: mol_type = genomic DNA; note = Gene: MYLK; note = Location (start to end; relative to TSS): MYLK_96_126; note = Orientation (relative to transcription): sense; note = sgRNA Position: 123884212; note = Sequence Name: 56322-704_101_SL_seq_11211
cccgggccgccttcgccgcg

SEQ ID NO: 11212 - DNA, 20 bp, Homo sapiens
  source 1..20: mol_type = genomic DNA; note = Gene: MYLK; note = Location (start to end; relative to TSS): MYLK_45_75; note = Orientation (relative to transcription): sense; note = sgRNA Position: 123884263; note = Sequence Name: 56322-704_101_SL_seq_11212
gcgctgtgcgcctgcggccg

SEQ ID NO: 11213 - DNA, 20 bp, Homo sapiens
  source 1..20: mol_type = genomic DNA; note = Gene: MYLK; note = Location (start to end; relative to TSS): MYLK_79_109; note = Orientation (relative to transcription): sense; note = sgRNA Position: 123884229; note = Sequence Name: 56322-704_101_SL_seq_11213
gcgccggtgccccggctccc

SEQ ID NO: 11214 - DNA, 20 bp, Homo sapiens
  source 1..20: mol_type = genomic DNA; note = Gene: MYLK; note = Location (start to end; relative to TSS): MYLK_39_69; note = Orientation (relative to transcription): sense; note = sgRNA Position: 123884269; note = Sequence Name: 56322-704_101_SL_seq_11214
gagcccgcgctgtgcgcctg

SEQ ID NO: 11215 - DNA, 20 bp, Homo sapiens
  source 1..20: mol_type = genomic DNA; note = Gene: MYLK; note = Location (start to end; relative to TSS): MYLK_71_101; note = Orientation (relative to transcription): sense; note = sgRNA Position: 123884237; note = Sequence Name: 56322-704_101_SL_seq_11215
cccgccgagcgccggtgccc

SEQ ID NO: 11216 - DNA, 20 bp, Homo sapiens
  source 1..20: mol_type = genomic DNA; note = Gene: MYLK; note = Location (start to end; relative to TSS): MYLK_17_47; note = Orientation (relative to transcription): sense; note = sgRNA Position: 123884291; note = Sequence Name: 56322-704_101_SL_seq_11216
agcagggcgctgagcgagct

SEQ ID NO: 11217 - DNA, 20 bp, Homo sapiens
  source 1..20: mol_type = genomic DNA; note = Gene: MYLK; note = Location (start to end; relative to TSS): MYLK_52_82; note = Orientation (relative to transcription): antisense; note = sgRNA Position: 123884276; note = Sequence Name: 56322-704_101_SL_seq_11217
ccggccgcaggcgcacagcg

SEQ ID NO: 11218 - DNA, 20 bp, Homo sapiens
  source 1..20: mol_type = genomic DNA; note = Gene: MYLK; note = Location (start to end; relative to TSS): MYLK_16_46; note = Orientation (relative to transcription): antisense; note = sgRNA Position: 123884312; note = Sequence Name: 56322-704_101_SL_seq_11218
tcagcgccctgctgccgacc

SEQ ID NO: 11219 - DNA, 20 bp, Homo sapiens
  source 1..20: mol_type = genomic DNA; note = Gene: MYLK; note = Location (start to end; relative to TSS): MYLK_51_81; note = Orientation (relative to transcription): antisense; note = sgRNA Position: 123884277; note = Sequence Name: 56322-704_101_SL_seq_11219
cggccgcaggcgcacagcgc

SEQ ID NO: 11220 - DNA, 20 bp, Homo sapiens
  source 1..20: mol_type = genomic DNA; note = Gene: MYOM1; note = Location (start to end; relative to TSS): MYOM1_35_65; note = Orientation (relative to transcription): antisense; note = sgRNA Position: 3219929; note = Sequence Name: 56322-704_101_SL_seq_11220
ggctaaagacaggaccctgg

SEQ ID NO: 11221 - DNA, 20 bp, Homo sapiens
  source 1..20: mol_type = genomic DNA; note = Gene: MYOM1; note = Location (start to end; relative to TSS): MYOM1_124_154; note = Orientation (relative to transcription): antisense; note = sgRNA Position: 3219840; note = Sequence Name: 56322-704_101_SL_seq_11221
gtggtggaaatgttccgatg

SEQ ID NO: 11222 - DNA, 20 bp, Homo sapiens
  source 1..20: mol_type = genomic DNA; note = Gene: MYOM1; note = Location (start to end; relative to TSS): MYOM1_36_66; note = Orientation (relative to transcription): antisense; note = sgRNA Position: 3219928; note = Sequence Name: 56322-704_101_SL_seq_11222
gggctaaagacaggaccctg

SEQ ID NO: 11223 - DNA, 20 bp, Homo sapiens
  source 1..20: mol_type = genomic DNA; note = Gene: MYOM1; note = Location (start to end; relative to TSS): MYOM1_118_148; note = Orientation (relative to transcription): antisense; note = sgRNA Position: 3219846; note = Sequence Name: 56322-704_101_SL_seq_11223
gaaatgttccgatgaggccg

SEQ ID NO: 11224 - DNA, 20 bp, Homo sapiens
  source 1..20: mol_type = genomic DNA; note = Gene: MYOM1; note = Location (start to end; relative to TSS): MYOM1_38_68; note = Orientation (relative to transcription): antisense; note = sgRNA Position: 3219926; note = Sequence Name: 56322-704_101_SL_seq_11224
cagggctaaagacaggaccc

SEQ ID NO: 11225 - DNA, 20 bp, Homo sapiens
  source 1..20: mol_type = genomic DNA; note = Gene: MYOM1; note = Location (start to end; relative to TSS): MYOM1_112_142; note = Orientation (relative to transcription): antisense; note = sgRNA Position: 3219852; note = Sequence Name: 56322-704_101_SL_seq_11225
ttccgatgaggccgaggagc

SEQ ID NO: 11226 - DNA, 20 bp, Homo sapiens
  source 1..20: mol_type = genomic DNA; note = Gene: MYOM1; note = Location (start to end; relative to TSS): MYOM1_37_67; note = Orientation (relative to transcription): antisense; note = sgRNA Position: 3219927; note = Sequence Name: 56322-704_101_SL_seq_11226
agggctaaagacaggaccct

SEQ ID NO: 11227 - DNA, 20 bp, Homo sapiens
  source 1..20: mol_type = genomic DNA; note = Gene: MYOM1; note = Location (start to end; relative to TSS): MYOM1_101_131; note = Orientation (relative to transcription): sense; note = sgRNA Position: 3219843; note = Sequence Name: 56322-704_101_SL_seq_11227
atccagctcctcggcctcat

SEQ ID NO: 11228 - DNA, 20 bp, Homo sapiens
  source 1..20: mol_type = genomic DNA; note = Gene: MYOM1; note = Location (start to end; relative to TSS): MYOM1_45_75; note = Orientation (relative to transcription): antisense; note = sgRNA Position: 3219919; note = Sequence Name: 56322-704_101_SL_seq_11228
taagaggcagggctaaagac

SEQ ID NO: 11229 - DNA, 20 bp, Homo sapiens
  source 1..20: mol_type = genomic DNA; note = Gene: MYOM1; note = Location (start to end; relative to TSS): MYOM1_92_122; note = Orientation (relative to transcription): sense; note = sgRNA Position: 3219852; note = Sequence Name: 56322-704_101_SL_seq_11229
cattctctcatccagctcct

SEQ ID NO: 11230 - DNA, 20 bp, Homo sapiens
  source 1..20: mol_type = genomic DNA; note = Gene: MYOM2; note = Location (start to end; relative to TSS): MYOM2_32_62; note = Orientation (relative to transcription): sense; note = sgRNA Position: 2045104; note = Sequence Name: 56322-704_101_SL_seq_11230
ttcctcggctggagtgtggg

SEQ ID NO: 11231 - DNA, 20 bp, Homo sapiens
  source 1..20: mol_type = genomic DNA; note = Gene: MYOM2; note = Location (start to end; relative to TSS): MYOM2_98_128; note = Orientation (relative to transcription): antisense; note = sgRNA Position: 2045150; note = Sequence Name: 56322-704_101_SL_seq_11231
agacagaaaggaaaattgca

SEQ ID NO: 11232 - DNA, 20 bp, Homo sapiens
  source 1..20: mol_type = genomic DNA; note = Gene: MYOM2; note = Location (start to end; relative to TSS): MYOM2_29_59; note = Orientation (relative to transcription): sense; note = sgRNA Position: 2045101; note = Sequence Name: 56322-704_101_SL_seq_11232
gccttcctcggctggagtgt

SEQ ID NO: 11233 - DNA, 20 bp, Homo sapiens
  source 1..20: mol_type = genomic DNA; note = Gene: MYOM2; note = Location (start to end; relative to TSS): MYOM2_95_125; note = Orientation (relative to transcription): antisense; note = sgRNA Position: 2045147; note = Sequence Name: 56322-704_101_SL_seq_11233
cagaaaggaaaattgcaagg

SEQ ID NO: 11234 - DNA, 20 bp, Homo sapiens
  source 1..20: mol_type = genomic DNA; note = Gene: MYOM2; note = Location (start to end; relative to TSS): MYOM2_28_58; note = Orientation (relative to transcription): sense; note = sgRNA Position: 2045100; note = Sequence Name: 56322-704_101_SL_seq_11234
tgccttcctcggctggagtg

SEQ ID NO: 11235 - DNA, 20 bp, Homo sapiens
  source 1..20: mol_type = genomic DNA; note = Gene: MYOM2; note = Location (start to end; relative to TSS): MYOM2_92_122; note = Orientation (relative to transcription): sense; note = sgRNA Position: 2045164; note = Sequence Name: 56322-704_101_SL_seq_11235
tgcaattttcctttctgtct

SEQ ID NO: 11236 - DNA, 20 bp, Homo sapiens
  source 1..20: mol_type = genomic DNA; note = Gene: MYOM2; note = Location (start to end; relative to TSS): MYOM2_37_67; note = Orientation (relative to transcription): sense; note = sgRNA Position: 2045109; note = Sequence Name: 56322-704_101_SL_seq_11236
cggctggagtgtgggtggct

SEQ ID NO: 11237 - DNA, 20 bp, Homo sapiens
  source 1..20: mol_type = genomic DNA; note = Gene: MYOM2; note = Location (start to end; relative to TSS): MYOM2_73_103; note = Orientation (relative to transcription): antisense; note = sgRNA Position: 2045125; note = Sequence Name: 56322-704_101_SL_seq_11237
gagagagaattcctgaccac

SEQ ID NO: 11238 - DNA, 20 bp, Homo sapiens
  source 1..20: mol_type = genomic DNA; note = Gene: MYOM2; note = Location (start to end; relative to TSS): MYOM2_21_51; note = Orientation (relative to transcription): sense; note = sgRNA Position: 2045093; note = Sequence Name: 56322-704_101_SL_seq_11238
tcagctctgccttcctcggc

SEQ ID NO: 11239 - DNA, 20 bp, Homo sapiens
  source 1..20: mol_type = genomic DNA; note = Gene: MYOM2; note = Location (start to end; relative to TSS): MYOM2_53_83; note = Orientation (relative to transcription): sense; note = sgRNA Position: 2045125; note = Sequence Name: 56322-704_101_SL_seq_11239
ggcttggtgagccggtggtc

SEQ ID NO: 11240 - DNA, 20 bp, Homo sapiens
  source 1..20: mol_type = genomic DNA; note = Gene: MYOM3; note = Location (start to end; relative to TSS): MYOM3_49_79; note = Orientation (relative to transcription): antisense; note = sgRNA Position: 24112082; note = Sequence Name: 56322-704_101_SL_seq_11240
gaagattcctgaggccgaga

SEQ ID NO: 11241 - DNA, 20 bp, Homo sapiens
  source 1..20: mol_type = genomic DNA; note = Gene: MYOM3; note = Location (start to end; relative to TSS): MYOM3_84_114; note = Orientation (relative to transcription): antisense; note = sgRNA Position: 24112047; note = Sequence Name: 56322-704_101_SL_seq_11241
cagaagcagtgtgcccactt

SEQ ID NO: 11242 - DNA, 20 bp, Homo sapiens
  source 1..20: mol_type = genomic DNA; note = Gene: MYOM3; note = Location (start to end; relative to TSS): MYOM3_25_55; note = Orientation (relative to transcription): antisense; note = sgRNA Position: 24112106; note = Sequence Name: 56322-704_101_SL_seq_11242
ccttgttctcttcttgccct

SEQ ID NO: 11243 - DNA, 20 bp, Homo sapiens
  source 1..20: mol_type = genomic DNA; note = Gene: MYOM3; note = Location (start to end; relative to TSS): MYOM3_73_103; note = Orientation (relative to transcription): antisense; note = sgRNA Position: 24112058; note = Sequence Name: 56322-704_101_SL_seq_11243
tgcccacttaggagtctctg

SEQ ID NO: 11244 - DNA, 20 bp, Homo sapiens
  source 1..20: mol_type = genomic DNA; note = Gene: MYOM3; note = Location (start to end; relative to TSS): MYOM3_26_56; note = Orientation (relative to transcription): sense; note = sgRNA Position: 24112085; note = Sequence Name: 56322-704_101_SL_seq_11244
gaagagaacaaggaccctct

SEQ ID NO: 11245 - DNA, 20 bp, Homo sapiens
  source 1..20: mol_type = genomic DNA; note = Gene: MYOM3; note = Location (start to end; relative to TSS): MYOM3_58_88; note = Orientation (relative to transcription): antisense; note = sgRNA Position: 24112073; note = Sequence Name: 56322-704_101_SL_seq_11245
ctctggggagaagattcctg

SEQ ID NO: 11246 - DNA, 20 bp, Homo sapiens
  source 1..20: mol_type = genomic DNA; note = Gene: MYOM3; note = Location (start to end; relative to TSS): MYOM3_17_47; note = Orientation (relative to transcription): antisense; note = sgRNA Position: 24112114; note = Sequence Name: 56322-704_101_SL_seq_11246
tcttcttgccctcggctcag

SEQ ID NO: 11247 - DNA, 20 bp, Homo sapiens
  source 1..20: mol_type = genomic DNA; note = Gene: MYOM3; note = Location (start to end; relative to TSS): MYOM3_50_80; note = Orientation (relative to transcription): antisense; note = sgRNA Position: 24112081; note = Sequence Name: 56322-704_101_SL_seq_11247
agaagattcctgaggccgag

SEQ ID NO: 11248 - DNA, 20 bp, Homo sapiens
  source 1..20: mol_type = genomic DNA; note = Gene: MYOM3; note = Location (start to end; relative to TSS): MYOM3_16_46; note = Orientation (relative to transcription): sense; note = sgRNA Position: 24112095; note = Sequence Name: 56322-704_101_SL_seq_11248
ccgagggcaagaagagaaca

SEQ ID NO: 11249 - DNA, 20 bp, Homo sapiens
  source 1..20: mol_type = genomic DNA; note = Gene: MYOM3; note = Location (start to end; relative to TSS): MYOM3_49_79; note = Orientation (relative to transcription): antisense; note = sgRNA Position: 24112082; note = Sequence Name: 56322-704_101_SL_seq_11249
gaagattcctgaggccgaga

SEQ ID NO: 11250 - DNA, 20 bp, Homo sapiens
  source 1..20: mol_type = genomic DNA; note = Gene: MYOT; note = Location (start to end; relative to TSS): MYOT_37_67; note = Orientation (relative to transcription): antisense; note = sgRNA Position: 137867903; note = Sequence Name: 56322-704_101_SL_seq_11250
cactattgaagggaaggaag

SEQ ID NO: 11251 - DNA, 20 bp, Homo sapiens
  source 1..20: mol_type = genomic DNA; note = Gene: MYOT; note = Location (start to end; relative to TSS): MYOT_101_131; note = Orientation (relative to transcription): antisense; note = sgRNA Position: 137867967; note = Sequence Name: 56322-704_101_SL_seq_11251
aagtgtagtaggaataaaga

SEQ ID NO: 11252 - DNA, 20 bp, Homo sapiens
  source 1..20: mol_type = genomic DNA; note = Gene: MYOT; note = Location (start to end; relative to TSS): MYOT_43_73; note = Orientation (relative to transcription): antisense; note = sgRNA Position: 137867909; note = Sequence Name: 56322-704_101_SL_seq_11252
ttaacccactattgaaggga

SEQ ID NO: 11253 - DNA, 20 bp, Homo sapiens
  source 1..20: mol_type = genomic DNA; note = Gene: MYOT; note = Location (start to end; relative to TSS): MYOT_100_130; note = Orientation (relative to transcription): antisense; note = sgRNA Position: 137867966; note = Sequence Name: 56322-704_101_SL_seq_11253
agtgtagtaggaataaagaa

SEQ ID NO: 11254 - DNA, 20 bp, Homo sapiens
  source 1..20: mol_type = genomic DNA; note = Gene: MYOT; note = Location (start to end; relative to TSS): MYOT_44_74; note = Orientation (relative to transcription): sense; note = sgRNA Position: 137867930; note = Sequence Name: 56322-704_101_SL_seq_11254
aatagtgggttaaacccagc

SEQ ID NO: 11255 - DNA, 20 bp, Homo sapiens
  source 1..20: mol_type = genomic DNA; note = Gene: MYOT; note = Location (start to end; relative to TSS): MYOT_79_109; note = Orientation (relative to transcription): antisense; note = sgRNA Position: 137867945; note = Sequence Name: 56322-704_101_SL_seq_11255
ggacttacccgtagttccag

SEQ ID NO: 11256 - DNA, 20 bp, Homo sapiens
  source 1..20: mol_type = genomic DNA; note = Gene: MYOT; note = Location (start to end; relative to TSS): MYOT_29_59; note = Orientation (relative to transcription): sense; note = sgRNA Position: 137867915; note = Sequence Name: 56322-704_101_SL_seq_11256
ctcttccttcccttcaatag

SEQ ID NO: 11257 - DNA, 20 bp, Homo sapiens
  source 1..20: mol_type = genomic DNA; note = Gene: MYOT; note = Location (start to end; relative to TSS): MYOT_63_93; note = Orientation (relative to transcription): sense; note = sgRNA Position: 137867949; note = Sequence Name: 56322-704_101_SL_seq_11257
ctggcaccctctggaactac

SEQ ID NO: 11258 - DNA, 20 bp, Homo sapiens
  source 1..20: mol_type = genomic DNA; note = Gene: MYOT; note = Location (start to end; relative to TSS): MYOT_30_60; note = Orientation (relative to transcription): sense; note = sgRNA Position: 137867916; note = Sequence Name: 56322-704_101_SL_seq_11258
tcttccttcccttcaatagt

SEQ ID NO: 11259 - DNA, 20 bp, Homo sapiens
  source 1..20: mol_type = genomic DNA; note = Gene: MYOT; note = Location (start to end; relative to TSS): MYOT_62_92; note = Orientation (relative to transcription): sense; note = sgRNA Position: 137867948; note = Sequence Name: 56322-704_101_SL_seq_11259
gctggcaccctctggaacta

SEQ ID NO: 11260 - DNA, 20 bp, Homo sapiens
  source 1..20: mol_type = genomic DNA; note = Gene: MYPN; note = Location (start to end; relative to TSS): MYPN_53_83; note = Orientation (relative to transcription): antisense; note = sgRNA Position: 68109547; note = Sequence Name: 56322-704_101_SL_seq_11260
aaccttagtttcagtgaaga

SEQ ID NO: 11261 - DNA, 20 bp, Homo sapiens
  source 1..20: mol_type = genomic DNA; note = Gene: MYPN; note = Location (start to end; relative to TSS): MYPN_87_117; note = Orientation (relative to transcription): sense; note = sgRNA Position: 68109601; note = Sequence Name: 56322-704_101_SL_seq_11261
cggctactctctatttccaa

SEQ ID NO: 11262 - DNA, 20 bp, Homo sapiens
  source 1..20: mol_type = genomic DNA; note = Gene: MYPN; note = Location (start to end; relative to TSS): MYPN_39_69; note = Orientation (relative to transcription): antisense; note = sgRNA Position: 68109533; note = Sequence Name: 56322-704_101_SL_seq_11262
tgaagatggctgtaagaagc

SEQ ID NO: 11263 - DNA, 20 bp, Homo sapiens
  source 1..20: mol_type = genomic DNA; note = Gene: MYPN; note = Location (start to end; relative to TSS): MYPN_86_116; note = Orientation (relative to transcription): sense; note = sgRNA Position: 68109600; note = Sequence Name: 56322-704_101_SL_seq_11263
acggctactctctatttcca

SEQ ID NO: 11264 - DNA, 20 bp, Homo sapiens
  source 1..20: mol_type = genomic DNA; note = Gene: MYPN; note = Location (start to end; relative to TSS): MYPN_42_72; note = Orientation (relative to transcription): sense; note = sgRNA Position: 68109556; note = Sequence Name: 56322-704_101_SL_seq_11264
agccatcttcactgaaacta

SEQ ID NO: 11265 - DNA, 20 bp, Homo sapiens
  source 1..20: mol_type = genomic DNA; note = Gene: MYPN; note = Location (start to end; relative to TSS): MYPN_80_110; note = Orientation (relative to transcription): antisense; note = sgRNA Position: 68109574; note = Sequence Name: 56322-704_101_SL_seq_11265
gtagccgtccatagagagtg

SEQ ID NO: 11266 - DNA, 20 bp, Homo sapiens
  source 1..20: mol_type = genomic DNA; note = Gene: MYPN; note = Location (start to end; relative to TSS): MYPN_21_51; note = Orientation (relative to transcription): antisense; note = sgRNA Position: 68109515; note = Sequence Name: 56322-704_101_SL_seq_11266
gctggacaacctgtcaccac

SEQ ID NO: 11267 - DNA, 20 bp, Homo sapiens
  source 1..20: mol_type = genomic DNA; note = Gene: MYPN; note = Location (start to end; relative to TSS): MYPN_53_83; note = Orientation (relative to transcription): antisense; note = sgRNA Position: 68109547; note = Sequence Name: 56322-704_101_SL_seq_11267
aaccttagtttcagtgaaga

SEQ ID NO: 11268 - DNA, 20 bp, Homo sapiens
  source 1..20: mol_type = genomic DNA; note = Gene: MYPN; note = Location (start to end; relative to TSS): MYPN_3_33; note = Orientation (relative to transcription): sense; note = sgRNA Position: 68109517; note = Sequence Name: 56322-704_101_SL_seq_11268
gctctggctccggtggtgac

SEQ ID NO: 11269 - DNA, 20 bp, Homo sapiens
  source 1..20: mol_type = genomic DNA; note = Gene: MYPN; note = Location (start to end; relative to TSS): MYPN_39_69; note = Orientation (relative to transcription): antisense; note = sgRNA Position: 68109533; note = Sequence Name: 56322-704_101_SL_seq_11269
tgaagatggctgtaagaagc

SEQ ID NO: 11270 - DNA, 20 bp, Homo sapiens
  source 1..20: mol_type = genomic DNA; note = Gene: NCAM1; note = Location (start to end; relative to TSS): NCAM1_52_82; note = Orientation (relative to transcription): sense; note = sgRNA Position: 112961498; note = Sequence Name: 56322-704_101_SL_seq_11270
aaaaataatcatactcagcc

SEQ ID NO: 11271 - DNA, 20 bp, Homo sapiens
  source 1..20: mol_type = genomic DNA; note = Gene: NCAM1; note = Location (start to end; relative to TSS): NCAM1_95_125; note = Orientation (relative to transcription): antisense; note = sgRNA Position: 112961521; note = Sequence Name: 56322-704_101_SL_seq_11271
gcggctgagcgacagaccta

SEQ ID NO: 11272 - DNA, 20 bp, Homo sapiens
  source 1..20: mol_type = genomic DNA; note = Gene: NCAM1; note = Location (start to end; relative to TSS): NCAM1_38_68; note = Orientation (relative to transcription): antisense; note = sgRNA Position: 112961464; note = Sequence Name: 56322-704_101_SL_seq_11272
gcagaattgtttcctgccag

SEQ ID NO: 11273 - DNA, 20 bp, Homo sapiens
  source 1..20: mol_type = genomic DNA; note = Gene: NCAM1; note = Location (start to end; relative to TSS): NCAM1_94_124; note = Orientation (relative to transcription): antisense; note = sgRNA Position: 112961520; note = Sequence Name: 56322-704_101_SL_seq_11273
cggctgagcgacagacctag

SEQ ID NO: 11274 - DNA, 20 bp, Homo sapiens
  source 1..20: mol_type = genomic DNA; note = Gene: NCAM1; note = Location (start to end; relative to TSS): NCAM1_17_47; note = Orientation (relative to transcription): sense; note = sgRNA Position: 112961463; note = Sequence Name: 56322-704_101_SL_seq_11274
gcagctcggctgccgctggc

SEQ ID NO: 11275 - DNA, 20 bp, Homo sapiens
  source 1..20: mol_type = genomic DNA; note = Gene: NCAM1; note = Location (start to end; relative to TSS): NCAM1_79_109; note = Orientation (relative to transcription): antisense; note = sgRNA Position: 112961505; note = Sequence Name: 56322-704_101_SL_seq_11275
cctaggggcagacaattgcc

SEQ ID NO: 11276 - DNA, 20 bp, Homo sapiens
  source 1..20: mol_type = genomic DNA; note = Gene: NCAM1; note = Location (start to end; relative to TSS): NCAM1_13_43; note = Orientation (relative to transcription): sense; note = sgRNA Position: 112961459; note = Sequence Name: 56322-704_101_SL_seq_11276
gaacgcagctcggctgccgc

SEQ ID NO: 11277 - DNA, 20 bp, Homo sapiens
  source 1..20: mol_type = genomic DNA; note = Gene: NCAM1; note = Location (start to end; relative to TSS): NCAM1_70_100; note = Orientation (relative to transcription): sense; note = sgRNA Position: 112961516; note = Sequence Name: 56322-704_101_SL_seq_11277
cctggcaattgtctgcccct

SEQ ID NO: 11278 - DNA, 20 bp, Homo sapiens
  source 1..20: mol_type = genomic DNA; note = Gene: NCAM1; note = Location (start to end; relative to TSS): NCAM1_9_39; note = Orientation (relative to transcription): antisense; note = sgRNA Position: 112961435; note = Sequence Name: 56322-704_101_SL_seq_11278
agctgcgttcacgcgctgat

SEQ ID NO: 11279 - DNA, 20 bp, Homo sapiens
  source 1..20: mol_type = genomic DNA; note = Gene: NCAM1; note = Location (start to end; relative to TSS): NCAM1_52_82; note = Orientation (relative to transcription): sense; note = sgRNA Position: 112961498; note = Sequence Name: 56322-704_101_SL_seq_11279
aaaaataatcatactcagcc

SEQ ID NO: 11280 - DNA, 20 bp, Homo sapiens
  source 1..20: mol_type = genomic DNA; note = Gene: NCAM2; note = Location (start to end; relative to TSS): NCAM2_43_73; note = Orientation (relative to transcription): sense; note = sgRNA Position: 20998478; note = Sequence Name: 56322-704_101_SL_seq_11280
ggcggcggcggctctagcag

SEQ ID NO: 11281 - DNA, 20 bp, Homo sapiens
  source 1..20: mol_type = genomic DNA; note = Gene: NCAM2; note = Location (start to end; relative to TSS): NCAM2_80_110; note = Orientation (relative to transcription): sense; note = sgRNA Position: 20998515; note = Sequence Name: 56322-704_101_SL_seq_11281
aaaggttctctctccagggc

SEQ ID NO: 11282 - DNA, 20 bp, Homo sapiens
  source 1..20: mol_type = genomic DNA; note = Gene: NCAM2; note = Location (start to end; relative to TSS): NCAM2_42_72; note = Orientation (relative to transcription): antisense; note = sgRNA Position: 20998457; note = Sequence Name: 56322-704_101_SL_seq_11282
agccgccgccgccgctcccg

SEQ ID NO: 11283 - DNA, 20 bp, Homo sapiens
  source 1..20: mol_type = genomic DNA; note = Gene: NCAM2; note = Location (start to end; relative to TSS): NCAM2_78_108; note = Orientation (relative to transcription): antisense; note = sgRNA Position: 20998493; note = Sequence Name: 56322-704_101_SL_seq_11283
gagagaacctttcgctgccc

SEQ ID NO: 11284 - DNA, 20 bp, Homo sapiens
  source 1..20: mol_type = genomic DNA; note = Gene: NCAM2; note = Location (start to end; relative to TSS): NCAM2_25_55; note = Orientation (relative to transcription): sense; note = sgRNA Position: 20998460; note = Sequence Name: 56322-704_101_SL_seq_11284
ctggggcaccgcgggagcgg

SEQ ID NO: 11285 - DNA, 20 bp, Homo sapiens
  source 1..20: mol_type = genomic DNA; note = Gene: NCAM2; note = Location (start to end; relative to TSS): NCAM2_76_106; note = Orientation (relative to transcription): sense; note = sgRNA Position: 20998511; note = Sequence Name: 56322-704_101_SL_seq_11285
agcgaaaggttctctctcca

SEQ ID NO: 11286 - DNA, 20 bp, Homo sapiens
  source 1..20: mol_type = genomic DNA; note = Gene: NCAM2; note = Location (start to end; relative to TSS): NCAM2_17_47; note = Orientation (relative to transcription): sense; note = sgRNA Position: 20998452; note = Sequence Name: 56322-704_101_SL_seq_11286
gcgggcggctggggcaccgc

SEQ ID NO: 11287 - DNA, 20 bp, Homo sapiens
  source 1..20: mol_type = genomic DNA; note = Gene: NCAM2; note = Location (start to end; relative to TSS): NCAM2_75_105; note = Orientation (relative to transcription): sense; note = sgRNA Position: 20998510; note = Sequence Name: 56322-704_101_SL_seq_11287
cagcgaaaggttctctctcc

SEQ ID NO: 11288 - DNA, 20 bp, Homo sapiens
  source 1..20: mol_type = genomic DNA; note = Gene: NCAM2; note = Location (start to end; relative to TSS): NCAM2_16_46; note = Orientation (relative to transcription): sense; note = sgRNA Position: 20998451; note = Sequence Name: 56322-704_101_SL_seq_11288
tgcgggcggctggggcaccg

SEQ ID NO: 11289 - DNA, 20 bp, Homo sapiens
  source 1..20: mol_type = genomic DNA; note = Gene: NCAM2; note = Location (start to end; relative to TSS): NCAM2_62_92; note = Orientation (relative to transcription): sense; note = sgRNA Position: 20998497; note = Sequence Name: 56322-704_101_SL_seq_11289
gaggcggccggggcagcgaa

SEQ ID NO: 11290 - DNA, 20 bp, Homo sapiens
  source 1..20: mol_type = genomic DNA; note = Gene: NCAN; note = Location (start to end; relative to TSS): NCAN_43_73; note = Orientation (relative to transcription): sense; note = sgRNA Position: 19212027; note = Sequence Name: 56322-704_101_SL_seq_11290
gcagcgtcctttgtgcccgg

SEQ ID NO: 11291 - DNA, 20 bp, Homo sapiens
  source 1..20: mol_type = genomic DNA; note = Gene: NCAN; note = Location (start to end; relative to TSS): NCAN_76_106; note = Orientation (relative to transcription): sense; note = sgRNA Position: 19212060; note = Sequence Name: 56322-704_101_SL_seq_11291
atgcgtccgagctaggagcc

SEQ ID NO: 11292 - DNA, 20 bp, Homo sapiens
  source 1..20: mol_type = genomic DNA; note = Gene: NCAN; note = Location (start to end; relative to TSS): NCAN_40_70; note = Orientation (relative to transcription): sense; note = sgRNA Position: 19212024; note = Sequence Name: 56322-704_101_SL_seq_11292
agcgcagcgtcctttgtgcc

SEQ ID NO: 11293 - DNA, 20 bp, Homo sapiens
  source 1..20: mol_type = genomic DNA; note = Gene: NCAN; note = Location (start to end; relative to TSS): NCAN_75_105; note = Orientation (relative to transcription): antisense; note = sgRNA Position: 19212039; note = Sequence Name: 56322-704_101_SL_seq_11293
agctcggacgcatcccgggg

SEQ ID NO: 11294 - DNA, 20 bp, Homo sapiens
  source 1..20: mol_type = genomic DNA; note = Gene: NCAN; note = Location (start to end; relative to TSS): NCAN_25_55; note = Orientation (relative to transcription): antisense; note = sgRNA Position: 19211989; note = Sequence Name: 56322-704_101_SL_seq_11294
cgactcagccagctccgcgc

SEQ ID NO: 11295 - DNA, 20 bp, Homo sapiens
  source 1..20: mol_type = genomic DNA; note = Gene: NCAN; note = Location (start to end; relative to TSS): NCAN_67_97; note = Orientation (relative to transcription): antisense; note = sgRNA Position: 19212031; note = Sequence Name: 56322-704_101_SL_seq_11295
cgcatcccggggcggccgcc

SEQ ID NO: 11296 - DNA, 20 bp, Homo sapiens
  source 1..20: mol_type = genomic DNA; note = Gene: NCAN; note = Location (start to end; relative to TSS): NCAN_24_54; note = Orientation (relative to transcription): antisense; note = sgRNA Position: 19211988; note = Sequence Name: 56322-704_101_SL_seq_11296
gactcagccagctccgcgcc

SEQ ID NO: 11297 - DNA, 20 bp, Homo sapiens
  source 1..20: mol_type = genomic DNA; note = Gene: NCAN; note = Location (start to end; relative to TSS): NCAN_59_89; note = Orientation (relative to transcription): antisense; note = sgRNA Position: 19212023; note = Sequence Name: 56322-704_101_SL_seq_11297
ggggcggccgccgggcacaa

SEQ ID NO: 11298 - DNA, 20 bp, Homo sapiens
  source 1..20: mol_type = genomic DNA; note = Gene: NCAN; note = Location (start to end; relative to TSS): NCAN_17_47; note = Orientation (relative to transcription): sense; note = sgRNA Position: 19212001; note = Sequence Name: 56322-704_101_SL_seq_11298
cggcgcggagctggctgagt

SEQ ID NO: 11299 - DNA, 20 bp, Homo sapiens
  source 1..20: mol_type = genomic DNA; note = Gene: NCAN; note = Location (start to end; relative to TSS): NCAN_52_82; note = Orientation (relative to transcription): sense; note = sgRNA Position: 19212036; note = Sequence Name: 56322-704_101_SL_seq_11299
tttgtgcccggcggccgccc

SEQ ID NO: 11300 - DNA, 20 bp, Homo sapiens
  source 1..20: mol_type = genomic DNA; note = Gene: NCR1; note = Location (start to end; relative to TSS): NCR1_58_88; note = Orientation (relative to transcription): sense; note = sgRNA Position: 54906232; note = Sequence Name: 56322-704_101_SL_seq_11300
tgcgtcggtgagttctggcg

SEQ ID NO: 11301 - DNA, 20 bp, Homo sapiens
  source 1..20: mol_type = genomic DNA; note = Gene: NCR1; note = Location (start to end; relative to TSS): NCR1_90_120; note = Orientation (relative to transcription): sense; note = sgRNA Position: 54906264; note = Sequence Name: 56322-704_101_SL_seq_11301
gggatcacggtgtgcctggg

SEQ ID NO: 11302 - DNA, 20 bp, Homo sapiens
  source 1..20: mol_type = genomic DNA; note = Gene: NCR1; note = Location (start to end; relative to TSS): NCR1_43_73; note = Orientation (relative to transcription): sense; note = sgRNA Position: 54906217; note = Sequence Name: 56322-704_101_SL_seq_11302
ctccctgccctgctctgcgt

SEQ ID NO: 11303 - DNA, 20 bp, Homo sapiens
  source 1..20: mol_type = genomic DNA; note = Gene: NCR1; note = Location (start to end; relative to TSS): NCR1_77_107; note = Orientation (relative to transcription): sense; note = sgRNA Position: 54906251; note = Sequence Name: 56322-704_101_SL_seq_11303
gtggaaggggaatgggatca

SEQ ID NO: 11304 - DNA, 20 bp, Homo sapiens
  source 1..20: mol_type = genomic DNA; note = Gene: NCR1; note = Location (start to end; relative to TSS): NCR1_23_53; note = Orientation (relative to transcription): antisense; note = sgRNA Position: 54906177; note = Sequence Name: 56322-704_101_SL_seq_11304
agacatcgctcagattctgc

SEQ ID NO: 11305 - DNA, 20 bp, Homo sapiens
  source 1..20: mol_type = genomic DNA; note = Gene: NCR1; note = Location (start to end; relative to TSS): NCR1_62_92; note = Orientation (relative to transcription): sense; note = sgRNA Position: 54906236; note = Sequence Name: 56322-704_101_SL_seq_11305
tcggtgagttctggcgtgga

SEQ ID NO: 11306 - DNA, 20 bp, Homo sapiens
  source 1..20: mol_type = genomic DNA; note = Gene: NCR1; note = Location (start to end; relative to TSS): NCR1_5_35; note = Orientation (relative to transcription): antisense; note = sgRNA Position: 54906159; note = Sequence Name: 56322-704_101_SL_seq_11306
gccggcctagtgctgagcag

SEQ ID NO: 11307 - DNA, 20 bp, Homo sapiens
  source 1..20: mol_type = genomic DNA; note = Gene: NCR1; note = Location (start to end; relative to TSS): NCR1_58_88; note = Orientation (relative to transcription): sense; note = sgRNA Position: 54906232; note = Sequence Name: 56322-704_101_SL_seq_11307
tgcgtcggtgagttctggcg

SEQ ID NO: 11308 - DNA, 20 bp, Homo sapiens
  source 1..20: mol_type = genomic DNA; note = Gene: NCR1; note = Location (start to end; relative to TSS): NCR1_4_34; note = Orientation (relative to transcription): antisense; note = sgRNA Position: 54906158; note = Sequence Name: 56322-704_101_SL_seq_11308
ccggcctagtgctgagcagt

SEQ ID NO: 11309 - DNA, 20 bp, Homo sapiens
  source 1..20: mol_type = genomic DNA; note = Gene: NCR1; note = Location (start to end; relative to TSS): NCR1_43_73; note = Orientation (relative to transcription): sense; note = sgRNA Position: 54906217; note = Sequence Name: 56322-704_101_SL_seq_11309
ctccctgccctgctctgcgt

SEQ ID NO: 11310 - DNA, 20 bp, Homo sapiens
  source 1..20: mol_type = genomic DNA; note = Gene: NCR2; note = Location (start to end; relative to TSS): NCR2_44_74; note = Orientation (relative to transcription): antisense; note = sgRNA Position: 41335658; note = Sequence Name: 56322-704_101_SL_seq_11310
gagtctgggtctggtgggct

SEQ ID NO: 11311 - DNA, 20 bp, Homo sapiens
  source 1..20: mol_type = genomic DNA; note = Gene: NCR2; note = Location (start to end; relative to TSS): NCR2_85_115; note = Orientation (relative to transcription): antisense; note = sgRNA Position: 41335699; note = Sequence Name: 56322-704_101_SL_seq_11311
attctgtgggcacagggaag

SEQ ID NO: 11312 - DNA, 20 bp, Homo sapiens
  source 1..20: mol_type = genomic DNA; note = Gene: NCR2; note = Location (start to end; relative to TSS): NCR2_47_77; note = Orientation (relative to transcription): sense; note = sgRNA Position: 41335681; note = Sequence Name: 56322-704_101_SL_seq_11312
gacccagactcacctacagc

SEQ ID NO: 11313 - DNA, 20 bp, Homo sapiens
  source 1..20: mol_type = genomic DNA; note = Gene: NCR2; note = Location (start to end; relative to TSS): NCR2_84_114; note = Orientation (relative to transcription): antisense; note = sgRNA Position: 41335698; note = Sequence Name: 56322-704_101_SL_seq_11313
ttctgtgggcacagggaagt

SEQ ID NO: 11314 - DNA, 20 bp, Homo sapiens
  source 1..20: mol_type = genomic DNA; note = Gene: NCR2; note = Location (start to end; relative to TSS): NCR2_49_79; note = Orientation (relative to transcription): antisense; note = sgRNA Position: 41335663; note = Sequence Name: 56322-704_101_SL_seq_11314
taggtgagtctgggtctggt

SEQ ID NO: 11315 - DNA, 20 bp, Homo sapiens
  source 1..20: mol_type = genomic DNA; note = Gene: NCR2; note = Location (start to end; relative to TSS): NCR2_83_113; note = Orientation (relative to transcription): antisense; note = sgRNA Position: 41335697; note = Sequence Name: 56322-704_101_SL_seq_11315
tctgtgggcacagggaagtg

SEQ ID NO: 11316 - DNA, 20 bp, Homo sapiens
  source 1..20: mol_type = genomic DNA; note = Gene: NCR2; note = Location (start to end; relative to TSS): NCR2_34_64; note = Orientation (relative to transcription): antisense; note = sgRNA Position: 41335648; note = Sequence Name: 56322-704_101_SL_seq_11316
ctggtgggctcggcgctgtc

SEQ ID NO: 11317 - DNA, 20 bp, Homo sapiens
  source 1..20: mol_type = genomic DNA; note = Gene: NCR2; note = Location (start to end; relative to TSS): NCR2_68_98; note = Orientation (relative to transcription): antisense; note = sgRNA Position: 41335682; note = Sequence Name: 56322-704_101_SL_seq_11317
aagtggggatctccagctgt

SEQ ID NO: 11318 - DNA, 20 bp, Homo sapiens
  source 1..20: mol_type = genomic DNA; note = Gene: NCR2; note = Location (start to end; relative to TSS): NCR2_18_48; note = Orientation (relative to transcription): antisense; note = sgRNA Position: 41335632; note = Sequence Name: 56322-704_101_SL_seq_11318
tgtctggcacacagcttccc

SEQ ID NO: 11319 - DNA, 20 bp, Homo sapiens
  source 1..20: mol_type = genomic DNA; note = Gene: NCR2; note = Location (start to end; relative to TSS): NCR2_49_79; note = Orientation (relative to transcription): antisense; note = sgRNA Position: 41335663; note = Sequence Name: 56322-704_101_SL_seq_11319
taggtgagtctgggtctggt

SEQ ID NO: 11320 - DNA, 20 bp, Homo sapiens
  source 1..20: mol_type = genomic DNA; note = Gene: NCR3; note = Location (start to end; relative to TSS): NCR3_34_64; note = Orientation (relative to transcription): antisense; note = sgRNA Position: 31592968; note = Sequence Name: 56322-704_101_SL_seq_11320
cagggtctctaggaggccaa

SEQ ID NO: 11321 - DNA, 20 bp, Homo sapiens
  source 1..20: mol_type = genomic DNA; note = Gene: NCR3; note = Location (start to end; relative to TSS): NCR3_80_110; note = Orientation (relative to transcription): antisense; note = sgRNA Position: 31592922; note = Sequence Name: 56322-704_101_SL_seq_11321
gcttgcctccctgaggagag

SEQ ID NO: 11322 - DNA, 20 bp, Homo sapiens
  source 1..20: mol_type = genomic DNA; note = Gene: NCR3; note = Location (start to end; relative to TSS): NCR3_35_65; note = Orientation (relative to transcription): antisense; note = sgRNA Position: 31592967; note = Sequence Name: 56322-704_101_SL_seq_11322
tcagggtctctaggaggcca

SEQ ID NO: 11323 - DNA, 20 bp, Homo sapiens
  source 1..20: mol_type = genomic DNA; note = Gene: NCR3; note = Location (start to end; relative to TSS): NCR3_66_96; note = Orientation (relative to transcription): sense; note = sgRNA Position: 31592916; note = Sequence Name: 56322-704_101_SL_seq_11323
tctgtcctctctcctcaggg

SEQ ID NO: 11324 - DNA, 20 bp, Homo sapiens
  source 1..20: mol_type = genomic DNA; note = Gene: NCR3; note = Location (start to end; relative to TSS): NCR3_33_63; note = Orientation (relative to transcription): antisense; note = sgRNA Position: 31592969; note = Sequence Name: 56322-704_101_SL_seq_11324
agggtctctaggaggccaag

SEQ ID NO: 11325 - DNA, 20 bp, Homo sapiens
  source 1..20: mol_type = genomic DNA; note = Gene: NCR3; note = Location (start to end; relative to TSS): NCR3_63_93; note = Orientation (relative to transcription): antisense; note = sgRNA Position: 31592939; note = Sequence Name: 56322-704_101_SL_seq_11325
gagaggacagatgctgctgg

SEQ ID NO: 11326 - DNA, 20 bp, Homo sapiens
  source 1..20: mol_type = genomic DNA; note = Gene: NCR3; note = Location (start to end; relative to TSS): NCR3_22_52; note = Orientation (relative to transcription): antisense; note = sgRNA Position: 31592980; note = Sequence Name: 56322-704_101_SL_seq_11326
gaggccaaggggccagcttg

SEQ ID NO: 11327 - DNA, 20 bp, Homo sapiens
  source 1..20: mol_type = genomic DNA; note = Gene: NCR3; note = Location (start to end; relative to TSS): NCR3_53_83; note = Orientation (relative to transcription): antisense; note = sgRNA Position: 31592949; note = Sequence Name: 56322-704_101_SL_seq_11327
atgctgctggaggagatgtc

SEQ ID NO: 11328 - DNA, 20 bp, Homo sapiens
  source 1..20: mol_type = genomic DNA; note = Gene: NCR3; note = Location (start to end; relative to TSS): NCR3_18_48; note = Orientation (relative to transcription): antisense; note = sgRNA Position: 31592984; note = Sequence Name: 56322-704_101_SL_seq_11328
ccaaggggccagcttgtggc

SEQ ID NO: 11329 - DNA, 20 bp, Homo sapiens
  source 1..20: mol_type = genomic DNA; note = Gene: NCR3; note = Location (start to end; relative to TSS): NCR3_52_82; note = Orientation (relative to transcription): antisense; note = sgRNA Position: 31592950; note = Sequence Name: 56322-704_101_SL_seq_11329
tgctgctggaggagatgtca

SEQ ID NO: 11330 - DNA, 20 bp, Homo sapiens
  source 1..20: mol_type = genomic DNA; note = Gene: NCR3LG1; note = Location (start to end; relative to TSS): NCR3LG1_43_73; note = Orientation (relative to transcription): antisense; note = sgRNA Position: 17351849; note = Sequence Name: 56322-704_101_SL_seq_11330
acacagccgggatttccagc

SEQ ID NO: 11331 - DNA, 20 bp, Homo sapiens
  source 1..20: mol_type = genomic DNA; note = Gene: NCR3LG1; note = Location (start to end; relative to TSS): NCR3LG1_89_119; note = Orientation (relative to transcription): sense; note = sgRNA Position: 17351915; note = Sequence Name: 56322-704_101_SL_seq_11331
ccctgcccttggtttctacc

SEQ ID NO: 11332 - DNA, 20 bp, Homo sapiens
  source 1..20: mol_type = genomic DNA; note = Gene: NCR3LG1; note = Location (start to end; relative to TSS): NCR3LG1_55_85; note = Orientation (relative to transcription): antisense; note = sgRNA Position: 17351861; note = Sequence Name: 56322-704_101_SL_seq_11332
gagttgacggagacacagcc

SEQ ID NO: 11333 - DNA, 20 bp, Homo sapiens
  source 1..20: mol_type = genomic DNA; note = Gene: NCR3LG1; note = Location (start to end; relative to TSS): NCR3LG1_88_118; note = Orientation (relative to transcription): sense; note = sgRNA Position: 17351914; note = Sequence Name: 56322-704_101_SL_seq_11333
cccctgcccttggtttctac

SEQ ID NO: 11334 - DNA, 20 bp, Homo sapiens
  source 1..20: mol_type = genomic DNA; note = Gene: NCR3LG1; note = Location (start to end; relative to TSS): NCR3LG1_28_58; note = Orientation (relative to transcription): sense; note = sgRNA Position: 17351854; note = Sequence Name: 56322-704_101_SL_seq_11334
aaagcgccggctggaaatcc

SEQ ID NO: 11335 - DNA, 20 bp, Homo sapiens
  source 1..20: mol_type = genomic DNA; note = Gene: NCR3LG1; note = Location (start to end; relative to TSS): NCR3LG1_61_91; note = Orientation (relative to transcription): sense; note = sgRNA Position: 17351887; note = Sequence Name: 56322-704_101_SL_seq_11335
gtcaactctttacgcaacag

SEQ ID NO: 11336 - DNA, 20 bp, Homo sapiens
  source 1..20: mol_type = genomic DNA; note = Gene: NCR3LG1; note = Location (start to end; relative to TSS): NCR3LG1_19_49; note = Orientation (relative to transcription): sense; note = sgRNA Position: 17351845; note = Sequence Name: 56322-704_101_SL_seq_11336
ggatgtgcaaaagcgccggc

SEQ ID NO: 11337 - DNA, 20 bp, Homo sapiens
  source 1..20: mol_type = genomic DNA; note = Gene: NCR3LG1; note = Location (start to end; relative to TSS): NCR3LG1_56_86; note = Orientation (relative to transcription): antisense; note = sgRNA Position: 17351862; note = Sequence Name: 56322-704_101_SL_seq_11337
agagttgacggagacacagc

SEQ ID NO: 11338 - DNA, 20 bp, Homo sapiens
  source 1..20: mol_type = genomic DNA; note = Gene: NCR3LG1; note = Location (start to end; relative to TSS): NCR3LG1_15_45; note = Orientation (relative to transcription): sense; note = sgRNA Position: 17351841; note = Sequence Name: 56322-704_101_SL_seq_11338
agtgggatgtgcaaaagcgc

SEQ ID NO: 11339 - DNA, 20 bp, Homo sapiens
  source 1..20: mol_type = genomic DNA; note = Gene: NCR3LG1; note = Location (start to end; relative to TSS): NCR3LG1_55_85; note = Orientation (relative to transcription): antisense; note = sgRNA Position: 17351861; note = Sequence Name: 56322-704_101_SL_seq_11339
gagttgacggagacacagcc

SEQ ID NO: 11340 - DNA, 20 bp, Homo sapiens
  source 1..20: mol_type = genomic DNA; note = Gene: NECTIN1; note = Location (start to end; relative to TSS): NECTIN1_53_83; note = Orientation (relative to transcription): sense; note = sgRNA Position: 119729123; note = Sequence Name: 56322-704_101_SL_seq_11340
gcggcggcggctgggacgcg

SEQ ID NO: 11341 - DNA, 20 bp, Homo sapiens
  source 1..20: mol_type = genomic DNA; note = Gene: NECTIN1; note = Location (start to end; relative to TSS): NECTIN1_94_124; note = Orientation (relative to transcription): antisense; note = sgRNA Position: 119729102; note = Sequence Name: 56322-704_101_SL_seq_11341
cggccgggcgcgaggagaac

SEQ ID NO: 11342 - DNA, 20 bp, Homo sapiens
  source 1..20: mol_type = genomic DNA; note = Gene: NECTIN1; note = Location (start to end; relative to TSS): NECTIN1_26_56; note = Orientation (relative to transcription): sense; note = sgRNA Position: 119729150; note = Sequence Name: 56322-704_101_SL_seq_11342
tgttgcggatcgccggcacc

SEQ ID NO: 11343 - DNA, 20 bp, Homo sapiens
  source 1..20: mol_type = genomic DNA; note = Gene: NECTIN1; note = Location (start to end; relative to TSS): NECTIN1_90_120; note = Orientation (relative to transcription): antisense; note = sgRNA Position: 119729106; note = Sequence Name: 56322-704_101_SL_seq_11343
cgggcgcgaggagaacgggt

SEQ ID NO: 11344 - DNA, 20 bp, Homo sapiens
  source 1..20: mol_type = genomic DNA; note = Gene: NECTIN1; note = Location (start to end; relative to TSS): NECTIN1_29_59; note = Orientation (relative to transcription): antisense; note = sgRNA Position: 119729167; note = Sequence Name: 56322-704_101_SL_seq_11344
gccggcgatccgcaacaatg

SEQ ID NO: 11345 - DNA, 20 bp, Homo sapiens
  source 1..20: mol_type = genomic DNA; note = Gene: NECTIN1; note = Location (start to end; relative to TSS): NECTIN1_87_117; note = Orientation (relative to transcription): antisense; note = sgRNA Position: 119729109; note = Sequence Name: 56322-704_101_SL_seq_11345
gcgcgaggagaacgggtcgg

SEQ ID NO: 11346 - DNA, 20 bp, Homo sapiens
  source 1..20: mol_type = genomic DNA; note = Gene: NECTIN1; note = Location (start to end; relative to TSS): NECTIN1_19_49; note = Orientation (relative to transcription): sense; note = sgRNA Position: 119729157; note = Sequence Name: 56322-704_101_SL_seq_11346
tccacattgttgcggatcgc

SEQ ID NO: 11347 - DNA, 20 bp, Homo sapiens
  source 1..20: mol_type = genomic DNA; note = Gene: NECTIN1; note = Location (start to end; relative to TSS): NECTIN1_82_112; note = Orientation (relative to transcription): sense; note = sgRNA Position: 119729094; note = Sequence Name: 56322-704_101_SL_seq_11347
cgacccgttctcctcgcgcc

SEQ ID NO: 11348 - DNA, 20 bp, Homo sapiens
  source 1..20: mol_type = genomic DNA; note = Gene: NECTIN1; note = Location (start to end; relative to TSS): NECTIN1_11_41; note = Orientation (relative to transcription): sense; note = sgRNA Position: 119729165; note = Sequence Name: 56322-704_101_SL_seq_11348
agcgcggctccacattgttg

SEQ ID NO: 11349 - DNA, 20 bp, Homo sapiens
  source 1..20: mol_type = genomic DNA; note = Gene: NECTIN1; note = Location (start to end; relative to TSS): NECTIN1_53_83; note = Orientation (relative to transcription): sense; note = sgRNA Position: 119729123; note = Sequence Name: 56322-704_101_SL_seq_11349
gcggcggcggctgggacgcg

SEQ ID NO: 11350 - DNA, 20 bp, Homo sapiens
  source 1..20: mol_type = genomic DNA; note = Gene: NECTIN2; note = Location (start to end; relative to TSS): NECTIN2_47_77; note = Orientation (relative to transcription): sense; note = sgRNA Position: 44846370; note = Sequence Name: 56322-704_101_SL_seq_11350
cgggcggggagagctgggcc

SEQ ID NO: 11351 - DNA, 20 bp, Homo sapiens
  source 1..20: mol_type = genomic DNA; note = Gene: NECTIN2; note = Location (start to end; relative to TSS): NECTIN2_78_108; note = Orientation (relative to transcription): sense; note = sgRNA Position: 44846401; note = Sequence Name: 56322-704_101_SL_seq_11351
acagggaggctagagcgcag

SEQ ID NO: 11352 - DNA, 20 bp, Homo sapiens
  source 1..20: mol_type = genomic DNA; note = Gene: NECTIN2; note = Location (start to end; relative to TSS): NECTIN2_32_62; note = Orientation (relative to transcription): sense; note = sgRNA Position: 44846355; note = Sequence Name: 56322-704_101_SL_seq_11352
ccgggggtgccgagccgggc

SEQ ID NO: 11353 - DNA, 20 bp, Homo sapiens
  source 1..20: mol_type = genomic DNA; note = Gene: NECTIN2; note = Location (start to end; relative to TSS): NECTIN2_64_94; note = Orientation (relative to transcription): sense; note = sgRNA Position: 44846387; note = Sequence Name: 56322-704_101_SL_seq_11353
gccgggagagcagaacaggg

SEQ ID NO: 11354 - DNA, 20 bp, Homo sapiens
  source 1..20: mol_type = genomic DNA; note = Gene: NECTIN2; note = Location (start to end; relative to TSS): NECTIN2_31_61; note = Orientation (relative to transcription): sense; note = sgRNA Position: 44846354; note = Sequence Name: 56322-704_101_SL_seq_11354
gccgggggtgccgagccggg

SEQ ID NO: 11355 - DNA, 20 bp, Homo sapiens
  source 1..20: mol_type = genomic DNA; note = Gene: NECTIN2; note = Location (start to end; relative to TSS): NECTIN2_61_91; note = Orientation (relative to transcription): sense; note = sgRNA Position: 44846384; note = Sequence Name: 56322-704_101_SL_seq_11355
tgggccgggagagcagaaca

SEQ ID NO: 11356 - DNA, 20 bp, Homo sapiens
  source 1..20: mol_type = genomic DNA; note = Gene: NECTIN2; note = Location (start to end; relative to TSS): NECTIN2_23_53; note = Orientation (relative to transcription): antisense; note = sgRNA Position: 44846326; note = Sequence Name: 56322-704_101_SL_seq_11356
cccggcctctcgctcagctc

SEQ ID NO: 11357 - DNA, 20 bp, Homo sapiens
  source 1..20: mol_type = genomic DNA; note = Gene: NECTIN2; note = Location (start to end; relative to TSS): NECTIN2_55_85; note = Orientation (relative to transcription): antisense; note = sgRNA Position: 44846358; note = Sequence Name: 56322-704_101_SL_seq_11357
ccggcccagctctccccgcc

SEQ ID NO: 11358 - DNA, 20 bp, Homo sapiens
  source 1..20: mol_type = genomic DNA; note = Gene: NECTIN2; note = Location (start to end; relative to TSS): NECTIN2_20_50; note = Orientation (relative to transcription): antisense; note = sgRNA Position: 44846323; note = Sequence Name: 56322-704_101_SL_seq_11358
ggcctctcgctcagctccgg

SEQ ID NO: 11359 - DNA, 20 bp, Homo sapiens
  source 1..20: mol_type = genomic DNA; note = Gene: NECTIN2; note = Location (start to end; relative to TSS): NECTIN2_50_80; note = Orientation (relative to transcription): antisense; note = sgRNA Position: 44846353; note = Sequence Name: 56322-704_101_SL_seq_11359
ccagctctccccgcccggct

SEQ ID NO: 11360 - DNA, 20 bp, Homo sapiens
  source 1..20: mol_type = genomic DNA; note = Gene: NECTIN3; note = Location (start to end; relative to TSS): NECTIN3_46_76; note = Orientation (relative to transcription): sense; note = sgRNA Position: 111071888; note = Sequence Name: 56322-704_101_SL_seq_11360
caagtgtcagccggcagcga

SEQ ID NO: 11361 - DNA, 20 bp, Homo sapiens
  source 1..20: mol_type = genomic DNA; note = Gene: NECTIN3; note = Location (start to end; relative to TSS): NECTIN3_113_143; note = Orientation (relative to transcription): antisense; note = sgRNA Position: 111071935; note = Sequence Name: 56322-704_101_SL_seq_11361
ctctgggcggaggctgtgga

SEQ ID NO: 11362 - DNA, 20 bp, Homo sapiens
  source 1..20: mol_type = genomic DNA; note = Gene: NECTIN3; note = Location (start to end; relative to TSS): NECTIN3_40_70; note = Orientation (relative to transcription): antisense; note = sgRNA Position: 111071862; note = Sequence Name: 56322-704_101_SL_seq_11362
gacacttggccgaacgctgg

SEQ ID NO: 11363 - DNA, 20 bp, Homo sapiens
  source 1..20: mol_type = genomic DNA; note = Gene: NECTIN3; note = Location (start to end; relative to TSS): NECTIN3_108_138; note = Orientation (relative to transcription): antisense; note = sgRNA Position: 111071930; note = Sequence Name: 56322-704_101_SL_seq_11363
ggcggaggctgtggaaggtc

SEQ ID NO: 11364 - DNA, 20 bp, Homo sapiens
  source 1..20: mol_type = genomic DNA; note = Gene: NECTIN3; note = Location (start to end; relative to TSS): NECTIN3_43_73; note = Orientation (relative to transcription): antisense; note = sgRNA Position: 111071865; note = Sequence Name: 56322-704_101_SL_seq_11364
gctgacacttggccgaacgc

SEQ ID NO: 11365 - DNA, 20 bp, Homo sapiens
  source 1..20: mol_type = genomic DNA; note = Gene: NECTIN3; note = Location (start to end; relative to TSS): NECTIN3_80_110; note = Orientation (relative to transcription): sense; note = sgRNA Position: 111071922; note = Sequence Name: 56322-704_101_SL_seq_11365
ggagctggggacgcgcgcgc

SEQ ID NO: 11366 - DNA, 20 bp, Homo sapiens
  source 1..20: mol_type = genomic DNA; note = Gene: NECTIN3; note = Location (start to end; relative to TSS): NECTIN3_37_67; note = Orientation (relative to transcription): sense; note = sgRNA Position: 111071879; note = Sequence Name: 56322-704_101_SL_seq_11366
gcgttcggccaagtgtcagc

SEQ ID NO: 11367 - DNA, 20 bp, Homo sapiens
  source 1..20: mol_type = genomic DNA; note = Gene: NECTIN3; note = Location (start to end; relative to TSS): NECTIN3_67_97; note = Orientation (relative to transcription): sense; note = sgRNA Position: 111071909; note = Sequence Name: 56322-704_101_SL_seq_11367
ggcgctagagctgggagctg

SEQ ID NO: 11368 - DNA, 20 bp, Homo sapiens
  source 1..20: mol_type = genomic DNA; note = Gene: NECTIN3; note = Location (start to end; relative to TSS): NECTIN3_22_52; note = Orientation (relative to transcription): sense; note = sgRNA Position: 111071864; note = Sequence Name: 56322-704_101_SL_seq_11368
tcgaggcagccgccagcgtt

SEQ ID NO: 11369 - DNA, 20 bp, Homo sapiens
  source 1..20: mol_type = genomic DNA; note = Gene: NECTIN3; note = Location (start to end; relative to TSS): NECTIN3_54_84; note = Orientation (relative to transcription): antisense; note = sgRNA Position: 111071876; note = Sequence Name: 56322-704_101_SL_seq_11369
cgtcgctgccggctgacact

SEQ ID NO: 11370 - DNA, 20 bp, Homo sapiens
  source 1..20: mol_type = genomic DNA; note = Gene: NECTIN4; note = Location (start to end; relative to TSS): NECTIN4_52_82; note = Orientation (relative to transcription): sense; note = sgRNA Position: 161089482; note = Sequence Name: 56322-704_101_SL_seq_11370
cggcttcttgggggtagcta

SEQ ID NO: 11371 - DNA, 20 bp, Homo sapiens
  source 1..20: mol_type = genomic DNA; note = Gene: NECTIN4; note = Location (start to end; relative to TSS): NECTIN4_83_113; note = Orientation (relative to transcription): sense; note = sgRNA Position: 161089451; note = Sequence Name: 56322-704_101_SL_seq_11371
gtagaacggggccggggctg

SEQ ID NO: 11372 - DNA, 20 bp, Homo sapiens
  source 1..20: mol_type = genomic DNA; note = Gene: NECTIN4; note = Location (start to end; relative to TSS): NECTIN4_43_73; note = Orientation (relative to transcription): sense; note = sgRNA Position: 161089491; note = Sequence Name: 56322-704_101_SL_seq_11372
tcccgatcacggcttcttgg

SEQ ID NO: 11373 - DNA, 20 bp, Homo sapiens
  source 1..20: mol_type = genomic DNA; note = Gene: NECTIN4; note = Location (start to end; relative to TSS): NECTIN4_76_106; note = Orientation (relative to transcription): sense; note = sgRNA Position: 161089458; note = Sequence Name: 56322-704_101_SL_seq_11373
tgggtgtgtagaacggggcc

SEQ ID NO: 11374 - DNA, 20 bp, Homo sapiens
  source 1..20: mol_type = genomic DNA; note = Gene: NECTIN4; note = Location (start to end; relative to TSS): NECTIN4_42_72; note = Orientation (relative to transcription): sense; note = sgRNA Position: 161089492; note = Sequence Name: 56322-704_101_SL_seq_11374
ctcccgatcacggcttcttg

SEQ ID NO: 11375 - DNA, 20 bp, Homo sapiens
  source 1..20: mol_type = genomic DNA; note = Gene: NECTIN4; note = Location (start to end; relative to TSS): NECTIN4_75_105; note = Orientation (relative to transcription): sense; note = sgRNA Position: 161089459; note = Sequence Name: 56322-704_101_SL_seq_11375
ctgggtgtgtagaacggggc

SEQ ID NO: 11376 - DNA, 20 bp, Homo sapiens
  source 1..20: mol_type = genomic DNA; note = Gene: NECTIN4; note = Location (start to end; relative to TSS): NECTIN4_32_62; note = Orientation (relative to transcription): sense; note = sgRNA Position: 161089502; note = Sequence Name: 56322-704_101_SL_seq_11376
gagctcggagctcccgatca

SEQ ID NO: 11377 - DNA, 20 bp, Homo sapiens
  source 1..20: mol_type = genomic DNA; note = Gene: NECTIN4; note = Location (start to end; relative to TSS): NECTIN4_69_99; note = Orientation (relative to transcription): sense; note = sgRNA Position: 161089465; note = Sequence Name: 56322-704_101_SL_seq_11377
ctacggctgggtgtgtagaa

SEQ ID NO: 11378 - DNA, 20 bp, Homo sapiens
  source 1..20: mol_type = genomic DNA; note = Gene: NECTIN4; note = Location (start to end; relative to TSS): NECTIN4_17_47; note = Orientation (relative to transcription): sense; note = sgRNA Position: 161089517; note = Sequence Name: 56322-704_101_SL_seq_11378
gaagcagctctgggggagct

SEQ ID NO: 11379 - DNA, 20 bp, Homo sapiens
  source 1..20: mol_type = genomic DNA; note = Gene: NECTIN4; note = Location (start to end; relative to TSS): NECTIN4_52_82; note = Orientation (relative to transcription): sense; note = sgRNA Position: 161089482; note = Sequence Name: 56322-704_101_SL_seq_11379
cggcttcttgggggtagcta

SEQ ID NO: 11380 - DNA, 20 bp, Homo sapiens
  source 1..20: mol_type = genomic DNA; note = Gene: NEGR1; note = Location (start to end; relative to TSS): NEGR1_39_69; note = Orientation (relative to transcription): sense; note = sgRNA Position: 72282476; note = Sequence Name: 56322-704_101_SL_seq_11380
ggacatgatgctgttggtgc

SEQ ID NO: 11381 - DNA, 20 bp, Homo sapiens
  source 1..20: mol_type = genomic DNA; note = Gene: NEGR1; note = Location (start to end; relative to TSS): NEGR1_87_117; note = Orientation (relative to transcription): antisense; note = sgRNA Position: 72282448; note = Sequence Name: 56322-704_101_SL_seq_11381
ggagcaccgccgccagccac

SEQ ID NO: 11382 - DNA, 20 bp, Homo sapiens
  source 1..20: mol_type = genomic DNA; note = Gene: NEGR1; note = Location (start to end; relative to TSS): NEGR1_36_66; note = Orientation (relative to transcription): antisense; note = sgRNA Position: 72282499; note = Sequence Name: 56322-704_101_SL_seq_11382
gcatcatgtccatccctgct

SEQ ID NO: 11383 - DNA, 20 bp, Homo sapiens
  source 1..20: mol_type = genomic DNA; note = Gene: NEGR1; note = Location (start to end; relative to TSS): NEGR1_72_102; note = Orientation (relative to transcription): sense; note = sgRNA Position: 72282443; note = Sequence Name: 56322-704_101_SL_seq_11383
ctcgaaccagtggctggcgg

SEQ ID NO: 11384 - DNA, 20 bp, Homo sapiens
  source 1..20: mol_type = genomic DNA; note = Gene: NEGR1; note = Location (start to end; relative to TSS): NEGR1_35_65; note = Orientation (relative to transcription): antisense; note = sgRNA Position: 72282500; note = Sequence Name: 56322-704_101_SL_seq_11384
catcatgtccatccctgcta

SEQ ID NO: 11385 - DNA, 20 bp, Homo sapiens
  source 1..20: mol_type = genomic DNA; note = Gene: NEGR1; note = Location (start to end; relative to TSS): NEGR1_69_99; note = Orientation (relative to transcription): sense; note = sgRNA Position: 72282446; note = Sequence Name: 56322-704_101_SL_seq_11385
ttgctcgaaccagtggctgg

SEQ ID NO: 11386 - DNA, 20 bp, Homo sapiens
  source 1..20: mol_type = genomic DNA; note = Gene: NEGR1; note = Location (start to end; relative to TSS): NEGR1_33_63; note = Orientation (relative to transcription): sense; note = sgRNA Position: 72282482; note = Sequence Name: 56322-704_101_SL_seq_11386
agggatggacatgatgctgt

SEQ ID NO: 11387 - DNA, 20 bp, Homo sapiens
  source 1..20: mol_type = genomic DNA; note = Gene: NEGR1; note = Location (start to end; relative to TSS): NEGR1_66_96; note = Orientation (relative to transcription): sense; note = sgRNA Position: 72282449; note = Sequence Name: 56322-704_101_SL_seq_11387
ttgttgctcgaaccagtggc

SEQ ID NO: 11388 - DNA, 20 bp, Homo sapiens
  source 1..20: mol_type = genomic DNA; note = Gene: NEGR1; note = Location (start to end; relative to TSS): NEGR1_18_48; note = Orientation (relative to transcription): sense; note = sgRNA Position: 72282497; note = Sequence Name: 56322-704_101_SL_seq_11388
gtgagcagccctagcaggga

SEQ ID NO: 11389 - DNA, 20 bp, Homo sapiens
  source 1..20: mol_type = genomic DNA; note = Gene: NEGR1; note = Location (start to end; relative to TSS): NEGR1_62_92; note = Orientation (relative to transcription): sense; note = sgRNA Position: 72282453; note = Sequence Name: 56322-704_101_SL_seq_11389
gtgcttgttgctcgaaccag

SEQ ID NO: 11390 - DNA, 20 bp, Homo sapiens
  source 1..20: mol_type = genomic DNA; note = Gene: NEO1; note = Location (start to end; relative to TSS): NEO1_26_56; note = Orientation (relative to transcription): sense; note = sgRNA Position: 73052515; note = Sequence Name: 56322-704_101_SL_seq_11390
ggagtctcccctccagcgag

SEQ ID NO: 11391 - DNA, 20 bp, Homo sapiens
  source 1..20: mol_type = genomic DNA; note = Gene: NEO1; note = Location (start to end; relative to TSS): NEO1_98_128; note = Orientation (relative to transcription): sense; note = sgRNA Position: 73052587; note = Sequence Name: 56322-704_101_SL_seq_11391
cgggagccgagcttgcagcg

SEQ ID NO: 11392 - DNA, 20 bp, Homo sapiens
  source 1..20: mol_type = genomic DNA; note = Gene: NEO1; note = Location (start to end; relative to TSS): NEO1_27_57; note = Orientation (relative to transcription): sense; note = sgRNA Position: 73052516; note = Sequence Name: 56322-704_101_SL_seq_11392
gagtctcccctccagcgaga

SEQ ID NO: 11393 - DNA, 20 bp, Homo sapiens
  source 1..20: mol_type = genomic DNA; note = Gene: NEO1; note = Location (start to end; relative to TSS): NEO1_79_109; note = Orientation (relative to transcription): antisense; note = sgRNA Position: 73052548; note = Sequence Name: 56322-704_101_SL_seq_11393
gccgctgctccagcccagcc

SEQ ID NO: 11394 - DNA, 20 bp, Homo sapiens
  source 1..20: mol_type = genomic DNA; note = Gene: NEO1; note = Location (start to end; relative to TSS): NEO1_28_58; note = Orientation (relative to transcription): sense; note = sgRNA Position: 73052517; note = Sequence Name: 56322-704_101_SL_seq_11394
agtctcccctccagcgagag

SEQ ID NO: 11395 - DNA, 20 bp, Homo sapiens
  source 1..20: mol_type = genomic DNA; note = Gene: NEO1; note = Location (start to end; relative to TSS): NEO1_72_102; note = Orientation (relative to transcription): sense; note = sgRNA Position: 73052561; note = Sequence Name: 56322-704_101_SL_seq_11395
gggctgggctggagcagcgg

SEQ ID NO: 11396 - DNA, 20 bp, Homo sapiens
  source 1..20: mol_type = genomic DNA; note = Gene: NEO1; note = Location (start to end; relative to TSS): NEO1_31_61; note = Orientation (relative to transcription): antisense; note = sgRNA Position: 73052500; note = Sequence Name: 56322-704_101_SL_seq_11396
tcgctggaggggagactcca

SEQ ID NO: 11397 - DNA, 20 bp, Homo sapiens
  source 1..20: mol_type = genomic DNA; note = Gene: NEO1; note = Location (start to end; relative to TSS): NEO1_69_99; note = Orientation (relative to transcription): sense; note = sgRNA Position: 73052558; note = Sequence Name: 56322-704_101_SL_seq_11397
gccgggctgggctggagcag

SEQ ID NO: 11398 - DNA, 20 bp, Homo sapiens
  source 1..20: mol_type = genomic DNA; note = Gene: NEO1; note = Location (start to end; relative to TSS): NEO1_32_62; note = Orientation (relative to transcription): antisense; note = sgRNA Position: 73052501; note = Sequence Name: 56322-704_101_SL_seq_11398
ctcgctggaggggagactcc

SEQ ID NO: 11399 - DNA, 20 bp, Homo sapiens
  source 1..20: mol_type = genomic DNA; note = Gene: NEO1; note = Location (start to end; relative to TSS): NEO1_69_99; note = Orientation (relative to transcription): sense; note = sgRNA Position: 73052558; note = Sequence Name: 56322-704_101_SL_seq_11399
gccgggctgggctggagcag

SEQ ID NO: 11400 - DNA, 20 bp, Homo sapiens
  source 1..20: mol_type = genomic DNA; note = Gene: NEXN; note = Location (start to end; relative to TSS): NEXN_45_75; note = Orientation (relative to transcription): sense; note = sgRNA Position: 77888695; note = Sequence Name: 56322-704_101_SL_seq_11400
acccctacccacagccaggc

SEQ ID NO: 11401 - DNA, 20 bp, Homo sapiens
  source 1..20: mol_type = genomic DNA; note = Gene: NEXN; note = Location (start to end; relative to TSS): NEXN_92_122; note = Orientation (relative to transcription): antisense; note = sgRNA Position: 77888722; note = Sequence Name: 56322-704_101_SL_seq_11401
cgaaggtacttctttccgcg

SEQ ID NO: 11402 - DNA, 20 bp, Homo sapiens
  source 1..20: mol_type = genomic DNA; note = Gene: NEXN; note = Location (start to end; relative to TSS): NEXN_44_74; note = Orientation (relative to transcription): sense; note = sgRNA Position: 77888694; note = Sequence Name: 56322-704_101_SL_seq_11402
gacccctacccacagccagg

SEQ ID NO: 11403 - DNA, 20 bp, Homo sapiens
  source 1..20: mol_type = genomic DNA; note = Gene: NEXN; note = Location (start to end; relative to TSS): NEXN_89_119; note = Orientation (relative to transcription): antisense; note = sgRNA Position: 77888719; note = Sequence Name: 56322-704_101_SL_seq_11403
aggtacttctttccgcgtgg

SEQ ID NO: 11404 - DNA, 20 bp, Homo sapiens
  source 1..20: mol_type = genomic DNA; note = Gene: NEXN; note = Location (start to end; relative to TSS): NEXN_41_71; note = Orientation (relative to transcription): sense; note = sgRNA Position: 77888691; note = Sequence Name: 56322-704_101_SL_seq_11404
ccagacccctacccacagcc

SEQ ID NO: 11405 - DNA, 20 bp, Homo sapiens
  source 1..20: mol_type = genomic DNA; note = Gene: NEXN; note = Location (start to end; relative to TSS): NEXN_88_118; note = Orientation (relative to transcription): antisense; note = sgRNA Position: 77888718; note = Sequence Name: 56322-704_101_SL_seq_11405
ggtacttctttccgcgtgga

SEQ ID NO: 11406 - DNA, 20 bp, Homo sapiens
  source 1..20: mol_type = genomic DNA; note = Gene: NEXN; note = Location (start to end; relative to TSS): NEXN_49_79; note = Orientation (relative to transcription): antisense; note = sgRNA Position: 77888679; note = Sequence Name: 56322-704_101_SL_seq_11406
ctggctgtgggtaggggtct

SEQ ID NO: 11407 - DNA, 20 bp, Homo sapiens
  source 1..20: mol_type = genomic DNA; note = Gene: NEXN; note = Location (start to end; relative to TSS): NEXN_87_117; note = Orientation (relative to transcription): sense; note = sgRNA Position: 77888737; note = Sequence Name: 56322-704_101_SL_seq_11407
gcggaaagaagtaccttcgc

SEQ ID NO: 11408 - DNA, 20 bp, Homo sapiens
  source 1..20: mol_type = genomic DNA; note = Gene: NEXN; note = Location (start to end; relative to TSS): NEXN_13_43; note = Orientation (relative to transcription): antisense; note = sgRNA Position: 77888643; note = Sequence Name: 56322-704_101_SL_seq_11408
aacacttctgctccagccgc

SEQ ID NO: 11409 - DNA, 20 bp, Homo sapiens
  source 1..20: mol_type = genomic DNA; note = Gene: NEXN; note = Location (start to end; relative to TSS): NEXN_45_75; note = Orientation (relative to transcription): sense; note = sgRNA Position: 77888695; note = Sequence Name: 56322-704_101_SL_seq_11409
acccctacccacagccaggc

SEQ ID NO: 11410 - DNA, 20 bp, Homo sapiens
  source 1..20: mol_type = genomic DNA; note = Gene: NFASC; note = Location (start to end; relative to TSS): NFASC_33_63; note = Orientation (relative to transcription): sense; note = sgRNA Position: 204828711; note = Sequence Name: 56322-704_101_SL_seq_11410
agaggcgctgcaggggacgc

SEQ ID NO: 11411 - DNA, 20 bp, Homo sapiens
  source 1..20: mol_type = genomic DNA; note = Gene: NFASC; note = Location (start to end; relative to TSS): NFASC_78_108; note = Orientation (relative to transcription): sense; note = sgRNA Position: 204828756; note = Sequence Name: 56322-704_101_SL_seq_11411
gacagctcggacagcgccca

SEQ ID NO: 11412 - DNA, 20 bp, Homo sapiens
  source 1..20: mol_type = genomic DNA; note = Gene: NFASC; note = Location (start to end; relative to TSS): NFASC_34_64; note = Orientation (relative to transcription): sense; note = sgRNA Position: 204828712; note = Sequence Name: 56322-704_101_SL_seq_11412
gaggcgctgcaggggacgcg

SEQ ID NO: 11413 - DNA, 20 bp, Homo sapiens
  source 1..20: mol_type = genomic DNA; note = Gene: NFASC; note = Location (start to end; relative to TSS): NFASC_77_107; note = Orientation (relative to transcription): sense; note = sgRNA Position: 204828755; note = Sequence Name: 56322-704_101_SL_seq_11413
ggacagctcggacagcgccc

SEQ ID NO: 11414 - DNA, 20 bp, Homo sapiens
  source 1..20: mol_type = genomic DNA; note = Gene: NFASC; note = Location (start to end; relative to TSS): NFASC_25_55; note = Orientation (relative to transcription): sense; note = sgRNA Position: 204828703; note = Sequence Name: 56322-704_101_SL_seq_11414
tggcggcgagaggcgctgca

SEQ ID NO: 11415 - DNA, 20 bp, Homo sapiens
  source 1..20: mol_type = genomic DNA; note = Gene: NFASC; note = Location (start to end; relative to TSS): NFASC_65_95; note = Orientation (relative to transcription): sense; note = sgRNA Position: 204828743; note = Sequence Name: 56322-704_101_SL_seq_11415
ggcgccggcagcggacagct

SEQ ID NO: 11416 - DNA, 20 bp, Homo sapiens
  source 1..20: mol_type = genomic DNA; note = Gene: NFASC; note = Location (start to end; relative to TSS): NFASC_26_56; note = Orientation (relative to transcription): sense; note = sgRNA Position: 204828704; note = Sequence Name: 56322-704_101_SL_seq_11416
ggcggcgagaggcgctgcag

SEQ ID NO: 11417 - DNA, 20 bp, Homo sapiens
  source 1..20: mol_type = genomic DNA; note = Gene: NFASC; note = Location (start to end; relative to TSS): NFASC_56_86; note = Orientation (relative to transcription): sense; note = sgRNA Position: 204828734; note = Sequence Name: 56322-704_101_SL_seq_11417
ggaagtggcggcgccggcag

SEQ ID NO: 11418 - DNA, 20 bp, Homo sapiens
  source 1..20: mol_type = genomic DNA; note = Gene: NFASC; note = Location (start to end; relative to TSS): NFASC_19_49; note = Orientation (relative to transcription): antisense; note = sgRNA Position: 204828677; note = Sequence Name: 56322-704_101_SL_seq_11418
cgccgccagccgccgcatta

SEQ ID NO: 11419 - DNA, 20 bp, Homo sapiens
  source 1..20: mol_type = genomic DNA; note = Gene: NFASC; note = Location (start to end; relative to TSS): NFASC_50_80; note = Orientation (relative to transcription): sense; note = sgRNA Position: 204828728; note = Sequence Name: 56322-704_101_SL_seq_11419
cgcgggggaagtggcggcgc

SEQ ID NO: 11420 - DNA, 20 bp, Homo sapiens
  source 1..20: mol_type = genomic DNA; note = Gene: NPHS1; note = Location (start to end; relative to TSS): NPHS1_49_79; note = Orientation (relative to transcription): antisense; note = sgRNA Position: 35852451; note = Sequence Name: 56322-704_101_SL_seq_11420
gagagcgatgaggctgatgc

SEQ ID NO: 11421 - DNA, 20 bp, Homo sapiens
  source 1..20: mol_type = genomic DNA; note = Gene: NPHS1; note = Location (start to end; relative to TSS): NPHS1_115_145; note = Orientation (relative to transcription): sense; note = sgRNA Position: 35852365; note = Sequence Name: 56322-704_101_SL_seq_11421
tgagtagtgagacaaggagc

SEQ ID NO: 11422 - DNA, 20 bp, Homo sapiens
  source 1..20: mol_type = genomic DNA; note = Gene: NPHS1; note = Location (start to end; relative to TSS): NPHS1_52_82; note = Orientation (relative to transcription): sense; note = sgRNA Position: 35852428; note = Sequence Name: 56322-704_101_SL_seq_11422
tcatcgctctcctaggctcc

SEQ ID NO: 11423 - DNA, 20 bp, Homo sapiens
  source 1..20: mol_type = genomic DNA; note = Gene: NPHS1; note = Location (start to end; relative to TSS): NPHS1_109_139; note = Orientation (relative to transcription): sense; note = sgRNA Position: 35852371; note = Sequence Name: 56322-704_101_SL_seq_11423
aggctgtgagtagtgagaca

SEQ ID NO: 11424 - DNA, 20 bp, Homo sapiens
  source 1..20: mol_type = genomic DNA; note = Gene: NPHS1; note = Location (start to end; relative to TSS): NPHS1_59_89; note = Orientation (relative to transcription): antisense; note = sgRNA Position: 35852441; note = Sequence Name: 56322-704_101_SL_seq_11424
aggagcctaggagagcgatg

SEQ ID NO: 11425 - DNA, 20 bp, Homo sapiens
  source 1..20: mol_type = genomic DNA; note = Gene: NPHS1; note = Location (start to end; relative to TSS): NPHS1_108_138; note = Orientation (relative to transcription): antisense; note = sgRNA Position: 35852392; note = Sequence Name: 56322-704_101_SL_seq_11425
ctactcacagcctttcaaga

SEQ ID NO: 11426 - DNA, 20 bp, Homo sapiens
  source 1..20: mol_type = genomic DNA; note = Gene: NPHS1; note = Location (start to end; relative to TSS): NPHS1_45_75; note = Orientation (relative to transcription): sense; note = sgRNA Position: 35852435; note = Sequence Name: 56322-704_101_SL_seq_11426
atcagcctcatcgctctcct

SEQ ID NO: 11427 - DNA, 20 bp, Homo sapiens
  source 1..20: mol_type = genomic DNA; note = Gene: NPHS1; note = Location (start to end; relative to TSS): NPHS1_89_119; note = Orientation (relative to transcription): sense; note = sgRNA Position: 35852391; note = Sequence Name: 56322-704_101_SL_seq_11427
ggctgcaggtccttcttgaa

SEQ ID NO: 11428 - DNA, 20 bp, Homo sapiens
  source 1..20: mol_type = genomic DNA; note = Gene: NPHS1; note = Location (start to end; relative to TSS): NPHS1_43_73; note = Orientation (relative to transcription): antisense; note = sgRNA Position: 35852457; note = Sequence Name: 56322-704_101_SL_seq_11428
gatgaggctgatgcaggcac

SEQ ID NO: 11429 - DNA, 20 bp, Homo sapiens
  source 1..20: mol_type = genomic DNA; note = Gene: NPHS1; note = Location (start to end; relative to TSS): NPHS1_75_105; note = Orientation (relative to transcription): sense; note = sgRNA Position: 35852405; note = Sequence Name: 56322-704_101_SL_seq_11429
cctgctggactctgggctgc

SEQ ID NO: 11430 - DNA, 20 bp, Homo sapiens
  source 1..20: mol_type = genomic DNA; note = Gene: NPTN; note = Location (start to end; relative to TSS): NPTN_53_83; note = Orientation (relative to transcription): antisense; note = sgRNA Position: 73633332; note = Sequence Name: 56322-704_101_SL_seq_11430
gtgagcgagggaggcagccg

SEQ ID NO: 11431 - DNA, 20 bp, Homo sapiens
  source 1..20: mol_type = genomic DNA; note = Gene: NPTN; note = Location (start to end; relative to TSS): NPTN_91_121; note = Orientation (relative to transcription): antisense; note = sgRNA Position: 73633294; note = Sequence Name: 56322-704_101_SL_seq_11431
aggggagggagggagggggc

SEQ ID NO: 11432 - DNA, 20 bp, Homo sapiens
  source 1..20: mol_type = genomic DNA; note = Gene: NPTN; note = Location (start to end; relative to TSS): NPTN_48_78; note = Orientation (relative to transcription): antisense; note = sgRNA Position: 73633337; note = Sequence Name: 56322-704_101_SL_seq_11432
cgagggaggcagccgcggct

SEQ ID NO: 11433 - DNA, 20 bp, Homo sapiens
  source 1..20: mol_type = genomic DNA; note = Gene: NPTN; note = Location (start to end; relative to TSS): NPTN_78_108; note = Orientation (relative to transcription): antisense; note = sgRNA Position: 73633307; note = Sequence Name: 56322-704_101_SL_seq_11433
agggggcgggcgagtgcgcg

SEQ ID NO: 11434 - DNA, 20 bp, Homo sapiens
  source 1..20: mol_type = genomic DNA; note = Gene: NPTN; note = Location (start to end; relative to TSS): NPTN_27_57; note = Orientation (relative to transcription): sense; note = sgRNA Position: 73633338; note = Sequence Name: 56322-704_101_SL_seq_11434
ggaaggacggagccgagccg

SEQ ID NO: 11435 - DNA, 20 bp, Homo sapiens
  source 1..20: mol_type = genomic DNA; note = Gene: NPTN; note = Location (start to end; relative to TSS): NPTN_62_92; note = Orientation (relative to transcription): antisense; note = sgRNA Position: 73633323; note = Sequence Name: 56322-704_101_SL_seq_11435
cgcgagggagtgagcgaggg

SEQ ID NO: 11436 - DNA, 20 bp, Homo sapiens
  source 1..20: mol_type = genomic DNA; note = Gene: NPTN; note = Location (start to end; relative to TSS): NPTN_14_44; note = Orientation (relative to transcription): sense; note = sgRNA Position: 73633351; note = Sequence Name: 56322-704_101_SL_seq_11436
aggaggaggacggggaagga

SEQ ID NO: 11437 - DNA, 20 bp, Homo sapiens
  source 1..20: mol_type = genomic DNA; note = Gene: NPTN; note = Location (start to end; relative to TSS): NPTN_53_83; note = Orientation (relative to transcription): antisense; note = sgRNA Position: 73633332; note = Sequence Name: 56322-704_101_SL_seq_11437
gtgagcgagggaggcagccg

SEQ ID NO: 11438 - DNA, 20 bp, Homo sapiens
  source 1..20: mol_type = genomic DNA; note = Gene: NPTN; note = Location (start to end; relative to TSS): NPTN_10_40; note = Orientation (relative to transcription): sense; note = sgRNA Position: 73633355; note = Sequence Name: 56322-704_101_SL_seq_11438
cggcaggaggaggacgggga

SEQ ID NO: 11439 - DNA, 20 bp, Homo sapiens
  source 1..20: mol_type = genomic DNA; note = Gene: NPTN; note = Location (start to end; relative to TSS): NPTN_48_78; note = Orientation (relative to transcription): antisense; note = sgRNA Position: 73633337; note = Sequence Name: 56322-704_101_SL_seq_11439
cgagggaggcagccgcggct

SEQ ID NO: 11440 - DNA, 20 bp, Homo sapiens
  source 1..20: mol_type = genomic DNA; note = Gene: NRCAM; note = Location (start to end; relative to TSS): NRCAM_36_66; note = Orientation (relative to transcription): antisense; note = sgRNA Position: 108456396; note = Sequence Name: 56322-704_101_SL_seq_11440
cgcgtctgaggctcggactg

SEQ ID NO: 11441 - DNA, 20 bp, Homo sapiens
  source 1..20: mol_type = genomic DNA; note = Gene: NRCAM; note = Location (start to end; relative to TSS): NRCAM_99_129; note = Orientation (relative to transcription): sense; note = sgRNA Position: 108456313; note = Sequence Name: 56322-704_101_SL_seq_11441
gatagcttcgtcgagaacgg

SEQ ID NO: 11442 - DNA, 20 bp, Homo sapiens
  source 1..20: mol_type = genomic DNA; note = Gene: NRCAM; note = Location (start to end; relative to TSS): NRCAM_31_61; note = Orientation (relative to transcription): sense; note = sgRNA Position: 108456381; note = Sequence Name: 56322-704_101_SL_seq_11442
agtccgagcctcagacgcgc

SEQ ID NO: 11443 - DNA, 20 bp, Homo sapiens
  source 1..20: mol_type = genomic DNA; note = Gene: NRCAM; note = Location (start to end; relative to TSS): NRCAM_96_126; note = Orientation (relative to transcription): sense; note = sgRNA Position: 108456316; note = Sequence Name: 56322-704_101_SL_seq_11443
ggggatagcttcgtcgagaa

SEQ ID NO: 11444 - DNA, 20 bp, Homo sapiens
  source 1..20: mol_type = genomic DNA; note = Gene: NRCAM; note = Location (start to end; relative to TSS): NRCAM_30_60; note = Orientation (relative to transcription): sense; note = sgRNA Position: 108456382; note = Sequence Name: 56322-704_101_SL_seq_11444
cagtccgagcctcagacgcg

SEQ ID NO: 11445 - DNA, 20 bp, Homo sapiens
  source 1..20: mol_type = genomic DNA; note = Gene: NRCAM; note = Location (start to end; relative to TSS): NRCAM_86_116; note = Orientation (relative to transcription): antisense; note = sgRNA Position: 108456346; note = Sequence Name: 56322-704_101_SL_seq_11445
cccctctggctgctccagcc

SEQ ID NO: 11446 - DNA, 20 bp, Homo sapiens
  source 1..20: mol_type = genomic DNA; note = Gene: NRCAM; note = Location (start to end; relative to TSS): NRCAM_39_69; note = Orientation (relative to transcription): sense; note = sgRNA Position: 108456373; note = Sequence Name: 56322-704_101_SL_seq_11446
cctcagacgcgcgggcgcgg

SEQ ID NO: 11447 - DNA, 20 bp, Homo sapiens
  source 1..20: mol_type = genomic DNA; note = Gene: NRCAM; note = Location (start to end; relative to TSS): NRCAM_83_113; note = Orientation (relative to transcription): antisense; note = sgRNA Position: 108456349; note = Sequence Name: 56322-704_101_SL_seq_11447
ctctggctgctccagccagg

SEQ ID NO: 11448 - DNA, 20 bp, Homo sapiens
  source 1..20: mol_type = genomic DNA; note = Gene: NRCAM; note = Location (start to end; relative to TSS): NRCAM_43_73; note = Orientation (relative to transcription): antisense; note = sgRNA Position: 108456389; note = Sequence Name: 56322-704_101_SL_seq_11448
gcgcccgcgcgtctgaggct

SEQ ID NO: 11449 - DNA, 20 bp, Homo sapiens
  source 1..20: mol_type = genomic DNA; note = Gene: NRCAM; note = Location (start to end; relative to TSS): NRCAM_75_105; note = Orientation (relative to transcription): sense; note = sgRNA Position: 108456337; note = Sequence Name: 56322-704_101_SL_seq_11449
cgcctggctggagcagccag

SEQ ID NO: 11450 - DNA, 20 bp, Homo sapiens
  source 1..20: mol_type = genomic DNA; note = Gene: NRG1; note = Location (start to end; relative to TSS): NRG1_36_66; note = Orientation (relative to transcription): sense; note = sgRNA Position: 32548373; note = Sequence Name: 56322-704_101_SL_seq_11450
ggcggcggctgccggacgat

SEQ ID NO: 11451 - DNA, 20 bp, Homo sapiens
  source 1..20: mol_type = genomic DNA; note = Gene: NRG1; note = Location (start to end; relative to TSS): NRG1_82_112; note = Orientation (relative to transcription): sense; note = sgRNA Position: 32548419; note = Sequence Name: 56322-704_101_SL_seq_11451
ctctccccgatcgggttgcg

SEQ ID NO: 11452 - DNA, 20 bp, Homo sapiens
  source 1..20: mol_type = genomic DNA; note = Gene: NRG1; note = Location (start to end; relative to TSS): NRG1_35_65; note = Orientation (relative to transcription): sense; note = sgRNA Position: 32548372; note = Sequence Name: 56322-704_101_SL_seq_11452
cggcggcggctgccggacga

SEQ ID NO: 11453 - DNA, 20 bp, Homo sapiens
  source 1..20: mol_type = genomic DNA; note = Gene: NRG1; note = Location (start to end; relative to TSS): NRG1_74_104; note = Orientation (relative to transcription): sense; note = sgRNA Position: 32548411; note = Sequence Name: 56322-704_101_SL_seq_11453
gtgataacctctccccgatc

SEQ ID NO: 11454 - DNA, 20 bp, Homo sapiens
  source 1..20: mol_type = genomic DNA; note = Gene: NRG1; note = Location (start to end; relative to TSS): NRG1_32_62; note = Orientation (relative to transcription): antisense; note = sgRNA Position: 32548349; note = Sequence Name: 56322-704_101_SL_seq_11454
agccgccgccgctcagctcc

SEQ ID NO: 11455 - DNA, 20 bp, Homo sapiens
  source 1..20: mol_type = genomic DNA; note = Gene: NRG1; note = Location (start to end; relative to TSS): NRG1_73_103; note = Orientation (relative to transcription): sense; note = sgRNA Position: 32548410; note = Sequence Name: 56322-704_101_SL_seq_11455
ggtgataacctctccccgat

SEQ ID NO: 11456 - DNA, 20 bp, Homo sapiens
  source 1..20: mol_type = genomic DNA; note = Gene: NRG1; note = Location (start to end; relative to TSS): NRG1_21_51; note = Orientation (relative to transcription): sense; note = sgRNA Position: 32548358; note = Sequence Name: 56322-704_101_SL_seq_11456
ggccaggagctgagcggcgg

SEQ ID NO: 11457 - DNA, 20 bp, Homo sapiens
  source 1..20: mol_type = genomic DNA; note = Gene: NRG1; note = Location (start to end; relative to TSS): NRG1_52_82; note = Orientation (relative to transcription): sense; note = sgRNA Position: 32548389; note = Sequence Name: 56322-704_101_SL_seq_11457
cgatgggagcgtgagcagga

SEQ ID NO: 11458 - DNA, 20 bp, Homo sapiens
  source 1..20: mol_type = genomic DNA; note = Gene: NRG1; note = Location (start to end; relative to TSS): NRG1_18_48; note = Orientation (relative to transcription): sense; note = sgRNA Position: 32548355; note = Sequence Name: 56322-704_101_SL_seq_11458
ggaggccaggagctgagcgg

SEQ ID NO: 11459 - DNA, 20 bp, Homo sapiens
  source 1..20: mol_type = genomic DNA; note = Gene: NRG1; note = Location (start to end; relative to TSS): NRG1_48_78; note = Orientation (relative to transcription): sense; note = sgRNA Position: 32548385; note = Sequence Name: 56322-704_101_SL_seq_11459
cggacgatgggagcgtgagc

SEQ ID NO: 11460 - DNA, 20 bp, Homo sapiens
  source 1..20: mol_type = genomic DNA; note = Gene: NRG2; note = Location (start to end; relative to TSS): NRG2_47_77; note = Orientation (relative to transcription): antisense; note = sgRNA Position: 140043248; note = Sequence Name: 56322-704_101_SL_seq_11460
gcgggccgcgatgcgcagcg

SEQ ID NO: 11461 - DNA, 20 bp, Homo sapiens
  source 1..20: mol_type = genomic DNA; note = Gene: NRG2; note = Location (start to end; relative to TSS): NRG2_79_109; note = Orientation (relative to transcription): sense; note = sgRNA Position: 140043196; note = Sequence Name: 56322-704_101_SL_seq_11461
cctagctgggccacctcccc

SEQ ID NO: 11462 - DNA, 20 bp, Homo sapiens
  source 1..20: mol_type = genomic DNA; note = Gene: NRG2; note = Location (start to end; relative to TSS): NRG2_33_63; note = Orientation (relative to transcription): sense; note = sgRNA Position: 140043242; note = Sequence Name: 56322-704_101_SL_seq_11462
ctgcgccgcgctgcgcatcg

SEQ ID NO: 11463 - DNA, 20 bp, Homo sapiens
  source 1..20: mol_type = genomic DNA; note = Gene: NRG2; note = Location (start to end; relative to TSS): NRG2_78_108; note = Orientation (relative to transcription): sense; note = sgRNA Position: 140043197; note = Sequence Name: 56322-704_101_SL_seq_11463
ccctagctgggccacctccc

SEQ ID NO: 11464 - DNA, 20 bp, Homo sapiens
  source 1..20: mol_type = genomic DNA; note = Gene: NRG2; note = Location (start to end; relative to TSS): NRG2_15_45; note = Orientation (relative to transcription): antisense; note = sgRNA Position: 140043280; note = Sequence Name: 56322-704_101_SL_seq_11464
gcgctcccaccctgtgcgcc

SEQ ID NO: 11465 - DNA, 20 bp, Homo sapiens
  source 1..20: mol_type = genomic DNA; note = Gene: NRG2; note = Location (start to end; relative to TSS): NRG2_76_106; note = Orientation (relative to transcription): antisense; note = sgRNA Position: 140043219; note = Sequence Name: 56322-704_101_SL_seq_11465
gcccagctagggcagggggc

SEQ ID NO: 11466 - DNA, 20 bp, Homo sapiens
  source 1..20: mol_type = genomic DNA; note = Gene: NRG2; note = Location (start to end; relative to TSS): NRG2_9_39; note = Orientation (relative to transcription): antisense; note = sgRNA Position: 140043286; note = Sequence Name: 56322-704_101_SL_seq_11466
ccaccctgtgcgccaggacc

SEQ ID NO: 11467 - DNA, 20 bp, Homo sapiens
  source 1..20: mol_type = genomic DNA; note = Gene: NRG2; note = Location (start to end; relative to TSS): NRG2_65_95; note = Orientation (relative to transcription): antisense; note = sgRNA Position: 140043230; note = Sequence Name: 56322-704_101_SL_seq_11467
gcagggggcaggcggcaagc

SEQ ID NO: 11468 - DNA, 20 bp, Homo sapiens
  source 1..20: mol_type = genomic DNA; note = Gene: NRG2; note = Location (start to end; relative to TSS): NRG2_6_36; note = Orientation (relative to transcription): antisense; note = sgRNA Position: 140043289; note = Sequence Name: 56322-704_101_SL_seq_11468
ccctgtgcgccaggacctgg

SEQ ID NO: 11469 - DNA, 20 bp, Homo sapiens
  source 1..20: mol_type = genomic DNA; note = Gene: NRG2; note = Location (start to end; relative to TSS): NRG2_47_77; note = Orientation (relative to transcription): antisense; note = sgRNA Position: 140043248; note = Sequence Name: 56322-704_101_SL_seq_11469
gcgggccgcgatgcgcagcg

SEQ ID NO: 11470 - DNA, 20 bp, Homo sapiens
  source 1..20: mol_type = genomic DNA; note = Gene: NTM; note = Location (start to end; relative to TSS): NTM_66_96; note = Orientation (relative to transcription): antisense; note = sgRNA Position: 131370687; note = Sequence Name: 56322-704_101_SL_seq_11470
taaatccactgttttgctga

SEQ ID NO: 11471 - DNA, 20 bp, Homo sapiens
  source 1..20: mol_type = genomic DNA; note = Gene: NTM; note = Location (start to end; relative to TSS): NTM_154_184; note = Orientation (relative to transcription): antisense; note = sgRNA Position: 131370775; note = Sequence Name: 56322-704_101_SL_seq_11471
tctttttcttcttttttgtc

SEQ ID NO: 11472 - DNA, 20 bp, Homo sapiens
  source 1..20: mol_type = genomic DNA; note = Gene: NTM; note = Location (start to end; relative to TSS): NTM_45_75; note = Orientation (relative to transcription): antisense; note = sgRNA Position: 131370666; note = Sequence Name: 56322-704_101_SL_seq_11472
ggacacaacaagaaagccga

SEQ ID NO: 11473 - DNA, 20 bp, Homo sapiens
  source 1..20: mol_type = genomic DNA; note = Gene: NTM; note = Location (start to end; relative to TSS): NTM_149_179; note = Orientation (relative to transcription): antisense; note = sgRNA Position: 131370770; note = Sequence Name: 56322-704_101_SL_seq_11473
ttcttcttttttgtcaggtt

SEQ ID NO: 11474 - DNA, 20 bp, Homo sapiens
  source 1..20: mol_type = genomic DNA; note = Gene: NTM; note = Location (start to end; relative to TSS): NTM_46_76; note = Orientation (relative to transcription): antisense; note = sgRNA Position: 131370667; note = Sequence Name: 56322-704_101_SL_seq_11474
aggacacaacaagaaagccg

SEQ ID NO: 11475 - DNA, 20 bp, Homo sapiens
  source 1..20: mol_type = genomic DNA; note = Gene: NTM; note = Location (start to end; relative to TSS): NTM_98_128; note = Orientation (relative to transcription): sense; note = sgRNA Position: 131370739; note = Sequence Name: 56322-704_101_SL_seq_11475
tgagagcaacacaatctatc

SEQ ID NO: 11476 - DNA, 20 bp, Homo sapiens
  source 1..20: mol_type = genomic DNA; note = Gene: NTM; note = Location (start to end; relative to TSS): NTM_52_82; note = Orientation (relative to transcription): sense; note = sgRNA Position: 131370693; note = Sequence Name: 56322-704_101_SL_seq_11476
tgtgtccttcagcaaaacag

SEQ ID NO: 11477 - DNA, 20 bp, Homo sapiens
  source 1..20: mol_type = genomic DNA; note = Gene: NTM; note = Location (start to end; relative to TSS): NTM_94_124; note = Orientation (relative to transcription): antisense; note = sgRNA Position: 131370715; note = Sequence Name: 56322-704_101_SL_seq_11477
gttgctctcaagcttgtgca

SEQ ID NO: 11478 - DNA, 20 bp, Homo sapiens
  source 1..20: mol_type = genomic DNA; note = Gene: NTM; note = Location (start to end; relative to TSS): NTM_20_50; note = Orientation (relative to transcription): sense; note = sgRNA Position: 131370661; note = Sequence Name: 56322-704_101_SL_seq_11478
gtcatactctctcacaccct

SEQ ID NO: 11479 - DNA, 20 bp, Homo sapiens
  source 1..20: mol_type = genomic DNA; note = Gene: NTM; note = Location (start to end; relative to TSS): NTM_52_82; note = Orientation (relative to transcription): sense; note = sgRNA Position: 131370693; note = Sequence Name: 56322-704_101_SL_seq_11479
tgtgtccttcagcaaaacag

SEQ ID NO: 11480 - DNA, 20 bp, Homo sapiens
  source 1..20: mol_type = genomic DNA; note = Gene: NTRK1; note = Location (start to end; relative to TSS): NTRK1_42_72; note = Orientation (relative to transcription): antisense; note = sgRNA Position: 156860913; note = Sequence Name: 56322-704_101_SL_seq_11480
cggcgcccgcctcgctcagg

SEQ ID NO: 11481 - DNA, 20 bp, Homo sapiens
  source 1..20: mol_type = genomic DNA; note = Gene: NTRK1; note = Location (start to end; relative to TSS): NTRK1_74_104; note = Orientation (relative to transcription): sense; note = sgRNA Position: 156860965; note = Sequence Name: 56322-704_101_SL_seq_11481
gacggcgcgggcagcttggc

SEQ ID NO: 11482 - DNA, 20 bp, Homo sapiens
  source 1..20: mol_type = genomic DNA; note = Gene: NTRK1; note = Location (start to end; relative to TSS): NTRK1_40_70; note = Orientation (relative to transcription): antisense; note = sgRNA Position: 156860911; note = Sequence Name: 56322-704_101_SL_seq_11482
gcgcccgcctcgctcaggcg

SEQ ID NO: 11483 - DNA, 20 bp, Homo sapiens
  source 1..20: mol_type = genomic DNA; note = Gene: NTRK1; note = Location (start to end; relative to TSS): NTRK1_70_100; note = Orientation (relative to transcription): sense; note = sgRNA Position: 156860961; note = Sequence Name: 56322-704_101_SL_seq_11483
ggcggacggcgcgggcagct

SEQ ID NO: 11484 - DNA, 20 bp, Homo sapiens
  source 1..20: mol_type = genomic DNA; note = Gene: NTRK1; note = Location (start to end; relative to TSS): NTRK1_28_58; note = Orientation (relative to transcription): sense; note = sgRNA Position: 156860919; note = Sequence Name: 56322-704_101_SL_seq_11484
ctgccccgcctgagcgaggc

SEQ ID NO: 11485 - DNA, 20 bp, Homo sapiens
  source 1..20: mol_type = genomic DNA; note = Gene: NTRK1; note = Location (start to end; relative to TSS): NTRK1_62_92; note = Orientation (relative to transcription): antisense; note = sgRNA Position: 156860933; note = Sequence Name: 56322-704_101_SL_seq_11485
tccgcctcgcagcatcgcgg

SEQ ID NO: 11486 - DNA, 20 bp, Homo sapiens
  source 1..20: mol_type = genomic DNA; note = Gene: NTRK1; note = Location (start to end; relative to TSS): NTRK1_27_57; note = Orientation (relative to transcription): sense; note = sgRNA Position: 156860918; note = Sequence Name: 56322-704_101_SL_seq_11486
gctgccccgcctgagcgagg

SEQ ID NO: 11487 - DNA, 20 bp, Homo sapiens
  source 1..20: mol_type = genomic DNA; note = Gene: NTRK1; note = Location (start to end; relative to TSS): NTRK1_61_91; note = Orientation (relative to transcription): sense; note = sgRNA Position: 156860952; note = Sequence Name: 56322-704_101_SL_seq_11487
atgctgcgaggcggacggcg

SEQ ID NO: 11488 - DNA, 20 bp, Homo sapiens
  source 1..20: mol_type = genomic DNA; note = Gene: NTRK1; note = Location (start to end; relative to TSS): NTRK1_24_54; note = Orientation (relative to transcription): sense; note = sgRNA Position: 156860915; note = Sequence Name: 56322-704_101_SL_seq_11488
acggctgccccgcctgagcg

SEQ ID NO: 11489 - DNA, 20 bp, Homo sapiens
  source 1..20: mol_type = genomic DNA; note = Gene: NTRK1; note = Location (start to end; relative to TSS): NTRK1_56_86; note = Orientation (relative to transcription): sense; note = sgRNA Position: 156860947; note = Sequence Name: 56322-704_101_SL_seq_11489
ccgcgatgctgcgaggcgga

SEQ ID NO: 11490 - DNA, 20 bp, Homo sapiens
  source 1..20: mol_type = genomic DNA; note = Gene: NTRK2; note = Location (start to end; relative to TSS): NTRK2_35_65; note = Orientation (relative to transcription): antisense; note = sgRNA Position: 84669770; note = Sequence Name: 56322-704_101_SL_seq_11490
tcctgctccaacccaattcc

SEQ ID NO: 11491 - DNA, 20 bp, Homo sapiens
  source 1..20: mol_type = genomic DNA; note = Gene: NTRK2; note = Location (start to end; relative to TSS): NTRK2_88_118; note = Orientation (relative to transcription): sense; note = sgRNA Position: 84669843; note = Sequence Name: 56322-704_101_SL_seq_11491
ccccggcggtagcaggagcc

SEQ ID NO: 11492 - DNA, 20 bp, Homo sapiens
  source 1..20: mol_type = genomic DNA; note = Gene: NTRK2; note = Location (start to end; relative to TSS): NTRK2_36_66; note = Orientation (relative to transcription): sense; note = sgRNA Position: 84669791; note = Sequence Name: 56322-704_101_SL_seq_11492
ggttggagcaggagcctcgc

SEQ ID NO: 11493 - DNA, 20 bp, Homo sapiens
  source 1..20: mol_type = genomic DNA; note = Gene: NTRK2; note = Location (start to end; relative to TSS): NTRK2_81_111; note = Orientation (relative to transcription): sense; note = sgRNA Position: 84669836; note = Sequence Name: 56322-704_101_SL_seq_11493
gctcagtccccggcggtagc

SEQ ID NO: 11494 - DNA, 20 bp, Homo sapiens
  source 1..20: mol_type = genomic DNA; note = Gene: NTRK2; note = Location (start to end; relative to TSS): NTRK2_25_55; note = Orientation (relative to transcription): sense; note = sgRNA Position: 84669780; note = Sequence Name: 56322-704_101_SL_seq_11494
tcccggaattgggttggagc

SEQ ID NO: 11495 - DNA, 20 bp, Homo sapiens
  source 1..20: mol_type = genomic DNA; note = Gene: NTRK2; note = Location (start to end; relative to TSS): NTRK2_74_104; note = Orientation (relative to transcription): sense; note = sgRNA Position: 84669829; note = Sequence Name: 56322-704_101_SL_seq_11495
tctacgcgctcagtccccgg

SEQ ID NO: 11496 - DNA, 20 bp, Homo sapiens
  source 1..20: mol_type = genomic DNA; note = Gene: NTRK2; note = Location (start to end; relative to TSS): NTRK2_19_49; note = Orientation (relative to transcription): sense; note = sgRNA Position: 84669774; note = Sequence Name: 56322-704_101_SL_seq_11496
ggcggctcccggaattgggt

SEQ ID NO: 11497 - DNA, 20 bp, Homo sapiens
  source 1..20: mol_type = genomic DNA; note = Gene: NTRK2; note = Location (start to end; relative to TSS): NTRK2_71_101; note = Orientation (relative to transcription): sense; note = sgRNA Position: 84669826; note = Sequence Name: 56322-704_101_SL_seq_11497
cgctctacgcgctcagtccc

SEQ ID NO: 11498 - DNA, 20 bp, Homo sapiens
  source 1..20: mol_type = genomic DNA; note = Gene: NTRK2; note = Location (start to end; relative to TSS): NTRK2_15_45; note = Orientation (relative to transcription): sense; note = sgRNA Position: 84669770; note = Sequence Name: 56322-704_101_SL_seq_11498
cggcggcggctcccggaatt

SEQ ID NO: 11499 - DNA, 20 bp, Homo sapiens
  source 1..20: mol_type = genomic DNA; note = Gene: NTRK2; note = Location (start to end; relative to TSS): NTRK2_59_89; note = Orientation (relative to transcription): antisense; note = sgRNA Position: 84669794; note = Sequence Name: 56322-704_101_SL_seq_11499
cgcgagcgaagcagccagcg

SEQ ID NO: 11500 - DNA, 20 bp, Homo sapiens
  source 1..20: mol_type = genomic DNA; note = Gene: NTRK3; note = Location (start to end; relative to TSS): NTRK3_57_87; note = Orientation (relative to transcription): antisense; note = sgRNA Position: 88256678; note = Sequence Name: 56322-704_101_SL_seq_11500
gaagagaaggaagatgcagt

SEQ ID NO: 11501 - DNA, 20 bp, Homo sapiens
  source 1..20: mol_type = genomic DNA; note = Gene: NTRK3; note = Location (start to end; relative to TSS): NTRK3_93_123; note = Orientation (relative to transcription): antisense; note = sgRNA Position: 88256642; note = Sequence Name: 56322-704_101_SL_seq_11501
ctctcacacatacacacacc

SEQ ID NO: 11502 - DNA, 20 bp, Homo sapiens
  source 1..20: mol_type = genomic DNA; note = Gene: NTRK3; note = Location (start to end; relative to TSS): NTRK3_33_63; note = Orientation (relative to transcription): antisense; note = sgRNA Position: 88256702; note = Sequence Name: 56322-704_101_SL_seq_11502
gctgcagcagccgccgcgaa

SEQ ID NO: 11503 - DNA, 20 bp, Homo sapiens
  source 1..20: mol_type = genomic DNA; note = Gene: NTRK3; note = Location (start to end; relative to TSS): NTRK3_65_95; note = Orientation (relative to transcription): sense; note = sgRNA Position: 88256650; note = Sequence Name: 56322-704_101_SL_seq_11503
ctcttcctttcctcgggctc

SEQ ID NO: 11504 - DNA, 20 bp, Homo sapiens
  source 1..20: mol_type = genomic DNA; note = Gene: NTRK3; note = Location (start to end; relative to TSS): NTRK3_21_51; note = Orientation (relative to transcription): antisense; note = sgRNA Position: 88256714; note = Sequence Name: 56322-704_101_SL_seq_11504
gccgcgaatggctcgccgcg

SEQ ID NO: 11505 - DNA, 20 bp, Homo sapiens
  source 1..20: mol_type = genomic DNA; note = Gene: NTRK3; note = Location (start to end; relative to TSS): NTRK3_59_89; note = Orientation (relative to transcription): sense; note = sgRNA Position: 88256656; note = Sequence Name: 56322-704_101_SL_seq_11505
ttccttctcttcctttcctc

SEQ ID NO: 11506 - DNA, 20 bp, Homo sapiens
  source 1..20: mol_type = genomic DNA; note = Gene: NTRK3; note = Location (start to end; relative to TSS): NTRK3_14_44; note = Orientation (relative to transcription): sense; note = sgRNA Position: 88256701; note = Sequence Name: 56322-704_101_SL_seq_11506
gcgcggcgagccattcgcgg

SEQ ID NO: 11507 - DNA, 20 bp, Homo sapiens
  source 1..20: mol_type = genomic DNA; note = Gene: NTRK3; note = Location (start to end; relative to TSS): NTRK3_58_88; note = Orientation (relative to transcription): sense; note = sgRNA Position: 88256657; note = Sequence Name: 56322-704_101_SL_seq_11507
cttccttctcttcctttcct

SEQ ID NO: 11508 - DNA, 20 bp, Homo sapiens
  source 1..20: mol_type = genomic DNA; note = Gene: NTRK3; note = Location (start to end; relative to TSS): NTRK3_11_41; note = Orientation (relative to transcription): sense; note = sgRNA Position: 88256704; note = Sequence Name: 56322-704_101_SL_seq_11508
gccgcgcggcgagccattcg

SEQ ID NO: 11509 - DNA, 20 bp, Homo sapiens
  source 1..20: mol_type = genomic DNA; note = Gene: NTRK3; note = Location (start to end; relative to TSS): NTRK3_57_87; note = Orientation (relative to transcription): antisense; note = sgRNA Position: 88256678; note = Sequence Name: 56322-704_101_SL_seq_11509
gaagagaaggaagatgcagt

SEQ ID NO: 11510 - DNA, 20 bp, Homo sapiens
  source 1..20: mol_type = genomic DNA; note = Gene: OBSCN; note = Location (start to end; relative to TSS): OBSCN_30_60; note = Orientation (relative to transcription): sense; note = sgRNA Position: 228208100; note = Sequence Name: 56322-704_101_SL_seq_11510
gcctgctggtcctgggccct

SEQ ID NO: 11511 - DNA, 20 bp, Homo sapiens
  source 1..20: mol_type = genomic DNA; note = Gene: OBSCN; note = Location (start to end; relative to TSS): OBSCN_91_121; note = Orientation (relative to transcription): antisense; note = sgRNA Position: 228208141; note = Sequence Name: 56322-704_101_SL_seq_11511
gcaggctgggggcacaggct

SEQ ID NO: 11512 - DNA, 20 bp, Homo sapiens
  source 1..20: mol_type = genomic DNA; note = Gene: OBSCN; note = Location (start to end; relative to TSS): OBSCN_33_63; note = Orientation (relative to transcription): sense; note = sgRNA Position: 228208103; note = Sequence Name: 56322-704_101_SL_seq_11512
tgctggtcctgggccctcgg

SEQ ID NO: 11513 - DNA, 20 bp, Homo sapiens
  source 1..20: mol_type = genomic DNA; note = Gene: OBSCN; note = Location (start to end; relative to TSS): OBSCN_88_118; note = Orientation (relative to transcription): antisense; note = sgRNA Position: 228208138; note = Sequence Name: 56322-704_101_SL_seq_11513
ggctgggggcacaggctggg

SEQ ID NO: 11514 - DNA, 20 bp, Homo sapiens
  source 1..20: mol_type = genomic DNA; note = Gene: OBSCN; note = Location (start to end; relative to TSS): OBSCN_34_64; note = Orientation (relative to transcription): sense; note = sgRNA Position: 228208104; note = Sequence Name: 56322-704_101_SL_seq_11514
gctggtcctgggccctcgga

SEQ ID NO: 11515 - DNA, 20 bp, Homo sapiens
  source 1..20: mol_type = genomic DNA; note = Gene: OBSCN; note = Location (start to end; relative to TSS): OBSCN_83_113; note = Orientation (relative to transcription): antisense; note = sgRNA Position: 228208133; note = Sequence Name: 56322-704_101_SL_seq_11515
ggggcacaggctgggaggca

SEQ ID NO: 11516 - DNA, 20 bp, Homo sapiens
  source 1..20: mol_type = genomic DNA; note = Gene: OBSCN; note = Location (start to end; relative to TSS): OBSCN_37_67; note = Orientation (relative to transcription): sense; note = sgRNA Position: 228208107; note = Sequence Name: 56322-704_101_SL_seq_11516
ggtcctgggccctcggaggg

SEQ ID NO: 11517 - DNA, 20 bp, Homo sapiens
  source 1..20: mol_type = genomic DNA; note = Gene: OBSCN; note = Location (start to end; relative to TSS): OBSCN_74_104; note = Orientation (relative to transcription): antisense; note = sgRNA Position: 228208124; note = Sequence Name: 56322-704_101_SL_seq_11517
gctgggaggcaggggctgcc

SEQ ID NO: 11518 - DNA, 20 bp, Homo sapiens
  source 1..20: mol_type = genomic DNA; note = Gene: OBSCN; note = Location (start to end; relative to TSS): OBSCN_23_53; note = Orientation (relative to transcription): sense; note = sgRNA Position: 228208093; note = Sequence Name: 56322-704_101_SL_seq_11518
gtaggcagcctgctggtcct

SEQ ID NO: 11519 - DNA, 20 bp, Homo sapiens
  source 1..20: mol_type = genomic DNA; note = Gene: OBSCN; note = Location (start to end; relative to TSS): OBSCN_55_85; note = Orientation (relative to transcription): antisense; note = sgRNA Position: 228208105; note = Sequence Name: 56322-704_101_SL_seq_11519
cgggtctcacctccctccga

SEQ ID NO: 11520 - DNA, 20 bp, Homo sapiens
  source 1..20: mol_type = genomic DNA; note = Gene: OBSL1; note = Location (start to end; relative to TSS): OBSL1_42_72; note = Orientation (relative to transcription): antisense; note = sgRNA Position: 219571493; note = Sequence Name: 56322-704_101_SL_seq_11520
ctgtttgcctctccagcgag

SEQ ID NO: 11521 - DNA, 20 bp, Homo sapiens
  source 1..20: mol_type = genomic DNA; note = Gene: OBSL1; note = Location (start to end; relative to TSS): OBSL1_75_105; note = Orientation (relative to transcription): antisense; note = sgRNA Position: 219571460; note = Sequence Name: 56322-704_101_SL_seq_11521
gcccgaagcctggcgctcag

SEQ ID NO: 11522 - DNA, 20 bp, Homo sapiens
  source 1..20: mol_type = genomic DNA; note = Gene: OBSL1; note = Location (start to end; relative to TSS): OBSL1_38_68; note = Orientation (relative to transcription): sense; note = sgRNA Position: 219571477; note = Sequence Name: 56322-704_101_SL_seq_11522
cgctggagaggcaaacagga

SEQ ID NO: 11523 - DNA, 20 bp, Homo sapiens
  source 1..20: mol_type = genomic DNA; note = Gene: OBSL1; note = Location (start to end; relative to TSS): OBSL1_74_104; note = Orientation (relative to transcription): antisense; note = sgRNA Position: 219571461; note = Sequence Name: 56322-704_101_SL_seq_11523
cccgaagcctggcgctcagg

SEQ ID NO: 11524 - DNA, 20 bp, Homo sapiens
  source 1..20: mol_type = genomic DNA; note = Gene: OBSL1; note = Location (start to end; relative to TSS): OBSL1_34_64; note = Orientation (relative to transcription): sense; note = sgRNA Position: 219571481; note = Sequence Name: 56322-704_101_SL_seq_11524
cactcgctggagaggcaaac

SEQ ID NO: 11525 - DNA, 20 bp, Homo sapiens
  source 1..20: mol_type = genomic DNA; note = Gene: OBSL1; note = Location (start to end; relative to TSS): OBSL1_71_101; note = Orientation (relative to transcription): sense; note = sgRNA Position: 219571444; note = Sequence Name: 56322-704_101_SL_seq_11525
gagcgccaggcttcgggccc

SEQ ID NO: 11526 - DNA, 20 bp, Homo sapiens
  source 1..20: mol_type = genomic DNA; note = Gene: OBSL1; note = Location (start to end; relative to TSS): OBSL1_26_56; note = Orientation (relative to transcription): sense; note = sgRNA Position: 219571489; note = Sequence Name: 56322-704_101_SL_seq_11526
tgcggggccactcgctggag

SEQ ID NO: 11527 - DNA, 20 bp, Homo sapiens
  source 1..20: mol_type = genomic DNA; note = Gene: OBSL1; note = Location (start to end; relative to TSS): OBSL1_70_100; note = Orientation (relative to transcription): sense; note = sgRNA Position: 219571445; note = Sequence Name: 56322-704_101_SL_seq_11527
tgagcgccaggcttcgggcc

SEQ ID NO: 11528 - DNA, 20 bp, Homo sapiens
  source 1..20: mol_type = genomic DNA; note = Gene: OBSL1; note = Location (start to end; relative to TSS): OBSL1_21_51; note = Orientation (relative to transcription): sense; note = sgRNA Position: 219571494; note = Sequence Name: 56322-704_101_SL_seq_11528
gaggctgcggggccactcgc

SEQ ID NO: 11529 - DNA, 20 bp, Homo sapiens
  source 1..20: mol_type = genomic DNA; note = Gene: OBSL1; note = Location (start to end; relative to TSS): OBSL1_58_88; note = Orientation (relative to transcription): sense; note = sgRNA Position: 219571457; note = Sequence Name: 56322-704_101_SL_seq_11529
aggactgccccctgagcgcc

SEQ ID NO: 11530 - DNA, 20 bp, Homo sapiens
  source 1..20: mol_type = genomic DNA; note = Gene: OPCML; note = Location (start to end; relative to TSS): OPCML_47_77; note = Orientation (relative to transcription): sense; note = sgRNA Position: 133532430; note = Sequence Name: 56322-704_101_SL_seq_11530
ctccctccctttgcaaacat

SEQ ID NO: 11531 - DNA, 20 bp, Homo sapiens
  source 1..20: mol_type = genomic DNA; note = Gene: OPCML; note = Location (start to end; relative to TSS): OPCML_78_108; note = Orientation (relative to transcription): sense; note = sgRNA Position: 133532399; note = Sequence Name: 56322-704_101_SL_seq_11531
ctgctcagaattcagcacag

SEQ ID NO: 11532 - DNA, 20 bp, Homo sapiens
  source 1..20: mol_type = genomic DNA; note = Gene: OPCML; note = Location (start to end; relative to TSS): OPCML_22_52; note = Orientation (relative to transcription): antisense; note = sgRNA Position: 133532475; note = Sequence Name: 56322-704_101_SL_seq_11532
gagagagagcgcgcgagaga

SEQ ID NO: 11533 - DNA, 20 bp, Homo sapiens
  source 1..20: mol_type = genomic DNA; note = Gene: OPCML; note = Location (start to end; relative to TSS): OPCML_62_92; note = Orientation (relative to transcription): antisense; note = sgRNA Position: 133532435; note = Sequence Name: 56322-704_101_SL_seq_11533
ttaaatccaatgtttgcaaa

SEQ ID NO: 11534 - DNA, 20 bp, Homo sapiens
  source 1..20: mol_type = genomic DNA; note = Gene: OPCML; note = Location (start to end; relative to TSS): OPCML_21_51; note = Orientation (relative to transcription): antisense; note = sgRNA Position: 133532476; note = Sequence Name: 56322-704_101_SL_seq_11534
agagagagcgcgcgagagat

SEQ ID NO: 11535 - DNA, 20 bp, Homo sapiens
  source 1..20: mol_type = genomic DNA; note = Gene: OPCML; note = Location (start to end; relative to TSS): OPCML_59_89; note = Orientation (relative to transcription): antisense; note = sgRNA Position: 133532438; note = Sequence Name: 56322-704_101_SL_seq_11535
aatccaatgtttgcaaaggg

SEQ ID NO: 11536 - DNA, 20 bp, Homo sapiens
  source 1..20: mol_type = genomic DNA; note = Gene: OPCML; note = Location (start to end; relative to TSS): OPCML_15_45; note = Orientation (relative to transcription): antisense; note = sgRNA Position: 133532482; note = Sequence Name: 56322-704_101_SL_seq_11536
agcgcgcgagagatgggagc

SEQ ID NO: 11537 - DNA, 20 bp, Homo sapiens
  source 1..20: mol_type = genomic DNA; note = Gene: OPCML; note = Location (start to end; relative to TSS): OPCML_58_88; note = Orientation (relative to transcription): antisense; note = sgRNA Position: 133532439; note = Sequence Name: 56322-704_101_SL_seq_11537
atccaatgtttgcaaaggga

SEQ ID NO: 11538 - DNA, 20 bp, Homo sapiens
  source 1..20: mol_type = genomic DNA; note = Gene: OPCML; note = Location (start to end; relative to TSS): OPCML_11_41; note = Orientation (relative to transcription): antisense; note = sgRNA Position: 133532486; note = Sequence Name: 56322-704_101_SL_seq_11538
cgcgagagatgggagcaggc

SEQ ID NO: 11539 - DNA, 20 bp, Homo sapiens
  source 1..20: mol_type = genomic DNA; note = Gene: OPCML; note = Location (start to end; relative to TSS): OPCML_47_77; note = Orientation (relative to transcription): sense; note = sgRNA Position: 133532430; note = Sequence Name: 56322-704_101_SL_seq_11539
ctccctccctttgcaaacat

SEQ ID NO: 11540 - DNA, 20 bp, Homo sapiens
  source 1..20: mol_type = genomic DNA; note = Gene: OSCAR; note = Location (start to end; relative to TSS): OSCAR_57_87; note = Orientation (relative to transcription): antisense; note = sgRNA Position: 54100742; note = Sequence Name: 56322-704_101_SL_seq_11540
ggaacccagggagaagaaag

SEQ ID NO: 11541 - DNA, 20 bp, Homo sapiens
  source 1..20: mol_type = genomic DNA; note = Gene: OSCAR; note = Location (start to end; relative to TSS): OSCAR_102_132; note = Orientation (relative to transcription): sense; note = sgRNA Position: 54100677; note = Sequence Name: 56322-704_101_SL_seq_11541
tggagacccagacaccctgc

SEQ ID NO: 11542 - DNA, 20 bp, Homo sapiens
  source 1..20: mol_type = genomic DNA; note = Gene: OSCAR; note = Location (start to end; relative to TSS): OSCAR_44_74; note = Orientation (relative to transcription): antisense; note = sgRNA Position: 54100755; note = Sequence Name: 56322-704_101_SL_seq_11542
aagaaaggggtgactcacag

SEQ ID NO: 11543 - DNA, 20 bp, Homo sapiens
  source 1..20: mol_type = genomic DNA; note = Gene: OSCAR; note = Location (start to end; relative to TSS): OSCAR_78_108; note = Orientation (relative to transcription): antisense; note = sgRNA Position: 54100721; note = Sequence Name: 56322-704_101_SL_seq_11543
ctctgcccccaaccccagcc

SEQ ID NO: 11544 - DNA, 20 bp, Homo sapiens
  source 1..20: mol_type = genomic DNA; note = Gene: OSCAR; note = Location (start to end; relative to TSS): OSCAR_17_47; note = Orientation (relative to transcription): antisense; note = sgRNA Position: 54100782; note = Sequence Name: 56322-704_101_SL_seq_11544
gcagctggaggatcagcacc

SEQ ID NO: 11545 - DNA, 20 bp, Homo sapiens
  source 1..20: mol_type = genomic DNA; note = Gene: OSCAR; note = Location (start to end; relative to TSS): OSCAR_58_88; note = Orientation (relative to transcription): antisense; note = sgRNA Position: 54100741; note = Sequence Name: 56322-704_101_SL_seq_11545
aggaacccagggagaagaaa

SEQ ID NO: 11546 - DNA, 20 bp, Homo sapiens
  source 1..20: mol_type = genomic DNA; note = Gene: OSCAR; note = Location (start to end; relative to TSS): OSCAR_16_46; note = Orientation (relative to transcription): antisense; note = sgRNA Position: 54100783; note = Sequence Name: 56322-704_101_SL_seq_11546
cagctggaggatcagcacca

SEQ ID NO: 11547 - DNA, 20 bp, Homo sapiens
  source 1..20: mol_type = genomic DNA; note = Gene: OSCAR; note = Location (start to end; relative to TSS): OSCAR_57_87; note = Orientation (relative to transcription): antisense; note = sgRNA Position: 54100742; note = Sequence Name: 56322-704_101_SL_seq_11547
ggaacccagggagaagaaag

SEQ ID NO: 11548 - DNA, 20 bp, Homo sapiens
  source 1..20: mol_type = genomic DNA; note = Gene: OSCAR; note = Location (start to end; relative to TSS): OSCAR_10_40; note = Orientation (relative to transcription): antisense; note = sgRNA Position: 54100789; note = Sequence Name: 56322-704_101_SL_seq_11548
gaggatcagcaccagggcca

SEQ ID NO: 11549 - DNA, 20 bp, Homo sapiens
  source 1..20: mol_type = genomic DNA; note = Gene: OSCAR; note = Location (start to end; relative to TSS): OSCAR_44_74; note = Orientation (relative to transcription): antisense; note = sgRNA Position: 54100755; note = Sequence Name: 56322-704_101_SL_seq_11549
aagaaaggggtgactcacag

SEQ ID NO: 11550 - DNA, 20 bp, Homo sapiens
  source 1..20: mol_type = genomic DNA; note = Gene: PALLD; note = Location (start to end; relative to TSS): PALLD_53_83; note = Orientation (relative to transcription): antisense; note = sgRNA Position: 168497111; note = Sequence Name: 56322-704_101_SL_seq_11550
ttctgggagaatggaggttg

SEQ ID NO: 11551 - DNA, 20 bp, Homo sapiens
  source 1..20: mol_type = genomic DNA; note = Gene: PALLD; note = Location (start to end; relative to TSS): PALLD_112_142; note = Orientation (relative to transcription): sense; note = sgRNA Position: 168497190; note = Sequence Name: 56322-704_101_SL_seq_11551
aaactgaccaagcattgaaa

SEQ ID NO: 11552 - DNA, 20 bp, Homo sapiens
  source 1..20: mol_type = genomic DNA; note = Gene: PALLD; note = Location (start to end; relative to TSS): PALLD_25_55; note = Orientation (relative to transcription): antisense; note = sgRNA Position: 168497083; note = Sequence Name: 56322-704_101_SL_seq_11552
cctattcattagagactgcc

SEQ ID NO: 11553 - DNA, 20 bp, Homo sapiens
  source 1..20: mol_type = genomic DNA; note = Gene: PALLD; note = Location (start to end; relative to TSS): PALLD_82_112; note = Orientation (relative to transcription): sense; note = sgRNA Position: 168497160; note = Sequence Name: 56322-704_101_SL_seq_11553
tctgaaattcatcacctctc

SEQ ID NO: 11554 - DNA, 20 bp, Homo sapiens
  source 1..20: mol_type = genomic DNA; note = Gene: PALLD; note = Location (start to end; relative to TSS): PALLD_21_51; note = Orientation (relative to transcription): sense; note = sgRNA Position: 168497099; note = Sequence Name: 56322-704_101_SL_seq_11554
cagtctctaatgaataggca

SEQ ID NO: 11555 - DNA, 20 bp, Homo sapiens
  source 1..20: mol_type = genomic DNA; note = Gene: PALLD; note = Location (start to end; relative to TSS): PALLD_62_92; note = Orientation (relative to transcription): antisense; note = sgRNA Position: 168497120; note = Sequence Name: 56322-704_101_SL_seq_11555
tttcttcttttctgggagaa

SEQ ID NO: 11556 - DNA, 20 bp, Homo sapiens
  source 1..20: mol_type = genomic DNA; note = Gene: PALLD; note = Location (start to end; relative to TSS): PALLD_18_48; note = Orientation (relative to transcription): antisense; note = sgRNA Position: 168497076; note = Sequence Name: 56322-704_101_SL_seq_11556
attagagactgcctggtccg

SEQ ID NO: 11557 - DNA, 20 bp, Homo sapiens
  source 1..20: mol_type = genomic DNA; note = Gene: PALLD; note = Location (start to end; relative to TSS): PALLD_59_89; note = Orientation (relative to transcription): antisense; note = sgRNA Position: 168497117; note = Sequence Name: 56322-704_101_SL_seq_11557
cttcttttctgggagaatgg

SEQ ID NO: 11558 - DNA, 20 bp, Homo sapiens
  source 1..20: mol_type = genomic DNA; note = Gene: PALLD; note = Location (start to end; relative to TSS): PALLD_16_46; note = Orientation (relative to transcription): sense; note = sgRNA Position: 168497094; note = Sequence Name: 56322-704_101_SL_seq_11558
ccaggcagtctctaatgaat

SEQ ID NO: 11559 - DNA, 20 bp, Homo sapiens
  source 1..20: mol_type = genomic DNA; note = Gene: PALLD; note = Location (start to end; relative to TSS): PALLD_53_83; note = Orientation (relative to transcription): antisense; note = sgRNA Position: 168497111; note = Sequence Name: 56322-704_101_SL_seq_11559
ttctgggagaatggaggttg

SEQ ID NO: 11560 - DNA, 20 bp, Homo sapiens
  source 1..20: mol_type = genomic DNA; note = Gene: PAPLN; note = Location (start to end; relative to TSS): PAPLN_40_70; note = Orientation (relative to transcription): antisense; note = sgRNA Position: 73237552; note = Sequence Name: 56322-704_101_SL_seq_11560
tgcagccagggccgctccgt

SEQ ID NO: 11561 - DNA, 20 bp, Homo sapiens
  source 1..20: mol_type = genomic DNA; note = Gene: PAPLN; note = Location (start to end; relative to TSS): PAPLN_86_116; note = Orientation (relative to transcription): sense; note = sgRNA Position: 73237618; note = Sequence Name: 56322-704_101_SL_seq_11561
gcggagggactggaagcccc

SEQ ID NO: 11562 - DNA, 20 bp, Homo sapiens
  source 1..20: mol_type = genomic DNA; note = Gene: PAPLN; note = Location (start to end; relative to TSS): PAPLN_28_58; note = Orientation (relative to transcription): antisense; note = sgRNA Position: 73237540; note = Sequence Name: 56322-704_101_SL_seq_11562
cgctccgtcggtgcccgccc

SEQ ID NO: 11563 - DNA, 20 bp, Homo sapiens
  source 1..20: mol_type = genomic DNA; note = Gene: PAPLN; note = Location (start to end; relative to TSS): PAPLN_76_106; note = Orientation (relative to transcription): sense; note = sgRNA Position: 73237608; note = Sequence Name: 56322-704_101_SL_seq_11563
aggtagggaggcggagggac

SEQ ID NO: 11564 - DNA, 20 bp, Homo sapiens
  source 1..20: mol_type = genomic DNA; note = Gene: PAPLN; note = Location (start to end; relative to TSS): PAPLN_26_56; note = Orientation (relative to transcription): sense; note = sgRNA Position: 73237558; note = Sequence Name: 56322-704_101_SL_seq_11564
gggcaccgacggagcggccc

SEQ ID NO: 11565 - DNA, 20 bp, Homo sapiens
  source 1..20: mol_type = genomic DNA; note = Gene: PAPLN; note = Location (start to end; relative to TSS): PAPLN_71_101; note = Orientation (relative to transcription): sense; note = sgRNA Position: 73237603; note = Sequence Name: 56322-704_101_SL_seq_11565
aagacaggtagggaggcgga

SEQ ID NO: 11566 - DNA, 20 bp, Homo sapiens
  source 1..20: mol_type = genomic DNA; note = Gene: PAPLN; note = Location (start to end; relative to TSS): PAPLN_20_50; note = Orientation (relative to transcription): sense; note = sgRNA Position: 73237552; note = Sequence Name: 56322-704_101_SL_seq_11566
ctgggcgggcaccgacggag

SEQ ID NO: 11567 - DNA, 20 bp, Homo sapiens
  source 1..20: mol_type = genomic DNA; note = Gene: PAPLN; note = Location (start to end; relative to TSS): PAPLN_53_83; note = Orientation (relative to transcription): antisense; note = sgRNA Position: 73237565; note = Sequence Name: 56322-704_101_SL_seq_11567
ggcgccgggaggctgcagcc

SEQ ID NO: 11568 - DNA, 20 bp, Homo sapiens
  source 1..20: mol_type = genomic DNA; note = Gene: PAPLN; note = Location (start to end; relative to TSS): PAPLN_15_45; note = Orientation (relative to transcription): sense; note = sgRNA Position: 73237547; note = Sequence Name: 56322-704_101_SL_seq_11568
tgggcctgggcgggcaccga

SEQ ID NO: 11569 - DNA, 20 bp, Homo sapiens
  source 1..20: mol_type = genomic DNA; note = Gene: PAPLN; note = Location (start to end; relative to TSS): PAPLN_52_82; note = Orientation (relative to transcription): antisense; note = sgRNA Position: 73237564; note = Sequence Name: 56322-704_101_SL_seq_11569
gcgccgggaggctgcagcca

SEQ ID NO: 11570 - DNA, 20 bp, Homo sapiens
  source 1..20: mol_type = genomic DNA; note = Gene: PDCD1; note = Location (start to end; relative to TSS): PDCD1_49_79; note = Orientation (relative to transcription): sense; note = sgRNA Position: 241858821; note = Sequence Name: 56322-704_101_SL_seq_11570
tgcagatcccacaggcgccc

SEQ ID NO: 11571 - DNA, 20 bp, Homo sapiens
  source 1..20: mol_type = genomic DNA; note = Gene: PDCD1; note = Location (start to end; relative to TSS): PDCD1_82_112; note = Orientation (relative to transcription): sense; note = sgRNA Position: 241858788; note = Sequence Name: 56322-704_101_SL_seq_11571
gggcggtgctacaactgggc

SEQ ID NO: 11572 - DNA, 20 bp, Homo sapiens
  source 1..20: mol_type = genomic DNA; note = Gene: PDCD1; note = Location (start to end; relative to TSS): PDCD1_51_81; note = Orientation (relative to transcription): antisense; note = sgRNA Position: 241858839; note = Sequence Name: 56322-704_101_SL_seq_11572
gcctgtgggatctgcatgcc

SEQ ID NO: 11573 - DNA, 20 bp, Homo sapiens
  source 1..20: mol_type = genomic DNA; note = Gene: PDCD1; note = Location (start to end; relative to TSS): PDCD1_81_111; note = Orientation (relative to transcription): antisense; note = sgRNA Position: 241858809; note = Sequence Name: 56322-704_101_SL_seq_11573
tgtagcaccgcccagacgac

SEQ ID NO: 11574 - DNA, 20 bp, Homo sapiens
  source 1..20: mol_type = genomic DNA; note = Gene: PDCD1; note = Location (start to end; relative to TSS): PDCD1_41_71; note = Orientation (relative to transcription): sense; note = sgRNA Position: 241858829; note = Sequence Name: 56322-704_101_SL_seq_11574
tccaggcatgcagatcccac

SEQ ID NO: 11575 - DNA, 20 bp, Homo sapiens
  source 1..20: mol_type = genomic DNA; note = Gene: PDCD1; note = Location (start to end; relative to TSS): PDCD1_75_105; note = Orientation (relative to transcription): antisense; note = sgRNA Position: 241858815; note = Sequence Name: 56322-704_101_SL_seq_11575
accgcccagacgactggcca

SEQ ID NO: 11576 - DNA, 20 bp, Homo sapiens
  source 1..20: mol_type = genomic DNA; note = Gene: PDCD1; note = Location (start to end; relative to TSS): PDCD1_14_44; note = Orientation (relative to transcription): sense; note = sgRNA Position: 241858856; note = Sequence Name: 56322-704_101_SL_seq_11576
gagaaggcggcactctggtg

SEQ ID NO: 11577 - DNA, 20 bp, Homo sapiens
  source 1..20: mol_type = genomic DNA; note = Gene: PDCD1; note = Location (start to end; relative to TSS): PDCD1_51_81; note = Orientation (relative to transcription): antisense; note = sgRNA Position: 241858839; note = Sequence Name: 56322-704_101_SL_seq_11577
gcctgtgggatctgcatgcc

SEQ ID NO: 11578 - DNA, 20 bp, Homo sapiens
  source 1..20: mol_type = genomic DNA; note = Gene: PDCD1; note = Location (start to end; relative to TSS): PDCD1_13_43; note = Orientation (relative to transcription): sense; note = sgRNA Position: 241858857; note = Sequence Name: 56322-704_101_SL_seq_11578
ggagaaggcggcactctggt

SEQ ID NO: 11579 - DNA, 20 bp, Homo sapiens
  source 1..20: mol_type = genomic DNA; note = Gene: PDCD1; note = Location (start to end; relative to TSS): PDCD1_49_79; note = Orientation (relative to transcription): sense; note = sgRNA Position: 241858821; note = Sequence Name: 56322-704_101_SL_seq_11579
tgcagatcccacaggcgccc

SEQ ID NO: 11580 - DNA, 20 bp, Homo sapiens
  source 1..20: mol_type = genomic DNA; note = Gene: PDCD1LG2; note = Location (start to end; relative to TSS): PDCD1LG2_91_121; note = Orientation (relative to transcription): antisense; note = sgRNA Position: 5510628; note = Sequence Name: 56322-704_101_SL_seq_11580
tagctgggacatatgaggat

SEQ ID NO: 11581 - DNA, 20 bp, Homo sapiens
  source 1..20: mol_type = genomic DNA; note = Gene: PDCD1LG2; note = Location (start to end; relative to TSS): PDCD1LG2_122_152; note = Orientation (relative to transcription): antisense; note = sgRNA Position: 5510659; note = Sequence Name: 56322-704_101_SL_seq_11581
acatgcagtagctccaaccc

SEQ ID NO: 11582 - DNA, 20 bp, Homo sapiens
  source 1..20: mol_type = genomic DNA; note = Gene: PDCD1LG2; note = Location (start to end; relative to TSS): PDCD1LG2_66_96; note = Orientation (relative to transcription): antisense; note = sgRNA Position: 5510603; note = Sequence Name: 56322-704_101_SL_seq_11582
acaaaaaagcactcaaaatt

SEQ ID NO: 11583 - DNA, 20 bp, Homo sapiens
  source 1..20: mol_type = genomic DNA; note = Gene: PDCD1LG2; note = Location (start to end; relative to TSS): PDCD1LG2_96_126; note = Orientation (relative to transcription): sense; note = sgRNA Position: 5510653; note = Sequence Name: 56322-704_101_SL_seq_11583
tcccagctagaaagaatcct

SEQ ID NO: 11584 - DNA, 20 bp, Homo sapiens
  source 1..20: mol_type = genomic DNA; note = Gene: PDCD1LG2; note = Location (start to end; relative to TSS): PDCD1LG2_19_49; note = Orientation (relative to transcription): antisense; note = sgRNA Position: 5510556; note = Sequence Name: 56322-704_101_SL_seq_11584
aaagttgttcattcagctta

SEQ ID NO: 11585 - DNA, 20 bp, Homo sapiens
  source 1..20: mol_type = genomic DNA; note = Gene: PDCD1LG2; note = Location (start to end; relative to TSS): PDCD1LG2_91_121; note = Orientation (relative to transcription): antisense; note = sgRNA Position: 5510628; note = Sequence Name: 56322-704_101_SL_seq_11585
tagctgggacatatgaggat

SEQ ID NO: 11586 - DNA, 20 bp, Homo sapiens
  source 1..20: mol_type = genomic DNA; note = Gene: PDCD1LG2; note = Location (start to end; relative to TSS): PDCD1LG2_-17_13; note = Orientation (relative to transcription): sense; note = sgRNA Position: 5510540; note = Sequence Name: 56322-704_101_SL_seq_11586
tttgactcactctcatgtta

SEQ ID NO: 11587 - DNA, 20 bp, Homo sapiens
  source 1..20: mol_type = genomic DNA; note = Gene: PDCD1LG2; note = Location (start to end; relative to TSS): PDCD1LG2_66_96; note = Orientation (relative to transcription): antisense; note = sgRNA Position: 5510603; note = Sequence Name: 56322-704_101_SL_seq_11587
acaaaaaagcactcaaaatt

SEQ ID NO: 11588 - DNA, 20 bp, Homo sapiens
  source 1..20: mol_type = genomic DNA; note = Gene: PDCD1LG2; note = Location (start to end; relative to TSS): PDCD1LG2_-26_4; note = Orientation (relative to transcription): antisense; note = sgRNA Position: 5510511; note = Sequence Name: 56322-704_101_SL_seq_11588
tcaaaccagaactagttctg

SEQ ID NO: 11589 - DNA, 20 bp, Homo sapiens
  source 1..20: mol_type = genomic DNA; note = Gene: PDCD1LG2; note = Location (start to end; relative to TSS): PDCD1LG2_19_49; note = Orientation (relative to transcription): antisense; note = sgRNA Position: 5510556; note = Sequence Name: 56322-704_101_SL_seq_11589
aaagttgttcattcagctta

SEQ ID NO: 11590 - DNA, 20 bp, Homo sapiens
  source 1..20: mol_type = genomic DNA; note = Gene: PDGFRA; note = Location (start to end; relative to TSS): PDGFRA_58_88; note = Orientation (relative to transcription): sense; note = sgRNA Position: 54229377; note = Sequence Name: 56322-704_101_SL_seq_11590
cacgctctttactccatgtg

SEQ ID NO: 11591 - DNA, 20 bp, Homo sapiens
  source 1..20: mol_type = genomic DNA; note = Gene: PDGFRA; note = Location (start to end; relative to TSS): PDGFRA_92_122; note = Orientation (relative to transcription): sense; note = sgRNA Position: 54229411; note = Sequence Name: 56322-704_101_SL_seq_11591
cggaataacatcggaggaga

SEQ ID NO: 11592 - DNA, 20 bp, Homo sapiens
  source 1..20: mol_type = genomic DNA; note = Gene: PDGFRA; note = Location (start to end; relative to TSS): PDGFRA_35_65; note = Orientation (relative to transcription): sense; note = sgRNA Position: 54229354; note = Sequence Name: 56322-704_101_SL_seq_11592
aagagatcattggaggccgt

SEQ ID NO: 11593 - DNA, 20 bp, Homo sapiens
  source 1..20: mol_type = genomic DNA; note = Gene: PDGFRA; note = Location (start to end; relative to TSS): PDGFRA_80_110; note = Orientation (relative to transcription): antisense; note = sgRNA Position: 54229379; note = Sequence Name: 56322-704_101_SL_seq_11593
cgcaatgaatgtcccacaca

SEQ ID NO: 11594 - DNA, 20 bp, Homo sapiens
  source 1..20: mol_type = genomic DNA; note = Gene: PDGFRA; note = Location (start to end; relative to TSS): PDGFRA_34_64; note = Orientation (relative to transcription): sense; note = sgRNA Position: 54229353; note = Sequence Name: 56322-704_101_SL_seq_11594
caagagatcattggaggccg

SEQ ID NO: 11595 - DNA, 20 bp, Homo sapiens
  source 1..20: mol_type = genomic DNA; note = Gene: PDGFRA; note = Location (start to end; relative to TSS): PDGFRA_72_102; note = Orientation (relative to transcription): sense; note = sgRNA Position: 54229391; note = Sequence Name: 56322-704_101_SL_seq_11595
catgtgtgggacattcattg

SEQ ID NO: 11596 - DNA, 20 bp, Homo sapiens
  source 1..20: mol_type = genomic DNA; note = Gene: PDGFRA; note = Location (start to end; relative to TSS): PDGFRA_25_55; note = Orientation (relative to transcription): sense; note = sgRNA Position: 54229344; note = Sequence Name: 56322-704_101_SL_seq_11596
aggagactgcaagagatcat

SEQ ID NO: 11597 - DNA, 20 bp, Homo sapiens
  source 1..20: mol_type = genomic DNA; note = Gene: PDGFRA; note = Location (start to end; relative to TSS): PDGFRA_59_89; note = Orientation (relative to transcription): sense; note = sgRNA Position: 54229378; note = Sequence Name: 56322-704_101_SL_seq_11597
acgctctttactccatgtgt

SEQ ID NO: 11598 - DNA, 20 bp, Homo sapiens
  source 1..20: mol_type = genomic DNA; note = Gene: PDGFRA; note = Location (start to end; relative to TSS): PDGFRA_28_58; note = Orientation (relative to transcription): sense; note = sgRNA Position: 54229347; note = Sequence Name: 56322-704_101_SL_seq_11598
agactgcaagagatcattgg

SEQ ID NO: 11599 - DNA, 20 bp, Homo sapiens
  source 1..20: mol_type = genomic DNA; note = Gene: PDGFRA; note = Location (start to end; relative to TSS): PDGFRA_58_88; note = Orientation (relative to transcription): sense; note = sgRNA Position: 54229377; note = Sequence Name: 56322-704_101_SL_seq_11599
cacgctctttactccatgtg

SEQ ID NO: 11600 - DNA, 20 bp, Homo sapiens
  source 1..20: mol_type = genomic DNA; note = Gene: PDGFRB; note = Location (start to end; relative to TSS): PDGFRB_30_60; note = Orientation (relative to transcription): sense; note = sgRNA Position: 150155791; note = Sequence Name: 56322-704_101_SL_seq_11600
ggatcgctctgtgagcaact

SEQ ID NO: 11601 - DNA, 20 bp, Homo sapiens
  source 1..20: mol_type = genomic DNA; note = Gene: PDGFRB; note = Location (start to end; relative to TSS): PDGFRB_101_131; note = Orientation (relative to transcription): antisense; note = sgRNA Position: 150155740; note = Sequence Name: 56322-704_101_SL_seq_11601
tgctgggcagcagggctgag

SEQ ID NO: 11602 - DNA, 20 bp, Homo sapiens
  source 1..20: mol_type = genomic DNA; note = Gene: PDGFRB; note = Location (start to end; relative to TSS): PDGFRB_24_54; note = Orientation (relative to transcription): antisense; note = sgRNA Position: 150155817; note = Sequence Name: 56322-704_101_SL_seq_11602
agcgatcctgggtcccagat

SEQ ID NO: 11603 - DNA, 20 bp, Homo sapiens
  source 1..20: mol_type = genomic DNA; note = Gene: PDGFRB; note = Location (start to end; relative to TSS): PDGFRB_97_127; note = Orientation (relative to transcription): antisense; note = sgRNA Position: 150155744; note = Sequence Name: 56322-704_101_SL_seq_11603
gggcagcagggctgaggggc

SEQ ID NO: 11604 - DNA, 20 bp, Homo sapiens
  source 1..20: mol_type = genomic DNA; note = Gene: PDGFRB; note = Location (start to end; relative to TSS): PDGFRB_23_53; note = Orientation (relative to transcription): antisense; note = sgRNA Position: 150155818; note = Sequence Name: 56322-704_101_SL_seq_11604
gcgatcctgggtcccagata

SEQ ID NO: 11605 - DNA, 20 bp, Homo sapiens
  source 1..20: mol_type = genomic DNA; note = Gene: PDGFRB; note = Location (start to end; relative to TSS): PDGFRB_69_99; note = Orientation (relative to transcription): sense; note = sgRNA Position: 150155752; note = Sequence Name: 56322-704_101_SL_seq_11605
aacaaggaggaggagagagc

SEQ ID NO: 11606 - DNA, 20 bp, Homo sapiens
  source 1..20: mol_type = genomic DNA; note = Gene: PDGFRB; note = Location (start to end; relative to TSS): PDGFRB_20_50; note = Orientation (relative to transcription): antisense; note = sgRNA Position: 150155821; note = Sequence Name: 56322-704_101_SL_seq_11606
atcctgggtcccagataggg

SEQ ID NO: 11607 - DNA, 20 bp, Homo sapiens
  source 1..20: mol_type = genomic DNA; note = Gene: PDGFRB; note = Location (start to end; relative to TSS): PDGFRB_64_94; note = Orientation (relative to transcription): antisense; note = sgRNA Position: 150155777; note = Sequence Name: 56322-704_101_SL_seq_11607
ctccttgttgatctcctctc

SEQ ID NO: 11608 - DNA, 20 bp, Homo sapiens
  source 1..20: mol_type = genomic DNA; note = Gene: PDGFRB; note = Location (start to end; relative to TSS): PDGFRB_19_49; note = Orientation (relative to transcription): antisense; note = sgRNA Position: 150155822; note = Sequence Name: 56322-704_101_SL_seq_11608
tcctgggtcccagatagggc

SEQ ID NO: 11609 - DNA, 20 bp, Homo sapiens
  source 1..20: mol_type = genomic DNA; note = Gene: PDGFRB; note = Location (start to end; relative to TSS): PDGFRB_59_89; note = Orientation (relative to transcription): sense; note = sgRNA Position: 150155762; note = Sequence Name: 56322-704_101_SL_seq_11609
agaggagatcaacaaggagg

SEQ ID NO: 11610 - DNA, 20 bp, Homo sapiens
  source 1..20: mol_type = genomic DNA; note = Gene: PDGFRL; note = Location (start to end; relative to TSS): PDGFRL_32_62; note = Orientation (relative to transcription): antisense; note = sgRNA Position: 17577254; note = Sequence Name: 56322-704_101_SL_seq_11610
cagcagccagaccttcatct

SEQ ID NO: 11611 - DNA, 20 bp, Homo sapiens
  source 1..20: mol_type = genomic DNA; note = Gene: PDGFRL; note = Location (start to end; relative to TSS): PDGFRL_75_105; note = Orientation (relative to transcription): sense; note = sgRNA Position: 17577317; note = Sequence Name: 56322-704_101_SL_seq_11611
ggaggatggtgagtgactct

SEQ ID NO: 11612 - DNA, 20 bp, Homo sapiens
  source 1..20: mol_type = genomic DNA; note = Gene: PDGFRL; note = Location (start to end; relative to TSS): PDGFRL_28_58; note = Orientation (relative to transcription): sense; note = sgRNA Position: 17577270; note = Sequence Name: 56322-704_101_SL_seq_11612
atgaaggtctggctgctgct

SEQ ID NO: 11613 - DNA, 20 bp, Homo sapiens
  source 1..20: mol_type = genomic DNA; note = Gene: PDGFRL; note = Location (start to end; relative to TSS): PDGFRL_74_104; note = Orientation (relative to transcription): sense; note = sgRNA Position: 17577316; note = Sequence Name: 56322-704_101_SL_seq_11613
tggaggatggtgagtgactc

SEQ ID NO: 11614 - DNA, 20 bp, Homo sapiens
  source 1..20: mol_type = genomic DNA; note = Gene: PDGFRL; note = Location (start to end; relative to TSS): PDGFRL_31_61; note = Orientation (relative to transcription): antisense; note = sgRNA Position: 17577253; note = Sequence Name: 56322-704_101_SL_seq_11614
agcagccagaccttcatctc

SEQ ID NO: 11615 - DNA, 20 bp, Homo sapiens
  source 1..20: mol_type = genomic DNA; note = Gene: PDGFRL; note = Location (start to end; relative to TSS): PDGFRL_61_91; note = Orientation (relative to transcription): sense; note = sgRNA Position: 17577303; note = Sequence Name: 56322-704_101_SL_seq_11615
gtgcacgaagcgctggagga

SEQ ID NO: 11616 - DNA, 20 bp, Homo sapiens
  source 1..20: mol_type = genomic DNA; note = Gene: PDGFRL; note = Location (start to end; relative to TSS): PDGFRL_23_53; note = Orientation (relative to transcription): antisense; note = sgRNA Position: 17577245; note = Sequence Name: 56322-704_101_SL_seq_11616
gaccttcatctcgggaacct

SEQ ID NO: 11617 - DNA, 20 bp, Homo sapiens
  source 1..20: mol_type = genomic DNA; note = Gene: PDGFRL; note = Location (start to end; relative to TSS): PDGFRL_57_87; note = Orientation (relative to transcription): sense; note = sgRNA Position: 17577299; note = Sequence Name: 56322-704_101_SL_seq_11617
gctggtgcacgaagcgctgg

SEQ ID NO: 11618 - DNA, 20 bp, Homo sapiens
  source 1..20: mol_type = genomic DNA; note = Gene: PDGFRL; note = Location (start to end; relative to TSS): PDGFRL_17_47; note = Orientation (relative to transcription): sense; note = sgRNA Position: 17577259; note = Sequence Name: 56322-704_101_SL_seq_11618
aggttcccgagatgaaggtc

SEQ ID NO: 11619 - DNA, 20 bp, Homo sapiens
  source 1..20: mol_type = genomic DNA; note = Gene: PDGFRL; note = Location (start to end; relative to TSS): PDGFRL_54_84; note = Orientation (relative to transcription): sense; note = sgRNA Position: 17577296; note = Sequence Name: 56322-704_101_SL_seq_11619
tctgctggtgcacgaagcgc

SEQ ID NO: 11620 - DNA, 20 bp, Homo sapiens
  source 1..20: mol_type = genomic DNA; note = Gene: PECAM1; note = Location (start to end; relative to TSS): PECAM1_33_63; note = Orientation (relative to transcription): sense; note = sgRNA Position: 64390803; note = Sequence Name: 56322-704_101_SL_seq_11620
ccggtctctctgcaggcgcc

SEQ ID NO: 11621 - DNA, 20 bp, Homo sapiens
  source 1..20: mol_type = genomic DNA; note = Gene: PECAM1; note = Location (start to end; relative to TSS): PECAM1_72_102; note = Orientation (relative to transcription): sense; note = sgRNA Position: 64390764; note = Sequence Name: 56322-704_101_SL_seq_11621
atttctgcttttcacagggc

SEQ ID NO: 11622 - DNA, 20 bp, Homo sapiens
  source 1..20: mol_type = genomic DNA; note = Gene: PECAM1; note = Location (start to end; relative to TSS): PECAM1_32_62; note = Orientation (relative to transcription): sense; note = sgRNA Position: 64390804; note = Sequence Name: 56322-704_101_SL_seq_11622
gccggtctctctgcaggcgc

SEQ ID NO: 11623 - DNA, 20 bp, Homo sapiens
  source 1..20: mol_type = genomic DNA; note = Gene: PECAM1; note = Location (start to end; relative to TSS): PECAM1_71_101; note = Orientation (relative to transcription): sense; note = sgRNA Position: 64390765; note = Sequence Name: 56322-704_101_SL_seq_11623
aatttctgcttttcacaggg

SEQ ID NO: 11624 - DNA, 20 bp, Homo sapiens
  source 1..20: mol_type = genomic DNA; note = Gene: PECAM1; note = Location (start to end; relative to TSS): PECAM1_19_49; note = Orientation (relative to transcription): antisense; note = sgRNA Position: 64390837; note = Sequence Name: 56322-704_101_SL_seq_11624
ctgtggcgctggtcaggtaa

SEQ ID NO: 11625 - DNA, 20 bp, Homo sapiens
  source 1..20: mol_type = genomic DNA; note = Gene: PECAM1; note = Location (start to end; relative to TSS): PECAM1_68_98; note = Orientation (relative to transcription): sense; note = sgRNA Position: 64390768; note = Sequence Name: 56322-704_101_SL_seq_11625
agcaatttctgcttttcaca

SEQ ID NO: 11626 - DNA, 20 bp, Homo sapiens
  source 1..20: mol_type = genomic DNA; note = Gene: PECAM1; note = Location (start to end; relative to TSS): PECAM1_25_55; note = Orientation (relative to transcription): antisense; note = sgRNA Position: 64390831; note = Sequence Name: 56322-704_101_SL_seq_11626
gaccggctgtggcgctggtc

SEQ ID NO: 11627 - DNA, 20 bp, Homo sapiens
  source 1..20: mol_type = genomic DNA; note = Gene: PECAM1; note = Location (start to end; relative to TSS): PECAM1_67_97; note = Orientation (relative to transcription): sense; note = sgRNA Position: 64390769; note = Sequence Name: 56322-704_101_SL_seq_11627
gagcaatttctgcttttcac

SEQ ID NO: 11628 - DNA, 20 bp, Homo sapiens
  source 1..20: mol_type = genomic DNA; note = Gene: PECAM1; note = Location (start to end; relative to TSS): PECAM1_30_60; note = Orientation (relative to transcription): antisense; note = sgRNA Position: 64390826; note = Sequence Name: 56322-704_101_SL_seq_11628
agagagaccggctgtggcgc

SEQ ID NO: 11629 - DNA, 20 bp, Homo sapiens
  source 1..20: mol_type = genomic DNA; note = Gene: PECAM1; note = Location (start to end; relative to TSS): PECAM1_60_90; note = Orientation (relative to transcription): antisense; note = sgRNA Position: 64390796; note = Sequence Name: 56322-704_101_SL_seq_11629
attgctctggtcacttctcc

SEQ ID NO: 11630 - DNA, 20 bp, Homo sapiens
  source 1..20: mol_type = genomic DNA; note = Gene: PIGR; note = Location (start to end; relative to TSS): PIGR_34_64; note = Orientation (relative to transcription): sense; note = sgRNA Position: 206946408; note = Sequence Name: 56322-704_101_SL_seq_11630
agtagctcctagagaggcag

SEQ ID NO: 11631 - DNA, 20 bp, Homo sapiens
  source 1..20: mol_type = genomic DNA; note = Gene: PIGR; note = Location (start to end; relative to TSS): PIGR_88_118; note = Orientation (relative to transcription): sense; note = sgRNA Position: 206946354; note = Sequence Name: 56322-704_101_SL_seq_11631
agtcagatcaacgggagaga

SEQ ID NO: 11632 - DNA, 20 bp, Homo sapiens
  source 1..20: mol_type = genomic DNA; note = Gene: PIGR; note = Location (start to end; relative to TSS): PIGR_33_63; note = Orientation (relative to transcription): sense; note = sgRNA Position: 206946409; note = Sequence Name: 56322-704_101_SL_seq_11632
cagtagctcctagagaggca

SEQ ID NO: 11633 - DNA, 20 bp, Homo sapiens
  source 1..20: mol_type = genomic DNA; note = Gene: PIGR; note = Location (start to end; relative to TSS): PIGR_80_110; note = Orientation (relative to transcription): sense; note = sgRNA Position: 206946362; note = Sequence Name: 56322-704_101_SL_seq_11633
gtccctgaagtcagatcaac

SEQ ID NO: 11634 - DNA, 20 bp, Homo sapiens
  source 1..20: mol_type = genomic DNA; note = Gene: PIGR; note = Location (start to end; relative to TSS): PIGR_32_62; note = Orientation (relative to transcription): sense; note = sgRNA Position: 206946410; note = Sequence Name: 56322-704_101_SL_seq_11634
ccagtagctcctagagaggc

SEQ ID NO: 11635 - DNA, 20 bp, Homo sapiens
  source 1..20: mol_type = genomic DNA; note = Gene: PIGR; note = Location (start to end; relative to TSS): PIGR_79_109; note = Orientation (relative to transcription): sense; note = sgRNA Position: 206946363; note = Sequence Name: 56322-704_101_SL_seq_11635
tgtccctgaagtcagatcaa

SEQ ID NO: 11636 - DNA, 20 bp, Homo sapiens
  source 1..20: mol_type = genomic DNA; note = Gene: PIGR; note = Location (start to end; relative to TSS): PIGR_30_60; note = Orientation (relative to transcription): antisense; note = sgRNA Position: 206946432; note = Sequence Name: 56322-704_101_SL_seq_11636
aggagctactggcagggcac

SEQ ID NO: 11637 - DNA, 20 bp, Homo sapiens
  source 1..20: mol_type = genomic DNA; note = Gene: PIGR; note = Location (start to end; relative to TSS): PIGR_77_107; note = Orientation (relative to transcription): antisense; note = sgRNA Position: 206946385; note = Sequence Name: 56322-704_101_SL_seq_11637
acttcagggacacagcctgc

SEQ ID NO: 11638 - DNA, 20 bp, Homo sapiens
  source 1..20: mol_type = genomic DNA; note = Gene: PIGR; note = Location (start to end; relative to TSS): PIGR_28_58; note = Orientation (relative to transcription): sense; note = sgRNA Position: 206946414; note = Sequence Name: 56322-704_101_SL_seq_11638
cctgccagtagctcctagag

SEQ ID NO: 11639 - DNA, 20 bp, Homo sapiens
  source 1..20: mol_type = genomic DNA; note = Gene: PIGR; note = Location (start to end; relative to TSS): PIGR_69_99; note = Orientation (relative to transcription): antisense; note = sgRNA Position: 206946393; note = Sequence Name: 56322-704_101_SL_seq_11639
gacacagcctgctggccagt

SEQ ID NO: 11640 - DNA, 20 bp, Homo sapiens
  source 1..20: mol_type = genomic DNA; note = Gene: PILRA; note = Location (start to end; relative to TSS): PILRA_45_75; note = Orientation (relative to transcription): antisense; note = sgRNA Position: 100373538; note = Sequence Name: 56322-704_101_SL_seq_11640
ccgggctcaggctccgaaga

SEQ ID NO: 11641 - DNA, 20 bp, Homo sapiens
  source 1..20: mol_type = genomic DNA; note = Gene: PILRA; note = Location (start to end; relative to TSS): PILRA_79_109; note = Orientation (relative to transcription): sense; note = sgRNA Position: 100373592; note = Sequence Name: 56322-704_101_SL_seq_11641
ccccaggcggcccctccaca

SEQ ID NO: 11642 - DNA, 20 bp, Homo sapiens
  source 1..20: mol_type = genomic DNA; note = Gene: PILRA; note = Location (start to end; relative to TSS): PILRA_46_76; note = Orientation (relative to transcription): antisense; note = sgRNA Position: 100373539; note = Sequence Name: 56322-704_101_SL_seq_11642
gccgggctcaggctccgaag

SEQ ID NO: 11643 - DNA, 20 bp, Homo sapiens
  source 1..20: mol_type = genomic DNA; note = Gene: PILRA; note = Location (start to end; relative to TSS): PILRA_78_108; note = Orientation (relative to transcription): sense; note = sgRNA Position: 100373591; note = Sequence Name: 56322-704_101_SL_seq_11643
cccccaggcggcccctccac

SEQ ID NO: 11644 - DNA, 20 bp, Homo sapiens
  source 1..20: mol_type = genomic DNA; note = Gene: PILRA; note = Location (start to end; relative to TSS): PILRA_36_66; note = Orientation (relative to transcription): antisense; note = sgRNA Position: 100373529; note = Sequence Name: 56322-704_101_SL_seq_11644
ggctccgaagagggctgtgg

SEQ ID NO: 11645 - DNA, 20 bp, Homo sapiens
  source 1..20: mol_type = genomic DNA; note = Gene: PILRA; note = Location (start to end; relative to TSS): PILRA_66_96; note = Orientation (relative to transcription): sense; note = sgRNA Position: 100373579; note = Sequence Name: 56322-704_101_SL_seq_11645
cactcacctcaacccccagg

SEQ ID NO: 11646 - DNA, 20 bp, Homo sapiens
  source 1..20: mol_type = genomic DNA; note = Gene: PILRA; note = Location (start to end; relative to TSS): PILRA_31_61; note = Orientation (relative to transcription): antisense; note = sgRNA Position: 100373524; note = Sequence Name: 56322-704_101_SL_seq_11646
cgaagagggctgtgggggcc

SEQ ID NO: 11647 - DNA, 20 bp, Homo sapiens
  source 1..20: mol_type = genomic DNA; note = Gene: PILRA; note = Location (start to end; relative to TSS): PILRA_63_93; note = Orientation (relative to transcription): sense; note = sgRNA Position: 100373576; note = Sequence Name: 56322-704_101_SL_seq_11647
cctcactcacctcaaccccc

SEQ ID NO: 11648 - DNA, 20 bp, Homo sapiens
  source 1..20: mol_type = genomic DNA; note = Gene: PILRA; note = Location (start to end; relative to TSS): PILRA_23_53; note = Orientation (relative to transcription): sense; note = sgRNA Position: 100373536; note = Sequence Name: 56322-704_101_SL_seq_11648
ctggcccccacagccctctt

SEQ ID NO: 11649 - DNA, 20 bp, Homo sapiens
  source 1..20: mol_type = genomic DNA; note = Gene: PILRA; note = Location (start to end; relative to TSS): PILRA_57_87; note = Orientation (relative to transcription): antisense; note = sgRNA Position: 100373550; note = Sequence Name: 56322-704_101_SL_seq_11649
gagtgaggagagccgggctc

SEQ ID NO: 11650 - DNA, 20 bp, Homo sapiens
  source 1..20: mol_type = genomic DNA; note = Gene: PILRB; note = Location (start to end; relative to TSS): PILRB_39_69; note = Orientation (relative to transcription): sense; note = sgRNA Position: 100358182; note = Sequence Name: 56322-704_101_SL_seq_11650
ccggcccccacagccctctg

SEQ ID NO: 11651 - DNA, 20 bp, Homo sapiens
  source 1..20: mol_type = genomic DNA; note = Gene: PILRB; note = Location (start to end; relative to TSS): PILRB_88_118; note = Orientation (relative to transcription): antisense; note = sgRNA Position: 100358211; note = Sequence Name: 56322-704_101_SL_seq_11651
cctgagggctgaggtgagtg

SEQ ID NO: 11652 - DNA, 20 bp, Homo sapiens
  source 1..20: mol_type = genomic DNA; note = Gene: PILRB; note = Location (start to end; relative to TSS): PILRB_38_68; note = Orientation (relative to transcription): sense; note = sgRNA Position: 100358181; note = Sequence Name: 56322-704_101_SL_seq_11652
cccggcccccacagccctct

SEQ ID NO: 11653 - DNA, 20 bp, Homo sapiens
  source 1..20: mol_type = genomic DNA; note = Gene: PILRB; note = Location (start to end; relative to TSS): PILRB_79_109; note = Orientation (relative to transcription): sense; note = sgRNA Position: 100358222; note = Sequence Name: 56322-704_101_SL_seq_11653
ccccactcacctcagccctc

SEQ ID NO: 11654 - DNA, 20 bp, Homo sapiens
  source 1..20: mol_type = genomic DNA; note = Gene: PILRB; note = Location (start to end; relative to TSS): PILRB_20_50; note = Orientation (relative to transcription): sense; note = sgRNA Position: 100358163; note = Sequence Name: 56322-704_101_SL_seq_11654
actggtttggggaaggtccc

SEQ ID NO: 11655 - DNA, 20 bp, Homo sapiens
  source 1..20: mol_type = genomic DNA; note = Gene: PILRB; note = Location (start to end; relative to TSS): PILRB_78_108; note = Orientation (relative to transcription): antisense; note = sgRNA Position: 100358201; note = Sequence Name: 56322-704_101_SL_seq_11655
gaggtgagtggggagagcca

SEQ ID NO: 11656 - DNA, 20 bp, Homo sapiens
  source 1..20: mol_type = genomic DNA; note = Gene: PILRB; note = Location (start to end; relative to TSS): PILRB_18_48; note = Orientation (relative to transcription): antisense; note = sgRNA Position: 100358141; note = Sequence Name: 56322-704_101_SL_seq_11656
ccccaaaccagtacacctcc

SEQ ID NO: 11657 - DNA, 20 bp, Homo sapiens
  source 1..20: mol_type = genomic DNA; note = Gene: PILRB; note = Location (start to end; relative to TSS): PILRB_73_103; note = Orientation (relative to transcription): antisense; note = sgRNA Position: 100358196; note = Sequence Name: 56322-704_101_SL_seq_11657
gagtggggagagccagggtg

SEQ ID NO: 11658 - DNA, 20 bp, Homo sapiens
  source 1..20: mol_type = genomic DNA; note = Gene: PILRB; note = Location (start to end; relative to TSS): PILRB_17_47; note = Orientation (relative to transcription): antisense; note = sgRNA Position: 100358140; note = Sequence Name: 56322-704_101_SL_seq_11658
cccaaaccagtacacctcca

SEQ ID NO: 11659 - DNA, 20 bp, Homo sapiens
  source 1..20: mol_type = genomic DNA; note = Gene: PILRB; note = Location (start to end; relative to TSS): PILRB_62_92; note = Orientation (relative to transcription): antisense; note = sgRNA Position: 100358185; note = Sequence Name: 56322-704_101_SL_seq_11659
gccagggtgaggctccccag

SEQ ID NO: 11660 - DNA, 20 bp, Homo sapiens
  source 1..20: mol_type = genomic DNA; note = Gene: PRTG; note = Location (start to end; relative to TSS): PRTG_48_78; note = Orientation (relative to transcription): antisense; note = sgRNA Position: 55743100; note = Sequence Name: 56322-704_101_SL_seq_11660
cggcgaggctggtgctcgga

SEQ ID NO: 11661 - DNA, 20 bp, Homo sapiens
  source 1..20: mol_type = genomic DNA; note = Gene: PRTG; note = Location (start to end; relative to TSS): PRTG_80_110; note = Orientation (relative to transcription): sense; note = sgRNA Position: 55743048; note = Sequence Name: 56322-704_101_SL_seq_11661
cgccggtgccggagccggag

SEQ ID NO: 11662 - DNA, 20 bp, Homo sapiens
  source 1..20: mol_type = genomic DNA; note = Gene: PRTG; note = Location (start to end; relative to TSS): PRTG_27_57; note = Orientation (relative to transcription): antisense; note = sgRNA Position: 55743121; note = Sequence Name: 56322-704_101_SL_seq_11662
ggccgctcgcgagaagcaag

SEQ ID NO: 11663 - DNA, 20 bp, Homo sapiens
  source 1..20: mol_type = genomic DNA; note = Gene: PRTG; note = Location (start to end; relative to TSS): PRTG_68_98; note = Orientation (relative to transcription): antisense; note = sgRNA Position: 55743080; note = Sequence Name: 56322-704_101_SL_seq_11663
cgtggcgagcgtctctgcgg

SEQ ID NO: 11664 - DNA, 20 bp, Homo sapiens
  source 1..20: mol_type = genomic DNA; note = Gene: PRTG; note = Location (start to end; relative to TSS): PRTG_28_58; note = Orientation (relative to transcription): antisense; note = sgRNA Position: 55743120; note = Sequence Name: 56322-704_101_SL_seq_11664
cggccgctcgcgagaagcaa

SEQ ID NO: 11665 - DNA, 20 bp, Homo sapiens
  source 1..20: mol_type = genomic DNA; note = Gene: PRTG; note = Location (start to end; relative to TSS): PRTG_63_93; note = Orientation (relative to transcription): antisense; note = sgRNA Position: 55743085; note = Sequence Name: 56322-704_101_SL_seq_11665
cgagcgtctctgcggcggcg

SEQ ID NO: 11666 - DNA, 20 bp, Homo sapiens
  source 1..20: mol_type = genomic DNA; note = Gene: PRTG; note = Location (start to end; relative to TSS): PRTG_29_59; note = Orientation (relative to transcription): antisense; note = sgRNA Position: 55743119; note = Sequence Name: 56322-704_101_SL_seq_11666
acggccgctcgcgagaagca

SEQ ID NO: 11667 - DNA, 20 bp, Homo sapiens
  source 1..20: mol_type = genomic DNA; note = Gene: PRTG; note = Location (start to end; relative to TSS): PRTG_59_89; note = Orientation (relative to transcription): antisense; note = sgRNA Position: 55743089; note = Sequence Name: 56322-704_101_SL_seq_11667
cgtctctgcggcggcgaggc

SEQ ID NO: 11668 - DNA, 20 bp, Homo sapiens
  source 1..20: mol_type = genomic DNA; note = Gene: PRTG; note = Location (start to end; relative to TSS): PRTG_16_46; note = Orientation (relative to transcription): sense; note = sgRNA Position: 55743112; note = Sequence Name: 56322-704_101_SL_seq_11668
ggccccttgcttctcgcgag

SEQ ID NO: 11669 - DNA, 20 bp, Homo sapiens
  source 1..20: mol_type = genomic DNA; note = Gene: PRTG; note = Location (start to end; relative to TSS): PRTG_48_78; note = Orientation (relative to transcription): antisense; note = sgRNA Position: 55743100; note = Sequence Name: 56322-704_101_SL_seq_11669
cggcgaggctggtgctcgga

SEQ ID NO: 11670 - DNA, 20 bp, Homo sapiens
  source 1..20: mol_type = genomic DNA; note = Gene: PSG1; note = Location (start to end; relative to TSS): PSG1_17_47; note = Orientation (relative to transcription): sense; note = sgRNA Position: 42879672; note = Sequence Name: 56322-704_101_SL_seq_11670
ggctcagcacagaaagagga

SEQ ID NO: 11671 - DNA, 20 bp, Homo sapiens
  source 1..20: mol_type = genomic DNA; note = Gene: PSG1; note = Location (start to end; relative to TSS): PSG1_131_161; note = Orientation (relative to transcription): antisense; note = sgRNA Position: 42879578; note = Sequence Name: 56322-704_101_SL_seq_11671
aggggctgagagggttccca

SEQ ID NO: 11672 - DNA, 20 bp, Homo sapiens
  source 1..20: mol_type = genomic DNA; note = Gene: PSG1; note = Location (start to end; relative to TSS): PSG1_16_46; note = Orientation (relative to transcription): antisense; note = sgRNA Position: 42879693; note = Sequence Name: 56322-704_101_SL_seq_11672
tctgtgctgagcctcttccc

SEQ ID NO: 11673 - DNA, 20 bp, Homo sapiens
  source 1..20: mol_type = genomic DNA; note = Gene: PSG1; note = Location (start to end; relative to TSS): PSG1_101_131; note = Orientation (relative to transcription): antisense; note = sgRNA Position: 42879608; note = Sequence Name: 56322-704_101_SL_seq_11673
tgcttgtgtgttctcctctg

SEQ ID NO: 11674 - DNA, 20 bp, Homo sapiens
  source 1..20: mol_type = genomic DNA; note = Gene: PSG1; note = Location (start to end; relative to TSS): PSG1_15_45; note = Orientation (relative to transcription): antisense; note = sgRNA Position: 42879694; note = Sequence Name: 56322-704_101_SL_seq_11674
ctgtgctgagcctcttccca

SEQ ID NO: 11675 - DNA, 20 bp, Homo sapiens
  source 1..20: mol_type = genomic DNA; note = Gene: PSG1; note = Location (start to end; relative to TSS): PSG1_88_118; note = Orientation (relative to transcription): antisense; note = sgRNA Position: 42879621; note = Sequence Name: 56322-704_101_SL_seq_11675
tcctctgtggagataagcct

SEQ ID NO: 11676 - DNA, 20 bp, Homo sapiens
  source 1..20: mol_type = genomic DNA; note = Gene: PSG1; note = Location (start to end; relative to TSS): PSG1_13_43; note = Orientation (relative to transcription): sense; note = sgRNA Position: 42879676; note = Sequence Name: 56322-704_101_SL_seq_11676
aagaggctcagcacagaaag

SEQ ID NO: 11677 - DNA, 20 bp, Homo sapiens
  source 1..20: mol_type = genomic DNA; note = Gene: PSG1; note = Location (start to end; relative to TSS): PSG1_78_108; note = Orientation (relative to transcription): sense; note = sgRNA Position: 42879611; note = Sequence Name: 56322-704_101_SL_seq_11677
tcctaggcttatctccacag

SEQ ID NO: 11678 - DNA, 20 bp, Homo sapiens
  source 1..20: mol_type = genomic DNA; note = Gene: PSG1; note = Location (start to end; relative to TSS): PSG1_11_41; note = Orientation (relative to transcription): antisense; note = sgRNA Position: 42879698; note = Sequence Name: 56322-704_101_SL_seq_11678
gctgagcctcttcccagggc

SEQ ID NO: 11679 - DNA, 20 bp, Homo sapiens
  source 1..20: mol_type = genomic DNA; note = Gene: PSG1; note = Location (start to end; relative to TSS): PSG1_65_95; note = Orientation (relative to transcription): antisense; note = sgRNA Position: 42879644; note = Sequence Name: 56322-704_101_SL_seq_11679
atccagaaactctctgagca

SEQ ID NO: 11680 - DNA, 20 bp, Homo sapiens
  source 1..20: mol_type = genomic DNA; note = Gene: PSG10P; note = Location (start to end; relative to TSS): PSG10P_45_75; note = Orientation (relative to transcription): sense; note = sgRNA Position: 42855649; note = Sequence Name: 56322-704_101_SL_seq_11680
acctaggctcatctccacag

SEQ ID NO: 11681 - DNA, 20 bp, Homo sapiens
  source 1..20: mol_type = genomic DNA; note = Gene: PSG10P; note = Location (start to end; relative to TSS): PSG10P_106_136; note = Orientation (relative to transcription): antisense; note = sgRNA Position: 42855608; note = Sequence Name: 56322-704_101_SL_seq_11681
gtgcagggaggggctgagag

SEQ ID NO: 11682 - DNA, 20 bp, Homo sapiens
  source 1..20: mol_type = genomic DNA; note = Gene: PSG10P; note = Location (start to end; relative to TSS): PSG10P_32_62; note = Orientation (relative to transcription): antisense; note = sgRNA Position: 42855682; note = Sequence Name: 56322-704_101_SL_seq_11682
ttccagaaacttcctgagca

SEQ ID NO: 11683 - DNA, 20 bp, Homo sapiens
  source 1..20: mol_type = genomic DNA; note = Gene: PSG10P; note = Location (start to end; relative to TSS): PSG10P_98_128; note = Orientation (relative to transcription): antisense; note = sgRNA Position: 42855616; note = Sequence Name: 56322-704_101_SL_seq_11683
aggggctgagaggggcccca

SEQ ID NO: 11684 - DNA, 20 bp, Homo sapiens
  source 1..20: mol_type = genomic DNA; note = Gene: PSG10P; note = Location (start to end; relative to TSS): PSG10P_29_59; note = Orientation (relative to transcription): sense; note = sgRNA Position: 42855665; note = Sequence Name: 56322-704_101_SL_seq_11684
tcaggaagtttctggaacct

SEQ ID NO: 11685 - DNA, 20 bp, Homo sapiens
  source 1..20: mol_type = genomic DNA; note = Gene: PSG10P; note = Location (start to end; relative to TSS): PSG10P_68_98; note = Orientation (relative to transcription): antisense; note = sgRNA Position: 42855646; note = Sequence Name: 56322-704_101_SL_seq_11685
tgcttgtgtgttctcctctg

SEQ ID NO: 11686 - DNA, 20 bp, Homo sapiens
  source 1..20: mol_type = genomic DNA; note = Gene: PSG10P; note = Location (start to end; relative to TSS): PSG10P_25_55; note = Orientation (relative to transcription): antisense; note = sgRNA Position: 42855689; note = Sequence Name: 56322-704_101_SL_seq_11686
aacttcctgagcacggctgt

SEQ ID NO: 11687 - DNA, 20 bp, Homo sapiens
  source 1..20: mol_type = genomic DNA; note = Gene: PSG10P; note = Location (start to end; relative to TSS): PSG10P_55_85; note = Orientation (relative to transcription): antisense; note = sgRNA Position: 42855659; note = Sequence Name: 56322-704_101_SL_seq_11687
tcctctgtggagatgagcct

SEQ ID NO: 11688 - DNA, 20 bp, Homo sapiens
  source 1..20: mol_type = genomic DNA; note = Gene: PSG10P; note = Location (start to end; relative to TSS): PSG10P_11_41; note = Orientation (relative to transcription): sense; note = sgRNA Position: 42855683; note = Sequence Name: 56322-704_101_SL_seq_11688
cacagcctacagccgtgctc

SEQ ID NO: 11689 - DNA, 20 bp, Homo sapiens
  source 1..20: mol_type = genomic DNA; note = Gene: PSG10P; note = Location (start to end; relative to TSS): PSG10P_45_75; note = Orientation (relative to transcription): sense; note = sgRNA Position: 42855649; note = Sequence Name: 56322-704_101_SL_seq_11689
acctaggctcatctccacag

SEQ ID NO: 11690 - DNA, 20 bp, Homo sapiens
  source 1..20: mol_type = genomic DNA; note = Gene: PSG11; note = Location (start to end; relative to TSS): PSG11_43_73; note = Orientation (relative to transcription): sense; note = sgRNA Position: 43026402; note = Sequence Name: 56322-704_101_SL_seq_11690
tcctaggctcatctccacag

SEQ ID NO: 11691 - DNA, 20 bp, Homo sapiens
  source 1..20: mol_type = genomic DNA; note = Gene: PSG11; note = Location (start to end; relative to TSS): PSG11_105_135; note = Orientation (relative to transcription): antisense; note = sgRNA Position: 43026360; note = Sequence Name: 56322-704_101_SL_seq_11691
tgtgcagggaggggctgaga

SEQ ID NO: 11692 - DNA, 20 bp, Homo sapiens
  source 1..20: mol_type = genomic DNA; note = Gene: PSG11; note = Location (start to end; relative to TSS): PSG11_53_83; note = Orientation (relative to transcription): antisense; note = sgRNA Position: 43026412; note = Sequence Name: 56322-704_101_SL_seq_11692
tcctctgtggagatgagcct

SEQ ID NO: 11693 - DNA, 20 bp, Homo sapiens
  source 1..20: mol_type = genomic DNA; note = Gene: PSG11; note = Location (start to end; relative to TSS): PSG11_104_134; note = Orientation (relative to transcription): antisense; note = sgRNA Position: 43026361; note = Sequence Name: 56322-704_101_SL_seq_11693
gtgcagggaggggctgagag

SEQ ID NO: 11694 - DNA, 20 bp, Homo sapiens
  source 1..20: mol_type = genomic DNA; note = Gene: PSG11; note = Location (start to end; relative to TSS): PSG11_27_57; note = Orientation (relative to transcription): sense; note = sgRNA Position: 43026418; note = Sequence Name: 56322-704_101_SL_seq_11694
tctggaagcttctggatcct

SEQ ID NO: 11695 - DNA, 20 bp, Homo sapiens
  source 1..20: mol_type = genomic DNA; note = Gene: PSG11; note = Location (start to end; relative to TSS): PSG11_66_96; note = Orientation (relative to transcription): antisense; note = sgRNA Position: 43026399; note = Sequence Name: 56322-704_101_SL_seq_11695
tgcgtgcatgttctcctctg

SEQ ID NO: 11696 - DNA, 20 bp, Homo sapiens
  source 1..20: mol_type = genomic DNA; note = Gene: PSG11; note = Location (start to end; relative to TSS): PSG11_19_49; note = Orientation (relative to transcription): sense; note = sgRNA Position: 43026426; note = Sequence Name: 56322-704_101_SL_seq_11696
agccgtgctctggaagcttc

SEQ ID NO: 11697 - DNA, 20 bp, Homo sapiens
  source 1..20: mol_type = genomic DNA; note = Gene: PSG11; note = Location (start to end; relative to TSS): PSG11_53_83; note = Orientation (relative to transcription): antisense; note = sgRNA Position: 43026412; note = Sequence Name: 56322-704_101_SL_seq_11697
tcctctgtggagatgagcct

SEQ ID NO: 11698 - DNA, 20 bp, Homo sapiens
  source 1..20: mol_type = genomic DNA; note = Gene: PSG11; note = Location (start to end; relative to TSS): PSG11_9_39; note = Orientation (relative to transcription): sense; note = sgRNA Position: 43026436; note = Sequence Name: 56322-704_101_SL_seq_11698
cacagctgacagccgtgctc

SEQ ID NO: 11699 - DNA, 20 bp, Homo sapiens
  source 1..20: mol_type = genomic DNA; note = Gene: PSG11; note = Location (start to end; relative to TSS): PSG11_43_73; note = Orientation (relative to transcription): sense; note = sgRNA Position: 43026402; note = Sequence Name: 56322-704_101_SL_seq_11699
tcctaggctcatctccacag

SEQ ID NO: 11700 - DNA, 20 bp, Homo sapiens
  source 1..20: mol_type = genomic DNA; note = Gene: PSG2; note = Location (start to end; relative to TSS): PSG2_44_74; note = Orientation (relative to transcription): sense; note = sgRNA Position: 43082633; note = Sequence Name: 56322-704_101_SL_seq_11700
cacagctgacagccgtgctc

SEQ ID NO: 11701 - DNA, 20 bp, Homo sapiens
  source 1..20: mol_type = genomic DNA; note = Gene: PSG2; note = Location (start to end; relative to TSS): PSG2_88_118; note = Orientation (relative to transcription): antisense; note = sgRNA Position: 43082609; note = Sequence Name: 56322-704_101_SL_seq_11701
tcctctgtggagatgagcct

SEQ ID NO: 11702 - DNA, 20 bp, Homo sapiens
  source 1..20: mol_type = genomic DNA; note = Gene: PSG2; note = Location (start to end; relative to TSS): PSG2_17_47; note = Orientation (relative to transcription): sense; note = sgRNA Position: 43082660; note = Sequence Name: 56322-704_101_SL_seq_11702
ggctcagtgcagaaggagga

SEQ ID NO: 11703 - DNA, 20 bp, Homo sapiens
  source 1..20: mol_type = genomic DNA; note = Gene: PSG2; note = Location (start to end; relative to TSS): PSG2_78_108; note = Orientation (relative to transcription): sense; note = sgRNA Position: 43082599; note = Sequence Name: 56322-704_101_SL_seq_11703
tcctaggctcatctccacag

SEQ ID NO: 11704 - DNA, 20 bp, Homo sapiens
  source 1..20: mol_type = genomic DNA; note = Gene: PSG2; note = Location (start to end; relative to TSS): PSG2_16_46; note = Orientation (relative to transcription): antisense; note = sgRNA Position: 43082681; note = Sequence Name: 56322-704_101_SL_seq_11704
tctgcactgagcctcttcct

SEQ ID NO: 11705 - DNA, 20 bp, Homo sapiens
  source 1..20: mol_type = genomic DNA; note = Gene: PSG2; note = Location (start to end; relative to TSS): PSG2_65_95; note = Orientation (relative to transcription): antisense; note = sgRNA Position: 43082632; note = Sequence Name: 56322-704_101_SL_seq_11705
atccagaaacttcctgagca

SEQ ID NO: 11706 - DNA, 20 bp, Homo sapiens
  source 1..20: mol_type = genomic DNA; note = Gene: PSG2; note = Location (start to end; relative to TSS): PSG2_15_45; note = Orientation (relative to transcription): antisense; note = sgRNA Position: 43082682; note = Sequence Name: 56322-704_101_SL_seq_11706
ctgcactgagcctcttcctg

SEQ ID NO: 11707 - DNA, 20 bp, Homo sapiens
  source 1..20: mol_type = genomic DNA; note = Gene: PSG2; note = Location (start to end; relative to TSS): PSG2_62_92; note = Orientation (relative to transcription): sense; note = sgRNA Position: 43082615; note = Sequence Name: 56322-704_101_SL_seq_11707
tcaggaagtttctggatcct

SEQ ID NO: 11708 - DNA, 20 bp, Homo sapiens
  source 1..20: mol_type = genomic DNA; note = Gene: PSG2; note = Location (start to end; relative to TSS): PSG2_13_43; note = Orientation (relative to transcription): sense; note = sgRNA Position: 43082664; note = Sequence Name: 56322-704_101_SL_seq_11708
aagaggctcagtgcagaagg

SEQ ID NO: 11709 - DNA, 20 bp, Homo sapiens
  source 1..20: mol_type = genomic DNA; note = Gene: PSG2; note = Location (start to end; relative to TSS): PSG2_44_74; note = Orientation (relative to transcription): sense; note = sgRNA Position: 43082633; note = Sequence Name: 56322-704_101_SL_seq_11709
cacagctgacagccgtgctc

SEQ ID NO: 11710 - DNA, 20 bp, Homo sapiens
  source 1..20: mol_type = genomic DNA; note = Gene: PSG3; note = Location (start to end; relative to TSS): PSG3_43_73; note = Orientation (relative to transcription): sense; note = sgRNA Position: 42740414; note = Sequence Name: 56322-704_101_SL_seq_11710
tcctaggctcagctccacag

SEQ ID NO: 11711 - DNA, 20 bp, Homo sapiens
  source 1..20: mol_type = genomic DNA; note = Gene: PSG3; note = Location (start to end; relative to TSS): PSG3_105_135; note = Orientation (relative to transcription): antisense; note = sgRNA Position: 42740372; note = Sequence Name: 56322-704_101_SL_seq_11711
tgtgcagggaggggctgaga

SEQ ID NO: 11712 - DNA, 20 bp, Homo sapiens
  source 1..20: mol_type = genomic DNA; note = Gene: PSG3; note = Location (start to end; relative to TSS): PSG3_53_83; note = Orientation (relative to transcription): antisense; note = sgRNA Position: 42740424; note = Sequence Name: 56322-704_101_SL_seq_11712
tcctctgtggagctgagcct

SEQ ID NO: 11713 - DNA, 20 bp, Homo sapiens
  source 1..20: mol_type = genomic DNA; note = Gene: PSG3; note = Location (start to end; relative to TSS): PSG3_104_134; note = Orientation (relative to transcription): antisense; note = sgRNA Position: 42740373; note = Sequence Name: 56322-704_101_SL_seq_11713
gtgcagggaggggctgagag

SEQ ID NO: 11714 - DNA, 20 bp, Homo sapiens
  source 1..20: mol_type = genomic DNA; note = Gene: PSG3; note = Location (start to end; relative to TSS): PSG3_27_57; note = Orientation (relative to transcription): sense; note = sgRNA Position: 42740430; note = Sequence Name: 56322-704_101_SL_seq_11714
tcaggaagtttctggatcct

SEQ ID NO: 11715 - DNA, 20 bp, Homo sapiens
  source 1..20: mol_type = genomic DNA; note = Gene: PSG3; note = Location (start to end; relative to TSS): PSG3_96_126; note = Orientation (relative to transcription): antisense; note = sgRNA Position: 42740381; note = Sequence Name: 56322-704_101_SL_seq_11715
aggggctgagaggggcccca

SEQ ID NO: 11716 - DNA, 20 bp, Homo sapiens
  source 1..20: mol_type = genomic DNA; note = Gene: PSG3; note = Location (start to end; relative to TSS): PSG3_30_60; note = Orientation (relative to transcription): antisense; note = sgRNA Position: 42740447; note = Sequence Name: 56322-704_101_SL_seq_11716
atccagaaacttcctgagca

SEQ ID NO: 11717 - DNA, 20 bp, Homo sapiens
  source 1..20: mol_type = genomic DNA; note = Gene: PSG3; note = Location (start to end; relative to TSS): PSG3_66_96; note = Orientation (relative to transcription): antisense; note = sgRNA Position: 42740411; note = Sequence Name: 56322-704_101_SL_seq_11717
tgcctgcgtgttctcctctg

SEQ ID NO: 11718 - DNA, 20 bp, Homo sapiens
  source 1..20: mol_type = genomic DNA; note = Gene: PSG3; note = Location (start to end; relative to TSS): PSG3_9_39; note = Orientation (relative to transcription): sense; note = sgRNA Position: 42740448; note = Sequence Name: 56322-704_101_SL_seq_11718
cacagctgagagccatgctc

SEQ ID NO: 11719 - DNA, 20 bp, Homo sapiens
  source 1..20: mol_type = genomic DNA; note = Gene: PSG3; note = Location (start to end; relative to TSS): PSG3_43_73; note = Orientation (relative to transcription): sense; note = sgRNA Position: 42740414; note = Sequence Name: 56322-704_101_SL_seq_11719
tcctaggctcagctccacag

SEQ ID NO: 11720 - DNA, 20 bp, Homo sapiens
  source 1..20: mol_type = genomic DNA; note = Gene: PSG4; note = Location (start to end; relative to TSS): PSG4_48_78; note = Orientation (relative to transcription): sense; note = sgRNA Position: 43205566; note = Sequence Name: 56322-704_101_SL_seq_11720
tcctaggcttatctccacag

SEQ ID NO: 11721 - DNA, 20 bp, Homo sapiens
  source 1..20: mol_type = genomic DNA; note = Gene: PSG4; note = Location (start to end; relative to TSS): PSG4_109_139; note = Orientation (relative to transcription): antisense; note = sgRNA Position: 43205525; note = Sequence Name: 56322-704_101_SL_seq_11721
gtgcagggaggggctgagag

SEQ ID NO: 11722 - DNA, 20 bp, Homo sapiens
  source 1..20: mol_type = genomic DNA; note = Gene: PSG4; note = Location (start to end; relative to TSS): PSG4_35_65; note = Orientation (relative to transcription): antisense; note = sgRNA Position: 43205599; note = Sequence Name: 56322-704_101_SL_seq_11722
atccagaagcttcctgagta

SEQ ID NO: 11723 - DNA, 20 bp, Homo sapiens
  source 1..20: mol_type = genomic DNA; note = Gene: PSG4; note = Location (start to end; relative to TSS): PSG4_101_131; note = Orientation (relative to transcription): antisense; note = sgRNA Position: 43205533; note = Sequence Name: 56322-704_101_SL_seq_11723
aggggctgagaggggcccca

SEQ ID NO: 11724 - DNA, 20 bp, Homo sapiens
  source 1..20: mol_type = genomic DNA; note = Gene: PSG4; note = Location (start to end; relative to TSS): PSG4_32_62; note = Orientation (relative to transcription): sense; note = sgRNA Position: 43205582; note = Sequence Name: 56322-704_101_SL_seq_11724
tcaggaagcttctggatcct

SEQ ID NO: 11725 - DNA, 20 bp, Homo sapiens
  source 1..20: mol_type = genomic DNA; note = Gene: PSG4; note = Location (start to end; relative to TSS): PSG4_71_101; note = Orientation (relative to transcription): antisense; note = sgRNA Position: 43205563; note = Sequence Name: 56322-704_101_SL_seq_11725
tgcttgtgtgttctcctctg

SEQ ID NO: 11726 - DNA, 20 bp, Homo sapiens
  source 1..20: mol_type = genomic DNA; note = Gene: PSG4; note = Location (start to end; relative to TSS): PSG4_24_54; note = Orientation (relative to transcription): sense; note = sgRNA Position: 43205590; note = Sequence Name: 56322-704_101_SL_seq_11726
agccgtactcaggaagcttc

SEQ ID NO: 11727 - DNA, 20 bp, Homo sapiens
  source 1..20: mol_type = genomic DNA; note = Gene: PSG4; note = Location (start to end; relative to TSS): PSG4_58_88; note = Orientation (relative to transcription): antisense; note = sgRNA Position: 43205576; note = Sequence Name: 56322-704_101_SL_seq_11727
tcctctgtggagataagcct

SEQ ID NO: 11728 - DNA, 20 bp, Homo sapiens
  source 1..20: mol_type = genomic DNA; note = Gene: PSG4; note = Location (start to end; relative to TSS): PSG4_14_44; note = Orientation (relative to transcription): sense; note = sgRNA Position: 43205600; note = Sequence Name: 56322-704_101_SL_seq_11728
cacagctgacagccgtactc

SEQ ID NO: 11729 - DNA, 20 bp, Homo sapiens
  source 1..20: mol_type = genomic DNA; note = Gene: PSG4; note = Location (start to end; relative to TSS): PSG4_48_78; note = Orientation (relative to transcription): sense; note = sgRNA Position: 43205566; note = Sequence Name: 56322-704_101_SL_seq_11729
tcctaggcttatctccacag

SEQ ID NO: 11730 - DNA, 20 bp, Homo sapiens
  source 1..20: mol_type = genomic DNA; note = Gene: PSG5; note = Location (start to end; relative to TSS): PSG5_44_74; note = Orientation (relative to transcription): sense; note = sgRNA Position: 43186468; note = Sequence Name: 56322-704_101_SL_seq_11730
cacagcctacagccgtgctc

SEQ ID NO: 11731 - DNA, 20 bp, Homo sapiens
  source 1..20: mol_type = genomic DNA; note = Gene: PSG5; note = Location (start to end; relative to TSS): PSG5_78_108; note = Orientation (relative to transcription): sense; note = sgRNA Position: 43186434; note = Sequence Name: 56322-704_101_SL_seq_11731
tcctaggctcagctccacag

SEQ ID NO: 11732 - DNA, 20 bp, Homo sapiens
  source 1..20: mol_type = genomic DNA; note = Gene: PSG5; note = Location (start to end; relative to TSS): PSG5_17_47; note = Orientation (relative to transcription): sense; note = sgRNA Position: 43186495; note = Sequence Name: 56322-704_101_SL_seq_11732
ggctcagcacagaaggagga

SEQ ID NO: 11733 - DNA, 20 bp, Homo sapiens
  source 1..20: mol_type = genomic DNA; note = Gene: PSG5; note = Location (start to end; relative to TSS): PSG5_65_95; note = Orientation (relative to transcription): antisense; note = sgRNA Position: 43186467; note = Sequence Name: 56322-704_101_SL_seq_11733
atccagaaacttcctgagca

SEQ ID NO: 11734 - DNA, 20 bp, Homo sapiens
  source 1..20: mol_type = genomic DNA; note = Gene: PSG5; note = Location (start to end; relative to TSS): PSG5_16_46; note = Orientation (relative to transcription): antisense; note = sgRNA Position: 43186516; note = Sequence Name: 56322-704_101_SL_seq_11734
tctgtgctgagcctctctcc

SEQ ID NO: 11735 - DNA, 20 bp, Homo sapiens
  source 1..20: mol_type = genomic DNA; note = Gene: PSG5; note = Location (start to end; relative to TSS): PSG5_62_92; note = Orientation (relative to transcription): sense; note = sgRNA Position: 43186450; note = Sequence Name: 56322-704_101_SL_seq_11735
tcaggaagtttctggatcct

SEQ ID NO: 11736 - DNA, 20 bp, Homo sapiens
  source 1..20: mol_type = genomic DNA; note = Gene: PSG5; note = Location (start to end; relative to TSS): PSG5_15_45; note = Orientation (relative to transcription): antisense; note = sgRNA Position: 43186517; note = Sequence Name: 56322-704_101_SL_seq_11736
ctgtgctgagcctctctcca

SEQ ID NO: 11737 - DNA, 20 bp, Homo sapiens
  source 1..20: mol_type = genomic DNA; note = Gene: PSG5; note = Location (start to end; relative to TSS): PSG5_58_88; note = Orientation (relative to transcription): antisense; note = sgRNA Position: 43186474; note = Sequence Name: 56322-704_101_SL_seq_11737
aacttcctgagcacggctgt

SEQ ID NO: 11738 - DNA, 20 bp, Homo sapiens
  source 1..20: mol_type = genomic DNA; note = Gene: PSG5; note = Location (start to end; relative to TSS): PSG5_13_43; note = Orientation (relative to transcription): sense; note = sgRNA Position: 43186499; note = Sequence Name: 56322-704_101_SL_seq_11738
gagaggctcagcacagaagg

SEQ ID NO: 11739 - DNA, 20 bp, Homo sapiens
  source 1..20: mol_type = genomic DNA; note = Gene: PSG5; note = Location (start to end; relative to TSS): PSG5_44_74; note = Orientation (relative to transcription): sense; note = sgRNA Position: 43186468; note = Sequence Name: 56322-704_101_SL_seq_11739
cacagcctacagccgtgctc

SEQ ID NO: 11740 - DNA, 20 bp, Homo sapiens
  source 1..20: mol_type = genomic DNA; note = Gene: PSG6; note = Location (start to end; relative to TSS): PSG6_47_77; note = Orientation (relative to transcription): sense; note = sgRNA Position: 42917823; note = Sequence Name: 56322-704_101_SL_seq_11740
atcctaggctcatctccaca

SEQ ID NO: 11741 - DNA, 20 bp, Homo sapiens
  source 1..20: mol_type = genomic DNA; note = Gene: PSG6; note = Location (start to end; relative to TSS): PSG6_110_140; note = Orientation (relative to transcription): antisense; note = sgRNA Position: 42917780; note = Sequence Name: 56322-704_101_SL_seq_11741
agtgcagggaggggctgaga

SEQ ID NO: 11742 - DNA, 20 bp, Homo sapiens
  source 1..20: mol_type = genomic DNA; note = Gene: PSG6; note = Location (start to end; relative to TSS): PSG6_46_76; note = Orientation (relative to transcription): sense; note = sgRNA Position: 42917824; note = Sequence Name: 56322-704_101_SL_seq_11742
gatcctaggctcatctccac

SEQ ID NO: 11743 - DNA, 20 bp, Homo sapiens
  source 1..20: mol_type = genomic DNA; note = Gene: PSG6; note = Location (start to end; relative to TSS): PSG6_109_139; note = Orientation (relative to transcription): antisense; note = sgRNA Position: 42917781; note = Sequence Name: 56322-704_101_SL_seq_11743
gtgcagggaggggctgagag

SEQ ID NO: 11744 - DNA, 20 bp, Homo sapiens
  source 1..20: mol_type = genomic DNA; note = Gene: PSG6; note = Location (start to end; relative to TSS): PSG6_32_62; note = Orientation (relative to transcription): sense; note = sgRNA Position: 42917838; note = Sequence Name: 56322-704_101_SL_seq_11744
tcaggaagtctctggatcct

SEQ ID NO: 11745 - DNA, 20 bp, Homo sapiens
  source 1..20: mol_type = genomic DNA; note = Gene: PSG6; note = Location (start to end; relative to TSS): PSG6_101_131; note = Orientation (relative to transcription): antisense; note = sgRNA Position: 42917789; note = Sequence Name: 56322-704_101_SL_seq_11745
aggggctgagaggggtccca

SEQ ID NO: 11746 - DNA, 20 bp, Homo sapiens
  source 1..20: mol_type = genomic DNA; note = Gene: PSG6; note = Location (start to end; relative to TSS): PSG6_24_54; note = Orientation (relative to transcription): sense; note = sgRNA Position: 42917846; note = Sequence Name: 56322-704_101_SL_seq_11746
agccctgctcaggaagtctc

SEQ ID NO: 11747 - DNA, 20 bp, Homo sapiens
  source 1..20: mol_type = genomic DNA; note = Gene: PSG6; note = Location (start to end; relative to TSS): PSG6_71_101; note = Orientation (relative to transcription): antisense; note = sgRNA Position: 42917819; note = Sequence Name: 56322-704_101_SL_seq_11747
tgtctgtgtgttctcccctg

SEQ ID NO: 11748 - DNA, 20 bp, Homo sapiens
  source 1..20: mol_type = genomic DNA; note = Gene: PSG6; note = Location (start to end; relative to TSS): PSG6_27_57; note = Orientation (relative to transcription): antisense; note = sgRNA Position: 42917863; note = Sequence Name: 56322-704_101_SL_seq_11748
acttcctgagcagggctgtc

SEQ ID NO: 11749 - DNA, 20 bp, Homo sapiens
  source 1..20: mol_type = genomic DNA; note = Gene: PSG6; note = Location (start to end; relative to TSS): PSG6_58_88; note = Orientation (relative to transcription): antisense; note = sgRNA Position: 42917832; note = Sequence Name: 56322-704_101_SL_seq_11749
tcccctgtggagatgagcct

SEQ ID NO: 11750 - DNA, 20 bp, Homo sapiens
  source 1..20: mol_type = genomic DNA; note = Gene: PSG7; note = Location (start to end; relative to TSS): PSG7_53_83; note = Orientation (relative to transcription): sense; note = sgRNA Position: 42937130; note = Sequence Name: 56322-704_101_SL_seq_11750
agccgtgctcaggaagattc

SEQ ID NO: 11751 - DNA, 20 bp, Homo sapiens
  source 1..20: mol_type = genomic DNA; note = Gene: PSG7; note = Location (start to end; relative to TSS): PSG7_87_117; note = Orientation (relative to transcription): antisense; note = sgRNA Position: 42937116; note = Sequence Name: 56322-704_101_SL_seq_11751
tcctctgtggagatgagcct

SEQ ID NO: 11752 - DNA, 20 bp, Homo sapiens
  source 1..20: mol_type = genomic DNA; note = Gene: PSG7; note = Location (start to end; relative to TSS): PSG7_16_46; note = Orientation (relative to transcription): sense; note = sgRNA Position: 42937167; note = Sequence Name: 56322-704_101_SL_seq_11752
ggctcagtgcagaaggagga

SEQ ID NO: 11753 - DNA, 20 bp, Homo sapiens
  source 1..20: mol_type = genomic DNA; note = Gene: PSG7; note = Location (start to end; relative to TSS): PSG7_64_94; note = Orientation (relative to transcription): antisense; note = sgRNA Position: 42937139; note = Sequence Name: 56322-704_101_SL_seq_11753
atccagaatcttcctgagca

SEQ ID NO: 11754 - DNA, 20 bp, Homo sapiens
  source 1..20: mol_type = genomic DNA; note = Gene: PSG7; note = Location (start to end; relative to TSS): PSG7_15_45; note = Orientation (relative to transcription): antisense; note = sgRNA Position: 42937188; note = Sequence Name: 56322-704_101_SL_seq_11754
tctgcactgagcctcttccc

SEQ ID NO: 11755 - DNA, 20 bp, Homo sapiens
  source 1..20: mol_type = genomic DNA; note = Gene: PSG7; note = Location (start to end; relative to TSS): PSG7_61_91; note = Orientation (relative to transcription): sense; note = sgRNA Position: 42937122; note = Sequence Name: 56322-704_101_SL_seq_11755
tcaggaagattctggatcct

SEQ ID NO: 11756 - DNA, 20 bp, Homo sapiens
  source 1..20: mol_type = genomic DNA; note = Gene: PSG7; note = Location (start to end; relative to TSS): PSG7_14_44; note = Orientation (relative to transcription): antisense; note = sgRNA Position: 42937189; note = Sequence Name: 56322-704_101_SL_seq_11756
ctgcactgagcctcttcccg

SEQ ID NO: 11757 - DNA, 20 bp, Homo sapiens
  source 1..20: mol_type = genomic DNA; note = Gene: PSG7; note = Location (start to end; relative to TSS): PSG7_53_83; note = Orientation (relative to transcription): sense; note = sgRNA Position: 42937130; note = Sequence Name: 56322-704_101_SL_seq_11757
agccgtgctcaggaagattc

SEQ ID NO: 11758 - DNA, 20 bp, Homo sapiens
  source 1..20: mol_type = genomic DNA; note = Gene: PSG7; note = Location (start to end; relative to TSS): PSG7_12_42; note = Orientation (relative to transcription): sense; note = sgRNA Position: 42937171; note = Sequence Name: 56322-704_101_SL_seq_11758
aagaggctcagtgcagaagg

SEQ ID NO: 11759 - DNA, 20 bp, Homo sapiens
  source 1..20: mol_type = genomic DNA; note = Gene: PSG7; note = Location (start to end; relative to TSS): PSG7_43_73; note = Orientation (relative to transcription): sense; note = sgRNA Position: 42937140; note = Sequence Name: 56322-704_101_SL_seq_11759
cacagctgacagccgtgctc

SEQ ID NO: 11760 - DNA, 20 bp, Homo sapiens
  source 1..20: mol_type = genomic DNA; note = Gene: PSG8; note = Location (start to end; relative to TSS): PSG8_43_73; note = Orientation (relative to transcription): sense; note = sgRNA Position: 42765611; note = Sequence Name: 56322-704_101_SL_seq_11760
tcctaggctcatctccacag

SEQ ID NO: 11761 - DNA, 20 bp, Homo sapiens
  source 1..20: mol_type = genomic DNA; note = Gene: PSG8; note = Location (start to end; relative to TSS): PSG8_106_136; note = Orientation (relative to transcription): antisense; note = sgRNA Position: 42765568; note = Sequence Name: 56322-704_101_SL_seq_11761
gtgtgcagggaggggctgag

SEQ ID NO: 11762 - DNA, 20 bp, Homo sapiens
  source 1..20: mol_type = genomic DNA; note = Gene: PSG8; note = Location (start to end; relative to TSS): PSG8_53_83; note = Orientation (relative to transcription): antisense; note = sgRNA Position: 42765621; note = Sequence Name: 56322-704_101_SL_seq_11762
tcctctgtggagatgagcct

SEQ ID NO: 11763 - DNA, 20 bp, Homo sapiens
  source 1..20: mol_type = genomic DNA; note = Gene: PSG8; note = Location (start to end; relative to TSS): PSG8_96_126; note = Orientation (relative to transcription): antisense; note = sgRNA Position: 42765578; note = Sequence Name: 56322-704_101_SL_seq_11763
aggggctgagaggagcccca

SEQ ID NO: 11764 - DNA, 20 bp, Homo sapiens
  source 1..20: mol_type = genomic DNA; note = Gene: PSG8; note = Location (start to end; relative to TSS): PSG8_27_57; note = Orientation (relative to transcription): sense; note = sgRNA Position: 42765627; note = Sequence Name: 56322-704_101_SL_seq_11764
tcaggaagcttctggatcct

SEQ ID NO: 11765 - DNA, 20 bp, Homo sapiens
  source 1..20: mol_type = genomic DNA; note = Gene: PSG8; note = Location (start to end; relative to TSS): PSG8_66_96; note = Orientation (relative to transcription): antisense; note = sgRNA Position: 42765608; note = Sequence Name: 56322-704_101_SL_seq_11765
tgtctgtgtgttctcctctg

SEQ ID NO: 11766 - DNA, 20 bp, Homo sapiens
  source 1..20: mol_type = genomic DNA; note = Gene: PSG8; note = Location (start to end; relative to TSS): PSG8_19_49; note = Orientation (relative to transcription): sense; note = sgRNA Position: 42765635; note = Sequence Name: 56322-704_101_SL_seq_11766
agctgtgctcaggaagcttc

SEQ ID NO: 11767 - DNA, 20 bp, Homo sapiens
  source 1..20: mol_type = genomic DNA; note = Gene: PSG8; note = Location (start to end; relative to TSS): PSG8_53_83; note = Orientation (relative to transcription): antisense; note = sgRNA Position: 42765621; note = Sequence Name: 56322-704_101_SL_seq_11767
tcctctgtggagatgagcct

SEQ ID NO: 11768 - DNA, 20 bp, Homo sapiens
  source 1..20: mol_type = genomic DNA; note = Gene: PSG8; note = Location (start to end; relative to TSS): PSG8_9_39; note = Orientation (relative to transcription): sense; note = sgRNA Position: 42765645; note = Sequence Name: 56322-704_101_SL_seq_11768
cactgctgagagctgtgctc

SEQ ID NO: 11769 - DNA, 20 bp, Homo sapiens
  source 1..20: mol_type = genomic DNA; note = Gene: PSG8; note = Location (start to end; relative to TSS): PSG8_43_73; note = Orientation (relative to transcription): sense; note = sgRNA Position: 42765611; note = Sequence Name: 56322-704_101_SL_seq_11769
tcctaggctcatctccacag

SEQ ID NO: 11770 - DNA, 20 bp, Homo sapiens
  source 1..20: mol_type = genomic DNA; note = Gene: PSG9; note = Location (start to end; relative to TSS): PSG9_45_75; note = Orientation (relative to transcription): sense; note = sgRNA Position: 43269461; note = Sequence Name: 56322-704_101_SL_seq_11770
tcccaggctcatctccacag

SEQ ID NO: 11771 - DNA, 20 bp, Homo sapiens
  source 1..20: mol_type = genomic DNA; note = Gene: PSG9; note = Location (start to end; relative to TSS): PSG9_107_137; note = Orientation (relative to transcription): antisense; note = sgRNA Position: 43269419; note = Sequence Name: 56322-704_101_SL_seq_11771
tgtgcaggaaggggctggga

SEQ ID NO: 11772 - DNA, 20 bp, Homo sapiens
  source 1..20: mol_type = genomic DNA; note = Gene: PSG9; note = Location (start to end; relative to TSS): PSG9_55_85; note = Orientation (relative to transcription): antisense; note = sgRNA Position: 43269471; note = Sequence Name: 56322-704_101_SL_seq_11772
tcctctgtggagatgagcct

SEQ ID NO: 11773 - DNA, 20 bp, Homo sapiens
  source 1..20: mol_type = genomic DNA; note = Gene: PSG9; note = Location (start to end; relative to TSS): PSG9_106_136; note = Orientation (relative to transcription): antisense; note = sgRNA Position: 43269420; note = Sequence Name: 56322-704_101_SL_seq_11773
gtgcaggaaggggctgggag

SEQ ID NO: 11774 - DNA, 20 bp, Homo sapiens
  source 1..20: mol_type = genomic DNA; note = Gene: PSG9; note = Location (start to end; relative to TSS): PSG9_32_62; note = Orientation (relative to transcription): antisense; note = sgRNA Position: 43269494; note = Sequence Name: 56322-704_101_SL_seq_11774
atccagaagctgtctgagca

SEQ ID NO: 11775 - DNA, 20 bp, Homo sapiens
  source 1..20: mol_type = genomic DNA; note = Gene: PSG9; note = Location (start to end; relative to TSS): PSG9_98_128; note = Orientation (relative to transcription): antisense; note = sgRNA Position: 43269428; note = Sequence Name: 56322-704_101_SL_seq_11775
aggggctgggaggggcccca

SEQ ID NO: 11776 - DNA, 20 bp, Homo sapiens
  source 1..20: mol_type = genomic DNA; note = Gene: PSG9; note = Location (start to end; relative to TSS): PSG9_29_59; note = Orientation (relative to transcription): sense; note = sgRNA Position: 43269477; note = Sequence Name: 56322-704_101_SL_seq_11776
tcagacagcttctggatccc

SEQ ID NO: 11777 - DNA, 20 bp, Homo sapiens
  source 1..20: mol_type = genomic DNA; note = Gene: PSG9; note = Location (start to end; relative to TSS): PSG9_68_98; note = Orientation (relative to transcription): antisense; note = sgRNA Position: 43269458; note = Sequence Name: 56322-704_101_SL_seq_11777
tgcctgtgtgttctcctctg

SEQ ID NO: 11778 - DNA, 20 bp, Homo sapiens
  source 1..20: mol_type = genomic DNA; note = Gene: PSG9; note = Location (start to end; relative to TSS): PSG9_21_51; note = Orientation (relative to transcription): sense; note = sgRNA Position: 43269485; note = Sequence Name: 56322-704_101_SL_seq_11778
agccgtgctcagacagcttc

SEQ ID NO: 11779 - DNA, 20 bp, Homo sapiens
  source 1..20: mol_type = genomic DNA; note = Gene: PSG9; note = Location (start to end; relative to TSS): PSG9_55_85; note = Orientation (relative to transcription): antisense; note = sgRNA Position: 43269471; note = Sequence Name: 56322-704_101_SL_seq_11779
tcctctgtggagatgagcct

SEQ ID NO: 11780 - DNA, 20 bp, Homo sapiens
  source 1..20: mol_type = genomic DNA; note = Gene: PTGFRN; note = Location (start to end; relative to TSS): PTGFRN_46_76; note = Orientation (relative to transcription): sense; note = sgRNA Position: 116909988; note = Sequence Name: 56322-704_101_SL_seq_11780
tcccgggcccggccggctgg

SEQ ID NO: 11781 - DNA, 20 bp, Homo sapiens
  source 1..20: mol_type = genomic DNA; note = Gene: PTGFRN; note = Location (start to end; relative to TSS): PTGFRN_78_108; note = Orientation (relative to transcription): sense; note = sgRNA Position: 116910020; note = Sequence Name: 56322-704_101_SL_seq_11781
aggaggcgggagggagcgag

SEQ ID NO: 11782 - DNA, 20 bp, Homo sapiens
  source 1..20: mol_type = genomic DNA; note = Gene: PTGFRN; note = Location (start to end; relative to TSS): PTGFRN_30_60; note = Orientation (relative to transcription): sense; note = sgRNA Position: 116909972; note = Sequence Name: 56322-704_101_SL_seq_11782
gatcggcggggccggctccc

SEQ ID NO: 11783 - DNA, 20 bp, Homo sapiens
  source 1..20: mol_type = genomic DNA; note = Gene: PTGFRN; note = Location (start to end; relative to TSS): PTGFRN_61_91; note = Orientation (relative to transcription): sense; note = sgRNA Position: 116910003; note = Sequence Name: 56322-704_101_SL_seq_11783
gctggaggagggagggaagg

SEQ ID NO: 11784 - DNA, 20 bp, Homo sapiens
  source 1..20: mol_type = genomic DNA; note = Gene: PTGFRN; note = Location (start to end; relative to TSS): PTGFRN_22_52; note = Orientation (relative to transcription): sense; note = sgRNA Position: 116909964; note = Sequence Name: 56322-704_101_SL_seq_11784
cacactcggatcggcggggc

SEQ ID NO: 11785 - DNA, 20 bp, Homo sapiens
  source 1..20: mol_type = genomic DNA; note = Gene: PTGFRN; note = Location (start to end; relative to TSS): PTGFRN_53_83; note = Orientation (relative to transcription): sense; note = sgRNA Position: 116909995; note = Sequence Name: 56322-704_101_SL_seq_11785
cccggccggctggaggaggg

SEQ ID NO: 11786 - DNA, 20 bp, Homo sapiens
  source 1..20: mol_type = genomic DNA; note = Gene: PTGFRN; note = Location (start to end; relative to TSS): PTGFRN_18_48; note = Orientation (relative to transcription): sense; note = sgRNA Position: 116909960; note = Sequence Name: 56322-704_101_SL_seq_11786
gctgcacactcggatcggcg

SEQ ID NO: 11787 - DNA, 20 bp, Homo sapiens
  source 1..20: mol_type = genomic DNA; note = Gene: PTGFRN; note = Location (start to end; relative to TSS): PTGFRN_50_80; note = Orientation (relative to transcription): sense; note = sgRNA Position: 116909992; note = Sequence Name: 56322-704_101_SL_seq_11787
gggcccggccggctggagga

SEQ ID NO: 11788 - DNA, 20 bp, Homo sapiens
  source 1..20: mol_type = genomic DNA; note = Gene: PTGFRN; note = Location (start to end; relative to TSS): PTGFRN_17_47; note = Orientation (relative to transcription): sense; note = sgRNA Position: 116909959; note = Sequence Name: 56322-704_101_SL_seq_11788
ggctgcacactcggatcggc

SEQ ID NO: 11789 - DNA, 20 bp, Homo sapiens
  source 1..20: mol_type = genomic DNA; note = Gene: PTGFRN; note = Location (start to end; relative to TSS): PTGFRN_49_79; note = Orientation (relative to transcription): sense; note = sgRNA Position: 116909991; note = Sequence Name: 56322-704_101_SL_seq_11789
cgggcccggccggctggagg

SEQ ID NO: 11790 - DNA, 20 bp, Homo sapiens
  source 1..20: mol_type = genomic DNA; note = Gene: PTK7; note = Location (start to end; relative to TSS): PTK7_33_63; note = Orientation (relative to transcription): sense; note = sgRNA Position: 43076373; note = Sequence Name: 56322-704_101_SL_seq_11790
tcggggtcgggctccggctg

SEQ ID NO: 11791 - DNA, 20 bp, Homo sapiens
  source 1..20: mol_type = genomic DNA; note = Gene: PTK7; note = Location (start to end; relative to TSS): PTK7_87_117; note = Orientation (relative to transcription): sense; note = sgRNA Position: 43076427; note = Sequence Name: 56322-704_101_SL_seq_11791
tccgcctcctgtgcccgccg

SEQ ID NO: 11792 - DNA, 20 bp, Homo sapiens
  source 1..20: mol_type = genomic DNA; note = Gene: PTK7; note = Location (start to end; relative to TSS): PTK7_30_60; note = Orientation (relative to transcription): antisense; note = sgRNA Position: 43076350; note = Sequence Name: 56322-704_101_SL_seq_11792
cccgaccccgaggcgtcccg

SEQ ID NO: 11793 - DNA, 20 bp, Homo sapiens
  source 1..20: mol_type = genomic DNA; note = Gene: PTK7; note = Location (start to end; relative to TSS): PTK7_80_110; note = Orientation (relative to transcription): antisense; note = sgRNA Position: 43076400; note = Sequence Name: 56322-704_101_SL_seq_11793
aggcggagcgcaccggagcg

SEQ ID NO: 11794 - DNA, 20 bp, Homo sapiens
  source 1..20: mol_type = genomic DNA; note = Gene: PTK7; note = Location (start to end; relative to TSS): PTK7_27_57; note = Orientation (relative to transcription): sense; note = sgRNA Position: 43076367; note = Sequence Name: 56322-704_101_SL_seq_11794
gacgcctcggggtcgggctc

SEQ ID NO: 11795 - DNA, 20 bp, Homo sapiens
  source 1..20: mol_type = genomic DNA; note = Gene: PTK7; note = Location (start to end; relative to TSS): PTK7_79_109; note = Orientation (relative to transcription): antisense; note = sgRNA Position: 43076399; note = Sequence Name: 56322-704_101_SL_seq_11795
ggcggagcgcaccggagcgc

SEQ ID NO: 11796 - DNA, 20 bp, Homo sapiens
  source 1..20: mol_type = genomic DNA; note = Gene: PTK7; note = Location (start to end; relative to TSS): PTK7_20_50; note = Orientation (relative to transcription): sense; note = sgRNA Position: 43076360; note = Sequence Name: 56322-704_101_SL_seq_11796
gcctcgggacgcctcggggt

SEQ ID NO: 11797 - DNA, 20 bp, Homo sapiens
  source 1..20: mol_type = genomic DNA; note = Gene: PTK7; note = Location (start to end; relative to TSS): PTK7_59_89; note = Orientation (relative to transcription): sense; note = sgRNA Position: 43076399; note = Sequence Name: 56322-704_101_SL_seq_11797
ctgctgcggcgcccgcgctc

SEQ ID NO: 11798 - DNA, 20 bp, Homo sapiens
  source 1..20: mol_type = genomic DNA; note = Gene: PTK7; note = Location (start to end; relative to TSS): PTK7_21_51; note = Orientation (relative to transcription): sense; note = sgRNA Position: 43076361; note = Sequence Name: 56322-704_101_SL_seq_11798
cctcgggacgcctcggggtc

SEQ ID NO: 11799 - DNA, 20 bp, Homo sapiens
  source 1..20: mol_type = genomic DNA; note = Gene: PTK7; note = Location (start to end; relative to TSS): PTK7_55_85; note = Orientation (relative to transcription): antisense; note = sgRNA Position: 43076375; note = Sequence Name: 56322-704_101_SL_seq_11799
gccgcagcagcagccgcagc

SEQ ID NO: 11800 - DNA, 20 bp, Homo sapiens
  source 1..20: mol_type = genomic DNA; note = Gene: PTPRD; note = Location (start to end; relative to TSS): PTPRD_36_66; note = Orientation (relative to transcription): sense; note = sgRNA Position: 10612942; note = Sequence Name: 56322-704_101_SL_seq_11800
gagtgcgggagcggccgcct

SEQ ID NO: 11801 - DNA, 20 bp, Homo sapiens
  source 1..20: mol_type = genomic DNA; note = Gene: PTPRD; note = Location (start to end; relative to TSS): PTPRD_82_112; note = Orientation (relative to transcription): sense; note = sgRNA Position: 10612896; note = Sequence Name: 56322-704_101_SL_seq_11801
gccggcggccggagcgcgtg

SEQ ID NO: 11802 - DNA, 20 bp, Homo sapiens
  source 1..20: mol_type = genomic DNA; note = Gene: PTPRD; note = Location (start to end; relative to TSS): PTPRD_28_58; note = Orientation (relative to transcription): antisense; note = sgRNA Position: 10612970; note = Sequence Name: 56322-704_101_SL_seq_11802
gcactcgctcgctcgctcgc

SEQ ID NO: 11803 - DNA, 20 bp, Homo sapiens
  source 1..20: mol_type = genomic DNA; note = Gene: PTPRD; note = Location (start to end; relative to TSS): PTPRD_81_111; note = Orientation (relative to transcription): sense; note = sgRNA Position: 10612897; note = Sequence Name: 56322-704_101_SL_seq_11803
agccggcggccggagcgcgt

SEQ ID NO: 11804 - DNA, 20 bp, Homo sapiens
  source 1..20: mol_type = genomic DNA; note = Gene: PTPRD; note = Location (start to end; relative to TSS): PTPRD_27_57; note = Orientation (relative to transcription): sense; note = sgRNA Position: 10612951; note = Sequence Name: 56322-704_101_SL_seq_11804
cgagcgagcgagtgcgggag

SEQ ID NO: 11805 - DNA, 20 bp, Homo sapiens
  source 1..20: mol_type = genomic DNA; note = Gene: PTPRD; note = Location (start to end; relative to TSS): PTPRD_80_110; note = Orientation (relative to transcription): antisense; note = sgRNA Position: 10612918; note = Sequence Name: 56322-704_101_SL_seq_11805
ccggccgccggctgcgggcg

SEQ ID NO: 11806 - DNA, 20 bp, Homo sapiens
  source 1..20: mol_type = genomic DNA; note = Gene: PTPRD; note = Location (start to end; relative to TSS): PTPRD_22_52; note = Orientation (relative to transcription): sense; note = sgRNA Position: 10612956; note = Sequence Name: 56322-704_101_SL_seq_11806
gcgagcgagcgagcgagtgc

SEQ ID NO: 11807 - DNA, 20 bp, Homo sapiens
  source 1..20: mol_type = genomic DNA; note = Gene: PTPRD; note = Location (start to end; relative to TSS): PTPRD_67_97; note = Orientation (relative to transcription): sense; note = sgRNA Position: 10612911; note = Sequence Name: 56322-704_101_SL_seq_11807
ccagccgcgcccgcagccgg

SEQ ID NO: 11808 - DNA, 20 bp, Homo sapiens
  source 1..20: mol_type = genomic DNA; note = Gene: PTPRD; note = Location (start to end; relative to TSS): PTPRD_21_51; note = Orientation (relative to transcription): sense; note = sgRNA Position: 10612957; note = Sequence Name: 56322-704_101_SL_seq_11808
agcgagcgagcgagcgagtg

SEQ ID NO: 11809 - DNA, 20 bp, Homo sapiens
  source 1..20: mol_type = genomic DNA; note = Gene: PTPRD; note = Location (start to end; relative to TSS): PTPRD_59_89; note = Orientation (relative to transcription): antisense; note = sgRNA Position: 10612939; note = Sequence Name: 56322-704_101_SL_seq_11809
ggctgggcggggagccgagg

SEQ ID NO: 11810 - DNA, 20 bp, Homo sapiens
  source 1..20: mol_type = genomic DNA; note = Gene: PTPRF; note = Location (start to end; relative to TSS): PTPRF_46_76; note = Orientation (relative to transcription): antisense; note = sgRNA Position: 43530935; note = Sequence Name: 56322-704_101_SL_seq_11810
gccggagcccgagcccgagc

SEQ ID NO: 11811 - DNA, 20 bp, Homo sapiens
  source 1..20: mol_type = genomic DNA; note = Gene: PTPRF; note = Location (start to end; relative to TSS): PTPRF_76_106; note = Orientation (relative to transcription): antisense; note = sgRNA Position: 43530965; note = Sequence Name: 56322-704_101_SL_seq_11811
acccgagctggagccggagc

SEQ ID NO: 11812 - DNA, 20 bp, Homo sapiens
  source 1..20: mol_type = genomic DNA; note = Gene: PTPRF; note = Location (start to end; relative to TSS): PTPRF_30_60; note = Orientation (relative to transcription): sense; note = sgRNA Position: 43530939; note = Sequence Name: 56322-704_101_SL_seq_11812
ttcggctccggctcgggctc

SEQ ID NO: 11813 - DNA, 20 bp, Homo sapiens
  source 1..20: mol_type = genomic DNA; note = Gene: PTPRF; note = Location (start to end; relative to TSS): PTPRF_65_95; note = Orientation (relative to transcription): sense; note = sgRNA Position: 43530974; note = Sequence Name: 56322-704_101_SL_seq_11813
ctccggctccggctccagct

SEQ ID NO: 11814 - DNA, 20 bp, Homo sapiens
  source 1..20: mol_type = genomic DNA; note = Gene: PTPRF; note = Location (start to end; relative to TSS): PTPRF_24_54; note = Orientation (relative to transcription): sense; note = sgRNA Position: 43530933; note = Sequence Name: 56322-704_101_SL_seq_11814
tccagcttcggctccggctc

SEQ ID NO: 11815 - DNA, 20 bp, Homo sapiens
  source 1..20: mol_type = genomic DNA; note = Gene: PTPRF; note = Location (start to end; relative to TSS): PTPRF_64_94; note = Orientation (relative to transcription): antisense; note = sgRNA Position: 43530953; note = Sequence Name: 56322-704_101_SL_seq_11815
gccggagccggagccggagc

SEQ ID NO: 11816 - DNA, 20 bp, Homo sapiens
  source 1..20: mol_type = genomic DNA; note = Gene: PTPRF; note = Location (start to end; relative to TSS): PTPRF_23_53; note = Orientation (relative to transcription): sense; note = sgRNA Position: 43530932; note = Sequence Name: 56322-704_101_SL_seq_11816
ctccagcttcggctccggct

SEQ ID NO: 11817 - DNA, 20 bp, Homo sapiens
  source 1..20: mol_type = genomic DNA; note = Gene: PTPRF; note = Location (start to end; relative to TSS): PTPRF_54_84; note = Orientation (relative to transcription): sense; note = sgRNA Position: 43530963; note = Sequence Name: 56322-704_101_SL_seq_11817
tccggctccggctccggctc

SEQ ID NO: 11818 - DNA, 20 bp, Homo sapiens
  source 1..20: mol_type = genomic DNA; note = Gene: PTPRF; note = Location (start to end; relative to TSS): PTPRF_18_48; note = Orientation (relative to transcription): sense; note = sgRNA Position: 43530927; note = Sequence Name: 56322-704_101_SL_seq_11818
ggcggctccagcttcggctc

SEQ ID NO: 11819 - DNA, 20 bp, Homo sapiens
  source 1..20: mol_type = genomic DNA; note = Gene: PTPRF; note = Location (start to end; relative to TSS): PTPRF_48_78; note = Orientation (relative to transcription): sense; note = sgRNA Position: 43530957; note = Sequence Name: 56322-704_101_SL_seq_11819
tcgggctccggctccggctc

SEQ ID NO: 11820 - DNA, 20 bp, Homo sapiens
  source 1..20: mol_type = genomic DNA; note = Gene: PTPRK; note = Location (start to end; relative to TSS): PTPRK_38_68; note = Orientation (relative to transcription): antisense; note = sgRNA Position: 128520557; note = Sequence Name: 56322-704_101_SL_seq_11820
gcgtcgccggccggccgcgg

SEQ ID NO: 11821 - DNA, 20 bp, Homo sapiens
  source 1..20: mol_type = genomic DNA; note = Gene: PTPRK; note = Location (start to end; relative to TSS): PTPRK_76_106; note = Orientation (relative to transcription): antisense; note = sgRNA Position: 128520519; note = Sequence Name: 56322-704_101_SL_seq_11821
gcggtcgccaaactacctca

SEQ ID NO: 11822 - DNA, 20 bp, Homo sapiens
  source 1..20: mol_type = genomic DNA; note = Gene: PTPRK; note = Location (start to end; relative to TSS): PTPRK_41_71; note = Orientation (relative to transcription): antisense; note = sgRNA Position: 128520554; note = Sequence Name: 56322-704_101_SL_seq_11822
ccagcgtcgccggccggccg

SEQ ID NO: 11823 - DNA, 20 bp, Homo sapiens
  source 1..20: mol_type = genomic DNA; note = Gene: PTPRK; note = Location (start to end; relative to TSS): PTPRK_75_105; note = Orientation (relative to transcription): antisense; note = sgRNA Position: 128520520; note = Sequence Name: 56322-704_101_SL_seq_11823
cggtcgccaaactacctcag

SEQ ID NO: 11824 - DNA, 20 bp, Homo sapiens
  source 1..20: mol_type = genomic DNA; note = Gene: PTPRK; note = Location (start to end; relative to TSS): PTPRK_21_51; note = Orientation (relative to transcription): antisense; note = sgRNA Position: 128520574; note = Sequence Name: 56322-704_101_SL_seq_11824
cggcggcagctctccatgct

SEQ ID NO: 11825 - DNA, 20 bp, Homo sapiens
  source 1..20: mol_type = genomic DNA; note = Gene: PTPRK; note = Location (start to end; relative to TSS): PTPRK_60_90; note = Orientation (relative to transcription): sense; note = sgRNA Position: 128520515; note = Sequence Name: 56322-704_101_SL_seq_11825
ctttcgcccctgaggtagtt

SEQ ID NO: 11826 - DNA, 20 bp, Homo sapiens
  source 1..20: mol_type = genomic DNA; note = Gene: PTPRK; note = Location (start to end; relative to TSS): PTPRK_19_49; note = Orientation (relative to transcription): sense; note = sgRNA Position: 128520556; note = Sequence Name: 56322-704_101_SL_seq_11826
tggagagctgccgccgcggc

SEQ ID NO: 11827 - DNA, 20 bp, Homo sapiens
  source 1..20: mol_type = genomic DNA; note = Gene: PTPRK; note = Location (start to end; relative to TSS): PTPRK_52_82; note = Orientation (relative to transcription): sense; note = sgRNA Position: 128520523; note = Sequence Name: 56322-704_101_SL_seq_11827
tggcgacgctttcgcccctg

SEQ ID NO: 11828 - DNA, 20 bp, Homo sapiens
  source 1..20: mol_type = genomic DNA; note = Gene: PTPRK; note = Location (start to end; relative to TSS): PTPRK_18_48; note = Orientation (relative to transcription): antisense; note = sgRNA Position: 128520577; note = Sequence Name: 56322-704_101_SL_seq_11828
cggcagctctccatgctcgg

SEQ ID NO: 11829 - DNA, 20 bp, Homo sapiens
  source 1..20: mol_type = genomic DNA; note = Gene: PTPRK; note = Location (start to end; relative to TSS): PTPRK_51_81; note = Orientation (relative to transcription): antisense; note = sgRNA Position: 128520544; note = Sequence Name: 56322-704_101_SL_seq_11829
gaaagcgtcgccagcgtcgc

SEQ ID NO: 11830 - DNA, 20 bp, Homo sapiens
  source 1..20: mol_type = genomic DNA; note = Gene: PTPRM; note = Location (start to end; relative to TSS): PTPRM_39_69; note = Orientation (relative to transcription): sense; note = sgRNA Position: 7567381; note = Sequence Name: 56322-704_101_SL_seq_11830
catcggcgcgccgccgcccg

SEQ ID NO: 11831 - DNA, 20 bp, Homo sapiens
  source 1..20: mol_type = genomic DNA; note = Gene: PTPRM; note = Location (start to end; relative to TSS): PTPRM_69_99; note = Orientation (relative to transcription): sense; note = sgRNA Position: 7567411; note = Sequence Name: 56322-704_101_SL_seq_11831
tggggctgcctgtggagagg

SEQ ID NO: 11832 - DNA, 20 bp, Homo sapiens
  source 1..20: mol_type = genomic DNA; note = Gene: PTPRM; note = Location (start to end; relative to TSS): PTPRM_32_62; note = Orientation (relative to transcription): antisense; note = sgRNA Position: 7567354; note = Sequence Name: 56322-704_101_SL_seq_11832
gccgatgaccgagcccgcgc

SEQ ID NO: 11833 - DNA, 20 bp, Homo sapiens
  source 1..20: mol_type = genomic DNA; note = Gene: PTPRM; note = Location (start to end; relative to TSS): PTPRM_65_95; note = Orientation (relative to transcription): antisense; note = sgRNA Position: 7567387; note = Sequence Name: 56322-704_101_SL_seq_11833
ggcagccccaagcccagccc

SEQ ID NO: 11834 - DNA, 20 bp, Homo sapiens
  source 1..20: mol_type = genomic DNA; note = Gene: PTPRM; note = Location (start to end; relative to TSS): PTPRM_22_52; note = Orientation (relative to transcription): antisense; note = sgRNA Position: 7567344; note = Sequence Name: 56322-704_101_SL_seq_11834
gagcccgcgccggctgcgcg

SEQ ID NO: 11835 - DNA, 20 bp, Homo sapiens
  source 1..20: mol_type = genomic DNA; note = Gene: PTPRM; note = Location (start to end; relative to TSS): PTPRM_64_94; note = Orientation (relative to transcription): antisense; note = sgRNA Position: 7567386; note = Sequence Name: 56322-704_101_SL_seq_11835
gcagccccaagcccagcccc

SEQ ID NO: 11836 - DNA, 20 bp, Homo sapiens
  source 1..20: mol_type = genomic DNA; note = Gene: PTPRM; note = Location (start to end; relative to TSS): PTPRM_20_50; note = Orientation (relative to transcription): antisense; note = sgRNA Position: 7567342; note = Sequence Name: 56322-704_101_SL_seq_11836
gcccgcgccggctgcgcgcg

SEQ ID NO: 11837 - DNA, 20 bp, Homo sapiens
  source 1..20: mol_type = genomic DNA; note = Gene: PTPRM; note = Location (start to end; relative to TSS): PTPRM_61_91; note = Orientation (relative to transcription): antisense; note = sgRNA Position: 7567383; note = Sequence Name: 56322-704_101_SL_seq_11837
gccccaagcccagccccggg

SEQ ID NO: 11838 - DNA, 20 bp, Homo sapiens
  source 1..20: mol_type = genomic DNA; note = Gene: PTPRM; note = Location (start to end; relative to TSS): PTPRM_21_51; note = Orientation (relative to transcription): antisense; note = sgRNA Position: 7567343; note = Sequence Name: 56322-704_101_SL_seq_11838
agcccgcgccggctgcgcgc

SEQ ID NO: 11839 - DNA, 20 bp, Homo sapiens
  source 1..20: mol_type = genomic DNA; note = Gene: PTPRM; note = Location (start to end; relative to TSS): PTPRM_51_81; note = Orientation (relative to transcription): sense; note = sgRNA Position: 7567393; note = Sequence Name: 56322-704_101_SL_seq_11839
gccgcccggggctgggcttg

SEQ ID NO: 11840 - DNA, 20 bp, Homo sapiens
  source 1..20: mol_type = genomic DNA; note = Gene: PTPRS; note = Location (start to end; relative to TSS): PTPRS_37_67; note = Orientation (relative to transcription): antisense; note = sgRNA Position: 5340771; note = Sequence Name: 56322-704_101_SL_seq_11840
ggctcgcggcgtgcgcgcgc

SEQ ID NO: 11841 - DNA, 20 bp, Homo sapiens
  source 1..20: mol_type = genomic DNA; note = Gene: PTPRS; note = Location (start to end; relative to TSS): PTPRS_82_112; note = Orientation (relative to transcription): sense; note = sgRNA Position: 5340706; note = Sequence Name: 56322-704_101_SL_seq_11841
caacagccacgatgtgaagc

SEQ ID NO: 11842 - DNA, 20 bp, Homo sapiens
  source 1..20: mol_type = genomic DNA; note = Gene: PTPRS; note = Location (start to end; relative to TSS): PTPRS_33_63; note = Orientation (relative to transcription): sense; note = sgRNA Position: 5340755; note = Sequence Name: 56322-704_101_SL_seq_11842
gcgcgcacgccgcgagccgc

SEQ ID NO: 11843 - DNA, 20 bp, Homo sapiens
  source 1..20: mol_type = genomic DNA; note = Gene: PTPRS; note = Location (start to end; relative to TSS): PTPRS_81_111; note = Orientation (relative to transcription): sense; note = sgRNA Position: 5340707; note = Sequence Name: 56322-704_101_SL_seq_11843
gcaacagccacgatgtgaag

SEQ ID NO: 11844 - DNA, 20 bp, Homo sapiens
  source 1..20: mol_type = genomic DNA; note = Gene: PTPRS; note = Location (start to end; relative to TSS): PTPRS_32_62; note = Orientation (relative to transcription): antisense; note = sgRNA Position: 5340776; note = Sequence Name: 56322-704_101_SL_seq_11844
gcggcgtgcgcgcgccggcc

SEQ ID NO: 11845 - DNA, 20 bp, Homo sapiens
  source 1..20: mol_type = genomic DNA; note = Gene: PTPRS; note = Location (start to end; relative to TSS): PTPRS_75_105; note = Orientation (relative to transcription): antisense; note = sgRNA Position: 5340733; note = Sequence Name: 56322-704_101_SL_seq_11845
gctgttgcatgggatccgag

SEQ ID NO: 11846 - DNA, 20 bp, Homo sapiens
  source 1..20: mol_type = genomic DNA; note = Gene: PTPRS; note = Location (start to end; relative to TSS): PTPRS_21_51; note = Orientation (relative to transcription): antisense; note = sgRNA Position: 5340787; note = Sequence Name: 56322-704_101_SL_seq_11846
gcgccggccgggctgccggg

SEQ ID NO: 11847 - DNA, 20 bp, Homo sapiens
  source 1..20: mol_type = genomic DNA; note = Gene: PTPRS; note = Location (start to end; relative to TSS): PTPRS_58_88; note = Orientation (relative to transcription): antisense; note = sgRNA Position: 5340750; note = Sequence Name: 56322-704_101_SL_seq_11847
gagcggagcccgagcgccag

SEQ ID NO: 11848 - DNA, 20 bp, Homo sapiens
  source 1..20: mol_type = genomic DNA; note = Gene: PTPRS; note = Location (start to end; relative to TSS): PTPRS_17_47; note = Orientation (relative to transcription): antisense; note = sgRNA Position: 5340791; note = Sequence Name: 56322-704_101_SL_seq_11848
cggccgggctgccgggcggg

SEQ ID NO: 11849 - DNA, 20 bp, Homo sapiens
  source 1..20: mol_type = genomic DNA; note = Gene: PTPRS; note = Location (start to end; relative to TSS): PTPRS_51_81; note = Orientation (relative to transcription): sense; note = sgRNA Position: 5340737; note = Sequence Name: 56322-704_101_SL_seq_11849
gctggcgctcgggctccgct

SEQ ID NO: 11850 - DNA, 20 bp, Homo sapiens
  source 1..20: mol_type = genomic DNA; note = Gene: PTPRT; note = Location (start to end; relative to TSS): PTPRT_50_80; note = Orientation (relative to transcription): antisense; note = sgRNA Position: 43189852; note = Sequence Name: 56322-704_101_SL_seq_11850
gcgcgcggctggctccgctc

SEQ ID NO: 11851 - DNA, 20 bp, Homo sapiens
  source 1..20: mol_type = genomic DNA; note = Gene: PTPRT; note = Location (start to end; relative to TSS): PTPRT_84_114; note = Orientation (relative to transcription): antisense; note = sgRNA Position: 43189818; note = Sequence Name: 56322-704_101_SL_seq_11851
gtggccccgcatcgccggcg

SEQ ID NO: 11852 - DNA, 20 bp, Homo sapiens
  source 1..20: mol_type = genomic DNA; note = Gene: PTPRT; note = Location (start to end; relative to TSS): PTPRT_37_67; note = Orientation (relative to transcription): antisense; note = sgRNA Position: 43189865; note = Sequence Name: 56322-704_101_SL_seq_11852
tccgctcgggctcccggagc

SEQ ID NO: 11853 - DNA, 20 bp, Homo sapiens
  source 1..20: mol_type = genomic DNA; note = Gene: PTPRT; note = Location (start to end; relative to TSS): PTPRT_69_99; note = Orientation (relative to transcription): sense; note = sgRNA Position: 43189813; note = Sequence Name: 56322-704_101_SL_seq_11853
cagcggccgcgccggcgatg

SEQ ID NO: 11854 - DNA, 20 bp, Homo sapiens
  source 1..20: mol_type = genomic DNA; note = Gene: PTPRT; note = Location (start to end; relative to TSS): PTPRT_27_57; note = Orientation (relative to transcription): sense; note = sgRNA Position: 43189855; note = Sequence Name: 56322-704_101_SL_seq_11854
gccggctccgggagcccgag

SEQ ID NO: 11855 - DNA, 20 bp, Homo sapiens
  source 1..20: mol_type = genomic DNA; note = Gene: PTPRT; note = Location (start to end; relative to TSS): PTPRT_65_95; note = Orientation (relative to transcription): antisense; note = sgRNA Position: 43189837; note = Sequence Name: 56322-704_101_SL_seq_11855
gcggccgctggctgtgcgcg

SEQ ID NO: 11856 - DNA, 20 bp, Homo sapiens
  source 1..20: mol_type = genomic DNA; note = Gene: PTPRT; note = Location (start to end; relative to TSS): PTPRT_16_46; note = Orientation (relative to transcription): sense; note = sgRNA Position: 43189866; note = Sequence Name: 56322-704_101_SL_seq_11856
aacgcaggagcgccggctcc

SEQ ID NO: 11857 - DNA, 20 bp, Homo sapiens
  source 1..20: mol_type = genomic DNA; note = Gene: PTPRT; note = Location (start to end; relative to TSS): PTPRT_52_82; note = Orientation (relative to transcription): sense; note = sgRNA Position: 43189830; note = Sequence Name: 56322-704_101_SL_seq_11857
ccagccgcgcgcacagccag

SEQ ID NO: 11858 - DNA, 20 bp, Homo sapiens
  source 1..20: mol_type = genomic DNA; note = Gene: PTPRT; note = Location (start to end; relative to TSS): PTPRT_15_45; note = Orientation (relative to transcription): sense; note = sgRNA Position: 43189867; note = Sequence Name: 56322-704_101_SL_seq_11858
gaacgcaggagcgccggctc

SEQ ID NO: 11859 - DNA, 20 bp, Homo sapiens
  source 1..20: mol_type = genomic DNA; note = Gene: PTPRT; note = Location (start to end; relative to TSS): PTPRT_50_80; note = Orientation (relative to transcription): antisense; note = sgRNA Position: 43189852; note = Sequence Name: 56322-704_101_SL_seq_11859
gcgcgcggctggctccgctc

SEQ ID NO: 11860 - DNA, 20 bp, Homo sapiens
  source 1..20: mol_type = genomic DNA; note = Gene: PVR; note = Location (start to end; relative to TSS): PVR_41_71; note = Orientation (relative to transcription): antisense; note = sgRNA Position: 44643957; note = Sequence Name: 56322-704_101_SL_seq_11860
cgctcctccagtgcctgggg

SEQ ID NO: 11861 - DNA, 20 bp, Homo sapiens
  source 1..20: mol_type = genomic DNA; note = Gene: PVR; note = Location (start to end; relative to TSS): PVR_71_101; note = Orientation (relative to transcription): sense; note = sgRNA Position: 44644007; note = Sequence Name: 56322-704_101_SL_seq_11861
aggacctgagctccgggagc

SEQ ID NO: 11862 - DNA, 20 bp, Homo sapiens
  source 1..20: mol_type = genomic DNA; note = Gene: PVR; note = Location (start to end; relative to TSS): PVR_25_55; note = Orientation (relative to transcription): sense; note = sgRNA Position: 44643961; note = Sequence Name: 56322-704_101_SL_seq_11862
ccccttcccaccccaggcac

SEQ ID NO: 11863 - DNA, 20 bp, Homo sapiens
  source 1..20: mol_type = genomic DNA; note = Gene: PVR; note = Location (start to end; relative to TSS): PVR_66_96; note = Orientation (relative to transcription): antisense; note = sgRNA Position: 44643982; note = Sequence Name: 56322-704_101_SL_seq_11863
tcaggtcctggaatccccgg

SEQ ID NO: 11864 - DNA, 20 bp, Homo sapiens
  source 1..20: mol_type = genomic DNA; note = Gene: PVR; note = Location (start to end; relative to TSS): PVR_33_63; note = Orientation (relative to transcription): sense; note = sgRNA Position: 44643969; note = Sequence Name: 56322-704_101_SL_seq_11864
caccccaggcactggaggag

SEQ ID NO: 11865 - DNA, 20 bp, Homo sapiens
  source 1..20: mol_type = genomic DNA; note = Gene: PVR; note = Location (start to end; relative to TSS): PVR_65_95; note = Orientation (relative to transcription): antisense; note = sgRNA Position: 44643981; note = Sequence Name: 56322-704_101_SL_seq_11865
caggtcctggaatccccggg

SEQ ID NO: 11866 - DNA, 20 bp, Homo sapiens
  source 1..20: mol_type = genomic DNA; note = Gene: PVR; note = Location (start to end; relative to TSS): PVR_28_58; note = Orientation (relative to transcription): sense; note = sgRNA Position: 44643964; note = Sequence Name: 56322-704_101_SL_seq_11866
cttcccaccccaggcactgg

SEQ ID NO: 11867 - DNA, 20 bp, Homo sapiens
  source 1..20: mol_type = genomic DNA; note = Gene: PVR; note = Location (start to end; relative to TSS): PVR_64_94; note = Orientation (relative to transcription): sense; note = sgRNA Position: 44644000; note = Sequence Name: 56322-704_101_SL_seq_11867
ggattccaggacctgagctc

SEQ ID NO: 11868 - DNA, 20 bp, Homo sapiens
  source 1..20: mol_type = genomic DNA; note = Gene: PVR; note = Location (start to end; relative to TSS): PVR_19_49; note = Orientation (relative to transcription): sense; note = sgRNA Position: 44643955; note = Sequence Name: 56322-704_101_SL_seq_11868
ggtattccccttcccacccc

SEQ ID NO: 11869 - DNA, 20 bp, Homo sapiens
  source 1..20: mol_type = genomic DNA; note = Gene: PVR; note = Location (start to end; relative to TSS): PVR_51_81; note = Orientation (relative to transcription): sense; note = sgRNA Position: 44643987; note = Sequence Name: 56322-704_101_SL_seq_11869
agcggccccccggggattcc

(The sequence listing continues in the following parts.)